United States Patent Application Publication US 2014/0325702 A1 - sequence listing, part 8

SEQ ID NO: 6386 - DNA, 3837 bp, Heterodera glycines
  unsure (1)..(3837): unsure at all n locations
taaaattcatcggcactcgcattcacaataatctaaaatttataagaaatttctttaatttcaaatattcgttttccgattttaacaatttcattttaatttaggacttttttttagccaaaaagccaaaattgggcaaaacaacacatagaatcatttgtttgtattatttttctgaatttttagaaataattagagaccgatattttggaaaaaactcgaatatttgaaacatgacgcaaaattcaaatcgccaggtgaatttcaggaaaataattcaaaaatgaaaaaaattcgcgcgttttaaacatattttaccggggcatccacaaaatttccaacccaatttggacctcctttcatgtcgaggcctgaaattcaaaaatttaaaataaatttacgaatgttttccctcacataaattccaatccgtccatccgaccacccaattgcgcaattggttcagaatgtcatgcccataggaccaaccgcgaatccaatcgcccaacaacggcgtgtgctcccaatcgaaaaagcctgcacaagcctagaaaaattttttgaattttttaaaattttcaatttttggcacttcgctggccaacaaaaatttgtcggggtataatttgtgcatgaggctcaacggatcgtacgtcgaatgggcatacctttgaaaaacaaattcgaacaaaatcatttaaaatttttttgtttaccaatggacagccagcccatcaattgcagttttttgcgggtcgtaaaaaagctaaaaaatcgaaaaatttcaaaaaaaaaattcagttttttggttacatctttagactccgcttcgatggtatgccgttggtcatcatgggccataattaccaaattttttgatgcttccgagcttttaagggctggcagaagcaattgagaagcaaaatcgctaaaaatttaaaattattaaaaatttaaaataaaatttcaattttgcctaattttttcaattttaccattgcgatttgctgtcaaaccaatgcgcttgccagctgagattaccgttataaacaataactaaaaaatatatatatttattaaaatttaaaaacgacaattaattaattcactgacatggctcattttggagagttaggccccaaaaagtcacattttgtttggcatattcttcaaaaaacctaaaataataaaataattattcgatttttttataattcgaacataaataaatgaattttctcaattttagccgacctcttgaaatactgtgcgtaggtatggaagtagggcccatccaaagtgcccttcattttggcggaccctcgcattcgtccgctcgttttcatccaaccgggcggagacctttgaaaagcataaaattgaaattaaaaatgccatgccaagggaaagatttaaataaacatcaaataaaaatattatttgtactttttatgaaaattttttaccatggcgacgcatacaaacggaggtcccctccggtcagctgaatggccttcaaaatgtgtgggatctgaaaatgttggcagttaattcagaaatttctcctttttgtaaattttaaatccaaaattaggaattcttcaagactcgagaccatttgcccgaaattctcaagaatttcttgggaattgactctccgactatttgtgccaatgccaatgccttactttctcttcaaagtcctccctggccaatgcaaatgtggtcagattgaaatcgtccggcgtgtccaaatacgaatattcacgggtggaaaagtcagagctggcaattggaacacggccaactgagtaaccgatgcctaaaacaggaaaaacggaaaattgaagtgatttggcatatggtaagagaggtaccgtaacccaaacagggtcattagtgccatttttgaatttggcaatgttagaagagtataatttaatttttttaaattgtcaggactgtgattctgtcaatattccatttgtaccaatttccttgtcaaaatacgtcttcagcagtgcctcgcggctccgttcgctcaatgcgtttaaatttacgcctgccgcgtcggtgaacgctccgccaaagcccaaaatgcgctgccgtttctttgacgcgtccacgcgcacttcgaattcagtgtcatcacttgcaccttctccaaaatttatttataatttttgttggcatttttaaattattttaccatttttattttcggcatttttaaatttggccaatcgatgggccaatttgtcgctcacataatacaccattttgttcccactgacatcgcccaatggttcgggcgagtcgcaataatcggacgaacaaacgcacacaaatgagtcatggccaaagctaattagttaaattaatcaattaatcattaatgaattgactaattaaaagccacacagtcaattaactaaattggtttacctctttttcttgcacggcttcacttcttcttcagctatgatcaaattttgaccaacaaaaaaaaataataaaaagaaattaaaaatttccattttgctctaaatatatttcttcaaatattagaatttgtgttaaaatttttatttatttatttttcatgggttcaaatcattcaatcaattatcattcactgatcagacggactcatggccagacaaattctttattgatcagaacgaggacgacatacagctgattacacaataaacgagtaaacagccccccccccacccgataaacgggcagtgaattaagtgcactaattgtgccaaaagtgtaacgccgccaattaatttgcctccattaattaaatgccttgcaaatgagaggataatggatggttcacaggaagggccattgtgtgaaaagcagcaaattaagcagctgctaaattaaccaattcgatttcctcaaaattattttgaaagcgcatttttcacggattttgaaaggtgtaaacttttaaaaattcaactattgttaatttattaagaattgaaatgaaaaaacacgaaaaaactataaaaaaaatttgttttttgacaatttaaatatttcttaaaagcatttttgaactttttaataaatatttaagttttctgaaaaaaagaatcacattacagctctgccaaatagaaagttatattttttcgctgaatgtatgtaatcatcaaatttgttatttttaatgcccgtttataagaatcattaatttcatggccacataacccgattaaatatggccctagggtttaatcgcaagcaaattaacttatagatcagactctgatcactcgtgactttactgattagacccaactttactccacttcgtataaaaattaaagtgattaaaaaatgattgatcagcccaggcaaataaatctggtcccagccgggtttttattctctcgggggggggggggtctggctgaaacaaaataaaatttttagggcacggtttgatcagacaacaataatttctgatcacagattcttttactttcctccatcaattaaaattaaattatgaaaaaacgattaatcaacccaatttttcattctttttgttctctcgggtttgtctggggctaaacaaaaaaaaatttttggcccgattggaatggttttgatctgatgaaatgattgatagggagggcacacacacacattgatcaatcattaatttactgaccagctccgatttggtcttaaggtgataggtcgaacttaaaaaagaatcaaagatgaataatatttaaaatttgttattagtttatttgtagataataaatcataattttcctcanaattaaatcggattaaacaatt

SEQ ID NO: 6387 - DNA, 3667 bp, Heterodera glycines
tgtgccaaactgggtgcgttacactgcaaatgtagtctccggcgtggatttgctgtgcactctgaacaatgatctgattgccgcgttgttgccatccgtgcggcagcggtcccccgaggcgttgaaaatgccattggacttcgcagtcggcgtagcccggggtcagacaagtgaacactgcttgttggccttttaacaatgaaatgaagttagtatgtgtcattgccatgcgttagcgttaccttcgtccaccagttgatgaggcggtgttacggatggctttggcatgtgggcaggtgccgcgggcaatgccgggggcaaagtggcggggtaatggacaaaggcgggcgcagcttgtggcgaggcttaatgtacgagaatggcaccccatttgaacacattctcccgcccgtgctgctgctgtatcctaccgattgtcagcgtggcatcgtccgtagaaatgtcccctttcaatcggccggtgcatcggtagtgtcccgtgtcctgctgttgcacttggtcgatcaccaactgatgtccaaactgttgtgcccgttcgggcaattcgggttctccgattttgctccattggatttccaccaagtcgggctgaaccgggaaaattggacaaattctataaaattttaatccaaatttattctttactttatctgcagaaacaattttgcatgtccatttggcacgagaaccttcctgaatggtcagctgttttggctgaagaatttccacacgaaaaggcactaaatgataaaagactaaattagggtaattagcattaattaaaattaattgataattaaaaatgtgacgtaaagaaagggaaagaaaggaggacactttaattgatttaaagaagagagaccgaccgtaggaaaataaattcgggaggtacagaaacccgaccgaaagtacagtaacccttaccgattgcaaaggcgagcaattaaaaaggccccgagcaacggagaagaaaatttgcagcatttggcccatcaccggcgaagcatcggaaagcgagcgaagcaaagaaaaaacaaagaaaagttggaattttgccaaaaaagtgcaaaaaaagagagaaaaaagtgccaaaatttattcaaatgtcattaaagcaagagaaatttttgaaattctgaaggggcagcgattttagcaatttaaattggagaataaaattctaaatgaaatcagagacaaaaggagggcgagagagaagggcgaatagagagggtgaaagagagagagagagtgggtgcagagaaggagagaaaagaggaaatagagagataggcgagagatgatgagaaatgccggacaaaaacaccgtaacagagacaaaaatcggtttgatttgaaacccttcagagagtggtaaagtgttcctcccccttcagcagcacaattggggagaccttcgaagctgacggaagtgggtttggaactcttcttcctctgaagtgttttgcttaggaggcactcaaaaaacagctgagaaatggccaaaaacacgcgaaaggcacaaaaaacgaacgaagcgaaaacaaattaaaaaataaaataaaaatgaaaaagcaaaacggcacaaaaaaacaatgcctaaaaatgcaagcgaagcgaaataaacggaagtgagtgaatgcgttattatgtaaagcggcgaatgttctgcgcatcggcggtggtcagtttgtgaaaaagcggtggcctcgcacgcggtagcgtttcggcccggtgcgttcgacttttatgccgccgcccccgcgccggtgctgcgcgccattcggaggccgcacaacgccaatgtcacgccggccatcaccaacaccaacaccaaaagcacctctctcaccgtcgggtcccggcacgaactccacttcagacggcttgtgcttgccgatgggctcgcacttgcgcccatcggcggtctgaccaggcgtataaccgggggcacatctgtggaaaaaagtggcggaaatggaaagaaattgaaatggcatttagagaatcgggggaagaaaaagggcaaacaaattacgaaagggcaatgtaattacgctgatgctaatttgcttaattggacgcttaaatttgccaagtgtatgcaaaacgcactcatcacaaagacggccagcaaagcccggcggacagttgcggcattggacctgtccacgcgcatccaaaaagcattcggcggtaccccttcacataaaacgaaatgaatgaatggcactttttgcagccgaaagtgtggcggcactcttcaaaggaacttacgggcacgggcactgcgtgcagtcccacggcgttccctttgttgcgtcgccgtaaaagccctttttgcacaattcgcaatggaacccttcagtgttatgttcgcacagctgaagagcaaaacaaatttatgaagagtctgacgattttgcttatttaatgagattagtaattaaatttacaaaaactcacaatacaacgtccgtatgagtcgcagccgcgcggcgaatggttgtggcaatcgcagcgcgggcgtacaaccgcgatctccggtgccggacgacagtcgtagggagtgccacgacgtgcgtcgccaacaaagccgggcttacaacgctcacaacgatcacccttagacaggtaagttggtgattagaaagtttgtcggggattaaattaaaaagaacccttcaaaaagtgccggaaaattgacattaaatttttatttttaaatatttatgaaaaaataattaattaacttagaaagagagagagagagagtggattaattagcaaaaataaacaaattcatctccaaatttgggatttattaatctcattggcagccttctgcccgtgccaaaaattagcaaattcatttgaatcaaagaataaacttgctaattctaaggctaatcgtcaattcctatcagagtttctccgtgtgttttacctcagtgttgtgttggcagtcaatgcatgcgccgtactcggcatcgcattggcttgcatggttgtggcactcgcacttttcgcacatgcccaagtagggcccaccgccggtgcgcgagtagcccggggcacagtccttggcgacggatttccgattaatttaatgattcctctcgactaatttttaatagtttctatttttggtatttttcataccatcgttatctcccattttcataattaaatcctcttgcccttccgtcccactttcattcatttgtcgtattttaatctgttttgaattttttcccccaccgctctctttcccttttttatgtctgtccccttccctccctccccaatgccaatgccaatgccaatgctttattaatccccatttctttataaaccggaaaaaaaaggtattttctgctaaaaagcggaaaaaatttttgcctatattttataaaccggaaaataaatgtattttctgttattaaacccggaaaacaattatcatttctgttaataaaccggaaaataaatgtattttctgctatttaaaccggaaaaacgaatggtatttccctttatatacccggaaaataccatgtattttctgttaataacacggaaaaccaattgtaatttctttttaaaccggaaaataaatggattttctggtattaaacccggaaaa

SEQ ID NO: 6388 - DNA, 2911 bp, Heterodera glycines
  unsure (1)..(2911): unsure at all n locations
aggattattaagaaaatgtttgtaattgctttagctcagtggcaatgcgtttaatgcgtaaagcttgccattggacattgagcggacgacgcaaaagtcaaatggccaaattaaattatttccatgcaaataattgtttattggcatgatttttaaatcagcattaggaaattaccctccattaatttgttattcgcaaattgtttgggcaaagtaaacttttgaactaatttattaatgatttgttacgtaaatcccttatccgtccccctccccaattaatccgtaggcattttctttttaaacgtttctctccccctccccaaactcgcttctctcacctcgcatgaactgccaatgtatccagctgggcattggcactgttccacgtccaacgcaccttcgcccgtgccgtaagcgtccgccgtgtccaaagaggcggagacaagcgacgcttgcgagcactcgcgcatgtaactcattttgatcagaagcgcgtccaggtcggccagcaccatcatgagctgctcgcgcgaggcggagacgccgttggagtggcgccagccgagctcagtgatcggaacctgaggcggaggagggcattttccaatgtttgccgccccttctctttgtgccgactttacctccaccaaattgggccggtccgcgtgcacttgctgcctgctcacatattccagctgaatgttgttgccgcggatgatcgcgtccgcgtccgggttgagcggcccggcgccggagaagcggaaagtgtagcggagtttgccaccgtaggcggtcactttgtcgcccagaaacttttgcggtaagctccagtatagtgtttgaccgcgtgcctcataaaacccgtggaaactgatggatccatcgtacacctgaggggatggtaccgtatgcacaatgcgttcgttttgcgatttgctttcgctttgctcggcgaacctgcggttgcgtcggcggttgtacggactgtgcgcgtccgacgtggtcgcctccaattggtcgcggtctacgcgcgcataatcgagctcgactcggttgcggcgccaatgcgaactttcgcacacgcgcgtgacgcctgagcagaagcagcgcaagcacccctgggggttttggggcgacaaattgaacgcctcgggcgcacatcggtcgcaagtgacgccttcaaagatattgttggggacaaagcaaaaagcaaaattgaaaagcaaaacgccgaaacataaaatttagcaacaaatttgcgacacaacacttggataaatcagcaaaaagggatttggccgagttggcttaatcccaaggccaaataaacgcatttagcgctttagcatttgtggcgcataaataatccctgcagcgttttccaaggacaatcaaaaggcattttgtctaagctttgcataaagctaagtgaagttctctgtccagactctttccctctccatttttctaatatgtgcatcataatcacaaaatccgctctttctcctaaatccgcttttcctccattagacttttgtccccccggcacttttcctgtcatattttttccgttcttccgctccaattacactttcatttcctagaatttgactttttgtccttctcaccgactacattcggcttgcaatcgcatcgtctgtcgtgttggggatgggcggacaatgcgccggccgagtcacacaatggccgttccggtggctgccgtgccgccacgcaatggcccaggtagggcccttggcccgaccgttcgtagccctcggcacactcttcgcaggaagtgccgacgtagccggggggacactcgcactgctccacctccagcgctcgttcatcttgtgtgtcctttgacacggcaatttcccgagctcgtgtcgccgaggctgaaaatggcatcaaaattagagagggggcggggcaactgccgaagttataatttgacgagattttgctgatgcaaattttacgagagattccttccttttaatggcatggctttgcaaaaggtgccatttgtctcgtacactttgttcttatgaataattagagagagatgcttatacaaaattagtaaattctttgaattttttcctcctcttcagcaattaaaattaaaatgcgctcatttcccagattgattattttatttcatttattctcttctcatctttttctccttttcccaattcataatttattctcccccattttttgccaaatttttccaaattgggtaatacaaataataataactcgcgcgtcgttttccccttattttgtttctatttgtgggcacacaatcacttgcccacttatttatttattagttttttggccagatgctcttcgtcgtggttgttcttctgttcacccccccccccgtttttgttttgtgtcatttcggcatttttcacccctttggaatgctttcgtcataattcccctcctctgtcgacaacattttttgtgtttttgatttatttcgtgccatttgcctcttcggcgccgaaggctaattctgctgcaataattcactaactccctcagcttacgtcagcagtgcttctccccagtgcttctcaccccccccccctttcctcgtccattctccgcttttttgtcgccgcctttccatccccccgcggattttgcgcactgacagttcgaaatacagcagtacaactgtggtactaagaacaaaactacgtgaaagtttaaggaagtaaaagcattttttcattgaggataaataagaggaattcgcattttaatacgggcatttttgattagtgccatggtccggntcgaaatgtgccantcctcccccccccctctctccctcttccacccggngcaatttactcgttgtccgccgcttttacattctaaa

SEQ ID NO: 6389 - DNA, 945 bp, Heterodera glycines
ggtaaccgaagtcccgagaatggaactcattcatgtgccatgtttgtcccggtgccaagcccttccgtatttgccatcatttcttccaaccaatgcttccatttttcgtcatccgaccgttgaatttgccgcgtcccttcccattttcttcgcttttttccggcgttcatttgaaattgaaatttttaatttatttaatttaccattttaagattgattatcccactcgtaattattcattgttctgtcaaaatgtgcggttcgatgtgtcccccggcgctggccaaacttttgggatggcatcgtgccaaagggggccaacgcggccaacggcccgagtcgtttttgacagcctacgaaatggagcaactgccggtgatgctgaacgaattggaaaaggccaaccgacacttttggcaaatggtctgctggcgatggagtcaaaatgagcagaaagcagcggccgaacgaagtgcgaaaaaggcgagacatcagcagcaaatgcaacagcagcagcagcagcaggagacgacgagcggagaaccgagtccaaaggacaaaagaaaaggtttggcattgtgtcttttccgccaaattaagttttaatccaactgttttaggctgtcccgacgattcgtacgtgaacggatgcgctctgcgcgagttggtccgtttgatggcgaagacaatgtgcgagaagggcacttttgacgcgcggacagaaacgatgctgacggagttccgcgcgcgcattttgggccaacggaacgcgtcgatgagagaaacgatgggcaaagagagcaaagcggagaggcggcggaaagagtttatgaagatgaggaccatttcattcaacgggggactgggcgaagggattggacggcacggcaaggagcagcaacaacaggaaaagggcaagagttccgcgtccacatgcgcctcatc

SEQ ID NO: 6390 - DNA, 4047 bp, Heterodera glycines
tttggtagtgaagtgtacattttctctgggaattagttgtcccagtgcttagatggcattggttcgagtttataccttgttttttagacttagctcatcaagagctttcgaatgataccaaatttgtccgaatttgagcgttttaaaaggtcaggagccctctttttcattcaaattttcgagttttaaaccggttcaaaaaccggtttaaatgcttttccgagcccaattttaagcttttctatcgttctcagcacctaagaaaacctataaaagtgtttttgtgcgattttgagccgataccgtattcggcaattttacccaaaattgttgtgcataagaaagcattttaaaaatgtccttgtttcttcttttcctcctcattccattctctcaagcgcccattttttttgcagtcattttgttcctgcaaatttcttcagaaattttgcacgtttattgtttcctttttttctaatgtttgttttttcaaattacctcattataaaaaaaaacattttttccaacgcaataattctgccctttgtgtgacatcattcgaaatacgacatattgtgctaattgccacaaaatgaacggacggtaattaaaaattacaaattgatttgaattattcaaataaactatttccccgcagttcagctgggtttgcagcaatgtttggttggacacttttccgttctttgaccgtcctcaactcggcctcaaattggcacttctttcgccccgttttgatgctttagtggacatgcatttcgatgccaaaagcaaattgacaatttggagaccaatcatgattatcaaggacagtgggcaatcatggagcttactggtcccattttaattttctagtgctattttaaggtgctgagcacgaagccggcctaaaaatgtccgaatccgggttcggtgttcagaattggtcataataaggccggattcatgctcagcaccttgaactaatgctagaacattgtttccaagatttaaaaaaaaaaaaaacgcgaacagtaaactccacgatttccagtacacagcggcgccaaaattatctgtttttatcgatggtatcaattctgtgcaatttccattgcccgaccattcgctgcccaataaaattcgctttaaatcccttcatatttggtaattcaaaagcattatatggaaataaaagcatcattcccttttaaggtacattgaccattccgtgatcgcttttctccgtgccaatcagcaaatttgggacaaaggcaccaatttgatcttgagtattccttttgcaaaagatgatcagccaatttggcgtgtttttgtccgtgaaatttggccaatttttacgcaaaacattcgctacttgagcttttacaatgatggcctccttttggacaatttacgtcgtcgcatttcgccaacaattctcactgatctcaacattaattcaatcagttccggctatttgttgcccgatgcgactgatgattttgacgagccaaatgcaattccaactgctggccaaatgttgtcaaaatggttgcacactccgataaaaaatggacaactgaagcgattgcgttgctttgtgaagccacataatatcgaatgggacaacatcaacactttgaaaaaggtgggccatattttcgttaatcatctgattttgattgcatttaatggccgttttccccattgttagaaatttctcaatgccaccacttccgttagctacaaaattcaatttattattgatccattgtcaacgcaaattgtgccatttgaattagctaacgaacggaccatggagaagctgacactgatcaaaaaaagcggacatcgtcatgaggaaagatggattatgaaacggtgccaaaatggggcgacggcgacgacggatcaatgggaaggcgaaaatttggacgatttgaacactgtcgcctttatgtttttccctgccaaggaatgcgttgggtgagcaacaaaaaaaagcattttattttgtttaaaaattgtgccgaatttttaggcgtttgtctccacgtcgaaaatggtgtcaaattatgtgaaagtgatttatgcatttgagaaaaggtcgatcattttggattataatgatgaataggagtgatttgatcatttttaatgttcgtttttatatcttcgtttaaatatattttattttatctcgtctcgacgcatccctttgatatgtgtactaggttgcgtccccgaccgtcggggttggaaaagtcggggttggaagcgtcggggtcgaccacatcgttcggggtcgtggtttttcaatttttgccttatgccatatagtcaaaaaacttacattatttttgcttaaaatttttttattattcattaatacttttatgtacttttttatttggtaaaaatcagttaaaaaattgcattttaattctttaattttcaaaaatttttcgagccggcgcttactgacaccgccggacccttgttcccgaaaagttttttgtttttcaaattggcgatcactcttgaaatgacacgcagacccggagcgacgtttgatgaattcattgcacaagcagtacgagcggaagcaacgcaatcggttgccagaaactcgtttaggtcaaaccaaacttttcaacggaaaatgcagaatttttcatattcatccaataatgtgctatcaaaaatccataccagtaattggtcccgaccagaaatgaacacgaacaggccaactgtgttgggacgacccacaattcaaataattgtttatcattgggtccgttctttgaccgaccaatattgatttgttcccctctcccatccaattccttccactcatttccccaattcattccttcccaatttgccttcgcattgttttccctcctatttttactccattcctccgaccaaatatttgtattttatttttccattttcttcaataaaaatattttattgtgttgtccaccggcacaacaaactgtagccgcgttggtcacgtatctcgaaattgtacggttccaccaaaatctcgaccctcacaagagcgccaaaaccaatttttcaaacaactcggaacagggggcaaataacgcgcctttaaattggaacaggcaagctccaaccaaaagcggaccacagtttccggcgtcaagaaattttcttcgccaaaattacctcgttgagcaaaacaacgaaccgcaaaaacggaatgatttgctgacaggtgctgtgaatgctgaataccgaccgcaaaattgaaaatttctcaatttttttcttagaattttcataagaaaaaattttctaagatttttttctttaaaaatttataagttagcaattaaaaaaattacccattctacgaaatttcattgtacgaaactccacagtacgaactacccatgtacgaaatgcctattgtacgaactgccatgaccccggacggaggtgcccaaatttctctgatttcagctgagtttttcgcacaaattatggacatggtggacaaaatgagatcatttcttactcggaaaggcgcattgtggacataaataacaaagaagtgaaatgttacggaactgtttgcctcccaagttagaggatcggaaactgctagaattcgaatgttcgttgcccagtctacttttggatacgatcttctttttggaacaaatgctttgaatcaattcattttaccgaaaaattgggtgttgtcccaattttaatgtcacacaatgaggtactaattaggtttgggtccccttttttggtcaaattttttcaacaatttttttttggttaaaaacacctgaaaacaaatatccgggggttttcgggcttgctgatcacgaatacgacatccatttcgatcaattcgggattccgaattcgaacaaaaagtcgaaaagtcacatttttcgattttaggctaaagatggtttaacaatgttttattgaagcactgatgactttaaagttcatttgaatgtatttagaccttgttcgatcaaaaaaaaaatt

SEQ ID NO: 6391 - DNA, 3582 bp, Heterodera glycines
  unsure (1)..(3582): unsure at all n locations
atcaaaaatcgcgaaaaaggcactataataggcaccaaaaaattgaaaaaaaggcatgaaaaggcacgaaaatcccgaaaaaggcatgaaaaaaggcattaaaaaattttttctaatgttttttaaggtgccaaacacgtaaacttaaccaaaaacttaattctggtcatttaaatgattattaaacatttaataattttttttgaataaggaaaatttttaaaccgaaaatttattatcaagaaaaaaaaatgaattttggcgatcaatttttgagaaaatttttcaattcttcggggtatattttcagaaattttttcaattcttagggatgtattttctgaaaatttttcaagtcatttcttaggggtgtattttcccgattttattccatttttaatggaattttccggaaaaaaaggccaaaaaaggcaccaaaatctgaaaaaagcgccaaaaaaggcaccaaaacagcaaaatgccaaaaaaggcatttaaggcacgaaaatccgaaaaaggcaaaaaaaggcaaaataaaagtcaacgtagaaagctcaaatcaagtggaaaatgtgttatttatgcttaatatatcgaaactagtgcgcagaaaaaaggcatatgcctcaaaatgcggtctctaatcatgttcttctccaaagtcttcatcgcggtcattgttgttgtcgttatgctcacattgttcagaagttgtcgcgttttcgccgtcgttgttgttcagaaacttgcgtttacgacatttttgaagaatttcaattttttcgattaattttgtttataaggcaattatgatatatttatatatatgtataatatacatgtaaatagatgtaccaaaataaataaatttatattttttaatttgtcgggattatgactcattttggcttagtcgggatttcgacgcgtcgggattttgacagcgcgcccccacattgattattctaatttgtacttacttttggttaattttataactttttttttgcagtttttcgtgacttgaattcccatctcctttcatcaattccactttttcatgactataaaaatggttgtttttttgatttgcctctcatatctaataaaaaaatatttctaaacacaaattattctgtcctttgtgaaattgtgctaattgcctcaaaaatgaacccgtaaggaataatttaacccatttaccctcagttatttttccctaatttagctggatatgcaacgacgttttgatggatattctcccattctttgaacgtgttgaactcggcctcaaaatggcacttctttcgccacgttttgatgggctggtggacaaacatttcgatggcaaatcagaattgacaatttggagaccaatcttaattcacaagtataatgtagcggtattatctgtgtctatcgacaataccaattctatgccatttccgttgcccaaccattcgctacacaacaaaatccgctttaacaaccttctgattaagtaaatgcgtaattatctgtgcgtaatatgttgttcccttttaaggtacattgaccattccgtcattgcatttctccgtgccaacaagcaaatttggaacaaaggcaccaatttgtggttgagtgttccttttgcacgagatgatcagccaatttggggtgtttttgtccgtgaaatttggccaatttttgcgccttatattcgccacttgaacatttacaatgatggcctccttttggacaatttgcgtcgtttcatttcgccgacaattctcactgatctcaacattaattcaatcagttccgcttttttgcccgatgcgactgatgattttgacgagccaaatgcaattccaactgctggccaaatgttgtcaaaatggttgcacattccgcgaaaagatggacaaccgaagcgattgtgttgcatgcttgcttctgctggtgatgtcaacaatttcaaagaggtatggcaatgtttttgttaatcaactgattttattgcatttacactccattttttaattgtttaggaatttctcaatgccaccacttccgttagctacaaaattaaatttattgttaatccaccgtcaccgcaaattgtgccatttgaattagctaacgaacggaccatggaaaagctgacactgatcaaaaaaagcggacatcctcaggaggaccgatggattatgaaacggtgccaaaatggggcgacggcgacgacggatcaatgggaagacggagatttggacgatttgaacactgtctcctttgtgtttttccctgtcaagggatgcattgggtgagcaacaaaaaaaaaatcattttattttgtttaaaaattgtgccgaatttttaggcctttgtctccacgtcgaaaatggtgtcaaattatgtgaaagtgatttatgcatttgagaaaaggtcgatcattttggattataatgataaataggagtgatttgatcattttaatgttcatttttattatcttcgtttaaatatattttattttatctcgtctcgacgcatcacttggaacacggacaactgagtaccaaggtcccggttttgaccgggacctggatattcccggcttttttcccggttttcccagccaaaaattcccggtttttcaacccaaaaagtcccggtcgtgcccaaatttcccggccccgctgcactctagtttttataaaatcatatatgtaggtggttttcgaggtcgctgcagattattcttaggggtgtatttttcgtttttattgcatttttcataacaaatttttattcacaagcaaaaatggttgaagtttttttcaattatataaaagactagaaaatagttgctaataactcgataagtagcttaacgaaaaataatatgttcttagtacgttttaagccatagaagagagctcaggaaaaaatagtgaaaaaaaaattggagccctaatgacaattgaaaatcaaaaaaactttaaatattttagtcggaaagaattacatatcaacaataatgagcaaagaacagcaacaaaattatgtatcagaccaatttgtccattcaataatatccaaatccgccgatcatttctcaattatttttcacttccgaacatttcgacggttgagagaatggcctaaattaagtgcaaatttgaatttttcggaacatgttaaactttcgaatgataccaagtttattattggatttggatgctaaagaaaaaagttatagccaaaaacataaactttattgaaaatctgagacagataacccacaagtacctaaatgtgcttgaatttacgaaatgctaaggcgtttaaagcgaatgttcatgcgcaacggatggtcgggcaacggaaatggcacacatttgccatcaatacccacagatacatttggtttgagtccaacgcccttgtgaatatagacacaacgccaaattgttaatttgtttttgccatcanaatgttggtccactanaagattgaaacgcggcgtaagaagtgccaatttgagnngcgagtgagggacgtccaaaaaggngaaaacgtccatccaancgtcaaagc

SEQ ID NO: 6392 - DNA, 6592 bp, Heterodera glycines
aacaaaaacaaaaaacatgatgtctatcgttgtgataattttttttgcatttcttttaattgcatttttgtttttgcacattagtttgagtgaaatttgctgaaaattggtaaaaatattttaaaatatgtttttgaatgggcggcgcaaatgtctattttttcttggcggcgcaagtgtcgaggcgcaaattgaagcactttttgacaaaaaatttacataatttgtttgattttcttttagttattacagaattatctttaatcacaaatcaataactaattgagatcagtcataaaaacgcaagcattctcgaatacaatgcattaatatacgtcaccccaatattgacattataatattgacagttttattcagaagaataataaaatcttcaattgtaaaataaatattattattaatagggatggcattttttaaataaatgccaatttttctgtgaagccaaactatgctctaaaaacatattttccactttgtttgggagcttccagactcaagtttataatatagatagttttacttctttcgatatttttcaaaatattaccattgtatctattttggtacctttttcggcacttttcttacctattttaggatttcgtaaatcctaatcacaaaaagaatacgaagaaaattgtttgtaagtttttctgaatcactcactgataagattatatcgcaaaaaatttaccaatatcatatccgggttcaagacactcgccctttattggaacttcaaccaaaattgtccacttgttgattataaaaaaaacccaatttttagattattatttttttctgctaaaaatgctaatgaacttcatgctatacatttttgtaataattttatgtaagtattttaatatgaaaattttcatattagattaaatatactggatagaaaatattaatttaaaaaacaatcaaaaataattaaaatatatatgttttatgggcatgttccttgaagaaaggggcttataaacagtaattttttttttaattttctttttgattaaaatttttagtgcatttaaatgcatatttggccaattatgaaataattaaaataaaacagaaattattccctaaggattgatattttaaattttcaaaaaagctagcccaaaaatattaattttttttacaatttggcgacaattaaaaaacttttgctattaatgaattaagctaaaaaagtttgttcaattttcctctttccccgcttccgaccccccccccccccacctattttggggcattttgcgggcgaaggtgaggggggtcgacttctgcccattttccatctatgctttacaataaaaatgtggcgcataatgttgccggaaagccttcaatttaaattaattaattgacgcagttgggggagggtctgcgccgtttgttccgatttagccgtcgccaattgcccaatttgccgcccaaaaattcgcaccaaaaatactccgcaaatttatctcaaactcaaacttgggtaattaaaccctacacttacaataaatgtgcgagaaatataaagaggaggccgtcgctccgccgatggtccgatcggcgtttttgcgctgcctcgggcgaccttcacgcgggtaaggcgccacatccgctttttatcgctttctttcccctaattcacgtgcccgccgtcagccgacccctcccttcacccctttctttccttcatcgtttcccgtttgccctaattttctcatcatttcatccatcaatcactcctcgttcgctacttcgttcattcctccccgtcctccccatttgtccgctcgacggacattcgcggctgacgttcagtcgcgacattcccacgactttgaaaacgtcgttttgagcggaacgcgaccatttgtcgtttcagatccatcaccagcggggacggctcggggtcctcttgttgcgaacttgccgtttcattcgctctcatttcctggggcattggaggcggtaccagctcaattgcttcaatccttgaaattgccggtgctcgccgtgtgcctcgagtagctctgttccgctgcgtccactgatttcccgtcaccaaattgcggatggtaacgatgacgggccccattaagtagacccataccaagggtatcaggacatcgcgcccaaaaatgaatgtgacgtaaatgcagcatgccgttgtccagtaggagacgagcagccgaagtttttccataaaccattcttcggtgaggccaatcactccgttcgggagagctcccagtgtgagcgcacgcgccgttttgtgctccttctccttcgacttccattgatccaaacgcagccattcatccaagtgcgcaaatagcccttcgcctgtttcgttgtcgatcgtccatcgatgaaaaactagcggcgtgatttccaacaacgatttgtctccagaggcttcgtggatctcagagatgctgctggagtcgattttctggatcgtagcggtgcgtgtgtcgattttgatccaattgctctggctcagttgcagataatggtagcggaaatttccacaatctgcgaatggtgatgacgctgtgaggatgtgaagctccggatccaggaatgcgttgagcgtcttcttgtcaatgcggatttggaccggaatgtagcggtaacagttgttgactgcctgatagtccacattttgcattgaaaactcagcgcacgagaagatttgcatcgtgtcttcgtttagccacctggccataacatccttgcgtcgtaaaagtcgtctggcctgaatggtcggatttcctcctctggaacttctgcggcattccttggaaaaaagctgcgcgattgatcggcttgtggcgagttgtcctgcagttaattgtactgcgagttgctcctcctggatggctctttttcccaatccacgatcgttgacgatcttcaggtactcatcctccaggattccaaacgattggtccgacaagcgaattggttttccgttgcatgctgtttccattttcgcctctttgctaaacgttagcgcctgttccttgcttttggatatccatgttccgcctgcccaatccgttgatcccgtgtgctctccgtccatactttcgacgaaatggtagtcgcatggcttacagctctcgttgcactccgcgatgaatcggagtcctggattttttttgatatgcccaaaatccaagtcaactccataaattcgtcgatattcatcgatgtactcctgtttttgttccaatgtttcgatcccctccggaaagccgcttgattccacctatgaaaaaaagttggataaaaacttttttttaattatactaccttgagcctgataaattgccgcacatatcctttgaaaatctgatcactccattctgcgtaatgccaggccctccaaaatcggtcgacaatataacccatctctaacgctttttcgagttcaatgtgagtgaagttgccagtgaaggccctctgctgatctgtgtggttgcacttgtgcgaacaccgtgtcacacttttacggaacaaagctgcacatcgatggcagcagctgaatagtaatctttcgtcaatcttcatcggaagtactggtatttgtagtccacgaggagggatgacgcgaacacggtaaagacctcggtagcttaaatgctcaggttttgtccaattgacaatcatctcctccgcgctaggatgaacaacggtaggaacgccaacgggataatcggtgtcatagttgacccatggatatagtgagacaatgtcgaagacggagatcttctcgtcctctgctgtttcagcaaaaagtcgcaatgggccagttcgtctgccgcaatatgcaagtctagggtccagaggtccacgttcattccccaagtcatcaaaaaactctttcatctcgtcgtttttctttagctggtcatttatttcacactcccagacttcttcaacttgtaaacagatcccattatcgtcaggctcgcgaagttggcgaagacggtcatgtgttgtttcattcagctcacgacacgtctttccatcgacgagctcctcattaggtttgaaacatttctcacatccatgccaataacatcctaacacttcgatgcaccgttgttgtctctcaatccatccatcaagtttgaattgtttccatcgtttttcgcgtccattgcccgcatgctggatttcaatgccttcactttttgcccgccagtccaaatatttgattgcgatgacgctggctctgtcgtttcgttcatagcccagctcggagaccattgcaatctgatcttcttgcataaattgaaccttgaagatgttcatgcaagcgctgtaaaatgaaaatgataaaagagcaatttatgttttaaacctcgctatggtacagctaattggcagcacgtcaaatccgtccgtaatttcatccatcaaaatctggcggaatttaaccaaagctttgagcagaatttcggtgtcattcagacagtatgcccttagctcatcgggcaagaagaatggcgtctctttgttgtcgttgtaccattttttaaacttttcgtacttgtcagccttcatcgtgccgggctcatactcgctttcgtccggaagattttccagtcttatggcgtcgttctcccttctgttaaatgcataagggaagaacggtttgtcctcgcagtcaagattaaaagttttttttaattcggcgagcgctatcggcataatcagacaggagtcacgccatatgagcattgaatgctttcggctatattggacgcaaattcgaaaatttttagtccgttcatcacgcattgccataggcttcactcctattatctgaatttaagtttattttctcaatcacatcccaccattctttttctcgctccagcactctattgttttgacagcaaatttcacagtcattttttgactctgacgattcacagcaatcggtgcacgtaatacgtgccgaaagaaaattgacctgatgtatacgctgacagtcgtcctcaagttgttcaagtcgtgtttcagtatcccagacgatgatacgatagcgctgtttttcttttggtatctggatccttttgatgaaacaactcgtcttttccgcgtgataaacctgaaatgatgcgcgtgtttctattttttcaaatagaatattctaccttgcatcgtttgcaatagcttgtatagcatttgtgtatctcgccggtatctgaccaatgagtacgattacagagagaacaacgtttaatcactctgcatgttgacccacggtggttttcataacatgtttgtgaaaaaaagtatcggttacattccgggcacaaaatttggatgccttgctgttttgagcatggttgttctggtccaactgaaaaatttcagtatagcaaaattttaacaaattttaaaatctttagcacattgcggacatctgctcttacaatgaaatgtatgtttagcgtcaagagtgtacgtacactcgcagtctacgcaatatttccgaccaagtttgaagaagcaatgaatttttttgatcgcatcataatgattgtcggaccgaaaaagcgtgacgttaaaacgatgtcctcccgctcctttccatataggccgaggtagctcttctggccggtcttcaaacaacacaatgcgatacgtcccaggaaaaacattatcctgaaacatattttcagcaatttatgactaaaatcgtataacacttacccagtattgttgaacatgctgtagatgttcaattccaaaagaagtttgaccaatctggatgccagatgcattcatcaactcttcagctgcagttcgcattcgttcattgtttgataccaggcgattgaacgcttcgtagtttttgcaaaaatcccttcttttctttatgtttgaaaaaaatggagaatttgtcgaattgggattggaacaaaaaatatcatggtcgtgatatgcccggcctgcatcaagtgcatgaaataagcagtagttgtccacgttgtgtatacgtattctttgcgcttcgtcgtatccccaattttggtatttgtgcaagcgtggggcggaccctgccggaggagtcaagcatgtgacgacgatctcccaagctcggccatcacaacgtcgacattgttttgcagaggagaccgtataggaagaactaccggatcgtttaagacttttccggttaccattatgcacaattttgaaacagtgcgcccacttactttttccgcattttgtacagctctggcgatgagttcatcgaaggcttgacgtagtgcttcatcaggttgctcatgctgggcgttgagcacaaattcggtgacatggcgctgcacagagaaccgctcgatgctatgtgaatgattggtgatttctttgtacaacggcagctgttgctgtccaccatcggaatccgatgatcgatcgcccattccagtttgatttgtcgcttctgatgatgattgttgttgctgggtagtctcctcttccaattgtggttcagttgggtactgttcgaagtacaccattgagcggaaat

SEQ ID NO: 6393 - DNA, 4733 bp, Heterodera glycines
  unsure (1)..(4733): unsure at all n locations
aaatggcagcggacaaaggnccgcacctttacgaggcgcacttcaacaacgcactgctgctgcacgaggcactgacaaatgagccattaattaatgcccgagtgataaattagtggcttaaattgtgggattcaccagtcaatctcttgcgggtttgaaaagacgggataatgaatgactgataagattatgatcaataatggtctgaaagatccttggcacattttccgctcaccactaaatgattgaaaggagaaggaggaggaataattgacaatcaaatcacaaaaatgattttcccaaaattttgttcgtcccctgtttaagatgggtaattacgcggagtgtcaccgttcgctaaaacggtcgttggagcttttcccggatcatttctactccaaaaaattgctgcaacgtgtggagacaattctgaagagctgatttgatggggtcacatgaattaaaaattccatgcttaatctttataaaataaattattgtttaaattttatttggaaataattggataaaaaatggctaaactacaaataaatatgtaaggctgtaatttttatacaaatacatatttttcgcgcatttttttgcacaaaaatcctggttagaccttaaacggtgacttttataatgtgtattttgtcaattttcataaaattcaataaaaatgtaaaaaaataaataaattcatttattttgatttttattaattgtctaatttaaattattatttttttttgtcaattggaatcgataaaaatatttaaaaaaataatttataaaaaaaataaaatttaatttttaatgtggagaatacaacagcatgtgttgtttttttaagaatttttaaaaagttttcatgatgaaaaatcgttggaattccaatccatgtgaacagtgccattgatagcagcaaacaatttctccaaattgccaaacaatgagcctgacttttgtgccgtcaaagcactgttatcattgtgccggaattcgaacagttttgcctcagggaacatttccagccggtcaatccatgcattttctgcttcttcgacgcagtctaatgccgcttcattggtggcttaatccaataaatattaaaaaaataaaataaatattaaaataaatttaaaattgtatattttcttcacctttcgtctgtttgtcttctttttgtgttctttttgaaaatgcgtgctttaatttgtccaatttcactttaaaaatgtccgtccgatcaaagggactttgtccaaacataagtcgaacctgtaaatatttttaaaataaattttctaaattcattttttattattacccctaaatttcttatgtcatcctcaatttcgtgactgtccccattgagtggcaatggaaaattgtccgggtccaactgataagactgtttcaagaaaacaccgaccaatcgggcgcgactctgaaattataaaaaagtaaatgttaaaactaaaaattattttagagaaatttaaaaaaaataatttttcaaaaattcttgccaaaatgaaaaaagggaggaaaatggcaaaaatggacgagaacagtgaggaaaaactgacaaaaaaggagaaaaaaaggcgaaaatagacatgtaaaattttaaaaaagcgtttatattttttgcaaataaagaaaattcctgtaagtgttaaatttaaattattcaatggtccgaccgtttcatcgatgcctttcgtgccaataagccattccaaaaactcaaaattcttagagtccaaataagctttgagcagatgcgtttcctggtatgaatttatattggtaagcattttgtctcttagaccaccgagtgtaccaaatgtccgctgaattgtaacagaacaggcacttcaaattcgaccaaagttggcatatgctaattagaaaaacaggcattaattagcattggtctttgttttttttctctaatcagtgcctttttcgtttctcaccttcttcggtttttgttcttcttccacgggacggattggcatcagtcgccgctgctgatcagttgacaactgattgatcagtcgccccaattcgcgcattttctcgtcaaaaccaatgcgcttactgtaataaatttggtggacgcgtctttgctgtgccggcgacaatttgcgaaatgcggcggggacgggaaaccgcgagagcaaatcgtccggcaaagccatgaacatctcgtcgagcagttcaagtcgtttctaagcacttattatatttatgtgtttttcgtttttgaaataaaaattcatttaaattgatttgcaaatcaatgaaatccttacaaaaatttctaaaattttattgaagttttaaaagcactaattactgattaatttacagtttttgccaatgttttgtccatgtaaattgctttgaatcggttgaatatttctggtggcatcgcttttcgatattcactgagtgtcgtgtgaagtgaacgtttacttgtgacaacaataatttgcaaaaataataatagtaatattttaaataattgcatttttatgaatgggtgggaaattgacactaattggcccattttctttataaatggtcaaaaatcggaataaatattcattgacaaaattcaatgtttgcacaaatgaccacaaaaatggttaatggtcgaaatacagccaaccaagctgcataaaattgctgctatataaaaaaaagtggacaaaaatgcgaaagtaaaaacattttatgataaaatgtttttaattcatataacaaattttgttatcactttaggggacgtactaacaatgtaaaaatgaagtgcagtgaacagaaaatcccgtctttttaagtattcggcaaatttggccaaatggacaatattttatcggctttcgctgatcagcaccgaaacggaaggtggccgagcacaatgggtggggaaaggttgtggagaagcggcaattattggaccaaaggcagataattcataccatttataccatatgggaaggaagcagacactgctacggtattccccttacagtaacgctgtcaacgcaaagagaacccagcgattgttggcaacaaaggttggttggcactttgcaatccattttccatcaactgagtttgtgccatttccagtttaaagcctttcaccgccaaggagctcctgaagatgaacggaggtcagttttccgagctgttgagcgagtctcggcacatgggctgggctcagctgcacaacaccgacttggccgcattttcggcactcacttttctcatcgttctccgatattttgccaaatttacattggctttaatattttgtccaaaaaaggcttttgaaaaattacaaaagtaaaaaggaaaagccgtgttgcgacttttgcgccgcggacatttgcgcctcaacacttgcgccgaccaacaaaaatggacatttgcgcctcaacacttgcgccgaccaacaaaaatggacatttgcgccgctcagtcaaatatatatttaaatatttttactaattttcaacgaattttattccaattaccatgccaacaacaagaagcatttaaaagaaatacaaaaaaataatcacaacgatagacacccaatttttgttttgttttttgtacatcagcagcaaaggcaaatttgttgccaaggaaacaaaaaatgaagatttaataagtcaaattaatgtatgtaggttttagtttaaataaaaatcttttggatattttaaaattttaagaacggtgcaaatggattttatagggcggcgcaaatgtcggtacaccgaataagcagggttgccaactgaaatctttcaaaatcaacttttcctgacaaaaaagcaacatttaaggggtcaaaaatcattcgttttaggaaaattttattccaagtgaaattttgtaaatttgaatgcaatttatttagagattttcaccaaaaatgacaactttttgagatttgaagtcattttttatgaaaaaataagttttggagcccggcggtgccgatagacaccgccgagggaaaaaaatggaaattttgaccaatcttatataataaagttgagtgtctgtatgtgtgtgtccagtgtttgaatttgtgtggcgttttgtttgagttttgcgttaaaaatgaatttgaaaaatgaaatgtttagttttgcttttttcatttttgttttgtcagttttgcaaaaagcagtttttaaaaaatgttttttttctgtttttcttttttaatgaaaaaaagtttttgtatgttttatcaatgataatgaaatcgcaatgaatgctttctattgcatttgttgagaaaagtattttgtttttgttatattagcaaagtgcatatggaaatgaatgctcttaatttttgtaaaaaaaagaaagaaaaattgtttttgtatatgcaaagtcaatggaaatgatcttacaagtagttttggtattgtattgaaaaagttttggttcgagaaattgttttgactttgaaatagagtttttttgtttttgtaattaaagcggatgtcaattatgcctcttttaatggatatggttttaattgatggatttatcgcacttattgtttgttttgacaaaaaaaaagttacttttaacgatataaggtcagtttgttctttttttgtatgtagatgtttatgtaaaagaaattataaaaatgtaagagaacaagtatttataatgaa

SEQ ID NO: 6394 - DNA, 1060 bp, Heterodera glycines
tttttcattaatataatttattacttttcattatttgagccttcttttttctttctctttttttgtattctcatttaattttcccactctcctaaaattgatttctgtccgattttccgcccatttgctgcctaaaaggaaaggaaagggaggggcaattaaagtgagatgaaagttgggcgtaacattaggcattttatttaatgaattacaaaaactaaaagattagttaggaaattcaatttatttattttttgctttcttaaaatgaaatttggtcccatttggctaatacgattttatatgtattaacatctgttaatttggcattttagctgacaatttgctaattactcctttcccaaatggagtcttcctcctcttcctcctcctcctctttctcctcgtcgctttttctgcccaatgcccaatcccattgtgataatgaggcgagccaaatactcattagtgattttgaccacgcaaaaggtcaattcccggctccaatttcttcaaatgtttccgcctccattccgtgccctgtctgtgctgaaccgtccaacggcactttcttcggtgttccaacatgccgcgcttgcggctcattcttccgccgatcggtgcttaacaaacaaaaatatttgtgccgtaaggcgaatgattgtgccatcaataacggaggtcggatagggaggaaaaattggcatttcgaacaaatttttgttttcagaaggaatgcgaaattcgtgccgcgcgtgtcggctcaaacggtgttttgaagttggcatggacatttcgcaaaaactatccaaaagtcataccaaacgttaagtaattcggtgatgcgacatttgcggcgcagaattaaatgacccaaacctaagttttttttcagaaatgggcaaaatgttaagccttgggtggaaatccaatcctttggcatctcggccatttcgttccgaggcaaatccgcctcttatcaaccgtctctttacgtgttttaacgcccagctatgccttctttacaatatcctgtcgctgacctgctttaaaaatttat

SEQ ID NO: 6395 - DNA, 4959 bp, Heterodera glycines
tgagtcagaatttcccaaattcattcacctttatgcgatattttcgaaatattgacaatgcgacaacgagcgttggtcaatgttttgagagggacgcgcaaaatcattttggatgcccagcaggtaaataagcaatgggctcccggacaatcggacagtaaaatactcaaaaagaaaagaaaatgccgtcgctgaaggggaccgattgtgccatatcaagaagaaaccacttttctgtgaattttattttttatgattttttaaataattattttcccccttaaaaatttgactgtcgataaataaatatatcaaaaatttttattgtcctttgagattttttcaaaatttttgatttccgacgttttcggggtcgtaattccgatttccgaaaaatttttgaccctcggaattccgatttttgaaaatttttgggacttcggaatgccgtctttgttaggcattgttcaaccattaattaattctcttctcagttgtacttgatccgacatgacgaacacatccaaattaagcgcggtttcattgtgcttttgcttgaacacgtcagagaacagttccctcaactcaatgaacaaccgacacaaataaaggcaacaattaatgaattattattatttatttttcttaaaaattattgaaaaatgtatacaattagcattttggaaaattcagattggcattgtccaaagctactcatttcaggctgaaattttacgaatttgtttctcaacagtaagaggaataattgatgatgatgattctatgctttctcattttgaagggctttttaaaatattttagcttaaattctttccccggcaaaatgtcccaattaaacatttggtgctcaatggctgctgttttttatcgacagataaattggattacttcttttcttcttacggatcgatcagtgaaaggaaaaagtgcgtataaatacgaattaaaaataaatttaaaaaatggagggttaggaacagaaaaagtttttaaaataaatataaaacataattctcattttatgttcgaacattaaaaggtatgggctcgaatgccttgccagtttcggagtgatcgtgtcacatttaaagccgctaaatttgtccgaacttgagctgagcgcattgaatggaattcagctatggaattgcagtaagtccgcaaaaattggcattttgccaactttaatttaatattgttttttactttgtatttttgcgacaatattatccttcttctattagttgagcgttttgtgccattgtctgatcagcaaaaagcgcatcggaatgcattttttgttgaattaaacgcaatggccgcacaaaacaacggcaaaatagccgagattggcatcagattcggcttattgatgaaccttttgttcgacactttggtgacaaattaattagtttaatttaaacataattaaataataatgaaaatcaaatttaatttattccaatctgcgttttcgcattcagaatgctgcttctcaactgcttgaagcattcgcaatggctgatatttttttcccagctcaccattctttttgcttccccgatgctattgtcggcgctttgttggtacaataaccaaaattagggaaacaattattgtttaataaacaattaaaatttaggatcaacagtgaaattataaatggccgaaaaagagagtgatcaaaagagagagacagacgcaaaaagacagcagagagtgtgtgagaaggagagagagagaaagaggagagagagagagagagttcaatcggattttaatgtcatctaacaattttttttctcattttttaattttttttctgccgtccccaaatgccatcatctgacaacaaattatacaattttatgacaatatctgttaaaattgattcaaaagtttaaaattccagctgcgtttgacggcaccgccgagcttatgtcgtcccatgaagttttttggccaaaatagttaataatcagaagatttcaaaatgaaattccgatattcctttgtcgcaaaattacaaaaaaaaaataaaaatttatgttactgtaaattaatttaaaaattgcctaaaaacctttgtttaattagggttataaattgtatgttttatgctacgaggaaagtggctcaaaatagcatttctacgttaaatttttttttgattaaggtttttgtcaatccatatttcgccatttttgcctttttagcatatttcgttcatttttggcaaattttcattaaaaatgcaataacacctctacggatcgacttttcgggaatttaaaaaaaacatcaaagagaattttttcgaaattttggcaaattttatgtttaattatgattttcttttaaccagtttttctattggattcttttaaatataaaatttaaaatgatcacggattacgggaaattacggcgtttttcgacccccgtaattacggattacggatttccgtaattgagaaaatcgccacagggatttcttttatatcataattttttcgactttttttaatttggacttcatctgaattttctgcattttcaagttgggttgagccccgaccccgagctcctcgatccccgatgatccccgtactccgttgtcattcctttttttggaaattaatttgttaatttaaatataaagcttttatccttattttttcttttaaattgtcgctttctatcggcacctgtagcgtgtgaaaacaaaaaacaaatgcacaattgagtcaaacttatttttttatactttttgggatttttatgacttcttgcattttttttttgactttttcatgacttttcactttttaaggcagttaattttagcaaagaaaattccgaaaaataagtcaattttagacagcaaaaaaatgaaatacttttgatgtgttagcgaaatgaataaagaatgagatttttgatgagaatcacgtaattattaagcagttttgtttcaatttttggctttacctttttggagtttttaacatatatttttgggattttttggctttagcacatataaatcccagcagtcctgacaataacaatatgtacaaaaaaagcgaaacttagttcaattgccttagtgtctctaattacatatgctcaaaaaattgtgtttaattattagggatgggaattttatgtaaatgcatattttttcctgggttctccatgctctgaatatttgtgtttgcgtacaaaaattgtgacttttatttatagattttactcatactatttcggggggtttatttttttattttttacatattttacaaattttcttacataaaaattcccatctctattaaatataaaaaccaaaagtttataagcaaaaaatgccaaaggtgtgacggattttttttgaaatatttttagtaaaaaaattatccttcattattaatttggtttatccaacataataatttacgatataattttctgacgtaagcaaacgctgtgcatattctttccttttttcaattgattttattaattttttttatatataaaattttttataaatctgagttaataaatagggcttgcattttgaggcatacgcctttttttctgcgcactggtttcgatatattaagcataaaaaacgcattttccacttggtttgaggctttacgttgacttttattatgcctttttcgggatttttgtgtcttaaatgccttttttggcagcgttttttaccgaaaaatcccattaaaatgcaataaaattggaaaaatacacccctaagaatttaaaaattttctcaaaaaataatttaatttttttttaaagaaattttaggcttaaaatttccttattcgaaaaacattacaaaatatttaataatcatttaaaagacaaaaattaagttttttggttaatttttacgtgtttttctccctaaaaagcagttaattaaaaaaattttaaatgccttttttcatgcctttttcgggattttcgtgccttttcatgcctttttttcaatttttttggtgcctattatagtgcctttttcgcgatttttggtgcctttttttgcgagctctattaataaagaaactttattcgtataaatatttctataattgtatattttatattaaataataatattctaggtcactaactttactcagaactgattactttttaataaattgtttataaaatttaaaatttaaaaataaaaatattcgtataagcaaaaaatagagacgaagaaatctcgcaaaatttgaggtattctatattaaatttaatttctaagttataaaaagtttctggtgtttcttttggcggatttatgaaagccagggcattggtgcaggcagaattaataacaaaaaccacttttagatatatacaaaaaatgttttcattatttttgttgcaatttttttgctcactttggcatattctcactgcaatggataataatcacattcaaacatttaataatggccaagatggtcatttttgtctcaaactgatcagattaatgttccatctaattatcatactgtttatgatgtgccaactaattaccatttggctaatgaatatgatcacaatggcatggcattgtattcaaattcgatgccactgattagctcaaataatgttaataatataaatgattcttcggttcattcatttgggcatggtctttatcaccatagttacccgaatttttcaagctatcacccagtggaacataatcatgtacacagcactgataatgtgatagtgccaatggataatcagtcaaacggaactcaatccaataattaatcaaaaaattggcaatgtggcgaagccgatcaatttgatgccaaataatgtgcatcatccattgcccgatgctaatcattattgtcatatcaaagcaccaaattctat

SEQ ID NO: 6396 - DNA, 899 bp, Heterodera glycines
aactgagtaccgaggtcccggttttgaccgggaccgggaccagtcccgggttttttcccggttttcccagccaaaaattcccgggttttcaacccgaaaaggtcccggtcccggttaagcccaaaattcccggtcccgctctactctattcaaaatataatgtgaatttcatgagcaatttgaaaataagtacgtattcagttttgaatctaaggaaggatggcatatgtagatgttaaaatgatttattatttctttcctttattacttgtaatatttgtattttgatatttttatgcatataatttagggctggagccaaaaattcccggtcccgaccagccctaatataattagatttttggaggagtggacatttttatcaattaaatgtgttccatcatatttttcagcaattcaattccttcttcctttttctttgcattttcattttcccccaacaaatgctccgttgaatagcacttcctttttgcttctgataaggaaaaaggcgaacggatggtcggcacggaaaacgggcggagggggcggattataagcgaagccggttggcatcgatacgattgttgcggcaccagcctcacaacccttttcgtcaaccttaaaaatttaaatttttttcatttattgtgaaagaatcaagatctaaacatgaatgtcctctctaattggcatttccgatccaatcattgtttttttctataattttttcactcaccgaaatcattgctttttgaagaaccttgtcaatatataatgggatagacttatttatgcccgagaaatcagcactgtccgagttgaacgcacttttaagcccaagcgacggcaacagttcttccaatttgtgggtcgactcaattttgaattttggcaaa

SEQ ID NO: 6397 - DNA, 6412 bp, Heterodera glycines
agtaatttgaactgaattttgtataattaaagacagcccttttatttatttaaatgtaaaataaacaaattaacaaggaaataaggggataaagcaaatatttatttatacgttattctcttcctggtaaacgaaaaaatttgtttgttgcatcatatccaactaaaaagaatatttcaaattaacaattttaaatatctattttgacaataatttgctatcgaaaattggacttcctaattacatgccttgcgaagacatactttgatttctttgccatttgcgagaaaaaatatttctttttgtgtgtcgcgttcattgaaaggatatgaccaatttccattgaaataaatcgcattgatcagaagaagtctaatgaattgataatgtaaaaaattaaattttatgtgtattacactggtcgaccatcaagaaattcgggattaatcatttttggaatttttccattcgtcgcattctcaacaaatgcattaatttcctataaaaagcattaatttcgaattcgttttttgtttttgtttatacgtttgctgcttcttcccttttgccaaaatcaatctgttcaaaatttccctggtaatatttgctcaatgtctgattaaactcttccaaaatggtaaaactttcgtttagaaatattttgttggcaatgctcaaattgaacgttttctccaattccatttcatcgataaatttggcattgttttgatgcagcgaagaaccatctaattaattggtaaaagacattaaaatgggtatggcactttaaaatggaaaaatttgccaccatcggccaacaaattgacaaattcggccgccgtttgtccccgcgcgcccgcataagccatggccaacgcaatggccgccgaaatgggcgaaagtaccgtattctgtgtagacgatgcatcagcacagcagttacggtagattgcgtttagcaaattcatggaaaattctgaaaaaaactaacttcattaattatgagtaatatacttataaattagctaattacccaattaattttactcacgtggtcccgttgtttgtggatattgaaatgcgatgttcaccttcccattggcactgatggacttcaattcggtcggttgccacgtcagttggtgctgctctgtgtacaaatgggcgcccctcgggtcacgccattgcactgcttggccagccatgttcaactgcaggccgcgcatctcatgcacacggccctggaaatgcattttaaaattaattataatttttgtaaaataagtaaaatattgtttatgaacatcatagcaaaataagacgaaatatttatgtattaatcgaactctcagcgaatgaaaacgttcaaatattcaacaaatatatgttgatcaaccgattcctctcgggttttaaatgacgaaatcagaatgaaatttttggaaaaaatatgatgagttatggtcaacatcttatttaaagagcttaaaacacaaaaattttaattttcttaggtgttaaaaacgttagaaaaattttaaaaaaattagctaaagctttaaaccgtatatgatcaacatttaccaaaaatagtgatttattgatgtgtgaatttctcagaaaagtgaatttttaaaaattgaaataaaaaattaaaatactttttcaaattcaatggctggcagtttgaagatgtttgtgccacaactgattaaataacgaaataaattgtcaaaatgaaatccatgtgatttaaattatttatttcttaagtttacaataaattggcatcatttgtcctcattaattcttttgtgccggttgtttacccaaattattttcccatttaaatctttcattgttgttactgattccgtttattttaaagtgtatttattgcgaattttattattattttttttttgtccaattaaatttgtctccaaacactcgcaaacccgcgcaaattctcctacgaaataaaatattattatttgcatttttttctctttacgcactctccgcttatggttactgtaatgccattgaacgcattttccatttgcgcactgccaaataaactgctgcaaattcggtgttggaataccacgggaaaggtaaaaggagaaaaggaagaatccgtaatttcaaaactgaaaacaattaaataaattaataaaataataatataattaaatttatttaattttataattaatggtaattagttattaattaattgccccatttctgataatttgtccctttcttccacctgttctcaaacattgttttcatttgtgcgtcacaatttccgtagaaaaacgaacttttcggctcctcaaattcaattttcacttttgccgtgcaattttgggctgttcctcccgcgacgcatccgtccaaaaatgcgagagtgcctaaagaaaaagtcaaatttaaaatgattaatttttggcacggtaatgtttaaaattgtttttacgtttatattcgtttccatttggctccttttcgggttcattttcgtaaaaatggaccttaaattttaagaaataaattcttcactttttttaacctgaccatgacacagtgtttgatttggtcataatagggattaccacactttggcatctgaaaaagtaccgtataaaataagaatatttattcctttaccaatgccattttgtataaatcctgcaaacaattgagtccgacgaatgttccaatgattttcgaaaatccttcattcggcatttgctttttgtacttaaatgacacacagcagtaccctattcgttcctcttcgaataccgtaccacacaagcacagtaatcctcgtcctgattggtcccattgctcgcctttgtcccactgtaacacgcgtaacatccattggccgacattttctcctccgcttttaatttgttgtcctcaaaaagagatgagtccaaccacgggggccgcaaatgcttggggatgaagcctttctgttggaccaccgacgagcgaaggcaaagcgagtgaaattgggcggagcgatcaatggcacggcacacatccgcggcattaaattctgaaaaaatattaattaaaatttatttttaaaaatatttgggacctggacttgcatcgatgaatttgatacttaacagaagaataatcgttttaaaaacagtcaaaaccaacagatgtttaagctgctggtttataatcatttttgatctaatttcattcatttaggagaatataattctttaaaatatttttatattttttcaagcaaataaaaaattattttttattacatattttatgaaaatattactcaaataatgtcatcattttttggtggaaaagagtgataatatttttgagcgaatttctttcattaaataatttgcatatttattttagtaaacaaaaaataaatgattatcataacggtatattagaaatgaaaaacggagatgagtcatcccagtcagtttggtttattttgtaatatattattcgctcgttgtgtattctggtaaaaagtgtaaagtgatgaagtaatgctgaaaattttaagagttaagtgaaaatgaatattctgattttatttttgtgacctttcccgcacttttatttttcaaattaaatttttaatttaggttttaatagagtagagcggtaatgggtagttgtaaaaaaccggtaccggtatttttaggattgaaacggtactatttggctggaaaaaccggtaaaaaacggtacttacctgttccggttaaaaccagtactaagcactcatttgtacgtttatttcagtaccactaccggtgccgctctactctagttttaataaataaaaaggttttagttcggcaccacttaattttttcaccaaaattagcaccaaaactgctggtgagatcgcttgacattcgtacatttttgcagttgtgcataatttcttagagacttcacacggacaaattgctcaactgccggagagaacgaccatttgggaatatcaaaaacagcccaaaataaacagacactttaatacattcattcaatgccatttctcaccatttttgacaaaataatgacttttttattcttgagatgactgaaagttaattagaatttgtttagtttagaaagctttataaatagactaacatttctcagtttttctcattattctataaaaatgacaaataaaattattttgtgcacaatcattgcattggcattcttaaccaaaattgatcaggttcatcgctttatttatttatctaaatttaaaaatgtttttaaaacagatttcatcatgcttttctgtcacatacggaaatagatgttgcaaaaccattccgaattttcccgttattccaagtattttaaattttgaatttaacatatgcgattttatgatttgcttgtttctaaaaaaccagtgcttaattatgtatcaaatcctaggtattgtcactttgtgtagtgtcggcagtccgtggtgcaacgcttttggagggaattgcgtcgtttgcgaatttgttttcattccgactgcacgttgtgagctgatcaccaagtgcagttgctactattgttgtgaggagcagtacaaagactattgccctcaggggtgcgaaaattgcgtgacggacggcgagggcggctgtgaggagaacgcaaaaagcagagaaaaattcgaaggctgcgcgtaattaattaatctattaattatgaaaaggaatgcccatcacaaacccaaaacccttagaaaaaatataaaattagcaaaatatcatttaaattaaaaatgctcatacaatatcacacttatcataaccataatcattgccaaaatggaatttttgctgatttttttaatattctttttcgattttcacattataacgtaggtgggtaattctgcacccatgttatgataacataataaaactttcatcaaacccattaagaagcacagggtcaacaagcaatatcagaggaggaggcgaaacggcattttcaaagttgaaaaggaaaacggaggcgcagatggcatttgaaatggcaagtgaaaaatcaaaaaataagcaaatagaatgtgataacagatagacacggatttggacggatttatctcaaaggaggagggcatttattatcttcgcacatcgcaacaccaaagctctacgcccgcggaccttgacaagaattcgtcctggtttgacacgatggaccgaaatgggaataaaaaaattgatcctgaagaatttgatcgcttactcggcacaaaatgagcaaacctacattttataaatgtcttaaagtttgaactgcttcacaaaaacaaagggtaaaaaaaataatgaaaattttaatgcacaacatttatttatttttgagtatacggtaaatacaaagctaataattaattatgtgttaatttctcacaaaataaaaatacttatgaatcagcagagattggataaatcgaattcgaaattgagcccaaagttcgcttcgatttggtcatcaaagctgaacaaagaaacgaatggaaccaattcagatggaagaggaacgaacatttgagaagcatcttaaaaagaaaatggaaaagcattaaaaatggttatttaatcgtaaatattggacaaaaaatgcaaaattcattttaatggccaaggaattaagaaataaaggctcataaaggaaccaaaaagtcaaaaacactttcacaaaaggtgaaaataagcaacatttaatggactttgtatataaatcttaaaactaaaattgtatccctggaaccattaattacctatatttggaaatggaaatatttttaattgctcaccaacccaaaagatgtccatttttctgtgccggccaaaaccaatcgcgtcgtttgctgtccgcgccgcgtgcggcgacaagcgcaactgaaaaacgaatttctctgattcaaaaatgctttttctgttgactgtaatgcgctgcgagcatatccctcgtgtagaaaaacgtaattaaactaaaggaaaatgtgaagaatgatacggtagcaacgagttacagtatggaaaagaaaagttacggtaggaaaagtgacgaaaagtaaagcattgaaaagcgccattaacaagttaaaatttctgatctgaatttggtcataatgagtatcttaccatcgatgcctgtgattatatttgatttaagttttgctgcgtttccaaactgtgccaagtcgcgcttgtcgcgtggtggccgcggagattggccgtgaagtgatcgaagtacgcgacgtgcacaacatgctgttttgggtgcccgtcttcaaacggctttcgggccgttgcatcccttggaagggttaacgaatgaatggcattggcatccattt

SEQ ID NO: 6398 - DNA, 1098 bp, Heterodera glycines
  unsure (1)..(1098): unsure at all n locations
caaatatttacaaagagaatttgaatttactcaaattctcttggctttcattgcatttacaggaacttaagcattttgatgtacaaaatggcaaattaattggcaatgacagcgacgagtcattggaatcagtaaatgaaaagaaaattaattgcttgattaattaattaattaattacatatatagttgattgattaattatttagttggtttcatttatttctaaaaatggctttggtctcataaacgacgaacggagaacaaaaattgatcaggcaattcaagaaatagaacaaattgtaaagaaatgggtaagtccttccttaagaattccatagaaaaacaaatttaataaaataaataaaaattaaataatgccaatgaaaaaataaaatacccgaatttgtcattttcaatttggtgtaaaacatacttaaattattaattggacaaaatgcgcaatttgcgccaaaatttgaccggtttcaacgtatcttttggaaaaaatttcacaacttttgttcgaattcggctccggggtccggaattgggcaaatccgagttcaaatttgcaatcagcacccttaaaaatccccggaaactgattttgagcctaaaataaaagaatttaaattagggagggatccccattctttaggactattgcccaaattcgttatttttttcgaaatttagaatcgcaaagcgaaaattattgtcatgggttcctaccaattgggcgcactcaccaaacaatcagacatcgatgccatttgtgttgtgcccgaattacgcacttggagagcggcaaaattttttgggaaggcaaagtgccaaattcaatggaacgggttcagaaggtgcgcggatgattcactgttttgccacttttgtttggtgagtgaaaccgtggggaaacttccagaaaattgctcggattanatgaataattaaaaaataataaatttttaaattggaagtcagatgaaaatgaacattgatcgattttataatttagcttanatttaatcaaatttaatgaacttcgtattgaacctctgctatctttatggatttttaaaaaattagtaaaaatt

SEQ ID NO: 6399 - DNA, 3297 bp, Heterodera glycines
gctcaatcggatccaagacgcgtgggtgccgctgattaaattcaaattcgaaatcgacccgaacacttccgtcgattttgacattggactagaaacatttgcaatccatgacgaaatttttaaatccgaagagccaataaaatacgaacaatgcgacgcattgtcagcgaaaatggccaacgaaattggacaattagcgaatcggaggagggcatttattacgaggggtggagactatgaggaactgatggaaatgaacagcgagcgggagaagctgagaaggaagctcagatcattggcaggtgattggcccggcgggggagggcttaaatttgacaatccatcggaggacggaagatgccgttgattactgtgtaatgtcacttctaaagttcggcccaaatttccccgtacaataatagtagacatggaataatgtcctttattccgaaggcggatatccacgaaatacagtatgctaatataatgaggaaaaggggaaagggaccccgacccgtgcaggacggaaggggaggggatctggagtaaatgtgatcccggttataagaatgaatagaggtgatcgctaaggaatgggccacattacgagaaagggcggagctaaagttgatcagagtgatcagaggcactaacaaaatcagacagtcaaaaaataagaaataatgtacaattagtttctcgcccaaaaaccatacaattttaggcttcgaagtgggcgtaattattttgaagaaactttttgcgacagaaaagagagaaaaagaagacaaccaaatcattttaagaaattatcgcactttattattggctgtaaaaatgtgggccaaaggtattttaaaatgaaaaaataaaataaattattattttaaattggtatttattctctaattttctctcatcagagcatcacatttatgacaacaaattgggcttcttcaatggcattagcctttcccttttggtggccaaagtgatgcttctttacccaatggcatcacttccttttctcattgaaaagttcttcttcaccttctccacatggtcattttgttttaatattttcttttaaaaaaagttttaataaaattaattgtcaattattttttgaattttaaatgtcctaattattctatgcaagttttaggccttggccaaccccggtaaagctgtccaatttgccggatgggtcggcactccgctggaaccccagcgaagaaaaacaaaaacggagcgaaattggctatggaattgcggccgaattggcaatgccaattgtcacgccgggacacattgaacaaaatgccactttcaatgtgaaccgatccaccgcaacaatcattcggcgggaaatgcaaaacggtgtcaattaaaggaaaataaaataattagggaattaaaaagggatgtcatcattaatttgaatgtttagcaattaaaattgtacgaaattggccaaatctgagcatttcattgaatggaaaatggaaaagcttaataaaggctacaaaattcaaggaaaaggtgacccaataatattatttaaattgaaacgcgtcaggaccagtcagctggggacagctcagctttaagataatttacaaaatttataaaattgaaaaatattaaaagttttaaacaatgacttaggttagggctaggctttaggctaggcctaggcttgcttgtgcctaggcttaattttataaaaatttaattgtatggctgaatcgtccatcagtcgaattgtcccatcagctgattgtcctcagctgactagttcagaagccaaattaaaaattaaaaaatttcaaatatttttcgcagttttcccatttcattcgcattaattgcaaagccttcgctttggccgacttttacgacttttgtggctacgtggagacgcgaattcgtctccaattgctgatcgatgtcgaacgatttgatcgcattcgattggcccatgcgaagcaaattgttgaaaaggaacaaattttgggagagaatttggatggaagcaccgctaataaaaagaatcacaaaaagtgaaacggagggtctcttctatttttaggattttatcaattttttcctgggctacctttggtcagaaacgtactaaaaactatatttttggatgctattgttaaactacttttcgaatttttagatcctaaaatccttaaaaagagataatttgtcctgttttggcattttgcctaaaattgcctaacaacaacaaaaaaaacgaagataaactccctaagaatcgacttaaaatttgaaaaacaaagccctaatattgtcttttcaatacatacaaaattaagaaatgttttcttcaaaatttggttggttggcctcgaattggacgagcaaatcgcttcagaaaatgagtcggaaagtacgaacaattggaataattggaaagaagcactgaattcgatgctttccgaacaatttaacgccgtcattttgaaggcgtatcggacaaagaatggttttagtggcccattggttcacattcaattgacggcacaatatgagcaaaagcattaaaaggggcataatataatcgaagatgaaaagtaaagttgttttttttggtagagatctcattagtgtaacatcgaaaatttggaaaaataataaaaaaggaaattgatgcaaggttttatggtcatatgctaatcgacaaaaaaatccttaaaaatagccgtttttatgttaaaaaatgctacaaaaaactcccaattttcaatttttttttctcggcggcgcatatcagcatcgccggcccccaaaagattatttcttcttaaaaaatttgctcaaaatcgaaaaaattggtcatttttggttaaaatctggtgtcaaaatgaactcaaattttcaaaaaatttccaggcgtcgcctagcgtcgcaaaaacccttttttcattttgactaaattttcaaaatgctgatttttgaacccaaatgatgatttttgtcggtcacagcccagtttttaattgttttattcaaaaatcaaacaatatgccataaaaggatttttgttaagcgaggttaattttcaaaaatgccaccgatttgggtaatactgacttttactggtcccataaaaaaaaggaataaaaagcccgttttttgcgattctacgttgtactcgggggttatcggggccgctgatcacgaatatgacatcagatttgtcatatgacagagtctaatctatgattttttcaagtctatgatttttcatcaagtaattttttt

SEQ ID NO: 6400 - DNA, 4464 bp, Heterodera glycines
tatgtacataaaacaattatttacgcatttatatgacgagatgagttacaatttacatatgggtatgtataacacaatagaaatagtggtagaaaacaacaacaacacacatacatattatatacatgattatttgtcctaataaatgtatcacggaatacaatcagatacatagatggatcaccacaacacaacagcacattattcaattctactgcttcggcgcctgctgcttctttccttgggccagtcgagcgtttactttcgctaggtccgtcattgtgttgttgggcaatgagtccggcacgaaccatccttcgtcgggctcagatgctgattgtgaagcactggaactgtcggcgttgtccccattcatcgttaatttggtcacagcccctccgctctcgccattgacggtttcgcgcgcatctttttggcttcctcctcgcatgcagcacacaatgcacaccagcaggaccaagaagagcacaattgctacaatgacgctaaaaatggtaggagaaaaatgaatggctgtgaaaagcgttgaacaaaatgatacggacccaatcaaaatccaaaacagcaatgattgttcgtcattagtatcatcagttgtcgccgcctcagtgccagcttctgtagtcgaaggagtggcaaccgtcgtttcttttttggtggttgtgaatgttgtggtgttcaaaggaaattgcggtgatgacgacgcatttctggcgcgaagagtttccgtcgtttggctgaaagcgaaaaagaacacaattaaatgttgaacgtgtacagcagcagcagaaagagttattcacacacctctcattttgctgacagcagccaaagttgagcagaaatgcggcggcgatgaagagaagagtgggcagaattttggaaatttgggaggccatttcagcggcactgttaatgaaagagaagtgaatggagggaaagagtggagttggcggtgcttttataataaaatggcacagggaaaatgcaacgaaacaaagacagaaaatgaaacacgaaaagtaaaagatataaaaaggaaagaaaatgaaacatgaaaaaccgatgtcagcttcaaatgcaaaattttcaaaaataaaaaccatgttgttcgtcttgtcattctttcccgattaaattttactaccaagaaaattagtacccaaaaggcacaggaaaaatgcaaaagtgaaggaaacacgaaaaacggatggtggaggcaaagtcacggcgaaatgaacagcgaaaggatgggcaaacttcgttcgctgtctttccgctctgattgccctgggcttcgacttgcttcaccacgtccatgccctcaacgactcgcccaaacaccacgtgtttgccgtcaagccactgcaatgaaaacatcatcaaaaaccctaaaccgaaaataacaaaagcaatttccgggaataggagagcggaaaatttgcagtgcttaattgtgtgttattcaaaaaccgcaagtaccgaatttcttgaccacggcaccttttcctattgttaaaacacttgcgctactgcgcacataaattgcaatttgtaagaattttccaagtataggcattttcccagtatttcttgaattcgctagattaatttgtgttaaaaatgaatctcgaaaatggctaaatacgcctttcgtccaacctccgttttcactgtgttgatgaaaaactgcgagccgttagtgttggggccggcattggccatcgactgaatttaaaaataagttgaaaaatgacgctttttctggcccatgggctacgagtgttccattccttaaacgttaccaatagtcccgggacggtatgcttctctttgaaattctcgtcggggaatttctcgcctaaaggaccgattcattcgcatttcgtcctaacacttgccatagatcgactcgccgcctttcgcttaattcccctaaataaaaatgtgcttctcatcagagtttgaagacacacgctctaagtgcagatttatcttcgagcaaccttgtcgatgccctaccaaccaactcgaggccatcaaattcagcaaggttggaaaattttcaaaaattttttaaatccaagcaaatccctttccattctacgtttgttaaggtgataagcgcggaagacaacagtctgtgctgtttttgtgcaggtccagtaaatacgcagtataaatattatatatattgttttacataatttttgtcatactttgaaatgaaagcgcaacgattttcatggtccgtcactgatcaaaaaaaagtgttacacccattccgactaaaacccgccaaatccgaaccatttgaactcgaatatgcatgtataaagattcgaaacttctttatagcccaaaattcagttaaaagcaatactgatttgttgcttatgcatgtatataaatttaatgtgacttgatccacaactgttttaacaaaggaccccattttttggaacaagcaaattaaacgatttttgatgctttttagtttgataaaaaaattttttgtaaaataaggaaccattttctgtcgtaattgtttatttatacatctttaccatatccatttttgttacagaggaatacggtcacaggtcgttggaagtgctgtacaaatgttcgacgtgtggcaaagaaacgcacagaatttatgagtgcttcagtacgtcaatttttacaccacatcccctcaattacaataattgtgcccggttttagttgacgtcgattattggtcgggcaatgattgcgacactcgctaccgtactcgagcgtacagtgcgtggggactgtacacggaaaaagtcacaaaaatggcactgctggggcggatgaccatgaacaactttgaggcggtggagcgcaaattcgatgtgatgtgcattgttcaggacaatcattacaagacaaccgatgattggaccgacactttgataagacgtcttgaataaataggcaggccaaatggcaacaatttattgtataactgtatatattatatttgtatgtatctctcgtataattatattatatttgtttaggataaatgttatacgatctttttcgtacaaaatgagtacatttcattcaccatgtctttcgcccttccaatccgaaaaaacgtcactatttctgaatttttgtcactgttttggcatttccctcttcccgtcccgttcaactctaattagaaccgatgaggaaaatttgaaaatttcgacatgatctgttatataggaaattttaattctgggttcgaccgtgccaacatttcaaacagaaccatcgaatttgatttgggtctcagaactactaacattttattaattaattttacgaaatatgtatttaataaaaaagagtcatgctacatcatatcacagagaaacaagcaagcttcagcacaagtgatcaaagttcagtttgtgttctccttccatcactgaggcagcggccaattgctaaaatggcaaagtattaataatttgatttgcattttgtgtttgtccacttccaattcaccttggccttctgtgcctctgcaacgaattgctctttgtgtccggcaatttcactgatcgcttccacaaagaatttctgcatcagttgcgcattttttcgcattgtttcgcccactaaagcaatgctcacctgacaaatgaaacaataggaaacaaattatatataggaatatagtggcacgggaacgggaattttgagatgccgtgacaaaaaggccatgaacagttttgaattggtcggacggttgtctcctaacgtaccccttcagcggtatcgcgccaacaatcgtagtcagtcacaacggcaaccgaagcgtacggaatgcccaattctttggcaaggacagccttaaatttagcatttagtaatgcttttcaatttataaatcacttccgggcacagtgtcatgccaaccaaatcggcgccccaaacgcggaacagctcgctctccgcccgcgtggagaagcgtggtccctccacgcacaccaacacgccgcggtcgctgtgtgcagcgcccaaacgcgtcgccgtggcgagcagcgcccgtcgcaggcgttcgttgagcgcgggatgcattggcatatggcaaatgcccggcggatgacccggcagtccatcgtaaaaggtctgctcgcgtttcgtcgtcctgtgcggtgccaaagggggaaaatgagtcattttagaaatggcagcggaaaattaggaaaaattgagtaattatggaaggagtatttgcaattttaatgaagtattattgttttgccgtcccaccggtcgatgaacgagtcgatcagcaccaatttgccgggctccaattcctcccgcagagagccgcaagcgcacgcggcgacgatgacattgacgccggcctttttcagcgccccaaatgtttgcccggataatttatgttgg

SEQ ID NO: 6401 - DNA, 4722 bp, Heterodera glycines
  unsure (1)..(4722): unsure at all n locations
ggaaaaaaaatatggatttccatataattaccatccctacttgnatgaggaagcaattagcgcacttagagaagaatttggcggaatgatgaaagaaaagggaggaaaagtggcgaaataatttactcggaggaaaaaggaattggaaaaatgaaaaaagagttggaatggctggtgaagtgatcgcttttattccaaatgtcaactaactttttcacgaaaacatttttggggagtcaagacaacacaaaaccttcataagtatctcatccaagaggcaactcatccacacacagctaacatcatttacagaaaaaaatgtttccgtgtttttcggagtcactgaactgataatgatgattcattacgacatcatccatttttggccaattaagttccttgtatccccattgaacaaaaatggaaatcccagaattcataattagataggcagcatcttttgtatgcttcttagaaaagaattaaaacaagaatttttcgacagttcacctatttccaatggaccagaataatctaaaattttaccaaattttttcccaatattatataattcaaaaaattcaaatttgagttaataattttttacaaagcatatcatagagaaaaagtcaataaaatggccaaatagtaaaagcaaaaaaatgactaagaaaaaatactagttcagagaaaaaaattttggaattatgtatttttggaaaatttgacatgtaattaacgtttaaattaaaatcttttaattaaaaaagtgtctattgttgatgagttgcctttgatgatttgcccgtgggtgagatttttgggtgacctctttctgtactttgtcgaatgatctgaaatttgtgattcatattctaattcggatttgtcaccattccaaaattcaaacgacctgccgaaaacaggtgcactttatgctatgacctatttctttaataaaataaatatccggaataattggaatgttttggccaaatccgctaataaatccaataaaaatttttaaattttacagtcggcactaaccgctttgcttttctcaaaaaatatttttttagcaaattgtttcttaaaaaattggatcaaaatcgtaaaaattggttttaggtaaaaatctgttaagaaatagtgtaattgcctaaaataccttaaagaacagtcaaaattttacaattttttgaaatttttgctaaaaaatcacaaaatttagtcattttttggataaaatctggtaacaaatcgcattaaaaattacaaattttttcccggcggctcctattggcaccgccgaacccctttgttccccaaaagttctggaaaaaactcgccgcgaaaaaaagcggtcttgaaaacaaaaaaaaggtcatcgatttacatggccgaacccattcgcaaaatcggaaaattggccgctgacccgcttgttttgcacaaattctgaattttggggtctaattttagtgttctttatcatgaatttgaaaaaaaacttcgtcacactgaatatacatatacttctgaacaattctaatgctaaaacaggcactcgcgcgaaaacggaataaaaattttgtatttgaaaaattttgtccaaaaatttttagcgttgaaaaattacattaccggtttttaccggtaccggtacctgtggaaaaagttggtaccggtaccggtttttgcagtgccggtcagtaccggtaccggttttttataattacctattaccgctctcctctaagtatacctaatcattttgtaaaagaaattttttcgagactggcggcatacgtcaaaagggggtaatgggctaaccaagattttttaaaggtgtgttagtatttgatatttggcgtttaaatttcagtttttgctagaaaagtagattttagcaatattttaaataaaaaattttccttttttttaattataattttttaaaaattttttagactttttttcaaatttttaaatttgatttattttttcttttaaacaatatagcaaataatatttatacattggttctatgggcacttttccattatgctgccgcacaccaaaatgtaaaaaaagggaaaaaatgcgccagttttggcgcgcaacgattatttagaatgaggcataaaagccgcaatttgaactaaatgtcatcgaatgtatcagcaccgcgccgtttgcagtcttcgcgccaaaggaattcgcataagcatgagtcaagcattttggggtgagcagcagggatgggctttcgctttcgcattttattttccgatttggcctaaaaatatcaaaaatatttgaagctttttttacattttgcttgatatctgctaacagattatgccatcaaatggatattttcgaggacttttcatacatttattgtagagtggtacgggaccaggaattttggccaaaaccgggaccgggacctcggtttttgtccgggaccggggaccgggaccaaccgggaaattttaaaaattcaaaaaaattaaaaaattcaaatttttagtttatttcaaatgaaaaaattaaataattaattttttgtttggttttttatttataaaacccaaaagttaacgcaaaattaaattataatatatttaatcaatgtttcaaacaaaatttatttaaattattaaatcatttttggactaatgatcgaatattattagaaattcatatttgcttttcacatcactttttttcggcgagctttttccaaaaacttttggggaaagaaagggggttcggcggtgccgataggcgccgccgtgggagattttgaaaatttgagtgtagttagttaacagattttcaacaaaaaagggtagtttttgggattattagtttgtatggacttactttaaaaaatgataaaatatgtgtcaattaaaaaatatatatatgaggaatatttttttgtcgataggaaacccatgagtatacaaaaaaaaattcaaaatcttttaatttctgtagagggattgaaccatgggaaagaagtagaaaaccaagaggattagccactaggacatcagcacaattggtagttaaaaatttcccttctccaattttcatcactaatttttcacccagacccctattcttcttaccagtgcttattagtcccgccgggaccgggactggcaaaccgggaccgggattttttttcaaaatccgggaccgggacctcggaggaccgggaattcccgccccggtcccggtccaccctaatttattgtaaattgactaagttttatttaaaaaactttgatcaattttatggaaaatcttttaataaagacttttttgttaataaattttgtaacttagtaaagacaaacaaacttacaactagtaggccgtagaaacaacagtaaggaaagctttaaaggcataaattaaattaaaaatttcacttctcaaatttaaaattttcacgtctcaaattttaaatgacaatttccaacaatattattggggtgttgtataagttctgtcacccttcttatgctatgctaatcggaattttttgcaccgttaaccacaagtgacagccgatcaatttctgtcctataggaaagagcagacatttttgcttcggttaaaagccatttttcgttcttccccattcaaattgatttttaaaaaaattttccaatggatgtccccaaattacaaattcgatcacttttattgtacgggtcaaaactttgctttgatcagttggaaatttattaaaagcagtttttgtggccaaatcaagtccggagaatccaaatctggcctcagatttgatctctgaattttctctggcattgtactgctccatgtcgttgacaagaagttgaagcagtacagggtcatagaacagcaactgactaaagccaagaaatcagtggttgaatttgtccacttttttaagtagacccatcagtttatttgagtctaactatcttgaatttaatcgatagatcatttttaaaatctcaaaaatggcagaatatgatcgggaatgatggtgcatattttgattaattttgagttattatttgattttttataaatttttgaatgaaatttttggtcggggtgacagaacttatacaacaccccaatatatagtttatacaaaagttaattttgtggggttaatcctacggtatccccccgcaaaaatatgagttccattcccgcagcggtatccgcaaatttgattgttcgttctcccatttgcgcagatatgtcaatcatgcaattttctttttccaaggatgactcatcgtcgaccatcggcggtcgcgaaacgcccgccgcctccaaaagcatttctggcaccgcatctgcctctgccccatcaaagaaagcgccgtcctctttgagtgtttcgaatggcggtggtgccaaagcggcgtccgtcgtcgcctccggcactgtgccaaagagcaaaagtgtcgttgggaaaaacgcgaagagttcccccgctgcggaccctttggatttggtgcgcgcgagtggacaacggacgaacacgcgactgctcgaacgcgacgcattggaagcatttgtgaaaacggtggacccaaacgaattgttggaggacgaagtggcggacgcgattggcctggtggtggaggaatttgtggacgaactgatccgacactccgtcgatgtaattgagggggggggggg

SEQ ID NO: 6402 - DNA, 4297 bp, Heterodera glycines
cagagaaataccttagtataaatactttctgcctgcaaaatttaagaatttttcgatcatgtacaaattttttacaaaaatcaacatgtttttaaaacttaaaaatttcacggaaaaatatttccgtgaaattttcaagtttattaaacacgggaatgtttataaaaaaattttgaatatataaaatctttttaaattttgcaggcagaaagtatttatactaaggtatttctctgcaaaaattcatatttttctgaaaagtacgaaacgaacaggaaaatcagcatttttaaattccgtgaatcttatttacctaaaaatcgcatccctagtgatcactcccaaatcgacagaattttgcacgaattgggaaaaaaatggcgctgcagtaagtggttgcctcacgatttgaccccccctcagcgacaacggcgggtggacatcgctactcaactgctccaacaacaacagcaacatcccatttctcgggagggtcctgacttcagatgaaaaatggatccccctcgacaatttgcgaccggaaaagcagtggctttccccaggacaacaggcggtaccggggccgaaagtggatcaattatccattagcatatttacttaagcataaaactaattaatctggataataattgcaaaaatcttgaaatgttcgtctttttttatcacattttgcaaagtcttcgtgttctccaattcacaaacatttcacctcaccgtcagtgttcttctcaatccaatcacagtaacgcgatactcgcgtgtacagtactgtatattaagatggatatggtaattagtacatttggacatttgaaaaaaccatgggactgggctggatttcttgtaaaaaaaatcagataatccaggtctaagaaaatttccaaagcccgttctcgggaggcctttaaaaagcgtgaccttaactatcgggcctttggtcggttatctgctttgtgatggcataaggaaataaagtgtgggagaaagtatgataaaaggacatgggagaaccccttaaggaacgcccgtagctcagtcggttagaacattcctcgacatgggaaggccgtgggttcgagtcccaccagcgagttatcttttatgttgttctactacgtacataacttgtctttttttgttttattgtccaccacttacttgcaaaacgattatcctttttgagcgttgaaatgcttgacactccaatctgatcagagaaattttgttggatccttttcattttggcattccattactttaattttcaaaaatgtgagtttaattttatattttggtttaggtaactaggattttcaaattattaggagtaaaaagaatgtataactcaatttgttgccagttttagacagtatgtactagttgggtctgatttctcacctgtgtccaaatgttaccattttgtgtctgttgcataagcggtccaccgctgtccccctaaaatcaccaaaaattcgtgtaataaccttaaaatgatacatttttattgaattattaatttggcactcaattaattccattgtattgagcaaggcatcttctttcttacagaatttttgtctaatatttgaaaatgccaaagaaaattaacctaaaaaccttgcacggggacccaaacacgtcaaattccgagaaataggactttttcgagcttgtctaatgatcttcgatctttttgaacgactaacaaaacatcaccacgttcataagatctgttttcaggatgcaaacgggaagcagaaagaaatccacaaaggccaagaaaaccttccccttatcttgctatattgtttagccaatggaaaacgtttagacttgtatttgtgtaactgattctacacagaataatgcaaatgttgaagccttgcaaactcaaaataaatttaaaaaatgctactaacaaattatgttgattaattatattcaaatataattagttaaaagattaaattaaaaaccaatataaaatatttagtttgcttaataaaatttatttgctttgcttgattgctgtggctttgtgtgtatacggtttagggccgaaacacaaataataattaatttaaataaattaacccaaagagacaccgtactgatgaggcccggtctctttcggttaaatttgcacgtttcgcgaagtgcccatttttgcactgtcgcgaaagagtcgggggcgtttgggccccagtttttgggcccccgcgtttgggcccccgtttttgggccctcgttttttgggccccagggtcgtttgggccccaagtacagaaaaatgaaaaatcacagtaaaaacaactttttaaatttcagcataaaaatgtaaaataaacagtttaaaaataaattcaacaataattttaacaataaaaaatgtaaaaattaacagaaattcacgggttcattcgatagttgcgagaaattccccggagaaactccaaaataatgtgaaattgattgcgattgtggtaattgtgatcatggttgatgttgcctgcattcatcgggacgtaaaggcgcaccaaattaagaattcgttcatctgtcgccaaaaactttcgcttttttggtggtggctcctctccggcaatgaatgacgcgtatttgacgtctgttgtcttctgctcacgacttagcacgtcaatgaagtgaaaaatcgacgggtgtcggcaattgaaggcgccctgtagacgatgatgctccgcctcggagtggttgttggtccgtgaatcggcattaagcgtgcgtgtgtagacgttccattgttcagggcgaaaagttggttgagaccatgtgccattgggcctgggctgtccaacgtaattgattaatagcctgtaatttcagtggggtttaaatttaaaaaaagttcacacaccagtcaatcagcggttggaaaaccgccaaatttccgaactccgtatcaagtgccgctaccgccattctaatgtcacacaagggcacgaacgcaacagacgtgatcattcgagcgttctcggcaaacacagaatcggtgcagtagcgctgaaacgggtcggggtcacttcggcgccgcaataatttttaaaaaaattattaaaacctgccacaaattttgttccttcaatttcttttgcaaatttcgcacaaaatggaagaaacaaaaattgatttgacaccctccaaatacagttgtgaccgcattgctcacggccaattcgaaatcaattgtgaatgatgtaggtgcaaatgttggccatgcctgatgtaggagctcaaacatacgaatgtatgacgcctgcgacttcgatgtgagcagaaaatggcacactggtatgatccatttgcctcgtctaaacattgcaaaataaaaaaatttctaaaaactaactaacctagccaaaattgtataaatttgataaaaaaagtggcggcgccaatgaaaaagtcccgtcaccgaagcaagcttccagcgaaggtgtaaaggtggccttcgtaagacaattttactttttgttttttggttgcaattgggttagccattcgaatgttaattaaacctaacttatgccaagtggcgagggatccctcaggcttagtttttagaatcttaatttttaaaaaagcacatttttcgatttttgggttggggcccaaacgaccccggggcccaaaaacgggggcccaaacgaccccggggcccaaaaacgggggcccaaacgcgggggcccaaaaacgggggcccaaacgctctggtcccgactttaacacgtttggttatggttacatattttattttatatttgaattggcattttgttttttcgccaacgttttttccaacttttttctttttttaccgtccatgcatagtgttgctgatcgtgagatgcaaaatggccaacaaagatgtctctctgtttcggcatcctttcgtgcccattttttgcctaattattgtcgcagtaaaatgtttgttaattcggtgctaccattccactgattttgaggtggcatttaacatttgaaaaaaggttcgaaatgctgaggtttgaaggtccaccgcaattggatggctttggcttaccatttgccaatgtccgattggcatcgctccgatttgtcccaatggacgttggactatccgcctatttttgcttatttggaatggatttttgcacaatttgaaaataaattcaagagggccaaacaatttttgtccgctaattaccccccccccccccttccctaattggcattcattcgtttttctattcaatta

SEQ ID NO: 6403 - DNA, 1728 bp, Heterodera glycines
  unsure (1)..(1728): unsure at all n locations
atatttatannttgaatttgacttacaaattccaaactgaccattattcgatggtacacaacactgcaaaacaattttttttaactttttctcaaaattagtgtttttgtagttcacagcaggaaattttttgcttttgatatggttttctaaagattttaaaaattttttgaaaatttttttcggcgccgaaaaagccattttatatagggcgccgaaattgccgcgccgaagtggccgcgccgaaatggccgcgccgaaaaaacccgcgccgaagtggccgcgccgaaaaaacctcgcgccgaaatacccgcgccgaagtggccgcgccgaagtgggcggttcccaacttaatgagtaccttgttgggtatttagtaatttacttgtcaatttgttcgtccgtcagtgttttcttccgatcagttcaattaccagcttaagtattttatgaagtcttaatttttaaatgtagttcttactcgtttcaacctcctctcattgttcgtcaaaacttgggtcgccgtgtttgttgcttgttggattaaatttgcgatcagctcgtctgttggttccatttcacgtaattccaaaacctaaaacaaaagatttaaatgtctaatgtaaatgaacaatttcaatatgtacgttacttgaattgccacagctcgtgcatcttccacatcctgttcgtctccttgcgcgttgtgaaacatcaacagttccaccgcgcgtccacccataaattgcacaatttgcgcaaagcgttcttcatctgtgtagagtccttcaacatcgtgccaagaagtttcgcccaaattgcctccttgggcttgaatcgtgacctattaaataattgatgaaaattaataggaaagtaagcattcattttttgtaccagattgctgaaaactacttactttgtctaaaatgtcgatgttgttttgcccatattttatcgcgtgtgccgcttcgtggtacgctgtgaccaacaaattctgtactccttccaatgccggcccgagcaatatattgtatttgcgcttgtacagtccaaatctccaacgcccgtcaacttttccatatttagcgaatcttggttttcgtttttttcttgccattgctaaattaaaacttaaaaaagaaattcactgcaattaaaaaaaagtagccgatgaaaacggtaaaaagaaacagccaaaatattcatgttgagtttaattagaaccgcattatatgagcccttgctcattttttcggccatttgggctccgggccatatgaccgatattttccaaaaaacattatttgtatacctacatgtattaatataaaattcaaaacaattctatttaatgcacataatccaaggttaccctttgtcgttacagacccgggactgaaatggccaaatggctttgggactgaaccgtccaaagccaaaaacgcatggaattgcgaccaaatagataccaatcgatcccttacggtctgctaatcatgaattcgaaggaatttttggataaaaaagaaatttacaaaagttatggctcctcaaaatcgttaaaactgttataaaccgattcagtcagaaaaaaggaaaaaatcaaatataaaagattgaatttagcttattgcgctaaaaaaccaccgccgcatactcgactacggcggccagtaggtggggcgagactacgggctccggaagaagtccgcgcgtgatccgcag

SEQ ID NO: 6404 - DNA, 1619 bp, Heterodera glycines
atgcataatttttttctctatcgatatgcaaaatttggtgcagattgtatgagtagaaaaaaagttatatgtggcgaaataaatgttataataaaaatattagatagtacgccaaaaggagacaaaaaattagagaaaaaaagataatgtttttctctggcattctctatttattggtacacatctcgttttttcggacggtgtgtgcacggatcatgagaggaaatattaaaaaataaattatttaaaaaagaaaaattaacaaatcaaaaagatttatcaatttttgacatgaataaaaaagaaaaataaaataaattacgaagagccaccaaaaaatctggcaatttgcgatcgattgcaatgttgtgcaataatacagctgctgccgtgatcaatgttggcacattctgcaacttaattcgtacttcggaatgtaaaatatggaatcgcctcttccatctggcaaatgcattctcgacaataacacgcgtttttgcatgtgcataattatattgttgctgagctgcagttgtagggtttgcaaaaggtgtcattagccagcgacgtgttgggtaagcactatctaccagaataattccttggatttggcccccttcaaatgcttcccatacgcttgactgtcgaagaagaacaaaggcatcgtgactgcaaccaggccattggcgagaaaatttgaccgttttaaagggtcaggggccccctttttcactcaatttttcgagttttaaaccggttcaaaaaccgttttttggcacttccgcaactggagacctacttcttcgtgcatagctcgtcaagacgaatcgattggtatatcatttgtgtcatttttttccggggggttgactatagtatatccaaaaatttatttacacaatttttctgtctatctataattttaaattatctaacgagttccagatgtgctgttattgccatttttttgaacccctccgcgtctgtcggctggttgatttgtttaattagctctttcatagccgctggcactttctcatgagggattgcgatataatcccccacctgtacaagtcttgtacggtacacacccgcgccaatcgcgctattcatggcgagtgcgttaagtttttggatatcctggaaagaaaaaaaacaaatatttttcttttgtttttttaaattttttggaattttttattttaattaattttttagattttccttttttttttggtttttggggaaaatttcaaaatagtaacgaatacaatcccattaagcttcatgcagcttacttcttcagttaaagaatttttattttcaaaaagtgccgtcgtgttttgcattcttttcagaaggtcacgatcatgtaaaaacatagttaggccactgtaataatcatccatccacttttggagctctttttttttctcctcactcagacccatttgtactggatccattttaaaataaaattattgtactgactaaatgaaaaagtaagttaaaaataaatgtgtttataatgaaagcataatgggaagaatgaaacgattagtaaaatgagcggaaaaggacaaaggcaggccaaaggaaatgcaaagaaaaattagctt

SEQ ID NO: 6405 - DNA, 1678 bp, Heterodera glycines
gccatgaaagtggaaggcgcagtcccccgccttctgacgacggacggctcatctgaagaggaaatatgcaataaaattgaataattatagtaggaatagcgcattttgaattataattagaacaagccattcgccggaattcggagcccacaaaatcgacgattttttgcggacgtctcaaaaaatttccagcattatttttcaatgcgccgtagcattttgagttggtttttattaacggagatttgtaatataggtaattcaatgccccctcccgttttagcaaaacattttttttttaaagtcgtgaaaacatttttcttgaggcttggaggctgatcatgaatatggcatactttttggcctattccggacccgaatttgaacaaaatggggcatttgacccaaaatattttaactatttctcaaacaaaaaaaaaacttaccggcaatgttttccttcgatgttccgggcgttgattgagccgtccttttagagcgctttacaaaagcgttgaaactgctcgtctctttgtccaacttttggatgaatgagtccaccatttcataagtgctctcggcgagttgaatcttttcattgcacaaatcattggcccttaaattgttttttgcacattttatcattttgccagtttcccccacaaaatccgcacttagcgaattgttcttcgatttcctcatatttccgctttcgttcgtctttgcccgtctttttccatgtgtttgccatttgagtcattttttgtctgagctcattttctgccagtttcgccttcacgtccaaaactcggatgtcgtacaaattctcctccattttccgatggatcggacgcgaattctttagacatttttcgtaaaggtcttccatctttttaagctttcgtaaaagtgaattaatacaataaaatcctttaagagggataaaaatggaaatttaagttcgtaaatgcgcccttcgagccagcagataagtcatttgatttaaaaaaagatttacataatttggctcatgcatttttttaaataagaaattgcatgagagaaagaaacaaaatggtcatacacataattgagaaagagacgcagaaaattgcgaaattgcgaagcaaaacgaaacaaaacgaaatgaaacattttcatttcttttttcagtgtttttgaagagaaaaaaattggcatagagtcagaagagagatgaatttaaaaagcaaatgatgagcaatggacaagcgtattaagcaattcatttgtcatttgtttgtttccctttgaattcgcccgccaattttcatcactttttaaaaacgaattaaaacttgaaattgtttatttttgtattgttacaacaactcctacatacagctcagcttcatctcgattatgatcaaggcaaattaatgcttattagatttcattacattatttagcatatttttaccagtttcttgatcaaatacataattaatggtttttcttggtttgctcttaaactaattagtaattactaattaacaaataattaatgttttctaattttacctcttgttcggctattatgtatgtccattaactatttcattatgcaattttttttcattccattaataaatatgtcctctttttcagctgttattgtcattttatgcagcacaaaaat

SEQ ID NO: 6406 - DNA, 2824 bp, Heterodera glycines
tgtattgtcatttatgcagcacaaaaattttgtcggcaatgaacggggaatgttttcgcgcaaaaaattcttgccaatgaacccggtttattccattggcactcccgttgaccagcagcaacagcagcagggcaaaaacaatgaagcggcggacaacagtgaaaatgtgccggccaatcaaatgccacccgaccttgacgaggtgtgtttaggctacatgactcaatgctcgagcacacaaaattcgtaccaaattttcatttcgcaattttttctcggcatttgtgtcttgagtccttgaaaaccgattagtttagtgtgtctgtttaaagttaatttccattttatcttgttttgaaatatttttcaattttccacaggctgataccgcgcatcgcgtccaaacggacacttttgtcaattatgcgcccctccgactgcgttccggctttccccaccctgacgaagttgtggaaacgctctcgctcagcagtgtttcgtcgccggaaattcgctataccatggccatccccgacgaagtggtcgacggaggtacagacacaaatgggaaacatgagttttcgaaggtccacaatctcttccatttaggcattccttttccggggattgaggagaggattttaaccccttttctggtccgacaaaccaaaccccgcccccttttttcagatttcttaattaggattcgctttttaccaaattgaaaagttgcctgatttgggtgtcacttggtctattgtataattggtcaattcaaatttaactctcgttcttaggtcggatatccaatcttcagttggaagccgcactgtacgcctgccaagctcaccagcgttttttgccttccggggaaaggattggctatctgattggtcagttttgccactttttggtattttttttaaactcattcataaatttttttaaaaattcctgacccattggctccgcaagaatagatttttttccaaaaatggccgttttgaatttttttggccataaatttcgaatatttcccatttccgcttcttgccccctggtattttcatcaccctttccatccttcggcaaatgccataacctttttatcaactttgtgtttaggtgacggtgccggcgtgggcaaagggcgcacaattgcggcgattattttcgagaatttcttgcgcggccgtcgcaaagcgatttggctgagtgtgtcgtccgatctgaagtatgacgcggagcgagacctgcgcgacattggggcggacaaaattgcggtgtgtgcgctgaacaaattgcgctacggacgcattgggtcctccgagagtggcggtggcatcggtcggggcgtcatttttgccacttactcctcactaattggcgagagtcggcgcggtagcacggcaaaaggtggcaaaagtgccgacgcgatggaaatgatgaaatcgccaacgacacaaaggcagcaacgacagccgcttgtaacacgcggcttcgccagttggtccaatggtgcggccgcgagtttgacggcgtcattgtgttcgacgagtgtcaccgggccaagaatttatgcccaaccgctggctcaaagccgaccaagacgggcaaggtggtgctggagttgcagcaagcgttgcctggcgcgcgaattgtgtacgcctccgcgacgggagccaccggtaaagcgctgggtgaaaacgggagacggtcaggggaggaatattgttagctatacttttttcgatattgtcgctgagatacggcattttatgaactattttgcaactaaattttccatttttcagagcctcgcaacatggcctacatgtcccggcttggcctctggggccttgggctgaccttcaaaacattcggcgagttcatccatgcggtggagaaccgtggggttggtgccatggaaatggttgcgatggacatgaaggtatatgtgtaacggcagtaatatttataatgggtcgtttaaaggggttccccggcccttgattctggacatttctaatcccgaaattactaatttgaaatgcccctggttcagctgcgtgggctgtacctctcgcgacaactctccttcaaaggcgcgagtttctccgttgaggagaccccattgacgctcgacttcatcaacatttacgacgagtcggtgaagctgtggatggaatgtcggcgtcaatttgcggtgggtttcatcttcgcaattaccattttgtatcattaggttttttctggattatttgttaatttttgcttgcgccgcctattggcacagtcggacttcgtcgtacaattactttttgagagtttgaccccaaaatggtaaaatttgtcatcttttggcgcaaaatccctacaaatttttgccttttcactcaggcgctggaaatttggacaaataagaccggaaaaaactttcactgaagagcctaaaaaacaaaatgaaaaagttttgggttcgtccatctgggttttttctggatttgggtttgaccgatggcaccgttacctctgccgtggaagaaataaggattttaaaaatacatttgtcttttggttgacaattagtgcgctttgcttttcagcgcgcacttcgtcacatcccggacagccgggccagcaagcagaacgtgtgggcccgcttctggggcgcccaccagcgcttcttcaagtacatgtgcatcagtgccaaggtggactcgtgcgtgcgcattgcgctggaggcaatccgatgccaaaaatgcgtggtcatcggcctgcagtcgaccggcgagtcacaaacgttggactttttggacgaaat

SEQ ID NO: 6407 - DNA, 874 bp, Heterodera glycines
ccccccccctggggaccgtccctgatatgcgggctgaatattaccgtctccaaattcaggcacttcttccgcatggcgccatgacattgacacggccggtgacggagacagccaatcggcagcactgaagcgttcaaaattgcatttgttgtgcggcggcggtgacggactgacaaccgagcgtgaaagcgggggcaactctgagtttgacgaggaggagggggagggcagcgacgactacgactcgtacgggttggccagtgacgatgacatgtcgccttcatccaacaatttgtccgacgatgatgaggacgacgagctgagtgcggagtcggacgatggcggtgacaacagtgacgaggaggagttggaacgtctgttgggcggaggcgcggcggcgattgacggcgacgctgtaccgctcgccaacgacggcgacaacgcatcctttgaacagccggaagaggaggtggaggtgaaccctttctgcatggacttggccgtcgaggacccgtgggcgagcgtacagaagaagcaaagcgttgaaagcggcggtggcaaatcgcagcaacagtcgctggacaaacagcgagcggcgactgtggcggcggaggcggaaaagcagcggcgactgcagcgacgcaagcgcaaaagggaggcggcagccaagcggaagcgacaacagcggcagatgcaggaggcactgatcaaagccaccgtgtccaacattacggtactactacttttttgtatattttgtctaaaaatccaaaaatgaaattttagtgcggcaccagcgccgagcaatttatcgccgagacgaacataatcgacggcagccaggaagacgatgcggacggaagtgtgaatttga

SEQ ID NO: 6408 - DNA, 1780 bp, Heterodera glycines
tgtctccgttttgtagtacaaattgtccagcaaatgttttccttcccctccctccgtctcttcctccgatgagtcactttcttcctcgcgaatttgttcaattgtcattccctccgcttcttcctcctcctcctcccattggtgccgtttttgttgcaccgccgccggcttttcaactccgtccatataatcggcgatcagttccaaatcggacaggaacaggtggacgtcctgttgagatattgggccttaatttgtgggcatttaatttgggactaatcaatggaaagcaatgtttttgccaaaaatgggatttatttgtttatatttttcattttattattcatttatttttccaattttaccaaagatttcgccttttgaagcgaaaattgacaatgtaaagaaaggaaaaagttttttcagcaaaaaattaaaactcatttcgcagaaaaaatttaaaaaaaagaattttgttttatatatttatataattaaaattgtttattattattggcaatttttattttaatgattaaaatgttcgcctcagtttccatcatttaatacgtggaattggcgcgcgttgaaatgagtggcggcgaatgcgcttaaaaacgccttcacataaattatttttacaaaacaaataataaccatcacattttacaaatgaaaaagttttaaaaatatagtttaaaattataggaatttgttagtaattttaaaaaagcactcataaattaaaaaaatacaaaaaaggaattgcaacggccgggaatcgaacccgggccgcccgcgtggcaggcgagcattctaccactgaaccaccgttgcttagtatatggacaaagtgaaattattagaaaagggatcttttggtactaggtcgttatttaaaaaactatcattatgattttatgtaaaattatttataacttagcttaaaagcaaccaaaaaggttttttgagttcatctagccctaacatttttgaaacttgacgaaattttctgaaattttgtaaacttgtagagcatacttagggctatcgaatgatatgaataaataaaagttttattgcttttaagctaagttataaataatttttcataagatcataatgatggttttttaaataacggctccgccccgatcttttgctgtggaaacgcaacataaaaaaggtacggatgtttctgtttacacacttctcattttattttgctgaagaaattataaatatttaattattagggtcgcgatttttagtgatttaactattttttgttcaattgttttgaagaaagtagctcaaaaaaagcatttctgcgttgaaatttttcgattttaatgtcacaatcggtcactagaaaactctattttggcactttgtcattaaaatagttaaaattcactatttgggttttgtcactattttttccattattgcgacattttttggaaaatttctcaacaaaacaataaaatcaaaaatatacatatccctaaaaacctaaattttcaaaaatatatccctaacggactcgctcagttcggccctcacggttcggccccaacgtgtttttccactatagcttttttatttgtaatccaaatccaataatcttggtatcattcgaaagctcttaacatgctctattagccttacaaaaagcgaaagtttttcaagcctggaaaaaattttattaagaaaaaacttcaaaaatttcgagtttttcgaaattttcatgaataactttttgtataattatctaatc

SEQ ID NO: 6409 - DNA, 1312 bp, Heterodera glycines
  unsure (1)..(1312): unsure at all n locations
ttttttttttttcccccccccccccccccccccccccgccgggcgagtatcatccctcacaatctgcgaaagaatgagttgatgagagggggagagaagcgaatgatgcgagtgatgtccacccccaacgcaacccacccccagccaaattacatataaaaagggtccccaaagacaaaaccattcactccgttccacaatcaatgaatggtcccttaaatcttaaatggtcattctttcttttttgtttcctctattttgtaatttaatttttctttccatttattcttcacttttttaaattaattcccaactttgaggagtacctaaatacatttgtatgttgtatgtaagtcaaggagtccccgaagctgttctacccgtaccggtttacgaaattttccatgttttatagtaaattgtcgtaaacggaacgggaagacgcactccgaggaataggttcattcaacttattgtcagcctgcaaccgtgcaaaagctgtgatttgccttgctgagcattgttcttagtcatgttgtcgtgcagttgatttatgactagaacgaatgttcagcacggcgagaacagtgacggcaaaaaacaaatgcaaaagtctgccgatcggattggcatattggccgttgtgaatgtcatctgatcggcgctttcattcacatgggcgtaatgtgctgattcgttttgctgttgccattctttcgcctgcccactcattccgcactcaaatcttctaattctcgctaaagtcagccgcggcggttcgtgtatgtgctcttcggtggactggccataagcattttgctgctttcccattgttcaccgggagaacatatacgagctgaaggggttgaagggcatggccaacgaatgtcctaatgtgttttgtcgcaataagcaaattcgatcccaaattcaaatcaatattcactttaaaactcaaatttactattaaaatgcataatttgtgatcgcttttcgcttcttttgtgtctctttcggtgagccttctccgtaattttttgctcaccgggagctcacaaatggagtgcgaaatttgcgtccatactaaacaaataccaaatgtctaaaaccaaagccagacgatggtgcttcttcatgcacaaatccagaacagattttggggagatttggcatggtagaagtccatcctctgcttttggtattgccattcattaattattttcatttttacgcatganatgcagtgagtaaagtacccaactanaaacggcatggattcttggattgacgaggattttgcgaaactggcatt

SEQ ID NO: 6410 - DNA, 4659 bp, Heterodera glycines
gctttttttcggtacgctttttccaaaactttgaaaatttgagggtaatttgttaacaggattttaccccccccccccccccccccctcttcccctcctttttgcccccttgggcttgatgagtgacatcaattggtgatatacgcattgaataagatggaatgggtcggccggggccgaacaacaactgaaatgggaagaataattaaatttcgccgaatgctttttctgttggatctcccgacgaaaagcccctgcccattcccattagctttttattatccgacgccaaactaaaccgccgccgtcccacccgtggcactggcatttattcatcagcagcggtgctttctttagtcagccgccgctgttgtgtgccttttgagaatggcacgaatcgatgccattgcttttggggacacgcaaatttgggaggccaaattttattaattcttttttatttatgtagaagaaataaatcagtagtttttttaataaataagtcgtcatacataaatgtcttccgtcaaagtcgccgtcagagttcggccattcaacacgagggaaatcggtgggaaattggccgaatttgaaatcgaaaaaaaaacaaaattcaaagaattgagctcaaaatgtgtcattgagatgggcgagaaaacgacaagtaagcaaacaaaaaatggagaagaaatgaaaaaaagtaaaataaaaatgaatgttttgttaagcgataacaaaccttttcaacaatcagtcgaacaaattcgaattcgacttttcctatttttcattcgaccgaacgaacagaaaatatgccagccaagaacgggtctatcttgaaattggtgcttgaaaagcgaaataaaactcaaaagttggaaaattgaggtgccgaaatgcttgatcacgccttcaatgggtacaatgtgtgcatttttgcctatgggcaaacgggtaagtcatttttgaaaagagacaatttttggcgtaattggcattcctttcattttccacaggttccggaaaggtcagtcagttacagtacgggggagaaatgttaccgtattcattcgaatggacaaatgttttttccttttgatttttgcccatttcagtcctatacgatgatgggcaaagcgaacgactcggaagagatgggactgatcccgcggctgtgccgcaatttattctcgcaaatatccgtgagcaaaaacgaacatttgaagcacactgttgaggcatggcaaatggaaaatgcaaatagaaaattcaattttataaaatgaatttgaggtctcttacatggaaatttattgtgagaaagtgaaggacttgctgagcccgaggaatgagaatttgaaagtgcgcgaacatccccaaattgggccttacgtggacaatctgcagaaaatggcagtctgttcatacgacgagtaaaacgggcgggggtggcgggtggcactaattgggtctaatttgcatgtttaaagcattttcgaattaatggacgcagggaataaggcgaggtaattaatacattaattaatggggaggggggtaattaaagaaattccaatgaaaaaaaacacaaatttaaaaaacacagaactgtggccgccaccaatatgaactcgacctcgtcacgttcacatgcaattttcacaattattctcacacaaagagagcacgacacaatcacggatttggacactgaaaaagtgagggaaaataaataaataattataatttaataaataaataattttttgattccataggaattattttaatttaaaaattattattttctgtctaaaatattttcattaaattaaaataattattttcttttgaacaatttaaattaaaggttagcaaaattttcgctggttgacctgctggtaagaaagacaaattatttaaaaaattaactaaactcagcaaaaccattgtttaggaagtgaaagagccgattcgacaggggcggaaggccaaagactaaaagtcgaaaaataaacaatttaatttaattttggcatttaaaaagttttaggagggcgcaaatatcaacaaaagtctgacaacacttggaatggtcattaaaaaggtaaaatttgtgaaataatatttaaaacaaaatatttaattttaattgtttagctcgcggaacaatcgaccaaaaagggacggcactcgcgcaccgcagtgattccttaccgggtcagaaacgggcaaaagcatcgttggcattccgcttgttcaggactccgtgctgacttggctcctccgcgagaatttgggcggcaattcgaagacggcaatgatcgccgctttgagtccggtaaattttggaagaaaattagcagaaaaacttccaaaaatacaggccgacgttaatttcgacgaaacattgagcaccctaaggcaagaaactcattcatatggaaattatgtgatggttaattgctccgtcaaagatatgcggacagtgccaaacaaattgtgtgccgtgccaaagtcaacgaggacccaaacgcgaagctgatccgggaactgaaaggtggggccagcggcagaagggcatcggtaaaagcaagcagtacatccggatttgatttaagaggaagtgtacaaactgcggaacatgttgcaaaactatggagtggaggttggcaaaataaggacgaaaatggcacagtgccaagccattcccctgaaatttgccaggttgacgaaaacggggacatttcgtcgagcacgcgagtcttttcggggagagaagaggagacgctggaacagatcaaaacatcggagaaactgatcgcggaactgaacgaaagttgggaggacaaactgaaaaagacggaagccatgaagtaaacgaaagagaaatacggggggggggagcaattaagtggtaattaatgggccaaacggacgacaaacccggcacagaaaggtgcgtgaagaagaactgcgcgaactcggcttggccacctccgcggacggatcggcactgggcgtgttccagcccaagaagctgcctcaccttgtgaatctgaacgaagacccgctgatgagtgaatgtttgctgtactatctgaaggagggggtcaccaggtcggtaatttgtgcagttaaaccatttgtctaattaattaatttaatttaaaattaattttttgctttagggtcggaaggtccgaggcggatcaacggccggacattttgctgagcggagaacatattcgaaacgcgcactgtcagtttatcaacgcggacgccgtggtgaacattgtgccaattgagggcgaatgttttttgaacggacagccaatcgaaggtgttttttggagggcacaagataaaaccaaacccacaaaaaacagctggaaactccaccaaactgagctcgggaagtcgcataattctcggccgaaaccacgtatttcgcttcaatggtaatttgtgaggaaataattggccagaaaactgacaatttgcagaccctcaagaagttcggacgagtcggcacaatttggcggcaattgcaagtgagggagggaggaactgatcattgcatagattaatttcttcaacgaatgatactgttttttttgaataggagaaccaatcgattggcgttttgcccaacatgaactgtttgagaagcagggcatcgacctgaagcaggagatgcacaaaaaagtgttggagatggagcaacagtttcgcaaggaaatggaacagatggaaagggaacaccgaagacggaacaatgtaaaagcaagggaatcactcggaatgattgttgtaattgccccaaattgatttgatattggccgataactctcgccctcccccattcattaatttatttaattaattggccaggagtacgaaagtcgcattcaaagtctgcaacggcaagtggacctcgcgcacagtcagttgatctcctcctcgggttgttcaagttggaacaacggcgagttcattctcagcaaaagtctgctggccgaaggtgccgttttctgacggcatttttaaaataatttttaattaagtgaacgaagacccgtggactgcgcaattggcgatgaaaatgcaaaaagcagcgctgaaatggcgctattaccaattcacctcagtcagagacgacctttggggaaatgccatctttttgagtactataattaattaaattgattaaatgaataatatattaattaaatgaatttgttaaaaattcagaggaggcaaatgcaatttcattggaactgagaaaacgagttgaattccaatttgtgctgctcaccgacacaatgtacagcccgttgtcaccggaactgttaccgccgggcgaaaatttgagcctgagaccgtacccaaagacgggtacggtgggaaaaagggaaaacggaggggagggggaattttacactccgttcttcggattttgcttttcactttaagtggtggcggtccaagtgcgcgacttgaaaaacggagcccttcactattggagtttggaaaaattgaagtgagtcatttgattgttggcacaaaaatggaagagaaaagggacaaaagacacggggaaaggacaaaggaaactcaaaaagggacaaggtgtcaaaaaattaagcaaccaattaa

SEQ ID NO: 6411 - DNA, 2277 bp, Heterodera glycines
taaaattgtaaaatttcagatttgatttgggcaggtatcgaagtgtgttggaggtgcaggaactgttgggcaattgcatttcattggtaaattattacatatttttaattgatcaatttgggttaattaattttcaaaaaatttatttaaatattttattcaattgaccaatttttctttatttatttcaaaaagattaatttattgactattcttaacacttttttgaattattttacttaattatttaaatttttttttgaaatatttgaaatatttttataccttttttttttgaagatttttataaataatttttacttatctaattaatttaatatatttttttaatatttttaattattttaactttttttcaattatttataattaaacattttttcttcttttttaggttacgcctacacgtgaacttctgacaaaagctcgtctttggaagtgtactggtcagttttggaggacttttttttgttttaaacacaaaaaattaagccattttttagggcccagtttttagggtcatttttcaaaatgtaaaaaatttcaaaaatttgccaaatttcagccgcttccgcaagcggttccaccaaaacggaggagcgttggctgttcgtcttcaacgatttgctgctgttggccagtgatcggagcgctttcattcgcggcaccaccggtgccggaaagtgcaaattacgcgcaatttttgccgcaaagtttaaaaaaaattttagctaaaaaatttttgggaattttttttttccagacacacccaaatttgtgaaggtgacagcttggagcgtgagcattcattttatttgcggggctccgattcgccgcagggtgatcaattaataatttaccaatattactttaattaattgaaatttttaaatttaaattttcaataattttttttattgggcaactttgagtctagattttcgacttttttatacttcgatttcgattttccgaggccaatttgtgtggtttcgtgaaaacactgaccaactttgggtatcatatcatccaatcaattaaattgatctgcagatttcctaattattcaaattttctctacatttaaccctacctaaaaatttataaaatttcgaaaattctcttcttttttttccaggccctcagcgatgtgtggagttgtgttgtgcttctcaggcagaaaaggacgcactgtttgacattgtttggaaagtcattcaccatgaagtgagttggagttataaaatggaaaattaaatatattttaatgtttaaaaatttttgaaaatttttttagacaaattcaaaaaattcggcggaaacattggccaaaaacacgaacaacaatagcagcaatacagaacagcaacaacagaataaaagttgtgcacattgtgacactgactttggatggtaaagcgattttgggaaaaatgaaaaattattaaatttattttaaattacaaaattaaaattgaatgaaataatttaacaaactattttgtatatttaaaaaaatatatttcattaattatgtaaatgtatttattatttttagacagaaattaaaattaattaattgttacataaaatttattcttttattattaaaaatttatgctaagtatttattttatgaaggtgattaaacaaacatttaaaaaatatatttttttaaaattaattattatttttttaaattttaatttattttccaattttattttcaaaaataattttactccatgcttttcggttcccaagaaatttgaagcttagcaatcatgaaaaaaaaacaaatttttaagccccagaattccgactttggcatttccatcattttccccaggtacacacgtccgttggtgtgccaacgatgtcaacaacggttttgcaagcgctgctttggccaacggcgcaaggagcagaaaatgtgcttggactgtttaaggacagcggtcggtacaaatgccatatggggaagggctggacgcaattacggattaagccttaattacggcgtttttattttttatacctctcataatgattaatacgaatcccttaattacggcatttttatttttatgcctctcgtaattattaattacggatttcttaattacagtgtttttatgccatccataatacagcgtttgtagaccctccttcgcgtgattacggattactggtttccgtaattacaacaattaggacgttttaacccctcttaacacgcccccccccccccccccc

SEQ ID NO: 6412 - DNA, 3826 bp, Heterodera glycines
aattccattaaaatttccaaaaattttcctcggctgcgcctgtcgacatcgtcagaatccatattttgtcatattttcggaaatttgactacaaaataagcaaaaatggtcattttttcagtgaaaaatgaatgaatgagtcatttctgacgattttttaatcttctaaatcacatttcattttttcgaaattttggatttaattgccccaaaaaagccgagggatttcagcccaactacatatataaatattcagcaaaaattccatccttcagcccttaattacagtacataaaccatttgaatggggtggggaagggctacgaaacatacggtaggtgtttacgggaaagtatagtaatctatggttttgtgaaaaattaaaattcaaaaattaaaaatgctcttcaaggccagctatgtgtccttctgcgggccctccggcaaacagatgcaacgcttttttgtgctgcgccgaaatttctgtctctattcctatcagacggacaaagtgccaaaatttgcggaattttcccgctaaaaattttgtttaaatttctcaaggacaaatgcgctttggccatgttgcccgtgtccggctgtgacattggtgatttatcatttatttacaatattattttgtgaattacctgaaaaaaagtttaattttttaatttatttttaatcatttttacttaaaatactaaatgaaatatatttaattcggtaatttaatacatattttttgtaccttcaaattatctatcttttaacggacaaagaagtaaaaaatctctaatatttaaatataaaatactttttaatacataaaaatggcaaaatttatttttaaaaaattaaatgtttattaattttaaatcaaaagaattttgttttttaatctggacaattacatttcagcaatcaatcagaatgaaaagttcggcttcacagttcggcacgcgcatcgaacctattgggtgacatggtaagactacagttcataagtctccttttccaaaaaaatctctctctattccccgcccccccctcccttaattagttttaatgagtcggatcatgtcgaatggatggcggcacttttgctgtcggcaaatgccaaattgccgggcgaaagcgacgcggacgaaagcggcggcggtggaggagaagggcataatcacggaatgcagcagcggaacaacgccaccaacaattacgggggcagaagcacccgcagcagcacaatttgtggtgcaatttatgtttttttgattaatttttaaattataaatttatttttatttcttctacaaaaatataatttttgattttttaattgagaaaaagcaataaaaatacgaatttataaaatttaatttaaaagttttattttaaatgtttcattcaatttaagtaattaaggctcataaattaaatagactaaaataccaaataggggacataaaatacgtactaaaaatgcccgaaatataaattttaaaaccatagaaatccaaaaaatataatttgaagcgataaaaaatttctattttaaattaaatttaaatttttttctcaattaaaaaagttgtatttctcaaagtaataaaacaaaaatgttgacaactaattgcaaatgattccccttttttcagataatctgaggggggctgcagtgatcaattcgccgcgtccaaaaccgtcattttgcgcctcaaacccattcagcggactcattgttcgacgctccgcttccatgggagacgcgcggtaattttcaaaaggaaattattaacaaaaaaaaacaattaaaatttaattaggtaattcatcattaatttttcagaattcgccaaatgactgctcacaatcggaccaccgaaaatggacaaaatgaaaaagacgaaatggcggaaaaaaattgaaaataaaaataaataaatttgtatctcccacccataattattatgctgtaatatcttttttttaaaatagtaaataattgaaaacttgactttttacatacattcaatagctcattcgaacgctcttaggctctacaacatctgtatatgagtttttacgcctgactaattttcttaaaatttgaaaaaatcaagtagtttataaaaaatcagataaaaataaatgattttcaaaatctgagttcagattcatgatcagcgcatttttttactctagaaaaaatgctttttgaaattttactatttttttacgtcgggaccgcaattccacaccattgccatgttttcaggaaaattttctttctttatccaaccatcgaaaaaatcggaaaacaaaattaaaaagccattcatttccgcaattcgcttcgtcgtccattctctgcccaaaaatcaacgacgatcgtggtagaaatggtcatcgcctcggtcgtcgcgtctgcgacggtcgcgcccaccaccaccgccgcctcctcctcgatcgccgcgatccctacgaagaaaaacaaaaatattcacaaaaatttagcagggcgataccgccgccggaccttaccccctaaaaaaattttttacgtaagcgcagcgaaaaagcgaggccgaagagcacccccccccccatcaagagtctggctctaagtttttgcccaacataaccaccacccgccgatctccctcggcggtcctttttcgtccgtcgtccacccacctgttgcccccttctcgacgatcgtagccatcatcagcgtaaaagcggtcgtggcgacgtgtgctgcggtaacgtgcaccacgattggcgtaacaacgttcgtagctgaaaaattaaaaaaaaatttaattcgaaaaatctttgcttccctagggttttttgtaaatcgccagacttacacttcatccgacacatctttgaggtgcatgaaattgcaaaagccgccctttgaacaggtggaaatttcgtgctggcgacaacgcgcctcgcgaaagtcggacacgggggacagctcggcgtagatgggctggccgttgaacctgcggagagaagggccatttgttgttgtgacaaaaaatgatagtaattcctctaatatacacaccccccccccctctatcagtgctggccccttagggttgaaaacggagaaaaatgggcccaaggaaactagtatcaaatggcatagtaaaggaaaatcacgccgtaaaaaacggcgtaaaaaaaggtcgttgcgtgggatgcaacctccaagccaaactcaaggactgtcgctgtctcaaaaaggcagaaacttctttgaaaatcgaaaatgggttggtaaattcttcacagcgagtacctccacgtggacacaaaaaaccatctccaagtaaaacagggtatgaggcgctcatttaataccaattttttttaaccccaaaagtagtaaacgaaaaactccgaaaatgtgtaatcagtcgaggaaatgaatggcatttgctctattttgtgaccaaattccaattcattcccccaaaaatgctaaccatcgattctccaggccttgcacggctttttctgcgtcctcctcataaacaaacttcacgtacacattgccaatctgtgaaaaacaatggcaaatgatttgttgagcatgtcaatttgtaccatgtgctcgccaatgttttcacaaacctaaaattgaaatgttttgtaaaattaagggaaaaaaccatctccaacttacgttcaattcctcaacaggacctgaaaatttagaaaatcaaaaattgtaatctcatcaaaaaaaaaattagaattgccgaccataagtgcgttggagttcggtgaacacttcctcgtaaaa

SEQ ID NO: 6413 - DNA, 8052 bp, Heterodera glycines
ttctatacgtcatattgtacctaattattaaatttattccccccttattttcctggaaatagagtaattaaataataaaacttttttatttatgcaaattgtataaattttactacatgaaaaaaacttttgtgtcttttcttgtcggaaaaattgtctctggtcttttctattctaggcagtctaattctcttgcctttgcgtgtaaattcgtccgatcttttagttaaattaattaattgctctcaaatatcaatttaatgacatctgtataatattgaataggtcaattaaatttatcctctctcaagttacctttaagcttggcaggtttaaaattttttagttcttatttttttcatattgaatcggcatttgatctatcattaaaaatcacgtctttaaaactattttctttaaacattttacacatttgtctgattttactttttatatattcttatttgaaattataaaataatattttcttgttggaacctgtccttagtgttgagtgttgaacgttgacatcattttgattttaattttatcgaaactgtaaaattataaagatcaaataattctaatggcacaaaaataaaaattaaactttttatctttatcttatttttaactatattcttgcttttcttttagttaattgcctttaaatttatcggcaaagataaaaacaatctcaatgacatttaaaatcatttattgtaatattttaaaaattatacttaaatttttttaaataaattatttaatgcctatcagtaagtatatcatttcattgtacaaatgtctttttttaattgtatattaaatattggaaatctttattgtattatcattatttattttcatgtccaatcgttctttctgttcattcgtgcattatgcgtgtatatttttcattatttgtatttttctgttttgagttactatggttaaattaccttttaaataattttatgttattaaaatgtgagatcaactgaattaaaatgcaccttataaaacaattttaattttttatctataattattttaataatttaaatattttatacataagatagaattttttagccattataaattaagaattgtaaaatattcatttttccattcattaaatttatgattattttctaaacattgaaaatgctagagttccatatatatttatttttttaaataagttcttttgaaatttagatttaaaaaatgcgcagacgattgatttacataagcaaatcatacccgctggcaaaatgaaatattttaagtgagagaaaaaagatggtacaagcagaagcgataagcgaacgagaaggtggggttgcacttgctgctgcgacaaaaaatgcattatcggaacgcgggagtgaggttgaacaacaacatcagcaagtcgtagtgatggcccgtggaggaacaataagcaatggggatggtgcccgtgcaaaagcagaggccactggtggcgctaaaagtgttgttgaaacgaggattacggaacatcacggtgaagagaggctagctgcagctacagccgtcatacatagagaggaaaggagagaagaaagaagaagaaaaatacgcgtaagaaacagagaccgacaacaaggaggagaagagaggcagcgcggagaaggacataggcagtctcgcccaaacgaaagacacaacgacaactttcacagttcgctacaattgaatttaccgcccaacagaatggaccgaaaggaacaggaggaacacatgcatcattcacgagatggtttgatgggacagtcgaacaatcaacaaggagaagagaggcagcaaggaggaggagggcataggcagtatcgcccaaccgaaagtcacaacgacaactttcacagttcgctgcaattgaatttgccgcctagcagattggaaggaagggaacaggaggaacgcatacatcattctcgagatggtttgatgggacagtcgaacaatcagcaaatgagaaaacgaattcaacgagaatgtttttgcacgtgctaatttttttggtgtttggtattgtatgacttatattaattttctaaataaaataacaaaaaaaaaagaatattattttttttcaccaatgagagcaaccaggcaaattggaaagacggtcttggtctaaatcatcattatcatcatcatcatcattagtttcttcttcgtcatcttgttctgttctgtgtcgtgtttgctgttgcgcatttcggaaaccaaaaggcagggtctccattccgggccttattcgtcctttaacatagtgggggcggtaatccttgtgtgcttgataggtgtataaatcagcagaagtgttgcggcctatttgaggaaaagcaacacggatcgatcgcgatgagccagaaaaaacgaaagtgtcatcataatcagcaaaatatagtgcgtcatcactaaaaataatcagcagcagattaatattgcaagaaggtctaattaacacactcacatttgtccatcatgatcgtagtgctcaagaacaatgtctttcattgattcaaaatttagcagctggctagtggaatatgagaggcgaaaacttctgacttttagctctgctttttcttccgctcgtgtatggcgatcacaatgtcgaaaaccgtaattttttggaccaccgcttataaattcaaatattcgacgttcaggaagctctcgcttcatttgacccagagcttctccttcaggcaccaatcgctccccattttttgcaacataataaatagaatcggtatctaatcactagaatgtaaaaaaaaagataaaaagctgaccacaatagagaagtttatgaccaagttgtacaactttctcaatgtaggaataaaggtgaagtcttgcgtatgaagtaacataaattgcaatcggcaaacagttggtcgctggtgcttttgaaaaatcagcttttgtcttcacaacaacacggtcaagatgaggtgaaacatgatgaaagtcgagtacttctatcgaagggtcgtcgagcaaacagtggaactcagatggcgatgaagcgtaacgaacttcggttcttcccacgcgttgggcaaacttgccccaaagggaatttgccagcaatttctaaagtagaattagcatagaggatcattactcaaggcatgttaccgcaaccattcgaagaccaggattatttgcaatttttccacggtcgagtcgtattccttcggcacgctcaaactcgtcaatatagtcatcgcgacgttcttcgctttcacaaccagtaggccatccacttgcttgaactttcatgcccacaaatgtgttcatataaccacgaaacatttcagcatcccattcatcataatgccaaacctatattttattttttttttacaactttttttcaaatttatcgagttacctcaaacagatcggttacggtatatccgagttcaagcgctttgtttagttcaacatgtgtgtacctaagtgtataaaccaatcgatgagcggggggggggggggggtcatacgcagcgttccaagaacgtaaatgatctgtatgtgcacatgcgcgctgttggcgattatcagcacaacgagcacagagaggaaaagtcaggcgcccatcatttgtccgatatggtagcagcgggatacgaagagggcttagaaccggatctggcggcaaaacacaaacaaacagcagccctcgaaatgtattgcagtttgcgtttctccatggtaatggagatgccggaggttgtaaaagcacttcacgtgtaagcacacgaggatttccaacaggaaaatcaaatgccttcatcacgtaagggtagagactcaccttgaattaaaatgctattatgtttgcttcactgttgtgtatgacaaacaatatcgatgagaacaatttcctcatcgttagtgcaaatgtgttggagagtaaatggctctgtgcgccctccacgcagggcatcctcacgtggatccaacgggcgaggaacgaaggcgtcattgtacatttgccgaagcactggattggcccgcaaacttttcttcaactcacatccccaaacaacgtgaagctcgaacccgtgcgtgtgttctagctcccaaaggcggcgttgtgtacgttcatacaactcttcagcagatctaccgccagccaaagtttgttgacgatcgtttggaaaacatttgggacaccctgagaattattattctttttcatacgcatttaactcaattaatactaccatgataaaaacagcccatgtattcaatcgctatatttcgcagaggaggtagacgaacatgtaatccatccaatcgataaccagaatcctcaacatgcgcttcccccacagtccattgcgccgattgaacgtgcacacccgggttcatcagttcatacatgcgaatgtatcgtgcggattctgccgatgcgcgtcttcctcgtaaataaccgccctcaggtgtgttgatcagtttattgcgagacagaaaacaacgtcgaaaggttgccaacgcaagtgctgcacccgtagatgcaataacaaatggatccaagcccatggtattctccatgatcaattggcgaaatttcagcacactttcacgcaggatagctacatcattcgcacaataaattataagttgttctctgagctgaaatttggcgactgctccttcataagcataccaactcaaaaattgttcgcgtttggccgttttcatgtggtctggttgatagaatacagcatttggcagcccttggaggcgaacattcaaattttggtggcgaataaataaatatggaaaaaacggcttggcagttgcaatttcatttggcaaattgaacgttcttggcagggcgtcaagttcacagaagaaaaaattgagtgtgtctttaaaggttatttggcgctgaagatttcctttaagcgacattgagtaaatttttagccccgttgtgcagattcgttttgggggtaaatttcgatgatgtagtgcctccaaaaccagatgcatgtcgtattttccaccattgtgagacaaacaaatagtatgcgattttcgagggcctgttgagatgaggaagtcaagaaactggtccactgggtttttggttgcgtcttcaaagcagtggaagaaaagacgtctaggattatatgtgatgtttgttggcatctcagtgtcgtcatttggtgcgttacgaaagggcgggctacaccaaagacggccccgtggccctgatggcatgccacaaacacaaccattcgccttctgtccaataccgccgtaaatggtaattctatcggcaatgcagcgctcgcaaatcacttgagcaataatcaaaagcggaacatgtttttgcggaatttgtgttcgaagttgtaatggcctgtcctgagatgtttcagcatcgaagaaacaatatctaattgttttttgagaagcttggcgacggtggccaccacccccagccccatgctgggactcgccttctgcatcattgtcatcatcggtatcatcttctttatcggcagcatcatcgttgccattcaaacagttttcaactgaagattgttgctgttgttgttgttgtttttgttgacgccgtgtttgcccaaaaacacgacgtccatccattggctgaataaaacatggaccatcttccgcatgaggtcccccacactggtggcacaatgatgcaaattgctgttgctgctgctgctgctgctgttcttgctgttgttgttgttgtcggaccgagggtggacaaacatgttggaaattggtatagacgatccccccacatgctcgacaaacacgcctccattcgcagattgaacggaacgcgcgcccgcttcgcccatccaaggtggccggtgcgcgattggacaaatgatagttgtagcagtccaaatctgggaaaacgaattggcactgtgtacaaaaatgtttgctgttccttccgttggcaaattgttgttgttggcaagggtagtttgcaccatagcgtagacaaaggcggcaaacaactttgcattcttgcggatgataccaacgagtcacccgcctttcacaatcaacgcaataggacgtgcaacggaacagttgttcaatacgcccaacatagtgaaaatgggcgttctccaacaataggcacaggttgaagcaagcagcacggccagacgcccctttgaaaacaattcgatactgtcgcactttctcaaaaacagttagacgaatctgtgcctcttcgtagcgttcatcaacccattgctgaagctgtctgacgtcatccagcgtgtacatatttttattcgtcttaattcccgctctccgtaacagatggcgagcatcaggcccatgaaatcgttgttggccaacataattcttaaacatttgttgtccagctcgggtgttttggtactggcgcgaacgatggtctttcaacccaattaaaacggctcttgctaggcacaatctgtcgttcggattccgaatccggactaatgagttgacggtgtgaacaacggagtgttcatgatcccatgaacacgcccctatagaaatgattcaattaacatccattgtggtctcttttaccttcacgtccatttcccgttcgatcatcatgcattggccaaacagccaaaactttggtaagcgttgtcccggctgttaagtctattcctgccgctgattgatcgttcaaacgttgaatatagtcagcaattgcggccggatttttttgttctggaggccgaagagcaattgtgaatggattctcaaacgtgggcgggtgcaattgtaagccaatcaaggagggcggtggccgatctccaagcactcgcgcaaacaattgttcaacaagcatttccaacacgcggtccggtcgttggacttgttcaagcgggacaaaacgcacttgtgccacttctccccgagtgttccttggcctattgcgcatctcatgcacagactcgatagaaaatggatttcggttagccatttaattcttaatgggagaaaagattgaataaaggtaacaataaaaaatttattaaacactcaaaaaaaagcacaacaaatatatatttttttttattggtcaaagggatgcgctagtcgatggctccgaatttattttttgttgtgttgcttcttcggcttcttcttctgttttttctcttcctcaatttcggacatcgctttttccacttggtcatttgcgaatttttttaggcgttcagagtaactggaagcagtttttttggggatggatttttggcgcatttttttattttaaatgttaatgacctcattcgaacgaagaagcggaataacaaataaatttacagcaaaaggggcggagcttataacagaatccatttttcggtcatcatcgattattcaaaaaaatcattcattgtttatttcatcatcatcaatttcattgaaaatttgcgctacatactcggcatgtaaacgcatcaattcttcaaattgcacaaaatcctcttcttcttcttcatcttcttcctcttcttctcctctttcttctccctcatgaacgttgaaaagcaaagcctcctcaacatccaaaatctgaatcaataattcagcttgttgttgttcgggttgttggggctcaggcagcggtcgagcttccaaatcattaaaatctagcgagatatttgaaaaattttcgcttggaggcatttgcgaaagtgaatgatttagaagcgcatgaggaggcaattttatagccaggccttgatatacgaggaaaggggggggggacggggagaagcaaaaagcagcaaaagagggaaaaagcaagtagagagaatgcagagaaaacatacaaaaacgaaaatagggcggcgtgttgcaatttctctctgcacgcttttgcaccccatcataaattgggggtcagaggatggtacgggacaccggggggtggccaacaggccagggggagccggcacgcaccacctccgctacaggctttggaca

SEQ ID NO: 6414 - DNA, 609 bp, Heterodera glycines
ttcacggcatcatatcaatgattttgatcataataactccaccagttttaattatcagctttcaattctcaatctgtgcttaaatttgctaaaaccaaattctccgtttttaactctgatcagtgtttgtccatcgatcactactcatttcctttccaaatttttggcaaaagaaattccggcaaatgatcaaaatccaaatcggctgttactccgatcattttggcaatgaactgatgctagtgctttcgaaactgatcaattcggcttccacccacttgatcggaagctgttggccaacgcaaagggcggcgtccgccgccgtttggtcttgggccaccgcctgccaactgagcactgtggtgaagcccgggtcggtgaccacgcggcactgcagttggaactgctcttcgccgatgtcaaacctttaaaagccaaacatttggaggcaattaattaattaattaccccctctcagcccgacaattaaaaaaaattccataataggcatcatttttgcagaaaatttaattttcacgaggaccaatgggaaaacccctcaattttcaatcccatctcgaaaggagaggggttattagaggggggggg

SEQ ID NO: 6415 - DNA, 1433 bp, Heterodera glycines
  unsure (1)..(1433): unsure at all n locations
tctagagtcaaaacaatttgccgaaagaattattttttattttcaaaaatatataaaattaactcaaaaatgaaaaagggaataaaaattatgaataattttattatttttttaaattaacccaatcagcagaaggggtgagaggcaaaaaactgacaattttcttaaaatttgtggagattactataaaaattttcagcaaaaaaaattttgaagaaatatttaaaaaatatatgtaggtattcttttcttacgagaatttgtaaatacggccttacgatggataaacggagaatttcatcagagaaaaaaattcaagaaatttaaaattttcgcaaaattccgtcgcccgtcgcgcacctccgctcagccatccgtcggccgctttcatcggtgtgatgggcgggtggtcgcctttgttcgtgccgccccggggccgcgcaatgccttccctcaacagctgaatggccgtgtccacaaagcgttggcctttggccaactcgcgcagagcgccgacaaagtcgaaactgtccgggtacgcggtggtctccgtccgcgggtaactgagcggcgatagaaaaaataaggatggcacttttgctgggagtcgattagcaggggactaattagtctaatcagcaatcaacagaaagccaattaataaacaccatcatagatcagtggaaatgatcacagcagaatgatgagaggcggcgattttgatcatccaaaaatagctgatcaaaatattaaaagaattgaaagtgatcgaatgattttgatcatcacccaaaaaggccggtcaaaatataaaaattgatagaaaataaaactgatcggaaaacaaatcaattttaaatgttttaaaattcgaagctctccactgtttatagccaaccgactgcactgagtcagtgccagcatcagaaattcgagaacccaaatgagtttcagagggaatatgggaaaggcgtcgagagtctcgagcaaccagacaggcgcggcacaagcggttcaaccaaagtgcccgcccgtccaccttatgtatccgcgggtgtacaagtgttccgcaacagccatggtttgcgcgggagacagtcccaacgcggtggacgccacccgcaacagttcgaccgtgtgcagtgcctccggcttctccttgcggtgctctttggaggacacgtcgcacaccgtggcggccacgcatttctgtggcaaaatgtttatttttttttagaaaaatctcatgtaaaaatttttcgggggaggaggggtgtagtacaccaaattaggcctgtttttcatactcttctctcattgttggtatgtaaaaaacggattttttgatggaaaatgattgttttgggttctctaatttgtaagttagtttaaaagaaaanaaattttgaaaattttaaaagcattttagcatg

SEQ ID NO: 6416 - DNA, 3025 bp, Heterodera glycines
agtggtattgcgagtccctgtccctctccaataaatgctcatcggggaaaaattgaaatttttgagcgaattttcctaaaaaaaatccccaaaaaatctccggcacggcacgacccaccggaacaccgccgcgtccataaaattggcgccgcccgcgccgcgcatcgccggccgcacggcgtcgacgacttcgaagcaaatgttctcgccctccttgtcacagtcgagccacagcacaagcatatcgcaatgtttggcctcagaggcgagaaactgaggaggacgacaattgatttaatttaattaatttaaaaaataataaaaattaattttaaaaatggaaaaattaaattttaaaaataaatggtaaaaatcaaagatttaaaaaaatttaaatggacattttgcgaaaaagaaaatgaaaaattatggaattttttgatgttaaagggggtgaaaacgggaaaattttcaaaaaaatttgaaaagataaatataatgccgtaaaattctccctgatttttcggcatttttgtcaattaaatgcaaattaatggcattttttgcaaaaaaaaacaaataaatacctccggcattttcagcttcggatttgcctctttttgctcaatgttgcacagaaacagctcggccgggtcagtgcgatcccacgaattgtaacgggcggggaaatcgacgccttaaaaattaaaatttcgaaaaattaaatatttaaaaacaggccaaaaaattcaaaaaaaattcattaaataaaggtttctgatttttcttttataaaagaaatgacaaaaagtttcaaacacagaaaatttttgcttttaaaagcaaatttttcaaaaatttagtaaatgccggacaaatttaaaacattaaaaatttgctaagaaaattggtaaattcaaaaaatgaagtttttcaattgtccaaacatcttaaataaggataaataaaggacaaagctttaagttttgtttaaatctcccgatttaatttaaaatcaaatttttaaattttaaacggaaaattaatttttgaaatatttcttaaaaatttccaatttattatcccggcacttacacatcacatgcccacaggtggaagtgacccggaaattggcctgttttccccgaaacgatgctttgtactcggacactgagcaggcgccgttccatcctggcaaaatggggcaaaaattaatttaaaattaattagtttaaatttaattttattatgccgtgccatgcctttccgagtgtggcattttccgttggacaaaattttggcgattgcctccgccaaaataggcttttcggccaccattagcacattcattgcgcaacaacaccttagattaacaataagtcaattaatttaattttttaagggttaggagcgataaaaaaatatatattaaagcaaaaacgaaaaaattcgaaaaaaaataaaagcgttcgtaaaatatttctgactcctccaacaaattgttaaacatttcaaattttcattaataaactcatcgccaaaatatataaaagtaaaaaaagcattttaatcgactcgaacaattaattcagtgctggacaacaattatgtttaatgagctaattaatgaagagtctgattgaggcagaaataaaaaaggacggaaaagagaatgatgagaagctaaaaaggaaacggactgaacaataattattatcggcgggttaaaaaaacagaatttcaatgaatgagaagaaatgatgaatgattagttaccaagctcaattagtggtgcgctgttcgagagtcttggtctcgggtgaaggattaagcaggatctgcgttcctctcattttgtatgaaaaatgcgcagttttgagccaattgggaaataattgccactggcggacccccaaaaaaacaaataaaaggagaaattttaaattaaaaaaacttgaatcaattagcaacaccaagcttaattaatagtgatgctgatcaagagtctcgacccgagaaaaatgttgatgagtcattattttctatggttttttcgtgtctcaacattcgggtgccaaatgtcggtcttgtgaaatttaactcttgaatattttcaaatggattctcgagtttttacccgagaagagactcccctttttggggttcaattgaaagctacagtctctgtcaagagtattgtgaagttagtcctcgaaaaccctatcattcgaagcaactaacgcttaattactcactcattcgtcagagtaaaaaatgacatttttgtgtgattattttctccacgtgatggcatatttaaaaatagcatttccatacttttttaatgcggaaaggtgggaattgctggaaacggaggtgtttggtgagcagtgaaatttacacaattatcggtgaagattggttggtgaagttgccggatcggacggccgacacaaaccatcgaaggcctaataatgtggggaacgggggaggggagggggggggggatatgcgaaagatggaaatcaacgaacgatggatataaaaaagtggccaataaggttgtggatagcacacactttacttttctgtaatttgtttaaaaaatattgttttttgatcggaggcgacagattgtgagatgatcggtgtaaaaagcggtgggatgggaacattgcacgaacggccaagtttttgccggctttaaaatgatttgttgttggaaaatggatttcattttgagcaatttgtggaggagtggagtcgtacagcagttcattctcctctcctagtcgtaccatcccctgcttctattcgcatttctttaaacaattacatattcaatttgattattcattttttttaaattttagttcattgcttcatcctcttcggctatactgttcttgaactttgttgagcaatggcaaacaaagaaaacgaagtaataatgacaaaaaatttaaattattttcacccctcatcctcaaacatccccccgggcataataattaccctaaagaaa

SEQ ID NO: 6417 - DNA, 1868 bp, Heterodera glycines
cattcgtcagagtaaaaaagacatttttgtgtgatattttctccacgtgatggcatattaaaaatagcattttcatactttttaatgcgaaaggtgggaattgctgaaacggaggtgtttgtgagcagtgaaatttacacatttatcggtgaagattggttggtgaagttgcgggcggatcggacgcccgacacaaaccatcgaaggcttaataatgtgggaacggggggaggggaggggggggggggatatgcgaaagatggaaatcaacgaacgatggatataaaaaagtgtccaataaggttgtggatagcacacactttacttttctgtaatttgtttaaaaaatattgttttttgatcggaggcgacagattgtgagatgatcggtgtaaaaagcggtgggatgggaacattgcacgaacggccaagtttttgccggctttaaaatgatttgttgttgcaaaatggatttcattttgaacttttagttcattgcttcatcctcttcggctatactgttcttgaactttgttgagcaatggcaaacaaagaaaacgaagtaataatgacaaaaaatttaaattattttcacccctcatcctcaaacatccccccgggcataataattaccctaaagaaatccaaaattggccatgtgcggagtttcttatatttccacttttttaatgagtcttttttggtatttagtgcctgatttaaatagcacgaaatgtacaaaattgatgggcaaagaagggagtggagcaaattatttgaaaatggccatttttgagtaaattaatttctatttaaggtcgaaacgtgggagctgagctctgtctgccagacaattaccatcaccgggctgtcccaaatggtgaaagtgaattttgtcgaccaattgtttgcgggtaagttgtataagatttaaacatttaattttataatttcataatttatttaggcattgtcggaattgccaattcaatcgaacgctttgggggaccgttcccgagtttggatgtgttcggccttaaccgccacgacccaaattatgtaagtttaacacctgtcatgcagcgatctcaactgatttaaaatttcggcaatttatgccgcaattttgtgtgtgcttataattcaccccccccccccctccctcatccattttgcagggtttttgtattaacgaatttcgttgttaatggtacatattttaggcgaaccgcgtgatgaaagaagccgccgcaattgtcgatgattgctgcgactctcagctgtcaactgcggctgatattaatatgctttctgtctgagtgtgagttcatttttttgtaaaatattaatggttttggtaaataaatgtccgtacttactgaaatatgaccccccccccccgcgggggcagaggtgttccaaaatcaacgaaaatgacaaaatactatgtgcaaaaattaattattatgacagtgattgctcaaggcaatttgcctggtcgtggcgctccctttttgcctggggcaatcggatgcactccaaaaatttgcggccgaaatcgcgccggaatattttttggaacataactttattagttgtttaagcaaattaagcagggtatttattagctgccgttttgttttcgttggttttcgcacccatgcccccgtaggggcccaacttttaccccacacggagggagggctcggcggagggggggttatatcatgaacgactctatttcattaaatacagtataatattgtaataattaaagtgccaaaattgaatattctatatttttgtgtaataaaactttccctcaaaaaggtgatcgggctcaaaatgcagttgaatggtttgagcaa

SEQ ID NO: 6418 - DNA, 2245 bp, Heterodera glycines
  unsure (1)..(2245): unsure at all n locations
aaaacgattttcgggtttttgaattttaggaatttttaacgaattttcccagaaaaacggagaccacttccaaaacatagtttttcgagctctatcgattggtaatttttttggaaaaatttcgattttttcccggaaatagaaaaattttttggcctgagcgggacatttcagtcccgggcctataactcgtcgggggttggttctagccaaaaattgccttagggcaaaattgtagtgttttttaagctctatcgaatggtgtgccttttttggccctcgggattttggcctaatatttgaaaattcatatctagcctaagggttgaccaattttgagtaaataaagctttaaaaatagagaaaaatcaggagaattttatgggatttatttaggttttctaacatcaatatgaaaaaagttattccagaaattctggaaattttagatttttcagaaaaaaattcgtaactgccttctgaaaagctatttgagaaaagtaaaatactacaaaaatccgcaatttttttctctataatataaattttattttacatttttatctcttttttgcgaattgttataaaaataaaagtgattttgtgcttcgggtccaaaggggggtgggtgggtgaccaggatttttgagtggaaaattttgtcaatcatccaaaaatatgtctttaggcgtaatttgggccgttgatcacgaatacgtaatcagattttacttttaacatcgttaaggcctcagaatccccgtgtgattggggattctgaggcatcattttaagggggggggggcaggttcgaatccggacagtgtacattattctatctatttattttttggataattttcactgcatttaataaattaaaatagtttggttgtaaattatttaaattaattttttttaattaaaaattttcattatttattttttgaatttgcaaaaaaattaatttcatctgttaaacctcttctaatcacctctttaacgggcgcgaagcgcccgtaagagttcaacgaatttaaaaaacgggcgcgaagcgcccgactgaggccaacaaaaattgaaaaaccggcgagaagcgcccgactgaggccgcgaagcggcctaacaagctaaaaaacgggcgcgaagcgcccgtatgagttcaacgaatttaaaaaaccggcgcgaacattttgaggtggggggggagttcggattcgggcgtgtacattattttctatgcatttttgtgttattttgactgtttttaattaatttgaagatttcttttaaattatttaaatttattttttttaaattaaagaattacattatttttttttgaatttgtaaaaaaattaatttaatttcacttaaataaatattcaattaataatttccataggtgtatatttacgatcaaatgctttaaaaatgcagaaaaatacggcacattttatgccttttatttggtatttaaacaacagatacgaaaaaagctatgacaaaatttctgaaaatttccgaattttcggaaaaaattcataatcccttcatattaggggtacaggtagaacataatgatccaaaaatccgtaatttttagctctacaaaaaagttacttgcactatttatccatcacttcttcaaaaaaagttttttctgtgctattttggccgcttatcacgaatatgacatttatttttagtttcatatttttcttctggcgaaaaagtggtctgatcactgttgaacctcttctaatcactcttctaatcgctgttgtacctctccctaatcactgttgaacctcttctaatcgctgttgtacctctccctaatcactgttgaacctcttctaatcgctgttgtacctcttctatttacttttgtacctcttctatttactgttgtacttcttttaatcactgtgaacctcttctaatcgctgttgtacctcttcaatttacttttgtacctcttctatttactgttgtacctcttttaatcactgttgaaccttttctaatcgctgttgtacctcttcaatttacttttgtacctcttctatttactgtacctcttttaatcactgttgcacctcttctaatcactttttacctcttctatgggaaaattttttcctccaaaattgcttaaaaatgacttttctgngctattttgngccgcttatcacgaatatgacatttattttcagtttcagatactttgnngtcgtttaaa

SEQ ID NO: 6419 - DNA, 5485 bp, Heterodera glycines
tcgcatcgatttttccataaatgttcctttttcacttagttaaattttaatttcgaacaaatatttttatactttatttcattaaaaattcaataatcatacctatcattgtttataatcattaacgaaaatgccaaatcactttgatcgaacctggagggactgttgcaaattgaccaatcaaattttgtgcgaaattttggaacgcgacgaattgcaaatccgtgaagaaatttcaatgtggaatgcggtaaatttttttaaatttaaaaatgttacaaatttatttttaaaataagtccgaatctttttttaatcactaaattgttttgaataaaaaaaaataaaattttctctttaatttccttactattttctcttctctgacttgtcgctgctaccatttttagcggcgggcagagaagaaaaaatagtaaggaaatttgagagaaaaacttctctcaatttaacttgatatttccaaattgtgtttaaaagcggaaattatcgcatcgattttttccataatgttccttttttcacttatttttattctcaatcgagccaatttttttaatactttatttcctttcaaatttagaattttgcctaccattgtttattttacattgacgaaaatgccgacactttgatcgaatcggagggatttttgcaaattgaccaaaaaatgttgtgcgaaattttggaacgcgacgaattgcaaatccgtgaagaaatttcaatgtggaatgcggtaaatttttttaaatttaaaaatgttacaaatttatttttaaaataagtctgaatctttttttaatcactaaattgttttgaataaaaaaaaataaaattttctctttaatttccttactattttctcttctctgacttcaacaaataatttcattccaatttcaaaaaaaattcaataatcatacacatcaaatcttataatcattattgtacctcttcaaatcacttttgtacctcttttaatcactgttgcacctcttctaatcaaattttgtgcgaaattttggaacgcgacgaattgcaaatccgtgaagaaatttcaatgtggaatgcggtaaatttttttaaatttaaaaatgttacaaatttatttttaaaataagtccgaatctttttcggactattttataaaattattatattcaccagcctttccatatttacagttttcaactcgtcctcaaaatggcactgttttggcccgtttcgaagcgctggtggacaaacattttatgacaggacgaatttttttataatttcggcaagtattttttgtttttttctgttcttcttttttgtttttgtttttgggttatggtcccaaaagccttaacagccccaaattttcaaaattcaaaataaaataaaaatttttggaaattcaagaaaatttatttgtaaaagtaaatagtttttatgtgttttttttgaaggattttatgcgtaaaatatttaatggcctccaagtaggcaagtttttttttgtgtgtaaaaatgagaatgtttcaattttttaaattatttttttaggatttttttccaaaaaaacgaacttcaattttcagaatatcaaagtggtggacattctcccctttttgaccgtccatctcttaagagaacattttttcttaaaattaaaaaatcttttttttttggaaattttacatttttaatttaattttttgaccctttttattcaattaagcctaaaaatgcattttctatgaacaaatttacatatttaactaacattttttcaaagtttcagctgggtttgcatggtgtttggatggacattctccccttttgaccgtcctcaactcggcctcaaattggcattgctttcgccccgtttcaatgctccagtggacaaacatttcaacggctgaaggcgtaagtttcagtttcaaattggccatgaaaatttttctaatctctgttttttttggattcggcatttaaaaaatttaatttgaaaattttttttgagaaattttttcgatttatgacctcagaatccctgtgtgatttgtacctcttctaatcactgttgtacctcttctgatcacttttgtagcttttttccccattttttaaataactagagcgcaaaaaaaacctttttttcagcgacgaatatcgattatattttattattcatttctcagtataaattttgttattgattcccccccccctcccttttgttaaataattaaaaacaccaaactaccaatgcttattaagtttttcctttgtatagaattttaatctatatttcaaacattttagataattctctctttattttttgtttttttcagctgattttttgcaacactttggatgggcatttctgaccatcttcaactcggcccaaattggcattgctttcgccccgtttcaatgctctggtggacaaacatttcaatggcaaagcggattgctggcaagtttcaatttttctcaaagtaaccggtcaaatgtttaataagctctaaaattgtgattgcattcggcagttcataaattgaaaacggaaacaattttctttgttgataaaatcttaaaaattgtaattttcaagcatatgaaaatcaattattgtaactttttgaaaaaccaaaatcgctcaacattgtgggcttataccaattccatcccgtaaataatttgtgaaataaaaaaaatgttctgaagcaattgctatgtttggccggtttaaatcttaaaattcatcgatttgaccatgaaatgaataaaataagaaaaaatttttagatgctcatatatacaaaaattatggcaaggtgtacactaagccaatagttttgctaacccaaatctgaggttagttaggaattaagtttcgtacactttgtcacgcataagctccaaaatagaattaagaagtctttacacttgacagaaaaaaaatgttcttaaatttttaaaaatattattcagtcaattgtaaagatttctgtccttatgacccttttgagactcacatttttatttgttttcaaatcttatcggtctgctttgcgaccatgatgagatttgtgcacgtgccggtctgctttgcgaccatggcaacatatcggtctgcttagcgaccatgatatgtagtgcacacgccggtctgcttcgcgaccatggcgaggctggtctgctttgcgaccatagccattagtgtcggtctgctttgcgaccatgacacagtgccggtctgcttcgcgaccacggcacccatatcggtctgctttgcgaccatgatatggaacccaagcccagacctgctttcgccttttgcgttgcatgtggctcgttcgcgcaatggtagcgacacttatgtggccaaattggcttacccatgattggattgtggtcattttgacctgcccatcatgggactgtggtcaatatgtccagcccatcacgggattgtggtcaacttggcccgccccttcttgggattgtggtacgatgacctgtcctttgaggattgtgttacacaacggtttacaatgatgatttccttattgttaccggccaacatccggtgcgaagctggtcccgcactttgccaagaccagtggactggtgagaagtaacataggatatcggagttaaccaagacttatcaagtcaaaacttgatgttaataaggacctatcctctgggaattgtgaaaggacctaatctttctggagatttgtggttcataatggttatcaatgatttcattgaccaataataataactcagcactcaatgcccttagggcagatgggatatgtgagctctggctgattgattgcagcggcttcactgtggcgatcaggaagatgcacattttatttcacactatttcaatgtttttgataaatatttgatttgagtgtggtttatcggttgtaattcctaaatattttgccacatgtacatatcatttcctcatttttgttttcagatgacaaaaaaacaagaagctaaaagaaagaatgatcaggagcgataccgacggcggacggagcaatctgtcagcccaggtcgctcacccgtcccagacggaagtgcagatgggaatggagaggcatctgcatctctccggggcaccaccaccccaagtttaagtgctttgcaaataagcacacctgcttcttccattggaagtaaaaaaaggggaagacccttgaaagcaggagcgaagccaattttggcaacgcaagaaactgtgtcctcaattgacacacctcgaactgctgtcacccaaagtgaccaaggttcgccgtgcaaaaaaaggggaaaggtcaccgagtgtgacaaacccacgtttgcaaatgaagctattgcttcaacgcctgtttcgactcaaagtcgtggagggcgacctgccaaaaaaattggtggcccaggccgaggcaaactcagtgattccatgagcaaaagctctgaaatggatatcaatcttgaaaatgccccaattccggcaacctcgcacactgtgtctgaaaaaattgacttcagcactgtgcaaattaatttcgccacatcgcgaaattttgcctgtaaaatttggaaatgggcagcaatcggcctttacgaacgtgatggcgaaacaccgattgccccaagatctggcccaagatacattgagacctgttggaatgatatgacccagtttctcaatgacggctttgctgccacatacttggcatacttggcaaccatatcacaacgaaaagtggtcgttgttgacccaatggtatggagcaatggcctggacagagtcatgccttataaaaatatgacatttgggtacgaccctaatgttccggcagaagttatacttttgccagtacatttccctgcacattggactctcattgtccatgatgtgcaatttggcactcattttgccgattctttgcctaccacatatggcaggttggatccgcaactgacggataaaattaaaaatatcatttcggatattttgccgtcagcagtgttggaagggattgttgatgtcgaaaatctgacggtccaacacgatggtaatagttgtgggtactttgtgtgcctgtatgctgagtcatggcttatgaacaatcgcacatttgttctgcctgatttatccatcaattatgaaaagaagcgtattttatggcacattaacgagctgtatggctctgataatgtgccatatcatccaagggaaggggtgccaactccttgcccaattgtctatcgacatgcggatgaagcgcagtcgacatccatgacggtagcgccaatggaagttgatggtaacgatgacatcatgatcatcgaaccacagacgagtggacaggcacttaatgtcattccaacccaaacccaagtggcaggtgaaaaccaagctgactcgcttggtttggtgtcggaatcttgcgtcccgcaa

SEQ ID NO: 6420 - DNA, 6673 bp, Heterodera glycines
cggaaccgctcagttgggcgccggcatgtttttagctataacttatttctttgtcatccaacattgttgatttcattggaaagctctaaagtgtcctctattagcctgcaaaattttaaaaaatttagttaggttcaaaaaagttatggccagaagaattaaaaaaaccaaatttttccaacttttttggccataaatttgttcaaaattaacaaaattttttggaattttgcaggcaattagagcatctgaagagctctcgaatgataccaagattgatggatttggatgacaaagaaaaatgttatagtggaaaaacatgtgctggcgcccaaccgtgtgcgcccaactgaggtagaccgaccggcccataattaaaaaaaaacattttgatctttgtacatttaatttttccaatttataaatctctctcaagtcctttttcatatagtgcagttagccctgaggccatttttttttttgtaattcgctttttgtggaatattttgaattttttctatttttactcggtttttcgcgaagatattccaaaaattttcagacgttttttccttttagcttttataactatttaatttttgttaaagggtctctacgctcggacggtgaccaaacgctggggcttggaaatgtccgcctcaattgtgccatcttcgcgcggtccgcactgggcgcgccaggacttggttgatctggttggcgtcaacaacggaggtaagtcaaatattcaaaaaattaaaaaaaaaacttgttgttggcgttatgtttgatttgtacatgttataatcaatttttgtgtttggtggtggcgtttggtcgtttgttttgttatgcaatgatagcttaacatgtgaaaaattcattttttaattttaatttttttcccatgatttggttttccacttacacttacacaataacatgcctttctataaatatgaatgtacttaacgacaaaaatttattttaaaataaagtttcccacacatttacctgtcattttttttatttacgacaaattacaatttgtaactatttttagaagaataattaaagcagcattatatccggtaatagtttttttaaattgttcaaatcgtcacaatgacaatgccaaatacggttgtttttttgtccctttacaacgaaggcacttaaaaaaaatttttttaccatagcctaaaacccaaattcgcaagtacatttttgccctctaggcaaccttttttttcataaaaaatcgctttttttcttctttttccatcggatacattattacatattctcaaaacttttttttcttcttccattcttctttttctgtttgtttgaaagcggaaattgctttttccatggagaataaattgccaacggattagcgttaaatgtacactaaacattatgtagtcaatgaaaacagttgtcggcattttttttaaattaaatcactattttttaaaaatatttttaatagaaaatctattttaatttttaagaaaatctttttttcactgaaattgtttttaaatcatgccagctatgtatgttgaatcaatttaaaaagctcatttgaacacatttgttcaaacattccccgttaaatataccaacattagtcaatgaaaacagttcggcatttgttaattaaattattatttttttttataattaggatattcttttcattgaaattgttaagtcaaatcatgcactttgtgttgaattttatatgaaaatcaatttaaaaagctccatttgaacacatttgttcaaacatttattttcccataataaattcaataagcatcacgcaattaaagcccattcattatgttctttgtttgggttgatgccgcccttaattgtgttaccaatttaagcattcaatttggcattttcaaatattatcgaccaaattttgccaccgtaattgtcatttttactttgtatatgtacaaattttcgagtttggccccaaaaatggaccctttttggtctaatttttgcgtgtgattgatgtgtccccccccccacactgactgactgcttttgtgctgctaaatgtgaggaattggcataaaaatgggtggaatttgccactgaatgcgatgggaaatggcacggcacacacacactttttagggaaactaaatgcggtcgcttacacaagcaaaataacggcgtatttttggccaaaatttatttttcaatctttttactttttgagtattaaatagaaagcccatggcatgaaaaattggatattattcttttttttacttattaatttaaatgaaaaattctaaaattcaaataaagtataaatttacatatttctttccgatcaaaaagtcagccccatttaacgaaatcttgcatttaaattgctaaaaattttttttctaaattactatctttctttagaaatttcaatttttgatttcttcgtggggcgggggcctcgcaccttcggaaatggggccatagttctgagacattgttttttttttgtactttcgtttcataaacactaataaaaacaataaattaaacctaacaacaatggtggcacattttgagacaacacacaaacacattaaatccttaattgctcgttgtcacacaaatattgtgccaaaaattttgctccatttgcgtcgtctcccgccgtcgtctatccctcccttcacctcctcctcctcttccatccttcccgcgccgttcttcgcttaattggagttttccgtgtccatgtccccgtcctcctaatcccctatctccttctcaaattccatccttctctcatcatcaccgttcttgacaccccacccctttgggctgggcatataacaacaacatttctaatttttttttcagtccatgttatcacttgcaccggtgccattccaccaccggcggtggggggtcaactctgtcccgccaattccgtcctaacaggcccgtagccagaaaattttttttgaagagaatggggaatctgaatttttcttcttttttttttttgctcttcgggccaaaatttttttcttccagtgttatttcaaattttttcgcgccgggtaaaaaagcattgtagtcgtttttgccaaaaaatgactaattttggtgtcaaattctcaaagaaatatagtaaaatgggcgttcggcggtccaaaaattagcccctttttcttgaaaatttttaatttttcatttccggggggggggggggaagatattagaaagctgctctaaatgtttggccaaattttttttcaagataagtgaaaaatcttccgtccttatttcggtgcatcttattttcctgttctgttcgccaatctagttctctccttttaattttaattctcaagaaaaaaaacatgcctacgtcattcgaatgtattccgtgtaagtcactaagttttcgagtctcttagcatttgcataaatttgtttaattgacattaaattattttcattgctttaaccttgggattctttagtaattaacacgcttctcgcttcctctataagtggagaattttctatctttttaatttgcgcttcaagcacttaattcttattccaattagattttagataaataattattcttcccggctcaatttcgacttttttatgtacagtattcttattgcttttttcttgaccgtttgtcgcacttttgttcattgtatacttttctttgaagtgtcatttccggtgcttattttaagcttttcttcctttcttaaatcttttccgccaatttaatttggatcattaattaagtttattaactatttttcacttaaactgtttccatgttcgtctttgtttgtttttagttaattgtggcataatcaaatttttgatagaaaacaattaacacaatgttgctatgacgaacacaaaaagaaattaatactctacagtaattgccaatttgttcaattaattgatgacaaacaaattcgagctaatttaaaattgtagcttataaataaataaacatcaaaaagagcaccgccctcaattagtattaagtaatctcacatccccacgcggggcggcgcggcataataacacacattggctagcggaagaatttcttgtgcctaaaatcaatgccctgcggggatatttccgcatattttaaccgaatttttacacccctttaccccacccccttcccacgcgggacggggggagggagggaggcggaaagaatgaatgaatgaatttatgttagaagtgccaataccaaatttgtgcgttaggcggtgccaatgcccctcgccccttccctttttccccttcacctatggcccctgcgggaatgaatgcgagtgattgtgctaaaattattatttatgccccaatggcattagtttcacttctactgcagtatatctatacataattttataaaaataaactgaaaatttatatttattttgtaaattcttatgttagaggtatttccttgaaaaaaaacaattttaaaaattctttgtttttcttttaaaaaacttttttgtttaaaaaattctttgaaaattgtacaaacaaaataagaagaattttttgaacgaaatttgtttgaagaaaattattttcattttttaattagaaaatctctaagaaatttataaaacaaaaaatttttgcaaaagattttgtctgtcgagggcgggggattaataaatggacaaatttaaatgttcttccgttcattttccacctctatgtaagggtaattattaaaaatgtccgagaccaatttctgtccctgatccgtacacccttttaaaggattaaaaaacattatacccgcgccaaatggcggcgaattttgtcacatgggcatttttgaacgaacactttggcacacaaatttgtctgcctccggcgtgaggattatttcccatggaaatgaaaacgataacggatatcctcggtcttctacatggttaaggaatggagaaaccatactttcataatatgtatacaaaatccttcaaaaatttttttgctatttcttcattttacctatcgagaaatgcatttgttgcattttttacttacgccttatgcttaaatatattatttttttaatttaaatatttttaaaaattggcatttctaattagtgatgtgcgcgaatttttcattaattagctatatttgacgaatttttgaacttttaatttgcaatgttttataagtttacttcaaaaatatttttgggattaatttgacgtttcatactttaagtgttgtgtatagattaagcagttaagctcaaaatccttcttgccaatgacgacatttagacaaatgagacattgacacgacaatttgcagacaaatcgtgcaaaaattcttacaagaaaattaaaaagttattaaatagggatgctttcgaaatctcatctcttagatgctatgacgttagtcaaaaaccaacaaaatgggcgttcgtcaaaaaaccatcaaatgaaagttgttttttttttggtataacttttctcaaagcaacctaattttaaaaatcttgatataattcattaaaaaagcttggtttttgagtttctcaggtcataactttttaaaacttgacgaatttttttgaaattttgcatgataatagaaaacacttagggctaacgaaaaatatcaagttttaaaatttgatttattttaaacgaagttatgaaacctaagtaattcgaaaataagaaaaaaggaagtcgggatttctttccagccgattttggactaatatacctataacaaaatagggaataaatcctttttttctttggttaaacaatgaaaatttcagaactcaaattagagtgccacgggaccgggaccgggccgggaattcccggtcatccgaggtcccggttcccggtcccgtattttgaaaagctcaggtcccggtcccggtagggcaaccgggaaccgggaaaaacaagcactggtaagaatgggggtctaagtgaaaaattagtaatgaaaattggagttaaagggaaaaaattttaaaaatatattaatatattctttaaaagtaacgctgacaattgtgcggatggcctagtggctagtctccttgacttccccttctttcccttgttcaatccctctacagaaactaacatattttgaatttttctttttgtatactcatggctttcctatcgaaaaaatatgcttcctcatagttttattttaattgacacatttttatcattttttaaatgaaaatcctaccaattgagcttaataatcccaaaaccaaccttttttgttgaaaatctgttaacaaattacaatcaaattttcaaaatttcccacggcggcgcctatcggcaccgccggacccctttctttcccaaaaagtttttggaaaaagcgcggcgaaaaaatttatgtgaaacgtaaatctgaatttctaataatattcgatcacttagtccaaaaatgattaattgtttgaactaattaaagaaatttgtttgaaaaattttcattagtttaatttttgctttaacttttggattttattaaataaaacacaaaattaaaagtttattttgaattattttccctagaaataaattaccatttgaattttttt

SEQ ID NO: 6421 - DNA, 2661 bp, Heterodera glycines
  unsure (1)..(2661): unsure at all n locations
aaaaaagttatagcccaaaaaccgctggggcccaaaagtgccggggcccaactgacgggttccggatatttaagtttgatttgttgaatttaattcatttaaaaatagtttttttttcgcaatttaaaaaaaatatatatatttgttctagtattaaatgtcaaatttcgtttatacagtttataatttgaatttacctaaattcccatattttcaaaaaaatatattttttaaaatgtctattttgtaattaattaattaattaattttaattttaattatatatactcacccaatgcttggaagcaaaaagtgagcacattttgaaaaggcttttccccaatttgttcatcaattgttttgaacaaaacagcgccaattacgatgaataaaatggcgaataatattgtggtaaacaggggactgtagcggagcaaaaacttaaaaaaaaattttgctttaacaaaatataaaatttaaaacactcataaatattgttttaaaaaatataacaacattttaggataattaaataaaataaaataaaaataaattcaaattatccaattcgagcaccactaaacagttcgaaaatgttcagagaagtgaacgaagttttaaatgaatacatattacggaatgagctattagtatgatcaggcggtgcaaatcattttaaatttgctattaaagacccgagacaaggcttaacctaaattaggcacctcattttctgattttacgagaattatgggagatttaaacatttattaagaataggtccttattatttccattttattattattaaaatttaatttgtatttttttggaaaaaaagtatgcttctaacatattattatcaatttttttttcacttttaaagacttggaataaaagttttcattgaaaatttataaaatttgtaataaaaaagatacaagaaaattaatattaaattataaattttttcgcaattaccggttcctcaaaattaattattttaatttaattantgaaattgtttcgcgcatttaccngttcttctgctttcacangtttaagctgnntcattnttgctgctttctcttctcgctcctcctcagcttttgctttgatggtggaatcngacagaatgaagacgatcttcgccgaatgacggcctctgnttggcacttctaacattgtcgcacactcttgcttataaaaaataaaaatattcatccaaaatattctattgttaatttatttattaaaaaaaaaaaaaaaaaaaaaaggggggggggggtttttttttttccccccccccccccccccttttttttttttattaaaaaaaaaaaaattttttttttttataaaaaaaaaaaaaaaaaaaaaaaaaaccccccccccccccccccccccccccccccgggagggggggggggccgggggggggaaaggttttctttccccacaaaatttcttttttcaaaaaaaattaaaaaatttttttattttttttgaaaaagggggcataaattaaaaatcaaaattttcaactttattacttaaaccaacattcttttttctttgcattttgcactttttactagcgacacaccaatcaaatcgtttgttgttgtgtttgctatgatatgatgtccattatatttgccagtctttcgcaaatatattctcctctgctgggggtgaaaatgtgtgggaagaacaaacagcattgtttatgcccaagggcttacactggggttttgctgtgttgctgggatgggatgtgcaccccaaaattttgaaaaaatcgctaaaaaaattttcaaaatttttttttcttgaattttgtttcgaaaaattctgtctgaaaatgcagaaaaatttttttctaagggggccagtgaccggttggaagaaggaaacgaactgctccccgcctccccccccccccctcaaaaataatttaaacattcttggtgttattcgatagctccatgtttcaaaaaaaattatgaaatagtactcaaaaaacttatttttcaaaaaaaatctttttttcgtacatcaacaattttaatttacaggttcttcacctctttccctttggagttattttaaaatttgaatgtaaatttagggaactgtttgagaggaaatcccgcggatttttgcgcgaattccgctcccgttcccgacttttttggagaggaatttttgcggaatcgcctgggactcccgccccgcaacgttttgaactcccgcatccgtctcccgtaattttttttactgatctctagtagattgtacacattttttaaaattgttttttttggggggctcggaatacagatttccggttgcgaatttttttgggctgtcggattccgtttactgattgccaaaactttttcagtcgtcggaatgccaatttccgattgccagattttttgagggcgtcggcactttatacacaaaatgcattttcatttgcagtttttatgacttcctttccttgtattttacataatggtgggttctctctacgagatttttctcttaattgttaattaaggccttaattaaagtgtttttcaaatttttgcagggttttttttacaccaggtggaggataaccctaaatttaattttttattgtttttatcttgt

SEQ ID NO: 6422 - DNA, 1907 bp, Heterodera glycines
aaatgattggactttccgctcaaactgcttaacgaaagtatatcaaactttaaaaactgttgtgaatttttgtccccagttatataatgagaaaattatatgtacaaatatttgcagtttaaatgaagtaaaacagtgaaagttttgaaaatagttcagtgtcgaaaatactcagtgtcgaaattacccagtgtcgggattaccggacacgtctaaaagcccggatagcgcccaaaaatatcattgtatattttgttttgttttctcttattaatgcatttcgaaatccaactcgtactgtttttcgcattcgatagcccttaaagtttctatatctgcaggaaaaaaagtcaagaaaattttattgcttttcaaaaaagttatgaacaaaaatcatcgcaaaacgaacccattttcggagggcattcaaaaattgtgccggattataccaagaatatttaaataagtccattagggcaaaactatggcattttttttgtcgaaagacagtacgagttatgtttttccattttggtcaattttcaaaatttgaaaaatgcgaatttaacctttacaaatgaagttggataaaaaattatcagtcgaattgattatttatttggggtaaagtaaaactccccgaaatctcatcatttgcaaaatattctcctatttggtggtcctcttatgtgcgttccctttttcttccgatccgtcgtcattttatgtcaaaatgtttccgcgccttccgtttttggcaatgatttttcgcctcctattggcacttgtccaacccctcgagcccattggcaacagttgaagctgaactggttcaaaattgttttaataaaatgcgattctcgtgtttttctcatcaagtattatccgtaaaaaataggaaaaccctaaaaatccaggctttatccaacgcaattatttttctgctatttgtgtgacatcattcgaaattcaacagcaaattttgctaattgccaaaaaatgaaccgacggtaagcacaaattcgtcatttatttacctaacaaaacttttttcagttggatttgcaacgacgtttggatggacattttcccatcctttgaccgtcctcaactcggcctcaaattggcacttctttcgccacgtttcgatgcattggtggacaaacatttcgatggcaaaagcgaattgacaatttggagaactatcgaaattcgtcgcaagggcattggaccagaaacgaaactttatgtagagatcgattacgaatttgtgccatttccattgcccgaccgtccgttgcccagcaaaatccgttttaaatggcttcggattgagtaattcggaatcagagctatgacaataaaagcatcggattccggacaatccgtcagtggataatctttcggaagacaattctattagtgacggacaattcatcagtgaagaacaattcgtcagtagactgacgttccgtcaaaggacatttcgtcagagaattaaaaaaaaaatttgttgacggattgtccactgacagattgtccataaccgacggattgttttactgatggattcccactggcgcacatccagtagcaactttttccaaaaggcccaccgcttactgtatgccaactagctacagtatattattgttacaaaaacccatcccaattctacagtacccttcccctgctaccgccgccgtcctcctgttggtgttgttgtgctgtcctttttgtgccgcatgaagtcgatcagtctgtcctgcacaatgtccggctcggaagcagcttcatcttcctcatttcgtgactctgtcgaaatggagcgaccaccgccgccgccagcaagcgatcaaatctttttaaaaaaaatttttctaagtagaaaattaacaagtttttta

SEQ ID NO: 6423 - DNA, 3316 bp, Heterodera glycines
attttcatttgctttggccaatgtcagcttttcctttgtccattcgttcaccaattcgaatggcaccatttgtattgacggcacatgaacataaaaatgaatttcgtaactgacggaagaaatggcattggcacgaagaaaatgctaaacaatttgaaaacaaaaaacagtgatttgtcgagattatggccacacctccttgaaattgttgatccaatcaaagtccgtttgttcgttgtaattaccgcaacgcaatcgcttgggttgtccatcttttctcggagagtgcaaccatttggacaatgcttggccagcagaaattgttgaatttggcccatcaaaaccatcatcaatcgcagcgggaaacaaatcaaatgaatggattgaagtcaattggttgagatcgatgagaattgtcggcgaaatttgacgaagcaaatggtccaaatgatcaccatcgtaaaagcgcaagtggcgaatgtttgccgaaaaaattggccaaacaactgtaaatcggtgcctcttttgtcgaaaatttgatgatttgaacgaagaaaagcgatgacggagtgatcaatgtacctaaaaatggaaggaaagcttttattgccataactctgattttaaattactcaatccgaaggtctttaaaacggattttgctgggcaacggacggtcgggcaatggaaatggcacaaatttgtcatcgattcgtacagatagcttcggttctggtcctttgtccttgcgatgaattttgatctttctccaaattgtcaattcgcttttgccattgaaatgtttgtccaccagcgaattaaaacgtggcgaaagaagtgccaatttgaggccgagttgaggacggtcaaaggatgggaaaatgtccatccaaacgtcgttgcaaatccaactgaaatgggaaaacagtttagtcaaataaacgacgaatttgtgacttttaatttaattaccgtcggttcatttttggcagcaattagcacaatttggacgagttccgaatgatgtcacacaaatagcagaagaattaattgcgttggaaactttatttttatataatgagaaaagcgtaaaaccaaaaattctaacgaaaatcacattttatccaaacaacttttgaattttgtttgccttaaattgttgcaaatgggcccgaggggttggacaatatgccaatgggagacgaaaaatcattgacaaaaagcgagcagaaaaagggaatggcagtgcattggaatggaaggaacgcaacagaggagaatatattttgcaaaatgatgacatttgccgggcgttttagcccctacccccaaatcaatcaataaaaaatcaatttgacggattatttttatccaactttcatttgcaaatgttagacgcgcatttgttttttgaaatttgaaaactgaccaacgtaataataaatagggcttacatttttagatttttacctatttacgagaatttttgattttaaaaattatttttctcaatttgtcttaattagggaacggatttttaagcgcgaaaaagtccaaaataagtgcttaaataagggcgaaaaaagcgcgaaataagtgcgaaaataagcatgaaaaaattccaaatgtagaggtgaaatttgttaaaattgctgttttctctatgtaaattagttaaaattaagtcaaacaattttatttactgattgcagttaaaatgaagtacatttagaaattttcaggatttaagggtcgattctcaggggcgtatttttccgaaattttttgggtcgattcttaggagtgtattttttgaaaatttttaggtcaattctcaggggtgtatttttccgaaatttttttggccgattcttaggggtgtatttttgaaaatttttaggtcaattctcaggggtgtatttttccgaaatttttttggccgattcttaggggtgtatttatcatttttattgcatttttgctaataaatttccgaaaaatcgcgaaataagaacgaaaataagcataaaacgctaaaataagtacaaaaacttattttaagggcgaacctctaaaataagcatttttaagcacgaaacgccaaaataagcatttctaagttcgaataagtgcgttaaaacacaaatttttcgaacaaaaaatgtgtttttcgtgcatttctcgtcgagttaaagccgcagaaaaaataagcaaaaacttagaaatccgttccctagtcttaatatttgttgactttttaataaaatttttgtcattttacacccctaagttcggaactttttggcacctattttcccatttttagcacctatttttggggttttttagaacctaaaacctacctattttggcagtttttagcacctaaaaatgtaagccctaataataaagagtcaaactaccgtatttctctaattatatgcaagtcaccaataatctacccctttcgaagtaggttgaaaaataatctccccttctctatttatctgcccgggggataaatagaatttatatttttttcgaaaaaataacttcttttctatttttattagagtagagcgggaccgggaattttgggcaaaaccgggacttgccgggacctgagaagccgggaccgggacctcggtttttgtccgggaccgggaccgcaagaaaaaccgggaaccgggaccaaccgggaaattttaaaaattcaaaaaaattttaaaaatttaaaaaaaaattcaaattttaatttatatcaagtgaaaataatacaaaattatttggttttttataataaattaaattaatgaaaattttcaaacaaattttcttcaattatttcaaacaattaatcatttttggactaaatcatcgaatattaatagaaattcagatttgattttcacatcacttttttttggagcgctttttcaaaaaacttttgggaaagaaggggtccggcggtgccgataggcgccgccgggggaaattttgaaaatttgggtgcaatttgttaacagattttcaacaaaaaaaggttggtttttgcgattattaagctcaattggtaggattttcatttaaaaaaggataaaatatgtatcaatttaaaaaaactatgagtaatcatattttctttataggaaacccacgagtatacaaaaaaaaattgaaaataatctaatttttgtgactttttcatgactttttacactttttaaggcaaaatttgactttttgtgatgaaaattccgaaaaataagccaatcttagagacggaactgaaatttcttagtcattaggactcaaa

SEQ ID NO: 6424 - DNA, 6862 bp, Heterodera glycines
gtaaagctcatagcactgtgaatgtgttcagcatttgatatagaaatcatttttaattatatttggcataatgtttttcttaaatttttccataaaatttattttacattttaatttttaattttggaatttgcctttgcaatctttttaatttcatttttattcatttttttaaaatcttttttcaatttctttttcactcattcgtcccccattttttcattttcatgcgatttgcgttgtaataatatttttttttgatcattttctaccgaattttttcccatattttttattttttatgctctcttttccctctttaaaatatgcacaaactttaggtaattttacgcgtctttccaatgtttcattccggactgactttgacccgagtgccgaacagcaaaaagtcgcggatgaatccgaatttgctgatcccggccgcttgtcagtgtccgacttgtcactttttccaggcctcggcttccacgccgccctcaaacaaaggacaagcggagagaaggcaccaatacggaaaggtgaacaaaaatggggaattatgagcaaaattactaatttattaatgacgattcttatcttagagaatttaaaaggctgagattttagctttgcaacagttttcgcgacgaagagacacgatttatgcgcgatttgaacttgttggtcaatgttttcaagcggcgactgtcctccggcattggcaccgacgcgaagggaaaggtccgactgaattcggtcccttccttaagaaaaaacttcgtaggggaaattgcttatcagggccatgcaatttgctccagcatcatcgtttaaaaatttcagcacggagcgaaaaaaaagaatttataccgattttgcgccaaaaaatgacaattttgccattttcgggtcaaaatttgaaaaagggtgaaatgggggtggtatcgttaggcgtcgccgggaaaaaatttggaaattttaatgaaatatggtaaaaaaattaagttaagtttttcaaaaaatttgtccattttttcttgaaaactttggctacggcctgaatcttccctcaaaattttacccaattttaaggatattatctccaatctgttcggaaatgtgcacgaaatcctcgagttgaccatcaaaatccaccggaccattgacgatgccattgacatgtccgacccaccgatgctcggaatgggcctttgggagttggcggagggctgcgaattcgacgcatacgtccaatttatggtgggggggggggggacaaatggggaaaaaccgaaaaatcttaattttatttttggaataatttcaggaagtctttcgcgaaccccttaacagaaagttggccaaactgctgaaggagacaaaacacatggaatattttgatgtaaggcaacaaattttgaataatcattttctttttttgaaaaataatttacatattataatatttaaaaacggtttcaccttcgaacttggaacaaactctgctcaatttcccttcttaagttttttttttaaaaaaaaaaaacgttttttattcaaaaatgaaaatttctcaaactaaagacaaaccataaaaagaaggaggacacttggaagtccctgctttacattaattttaaaattttgacggctgcctttttttctccgaaaattggcattttcagcttgaagaccgaatgtacagcggcacacccggggggcacacttttcgcatgaccgtcaaatatgttttgcctgcactgctccattcggtggtcgcccatttcaaatgttactccgaatttgtaaaggttggcaattcgttgccaatttaaaatattcgaaaaattcatttatttttcaattagctgataatggaggccagtgaccacgaggcggacagaaaagacttgtacaacacggacatgtacctgaacatggtgacgaaacgaatgaacgatttgagggggctaatgtccgcccaagtgtaagccaaaacaaaaaaagggaggaagacggcaatcttcggaaattacccttaattttgccaattaatttccatttcccgcgcctcagaaatgagagaatagcgaggggaatgcgccgggacaattcgcgctccttccaattgagtgccatccaacgcattcagcgcagcatcgacgggtgggagggcaaagagatcggatacatgtgcaacactttcatacgcgagggcaaactgttccaactgcgcgggtcgacgacaatcgccggttggtgggggaaaccgagaaaaagtcatttttattgaaatggacgaacgaattcagcggaaattgttggaagagtcaatctgtagtcagttgaacgacttccaaaagtctttggatggaaagccgggccaggaaaagctgggaattttacccaaaatgagttttttgaattggccaattcactcttaaaattggttagcatttatgggttttccatttcatcagataacattctgcgcaatcgaagcggagggactgaacggcacgtgttccttttcgaccatttgctggtcatttgcaagccgaacaaaccgatgaaaatgagcagcagcgcccatcaaacgacggccggcaatttcaaattcaaagaaaaactgtacatacgacgctgtgacatcatcgacttggacgacgaccacggtgaataatgccaataatgagttggggaggtccgaaagctgagattgtgccgatttcactggtggggtgatgaccaattgacaatggcaattaattccctcacccctccccctttggtgtgccaatggatgcctttaacaaaactcatgggttatatttttcccaaggttaaattgaatcttgctagttgcaataaatcatgttagacaattggcagaaatgaaaaacgccttcaaaatttgcacgtcggcaaaggctggcggcaacgacgagtacatgtccatgctgactttgttctgccaaagtccggaagagaaggagcaatggatggcaggaatggtggaaatgcaaacggcagggtaaaggggcgggggacattggcacatcctcggaacagacaatcggtccatcctccgaatgtgacatttcatttttacccgatttcgtacacaattgaaaaatgaatttgccaattttttgcaggcaattgtttccggaaatgcgtttgatattatttatagcctcacaatcagcattattttaaaagggcaggaacttacaattagctccgaaaaaggttgataaaattttaaaaaatccaaaaaacctaaatattctgtaaataggtactgtaagttttttcatatcaattcgctgtaaaaatttcaaaccatcacactaccgtatctcgttttcatgaaattctgactcatggacgcattttcgataactgtgcaagaaaaccaaccaatttccattaatagttatacaatttaaaaaaaacatcgttaattcgatttttaaatttctccctttgttttgtcagtgcggtaaaaagaagaataaaccgtataattcgatcacttttttcgcgtctttcattctcttttttcctcgaaattgatctcaatgggccaacaaatcacttcaaatgtttgtgtaaagaaagaaaggtaaggcgaaaaagaacaaattgaaaaggaattaattcttttacatttgtcccattggctggcattgcgcaattttcccttactttttgggcacttttggaaatttttacacatttttggcactttgaacagaacactgcagcgaatgttggacgcccatcagaaagaggaggagaagcgcattccgctgatcattcccacggtttccgagtaccgttacgcggagccggacaccgacgagaacatcattttcgaggattacacccacaacagcggcatccccgtggttcgtgccggcacagtgctgaagctggtcgaacggctgacgtatccgcagtaagtaaatgtttcatgaaattaattctgaattttgcatcgttttccctttgggtacaccgacaacgaatttgtcaaaacgttcatgaccactttccgctcgttctgttcaccggccgaattgttggcacttttaattgaacgctttgtcattccgacgccgcacattttcatggcattggacccgcagcatttgctgtcatccgtgatggcgaactcatcctggttgtttgtttgtttttttcatttttgtaattattttggcatgtttcgttagcaatgattcggcatccctctcaaatggttctctccaacattcgcaactccattcgttcgcccacaatttgtcgcagtcccaacttgagcaggcattccacaaattcaggcaggaataccaaaagcccattcagctgaagtgagtctttattgtgccgtcataaattggcagtgccattgccaaccattcgctgtttctcagagtgttgagcatcatcaaccactgggtgagcaaccacttctacgacttcgagtcggacgcccttttgctcgtccgtctgatcgattttctgagcggaaacgaccgatccatcaaattgatcaccagccacaagaaatggtgcaccaagattcaggtagaaaatgccaaagatttgctggattatcctgccaatgttttctttccttcttaaaacagtggcaaaaacaaaggcatttttaggaagtgataaagcgaaagcacaggcatcaacagcaacaacaacagcagcaaaatcagttggactcggctggtcactcggccgacggcgaagtggcggacagcagcaacagatttaacaacagcaccagcacagccatgtcgtcgtcgtcggcaccgcccgcctccgacagcggcaccgccggtgtcccagccgcagcgaatgctgcagcgactgcgttcagtgtacagtgtccggaagtgagttgggacggggggatgggatactgtagcatacagtaaaataaatgatgaaagtgaatcagaagacagacttacagtttaaactccatccatccattcatttttttgtttagcccgtttggcattatgccaaggagggcgaagtcgacgcctacgaccttctcacgctgcacccattggaaatcggtcgtcaggtgacccttctccaatttttcctctaccgcgccatcaaacccttcggtgattttatatattttttttgtgttttcaaatccgttttaagaactcgtcgacgcggcgtggacaaagcgcgacaaataccagcggagtccgcaattgctgaaacttatcgaccacagcaacaatgtgaggctttctttctaagaatttgcctaatgcttcccttggctttttagctcacttattgggtcgctcgttccatcgtcgagaccgaatcgttggaggaacgcgtggaaatgttttcgagagtgttggagataatgaccgtgtttgaggagctgaacaacttcaacggcattgtggccttttttgctgcgctgaactgtcaaccggtgtatcgattggacgaaagcaaatcggtgggtgaaatgggggcggatgagtacatatatctaaaaaacttgccaatttttgtatttgtttcagcgattggacaaagagaagaagggatggtatgaccattatgtgcagttatgtggcaatggccatttgactgaactgctccaaaaactgcgctccatcaatccgccatgtgttccatttgcaggtgaagaaaaaggcgaatgccaacaaatcaatgttcattaattgtttgtaggtacatatttaacgcaaattgtgcttcgtttggagagtctaaagcaaatggagggacggatgaaccaacaaacgacgaaagcggccgaattggcaatggcaaacattgaacagcaacaggtgggcaatgaagaggaaaaggacgtggccaatggcacggcgcccaaacgggcacaataattgcttttgtcgactccgaattccccgatttgccatttttagacttgtgaacagaatgccgactccgcttccgtcgccgcctccgccatgtcaacggaacggtcgccgctgcagacgcccaaagggaaggcggacgcggaaggggccgcgcggaaaatgatttcctttatgaaatgccgcaaaattgcggcgatcattcgcgaaattcaaatgtaccaaaatcagccctattctctgcgagtggagccgaccattcgggtgggtcttctcttttaacatttaatcctcaattttttgattgatggcccttaatttgttgatattttttaaattccatctcagcaatggacggggcaccaaacattcatttgccaattgcttttgtttactctcccatttcatttcatttttcgtttttccacggcttttcctcctttttatgatgaatgccctttccctgctgttcacctttgcccctttctatttttgcatttaaatttaaacaaatgaattaaatgccattaaattagccctcaattgggcggcggtgtcattcgttcggcgatccttcgctttgtttgttctcttccgccgccttttcgttcgtttgtcggtgtttctcttcggtgtgtgtgacgtttccaattgtgacctctccccaaagcattggagaacccctccggcgctctttaccttcccatcccttcctcgtctcgttttcctcatttccggtccctccctcccccccccccccctttcccccttttgctcccctctcccccattttatgcgattcttccgaaatcgtccgtcagttgttgctgtttctgctgcatgtaattgtggtgaattggccgaccacatcagtggccaatggtggcacatttgaccaagaaatcgctttggtggacgcccacccccca

SEQ ID NO: 6425 - DNA, 5450 bp, Heterodera glycines
ccttaattctaagcacaactgattatactgtataattctaaaagcaatggttatgtcaagtgaaataccacagcaaatgtttgcaatagttccgcttactgattgtccacacattgcccaggtgcttttgttcgttctagtacagttttatacgtccagtaagacaacttcagtttcttaggcattacttttttatttcttggtcaatgtaactgaaaagttataaccacctcacctaattgcatttgccgtaaatgtttattagttttccattaggttgccagtgtccccctgggcgatgtggacgttaaggccaaatgtaacaaatgtgcaaatatcggtgagatactccttcagttatttttttacaaaacgtttttaggtgaaaattgggtttgtctcacgtgttatgaggtgattagctgaactattaagtggtcttattcactgaaaatcgcatttcgtcaggtgaattgttctcgcttcgtcgatggccatgcggtggatcattccgaaaagagtgaccatccgatcgcactgagtttctccgatttgtccgtgtggtgttactcatgcaatgcctatttggacaatgaagcattcgctgctgttatcgaagccggacgcaagtcaaaatttggacagaacgatggcccatcgacgtcggaaaaatagtgaaaataacaatgtttgattctcctaagattattattttattttgactattgcgatgcaaaaaaattcactgcgattagcctttgctctgatattgtaggatatcttttttcattcatcaggcaaaatttgaaggttttataatgatttccttaatgatcccgaattttcaaaaaaaaacaaacaaattttttgtgaattgataacaaatcataaaagcgttaaggtggcgtcttagggattctctcttctgtcgctttggtcattgcccccccccccctccctcacttcggacctccgaattctccctgcgagttgggaatggcgggttcgtcgtccgttcgctgttcgtctctctttgtttgtttttgttttgctccctccttcccatctttccctctctctctcctcccatccgttttcccctccatttttttctccatcgatccattggccttcgtccatttgtccccttttttcaaatttcaacacctccagcagctaatggatttcttctcgtttctgttcttcattgcccaactgattttcactgattgccaatttcccgaaccgacgcgaagtgtcgatttgtgggactcttttgggtgaatccgccgaatgtccctttgctttttgtcatgccttttcctttttcagcacttctactgcgaatagtttcggctcggttcgactgtttttccgtgtttttcttttcatttgtgcctttaggatgaatctcgggggaatgtgctggtgcgtctttcggttggcgaagtggtcggcctccgtgtgaccattccaaatttgccatggacgccttggcaagacccaaacgagcaaatcccagccgatcggacccattctgaactgaatcccctcccgggcaataataatgtgtccgttttcgcctttttgggaatgccttacgcggagccgccaattggcgaacgccgttttcgggtggaaaagggcaaaagaacgcggcactcatttcattggcatttgtttaggcgccccagcagctgatccgtgcgtcacttggccatttgtcctcttttagtgcccctccccccccccccaattggacgacagatctccccggcccttcgcccttcttggccaacactcttcccagtgcttgtgcccaagatatcgaggcccacccgtcccttttcgtcaacgacccctttccctattcggtcagcgaggtcagcacaacgccaaacgctttgagcagcgactgatcatttttgaattccatttcccattaaggactgtctccacctgaacattttcaccccttctgtggtctctccttttcgccttttcccgtccattctctcctccatttagaagtctttttcctcttccgtgtcaaattctctccccgttttggtcagtggcaattcaattcctttttgccatccaaattcaatgtaaaggtgttcttccacggcggcaacttccaaacgggcaccgccaacgattggcctggccacgtgttggcttctcggggcatcgtcgtcgtcgcggctaattaccgtctcggctcattcggtcgtttcccttagattagcttcccgtttccttaattttaatttttgtccttttcatttgaccatttgtcatgcgtttagggtttatgagtttgggagatgagttgaccggcaattatgggatcaaagaccagcgaatggctcttctttgggttcagcaacacatcacttccttcggaggcgacccgcgggctgtgaccatcggtcattccgtttgaaaatgccatgctcacttggcattttgtttttagttggccacgatgctggcgctgtcagtgctggcattcacatgctcagccctttctcaaaaagtacagcagcacataatgaattccgctttcacctcttttagacctcttccgcggtgtcgtggccatgtcgggtgccgaagtttcgtaccattcgatcattggaaaaccggcattgggtgccataaaaattcccaatggagttgaaaatctttttacacagcctttaacaacacaatgaaacttggccgttttctgggctgtgttcatccggtggcttcggaagtgttagtggggggagggggcaaagggaggaaaatgggggagggtaaaggcgcaagtgaagggggggggggagaggctgtgcccccatattagaattggttgggtctttcagctggagttgcatcctcacccgttccaccgatgacattgtccaggccgtttcctccaccgccgtcccttccattccggtcctttcatccttttatttccattatttgctttaagctttcagatcgaattcaaccgttacttgtttttgccatcggtgacaattatatatttttcttataaaacccattaacacacttcaattgggtttatgggtttcggttggcccttcgtttcgccgtcaggtccctttgatttttctccgcttttgaggtggatggccatgaactcacagcccacccgctttggctgcttaacaatgtgcgcaacggaattgtcaatgtcttttcggtgcccttcctcgtcggaatgaatgcacaggacgggaccgaggccattttggaagaccgcactttgggtgggacggcactctcccaatttggcactttgttcatttgcacaggcgaattcaccgactttctgcaaatcacccgccaatacatgcgttccttcatcatcgaatacgcgttcaagcacaactatacgatgaacagagaagtgccagcgaaagaccagagcagaataacgatctgatcagcgtcccttcaggcggttatcgatgccatcgaatccttctacacttattggcccgatgcttccgatgtttggcaaatccgacggtggttcatcgacttgatcactgatgcctattatactcagccgatcactcagtcggctcatctccactccgataccggctcccgtacctttctctatgtgaacaattacaatttctccatgcagcgtgaaaacactgtggcacataacggcgaagtgcccaattttccggcatgggccggtgaatccggccttttatgataggcatgacttccattatcaggcagctgtcacgactgcgatttgttccttctctttggctttcccttcatgccgcctgagttgctgccaaaggcaattcgatcggtcaattggacggacactgatcgaaatgccagtcaactgttctcctcatttgttcgccagttcaccaaatattcgtttgtcctgccgttcttccatttaattccaaaattcagtgaccccaatttgccaaatgatggcacttggttggcccatcagccacgagcccattggtacattaactttaattactctcgcgggcaaagtctgacagtgccgggcactctctcccgggactttcgctttgaacaggtcgctttttgggagaattatatccccgcagtgagtttctcaagtttttattttaattggaaaatacccattaagttggtcaattatatgaccaccactttctccccggaggagggaagtgttcgaaatgagatggtgttgttcaaagtgagtggttggacttttcaaatggcttgttgtggttatggcctaagaaactgaggaaggcattgattggatgtctaaagtgaattagagccgcgaaatatgcgtacacctccgtgctattcaatcctttcagggattgttcggtgtgtctctgttggttctcatcgctcttttggtgctgaccctttcattgggttacaatgtgtgcactcggcctttgagagagcgttgtggaagatattcggaatgggaggaagtccaagccgaagagagaggagcaaatgtggaaatggcaaggaaaagcacgagggaaagaggaggaggagaaggagctggacgggtgtcaagcttatgaaggacgactgacgaacaaaaaaaaacaatacgggcaataacttaatgaaattcagggaaaaccaaacaattaaaattgaaaatattccataaaatttttcgtaaattataaaaataacttaattgataaaatcgaaagacacaaattatatgatgaaaattttgaaattaagaggcaaaaagcaaaaggagagagaaattgagagggaaatcgattgaaggaatatttttagggaaacattggaggaaagggggggggggggggaatgaatgcaattgtgtacattttcctgcacatattttgtttaagtgtttgttatgtgagggaaacagagaaaaaagatcaaatcgatcaccaaaatttttttatgattaatccgagcacaagcgaagcgcattcattttaatgttcgaattcatgctttttagactacatacaatctcctgttgtccaacaatattaaatgataacagtcaaaagagaaaattcttaccgttttatttcgtttaatttctcgttcaatgtggcccttaaagtttgttgccgaatgtgaactaacagtagagaccggacgggaccgggataacgccggaaattgccgggactcccggtcccggttattttggacaaaccaccgggaccgggagtccctcccggtagaacgggagtcccggtcgatttcccaagtcccggccatttgggccgggactaaatttcaccagtgaaactgccccaaatttgaaaaatttaataattattttggcgaaatgtttttatttcaaagttcgaacatacaacttaaggatttttttaaatttgtacaatttcaattgtaaaaagatc

SEQ ID NO: 6426 - DNA, 1419 bp, Heterodera glycines
gtcccggtcgattttccaagtcccggtcccggccatttcaaaattccaatctctaactaacagtaattaaatgaatttaattttgctaattaatttgtttggcgttgtttagctttgtccgcttttcttacttttcattcattttccgtttgcttccttccattaattaattaggcacaccattttcttttcaatttctctttctttgtccttttcccattttttctacatgaattttattcattctctatagaaacgctttgagtatgttatgtgttgtcaagaagccttttttgcgtttccttctgcgcgtatctctcccccacccaatcatttccatcgtccctttcattttcatttattaaggctttttccccatacaaatgtcattttctttgcttcgctttgcttgttttgcccacttttccctctctttctctcactcgtttttaggccatctcaacaacaatgtttttcaacaataatttccactaaaactggaaaaataacagtcgaaatcggaccactgataaatagggatgatatttttaggttttaactaaattttttgctcaattgttttgaagaaaggagctcaaaaaacgtatttctgcgtttaaaattttcgattatgttgtcactttcggtcactagaaatcactattttggcgtttcgtcactaaaaatagtgaaaattagagcctggagcaggatcgaatcctgcgcagaattttgcaggatcccagtccgcaatcctgcattttttggaaaatgcaggattaatccggccggatccggtccggcaaaaaattttgaattccaatcctgcaacaggatccgcaaatttgatttttgtgcgggatccggcaggatccgcatacattctttgaaaattttaaaagacggaatgccaaaatttttgaataaatttataataaaatcaatcaaaataaattcaattttcatctcaaatttccgggccaggctgttttcgcatggccgttttcgcgtgggggtcgtttttgcgtgagtgcatctttaggactgaaattggtcgcatatctgccgaatccatttttcgaatcccgaacccgaattcgaacaatttttataactttttctctttttatttcttgcggctgatttcttctataataatttgtcagtttggtcagatgtgcgtcaaacgcaaattttttttattaaaatacatatgtagtataacaaaaaataacaaatttcagaacaaactaaggcaaactaaggtcgcatttcatagtttcgggaaataccagagcgaaaattgttcatgttttcgggattcatattgacatttgcataattggattcccggtcccggacgaaaatcgaggtcccggtaagtcccggtcccgatttttgtcaaaattcccggtcccg

SEQ ID NO: 6427 - DNA, 1088 bp, Heterodera glycines
acatttgggtttaaatttagtttcaaaaagagtaaatctctgtttttggatgtaaatgtaattaaaaggttaaattttcccccaacccatcaaaaaaagtccaatttttaatcaaaaattactacgacaactataatgacgccctccccccccccaaaaaaaataatccatttttttttgctgccgcccggcaagcgcgtcgtcgcgtcgtacgcgcggcgccatagcactcacttggacaagcgtgtcaatggagcgtccaattgtttgtacagccagctgagcgtggcgcgcctcgccgccaccgcccgggtccaccaggcacagcacgcgcatccacgcgcgcagccacagcgcggcattgccagtggactaaaatgggggaaaatttatgttgatgatgcttttgtatggtgggggattttggtggatgcttatggggataatggacgaatgaggtaattaatgcccgtttaaagggcataattaaaataattttttcgctttgctatgatcaattcgaagcgcgcactgctcaactcaattgccctctttttcttttcctcttccgcttgtgttggcactttcccactctctctttctctatctctctctcccatttccctcttccctctctctctggacaccatgaactgcttgacgaagcgtttggcaatgttctaggaacaacgctttttgaattggaccaatgccaaaacgtatggaaatgcagggaaatgacaatatattcaatttgtgggacccatccattggtgctggaaaacgcaaaattctagaaaatggaaaatgtttctcggtggcgggggcttagaaactcaggggcggcaaaattttataatttataattgcttaaatcaccccctttttcgcttccatttttttttgcttgcctgaattacgccttggacaacgtcgccgccgctgccccctccgttcgacgcaccgccgacaatggcacagtggtgcgagtcttcttccgtcgccagaatactgccacttccgctaccacctgtgtaagattggttaccaaaaaaatctgagaagagaacccaccccctccctataag

SEQ ID NO: 6428 - DNA, 3867 bp, Heterodera glycines
gagtgctcacatcgatggcaaaactggaaaaatgccaactggttggtgtcaaattgaaaatgagaggaagggggtcaaatgatattacaaatttggcaattattaactataaaaaatgcacttaaatgcgtttttattccctatggcatccatcagtcaaattccttttattttccattcaaaaaagttgaaaatttttagattatcaattaacaaatttccaatgcctttaggaaccaccaaaatacatcaaaaatttaatgaaaacaaaattttttaacggttatcttttcaaaatttaggcgaacaaaattgataggatttcgatgggttttagcgggtccaaaaatgagtttacccttccccattcattttcacggcacacaaaaataaacaaaagaaatcattaagccaattatttttcaaaaaaagtgcatggctctggaaagtcaaagatgcattgatacgaaaacccacaggttcaggacgagtgcccgcgtcatgctgtccaccacgtgggcccattgctccaccatttggccccaaatgcacgcgcggaacaccgccaacgcgtcgtcccacatccgttgctcgtccactaggcgtacctcgcggatgacgctgacaaaaatgtacacggagagcagcgtgcgggcgagtccgccggcggtcgcttggccaaacgcgtccgacttggcggtggtcagctcgacggcggcacccaactctttgatcagttcctggagagacaaacggttggaattgttacgagcttgtcccatttcattcattcacttgcgtcgtataattgacggccaaaaaactttgggcctaattaaaaatggtggtttttaaaattttattaaaacaaacggaaaagactttttaagatgatttttaatctgaaaaattgttcccggtgattttctgggttgctgaccacgaatctgacgccaatttaaccaatccggtcactattggcggttttcatgggtttcagacgtcgaatctgacatctaatttgtcaattccggcccctaatctaactgatcatttcgagttcttggaattcgagttagtgatggaacttgtgaaaatgggtgcactctacgcgtgtcccgacatttgcggccccgacttttgcggcccgacatttgcgcctttgtccaaaatctggttcaaaactaagttttttcaatcactgatcgcataaatagctttaaataagcgattaaaagtgattgtacatgatcatttgatcttcaaaaaaatgttgaaaaattaataaaattttcaaacaaaaaattattgatcataatgaaccataaaaccgtgttttcttaattttaatgcttattaggctatcaggggttgaaaaaattcaactttgagtccgattttggacataggcgcaaatgtcggggctccgcactacgcccccccccccccccgaaaatgctgatttgtgagagaaaatttcgaaaacttttacgaaaatggccatgtccttacctgccacacagttttggagagcggacgggctaaaatggtgctggaagggttggccaaatcgcgcgcaatttgcagaatggaatgggcaattgtgatggcggtctgcaattggtgtgaattattaaacaggcaaatggaagaaaaagtgttggaccattcaaaagctgctgtatctatgatgctaacaatgatgagaagtcttaaaatttaatgcccgctttttcataaatatttcaaaaaaaaaacaaccaccaaaaagaaaatgttggaccaccgacctgcagacgatcgccaggtgaactcaaatagggcgagcggaagaaggagaagagcatgtgaatgagcagcacggaccagtgctcaatgctgaccacgcccgactcgacgaagggcggaaactcgcgctgcaacagccaatggcggaccaagtccagcaccttttttgggcaaatagaaagtatttagattcctgatttgtgagggagaattggaggaggatgagaagtaaaaccaatgcaacgaaccgcattcaaggaccaagacaatgaatgcattgagataaactgaagacaaaaagcattgcttttccaatttttaatgccaaaaaccatagccagcgaaaataaatggccaaaaaggttcaacttacggggtttaaaaaattttgggcatttcgcaaaagcagcatgtaacctatttaaacaaacacaaataaccgataaaaatgccgaataaacagagggaccgacgaaataaaaaaatgcaatgaacaaattgctttgcaaaccttttgaatgacaatgcaacaggccaacggcagacggaacgcctcgcgcatcagagtcaacagcacattggacgcccgttgggaggagaacaaagccttgaaattttttttaatttttgaagacttaaagaccatgaagattgaaattttgcatatggaacgattggcattaaaacccccaaaaatgattgcctgtttgaacaacgcgaggctgggcggcggagcggcacgtccattcgcgccggcgttgaacttggactcggaagcgatgttgatgatccagcggatgagccaatatctgtgcgtgaactataaaaactgatcggtaaaaagtggaaatttttagtagagaaacagaaaaatggaagcggtacgaatccgtcgaaaaaacatacaaaataaaaattttaaaaattgttccttaaaaattttcagaattttctagccttcgaaaagcaaaacatttttaatattttattggaatttgcattaattaatcgggggagtcaagctgatcagtgcagtaacaaccaatcacctggcgatgatgatcgggtcaacagtgtccagcattggctgcacaatggcgccgtccgcgtcagtgccggtgccgccgccctcctcctccgcctcatcagctgaggtgccctcccagccgccgaacacgtccaccccgttggcctccgcgtcggggaacacctcgaaaatgtaggcgacaatcacgcggtccaacatgaagctgacggtgtccgcacgccgtgccgggtcggcccagtcaattttggtcgtctcccgagtggtgtactcgagaaatttgtccaaataaatctgaaaacacaaataaaattgggtgcacttcatttccctctggacgccccgaaaattcattaaaaaaaaattgcccgtagaatttttcaaaaaaaacttattggtagcgaaaaatttacgagcggtttttcattccaaagttttccaaaattcgctgaagtttcttaattttttttcgaaattcttatttgttgttcattcacctgcaggttctgtgcccgttcccgaaatcgcaactttgcggacgacgaatttgtgggcgacgaagacaccgacgaggcggaggaggacgaatggtgctgatgatagctaagctgagacgatggttgttgatgatgatggtggtgatgatgactatggtggtggtgttgcagcaacagttgctgttgattgtttgcgccgttgttggcattgccggcggcggcggttgacggctccacaagttcgggctgtacaattggcagtgcgcgcgcgggacggacatcggcgccggaaccgccagcggaacaaattggcacggaggatgatgcagatgatgaaccagcatggagatgacgagcattggcggatgatgctgttgatgatgatgaggatgggacgtcgtccacaaaaatggaggcgccctcgcaataggactgaaaattggaaaaattgagggaaaatcggaggagaggggattttttgttgggaaaaaacgatgaaataaaaggcaacaaataatggaaatatacaaatgacaa

SEQ ID NO: 6429 - DNA, 2348 bp, Heterodera glycines
  unsure (1)..(2348): unsure at all n locations
aaaaatgcccgtagaattttcaaaaaaactaattggtagcgaaaatttacgagcggttttcattccaaagttttccaaaattcgctgaagtttctntaatttttttcgaaaattcttatttgttgttcattcacctgcaggttctgtgcncgctcccgaaatcgcaactttgcggacgacgaatttgtgggcgacgaagacaccgacgaggcggaggaggacgaatggtgctgatgatagctaagctgagacgatggttgttgatgatgatggtggtgatgatgactatggtggtggtgttgcagcaacatttgctgttgattgtttgcgccgttgttggcattgccggcggcggcggttgacggctccacaagttcgggctgtacaattggcagtgcgcgcgcgggacggacatcggcgccggcaccgccagcggaacaaataggcacggacgatgatgatgctgatgatgaaccagcatggagatgacgagcattggcggaggatgatgttgatgatgatgggacgtcgtcaacaaaaatggaggcgccctcgcaataagactgaaaattggaaaaattgagggaaaatcggtggagaggggattttttgttgggaaaaaacgatgaaataaaggccaacaaataattggaaatatacaaatgacaaaggtcgaaatgaataaatcaaaataggtccaaattcattttaaaaatcggaagagtaaaagaaaggctattttgcggttaaatttttttttgtacaatttagtttgtaaaaaattttctgcgccatgggaaaaatagaattagccatcaaaaaatttgtgaccaaaagtttcaaaaaatatggaaaaattgggatccggcattgccgttaggtgcagcctgtgaaaataaaggaccaaatagttaaggaaatttagaaaaattttaaaaaaagttgaccattttttttatttttaaaatgttttattagggtttcagcagtgttaattttaaaataggactcaaaaaaacgaaaaatgaagcccgaaaaagatttcgtaccagtaaaagttggtcagattgggcccggttgcgcaagggaaagtgcggcaaacagcacttgaacacggtgtccaaacagcgcgttgtgtggccaaacatggccaattcctggtaccagatcaggaacagacggatggccaacttgcgcaccgccaacacattgtccggatggagtgccattttcagcacaaattcgatgccattcttttgccagcctaaaaagcgaaagtaaatggagggagtgagacaggaaatggagaaataaacgcaaaaacgaacaaatattcgccattttacgggatggttttctataattggacccaaaaactgtcacaagccaaattcgcaatgtaagaaaacaaatggatgtgtttccggctggttttgttgggcagcgtcaatgaaatttcaaaatttatagttgaattgtaaaaaatttcctaaaatcgaaaccacaacccaagaaaaccaatttgtatgaattaagcgtttccaacccaaatcaagggcctcgaatttgcggaaataattattgttcaccctttccgacaagttcgggtgcacaacacatggcctgctccaggatccaaagtgcggactcgacgtcggcgatggtttgcgggtcgacgatggccgcgtcgtaatgggcgagaaaaagcgcatcgatcaggtggaaaatttcgaaactgaacccctcgaagagttggcgcctttcctggaaattggacagcataaatcagtggcataaacactttcaatcgactcaaaatttttaagatttttgttaaacaaaaggaactaccaggaattaaatgttgtgttaaaccaagaattctcaaagaaactgaaatacccagtccattttcagtctacgaattgccatgaaatccaacttttcgtatgcgttcgattattgcattaaaaatgcaataatgccccacctggacactcaggcattcgtaggcattgcggaaatgttttgctctggacaccgggtcccggccccactccgcgaagcggttcaacgaattctgcaagtcttggtgcggctttttccgcaacatttttgctgtttttgtcaccccaaaaatgaatgatgatgatggtgatggattattcagcacgcatttttctcatcagctgaaaaagcgacggtgtttagtcatccgctgacaatagacaaaaaatgaacgggacgacaaaaaatttaaaaaaatgcataaggtaaacgaggaaatgggagcaaaaatcaaaattcctgtaaagaacaaagtgaaagaacggatttttaatagagac

SEQ ID NO: 6430 - DNA, 1640 bp, Heterodera glycines
attttggcggatgcaacatacaacgacgatgccgaaattcacgatgttatgacggctcttggtctgcaggtcgaaggatatgcaggaaaattgaaggactacgaaaacacggaagattcaatcatgaatttcgcttagacttgttcgatcccaatttttacccttttttattcattcattttttgaactattcctttttcctgcaaaatttattatttttgttatttgtttatgctattctgataaatcgttaatgaattatgtgttacgaagccttaaaaatgtaattttccgactttttcactaattttttagcttgggcgacatttcgacgcggcgacattatgacgcggtgacattttgacgcggcgacattatgatgcgacgacattttgacgcggcgacattatgacgcggcgacattttgacgggcagcgaaaaaaagaaagaaaaaaattgccaaaaaataaatggcgtaaaaaaacaaaatgccagtaaattcaaataaaaaacaaagagtctttatgcttgatcaaatgcctaatcaacgtcaaagcttccaacccacttcaaataagtcaatagatgttttttagagataatattttaaatttagttagtatttactattttcagtgccttatttgcgttgtttagttttgatcacacttgatcagccataactcgcttcattccctataaaatcgaataattttggtatcattcgaaagatactgaaaagaaatagcataggtaatgatgaaacaagaacggtacggttcacaacaagtcacccaatcttattttggtactaatggagtttgtatcccctacttttctatatttttttttgtacgaattgtttttagattaatggaatgagtgatcgcaacgcgtggccacagcaaaattcaacccgacaaacccgtggcaaaatcgcttaatatgtgcattcatcagaagcagaagaacggatgtgcctttgtgtgaacaatgagcagagagacgagattgaaacgatgctggtgccataaaatatagatgaaccgacgatatgattgatgatatatgagataaattggattcatatttgttggtaaattgttatttatgccattgcatatatgttgtatccgtatgcataaaattaggattggatgaactgctgtgaatcgaatcgtaccgctcagtttctcatcctttcctatgttatttccttttcagtttggcaaggatggtccttggaatttggccctcttacttgaaaatatcattgaattcaaaatgtccttgaaaataagcactcgaaaaattcaaaatgcgtatataaagggaacgcattgaacaaaatgctctcattttttgcgtccgtcaatagtttcttcataaaattaaacattaatataattcaatcatttattataaaaattataaagacaatgcgcttcataaatctcgagccacctttaatcacttccttaaaatattatagaaattcgaaagacaatgcgcttcataaatttcgagcttccttttaatcgcttccctaaaaaggaagacaagtgatttcaggatatgcgcagataaggtgaaaaattctatatttttctgcaaacattataaaaagtgtctgtttcttg

SEQ ID NO: 6431 - DNA, 3980 bp, Heterodera glycines
  unsure (1)..(3980): unsure at all n locations
aattgggccctctttcttgaaaatttgaaagtatccttgaattcaagaagtccttgaaaatgagcatttggaaaagtttttaaaaaaatcaaagaaatttgataaatttttgtaattttcaacaatattttgagtaaattatggcattatgtcaataaaaatgtaattttttttctcatggttgagaatttttgaaattttgtggcataaagtcactatttttcttaaaaaattagcccaaaatcgcaaattttggtcatttttggacaaaattatgtaaaaaaaaaatgaaaatatatatgaaaaaagttcaaatatgtaactggtgacggatttatttcttgcgtctgattgagcagtaaatatgcaataaaaattattattttattcatttttcaaaataataaatatttttttgctattaaataaaaaattataattcatattaaagcataattttattttgcattgattatattgatggatggcaaacgtcatttgcatatttacaacaaaattgtttttttcatacaattaataatatgccgaattacgtcagtaataaatattctcattgaattattacgtcaattaaatggcaaattcaaataaataaaaaatccataattagggctgtcgacagtcaacaattttgatgactttataactaatttaaatattcgaaggtaattgctgttttttagttgctcaaaatcatcggacctggtcagtttagtatggccgttttagtcagggggtcgttttagtctggttagctgttttcacccacaaattaattactttttataaaatatcattttttgtcgagcatatacatttaaaatttctgttcacctacaaagaagtgtttgcgttgcgagtttttcggacctaataacaaatgcaaaggtgtattcaaaaataaaacaaagaatatttttttaaattcagcctacacattgacattaatgctaatgtcctcaaaattattggaagccacacatgcgacatgattgccgaacagtggagtgtcagcgacgtgtgacccagctaaaacggcgtgcagttgagacgtggaaagcgccggctacaattcgtgcgcaagtcttgcagaacacaacaacatcaatgttagctgcttttccgaacaaagctgcgacaaaaaggtcaacttttcctaatttttatgccaaaatttgatttgttcatttattttaggttataaaacgtgttcgccgtgacgaatatgtgccacctgctgtacaactcagtttggacgctgtccacaaaggtgaaaaaatgaaaatcctaaaattccactaaattctgtattaaggcttttggtgtttgctcgatcttcgtcttcacaatggatctgtattatgaaaaatgtgttcgcagacggcactttcagtcggcgccacctttttcaggtaaatttatgtcctcgcaaagtaaaagcctaattttcatatttattttgggttttaaggcgaattaattggattttgattacgtactgccttctcacttcaagtgtgaagcgttgaacacgtatgcctcaactgattgtcaaagatggccgaatttttcgcctgaaacttttcgttggacttcgaggtggtgatatcgccgatgcgagaattcttcgactcttacggacatgccaatgtcaatgttaatcccgatatcatcagcgattttctcgttggtacattatctcgaatttatgaaatgtgcccgtaatgatttttcaatgttttgtttttttattgtaaatacattgataaatatgttttagtattaaattaaacatttttcgaaaaaaaatcagattagaatccatatggcacaaaatcagcttgccagactaaaacgaccccctgactaaaacgtcccctcagactaaaccggccagactaaaacggccagactaaaacggccagactaaaccggccagactaaaccgacccctcccgacccatttatgcctgggttattcaattctaacaacgaaatacgcaatgatgtataaaaattaaacattaatataattcaataatttattataaaaattataaagacaatacgcttcataaatctcgagctaccttttaatcacttccttaaaaaggaagacaagtgatttcaggatatgcgcagataaggtgaaaaattctatatttttctgcaaacattataaaaaatgtctgtttcttggcttctaaggtccaaatcaatccttttattactggattattcaatgcaatcgatgcaatttgcaatgatatataaaatttacccattaatatagaattcaataattttttatacaaaaacgacggacaatacgcttcataaatccaaatcaatccttttatgccaggagtattcaacttgaggaacgaaatgtgccatgctctgcaaaaaatgatttgtggccattcagctgagtaaagcctctccaattggtccgcatgaatcagaacttttctgattgagtttcccgtcatgtccttttttcctgaacacttcccctcctggcccctgatgctccggaaaaattcgttcgcaatttccgcgttttccgtcacttcgagctctttgataagagcatttccaatgccctggaagacgtgaaaaggcgccagaattattcgttcaaactcaattgattgtaaaagtggctcatcgacagttcccctggtgagcgctcgagcagcagcagtcggtttttctccattttccacaagtcgtccaaactgctaggcttacttcaaagtttcctccgatgtcctcatttggcacttttcgcgtccaataattggtcctggcgacaatcgcaaacgggatggaaatgtcgtaacggcagagccacagtgtcaatcagtgcccacaagaagctcagatcaccgccgagaaacctgaaaaattgagttgactccagaaaaaatatgttaatttacaatttgattttttttgcccgcaatttcattcaatttgccgatctgttgccaaatgttgccgcagaatttgatcaaattttcccttttgtccttcgcgggaaatgctgccacgatgaaattgttggccggagaatttgcatgtgaagtatgggccaaggaaatggttatttttgtgaagccttggccgttgtcagctggtcattctgcgcctgttgttccaattgacggctcagatcagcgatcattgcgtctctgttgcggacctgcagtcgtagaaagctgatcgtttgttcctgctccttcagctgtttgtccaactgctcggtttgtgtcgcggcgtcctcataagccaaatccacgtccgttgccttgtccatcattgtcaaatccatgtttgttgcattgtcggtagtttttggacggaaacccacatggcgcctgatcggagtcgctgacaatggccttgggcttgaacgtggtccttaatttattttttgcttcaaaatagtgattttttgacttacgaaggtccggagttgacgttgacggcccattttcggcggcttgggtcgatgtcccctctccatctgctgttggtacggcttcggtctgctttaaccctgaaaaatgcagtgtttttaaaataaaattaatttgatcaattttcgtcactttttggggttgatccagtttttttgcatgctcttggcgccattccttccgttttcgctttgcttcattccccgaattgcttagtttcattaatttatcagtttttttacgtgtaataacatttaaagcctaaaaaaagttgtgaatttagttgaatttttgcctggaaaaaatttttcccaattggtaactttttttgaaattttgcataggccaatattttgaccccctctatcgaatccctgtttattttttcgaagttatgtttttaactcgagatcggctcttctatttttactaaagggaatccccanaaaaattttaagttttgcaaagttttgg

SEQ ID NO: 6432 - DNA, 2391 bp, Heterodera glycines
ggaatcggcagaattgtcctcccccgtcatttttctgctcgaatgaaattcagcagcaactgccgcgttcattgtggacaacatcctttggaaggcatggaatgctgcggtaacactgacaattagcataaaacaataaaattgccaatcgagagggggagggaggggcaaagagttcaaaagtggcactttgtgtatgtgcgtgttttgaattaaaaacatagaaaaggctctaatgcactttatgagtccaattaaggacaatcccaggtttttatacaataattttattcatgttcgaacaaactatcattttggcatcattcgaagcacaaagctaaagtatataaagtcacagcatttagttaattatcaaaaaagatttgatttattaagtaattgctgattattttggtttgtaactttctttaaatgttagaattctcttgttttctcctattattaaatgatcggacacataaaatacctgtggactcatgactcataaagtgcattagagccgaaaatatgccatttaattggtaactgtgaaatgtttttggctctattataatgtacgcgtccaatcattgatcatccttagttcctttgaccaaaaaaaaacttatgtacacttcaaggtttctttcgtttaataacaaatagtatacatataggcattatgatggcattgattggatgtagaggctggaattttgaaagtattgggaccgggcttattgttagacatttgaccgggtaccgggccgcccgttcaaaaaaaaacccgttttatcagccgtcggaacacgggtttttcccaaaaaaacgggaccgggatcgcccggtaaaagcccgtccgggcctctaattggatgcgttaaatggaatttagccattgtctttggtttttgtttgttgttacgtcgcttgcaacttcgataggcgattaattttaagtaattctcttaaatttatctcttttttggatatttcagttgggtgtgcaacgatgtttggatggacattttccacttttttgaccatgcccaactcggcctcaaattggcactgatttcgccccgtttcgatcttttagtggacacgcatttcaatggcaaatcagaattgagaatttggagaccaatcttaatccacaaaaaggagaaaataattaaaagatatggggacgaaatcaaagttgaggaatttccgttgcccgaccattcgctgcacaacaaaatacgctttttcgaccttagtatcaagtaattcaaaaagcattattaaaagggaatccaaaaaatatgcacataaatttctctaaattgaggactaaattttccaaaattcttcaaaaggctcccggacaatccgacagtggacaatccgacagtggacaatccgacagttggacaatccgacagtgaggacaatccgacagaagtggacaatccgacagtggacaatccgacagtaaatttctattttaaaaaatattttcaagtcattagaacggattatttcctaaaaatatctcaatcaaatcaatttggttccggcattcgataagcgattgcacgtagataggccaaaaaaggtctgttatgacgatccaagaaaatggcgcgaattgcttggtcctgctgtacgtaaatgtttttccttgccattcccctgccacgcattccattttgtgggttattgttgtaatcttgcacaatcaaattccagtgtctgtcttcttctttcatttttttgacaaaataacttaatggcggatgaaggaagcggaattggctattgaaagagcgatgccacccctcgatgctgttatttgtcctcattaaattttgcttaactctaaatttttgtttcttaaaattctatttccactttcacctttcactcatattccacatttcctgtcggaaacttgcagacctcccctaattttgtatgggcgtccagtgttgtcgtgatgtacagcagcacgtacatgtattcgaccaggacaataaggcggacggtgtatgcagcgataaatttcaatgcctatgatcaaaacgcggcgctactgcattttactggccaaatgcattttgaggtgtccaatcaaaagtaaacttagttatgccataagtatggatgcgatttacagtaactaaaaccgccaaaatcgttagtttttaggttctaaaaaactataaattgcatccctagtcatagaaatagagggtgatcatggacgccaaaatgctctattggagcgtaaaatgcaatgtaatatgccaataaaatacatcagactaaccatctgcaattcggctcaaagcttaaaagctatactcgaacccgtcggccaataaaatttctctgcgctgagttgtt

SEQ ID NO: 6433 - DNA, 7153 bp, Heterodera glycines
  unsure (1)..(7153): unsure at all n locations
tctccgaatccaactcgacaaatgcaaatttttgcagcccgatacttttgttccttgggcatattgtgtcagcaaacggcattcgtcctgacccgtcgcgttcagacgcaattcggaaaatgcccgcaccgatcgacaaaagcagcctccgatcatttttaggcgctttgaattattatggcagatttgtcaaatgcatgcgtgagttgcgtgcaccgctcgaccgactcctccaaaaggacgtagcttggaattggacttctgaacagcaaaatgcttttgaaaaagcaaaggaaatgatgacatccgacctattgctgacccactacgacccggcacgcccaatcgtcgtatcagcagacgcctccaaggatggaatcggcgccacattaagccacacattccccgacaaaaaggaaaaagtggtagaacacgcagcatgcacattgacagcagcgcaacaaaattacagccaaattgaaaaagaggcattggccattgtgttcgccgttcagaaatttcaccgcatggtgtacggcagaaaatttattttgcaaacggaccacaagcctttattggcaatttttggctccaaaaagggcattccgatctatgccgcgagccgcctccagcgttggtccatgatcttagcgaattatgattttgaaattcgctacgtcaacacaacgtcatttggccaagccgacgttttgtctcggctgatcgcaaattattcgcgtccagaggaggacatcctgatagcaaacatctgtgccgatacggattgctacattaattctgttttcgaaaacagaatggatcagctccccgtgacaacagtcgaaattacagcagaaatggccaatgatcaaccacttcaaacggttcttcaatttttgagaaatggatggccagcaaaagtcaccgaatctgaaattagtccatattttccaaaacgggacaaaatttttgaagtggacaattgcctactgtatgaggaccgtgtgatcgtcccaacttcgcttcgcagtcgcatccttaaggcattgcacatcgctcacccaggcattgtgcgcatgaaagcacttgctcgacgtcacgtgtattggccgggaatggactcagcgatcgaaaaagttgtgagcacttgcgaagagtgtcaattgggccagaaaaaccccaccaaagcacctctttcaccatggccaacgacggacaaagtctttcagcgtgtccacatcgattttgcaggcccctgctcagatggtcaccaatatttaattctgatcgactcattttcaaagtggccagaagtttaccgaatgaacacaatttctgcctatgccacagtatttgtgctccgatcaatcatttttcggctcggaatcccagaagaaattctttccgacaatgggactcaatttcgatccgccgaattcgccacattttgtaaagaatttggtattaagcacatcttcacaccgccatttcacccacaatcgaatggccaagtcgagcgcttcgttgacaccttcaagcgatcgatgaagaaaatgtccaaaagtggaaaggattggatcgaaaagatgctgttctcctacagaaccactccacacgtcgccttaaatggcttttcgcccgatcaattattttttggcagaaaattgcgcacaaaattgtcgctagtccatccgaaaggagaaaaagacgaaaattttgatcgaaactcattcaaaaagggtcaaaacaattacaccgacaaaatggctctaaattttgatcggaagcatgggacaaaaatgatcaatttctttccaaatgatcatgtcctactgatcaattatcggaacaacaagacggagtggctgcaaggaaaagttgttgagaggcttcacaaatcgcccacatatcgtgtttatgtgcctgttctgcgtcgactcgttcatcggcacgcgaatcagctaaggcgacgccatcttttggaagaagaagccgaaaaggaggcacctcaaatcgaagagccaccgccggttgtcgaaccgcctcatccgccccaacaaaatcagccggccaattcaccattggttatccgccgatcaacccgagttaaaaagccgcgccaattttattctccaggatgaaaaatttaggcttaaaccttcgggtttcgaatttaagaggggaggtgttagagaaggaagtaattattgattaggtgtatgaccccacgccacttcgccatcttccccctccgattcccctcattcaattattattgtgcccaccaatttgacctcccaatttattctctgcatttatttattattttattttcttcggcaaataaacttatttaatttgttatcttcggacataacaaattttggcgcagtcagcaatcaactgcacatcaccggcaacaacaattccgagctttatctcgtgttgatattgctcgagagggaaaattagaaagctcgtgttgatttctaattttcgcagatcatcaaaaacttttctctccgtgtgagattaaagtctgccgtgtgcagttctcttcaattggccatggacgcgcaacagctacaacaattgcttaatgcactccaacaaatggtcactaatgccgcaccagcaaatttgagcaatgccagtttggcaagctctatcgatgctcgcctttcggcctttcattacaatccggaggtcggcaccacatttgaaagttggttcaaacggtttgggaaattgatcgaggacgacggaagcacactgccggaggcctcaaaagtgcggcttctcctcggcaaactcggagaggaggagtacagcaaatatcgggacacgatcagcccaacccagccggaccaagtgaattggaatgacaccatttcgcacctcaaacagctttttgccgagacacgttcgctgtttgtccgccgctacgaatgcttcaaaattcgacagcaaccaggacaggacgtgtcgtcacttattgcgcagatcaacgcatcatgtgaaaatgccgacctgagtctgacaaaggagcagctcaagtgcattattttggtcatcgcactcaacgatgaacaccatgatttgcgacaaaaggcattgaaaatgttggaggacgcgcagaaaaacggcaccaacatttcgctcaagaaaattgaggaggaacttcgggcaattcagcttgtcaaggagagcgccctttcgctggtcaacccaccaattgccacaaacgccattcgcacaaggccacggcaatggaccgacccagcgcaaagacaaagcggcggctccaatcaaaggcaaactccaaatgccaattcaagcggaaagccaacgcgtggtcaaccaacgcttccgtgtggatcatgtggcaaatccgaccactggcgctccgactgcacattcaaggacgccacttgctttaagtgcaacaaaaaagggcacatttcaacaatttgccggtcaaagaaggcaaaggcaccaccgaacagccaccggtcattccacactgtcaaaatcgacgcaaattgcttacatgtcggcacgactcaaggacgatggtggaaattgtgcattttgattaatggaaggcaaacttctatgaatggcgacaccggcgctcaggccacaattatttcattgcaaacatggcgagagttgggagaaccggaactgactccatccgacatcgatgccaaaaactgcaatgaccagccattcgccttgcttggcaaattcatctgcaccgtccaattttccgacaaaccaccgcaaactctgatcgcctatgtgagcggagaagtcggacacaatttattgggattgccgtggatcgaagctttggagatcatcccccgccaaattttatttccgtccagcaaatcggctgatcaggcgacaaaaatgattgacaatttttcggcagtgaagccgccaaacaaatcgatcaatgatgtgtcaacgcttaaagcggcactccaaaacgatttcccggaagtctttgaagaaggactgggacactgctcaaaggcaaaggcgcatctcattttacggtctgatgcaaagcctgtattttgccgagctcgccccattccacacggcgccatggaagctgtgaatgccgaattggatcgtcttcttcaaattggcgcaattaagccgattgatttcagtcattgggccgcaccgatcttggccgtaaaaaagaaaaacggcaagacgagagtctgcatcgacttctcgactggcctcaacaatgcattggaattgaaccggcacccactgccaaggccggacgacatctacgcttcactgaatggcgcgaaatttttctcaaatttggatttgcgcgatgcatatttgcaaatggaaatggatgacaaatccaagcaattgtgcgccatcaacacgcatcgcggactcttccaatgccaacgcctgccattcggagtcaaatcggcaccggcaatatttcaacatctgatggaccaaatttgtgccggtatcccaggtgtattcgcgtatcttgacgatggattaatcgccacaaaaacgcttgatcaacacatcacggcactgtacactctttttggacgcataaaagaatacggtcttcgcatccaactggacaaatgcaaatttttgcagcccgaacttttgttccttgngcatattgtgtcagcaaatggcattcgtcctgacccatcgcgttcggacgcaattcggaaaatgcccgcaccgatcgacaaaagcacgctccgatcattcttgggagctttgaattattatggcagatttgtcaaatgcatgcgtgagatgcgtgcaccgctcgacaaactcctccaaaaggacgtagtttggaattggacgtccgaacagcaaaatgcttttgaaaaagcaaaggaaacgatgacgtccgaccttctgctgacccattacgacccggcacgcccaatcgtcgtatcagcagacgcctccaaggatggaatcggcgccacattaagccacacattccccgacaaaaaggaaaaagtggtggaacatgccgcatgcacactgacagcagcgcagcaaaattacagccaaattgaaaaagaggcattggccattgtgttcgccgttcagaaatttcaccgcatggtatacggcagaaaatttattttgcaaacagaccacaagcctttattggcaatttttggctccaaaaagggcattccgatctatgccgcgagccgcctccagcgttggtccatgatcttagcgaattatgattttgaaattcgctacgtcaacacaacgtcatttggccaagccgacgttttgtctcggctgatcgcaaattattcgcgtccagaggaggacatcctgatagcaaacatctgtgccgatacggattgctacattaattctgttttcgaaaacagaatggatcagctccccgtgacaacagtcgaaattacagcagaaatggccaatgatcaaccacttcaaacggttcttcaatttttgagaaatggatggccagcaaaagtcgctgattctgaaattagtccatattttccaaaaagggacaaaatttttgaagtggacaattgcctactgtatgaggaccgtgtgatcgtcccaacttcgcttcgcagtcgcatccttaaggcattgcacatcgctcacccaggcattgtgcgcatgaaagcacttgctcgacgtcacgtgtattggccaggaatggactcggcgattgaaaaagttgtgagcacgtgcgaagagtgccaactgggccagaaaaacccgaccaaagcgcctctttcgccatggccaacgacggacaaagtgtttcagcgagtccacatcgattttgctggcccctgctcagacggtcaccaatatttgattttgatcgactcattttcaaagtggccagaagtctatcgtatgaatacaatttctgcttatgccaccgtatttgttctccgatcaatcatttatcggctcggaatcccagaggaaattgtttccgacaacgggacccaatttcgatccgccgaattcgccacattctgtaaagaatttggaatcaagcacattttcacaccgccatttcatcctcaatcgaatggccaggtggaacgcttcgttgacaccttcaagcgatcaatgaagaaaatgtcaaaaggtggaaaggattggatcgaaaagatgctgttctcctacagaaccactccccacgttgccttaaatggcttttcacccgatcaattatttttcggcagaaaattgcgcacgaaattgtcgctcgttcatccgaatggagaaaaagccgaaaattttgatcaaaactcattcaaaaagggacagtcaaaatacaccgacaaaatggctcaaaattttgatcggaagcatggatcaaaactgatcaatttctttccaaatgatcatgttcttctgatcaattatcgaaacaacaagacggagtggctgcaaggaaaagttgttgagaggcttcacaaatcgcccacatatcgtgtttatgtgcctgttctgcgtcgactcgttcatcggcacgcgaatcagctaaggcgacgccatcttttggaagaagaagccgaaaaggaggcacctcaaatcgaagagccaccgccggttgtaaaaccacctcttccacctcaacaaaatctgcctcagccagccaattccccgttggtagtccgccgatcaacccgagtcaaaaagccccgccaattttattcgccatcaaaataaattttttttttggcttaaaccttcgggtttcgaatttaagaggggaggtgttagagaaggaagtaattattgattaggtgtatgaccccacgccacttcgccatcttccccctccgattcccctcattcaattgttttatttgtgcccaccaattttgacctcccaatttattttctctgcatttttattattttattttcttcggcaaataaacttatttaatttgttatcttcggacataacagaaggcaaaggcaaagtgttggattttctcatcggacatcacaaggtagacgtcaatgggcattttttgtatgcagagtaaaaaaataaccaggtcaaaattttcaaaaattttcggtttctaatcatgagaaa

SEQ ID NO: 6434 - DNA, 2300 bp, Heterodera glycines
ggctctactgcattttacgcgtccaatcacagtttacgcgtccaatcgacttttacgcgtccaatcacagtttacgcgtccaatcaaaagtttacgcgtccaatcgacttttacgcgtccaatcaaaagtttacgcgtccaatcgacttttacgcgtccaatcaaaaatttatgtgtccaatcaaaattttcctaattcgaacatccttttgacataaggtaccaaccattgcaaaaagaaataataatttaaatatgacaaaacgtaacaaccattgcaaaaagaaataataatttaaatattaaaaacgtaaatccgtcattgatcacttattatcaaagtatcgataggtatatacgcattcaatcaattgttataaaatttaataatagagagactaatttgtgcgtgcttattttggtttcgataacctctgatatcaaaattttttgtgattttttattaacaatttggccaacaaatgacttcaatatgtttcggagatctaacaataacgaaaaaatttttcagcaaattctcgaagaaatacgtattcaataccctgtctaatcatcttttcgttgtattaatcaaagtcttcattttgacatttaacatttaagcatttaatgccaatattttaaataattaaataatttataataattgattggacacataaatttttgattggacgcgtaaacttttgattggacgcgtaaacttttgattggacgcgcaaactgtgattggacgcgtaaaatgcagtagagccaacaattctaatgctaaaaaacaggtactcgcgcgaaaactgaataaaaattttgtatttggaaaattttgtccaaaaatttttatgttctaaaattaccggtttttaccggtaccggtaccggtaccggttgaaaaagttggtaccggtaccggtaccggtttttgcagtaccggtaccggtttttttgcaattaccgattaccgctcaactctacttacaatcaaaatttttagcatttgtaaatttatatttttcatgtgttagagacatgaaaatagcggtaggggtcaactccgtctggccaactccgtctcagcaatgttcaaaaagctataacttttttctttgttggccaaacttcacaatcatggtatcattcgaaagccctagatgtttagaagatatttataagctgtttctcagtgattaatcagctctcaaaaaagttgtcagtttaaacccacaaaaaaggcagaattttcagttttttctttctatcttttttttatagttcgaaattttctgtaatttttagtaggctaatagagcctgtgaaaagctttcgaatgatatcaagattgtttgattcggtcaataacttcaagagttatattgactcaaagttggctcagacggagttggccagacggagttggcccgttccgtgaaaatagtacgccaaaaagagagaaaaagaaattcacaaaaattttcaccaataaactttttgaagtgcccgaattaggtggaaatgtaacctgaaaaaaatcggaacggggcgggcagggtccgcagttctttttatattttttgtttcgaggtcctagcaaatttacggtgtaaacacttttaacaaaatcaaaaatttttcactaataaatcagtcgaaaaataaccccacccctttctgaggaggttgaaaaataatccccctggtggataattagagataatacggtatgttttctgaggaaaaatttaaagcaaaacatttcataaaacagtcgggagaagaggggatacggtagcatattatttaaaatacgatagcattgggacacattttcaattaaaaattgttttttgctgaaaacaaaattatcaaaaaataaaaatgatgtgccaaaaggatcaattcaaaaaatcactgcgaaatgccaaattcggccaacaattctttgctcgcgaagacattggaggacagttttttacgattggacttgaaacatgcgcgcaatttgtcaacggaattcaaatgcaaaaaataattctaaaaatatataaaaataaaatttaatttcggaaatatttaaaaatcactttcaaattgatgagtccaaatttttcgatcagaaggaaacggtcgatcagcggaatttccacgcaatttgccaattgcgtctcacagcgcctcttcaaccagtccacctggaagaagtcggccaatttgagcaacaccagcacattctcagctgaaattgcaaaaaatggtgaaattttacaaaaaaatgtattttaaaa

SEQ ID NO: 6435 - DNA, 2218 bp, Heterodera glycines
gccaaaagctgaagcgtcgacgaaacagtgcaattggtgcttccgatctgtatcgggcagatgcaatgtaaaacggggaattgaaatatcgtccgaggacgaccaatttttgaacaaattaatccaggaagagttggaatcagtgggcaatgattggtcccactccaatttttctttacagagagattggaagaacaatttgtgtggtatcaaaactggtgagataaggccaagggggtcgtaacaagaagcaatgaatgatagaacagtacgtttcgtaaaattgtgggcactagggggtggttgtgtgaaaattaaacaatcgatttctgtattccaattaattccgagaaatttttggagagggtcaattagtcgtttggcctctgggagctgggaaatggcttcgacggaattagaacaaaattctctaagtggcatggaagccttttcaaaaagcttaattgattttaaacatttctcgtttgcctctgatgggttgtttgacgaaaggaacacattatcaacataaatgttatttttgatttcatttgaaaggggggatggatttagagacagatggtgctgacaaagggaggtggccaagtgtccgtgggatttcggaatgagattttttgggtagatagagcacccatgggttcttaagaaaaatgttttcaatttctgccaaatggacccctgtgccaagataaaaaaggccaaagtttttaatgatcaaataaaagaaatacctatttgtacctaagcacggtgtccagttgtgtagcgatagtgcgctagttagcatcatttaacccagggtggatcccctacatgtaaattaatttttttaatttttttctattatgccaagtcaattatcaaaatatttttttataaaaaaaactttatttttaatttttttgaaattatttagtgcagcaaatactcaataaaaatattagacaaaaatatattttttaattcgacaggatatttattacatctttatgtttaatggaattttttgatttttaaaggaataaaattaaaataaatattttgataaagaaataattttttttgataattgaattgcacataaaaagcaaaaacaaaattacaaaatggatttacacataggggattcgaacttgtgaccgaaaagtttttgactaacacattaccgctacaccaacaattgcttgttaacacgaaataaatgttccttttctttaattataaaaaagctaaaaactggcatgtcataactcggcactcgtactcatttggcagaaaataaaaccatttttcttaagaacctatgggtgctctatccacctaaccaagtttcatttggaaatcccacggacacttccctttgttaggttagcaaaatatgcaattataaaaattaatgaaaattgaaattttttaaacttacgatttggaagaatcggacactgaagagcaacgagcgaaattgcctccataaagtccttgaactgctccatgtccaggcccaactcgttcaaagtgatcagtcgatgctgcttctcccgcatttccacgctgagcatacgctggaccaccggcgaaacggacataagccaatgtgcggatacagtaagctgagacagtaaaaaagggtgggggagtacggtaaataagccgaaacaataaatggggtgggggtacggtaaattaaatgttcgctgtctttttttaaagccctaacgattggtgttttttgtagcaaattcacattcaaaaaaaaaacaaaacattttttggcacttcatagagcaagggtcaaaaacgaaaagcgaccattttaatttgcaaaaaaaaatatatattttacattttccagggattgctgaaaaataaataaaatttaatatttttctcaaaaaatttttcatttccggattgaattcactatttttggcaaatagtgccaaatttttccagctttgattactgaaaccgttgcactttcatttgtcaaatccaaaataaaagtaaataatagagatcggaccggtcggtttttttcggtatttttcgattttcagtttcggtttttaaccgaaaaaaaccgaccgataaatttttgagtttttcggtttttttcggtttcggtttttttcggttttttaaccgaaaccgttcgaccgaaataattaaaaaaccgaaacaatcgaccgactttttt

SEQ ID NO: 6436 - DNA, 681 bp, Heterodera glycines
ggggaggaggggacgaaaatgataagagatgccgaaggaggaggggggaagatgatcagagaagcttgaagggggatggattaatgaaatgccgggggaggaggggacgaaaatgataagagatgccgaaggaggaggggggaagatgatcagagaagcttgaaggggtatggattaatgaaatgccgggggaggaggggacgaaaatgataagagatgccgaaggaggaggggggaagatgatcagagaagcttgaagggggatggattaatgaaatgccgggggaggaggggacgaaaatgataagagatgccgagggaggaggggggaagatgatcagagaagcttgaagggggatggattaatgaaatgccgggggaggaggggacgaaaatgataagagatgccgaaggcactgatgcagtttatttttagagattaagtagtgaaaatgtgagattctctatttacattttattatcacttgaaattcgtgcaattgcagctccgtattctctaaatataaactgtaacagtgctgcggaaatatcgaattggtagcgccaaacaatcttccatttactatttttgcgtccaattttgtgaatttctcataatttcagctccttattcacttaaaataaactgtgtcagtgttacggaaggattgagttgataaa

SEQ ID NO: 6437 - DNA, 1330 bp, Heterodera glycines
ggtttaaaatcaaaaatccgaaaaaatggtattctgaatactttcaagaattttcttagtttttaaccatttttatttaaagaaaaatttcttcactttctcaaaaaaagattaaaaatttttttaattctaggttttggattttatataatctaaggggttggggtggaggcgaaacgacgggggattaaatgtactcgaattcggttcaaattttcattttttgaaataatgccatcatttttgtaggtactacgctaattacggagaggttggttttgaaaaaaagaaatcaatagatgaagatgacttgctttattcttaacataatatatcagttgctcaaattgggttgtttaagcaaaactatcgttcccaatccgtaaatgtgtccatgtcatcgtcgatggtgggccagaacgggttgtggacaaaaccggcacttttcacgaaccgacccaaagaagagcggcagcgtgagcaggacgatgacgcacttaggtagcaattagtccgggcgcaaatgtctggacgctggtctgacaaatgagacacgttgtccgggttttttttttgaatatagctcggccaaaaaaatttgggtagcgaaaaactacaaacaatctccgccgaaaaaaatagattgactgtatgcaaaattggtccattggtccccggatactaccaccgcccatcatttttttaacttccattgtatggccgactatctgtgacacattttgttaaatgaaaattcttatagggttatgcgtgagaaggagcggaggaaagaaatgcgccgaaaatttacgcaagagaaccaagcgcaacagaaacggcagaaggacattgagaaacggcacaatgaatggacgaaacaaatggaagaggaaagggaggcagtgaaagaacgaatccggtgggaatcgcctgatgaaaaagatttagagcaaatacctaattagaactcggagagaaaattacttcaaatttcatgttttaaataatttctgaaaatgtgcatttttcttgaaccggaaattattaaaatattctaatcgcaattatataattttcaggatgaataaacaaaagttggaggagcgcaagaagtcgggcatgaacggggaaggggacgacgatgacgaagaaaattaaatcataattaaaaaataatagcggaatttaccagatttttttttgtttccagtttttattttaaaacaatttctgactacgacattttgtttgcttttttgataaattattttgtcggatttctaattaatcacaattttttctttttaaatttttacctgccaattcccct

SEQ ID NO: 6438 - DNA, 3833 bp, Heterodera glycines
actaaacagctaaaccaatgggccctcgattttgcgtctcctaagcggcgcattttaaaaagtttgacctccttttttcttttttatttccactttgcattattaagcatgtcacgaggcgttcaaaatgaacgcgtcggttcgccttgggcccgagttggaaatcccggggtacaattgcttggaccatttctacgaattggacaccgaacagcactcgtgggaaatactccgcgaaattgtggaagagtcgaaaaaggtggcattaatttagaacccagaaaagggagtccttttctatattcggtcaaatttgattgagttcggataagataattctttaattcaactcaaaatgatgacgctaaaagacattcagctgcacaacatgctgatcatcaccggaatgccaatccgtcacaacctcggcctttacaattgcatggtggccgtggccaacgggcaaattgtgttcatttacccaaagacaattcttgcgaatgacgacgtttatcgggagggaaggtgctaatcaataattagttacataccctctcccctggaatgaataaaaataaaataatgacaataatacatttctcccgtccaaactttctctttattcatttaagtcatcaaaacaatgggacccgaggcgtgtttcaaaaataaacattttttaattgtttttccatctgttgaatttaaggtggtttgttgcatggcaacacaaaaatgagttcatcaactaccacataaaggaggaattcggcttctctcaggtactgtattaccgttttattgccaaggaaaatcttaaaaataacacatttgttgaacaatttaaacctaccgatttaaaatcgggaaaaccagttttagccattttgactcaaaccggtctaagaattttcttggcacttttgaaaattggccacattttaatttcgtcccagcaaaccgttccctttggcacttccgtgctcgagtcggcggacggcgttcggttgggcatggaaatgtgcgaggaaatgtgggcaccgttcgggcccagccaacggctagcgctgcaaggagtggacatcatttgcaactcgagcggctcccaccacgtgttgggcaagtcgcgcatgcgcatcaatcaactcgtgttgggtgcaacagcgaaggcaattaacacatattttagaattataccaataatcagtgtccacttgagaattggtttcagcttggcggcacttatttatacgcaaaccatcgtgggatggacggtgagcgcgtgttcttcgatggaatgtcctcaattgcgcaggtgattttgaaacgtacacttttaccaaatcttacaattaggcaaatattgtgctttttgtccaggatgggaagctgtacgcccagatcgaccagttcgacatagaagaaaccgccgtttgcagttgcactttgaatttggacaattcggtcgcttaccgggcaaaaattgccagcctttgccaacaggtgaccattaccaaagtggaaatattaaaggagtttctttcatattaaattttcaaattcctctttttttgaaaattaattcatgaaattagatccatcaaaaaatgatttattttttgctttttgcataagcgaaaagtgctttttccgtccagtccagcaaagtcgtgccaatgccatgcgttcggtgcgatgcgcaattattggccgacactttggcggtcggcggcggcgctctttcgcgtcagatcagcgtggaacagcggacaaacgttgatgagctttgccatgcgcctgcggcgtggctttggcattatttgcggcgcagcggaatggtccgtgggggaattaataaattatttttaatcaaaacatcctttttctctcttcccgtagagtggcttctttttgcctctatccggtggccaggacagtgtttccgtggctctgatggtccgtttgatgtgtgaaaaagtgtgtgatgccgtaaccaaaaatccaggtttgttggaatatttttattttttaattgttgaaatggatgtaacttttctctcccacttttcggcttgagtcctcctgcagcagaagaggaatccctgttgcaaattttgagtttaacccatacaaaaaaataagactaccatactactgaattaaaaaccctgggctttatttttctaccccctccgtcgaaaggggggctttatttcagggcatacatggaaaagggaggtgggtcaaccgaaatttttgcgaagggatctgggagggggagttctaattgagtaaatacgtttttgtttgtttcattttttgccataattcattcgtccccattcgttgtcagactctgatgacccggcctattttctgtgcggtgagcgcgtgccgaccgacccggcacttctctgcgcccgcattcttttcacctcttttatggcgtcctcaaattcctcagaaatgacaaagactttggcggcgggcattgccaaagacattggcgcaacgcattcaaagtacaaaattaacaaatggagagagataatttatatttcaattaaaattcattttgatttcgcatccattcttttagcattaacatcgacggaattgttcagtcgtaccttcaaacattggatttcactccgtcctatgaggcacatttttcgaatttattttctgatataatttttataaatccacaaattttctctaaattaccaatgccttttgcgcatttttcagtcttcggacctccgtgaagggatggcccttcagaatgtccaggcccgtgctcggatggtcctcgcctatttgcacgcgcaactgacgctgaccaaagagcggcgtaaaatttgcacttattgataaattgtttaaataatccctccttttcagggaaagggtctttgttggttttgggcgcttcaaatgtcgacgaaaggttggaaatgtttatttttttattaattgtagttttaaatgtccctttcagtttggttggctatgtcaccaaatacggttggttggctctcccccccccccctctcttttctctctcttccccttttctctctctctctttctgttgcttttcatttcctcttccacagattgttcctctgccgacattaacccaattggtgctatctcaaaggatgatttacgtgagtttctgtgccatgtgaatgctaatcataaattcccacacttacaaaggttcggcaattttttattttgtttccgaattacattaattcgatcatttgttgtgtttgcccccttttcagtgtcatccattcggtgccaaccgctgaattgcgtccactgaaggacggccaaattgtgcagacggacgaagccgaaatcgggctcacctatcgggaattgtccacttttggcaaattacgtcgtccaggctgttccgggccgtacagaatgttccaagaactcgtccacatttggcatcccgcgcgcagctatgacgaagtacactaaacatgggatggatagagttaacaggttctcccccccccccgactcattttctaccgaaaattttaaatttcgtctggaagtaaaaaaaacacatttttattgaaataaataatttggtttttatttttaagatagcggacaaagtgcgcattttcttccgccgttatgctatgaatcggcacaaggcgacagttgcaacacccggtaagcagaagactattttccaatttaacgaacttttattgcccctttactcttcagcttaccatgccaacacttacagcaacgaggaccaccgaaatgaccatcggccgtttctttaccggaca

SEQ ID NO: 6439 - DNA, 1373 bp, Heterodera glycines
tcactgaaaaacagtgtcacgttctgcatttttcaaatataccccgactaatgtttttccgttaaaatttgcaggaacaaccggttgactacgatggcacagaaattcaagtggtggacgacggggcggaagaagggccgacaatggcggacggtcagcagaatgtccaatacattctgcaggtgcttaccaacatttaaaagcattttttaaatataagtttccccgataatttacgaattcataaatttccacaataattttttgtacagtacgcggacagtggtgagatggaaaattcgatggtccagttggaggacggccgaataatccacgccacccaaattgggcagccaattccgttgtcctccgccaccgaagcgaaccttccgattggacagccgctgattatgagcatccccggcccgaacagtcaccagcagcagatgcagcagcacttccaagtggtgggcaactccgtcgccgtgccctcctcctccgccgcctctcttccgccaatcgcttcggcgccatcgccgcaatttcaacattcgccggcggagggggaagaacaatgaaaacacaaaaaacgaagggatgagatggattgatggaaggaggaggagtaattacaattagacaatttttcgctttaattcggagctttccatattcccataaatttgtcgaatttattattaacattaaactttttgcttttttattttcattgcaatgttttcagcgtcgctatgtcataattaccgtataatattataaaaaagaaagaaaattgaattctttttaggctatgcattcttacagcaattttgaggtgagtagaaggacaagaaagaaaagccgatttctagaattcttgttcttgggagtgttataactctgaatccgtttaatgaccctaattaggcagtgtcttaccacgcccttcagccactctttcgcggttgctccgtgccggcgtcccacgcggcgactgtccagtcgattcccccttttttcgtcgactttctacaccgacttcatcggatggttaacgaatacagtgccgaactgagccactggagcggagggatgcgtttttgtgcgtcacaaagggcactttacggcgcgaaattcgcagcgacgccaccgccggcgacaaaaggacggccaaaacgggcgatgggcgcagctgcacggagggaaaaaagcacactgaacgatagtcccaccgaacgacgactttcggggtggggcgggagtgattcaattaaaaattattaaatttgatttttgtttttggcattgccgggttcgcattttgccattaaaaaaacaatcgcaagccgacgagcgacagcagcagaaaagaa

SEQ ID NO: 6440 - DNA, 3606 bp, Heterodera glycines
tcctacaagcatcaaaccaacctaaaaatattattttcgtggtttttaggccgaaataagtgtgcaaagaaatttggaaatcaatacaaatccgggcccgaaattcgaaattgaggagagaaaaagttttcatccttcattcaacaaaatttgtaattaaaaaaaatagtttaaactattaaaaaaaaactatgctctctgtataataattaataattgtattaattattaatttaattaaatgcaataaaatttctcactgccgttcattgaatttggaggagaaaatgtatgggatttcgttgttcggccacctgttgttttgttttgccttcagcgcaatatgcttggtcatttgtcctgtttttagcagacgactcaatttaatttggcgtggtgacaacactaaatattttttggattaccaaaatgattgtgatgctcaaattatgagtctcgacatgtgttaattttatttgttggattttataaaaatccaaatccaaaaacataaaaattttaattaaaaaaattgatgaaaaattaactaattttttaaaattaaaattattaactttaaaaataacatactattaaataaatattttcttaatgatagataattaaggttatggcaaaaattcaaacaaaggcaaaaaatggacaaaatacaaaaaaaaatacaggcaaaatcccgccaattcttcagataatttttagatttttgtaaacctggcaaaattaggcaaaaacccaaaaatattgtgtaccgatgaaagaaaaattcctttttcttaattaaataacaatttaaatttattgtatttttttttacaaatgtctccgtagaccagccgtttgccaccaattttttcattgtatttgtatggcgaaagtggcgacgcaatggccaaatgggcacagaaaataattggccatcgaagcttttgcagcactagcaaaagaaaatattttgaacccaaatggtatggccacattctttaactataattaaattaaaattgaatttaaattaaaaaaaaaatgaattttaaattgtaaaaaatattagcgttatttttcaattaatgaaaatttaacaaaaagattttgttcctgaaataccgatgaaaacgaaaaataatattttaaaataattttacaaattcattaataaaatgtttttacaatccatggacaaattggctgtgtcccacagaatataaagcttccattaaatggtcaattggcgcaaaaactgggcttccagacggctgctgaaagacggctgaagaatgccaatttgtttgaacaaatgcttcgcttggccaaaatggcggacggacggatggacggacggacccatgggctgggccaacaattggatgtaacattcggccaaatatgtttttgtgtgtgtttcttatagttaaagaaagattattattaaatggttccggatttattgtgctgtttttatattctaacgcagggttacccttgaaaatttccctaaataagaacatcgctggtaaaaaataagattttagggtcaaaaataaggacattttttaaaacacgcttccaaaactttaaatgcatttttattcaacaaaaccaagcattactcaccgccaactatttttctgcgcaattacggcttagaaatgagaaatttatacatttccgaaaatcaattttaattttttaaattttttgggtgtaggtgagggaagagagtccggcggtgtcgataggcgccgcggggaaattttttgaaaatttaatgcaattttttaacaagtcctgtccaaaaaatgaccaaaatttgcgatcttgggctaattttaagaaaaaaatagagttttggggggccggcggtgccgataggcgccgctgggggaaaattttaagaattttaatgaattttgttaggaattagccaaatttttcagaaatttcctcttttaaatgaaaataaggcactaccccaaatcagaacatttcttagaaataataacagatacaacagctctaatagacgctgccggaaaaatttttgtaatttttaatacgaattcttaacgattttgttcaaaaaatgacaaaattaggattttgagccaattttttaaagagaataacaaaccgccgagagaaatttgaatattaactgaatcttgttaagattttgcatattaattcgcttcaaaaaacatttcgttcaaaaattatcattaaaaactaaatttctccctaaatccaaaaaataagacgaaaataaggacaaagagcttaaataaggacaaatcttacaaataaggacatttaaaatttgtaagatttggaccctcaaaataaggacaaatcttacaaataaggacaaagggtaaccctgttctaacgccttccgatactggcgaagtttgatcgaattaaaattttgaaaaaataaaaatcttcgaattggctatatttgtgggtttgtggtaggaataaggtccgatcatttccaaccttctatatttcgggaatcgaaatagaatttcgagaccaaggatagtgaaaatgtaaattccgatttttttacatgtttgaattaaggaaaaacaaaattattattttgaatatattatatatatttttgtttcaattataaaaaagggtcaattaattagaatttacgttaattccattgacaaattttgtccaaaaattttttctaggacttgatttacggaattaaatgatttattatttgaaaattatcgtttatttttatttcatttacaaaataaaaaagggttaattaattcgcatgcctaatcaaaattaatttaaacattaaaagtgaaatttgtttggaacattgtaaaaatgaatggttataaaattgatcacattttcaaataatgcattgttctatcacagtaaaaaattatcacagttttcataaatgctgaagtgtttttgtcgtccaattagcaatccaaaagtctaaattaaattgatttaaaaattgaaacaaataataaattgaacgcgagtacctatttctattttttaaatttacttttcaatttctttaaaaaatattttttttactcggattagtccatatgaattcccgaaatccctctaatcaaaaaaccaggcaaatgcttaggcccttttgataatttggcacattagcttaccttttcacaaggtatggatgcttcaactccgtttccaattgctgtcctactgctccatcggcatggcaaacgatcggacgctgatcagcgccggacaacccggactgatcggatgatgcacaaattggtgacagccggtgatcagcagctgaaacacatgccgagaatggtggtggccgaaatgccgacgggagaatggcatgctcatcaaacatattattttcaattaatttatcctgatcagccatctccatgtcgttgataaaactgatcggaggcggtattgcgctttgatgatggtggggtcgtcggtgaatgagttgcgcggagcggggataaatggagccggttcgacgataacgggtcatgattttggacacgccaagctttaaatgcaatttttaaaacg

SEQ ID NO: 6441 - DNA, 1063 bp, Heterodera glycines
  unsure (1)..(1063): unsure at all n locations
gataacgggtcatgattttggacacgcaagctttaaatgcaattttttaaaacgtcaaaaattaatacagtatattggaatacggtagcttacgactgcaacttatatatagaaaactacgctttatattcaataaaacaaaaaaagaaaagaaaaaatgtattcaatacagtattgaagtacggtagtgctaattgcattaattaattaataatttttttgaattttaattatgcttacaatgcgtaacgccaattactttggcaatgtgactaatcttcagccccctctggtacaggttcagaattttttgccgatccaacatgccctagaaaaaaatatttgtgaattttaattaaaaaatattagcgcattaccagtggccgaccaggattgtaggaacggcccaacttgtttcgtgctgaaaattacaaaatttattgtaaaaaaaaatttactagtcacttagtctcatctttttttctgtaagtgtataaattttttgtaaatttccggcaatttgttctttgccaatttgcacctaatgggtcacaaagaccaacaaactttcttttgactaatgacaataattttcatagtaatatacagctgaaattgataccgtattctaaactacaatatccattaaattgttgggaatatatgattataaattaatcaataatggatcacaaagattgcccactctcttacaaaaggactccaactgatcagcagcggcggacaataccgtcatccttttgtccatgtttgtgccgtgcatagtgtgatcattattgtccaccaccgtttcttttcgctgtacagtatccgcttgtgcaagtaccggtactgtggaagacatacagtcgttgttcctaatattgtcgttgttgttgttgtccatggccgctgatgcggaagcagtagctgcagcacaattggcaatcaaattgtgctgttggaggaggacttggccattgttcaggtgggccaattgttgttgaagcagttcgttcacttgnnggataatgtggccactgctngtgctgctactgtagct

SEQ ID NO: 6442 - DNA, 2707 bp, Heterodera glycines
acaaaaaaaaaattttcgaaaacacaaaaatatttttatgcagaaaaaaaagaatttttgttatttcaataaaaaaaagctttgtacaaaagtcttcatttttgctgccttttccgaattttttgtgcattttttttgcctttttttacccttttcgtgccaattttatgtgcctatgtggaaaatattttcttgcctaaaaatccggtccctattcatttctcttttaatttgccattaatttttggcattttgaattataatttgctataaattgtttttttttcttgattacatttgtgagaaattgggttatgctgtgcacatttgggtcgactaaatccagtttttcaccacctcctccaacagcagggggcacaccaaagtggaaaagttccacgccaaagccataaaagaaaagtcgcgcagatgaataatgataaaaaaattttgtcccatggctcttaatcaaaaaatgttggaggaacggggacatggaaaagtgggacggagacacggaggaaaagcgaaaaaggcctctgggcaaatggacaggaccaaaaatgatttattatgtgacaaattaaaaatatgaaaatgaataagcataatgatttatgggaaaaaaactttttattatctgagaaaagttgaaaattgaaataaatttattgaaattaaaaataaatatgagaaaatgatttatgttttttttacaattttttagaactaataaaaaaatttatttgttaaacgtaaaaatataatttgatttaatttaatcagtaaaaacacaaatttaattaattattcaaaacaaataatttatttattgtttttaatgttttaaatatttatttaaaataaattagataattaatggagtcctttttttacaatttttgattgtaaaattttaaaattttttgttttacaaaaaataaaaaataaatttcattgaaacagtaaaactataattatattagttaattttcaaaaataaataattaaaatattgttttaaatttataaaattttatttaaaaattaaaattttatttttttacaccaaaaaaccatatttaaaaaaagcttttatacaaatatttttctaaactattaatccagtaacattctaagcattattaaataatccatataattaatgctaattacccgtgctaatagttcccagagcatttgttccatgatcatttggcgttgtaaaagttgctgttgttgctgaaattgcggctgttgtgccgcaacaaatgccgacttctgccaatttgtcgccacaggttcttccacctgcagttttagttgatttacatcttcaactttgatcattgtcttcatcatcatctgcagttgatccatgctcatgttcatgttgcttctcccaacatcacaacatattgttgttgttgctggttgtggtgacgtcattgtgattagtcgaagaagcattggcaagggatgaaagccattgtttggcggtgccaacaacggcaaattatcattattgccactaatggacaacgaatttgcggcacgaagtaacaaatggtgttgttggttctgatagtgctgctgatgttcaagaagcattctgctgatcagtggtgattcattctgttgttcttgttgttgttggttagccaaaagttgtgccaaattgaactgatcggacaactgttcataatgatgattataattattgttgctcgtggcggcagtttcactggcggccaatgacatggcgttgcgctagtcagatcacttctgaactgatcacattattttgtatgaatttagaaaacaggtaaattgtgggatttgtttggaccttgatcagggaagaaatttaaaatttttggcctgatcagatgaagagagcttacatatttattatgatttttagccaagcaaaaatatttcaaaaaattgtcaccaccacaaacaatttggtcattttttgttcatgaattaaacaattaataggctacttagcctgactaaaattaataatgccaatgcatttttcataataaattgttttgagtttatgttccatttttttttctttttcaacaaaaaatgaatgcttaagccaacaaatcctgtaaaaaaggacaaaatccctcctccaactcattttggggttacaaaacacacacacaattggagccaatgtttttgggaataatgggaagggcccatggaatttttgggcggggggtaaagggccaaggatggacccgtcagccgcgccgcagccctgtccccccccccccccaccaatccgcgtcatctaattgggacacgaattaagtggatgatgtgggtcggaaagctggcctcctgccaccaacgaccccctgccccgaggggggtggtgagagcgcgggggtcagggccccgagggtgaagcggattttcctttcgctgtgcataacccagaaaagctgatgggatgtcggcacagaggcagggtggagaggtggatctgtggagtggatcagccaaacgcggactattttttgcacaaattgtcgtcgtcgtcgtaccctggggccctattgggactgactgactattcattccccttccattattcgtcgtcctttccaaatcacctctcccccctaaggagggccgggggggggggggggaggatgtgatggaaaagctccctccccccttt

SEQ ID NO: 6443 - DNA, 1320 bp, Heterodera glycines
  unsure (1)..(1320): unsure at all n locations
gggggtgaggagtgggngcggcagggcagggacgagaacaggaaaaaaaggtgggccaaattcgtggggagtgatatgtgggacgtggtggtggggctggggttatgggacaggacaaccggcgaccttcatcagcaagcagtaacaggaaatctgctgctttagctgacgaaatcattgctgctgctttttgggatgcgcatttgtttggtggctgacgccctctcattaggggccccccggggggacaatttgggggatggaaatttttgaagtcacttggggattaaatctcaaaagatggcattggctgtaaaaaaatgtgtgaaattctgattgtgaagcgattaaattacgaatatttggagatgattggggaatgaattggttgagaatgtttggaagggttcagtggcagtttgataagaatttttactatttgttcgaattcgggactggttttcgaattcagaacgaagttcttatagaatttctttatactacaatacttaatggtacagaaatttattttaaagatacttgtatcactgaagcattttataatgacgtattttccggtcatggaataggcttaagcctctagattttctttaattgcccacaaataactttgtgcgtttcaaacataaaatttatacaggatacaaaaatatgtatacaaatatacagcagtgtaaagttttaaatcctgaattccgatatgcgaaattacaatgttttggattttgaatgcaaacgaaaaaaatcggaattcgcaaataatatgacaagcaaaaaaatatacaggtttgatacaaaatatgataaaaacaaatatgtataccaacaaggaatacaatgaaattggaacccagaaactcaaatgaaaaacaaatgttaataaatttcaattttcctgggacttaacagaaaatcaaaaaacttgaaaactaaattaaaaaaaggcattgaaacccttatcctaattttgactcgactcggaaattgacggataaactttgactgatcaggcccccaaattttcattcgttttccgatcactatgaattctaacaaatcacaaaataaacacttaataaccaatcaacagcagccgcctctgtatctctccccaattgatcacactctctcactgaacaatctaaaactgatcacagccccccacatttgatcactactgattgatcagcatttgccaaacaatctaactacagctggcatcattgcaatttgtacaaaagccaatcgtaaattggttaaccccncgggcacattccggtggcaatttgtcatcatacg

SEQ ID NO: 6444 - DNA, 2911 bp, Heterodera glycines
  unsure (1)..(2911): unsure at all n locations
tccgtaaaaaattttgaaaactaaaaaaaattaagtttttcaaaaaaaaattctgatcggaaaaggaaacattgttattgaggcctcgtaactctattggtttttgctaatggaaaaaaaaatttcaaatttacaatagaagcttttggactttgctctatccaatagtgccaaatttatgcccacttttcgactggcactgaacagttcgatggatgggatgggtgctaattgtaagaatggttgattcatttaccatcactcttctttgtcacagattgaactgtttgcggtgtgcacggaacgccaaagtgatgccgaattggaccgtattgttcgcctccaacagtccctttatgcgtcacttcagctccgttttcggtgggtgtggcacagaataaaaggccaagaaaaagggtgcactccataatctcgcctctaaaatttttttttttaattttcaaactgaaattttattgaaaaaattttcaaaaaattttttgttaaattttcttataaaaaactaacaacttttttcttgaaaatttcgaaatttgaaattttttttaaattttggcacttagattttgtcccatccaaaaaaaaatagtgacattttgccaatgtttttttgtctctcctctcaagggtaatggacatgcccagtgaagagttgggagcaccggcagcacgcaaatttgacttggaagcatggatgccgggccgaaaaagttggggcgagctgtgcagcgcgtccaactgcaccgatttccaggcacgacgactgcatttgaagtacaggtgaggagaagggggaggaggacaagcaactgatgagggaggcaacaacaaaccacgattactactgtatttatacaatacaattctatacagtatacagttttagccctgacaatgaggcggcacttcattcgtcccccccccaacccaaccccttatcgtttcctctccgaaatttaaatcttagaaatttttcgaaacaataatttttttgtttttttttaatttaagtgaaaatttaaagaaaatttcaggggggatgcctctccgctgacaccaaaatgttaaaaaaacgaaaaattttccaaattaattgaaaaggagttgctgtttaaaaagaactagttattgtcacatattcccccgcacccctcccccccccccttatttttaatgtctgtccttgatgactgtctgtctgtccatcatctctgtccgtcaccccacccccggcacttttcaggccgtctgccgacgctgccgtcaacggtaatgaaagcactcctctccgttttgtgcacacctgcaacggcaccgggctggcctcaacccgggcaatgatcgcactgctggagacccatcagacgggggtcagtcggccccccccacccacccaaccacctgtttaaacagacacagtcattagtgctgctaattaacccaattatgtgaaaatttcatatatatatttaatgtcgaccgaccgcattaaaagcgccgcctgtctagctgtgcaaatattataacataatgcatttagataattattttattcaattcacgatatctcatttaatggttttaaattaaacgggtgtacgactccccccccctcgcacaaaactttaaaaaaattcaaacttttcaacaaaaaaaaaacataatctatttttaagaaaaaaaaattttaaaatcgctagaaaaatttttcggttttttttaattccctggggggggtgatggtggtggtacggtggatgggactgatccgaagcggattttctggcctggctgagcaagtaaaatgtatttccataattaagtttaatccaattcacgatatataatcccatttaatggcactaaattaaaattatcatcatttaagcgtcaaaagggtgtcaaattgccggacgtaatcaatgaacggatgcacactgaacgaagtgttggcatttattgtatacatcagaaaaatgccggccgaatgacttttgattgattttgacacacatcgatgggctttttttggtgaaacaaattggcttcaatttcaattcccatttattttccacatttatccctcaattttgttgaacatttttttaaaaattttattcgttacattgaggcaaataaaatttgttcctcaatttcggactcatttttatgttttaggcttatatttttagtgatatcatttacctattttccctaccaccagggtttcattaaaaaattttttgttggattttcaacaattttttatattattttcccatttttgaaaaaatttcgtcccacataattttttgctaataggcattaactacgcggtacaggactaacttaacctgcaaatatttcaacccttattagttttaaaaaatttttcaaaattctgagttttttttatttatgccaaaaaaattatcaaaaaaatgttttccatttttgactttgacagtgtaattaaaacaattatccgcaatgtaaccctcatttatttgagcatattagcgttagttaattgataagttccggctcattaaactttctcattaaattttaaaatattttaaattgtaactttctcaaacaaccaaacaaaaaaacttgctgccactcattagtatgtaattaccagcgccaaaaagtgcaatggcaatggcaatttccgtttgccaatgtttcgcccttagcctttttaattaatgggaaatgctttttctcccatcccactttttggtgngcttctcgatccccccccccgctttttggtccattttctctctctctctctctctcccctcacctctctcttccgtctctctctcttccctctgtctctttccccctctctttctcgtctccctgtctcactccctct

SEQ ID NO: 6445 - DNA, 1541 bp, Heterodera glycines
  unsure (1)..(1541): unsure at all n locations
ttttttctttctcaatcaaattaaatattcttggtattgctcgaaagcatttgaaaaactctattaacctacaaattttcacaattttttatgcttgtacaaaaaaatcgggggcaaaaaaagttcgaaaaactatttgctgttgtttttttgaccataaatttttgagaaaaaatcattcataatttcgcccaaaatgagccaaattttatcatcttaatatcattcgatagccctaagtgttttctattaccttgcaaaatttaaaaaaaaaatcgttaagtttcatcaaagttaaatgacctgagaagttcaaaaaaacaaccaagttttttgaacatttttggtcataactttcttttaaattaacaaaaacttttgaaatttttgcagactaataaaaaacacttagggctatcgaatgatataaaaaattaaaatttcattgcttttagagcaaagttatatgaaaacaatttttgttttttgactaacgtcgtcatagcagcctccaatgttccaaaaaagaggggatccaaattagctgacccattcatttgttgctttagagaatggggatgagaatttaaaaattatgccaccaattcatttaggcgagtgacaatatttaagagacaaaatccaaaatttatttaaaaattaattaagcctagccaagccatcaataaaataaaattatagctaacttttatataaaatgaaatgtcaaataccatcagcagtcattttaggtaattgaatttcgttcccaaaaattctctcctcacaatttttcttccatttctctccctaataaaattttacccactaatttaatttattattttttgctctcctccaaatttttgaatttgtggtgaaactttgtcatttttcacagaatttctcctcccttttttggcctctcttttctgatgcaaatgacagcttttttttgccattgtttcatttttggaattttatttttagtaaaaaaatttttttaatctaatgggcaactaaattagggccaattttgtaaaagtcgtcataaatttgcataatttttcgttttttgttggtctaaaaactttgatttgctttattttattcgtaaattatcgatattatttaaaagaaaattcagatttttattaaaaaaacgaaaattaagtatttttttataaaatgggcactcaaaacagcaaattgcgccaattttatcgtaaaacgctgagaaggagaaaagtgttgaaaaaacactggtgctcaccagcagcagatgaagcggcagcacaactcattgaaatgggaggaaaggaggaaattgtaaaaataaaaataataaatttaaattaaatgaatttaaataaaaaattcatttttaaatataaaattaaaatgcttaaaatagaaaataaaaatttttcttttctatttttaaataaaaatgtttcaattttaaaagaatttaattaaattgcttaaaattcaatttcaattcaaaggcttaaaaaataaattcaaatgcngttaaatta

SEQ ID NO: 6446 - DNA, 2048 bp, Heterodera glycines
  unsure (1)..(2048): unsure at all n locations
aataaaaattttatttttttaattaaaaaattaaattactttaaatcaaaattctaattttttaataaaaaattcanctagatagttgaaattaaaatcaaaattaaaatttcttcaattttaattttttttttcaaagactcttcacgagatgctcgagccccgttctgcttcagctgctgctgctgttcactcactaaccaattttgagaattgccacgaattggaggaaatgcagcaattaattgacacattggccggctcattaagaaagcaattagatgcccttgtgtcggtcaaccgggtgaggaaaaaagaagaaaatatttaccgtattccctaaaatacagcccccccccccccctaaattagaacttctctgaaatgaagccctcaccccctctttgaggggattcaaaaataaagcccctgggggatttattttaggaaatacggtaaattttagattttcctgaaaacatttttcggaattttctaccatttcagcagtttacggaaaatatccctttttggctctgatttggtcgcaaatccgtttttctccggaaatttactaaactttttcatttctggaattgaattttttttttcaatttagtccaggccaattttctgaatttattggacaccatttttggtttccgaaatatgtgcttaaatttctagaatttactgacaatgggcccttttttcctaaacaaatttattaatttttcgggagttttcctgaatttaatcgcatttatttaattcatttttaatcacttttttttaactttcagcaaaaagtccagcattgttctgttcggtggaaaaatgttaaaaattcctttttattcgctgatgccatcccgggcaaagagcgccgaaaattggagtcacagacggacgaatgccgacttcgcagttcactgcttaccgacaaaattacggtagggccaataccgtagtgtagtataaatttgttttttttttgtatgattttgaattaaatattatattatttattttggcatagaattgcttggactatttgcaaaattttgacactctgctcaattccctgcaaagtgaacaaaggcggaaaagcggtggtaaataatttgatgttttttaaggctggggggatttatttatatttatgaaaattacaaaatattaaaataaataatatttatgaaaaaatctccaaaattcagtaaaataaatttagaatttcgaaaaaacaatttaaaacaaataagcgtgttgaaatgttttcaggaaatgagatgaaaatgttgaatttaggttgattcacttcaattttagtgtccctgtaaagtttggtgagcttctgagcacttatcgaaaaattaggagggaaaaattttaggaattaattttgtaaaaaaaataaataaaataatgaaaacttagaattttttgaaaaaatttttaaaaccaataagcgttgaaatattttcaggttaagttagtcttatagttttaaaatataaattcctaaaaaattggcttaatttttggtaaaaagttaaaatggaaaaatatttaccaaaatattgcgctgacccacgaaatatccaagtctcgaattttagttttttattattcagatgggcctaaggttaggcaaggagtaatataaagggtatattcgtattcagcgaccccgaaaaccctaaaaatcctaaattagactcattttgttgttataaattttgaaaaattttggacatttcgtgggtttctactcttttggacatttcgtgggtttctactcttttggacatttcgtgggtttctactcttttggacatttcgtggcttggacactttgtgggggcgccaaatattgataaaagtcaaaaatatatttttttttttttttgtatattggcattaaaataacattgcggtaggaaatgtttaaataaatcaaaattccagccctattgatgaaatttcaaaatttcaaaatttatttatttttttgttttttcagacaaagcganttttgacctgca

SEQ ID NO: 6447 - DNA, 5325 bp, Heterodera glycines
  unsure (1)..(5325): unsure at all n locations
taaaataatntgtcggatgaagatttttcactccataaattttctattttgaccatctcaataagaacgcggttaagcgagcatttgttttccatctgtaatcatttaatgattttttagatatttagagaaattacctcaattagattgattgcataatttgcatgcgacaagtgaagttaaattgcctccattatcgagaacacagtcataaaatcggttaaacgttcggctttctgaccattctcttcggttatttgggttggaaatatcaattcccgcaattaggtcggattttcggcgttttggagttgtgcagtataattcatctgcagcacccgtctcgtattcaatggcaaacgcagtgtcttgtccagaaaatccacaattttgtagttgcgaagataaatgtgatgaagaagccatttaattccgaggaaaaggacaaatgtttttggttctattggccaacaaatactactagaagatgaatcaatggtggttcgtcggctggtcgctcgggtgaagaaaaggtcgttccacccacccatcccaccccctccctcgttcaacacacatttgcatcaatttacataaaaaaacacctgcatttcatttacatccttttcaattctataattcgtaatttaaaaaaacatcgttaaaacatcgttggcgttatgcacatcgttaaaattaacaaaacgatgttaaatcgtttctttaaaacaaaaaagactcgaacccacaaaatcaaaacgaacaacaaaagtatttctgatcccaaatcacagttaaattttaatctctcggtcatattttcatacaaaaaataatttaattacctatttaaaaattttgaattttaatattttataattcacaaaaatatttattacaaaaaatttaggttttaaaacattattccagcagggcaggtccactatttttttaaatagaattaaaaaagaatgatataagtgatcattttatttatgtaattcaataatttatcgaccagctaagtcaacactcttctctaatacacgtttaaataattaatattctctctatccaaaggcataaaaatttattaattctttttcatatgcataaaattatttaatagagtgaggaacttttttgaaccttaacgaaattttgcaggtttataaaggatattagggctatcgaaagatactaaaattgttggttttggttggcaaaggaaaaaattatagccaatttcaattcaggcaaaattattattattactttttaatggcaccgcccgtcagaaaaaagaaaaatttttcttccaaaaatcgtcgcctcatttcttctaccgcaattggtgaacgtgctgaacagcaacagatgggttcacttgtgacaccatttggaaaaaagcgaagagttcgacgagtggccaggaaaacgaagaaacgaatttctttgaagaaaatgtgagccaaaaatttgttggattcgaaattaatggatttcattttaatttcgctcaatatttttttcgcttttccccatactttctagagctcgacaatttgaaaaaaggcctggacccgtaattggatgtcctggacaaaaatccaggtccaggaaaaatccaggcctggatccccagaaccaggtcgagctctaataatttcagttcggtgtgcaacgatgtttggatggacattttgccttgttttgaccgtcctcaactcggactcaaattggcactgatttcgccacgtttcaattcgttggtggacaaatattttgatggcaaaagcgaattgacaatttggagaccaatcgcaattcggcgcaatgacagtgtcacaacaacgacggcaccacaattatttgtctttgccgacgatgccttttctgatcaattttcaaagctctttggctacgatgccaatcctgggccatttccatcgctccttggcgacaatacaaattgtgtgccatttccattgcccgaccgtccgttgcacagcaaaattcgctttgaatgccttcagattcagtaatttaaaaaaaccaaacttttatatgggaataaaagcacatgactgccagagatatgatgatttatcatcatcattagggcttccaaaaatatggatataaaatggcgaaatatggccataaaacatggaccaaaaatatggacataaccgcgaaatatggatatagagagtagaaacccaccctagaagcttaaaaccaagctaaaaacatgtttttcatacgtttcaggccacccacagtccaggaaaaaatatggattggatttccatataattggaagagctaatcatcatttttgctaattccaaggtgtcgatgaatgattttttctgtttaaaataatgatttccaaagcacaaaattgcaaattttcagtgaaaatctgtttaaaatgaccaaaatttctaatgttttcctccggcggtgcgtagggctctcaaaactttttttatataaaaaaaaaactggctcaaaatctctaaaatattttgctgaaaatctgctaacaaattgcactcaaatttgcaccgtcggaccccaaaaagtgttttttctgaaaaagctttgcaaataaacaattttaatgatttttttaaggttctgctcggttttatgcgtcccctgctggggtaggggtcactttggcgtagacaagaaaaagtttgattacttttttttattcaaccaaataaaataatgttgatattaaacgataggtctaaatgttctttattagcctgcaaaatttcaggaaattatattcggtctaaaaagagatatggcgcgctgcgccaaaatggccagaaaaatgcgatttttgaggttttagccataacgtttttgtatcgcggctaaattttttgaaactttgcaggttaataggcactatcaagtcattaaaatcataccaatattatttaatttggttggtaaataaaaatgctatgactttctgcgccaaaatgtcctgcgccaaagtgaccccgacccggtcccctgagaattttaagccataactttttcttacttggccaaaagctatattcttcgtatcaaacgaaagcttacatgtatagaagcttttgtagaactttatttttatctaaagtacaatagaaaaaaaattatactcgaaaaatttgaatttcgtgtttctcaaattttaatgccagtatttgcccttttctttcatttataaatcccgggacttaaaactttcgtttgataccaagaatatattccactatagcttttttatttgttatccaaatccatcaatctaggtatcatttgaaagctcttaatttcgacttttttgcaatttaatgttataacttttttagtaattaagaatataggcattgaccaagtaagaaaaaaattaggtcctaagaaacagaggatgataattagtggtaattcatgggacgcataaaaccaagcaaaatcattttttcaaaatgataattttttgccggaccggctcagttcggccccagcccaagtttttgatctataacttttttctttgtcaaccaaatccaacattcttaatatcattcgaaagctctttacatactctattagacttacaaaaagcaaaaaaaaaattttcaacaagcaaaaaatttatgatgaaaaaacttgaaagcttcgactttttcgcaaaattttcatatataacttttttggtaattgtctaatcgttaagcaatagcttagaaaaagcttctaaatacattaagctttcgaatgataccgagattgttggactttggtgacaaagaaaaacgttaatagtctaaaaattggctgggccgaactgaggtagaccgtttttggccccactttttgttggcaaaatggtgattttgaaacctttcatctgctggcagacagacctcttgctgaataaaagcattccattttcaggtgcattgatcgctctgtcatcgcttttctccgtgccaacaagcaaatttttgacagaaatggcaccaatttgcagttgagtgtgtcttatgcattcaaacatgatgtgatcagaccaattcggcttgtttttgtccgtcaaatttggcccatttttgcgacaaacattcgctgcctgtacattcagcgcattggtgattttgtcaatttgcgtcgtctcatttcaaagacaattctcaccgatctcgacattcatatggtcgattccaattttatatcgcccgatgcaactttttctactggccaagcgttggtcaaatggttgcacacgccgacaaaagacgggcagccaaagcgattgtgtttcaaaaattttgacgaacaattgatcaacaaattcaaaaaggtgtggcccataacaaattcccgcccaggtcgattttccaagttccggccccggtcccggcaatttcaaaattccggacgtcaccaattaaaatatggttttctctaacaatacaagttgcagtgctgcactttgaacacaccgagtcaattttgggcttccagttcaataaataaattggcttttgtaagatagtaaagggacaaaagacggaggttcgagtccgttgtgctacatgtcatttttttattaatttttgtccaaaaaattaaaaaatttcgattcgaagtggattcagttcttctctattgacagagataaataaatcgtataagagatgtttttttctctgcactctctctttattgacatatgtctcgttttttgactcggtgtgtgaaataagttgattttttgatttatcaagcattaaaagtgggggagcaataccgactagggttggccggtaatcggtaattgtaaaaaaaaccgataccggtacttaccggtgatgcaaaaaccggtaccggtaactttccaatacattaaaatttttggacaaaatctttcaaatacaaaatttttattccgttttcgcgcgaattttccaattttgcgaaagttgtctgcccccattcttaccagtgcaaaattttaccggcggttccggtactaggtaccagggatgtgccgagccagacaaaatccgattccgattaaatcgccgattccgattatggcccaaaatccgattaattgcgattccgattacgattacgattccgattcggcacatccctgctaggtacttttatttttgataaaaccggtaccatttccaaaaaccggtattaccggccggtacagtaccggtaccgaccaccctataccgacagaacgcatgngactttgcttcgtcattagcacatatagtatcgcct

SEQ ID NO: 6448 - DNA, 2107 bp, Heterodera glycines
cgaaactgaaatttgaaagcaattttcaattattttttaaattgtcgttaagttaccaaattattctgaaaatgtcttctaatatttgtatattaccatcttttgtcggagttttcctgtcttcttgctgttcttttccttcttcttcctccagactgaactgatcatcattcattcctcaaaataaaatttatgaaataaaatttaaaataataatttttggctctattttaaataaaaaagttattttctaaatatttttggccattactttttttgaacaaaacaaattttatgaaattttgcagaataaaaggactcttggagctataaatgatacaaagaatgttaatttggctggtgcttctataaaatgctatagtttaaagctttcaaataatttaggccatttcttttattattgtcctgtgaactgcagcaatagggccaaatttttcgctttatttgattaataaatttcaaaataatttctttgattttaaaatttcaaaaccatttcttttattgtataattttcatactgtatccactcaattatacaaaattccctaccgtatccgtcttgtccaaacacttcagaactggcaacagatggctccattgttttggctcgattcagctcagcaattcgggcaatcagaacactcatttcctccgatgtgctcagatttggaaaaattgctgaaaatgaaaaattaatttaaaaaaaattaattttagcaaatttaattattgaaaaatgtttttattattgtattttaattatgaattttaacaaattttttacgttggagaggagaaaattcgtcaattttaaaacctaaatttaaaattttaattttaatttgtttaatgcattcagaaaaaacatgagcaaatgaaggctaaattctgctatagccgctgtaattgtgcacatatttataggccaaaaagtaaataaatttatgggcaaaacgatgacccaaaaaatggagaaaatgcgacgggcaaaagataagaataataaatatttgaataactcatagttttcttccgtttttatcttttatttattcaaattgttgccttttagtttgggcaaacggtgacccaaaaatgggcaaaactgcggggaaagaaatatttgggaaaagggcaaaaaaagttgagatgaaactttattaaaaataaaaatggtttaattagggagaaggcttatatttttggaaatgaatcataacataattggccaaaaacgggaaaatgttaaatttctgctctatttcacttcaggcgtcaataaatgaaatatccaattataaacatcaatttttcaaaaatcttaaaaatttttctataagagaaccagtgccctacgagcactgaattttggaaaattcatttatggagaccaaaaatggaaaaaatagtactttttggtgaaaaatggctaaaaactcgattcccgagtcgagaaatttctcgggttttttggggtttcagttctcgtatcgtttcccggggtcatttctcggttattgtatcgtttctcggggtcatttcccggtctcggttctcggtagaaatcatttctcgcacatccctaataaatcgagagaccgtgggacaaatcgtgctgggtcgtttcttaaaaactgccattatgagcagcgttctcaggagcatattccaataacggtctaacataagttttgtacaaaataatccaaatcctagaagattttgatttaataacccgaaataaagagcgcatacgtaaatatgcattctttattatttgtgtgacatgattggaaaattgcaatttattatcaatatttatgcccaaatccctaattgtatccacgacatttattatatttccaccaattttatatatttctttggggtttttattccccaaatgaagtacaaaagtttttttaattgagattctgatctgccatttatttgcccattctgataaattatgcaatgctttatgcataatttctgtttcggttcttgctttataacaaatatataatttaacatcatcagcatataatttaattcttactcctgatggcaaagcatcaggaag

SEQ ID NO: 6449 - DNA, 5032 bp, Heterodera glycines
ggagaacctttatcagaacatgttatcaccgttgccttaaagctctagctctacccttcagaaagccatctttttgttttcccaaccatttcttaatttcaatttaaaaaatgtcgacaattgatacgaagtcaaaccatgctgatgaaatgaaaccgaacatgcaaaaagggaccaaacgagcggcaaccgatcgctcagacgagcctaaacgaccccgcttccttagtgagaagtgccgccatcctcgtttaattgccttcgaagaaagagaagcggcgtgccagtattttgaaaaaattttcaagcgtgacaaatttttgttcaaaaattctgatacttccgagtctgaatcggaataaattcctttaatttaattaaccaaagctacaaataatcaatcgcccattcatgtgcacccattattttttcttatttatatgctaatattattcgaaagctactaatattctaagctgtgaatatacacaattcgatacttgaaaaagcccttaatttgcaaaaaattaatcagaattagcgcaattcatgtgtaccctttacaacccacgtaaaaatatgatttatatgctcgcgcaaaattttttacgaatttatctttagctttcagcttataatcatagcttctaaccaaatagaactgctcgaaatgccatcacagttgactcctgaaatgatttttgataaaatttgcaacgatggatcgacaaaaatggacaaaaatacattgcaaagtctcctttcgaatggcacagatcgatctttcaatcaggacacctgtaggcttctcatcgacctgtttgactccaatcgcgatggcatgattgatcggaatgaattttggcctctttggaaggtgattattgttgcagtgttcatctttgacttgtcgtttagtttttgataacacattgttttaacggttcattttagtatgtggacgaatggaagatctcttttaagaatattgcagccgaaggtgagctgacaataggtgttgaccgacttgaaactgctttaagagaatatggtgagtgggcattttttgtctacaattccgctgtgagaaattggcagcgggcgctagcacaagctgtcgatttctcccagcgggcgctggcaccagctgccaatttctcccactattctaaatagtttctttataggatacagattttctgtcaacttttactgtacattattacgaaagtatgatcgcacaatgtcgggtaatataactgatttagttgttttcaatctgataattatttaagatcgcttacactttgatgattttatttatctttgtcttgtgctgcagcaattgactactccattccgcgatcgtgactttgatcagaaaggaaggattagagtttgtaagtaccatcttcaaaaattcatcccaaataattctttttaggtttcgaagactacatcgcgatgtttttatccacaatattataagattttcgcatttgctattaaattttgctctctatttggatttttattggtcattttacgttcaatgacgcatataattattaacttttggtttaaatgtcactataatcgtctttttgacttaatttccagcaaatcatctcggtattctctccccatcggtgtgtgaagatgaacaacaacaacaacaacaacctgaaacgattccaaattaagccaaaaggccccgaggaacaaccaactttgcgcacgaaaacgctcagcgaggtccaggagtttgatgcggctggctctttctttctgcgcgcaaagattgctagcgttctgttttccatctacaaggtgatggacaaaaaaaacgcttgctcctttgtcgcattatgcttacaatttaggcctgtccgatgcgtagcaacggtattccatgtcgtaagaaacttgacgaggaagacttctgtgtctcgtgcgcacatcgcgccaaaaagcccagccgcaatttgtaccttcgtgttgtactccgagattgcgatgatgaggaatgcgagcagcagacaaccgctttttcccatgtagccatcaaatttctgggcattgccagcgtagacgccttttacaacctatcagagaacgcgcccgataagttggaatcgatcttgcagtcgaaaatcgaccaaactgtgttcgtcaagctcaacatcaaggtgggtagtgtaaatggtcctcccgctattatctagtccagtgtcttctacgtaaaaattatgtcagataaacatgtatgttttaaggaaaagaatgagaccgcgacgctagactggattatttcctcaatatctgaggaaaaaccggtggcggtggtagtggatgttgaaagcagcgatgatgaggccgaggatgggtcatcatcttcaaatggttcacctaagaagcgcaccaaaaagaattgatgaaggtgctaatgatgatgatgtatggcgccggtaacggacaagatgttgacccgcaagccaaattttaaggctagatattctctgatgatttttagcattcaaccaaaaaaacgctttacaggattttttgcttttcatcttaaacaagtcgcttctatttgcatttgccatattatatatatagtaatgcgttaaaaaacgctccttatttccaccgaggtgctgaagatgtgcgaaaacagaagcattaatctcatgtttagcctttttcttttgcacacaaccacaatacatttgaagagtcaaataatgaaaaagggtgaagacgacactgctactgctgctgctgctgtcccacgaggcaaacggcccaactcaaactctgtatcagctgcccatttttctactgaatcagaggagatgaaaagttgtaagaaggaagagccgatggcgaccggatgtcgcaaaggtgcgaaacgacaatacccttattcgttgatgtcagctcgagcccaagatgtgtggtaagttttcagacccaaagtaaagcgtatgaaaataacccaggtcgctaaaacttgaccagttggaggagaaatattcaagaatggaagaggagctttcggaagacagcgatgatgcaattgatttctacgaagacggtattgatgatattgtggaaaagtgagttagcctcctttataccagctagaatgttatccattcatcctttttttttaaggataaatcgtttcgaagcaaaagtgaaaaaatggtcagtaaatcatggaaatacgccagtcgtcaaaaaaccacggttagttgttttcaagcagacagaacgcaccacatattatgacaacatactgaattttacagttataacacaaatgctgatgagaatagcaatgatgctgatgatgatgcgccaacatcgactgtgtacctgaatttgcacaatgacaagatgatcgagaaaacaaattaaaaaaatccctgatatggtttaaaaatgatgataatgatgaggatcataaaaaaactccgatatataaaccgattattttgtgagtgttttattacccaattaacattatcgcgaaacaaaattttttttttttgaattcctgtaatttgtattcagctaaatgccatccgattctgatagaaaaagaaggacaacatcagaaaaaagctccaagcaaagccaaactcagcctaaacaaccgagatgggatttccgctcgatgtcctattttgagaagtatccgactgagccacaaatggaagaggagatgaggcaactacgactagcgacagcaaatgatcagataggcacaggcgatacccacacatcggcagattcagaacaacaacaacaacaacagaagcaacaaccgttgtataaagagatcaccaaccatgtacataagcttgagcgattctctgtgcagcgccatgtcactgaatttatgcttaacgctcagcatgatgagcccgatgaagcgctacgtcaagcgttcgatgagctcattgccagagctgtacaaaatgcggaaaagaaaagtgggcgcgcagtctcaaaattaggcattatggtgtcagggaaagtgttaaacgatccagtagtgatacctatgcgccctccaatccaaaacaacgtcgacgtggtgatggctgagcttgacaagttgggtcagagcgagggagacgatggaggtgctgacaaaaaaactttgctgctcagcgatcctgtggagatcatcgtcacctgtttgacccctccagtagggtcagccccacgtttacatccataccaaaattggggatacgatgaatcgcaaagaattgtcatacgcaacaaggatagctactgtttatttcatgcgcttgttgcaggccgtgcctatcatgaccgcgatattttctgccttactcataacccaatagatgagcagcagcctcaatttatggcaaacataatgaacagacacgatttttgcaaagactacgaggcattcaatcgtctggtatcaaacattggtcgaatgcaaactgcagttgaagagctgatgaatgcgtcgggcattcaaaaggaccagacttcttatggaattgaacatattcagcaggttcaacaatactgggtatgatgtattacaaaattttaatcattatgtgttagaaatatatttcagaatcgtgtttttcccgggacataccgcttagttctgtttgaagatcgaccagaagagttacctcggccaatatggaaaggcccaggagggcatcgttttaacgtcacactttttctatccagcgatcattatgacgtaatcaaaaaaattcattgtttcttcaaacttggtcggaaatattgcattgagtgtgagtgcacgtacactgttgacgctaaacatacaatgcattgtaagagcagatgtcctcaatgtgctaaaggttagaaaaataatgttaatattttctataaccaaaatgtttagtcggacctcaacatccatgcccgaaacaagacggtgtccaaattttgtgcacagaatgcaaccgttattttttttcgcgattctgttacg

SEQ ID NO: 6450 - DNA, 2312 bp, Heterodera glycines
ggtaatttttggctatgtttctgttaaatcaatttctcagcgtgcttcccattctgaatcgcgttttgctgttcttgcaggtccaaacatggtacactttattatatgaattttttggtttcactttttttttaaattttaggcgggaaaaagcacttatatggtaatgttaattttactttttgttgtttatcgtacatttatttccttttagcgccaagtttgcatgttgcaaatattagcccaaatgggctgtatggtccctgctgaaagtgcatcatttgtgccgatgacaaggattttttcacgagttggtcataacgatgatttggtgcagaatctatcgggatttgcagtcgaagtatgtccaagttgtttaattaaaatatgaattcattttgaatggatttgcgttgtttttcatatgtccgaaatggcggtaattttgcaaaatgcgaatgaaacttcactgataatcattgacgaattggccagaagtgcgttcatgaattataacaaaataatttaattacaatatgatttactttttgcctggcatttattttttataggcacttccaccgaagaaggcattggaatttgttatgcgatttgcgagaaattgctttccactggggtgtctaaatgaaaaatacttacagtattctaaagtgtttgttcaccctttaggcctttgtgttttttgctacgcatttcttggacatggcacaaatggcattgaattacccaaacattgtcaaaaagtaaccaaactgattttaattttataatgcatcaatttcagctatcatttcgcttctgtttcgacgattgaccaagcgacacgattggaaatcctcacgccatcgccacaactccacgaaggaccgtatgaagggcctttatacggtaagatcaacaaaaggcattttataatgctgttaaatccagtgaaattcaggattggaattggctgagttggcgactttacctcaaaaaatcacacaggaggcacgccaattagcagagaaaattaggaaggcgaaggaaaattagtaatttataaacacacggacattacgtattacattttattaagtgtgacttcgtcgttctttgataagtcagtcgcatctgtacagtgatttgaggatttttatattttttcaatgtctcccatgtatttgtctgctcatttgtgcttttgagagatgtccaaattggtgataattgcaaatgcattcattgtttatgttcctcattatgtgatttctaattttccatcaaatttattgtatacaaatatgtatttgtgtaaaaaggcattgttatacaaaatagaatgacaattccatctgtttccatcatgcttttgtcctcctctccctaacttcccatattttgttcctcctcctccgtttctcatccccttttctcttcctctttcaacgcttttgccaccgcttcggcacatcgccacgcgtcttcctcccccacgcacattggtggctttatcctcagcacattcccttcatttcccccctttccgaccaaaacgccctcccgtcgaatgcattcgaatattctctcaactctttccgtgcccaacaccctttgtccatcctcttcgaccagttcaattccgatcattaaaccctttccccgaatgtctcccaaaaggcgggaatcgattcggcacaattcactcagcagaaaattaccaattttgaagcaattttgctggagtccttcctcgtcgattacctgcaatcaattagaatgggtttccgtttcgaaattgcttcacctcgagtactgctttggccacggtgcacgccagcggatttcctccgaaagtattgaagtatcggccaccctccatcagtctggcaccgatttcttttgttgtgattacggcgcccatgggaaatccgttggccattccctttgccatcgccacaatgtcaggcacggcattttgactttgaaatccccaaaaatgagtgccaaggcggccaaagcctgtctgaacttcgtcacatatcctaagtcctcctgaaatgttttcgcttttccaaaaataattcgggcctatttgcctctggcatggatctcgtcgaatgcccgctttaggtatccctcggggaattggactgtgccaccgatgccctggatgggctccgctatcattgccgctggtcccgttgtgctgggaaagtcgtgccgaagacaatcagtgagctcgtcgagatggtagtccaatgcgcagcacttcccttcagcatcggggcgttttcacaaatacgattttg

SEQ ID NO: 6451 - DNA, 4266 bp, Heterodera glycines
  unsure (1)..(4266): unsure at all n locations
agtccatcgtggtacgctttcgcagactgatcacgtcgaaacgcccgtgtaagtctggccaatccagcgccaattcattggcttccgtcccgattgacgaaaagcacgagctgaggtgccgggcattcgtccgaccaattcctccgcgtattttccatggcatccgtttcgtaaatggtcggactgtgccacaacaaatccgcttgctcctttagtcgggcggtcacttttctaatgcaattcgttggcattggcattaatttggacccacgggtggcaatggccgacagaaacggtgacaattccgccgatcatgtccaaatatttgttgccctcaatgtcccacaaaaattgcatctttcccctggcaattttcagcggctgtttgtaataagcaatggacgaagcgggcaaaagaaaacgacggttcattttaagcaaaaatcaaaaaataattatggacggaaattttttttttgttcttttggaaggaatcttttaatgatattacaaacaattagaaatgatgtgaccgcaaattgagaaaaaatgggagggaaaggtcaacgaatgcggaggagggacatcaaatcgatgaaaggcaattctcagcatgacaatccaagcagtaccttcaatttccctatcttttccattttgaagaacacaaatctatcataattggtttatataattaaaagtgataaataaatttgcagtgaatttatcccaattgttcgttcatgaaagacatcaaaaatatttaaattaatgggtctcaattctggcaactgtaaaataggaggttatactagttttaacttaaaatatttaaacagtcggaacaatcatagcactcccattttataaagtgccgtaattcacacaaaggcatagaatcaacgcaaaaatcaggcaattggcaggtcactgtacaagaacaaaagagctactgcggcacaacttcggcacgcctgccactttttgcagtcatcgcattcggattttcatgccgcgcaatcagacgttcaaccatcacctgaatttgcaaaaaatatggacctaaattgtgattattcaatagttttcatcaagcgaattaccttagtgtatttgagtctctgacacaaatctttaggacatccgtatttctccaaatattggaatttgcaggtaaagacattcttctgctggtctatgtatgtggcggcactcatcagcggacacacaatcaatttggagtgatcctgaaaagacaaatcccataataaatgtgcagaaatcaccaatattagaccattcatgtgtttattcaatgcgcacctggaagaagttgatctgcagagtgccgttgctcagatgcaagacaatcgccgactttgtccggaaccacgtgttcaggcagggcagccgcgccaactcgtcgccgtcccgcatcttaatgttggcgcccgccttcatcagatgctcgttcatgtacgaccggaagaacttgagcagagtgatcttcttctccagcgcctgcgggtatttgttggccccgtaaaagtgttcggtgttgttccgctcggtgtattgcaactgactgaaggccaacggaattggcatttctaattcaacggagccaaactcacttcccagccgcgtccaaaatgactttggtgttgtcgttgaacagcaccccgacactgttatcacacagctggtagcccagtccgtacttgtccgagtagtcgacccaccgagacacccaaaagaagggttgcgccctcggatcttcgatctcgtctgagaaaatcagaatcagtcaggtatttatcacaatcactgatccatcacctttgtccgcttcgctgaaccgctcgggatttgtattcagcagagagcacagctgcgcgtacaaatcggacaagtagaaatcggccggcacatcgttgttctcgcctaaacggaagcaatcgctgcaattaaacattcgcaaatgcggcagacccgcggccatctcagtgatgagcaccgatgccacgtcctgctttaccgccaccgcctgcggaggcactttcgtctcggggacggaggctagcggcgcatgtccagtgaaagcggggcctttggcggcacgaggactggggacatggtccaactaatagtgagaaaatgttagttctagcaaaagggaatgccagttccactcacttcgggtcgccgaatgagtccgcctgacaccgcctgcatgttgaacttgggagccatggtcagacatgaactcggcaacactttgggcaaaaagccgtccgtgaagaattggaagttgagaatttcggtgacccgcggtcgcctcgctgggtccggcgccagcagacgagtgatgagggaagccgcgtctttgcctattttgggcggaatggtgtactggttggccttgatgcgattgtacgtgtcctaaacgaaatgaaacacttgagtgacaagttatgaaccacaaaaaagcaccttcaaagtttccgtctcaaatggcggcttccccaccaaaagtgtgtagagaatgcagccgatcgcccaaatgtccacttcgtacgagtgccctttcttgtccagcatttcgggtgcgatgtaattgggcgtgccgcaaagcgtcttcttgcgctccccgtcgtagtccaccaccgtggccaggccaaagtcgccgatcttcagctgcatttccgaattcagaaaaaggttgccaagcttcaagtcacggtggatgattttcttcccatgcaaatatttgcaggcttcgacgatctgaacaatcagtggctaaagttggcaaaagctaattcgaaactcggctaacttggaaagtgaaatagcgcgcttccggctcggtgactgcctttctgcgcttgtgaagttccatgagagagcgccgcgaacacaactccaacagaatgtaaacattgtcatcatcctcgaagaacccttccatcttgacgacgtgcgggtgggcgagcgcttgatggatttggatttcctgagccatctaaacttttcaaataaaactcactcatccgctcaattcttttacttttttaaaatcatttgtttattttggacatagaaattgtgccagctttcaccttgtctcgctgatgtttcttcaccagcagtgttttggacacgactttgcccgcatagattttcttcgtttggttgtccgtcaactcatagcaccgtgcgaagccgcccttgccgagaaaaatgcctttggtgtaagtccgttttgtgacgttattctgtacgatgaaaggcacttccttcagcacaggctttgtccgcttttgtgttgacatgaaagtaatacaaatttagctatcttaaaattatggaaatatatgcattaatcattttttaaaaattctcgatatatattaaccaaaacggcgctacttgcaaagagcgctcttttgaaattatcaaaaagcaaaaacaaaaggggggacccttttgtttgcaaaattttttaatatttggtcatgaaaatttattccctggggttcttggggtccaagacctcgaattagatgtcagattcgtgatcagcgacctctaaaacccccggataacaaatttttcgtccctctttggtttttttgggaatcccaactgtaagcatcgggggtcttaaatctgtaaatgccggaaattaatttgacttcgatatttttttaattgtttcccttccctaattcagtgacatttacgagaattgcgaaacgattccccaaaaggattgcctctcgataaattctgtcgctgttgccgccaaatccgtcaaaggttttctcgtatttgtcggtcggaaggatggctcaattgcaattttttcgccatcaaacgcattcaaagaaccgctgaaagtgctgcagggacacaaatcgaatggtaattacttttccaatttcctattgactttatttttcagtctgtacacttctttatgacgaaaacacgggccttctcatgagcggttcatgggtatgttatacctttgttatcacattcattgtcagacttttctccaaaaagcgcatttttgttttgttactccattacattgaaccccccattttgaggatcacatgggctntggtttggcccgtcgccgatttgctggtcgaggatggntcccgaagttggcattggacttctgtccgggcatacctgctccgtgtgggccgtttcggttgttcccgccaaacccgtgcctatttttttgaccgc

SEQ ID NO: 6452 - DNA, 5498 bp, Heterodera glycines
aataaacccaaaagttaaagctaataaattaatgaaaattttcaaatcaaattttcttcatttctttcaaacaattaatcatttttggactaagtgatcgaatattattagaaattcagattacgtttcacataaattttttcggcgcgcttttttcaaaaaatttttgaagaagaaaggggtccggcggtgccgataggcgccgccggtggaaattttgaaaatttgagtgagatttgttcagattttcaacaaaaaaggctggtttttgggattactaggctcaatttgtacggattttctttaaaaaatgataaaatacaattaaaaaaaattaagaataatattttgtcgataggaaagccacgagtatataaaaagaaacttcaaaatattttcatttctgtagagggatcgaaccaggggaaagaagaagggaaagtgaaggagactagccactaggccatttgcactgttggtcttgctactttatgaatatatttaattattatttctaaattttttcctttaactccaaatttctcactaatttttgcactcagacccccattcttaccagtgcttgtttttcccggttgccctaccgggaccgggacctgagcttttcaaattccgggaaccgggaccgggacctcgaatgaccgggaattcccggcccggtcccgtggcactctaattacaacttcaaaatcaatttttgtaaattgagcaaattccgcaaaaaaatattcgaaaaaatcacttccatttatttattcgatcggcgcaacacagcaaacatataacatttatgagttatgaatacatatgtatatacatagtattgtacaacagcgaatatacaaaaacagagacaataacatcataagacacatcggtcaatcattcaattctcatcatatacgcacgtcggcaactatttcttcacaaagatgttatggtccaaaccggcaagcgtctgatactttgaatcttttattgaaaaagaggggaccacagacatttatttatttttttatttattaagcaagaaaaataagtcacagaagggcggggaccacttactctgtaactgtcaaaattatagcgaaacagagcaagtgaataaagaaaacaagcaataaatgaaaataaatcataaaaataatcactgtcaaaacaaattaccataaatgagatcaatgtcaattatggataatccctcccaacttttaaatttttgtgcattggtataatatttaaaattttcttaaatgtattaatcgaatttgttgctaatattgttttatcaagagaattccaacttttaactgatcgatttacgaaggacatggatgatttcttagattgaaacttggaatttaatcaaaaaatgatttattcctagtatttaaattagtgcgtttaaacatggaatttggatctaggtgggtgagaccatgaattattttatatgttgtaagaatatcaaaaatttttcttcgtttttcaagagttggtaatttaaaaagttcaagcctttgtccatatgggatatatggcaaattacattttcttaaagctatacgagtaaagtacttttggcatttttcaattttattaatgtgaatttttaactgagggttccatgcctcaggagcatattcaagaagaggacggatatacgacataaaaatgattttccatattgaaattctttttgacttaataatccgaaataaaaatcgcattctaccgtaagcatttctagttacggtatttatatgttcagtaagtttaagtttattgtcaataagaatacccaggtctcgaatggtgtccacttcgcaaattgtgttgttatttattttatattgttctctagggttatttttgcccaagtacaaaacaaaggttttgttaatagagatgtcgatacaccattcattagaccaattggacaattgcctcagagcttcgtgcattatcactctgtcagttttagttctatgtattgaatacaatttgacatcatctgcataaagtttgataaaaattcctttcggaattttcttaggtaaatcattaatataaataagaaacaaaataggtcctagaacagagccctgggggacgccagagcacattttgtattcagaagaaaacgaattttcaacacgaactaaaaaggagcgattggccaaaaaatcaaaaatccaattaaggattttacctctagtcatgttttaaaaggaaactagtaattgccctgacaacaaattttttaaaaattttacacagtgaacatgtgagggcaattggtctatagttggtgggacaacttttatccccttttttaaagagaggaattattatagattttttccaaaaggtcggtaattttccggtatcaaatgagattctgaaaagttcggtaacataaggtgcaaaagaaaggaaacaattttttattaacctgaaatttataccatccggtgaagtattatttttatttggtaaagatttaaggacccggccaacatcaacaacattaaattcaatatcattaattacaggagagtgactagataaatcataaggtaaagacttagaattatgtaaataatgttcagaaaaaacttttgcaaaaatttcagctttttgatcaggagaaaaaataactgaattatcataatttaaagtgggaatcttttcttcacatttgatatattttcttaggtacgagaatagtttgttcttaccaccggatagtattttattttcacgtttaccaacaaagtttctggtttggatactaatatgaagggagatacttttatataggtgttcatatttggctttatctcgtttcattaatctgattaagggtgccaaccccgaccccgccccgaccccgaaccccgacattttaggccatttttcggggttaaccccgaccccgaccccgacgcttccaaccccgacgaaccccgaccccgacccttaaccccgactcggggtcggggttaaatatacacccctaagaatggcattttcgtgggggaaaaggcaaaaaagttataagaaatttgaatgttgtctttgaaatgacaaaaaattttgaaattagaacattttgccaatattaataaaattatctaaaaataaatagaaaatttttctcctttctgcatttttcaggttaatatattgtacctaatttagataacatgtctgaaatatggtctttttataaaaaatcgcaaacatcggaaacggcattatgtaacctttgtcgcaattctttttcgtgtaagaaatcgtcgactaagggattatgggatcatttaaagacgatgcataatgacgaatttgaacaatggcaaaaaaacaaaggaaacacaaataaagaagtactaaatttaaaaggttctgtgatttataaaattttttaggggcaagaaaacaaaattacgaaattttttcaacaatctgatgaccaaaagcaaaaggccgacgaattggttctgaaattaatgttgcggacaaattcatcttttttaatcaccgaatcgcctgaattgagagagctgtacagcaaagcatttcctggatttgaagttattttttctctttattattcctaaaaaaatcattttttgcagctacatagtagggaatatttccgtaaaattgttctaccaaaaatggcaaatgcaatcaaggagaaaatttgttcacaagtttcaaacgattatttcacaataacaacagatggttggagtcaaccgacttcaactccttcattattaaggttataaattctctttatgttatatttaagttaaaattttagcattactattcatcatattgacaatgaattcaaccgaaacgattttgttttggaagcagtacctatcgaatcacattctggcgacaacattgccgactcaatttatgatgcacttgatgaaaacggattaaaaattgagaaattaatttccattgtccgtgatgacgcaaaaaacatgcagcgaatggctagggtcttaggaaaatcaaggtaaaacattttataagaacgaaaattattcgaaaatttaagtcatcaatgtgtggctcattttttacatcttgtggcgcatgatgtactcaaattgggccaaatcaaggaacttacggacaaagtacacgaatgggtgaaattttgccgcacaaggaagggatttgaaattttgagacgccatcaagaaaaacaaaatactgagaaaataaaattagtccaggttaaaataattttctacaaatctatgattttaaattcagtcggttataacaaggtggaattccgtttacaaaatgcttgatgtttttcgtcgtcagaaaaaggcattgctttcaatggaagcagaacgcactgaatttcatttgcttggttcacaggcaaagcgttcacggctcgattttgtctctgatcatttaccgccgctaattcagagtgattttgtatttctgcgccaactttgtcctttgttggagctgtttaacagagaaactgaaagagtaaaaacaatttaatttataaaattttctgattttctcattttaagttttcacgtgaaaagtcaacttgttcttgcattttgccaactctaaaaaggctttttgattttttaaccaaagaagaacaccctcaacaaattatgataattgcgcaaagtcttgctgaatcaattggctctcgaatgcacaattacagagaaaatgaattattgcgaatttcaatgttgttggacccccgttttgcgtatgatctgaatttatttatgagtggtttctggaaatcaattgcagaggatttaattgattttgcaaaggaaagtaatttaaacaattttaaacagaagtttattttattttaagttaatcccgaaaatgaaaccaatgcgcaaaattttaccgaaacacaacaaatgatcaatcagaatctgctcattttacggattttagtgaaagtgatgagagcgctttaaaatgtaaacaagaatgaaaaactttaatttttatttaaaatttagtggacatttgaaacagtatataaaaggataaataaaatatttatttgctaagggaaaatgaataataatttagtggtctggttaaacgtggatttgttcccacggcttttcttcatcggattactgttgccaaatttgaggactttggcattggcaaaaacaatgtaattaatatttattagcaaatctaattatatatttttcttaagtttgatgtgcgtcaatgcgctgcttatgttgaacaaatatttaatttttggagcaaaagcaaagataagatgacagctgatagaattgataatcataatataattactaacgatgatgtcgaaattatttatcccatccaaaatcaacatgtaaaaagtcatttccatctaattaattgaaaattattttagttaaaacaaccaattg

SEQ ID NO: 6453 - DNA, 933 bp, Heterodera glycines
aacgcgacggcaacggcgactgtcgaggaggaggcctcactaagtgccaaaacagcaacaacagcaaacactgctggacctgaagaagggcaagggggaggaccaagaagaggggtggaaggaggtgcgcaccaagcgcaacaaacgcggcagcaacaaccgcaacttcgccaattcgaggcagtggacgaccaatggcggcgaactcgacttccagttcgactcggagatggaatccgttggaaatgccgcggacggtggagccgaggcgaggcgagtcatttatttggtcattaaatgttggccaattaattaatcggctgacaatttctggcaattttcttggatgggtatatggggagcaggatgaaaggtcgccgccgaagcatctccaggacaaaatgttgtcgcagttttttttcaaaaatataaaaaaaatatgtcaaaaatttttttgttacctagcctaattctaaaaatttttattaagaaaattgaacgaaataaaaaatttattttttctggaaattcagcaaattttgttttcggtaacactaggttttcaacaaaaaggttttaacaatttaattaatttattttttgtgatgtttatgccggcgacgttttggggtgttcccgggtctatgacatgacaattatttcttgtttttgcttattttagtgaggacaaaatttgggacgatttggatgacgcgatgtgcaacaaactgatcatcgtcacccaaacgccgccttcgtccggcagaaaagggacggacgtgcggaaaatggaggacaaaatcaacaaggagatggagcacacgctgagaagatatgagcaggagctgtggtcgagcaaagcgcagcaacaggcgctggtgggcaaagcaaaatagcaaaagaaaatgcattggcaaagcctttgtgaggggg

SEQ ID NO: 6454 - DNA, 4988 bp, Heterodera glycines
ttcaccataaaaatttcttgaaaattttctaagttagctcataattttaaaaaatttctcggggtaaacgatgcggggggagtgaaacggcgggagggaaacgagctgctcccgtaaatggaggtatccgcggcggtgggccgcggactgaaattgaatttaaacgcgcgcatttccatagtcccacccttgcagcccaaaaaaaaaaaattcgggatgggcacccgaagagctttaacggccaaatttggacaaattcccttccccctggttacgggcatgcatccttggcattcggttttgaattcatatggccctagacacctttgttcaaaaaccatttcggaactctgcttcttatcctttttcttttttacagaaagatgcacgtggtgggcaatgccaagccaatgaaatggcaaaagggcgctgctcttcggcggacgaaggcaagcaaaatgcgcagagggaggaggggggcgcgtacaatgtgtggaccaaaaaggcgttggaacgagcggctgcgagcgcctccattgttcgtcgtttcgttgctttttgttctaaatgaaattcatttccccgggattatatttagccaaaaagtccggtggccaaacgcgaagagaatgacaagccggtgaaacgcttttaccccctcaacccgtgggagaagcagcaaccgaacaacaacaacaggcaaaacaagggcaaggagaacggcacacgccagccccaggtcatttggcgaaaactacctgacatttgacgatttgcaacttggtgactcgacttttagagactatacacttagggattccgacatttgaggctttcggcaattgtagggattttaatttaaaaaaatatttaacaaaaatttccaaaaaattatttcttaacaaaccaatttgacaatctcgttttcactcgaatgctcttggtgaggataagcttttaataaaaatttgtcgaattttcggctgaatacttagtattttcattaaaatcccccattgtcgtgtcccaaatgtcgggtcaacaaaagtcgctttataccaaatgccgagtcccctatgtcggaatccatgtccctaaaagactggtccaaaagttacaaatacccaaattttgcgcgatgcttggcactggagtggtcgaaatagaaaagaacatttggaaagaaaagtcccaattttcgtgtcttcaggctatgcctgtcggctgggtgctcggcgttcgttccaaaaccacgtccataaatgaagatgccggaccaagccatccgtcgacctccgacgctctctcaacaacggtcaagccaccggcatcgtcgtcgtcgattgccagcgttcttcctcctcatccctctttctcattgattcaagaaaacgggttcgaacagcgggttcgtttttcaggagttattaataaatcgtcggattctatggttgccgaatgatccaatccatgttcaggtgtacactgattggaggagtcagtgcaaaaaacagcgtgaggcacttggctacgacattcccgaggtcaagcattttttaaaaattatctcaaacattcaaataaaacaggccagtagcccgaaaaaaattctggttaggggggggggtggaatccaaaggccttgccattcgggccaaaaatattttacccagtgttatttttcaaaattttcagcgccgggagaaaaacaggaatctgtactggttttgggctaacaaatgacaaattttgcccttttacgggtctattttttcaaaaataatggcaaagtggggtccgacggtgccgatgggcgcgccaggaaattctttgcaaagtttattgaaatgataagaaaataatacaatttttttaaaaattttccaattcagatgcatacgctctatcggttttggtctctggttttgcgggacaatttccacaggtcaatggacaacgagtttccgtaatttgcactggaagacgctgaccatgggtaaacgaattcaaaaaggcgtcttctaaatgctttacctcccattcattcatccatccctttagccttcggtatggcattgaatcgcttttccgtttctacagctatgggcttgagaagaagttgcgcccgaagctgtacaacgatttccaagaagccactttgcaggacgttaagcgcggacacacttttggtctcgagaaattcctcgcctttttgaaatgtctctggcgtttgatttttttatgtatttttaaacgaaaatacgcttttttcagattgtaagtacagcactcaattggaggtgatgccacaaattgccaaggaattggccaggtaccgcagcaccgatttattcgccaccgaagtgagtgaagtggaaggttttactcggaccaggccgttttctacgagcataaattgttggctataactttttttttctttaccaacaaaatccgtcagtcttgttatcattcggcagccctaagtgtgtcctctattagcctgcaaaatttcagattaaaaaaagttatggtccgaagagttaaaaaaactggttgttcgaacgaacattttttgccataacttttttgaaccttaacgaaatttctcaaaatttgcaggtgaatagaggaattttagggctatcgaatgataccaagattgttggatttggttggcaaagaaaaaaatgttatagccaacaacttgcttgtacgaacacgcccctaacccattttaatgtgtgaaaattgaaaatatctatttaagccagcgaaagccgcaaaactcgaattgcagaacgagtcgaagaatcggagtggcggccgtaatgtgatggtcggtgcgggcaaataaaacatttcattttgttgattgatgcttgaccataaatgccttccgttgtttgttttctcctccttcgttttttttttgcttattagcatccctttccgctgttgacttccatttccatgattttatgttttccccatgaaattatcgcccatcaaaaaaagccaaaaagaacattctctcttgttgtttcaccaaccacttgaacatcaaaaatttgagtcacactttcatacctgaacacgggggggggtctcttagtcgatcgtaagggttcgagacagtcgatcgtacgaggtggggtggggaaggaaagttggggggcgggggtgaagggaggaagagggagaagaagaaaaaggagtgagagaaaaaaaaagtcagcgaaaaagtcgatcgttaataaattttttcatagtcaattcgaaaaattgccttatttcttaacaaatttcattaaaaattcaatatttttacgatcgactaatcctgatttgagaaaaattctcgagtaagaggaaagtgggtaaaaaaaccccgaattttgcctctttaaattccaaatttcttcgatcgactaaccctgatttgtgagaaaaattctcgatcgtaagaggagaggggataaaagaattcaaaatttcccttacgtcgcctataaaaagccttatttttcctaaaaaaaaattgacttaacgctaaaatagcactgtttagtgaaaatctgttagcaaatcacactcaaattttcaaaatttccccgccggcgcctatcggcaccgccggacctcttgtggtctccagttgaggccaaagtcgatcgtaagaccccttcactgacccccccccccccccttgttcaggtatgcacactttactcagtctttgcacttttctttgctctgcattgggtggacaaaaccagacagggggtggtgtgaggtgatgacaactcgtacaaaggcagactaggcctaattcgctaaatgtaaagtaaacgttgaaaatggacaaattttttcctaaaaatcaacctgaaaagcgaaattttcgcttttttttaaattttattattgacataaatttatcaatttttaatttaatttattcaatattctcgagaagattttgctacaaaaatattttttgaattttcggtctttggggtcaaaaaggccaatttagctgatgggggccgttcgttatacacagcgagtcaattttgggctccaagtacaaataagtttattatttatttagtaatcagaacgccaaaactttgcaaaacttaaaattttccggagattttcccttgcaaaaaaagaagagccgatctcgagttaaaaactagacagctaaaaaataaactgtgattcgatagagggggtcaaaatatgggcctatgcaaaatttgaagaaaatctgaccctaggaaaaattttttgacccaggacaaagttttttctttttctctcattttgatgcactatttccatgtctctaacatataaaataacacatggttcattttttgtcaataaacaatttttttaaacttttgactaattaagaaatattcttcagaattttcccttcaaaataagtataaaatggttttatttggtctattattgacaaagttataagctaaaaaaatctatatattaattttgccgtgtgtgtcacaaagtaaacaaaaaatttaaataaagttttgacgcgattgtttttatttggatggaagaaatgaagtgaaaaaacagagataatagagataagttgtattgtaagaaagagtgaagaagagagagagatgaagacagttaggaacaaagagcggagagtaaaggagagagaaatgattagagaaacaggaaaaaagagagagaaagtatgggagtgaatgagacagagacaaataagagaaagagagagaggggggagagagaaagaagaggagcgcgagagagagaaaaaaggacagaaagagaaagagaagagggagagagtgagagaatgattaaatcgagagagaataaaaaaggagttgagagaatgaaaaaaaggagagagagataaagagaaaacaggaggtagagagagagggggagagagaagagaagcgagagagaga

SEQ ID NO: 6455 - DNA, 5871 bp, Heterodera glycines
acaattttaagatattttctaatgcttcatctcgtccccccccggcattgtcattttgcgcttgagtaattccgctgccccgttccatttgaccaatgcattgactgggaggcgattgaatgggacttcagaaaacagtggaaccgaataccattaacgccatgagagtgatctggcctaatttctatgcaatttcctgattttgaaagttcaaatttgagaaaataaaaatattcattcgtatttctaagaaatgttcgggtcttgtaattttcagaaaagaataaagttgaaaaatatagttcaatgtaaaattctgtagaattaaaaaattttctgttttctaaaccttttgtttctcatattggaattggaattttattgccacaatgctctcagaaatgttcaaggaatttgttctgacttaatctgctaaaaattataaattaattgtaaaattagcttttagcacttttttggttagacacaaacaatttatatgagaattaaaaaagccgctaatggaacgtgttcgtatttaggagtctgtatcgtttcggcgccgccgtttcggcgcgagggtcgtttcggcgccagggtcgtttcggcgccaagccaaaattaaaaaatcatgaatcagttggaaattttgagcgatttaaattttcaaaaattaaaaattttagcaaaaatgtagaataacaataaactaacaaaagaaaatttaacaaaaattcatttgtttaccgtacttactcgtttagaaccccacccctctaaattagaagccccccccccaaaaaaaatatttgtttgccaaaacgagtttaaatttcctgcctatttgacacttaaatgtggaccaattatgttacaaaaaagctctaaaataaagaaaaatctggagaattttatactttttatttgaattccctattttcaataaaaatgattttgaaattcaggaccaaagggggaggacatgatttttgagtgggaaaaattttcaccaaaatcttccaaaatttttttagaagttatttaagccgctgatcaatgatcacgaaaatataatcagaatgatcttaagattcgttaagacataagaatccatccgtatcagtggattctgaagggatggcggtggtcaggttcggatcctttcgatataattttttgtgcattttgggtcttgtaaactttattgtgaatttttaaccattttcgtctgcttcaaaagttgcagggccttaaaaatcagaaatttttttggcgccgaaacggcggcgccgaaacgacccgttccccaataaaatacctaattcccgtcatttttttttaatttggggataaatgcataattttattgaattgattcttcaaatctctcctaacagcgattgaatcaatgaaacaacagaatagatgttattagtacattcacaatacacagatggcacatatttaggcattggtaacaacatcatgatgatggcattttgggtgaaattatatacatacaaatcggatggatttgacgggggatcaatttcattatacaacacataaaggggagccacactctctaagatgggcacaattatccgtgatttaattagtatcctctgcaaaaattcgcgtccatttcgtttgccatttttctccatgccgttgttgttattgttgttgttgtaccatggctcatccgaccacgcgtcacgtcattcagtcactgtcgctgcttgaggggcttctggtcgcattcccatgggtcgtattgttggtggcattcatcgtcgccggcggtgtcacgtgcaccgtcgtcccgttcattgcaagaccttgtgaaaacaggacaattattatatttgttgcttcaaaaaatgccaaaaaacgtattacgttcaagcgccaccatgacttccctctcggcctcggtcataggggcatgaccatgaccgtgcacatccaacgctcctccgtacatggggatttcatcgtgccgcgtacgcgcagcactccgtccacgcttcggctttctcggacgtccacgcccacgcttcttggccgacttggaccgcttctttggcgtcgctttgcgcgccacaatccggcgacgtcgacgagacgctttcctggcggacgacacacggcgcgacactcggcgagacgcgttcctgacggacggtgaacgacccgttgccctgttgccggttgctcttctgctcgcggaacgacgacccgtatgtgttgaacggctccgactacggccagcagcagcagcagcagttgaagtcgtacgacgagttcgctgaacggtggggaggaggggaaaatgaatgaatggtggcggaaaaagcggatgaaaaatgaatgaaaatggaggggaaagggatcaccgatcttgaagaagtcatctcgtcgatgagggacgaagaagctgtagacgaattggaattgtgttgtgatagcgcaacagagagagagggcaaaaaatgtgtaagcgctaaaattaattgcaaataattcaattaggagggataaagccgacttgaaaagagagtgaatgccaacaggggcaatcctaatttttgaatagaaaagagaattttgaaaatgttgcattttttctggggaaaagcttcgaattcattgaacaacaatttatgtatttttggtgcaaaataatgcttcaattattcctttaataaaaacaaaaatacgcattttccgtattttgaaaaaacatttcaactttttattcgaattcgggtccgagattcggaatttgggcaaatccgagttcagaatcgtaatcagcacccttgaaaacccacggaaaaattgcaattgtcacaaaaaggaacaaaacgtcgaaaaatggacagagcggaagagtgaatttgatgaattcaaacaaaaaaaaagtgcaaaaatcctaaaaatttctgcaatttatacttttttgaaaaatgactgacaaatttatgaaattttctgcgtatttaagcggtgaattccctaccaaaatcatccattcattcattgcattcacccattgtttctttccatcggtcgaatcgtcttcctatacaataaataattcccgtcagtttttttttgtttcattttttaaaatgaactgaattttgtgcccttttttcaggatggtcagagcaacaacggccaggacaagggcatcagcagcgcgagcacggagcatcaaaatcaatcgtcgaaatgccaagaaggcgcgtgccgcaattggacgagccggacatgtgagtgaagcggagggcaattaatacactaattaattcaaggacggcaatttttaaatgtgccaatttttcagacacgcaatgcgatcgcacgagagaagtgcatgatgtgtctgggcaaagtgagctccatgacgcgtgtgaccatgggctgtgtgcacgaatttcatcgcaggtggaggcggggctaattccgatcaatttcgaacccatggatccccgaattcgaacaagtctaaaagtcgagttttcctggccaaaatgccggaagttttgcttttgctgatcaccgaattcgaaatccgttccgatcaatttttaacccatgaccgtcgagttcgaacaagtctaaaagtcgttttctgtccatgattttctagaaattccttggtggaaaatttttggattttttggggcatagaatcccaattttgacatggtgatttcggattaatgcaacgcttatcattatccccccgtcaaggtgcctgtaccgctggctcaaatacaacaccaactgtcccgtgtgccgcttcaatttcatgcgcgcaattccccctgaagaaccggcggaggaacagcaacaacgagaagaaatgactatctgatcagatccatcattgaaatctgtaccatcataatgttgtgtattatgtatatgtctgtgtgttgtgtgtgtactcagtataaagatgatgatactcggaaaacccgaattttttttgtcggtttttgctgtagatattatttagaggtcattagtggagtccggcttttcagattgttgtcaaaattaggttagctttgatcagttcttctctcagtctctctctctagctaatctggacaggaaaagcggatctatgcaattttttttttgaaaataatgagatttaggtgtatatgtatctttttaaaaattgctgatcatgaagtgcccatttcaaaatttttgaatctggccaatttattcctctttttctctctctatatcttgcaaaattttcacgccttttttcatttttggtcacttttacaaaagtttgattagtttaaacgcatatcaccaatacatacaattccagtgatcggacattgattgaattcaagtgatcagatattgattgacacatgatgataggcaacataggtatcaacgaaaccaaatgtacaattcaaatgatcaatcggataaatgtcaatttcttatccttctgttgttgtgccatgatgctaatccaaagccacatccgcggttgtcgctggagtagtcgcagcgggcgcctcagtattggtcgccgcattcgtcgtcggagtagtcgccgctccggttgcgtcagtgttagtcgccaccgcgccatccgcaatcgccgtcgttgtcgtcgtagtcgcaccgggttcgttagcgttggtcaccgtcgctccatccgcgttcgtcgttgtcgctggagtagtcgcagcgggcgcctcagtgttggtcgccgtagtcgcaccgggttcgttggcgttggtcaccgtcgctccgtccgcggtcgtcgttgtcggtggagtagtcgcaccgggttcgttggcgttggtcaccgtcgctccatccgcgttcgtcgttgtcgctggagtagtcgcagcgggcgcctcagtgttggtcgccgtagtcgcaccgggttcgttggcgttggtcaccgtcgctccgtccgcggtcgtcgttgtcggtggagtagtcgcagtggtcgccgcgtccgttgtcacagtcgccgctccggttgcgtcagtgttggtggctgcatccgcagtcgtcgtcgtctgctgctgggcagcgttcttcccccgtcgggcacggccttttttcacggtcctcggacgtccacggccacgcttttgtccagcagtgcgcggcgccgccctcgatttgcgcgatcccctcggccttccacggagcggtttgagcttgagcggacgacgcattgccgagccgcgcttcttcctcgtgctggtcccgtcgccgtcgttgttgttcccctgccgacgtgacgcgcggcgcaccgctgcactcacacgcgctcgggcgctgcttcgaccacgcactggcgctgtccgtctgttgttggttgaggcgccctgctgtcgtcgacgagctctctgaacaacggcggggagggcgtaaaatgagagacggaaatagttgcagcaaaaaagagggactgaagcgggtgccaactgagcttgagaaaactttcagaagccatctttttcggcacttttgctgtttaagggggtcccgaaaaagaacgacagagaatttcattttcacacactatttgcacaattctcaagagatatttcaaaatagcgccttgtaatgagaggtagagacgcatagttttaaaaaaaatgttacttttgctttacttataaaagtatgcctcttctaccgctcataacaagggacagtggaagcagagaaagagaaacacgaaaatagcgcgtgtaagactttttctgtcttttcgggattcacaaacagcaaaagtgccgaaaaatgtgatggcttcagagagttttcttattagacgcagttgaccgaccactagcg

SEQ ID NO: 6456 - DNA, 3200 bp, Heterodera glycines
  unsure (1)..(3200): unsure at all n locations
aagtataacgtttatagaaatgttaagaatctaaaaaaattatatttattacatttaacaatcattttcgcaagatttttgatcattgctcaaaaaaaaatttgctgacgaattgtccactgacggattgtccattactgacggattgtccttcactgacggattgtccactgacggattgtccttcactgacggattgtccactgacggattgaccactgaaggatgcaccactgacggattgtccggaccaccaatgaacgcacctatggcccgtcccagtgttagcaagaatggatcaggaggcaaatccgccgctagaagcagcaatgccacaaatggcatcaccgacattcacggcaccgctctatcaatcccaaccaggggtgggcgaaacttcgagcttcgtgcttcgaaaacttcgcgtttttggggcttcgaacttcgagcttcggcttcgggtaacttacccgaagtttcgggaaaaacacacccctaaagatcgagtgaaaaatgttttaatgaaaattcaattaaaatttggtgcgtttcagagcactttttcaaaaaatattttatgaattaatgttgcaaaaaaatattggaaactcagaatttcgaacaaatttttacaatcaatatgcgttgaaatattttcaggataagttagttctgtaccggggagtatatctgtaaaatttagtgcgatttttctaattataaaaagagttaagttcgataaaaccgtaccagctgttttcgacagtgattggtttcggcagttctttttaattgattttctacttgatttattgtacatatgaattactattaatatacaatttgcatatacaaaatttagaattgagtaagtggtaataataaagattcgtatgattatttttattaaaaaatgaatcactttcattttttctatactaataactcctgctggactgtagtcaagaatacaacaaatttcttatatacgattctcgaatcgtgtgggaaaatatgctaacaaatgctggcgttgagtgccaagatgcaaatatctacaagctctttcttatagcagaattcgaaatcgcaaaccccgctgcaatgtaaagagcctgccctaatcattttaatttttcaaaatttatcgaaactttaccatatagagcaagtttttaaaaacaaactttactgtcgagatcaccactgtcgaaaactaacagcaccgatggaacgacaagttgtcgaccctacactggacaacactgaactggccgctctcaaccgctaaaattgctcaatttccagaaaaataattaaaattttgtaaaaaaaaagaaaaaaaaatgccaccatcgatagaacacgaaaaacaattttgaaagggtgggcacaaaataagaatcattttttattcgtaaaataattgaaggaaaaatggcgggaaaaaaaaatcttctactgttcttagaacaattcttctccaaattgtttcttccattttgaaatgctctttctatcaatttgtaatgtttttgcaattgcccgttcactcattttcggatttctctttttatttgccaataaattttcattttttccattttttccttctccgttattttactgcgaatgccaaattgtttcttccattttctaagtgtttcacggtttgttccaattttcttacaaatttcgtcataatttttctcccattcttttgttgaatattttcttttttgtttaaattcatttttcattacaatgaatttattgacaatttcaaatttttcttcatccgtttttgatttatagcttttctttatttgtttttgaaataagcaaaaaaaaatattcgccaaaagaatgggagaaaaattatgccgaaatttgtaagaaaatttgagttggctattatgacacaattaggaaatggaagaaacaatttggcattagcatagaaaaaagaactaagaaagaaaaaattgaaaaaatgaaaatttattggcaaataaaaatggaaaatccaaaaattagtgacaaagaaattgctgaaatgatacaatagaagttccaatacgaaacattcaaagatggaaagccaaatttggagaagcaaataatggaaaagaaattaaatccaaaaaatgagataaaaagaaagtgccaaaattcggaaaattgtatttatgagattttttcggtgaaatttggccaccaatcaaaaaaaatattttccatgaaatttagtgggttctaaagaaaaaaaaatatatgattctcaaatcatgaaccattatgcatgcattaagttcattaatattatgacaataaaattctgaaaaaatatttaggaatttaaaataatggaaaactcaaaatttcgaaaaaatttttaaaagcaataagcgttgaaagatttcaggttaagttagtcctgtttcaaactttcgatactttctttatcctcttttttgttttcatttcttctccattatttctctattttttctttatccgttattcttttttttttgctaatgccaaattggttttttcatttgttaattgtttcttgcaaattttggcataattttggtgccattcttttaacgaatattttttttctctttaagttcattggttttttcaatgaatttttgaataatttgacgtttttcttcatcagttgttgatttataacatttattttggttaagccccaattctttgatccatttaaaaattgtggttcgatttgtccccaatttcttcgctatttttgagttaatttttccccattcatcttttgaaaatgttcttcctttttgctttattttctcttttattttataaaattttgcaattatttctctttttttgagttgatttcgcctttcttcttccttttcttcccatttttctccaaatatttcgtcaaatgaattttgcttcaactttttcttttctgttaaaacataattaatatttattgcgacgatgaaaaataaaattaaagacaattttaggcctaatttcattttcttcaaaatatttttaaatgaattttttataaaaattttgttaatttatgcacaattttttatacatgannaaataataatcataatgaaaatattttattattaaaacaaactancaaacataaattaaacaaatattcatattaataaaaaaaa

SEQ ID NO: 6457 - DNA, 3219 bp, Heterodera glycines
gggattagaattctatcgatggaaataaaagaattgttgttgattaaaattttgtctctttgggtgggcaccgcaaatatcggcgccgcaagtgtcactttgaatgggcgccgcaagtgtcggcgccgcaaaaaaaatagccgcaaatgtcgggccgcaagtgtcagcgccgcaaaagtcggcgccgcaagtgtcactttgggtgggcgccgcaaatgtctgccccgcaaatgtcgcatcaccaattgaagcgagtcgtgcgggggagtcgttttgttgccgacattttagcgacagctcgagttgttgaattttttttttttgtttttacaaaaatccgacaatcgtggcatcattcgaaagctttacatttctaattccaacccgaattcgacgtattcgaacaattttttttttatccaaaatcagtttttctaccccaaattcgtgcttttttataactaaaaattgcgtcaacactgttttctgtttaaacattaaatatgctataaattgtctccggcaattttattttgcaaaaaaaaacgcaaaaaaattcctttaagtaaaaatttcaatttttcaaaatttctcctattttttttgttgtcataatcatcgtcttcgtcttctgctgcataggcaaatgtcgtcttcgcatggcggacaacagcacgggccacaacagaagtcacaaaaattgttgttgttgttgccgttgccgttgttgcgcattggcattcggcacggcgcctttttacggcacggcattgcacacatagccaccgggacgagttgcactttatggaaaatttataaaaatgtttccaaaaaatcgaatttaatttttatcataattatccgaaataggttggacgactaaatttacataaagccttattgattaaatcctatccaattcgaacactcggaaatcctggtccaattctaacttttttttttaattttgtggcaaattatgaaaaaaatagacgaaatttttgaaaatttcgaatccaacacctccataaggattctcttaaaatcataacattaatttttttattttgttgaaagcaaaaatttaagatgtcaaaaaaatattttaaatttactcggaggggccatggccggttgtggaggttgcaaaattcgtggtggtggtacctgaaaaagggatttaaaatttatttattatgaattaaatgtatattcctaatttttaaattaaaatattatttttttcatttattttagcctattatttgcatatgaatttgcccaaaaatttggcacaattggggccagtgagggtggcacgggttgcgcaaggttcatcatcggtggagcaaccgcgccagtcggcatcgcggcacctaacgacggcgcacaaagtgccgtcggcggtgagcacattggcattggcattggctgaacttagtgaggaaaattgaaaaaataattacatgaataaagtaatcagtaggaatgggaattttaggcgcaaaaattcgcaaaatagacattaaataggcacaaaaataggcaaataaattatttttcttagcactttttaggtagcaaaacatgtaaaaaaacataatcaaaaaatttaatctttgttatatcgcaattgtaactaaattataaaatattttaaaagattttctgtcgaataaggaaaatttagaaaacaaaaatttttattaagaaaaaaaatattttaagggattagtttttggaaatttttcaatttcttacgggctctatttttcgtttattgcatttttgttaaggatttattcgaaaatcctttaaacaggcacattaagcacaaaaaccccgaaaaggtaaaaatcggcattataaaagtcatcgtaaacccccaaatccaagcggaaaatgcgtttttcgtgcgaaggtcggaaatttgaaatttttgaaaaaattttcgaaattttaaaatattttaatatgctaaatttagataatataacttttgcaaatagataacaatttttcaaattatttattaccggaagtgacggcataactgctgccgggaggccaccaatcggtgtgccaaatgcgcctgcgggtcgaaattttatagaaattttaaataattttttttataatatttcaccctgaaaaccagcaaccggcatgttcagacagggcatgcccgggtaaatgcctcggcttaacaacaaaccgcacggtgcgggtgcaaacagaatgccaaatgcgaaattcaaatgccaaatgagaagcaataaatgggaaagtggcatttcgataattttatattgtttaattatggtctcgatttaattaaaacaccatttatctgcccattatatcatctaaattttgtacgaataataatttcttaattcatgtgttaaatttgtcaattttaattgaaaaaaataaattttattaattaataataatcaatttgtagtttattttgcgaataatttattgcccattatcaaaaaaaccgtagttttgaattaatttattccatttattttcagtgaattttttgatgcatttaattttattaaagattccatataattcaaattggaaggaaaattattattttttaaatttaaatatttttatcattattcttttttgtaaatataatttatatttttaaactcttaagcgagcaaatcatttgctaattttcattaattgatgctgttcaattagcggtgaatcattagacaataatgaagcgacgctaattggcgataatgatgcttcaggattcacatattcaaacaattttcaatgtccattcattttttcatttgaatacaaacaaataaaaaaagattggccatttgttttgtatacctatttttgggaatgcaaataaacatttatttgagcattttcttgaatgaatgaataaatggtcaatgcgatcgcgactgaattgagtgatcagttttggatgaacgtagacaaataattagtcaatttgtgttggggtaaaagaattttataaaaaattattttatttttaaaaaacttgtgaaatgatgcgtcatttatgaaattttgaatttgtaactttttattaaaatatttgcgtcgtattagaaaaaaaaaatcaaattttagtaaatcattttaattgtaatttattcattttcgatttgtagtatttgtacgtagataaaattgttaatttctatt

SEQ ID NO: 6458 - DNA, 1912 bp, Heterodera glycines
  unsure (1)..(1912): unsure at all n locations
aaaactcaaaaagggtaattctttttttataaattcaaaaatcatttaagtgaaagtgtcatatttgtttttgcactactctttttaaaataatcaaaataggacggaaatttatttgtttttattttcagcatttgtatcttaacgaatgaatggggcaattagcaaatgccattcaacaagtgcgcacatttaaatgaactggaaaaaagtaatggcgtaagaaaggaagctgcaaaagaaagagcaaattgttatttgaaaatgataattttttattattattcaattatttaaaaaacaaaaaatatttaattattcataaaaattattttattatcttatttcgactaaagttttcattttatttaactgttaaatttatttatgaaaatttattttttaaatttatatttaatttatttaataaataaaattattaattcaaattaaaaattagaaagaaatttccttaaataaaattatttagttataatataaaaatgcatatgatttttcagtctccattaaacaattttttaaattggattttatggcaaaatgctaatttcaggcgtccacctaaaaaatatatgtgtaaaaaatgcagcaaaaaaaaaaaaacaaaaaaatgctgtttgtgacagctgacttaattaagaatgtctgctaaattcagattattcgtgcttttataaatataaacatttttcaaaaatacgattaacaattttcgaaatttgaagaatttttattagaatgatttctgacgaggaaaaagctcgtcttaaatttatgcatgttaattgaaatgataataaatgataattaggtttcctagcgaatctcagtgatgtggcaatgcttctaataacaaaagtacattatttgaaaactactttttttaaattttgtacttttcaaatctttttattttcgagtcgatattttaagaaagttttaggtttgcaaatttgtactttttcattgaattttggtaaaattatattaaatccaatgagtgaataagtatataaaaagattcaattagtaaaaatgaatcatttttatacctatgaaaagaaaaagaaatttacgtaattatttttgttcaatttattttgcttgttttatttatttttttaaattttgctttataaaatggataaaatattgatttatatgccgttttataagttaatactcacaattagttgaagaaaataaatttagcaaatatggaaaattgtgtcagaataatgagttaaaatatagagctttttaattaaaaattcatctaaacaaactgaaaatttattgaacgtcttctgtttacagaattaattaatagaaataaatggttaattattttcgtgaatgaattgattcttggaatttcaatagaatagattagtcaaacaaaaatttgtgccttagcaaaaagagccgtcattttaagaatgaaacaaaaggcattcaatttattcacgtaaagacagtgctaatgtgtaattattcagctaattatttccgatttattacaattgcgcatttaagaagcaattagcatctttgtaaataaatggggcaatgatgtgaagtgacgaagaatgatgccacataaaatacctagtgttagacaaaattgctcataacgcaaatagcgtaattggcgtaaattatttcgtgcgaattcaaatttacgctgagcactgccattttgattgtttattttgatcagtcataaccttcttcatttccaactanattgaataaaatttgtatctanaaattctttttgannaggagagtatntttctaagcgaatggtaagtaatttgactcgtttcaatcactcaaatttttttgaatgaaaagtgaaaaaatatttataaagtgaggtgaaaatttg

SEQ ID NO: 6459 - DNA, 1687 bp, Heterodera glycines
atcgaagaaaaacaaaaatttccgaaattcataaattttttttgtgaaaaatcttagaaaatagagcttaattccaaaatttagcgctgcctatcggcatcacagggcccaaaaagtcataaaccttattaaaaaattggcgcaaaatcgcaaaaatttagcatattttggacaaaatctgctaacagatctaaccaaattttcaaaattttcccggcggcgcctatcggcaccgccggacgccgtaccctttctccttaagcgccgccgcagctcgtcgaatatatggacttaaaaataatgaaaatgaaatgatttaaacaactaaatttttgatgaaatttctcactcaccatcgtcgagaccgaagccaccggcgccttttgatgtcgatggtgtcgtcatcagctcacaacgtgccgtggatgttgacggcattggttcggcttgttggtcgtcgtcggcaggagttgaagggaatggcacatcaatttccaacatctccaccgacggcacgtccatttcctgcgatgtcatcggtgttggagttgatggtggtcgtccgtcgttgtcccgcgccggtgcctctgatgtgacggctcttcttcggatggttgtggcgtttctgcatcagtgttcggctggggagcggctaaaaatttggaaacttaggattttatgaaaaatgaatggaaaaactcacttttcttggcccatcgggcttgtctcgccctctccgtcttctcgcgtctctcctcccgtttttgttcacgcttttgcgttgaatttcgtgcattaattttgcttaataactttctcttaggcatctaaatttagaaaaataaattattacttgtttttggcttataattttagatctgagcgtaaaaaaaataattcgagcgttaaaaatgttcgtaatttttttctctatcgctatgcaaaatttggtgcggatttaacatagagaaaaaaagctagacatagaaaagtaaatgttgtttttacaccattaaaattgaagagatagtacgccaaagtgagagaaattacaaagaaaaagagtaacgacgagatagtactaggcttttctctgcacagtggagttgacccatagtgcaagaatttatgttgaaaatttgaagattaatttaaatatatggaatagtccaataaaaaataataatttaaattacgcgagccctttggacattaagaaattcgttcaaaacatgtccaccgatgagagaaaaaatttcacatttttgatgaaaacccaaatccatggggaacaattcttatccacctgccccctgtttgaaaatagtttttttggaaaaaaaacttgctgctaaaaaacatttttattggtttttttcatttgaaataaaatttttctaaatgctggcttttgacccctaatgattattttttaggccaatactgattttgaaaattttcagttgatgtccctgattttgaaatggtaaaaaaatttttttttaaaggttttaaaattttctgacttttttatcaaaaatttccgaaatgggaattgttcggggaaatcggaattccgaccctaaaaatatccgaaaccggaagtcggattccgtagcgtcactaatcactagtactcgctactctttcggcaccggcatgatcaagacactaatacccgcagaaa

SEQ ID NO: 6460 - DNA, 1966 bp, Heterodera glycines
tgcaactgcacaccgccgcaagtgatcagctggtttcgttgcgcgaactgttcaagccattgccaaccgtatttgtccacaatctttttgaatggaatttgatatacggtagcaataatacatgtagcattacttataagttaaattgatttaatttagggttttaagccatttagggtaatttccatttagggtaatttgttaataggcgaatttaacgaccgatgctcctcctacctgtttgtaaatgaacaaaactgcgtcatcatggtttgggtcagcagtaccaacagtgccattagcgaattctgctgactgcaataaatcaccgtaggtcggcggattggtcgaatttgagaccaaatttttgttgatactaatgcctagtgtcatcaccttcaaatgaatttgaattaattattcctttttaattataattattaaagctggaattgtatgaaaaagaaatctcaaaatacaaattttttataatatttttttcacaaaaaatctttgaaaagaatgaataagaccaaaatgccataaaaatgaacttattaggcctagaataatgttttaatactttaatttaatttttgataacaaggtgacatttaaaaaaatattttttgaattttttatttaaaaaatatgttaaaaagtgggaaatatttaaaaatatgtaaataaaagaaccattcacaaacacctattcagagcacttagaaatcagaaaatataatatcttaatttacaaccctaataattatttttcacaaaaagtttgttaaaaaaagcaaaattaatagtttttttaaaaagttttaattggcttttacaaaaaattttagattattaaaaataatatttttaaaaattttattttacaatatttttcagaaaaaataattttaaatttagaatatattttaaaaaggtgatgttctcaggctgttttttaataaaatatttgacttttttaaaaactgttatttcacaaaataaatttttacttttttttaattttttattaaaatgaaattttaacgtttgaaaattaaggaaattattttttcaaaacgatttttaggacaactttacagcacacatacgtataatccggtgaagtagccatccgggtcgcggaatgcgcggtacactttgtcccatccgcgcggtttgtatgccaacaattttccgagccgtttccatcgcgcaaattcttgcaatgtttgcaacgacacaatgtccggcacaacaccgcccggcgtgaccatttgcaggttcacgcgtggcgcatggttaacggagtaatccacgggaatgtccaaggtcatgttcggaaagcgttgctcaaacatttgcttaacgctgtcctggaaatcacaaattttggctttctgacaaactgttttcgagatttcgctcgcatttttaataactgttctgttgggctcgggctctcaaatatctcaaaaagtctcggactcaatttcagtcttgaggtcaattatgtctagggatgtcaaaaatatgtacaaaaagtggtcaaaatatgtacataaatatgtaaaaaaattccggaaatatgtaagaaatatatataaaaaccttaaaatatgtacgaaaatataaataaaaaattttttaaacagttattttttttgaaaaaaatattggtaaagtgttaaatcagggatgcgatcgaaaatttttcaaaatcagaacatcgagcccaaaaaatcagattttgggtcgaaaatcaggacattttgcttcattgcttcaaaacagttatttttacaatttattcaatcaaaaatgtattaaatattatattttcacctcccattaacgattttaacaattttggggaggaaattagcaaatcgtaaattttaatgcaattttttagcggcgtaattttcccaaaaaacttctgaggaatgggcgaggggagagggtc

SEQ ID NO: 6461 - DNA, 2027 bp, Heterodera glycines
ccatttttggtgataaccccgaccccgaaccccgacgcttcataccccgacaaccccgaaccccgacccttaaccccgatcggggtcggggttaaatatacacccctaagaatggcattttcgtgggagaaaatgcaaaaaagttagacgaaatttgaatttttttaaccatttgccaaatttttattaaataaagaagatttgctcaatttcggacatttggaatgtggtgtagaggttagtgccattgacattactttctgtcgtgagttcgataccgtttgacgttttcttctttaattattttctttgtgacaaattgttttttttaaattaaatactcatagaaatcgaccaatcttggcatattttgacaaaatacatatcgaagaaaaacaaaaatttccgaaattcataaatttttttggtgaaaaatcttagaaaatagagcttaattccaaaatttagcgctgcctatcggcatcacagggcccaaaaagtcataaaccttattaaaaaattggcgcaaaatcgcaaaaatttagcatattttggacaaaatctgctaacagatctaaccaaattttcaaaattttcccggcggcgcctatcggcaccgccggacgccgtaccctttctccttaagtctttagaaaagagcgacgtgaaaaaagatgttttggaaaacaaaaaagtaataaaaaattttaaaatttcaagaaaaaaaaaattaattctatacaaaatttctgataaaaaagaaataaaaaaatataaaaacaatacaaatattattatggaaattaataaatattatttccgaaaaaatattaaaaaaattttgactattaggcataagataaaaattgaaaaaccccgaaccccgaacgatttggcaaccccgaccccgacgcttccaaccccgacaaccccgaaccccgaattttccaaccccgacgtcggggacgcaaccctaatttagaacatggagaagccaggaaaaaaaatgtatttacataaaattgacatccctaattatgtcactaatctcggactcagtttcagcatgagtctcggaaaaagttctcgccattggatcacttgttggcgtggtgcttcaccgccggcgtacaccaccaatttgccaccctcggccaacgccgccgcgtacaattggtccaagcttctgttctccacatcaacattgccatgtttatgcggcttcttctgttgctgcttcttgtcccgttggccaatggcataatgcaatttgcttttgaataattcgtcaaaatcaaaattttcgtcggaatcaaaaaaatcgtcaaaaaagccgaggtgagccgcagcaaattgaccacataataatgttgttatcagtaaaaagcagacgatggaaaatgatttcatttttctgtgaatttttttttcatttttaaagtttttattttaaaatgcaaattaaataaataataattagtcgagatagaatcattattagtgaaatgggggcggggctttggtcaaaaatatttatgaaattgaaagaaataaaaatttttgaataaaaataatttcttttttaaatatttcttcataacaatataattacttactatttctccattttcgattttttgcttaaaacttgtcgaaataaacaaaaatggttaatttctgtgctgttatcaaatcctacaaaatttcaacaaaaaaaaaaaattaacgaggcggcgcttgacggcaccgccggcctcccctcgtttaataaaaaaaagactaatttaaaaaaaattggattttttaatacccggttggacccagatgcttggacccggacccgtacccggctttttgggtccggaaatacccgtgcccgttcaaagcaattaaacgatgatgcgaatgcatcaacaacataaattgcccactacaaacactcaatattaatctatgtatgcagttgatgttaaattgttaatccgatttaatccccagcccatttcatgattggaaaggacccagcc

SEQ ID NO: 6462 - DNA, 7187 bp, Heterodera glycines
  unsure (1)..(7187): unsure at all n locations
tcaaaaattaaaattaaataaaagtttttaaaaatttcatttaaacttcaatattttaagtnatccaatattttttgccctaaaacaaccaaccacatggggaaaattgaacccgagagatcaaaagcttttgaagtcactaattaattaatcccttacagatggattagcatttggagtaacgttcatttaatgtgttaaggaattagtaattaattaaattaatttctgcggattttctgaaatgaactgaaaagaaagcgcaattgaatgacaaaagctttatcaatcaaataggaaaatatgtccatttggtaaattaaggcatgacggtccaaaacttaacaaaacaaatggcatttacttgttttaaatgcaattagcaatcagagcacccaaattaggggcaaaataacgtattcggtggggttttatggacgacatttgaaaacgggtaaaatacggaagtgttggcattaatggccaagaaaaagaagaaaacgaatttaaaaaaatgaaggaaaagaatttccctcaataaaaaattgcaaaaatatttaataaaaaaagaaaatgatttaaaaaagcgcccgatgaaatttacttagtaaaagaacaaataaatatatcgacaaaaagataaatattaaaaacagaattcaaagtggattattattttgtgtcaaaaatcgctttatatagagaaatttttatgagcaatttgactttttgtgtactgaaaattcaatgaagcagatacaaaaaaaaaaatgaaacaatctatgagactttaattaaacagatgaaataacttttggtaattaaaagaaaaattggaggaaaaagggcggccgacaatgtcaaataaatgaaacagacattggacaatttatttgtatgcaaaatacaacaaattttaagatttgattgaagccacacacagattaaacacgcggcatatgcccttcttttggtatttttattttttgaataaataaacaataatttgcattaatttacaaagcgtaaaaagaatatttagaaaaaactaattatcggtacgaaaaattagttaccccacatttgagccaaggaaatttgcgccaagtccaaaatcgggttaaaacttacatttttcaatcccggatgactaaacagtcttaaataaacgatagaaagtgattctatgcaataatatgatcattctcaaatttgaaaaaataattaatctttcaaacaacagaattatcgtttctattaaaccaaaagaacaaattcaaaatttaatgctgttttataactctaagattgaaaaacctaaatttaaatccgatctttgacataggtgcaaatgtctggacacgcaaaaaattaaaatgatatttattcgaaggctcaaagttaagaatggagtcatattttttttatcattgtttagctcctaaaaatgatcgtattttcatcattgcctccgtgaaggattcacaaaacgaaaaacgttaccaactgagccacgaaaaggcacaaataaaaaaaagaataaaatgtaaaataaatgttttatttttttatagtaaaatccccggaattcgtgcgtattcgcacggggaccgttccgtgccgtattatttgtttttgaacagagtcgggggaccgtttcagcgacgccattttggcaaagtaagttttaatccgattttggacataggcgcaaatgttcggggcgcaaatgtctggacacggaaaaaatggtacaaagaaatgggaaaacgctatttcaacggttctattaaattatctttctttttttcaatattttgtgctaaatagtttctcaaaatataatagtgattctcattcattcgttcattcatttacacttaaattggacccaattcccttctcatttggccaattcttttacttgcacaaaaatcctgtgttttgccgggatggattggtcccggaatcccgacttcttcgtgcccaaactcgttttagttgtccaatcgatctgtttgcgcttcatgccaatcgttttccccattttacggccgatgagtcatcactagggccgggatttctagtgaaaaaactttttttttttgcttaattgttttgaagaaaggagctcaaaaaacgcatttctgcgttaaaattttttcatttggacgttatttttcgtcactagaaatccctattttggcgacttcgtcactaaaatagttaaaaatcactattttggcgttttgtcactattttttcacaatttcgacattttttggaaaattccttaacaaaaacgcaataaaaccaaaaaatacacccctaagaatcgacctaaaattttttttcaaaaaatacacccctaagaatcgacataaaaattttcaaaaatcactcctaagaaatgaaaaaaattttctcaaaaagctattttcgtggcaagaattttaatttaaaaaattattttttaggtacctattttgtttttttgcccttaaaaatcccagccctactcatttgcaatgcaatcagtgaataaaaattagttttgctcaatttttggctgaaaattatgtcactattcgtcactattttggactttttggcactatttcgtcactattttggcattgttactcactattttagttaactataaaaatatttatagaaaatttttaataacaaaaaatagttaactaataaaagcaatctctttctttattacatgacgtaaagttatttaatatttttgaaaattaacttatgcatttaaatgtgagaagttttgccttataatttttggtcataatattttcttatagcagagctaattaaatccaaatgagttctctagaaaaatcttatttaaaaatacttattaaacgagatgaaatggcaaagagtcctaaaagagaccgaacaaacccgggaattttgttgacgcatttataaattgcgccaaatgatcagaaaataaaaaaataaaataaataaattcacaattataattttaataaaactcatcaaattttaaaaattataaaaataaatgttgaaaatgaaaattactttggccagactttgagaacactttgagttaccgaaagatattaagaacataaattttgatgctttttaggtaaagttatgaatttatttatattttttgtagttttttgatcataaagagaattataaaacgcattagcacctccgagatcgagtctcgaacattttttaaaaaacataaaaagtgtcagccaaagaataggcataaaagtgacaaattaatttaaaaaattagcaaaaaatagaaacagaaaatatagaactttaaattcctcaattgtgaaagcgtattccctggagtttaaacgtcgttaatctcggatatggccttcatttttgccaattcgaattcccgatcccgaatttcgacataaagccgaacttcaattcttttttcatgtttttttatatagaagtcagatttgagatcagagactccaaaaacccctgggaacaagtttttaagagttattatcacaaaaaaattgcaaacttaaggatactaatgataatactaattacaatactaatgataatactaattacatacaatactaattataattccctctcattttctttgctttaccctcaacgctcacaacactttggaacatttccgcttgtgaatcactcattggccatatgctttttgcggccaattgtcgtgaatatgcgtggaatttgcacagattgacggagcattggacggactcggcaaaaggcgcggcacaaaacgatgggaaagaggaggactaaaaagtatcacttttgaaatttaaacagcaatattttttaccaaatcttgttgtggctttggtgccgtttctggcggcatctttggcatttgctttgtccattgcggcaaacattcatacgccgattgccattcatctccactgcttgatgtcattggtgggggcagaaaatgggtggactgttcttgttgttgttttggcaatttgtcaaaaatgggcatctaaaagccgaaaaaaaagataggggtaattaaggatatttgaaatgtgcgaaaagattaggggtaattagggtaattaaaattttattaattgaaaataaattatttaattagtcctccccaactttccccttgtgaactgactctgtgctgcgacgtcgtcatggacactgacatttcctccttcggcggtgccattgcccagggctttgtgccgtcgtacgtcgcctgtggaggcacacttttctgccgcggctgcggtgccatcgtcgcaccgctgcctccgcttatgctgtcggtgatgaacgggccgaacaccgggaacggactgaagccgcgcgagttggcgctgcggtcgtaccgacgctctaccgtgtccgccagctgatgaacactttggacgagttggggcggaaagcggtccaacaccaactcgtgcggcatctgttgctgcgcctgcaacaggcggaggcgttccaacggaggcatcgacgagtgttgcctgaagcaaagtgccaattgcacgcagtctcgatttcgcgaagcgactcgtgcgatttcttttccaaatattaaattttttcccgacagtgccagcgaatcaccgatttttatttcctaaaagttgactcgctcgaatatcttaaaattagcatttttggcaaaatctattaataaatccttcaaaaaccactcggggacccttcccttactgtgccgggctctgttttttgcttactgatattcgctttgcataactctgaaggggagggcattaaacaaagaaagaaccacgtgacacaaatgaggtaaaaacgcatcattattaaaataaaaatgttattaattcgaaggctcaaaatcccaaatcgtacaattaaaagttgtcattgttcagctaaactaaacgcctttgctttttcatcattgccttcgcgaaggattcacaaaacgcaaagcgttaccaactgagtcacgaaagggcacaaagacaaaaagaataaaatgcaaaataaatgttttatttattgtcaaatccccggaattcctgcgtatccgcgtggaattcactttgtctntatatcaaaatattaatncttaaatttcttacaaaatataaaaaattattttcttaaaatttaaaaattttaaattaacaaaatttcattattattttttattaaattattaatattatttaatttaccaaaatttaaaaaaaaatttttaaagttttcaaaaattttcaagaattttcttgaaatgaggggggggggggggtggctgttttaagaaacgcactagcacctctatgatttacgaattttgcaaatttttaattcctcacttttgccccacaattcctctctttctctgctgtctctcttccccaagcacatatttttggtaccgtaagggaaattctttgaaaataaataacataaaaaaacagtcagaccaaattaaataattaatttgataattcaatggcagaaaaaaatgttatccgaaggctcagctatgttatgaaattattgtcattgtttagctcctaaaaacatgcagatattttcatcattgccttcgcgaaggattcaaaatgcaaagcgttaccaactgagccacgaaaaggcacgaagacaaaaagcataaaatgcagatgcagaataaatgttttattttttcgtcaaatccccggaattcgtgcgtatgccgtattatttgcttttgatccgagtcgggggaccgtttcagcgacgccgttttggcgtcaagtatgtattacatccaagtcacaacaattagtgatgcttcaaagtgtatgctgacatttgcgctgggggcatttgcgcctatgtccaaaatcggatttaaatttgagtttttttcaatccgagaggtaaagaaaatactaaagttaaaaaagatggtcttctagtttattaggagcattaattctgctgtttgaatttaattgataatgattttttcaaaaattgacatgaaaagaataattatataatttgcttaatatgtgtataattatattttcttgcaaaatatttcgtaaaaacaatactttcacactgctcgctaacctttcaaaatatgataattaaattagtaaacaaaaataacatttaaaaagttggaaccatctaattgttctcccaaaaacacatagcttaactttttgaagaaatattctcggttggctaatattctctaattaaaaaatcactctttttgcatttattattagctataattttttaattcttttaattcttttaattttacttaatttattaattttgtattttacatgtttcttttgcatgtcacatacaatttaagacgaagaagcgaaaatggccatttttgtgaaatgccaacaaaaattaaattggacaaatttaaactaattaatattattttaaaatgaatttatctgacaatctttcggcaagtcgaaaattaaattaaataataattttaaaaattaaattgtctgtttttagttctatgattctttcaaagatgctgatttccccgccagttttatcgcaatttgcgctgcccgagctctgatttcattttttggagtgattttgaatgggatattgcttttcgtcactcttcggagcaagtgaaactttgattggatatttaaatatttatttattatttttaaaagaaactttatttatttaaaaggacaaattaacttcttgttttaatattttataatttttgcaaaaaattactgatcatcaaattatcagacacaacacttattaaatgctgtttaggctatcagggattaattggaaaaacttaagtttcagcccgattttggacataggcgcaaatgtaaccaatttattattaaatatcattttcattatttatttgatgaattttctcttttccccctttgggcgtcttcggtgccgttgcaatgctttgttggcatttgactccgtctgttccgccttggccatgtgcactaacttcgtcacattttgccgtggttttcttcgggccaatgtttatcgaactccgccactgcttttggctacaatttgtgccgacattttttcgtcattttngctgttaatgcatgctt

SEQ ID NO: 6463 - DNA, 1375 bp, Heterodera glycines
  unsure (1)..(1375): unsure at all n locations
acatggcaaaatgtaaaaaataataaatgaattcttcaaattttggcaaaatgtttttaaaacaatataatntagaccaaattgactacactaagcgcattttcaaggcattgctggtcaatgtgctttttgtgtccaccggttactttctgaacgccggctttttaattttactccgaaaactttcgctgagccaagtccaaattgtgtttggcacttacatcctcggcattttcacctgcatttcggcaattagcaacccattaacactttatctcttcaggtggtgggcaattcgaccttttaatttgcagaaacaattgaaattcagttcggattatcgaactgcgttcaacaaacatctttttggacgataagcattcattttatacgagagattctgatgcgatttgtggtggaaatgtcatggcgaaacgacaaattgaccagcgaaatggcagagttggaaatgttcggttggcatgaacaaaataagaaaaaacctcattttttaaaacattttcaaccatttttttgtgaatttgttaattcttgacagaagagattactgaaaaagcaaagaaaatgtgaaattctgaattcacaattattaccaaaagattaaaaacaatttattcatttatcaggtataattgtaaaaatttttgtcaggcgcattgttttttctttttcaaaatgcattggtaactcaaaatttaatccgatttttcgtccgtcactttgcccaaaaattttacacacacttcgcgtcgcgtgggaaatttctgcgggcgttggcccacgtttttgagttggtcaccagcgggaggagaagcagcggcagcagcagcttcagcgggggttgtcagcagccaattcacttggacatcgacgggagggaagtcgcgcagaatgaaaaccttccaagaaaccaattaaaggtaattatagaattagttaattaattgaaataagcgaaccgaccgattgccggtaccaatacgtttggcctggctcaagtgggcaagtgatattactgtcgacacacgcattttctgacaatgagggtgattagttaatgatcagccaatttgctaaattaacaaattgtcaccgttttccatatggaatttggtcagtgcgccgtgcgcatcgcccaaatgcgaccaaaccgccgtttgcaattgatcgacacggcgatctaaaaataccattcgaaaataattaaaaaaagaccaaaaaataatttaaaaaatatttctaaatcttattctaagcctaataagttatttttgtggcattttttcttattcactcttttctaagatttttaaccaaaaaaccataatagaaagttttatttataaattttggt

SEQ ID NO: 6464 - DNA, 3820 bp, Heterodera glycines
attattaaaagtttggaactaatatgtgaattattttacttattttaatttgaaagttaaaaaattatagatacctaatactgaatataaatttaaatatgcattttttaaatattttatctgtttaaaatgaaatcaattgacaaattaacttacttctgaaaagtaaaaacatatattaaattttggtaaattatcgaaaaattttctttttttggtccaaatagtaattatcaaataaaaacgaaatcatacaaaatgaatgttcattactttaataaaaagaaaatatataaaatttacaatttaaatatttaaaaataatgttgaaaacaattaatgaatcaaacttgctttaaagactattcagaagacaaataaaggatgttgaagaattaagcactgaacaagattaattttttataattaatgaaaatgccaaagaaataatacgaaaataataaaaaaatcttattcaaaacgaatcaaaaaagttgctgtttaataaataattaataggttttaatttaataattaaatttaagccattggactacatcccaacaaaggaaaattggagattaatttttaaaacacagacaaaattgtgttttacagttaacaaaagctacaaaaaagtaattaaaatcaaattttctaatttaaataatagtaaggttagttaaaaataaaattatttactcagaattgtcataaactaacaatattaataagaaaaactataaaaagtcgagaccatttttgaatgccaaccagtttcttcaacaagattaaaaaaagaacctttaattgtacttataaaaaactttatataatacaaataaatcgactaaaaattacattgtttattatctaaaaggtcaaattccaaattccaaaatcaaaattaatttaaatattaatgttaattttttacttttaaaacaaaaaataataactcgcttattataattatacaaaaacacattccatacaaaaaaaaaaatgattagaaatttccatataaacattttacgaaaaaggtaaccttcaataataataataaatatttttgtgcctaaattgcgattaaattttttactaggcaatatcagggtgctgacaaatgatcacaaatatcaatctttttaaacggagacaaattgatagtcattttctttttttaaagaaaataaatttactattgttgcaaaatactatctatctaaaaatgttctcgaacagaaatttaaatatcaaaatatatagatgattctttatattaacaaatatgacaacatttgaaatacaataaaatttaaataagaaaactaacttattgaaaaaaacattgcaaattaaaggaaataacttttttaaaataatataaagtgaaataatataattacataaataataactttatattatgaaagtaatcattattagagaccggacgagcccggggggccgcccgggcccgggcccggtaaattttcaaaaaaaccgggctcgggccgcccggtaaaacgggcttttaaaaaaacctctattagaacggcccccagcagctaaattagcctttttgagcccaaaacccgaaaaatttttcaaaaaaatttatgtccatattttgacatttttgccatttatgtccatatttcgcgatttttgccatttatgtccatattttgcgatttttggtccatattttatggccatatttcgcgatttatatccatataattacactccctaatcatgataatttaatatattttagaaatcgagcttaaatttcaaaattcgccaggcggcctatcggcaccgccggcccccccaaaaacctatttttttttaaaaaattagccaaaaatctctaaaatttggtaattctttagacaaaatctgtgtaatttatgccaaaaggtattgaattgaggcgatacattgactaaagtaatgtggagccatcacatcattcataaaaaattaattttttgtaaaattcaaagagtacgaccagtaacacaaagaaaatttcaaaaattcaaaatgtgacattttacattatgtgtcacactctacctttaatatgatttcccaaaaaatttattcaattcggttaaatattttaaaatttacggtatttttaatatcctctacagattcatgagaatttttgcaagttaacatttgatttctatatttgcgtttttgaaattgtttattttattggaattttttacatataataatgtttgatatgaaatcatttaaatatttttctatttttatttgctactaggtggaagaaaagtttcgctgattaaatattttaaaattaaataaataactttggagtgaaatttattttcatttaaatgtctaaagatttttatatattgtttaaaactcgtcgccaccatcggatgcaatgatgggtgcagcgagatcggctgcctcggcaatttatgttggattttgagtattattaatgtcttttaaagtttttttcttttatctgcaatatggatttaatttttatctacaaattatttttatttgttttgattttgttttttactgaaaataaaatgttttcaatgtgatttattttatatttaaaaacatttaatgtgctggtgaaaatgataagcattttggggtcaaattaccatataactcacatgattttccataaaatgaattagttttaaatatatatttttattataattatttaatcaacttcattattaatttttttataattaatattaatggtcagtttttattatttaagataattaaattggctaattacttttatctaaatttataatattttttaaggtctataacctttaattttattatcatatcctaatatacttaattacatttagtcatatgttttgctaaaaagtattttataagttcccataagttgacatttaattagatttttctttttctatgtttaattttttatttgtttatcgagtaaccgacaacgccaatacgttgtattcacggtcttctttgatctataatattcttttctttttaatattataattattcctatcaattaaagatgtttgttttcaattctcttgccaaaaaagctatgtttattcaaaaaatataatttttttaccaaaattagtgatttttttttttgatttatatttatgcattaactatttgtgagttggcgtgaaaccttttttgtttctaattatttttatatttatatttttacgattaattagtttaatgatttaccaaaattcacatctcattaaaaaaattttaatatgatttcaattaaatatatacgaatgttaaccaaaatctaaataattctataactcatttttaattctacaaagttaaaagcaattaaattaaactgtatgtgcctgatgcactgttattaattatccgcttaaaaatgttcaaaaatatagtcaaaacataaattatacaatttaaaatatataaagttaatattatcaaaaataaaatattacaatccataaaattattttaagaaggcattttaataattattgtgcattttactgtcggattgtccactgtccgatagtccacctctgtcggattgtccaatgtccgatcgtccacctctgtcggattgtccagtcacgccatgactgtaccttttatgatgcaaaaaatttggtttttttctattttttttaatttataataaatccttttcagaattgagtgctgatttttttaaaaattgaaaatcataaagttctctagcgatttgcttttgaatgat

SEQ ID NO: 6465 - DNA, 2018 bp, Heterodera glycines
  unsure (1)..(2018): unsure at all n locations
gagcactttgatttcggtgtcttcaaaaatttctgtatttcctaaggaaatagtgcattatacactagaacgatcagcatcaaaattgaagtgcccatgcctcagtgggttgaagtcgtagacccatcatccaaaaccaaatcggtagagaattcaaggcactttctaatcggtacacttaaaatttccagaaaaattttccaatcccctaggaattttttttcggaaattttcccgatttcactgtatattggggtgtcccgatcacatgaaggagtgtacggaataagttactgtaaaagacttttttgatcagcacccaaagttaccttagtatgaattttttctgaattttaggcctgcagaatattgagatttaaaaaaaataaaatcttatgctaaatatatgaccatgactgtaatttaatgctaaaagattaaatgggaaaattaaaaccttggatattttaaaaatattaattaagacaatgaaaagaccaaataaatcctgataaaatgattagccttttagtttattaaacttccaagaagaaaacataaattataactagtaatttctatagaatttcttaatgtacattttttaatttaagatttgagcatcatttcaatagtttatctcgagacgcgtggtcggtccttgaaaagctgaaggcactcccccagcatgaaacaataatttcaaaattaagaaaatttattttttttaaatatactgaagaatagaaatttactaacctattgcacaagagttcaattgggcaagttggaaataataaaaattatgcaataaaaaattataaaactgactgtttataataattttggcaaatctaagaaattaatttaaaattattaaaataaaaactggattaagaaaatccaaaagaaatccctttgtcgacaaatgaaacaaaatcatttatattaagtaaaattcaaagtaattcttaattattaatgaaatatctattccaagtaattcttaatttgtaaaaataagtttactaattttttgataaagttgataaacagaacaaagcgaaaacggagaaggagcaatgagagggacacgaaaatcggcagacggagacggacttttccaatagacgtgaaaagaattttttccaatttccatcgttttatattttccatattcaattggtaaaaaatttgtacattaaaaacccaaattaataataaaaacaattaaaaaacaagtcactccaataatgaatacttaaaaaatacccctttatattttaatgtttttaataaattctttttataactgtagattacaaaaagaaaaaaaaacttccctagaaaaacatttggattaccaattaaaaaacccagatcaattaaaagtaaaacgaaaaaaaaaattcttataaaatcacaattggtactttaagaataaagaaatcgggttgagcttgctaatttccaaaactttcaaattttgctacgcgtcatattatatattagaatcaatcatgaaacggtgattatcatataaataaataatttttttatgaatatttgatgacagacaatataatttgttttgaaattataaattatacgaaaacaatttatacaaataatgatattgaacaatattttatttttattaaataaaaaagaatggaattgagaaataattaaattaacttcaataaaatatactaaaggatttaaataatccttgtcgacctttatatgttaataaatctaataaaaattaattgaaaatagggtttaaaaaaattttgtttgcttattttnaaacgtcataaatgtaattaaaataataaatggcctaagaaattttgcctanacagtgtngaagcaagattttattagaaatagcaccnnaagaatatcnaacatcctacagaaanntttaatttcaaaacaaacaaaactaaatatataaataataattttcatcangtattaaaaataaaaaattattaattacggattttatt

SEQ ID NO: 6466 - DNA, 3237 bp, Heterodera glycines
  unsure (1)..(3237): unsure at all n locations
gataaagttgataaccagancaaagcgaaaacggagaaggagcaatgagagggacacgaaaatcggcagacggagacggacttttccaatagacgtgaaaagaattttttccaatttccatcgttttatattttccatattcaattggtaaaaaatttgtacattaaaaacccaaattaataataaaaacaattaaaaaacaagtcactccaataatgaatacttaaaaaatacccctttatattttaatgtttttaataaattctttttataactgtagattacaaaaagaaaaaaaacttccctagaaaaacatttggattaccaattaaaaaacccagatcaattaaaagtaaaacgaaaaaaaaaattcttataaaatcacaattggtactttaagaataaagaaatcgggttgagcttgctaatttccaaaactttcaaattttgctacgcgtcatattatatattagaatcaatcatgaaacggtgattatcatataaataaataatttttttatgaatatagcattataagcaacagtaaaagagaaaaatttactaaaattagaacgaaataaaaaatatattaaccaaaattttaattgctgttgtacgatgtacacttaattttaaattgatgacagacaatataatttgttttgaaattataaattatacgaaaacaatttatacaaataatgatattgaacaatattttatttttattaaataaaaaagaatggaattgagaaataattaaattaacttcaataaaatatactaaaggatttaaataatccttgtcgacctttatatgttaataaatctaataaaaattaattgaaaatagggtttaaaaaaattttgtttgcttattttaaaacgtcataaatgtaattaaaataataaatggcctaagaaattttgcctaaacagtgtgaaagcaagattttattagaatagccaccaaagaaatatcaaacatcctacagaaattttaaattttcaaaacaaaacaaaactaaaatatataaataataattttcatcagttattaaaaataaaaaattattaattacggattttatttaattgaatattatagatttaataaaattatcatgcctgaaacaaatattcaaaaaagtaagcagttaaactaataaaacataattacagatacttttataataatttaattacaacaataaatatgggcatatttgaatgcaaaaattttaattgaaaataaacgcgattaaatattgttacaaagtaattatttttaaattatgctgaaaaacgcttaattgattaaaaaattaattaactcaaatttgtttgcgagccgtgtaaaaacggaacggataagataacattttaaaatttaaattggaatcaaatgggtgcctcgaatgctgaatgacaagtatcattgacgcacaaaggaggagcattgattgctgattacgtggagcccatgttcggaaaattgtggtattagtgactctttgaccctttatttgattgtttgaatttgtttggcataatgtttatttgaattcgacccaaatattttggttttcttcaagagtagttagtggatttttttggttatcgtcggtgataatttttagccgttttgttggtcgtcgatttatttgtgtttttattaatttgttgttgattgaattttatttattttggattgtcttttaattatttgttgcataaatttattttgtttggtattggatttttaaagcaggttttggccaattcatagactatttgtgcaaaatttagaagcgtggcaaagaaacccccgacaaattgattcttcttttccaacatggcgctcctggtaacaaaggttagctaggtggcggacggcttggtttttcttcagtgatatttcttatattttttttaaaagcaactaatttggaaaaaccctcgtgttgggttcatcgactgctcgtcaaatttttaataccctcgtgttgggtttatcgactgttcttcaaatttttaataccctcgtgttgggtttgtttttcttcatccgccttatttggtccacttttacaacttatcgtcgaaagcactcgtgttgtgctacaccaattaaattttgtaaaagctcgtgttgctttaaattggatttttgttttatctcgtgttgataaaacaaaattatgccgacttcatcttcaccaacaaatttgcatccattgctttacggttcgtatgagaggctcaaaaaacatgcctgcgacattgacaaacgattgctttattcacttcgccgtctcgacaattttacgcggctcaactttttggtggaagtcgaatggaaaggaaaaacaaaaatgcaggaagggaaagaagaggatgcatacatcctgtacagccgagccatgaccatttatcttatgataagtgagtcaattgacgacgaattcaaacaaagccgcggaggtcatcttttctatgaaacttcacagcgtttgtgtggattttgacaaagttgctgtgagtttacaacagcggttcaaggatgggaaaggcgagttgcctaaattttgtgatccgttgggactgcgttgggccgaaattgttgaagaaccgatttccgaaaatttggaatgtggtaaggactccaattcgtcggatgcccagaacaaaattctgtccattttgccggcaaatgaaacagtacctccagcaaccgaagaattttccatggtggataataaaaatcaaaaggaggaaaaagaggagggcagagacaaagagacgccggcggacgaagtgttcgagggcgagttgggtttcagtcggcaagtgggcggggtcgaagttgtgctgagtcgggccgagttggagaagctgcgccgattggaaaaaccgggaattgttgtgatcggcttcaaaccgttgcatttgctgaaggattcgcatcggatgggcgccaccgtttttgtatatcccatcaaatcggtaatctccggcagttggccattggtcaatgcggaccaagtggagacggccaagcagttcgtcaagaaattgaccaacaccaaattcttaccggatgattttgcaaattccatgctccaacagcattacaaagctgtcgaaatggtaatggatttgccatttgacagtgaacagttcaaaaaagaggcagcggagaatgacaaattaattacgtacttcaaaaatcagact

SEQ ID NO: 6467 - DNA, 1743 bp, Heterodera glycines
atggaaatatgttttagctttatctgtccttgaaaagagaaatttaaaaccggtgctcttttgctatgtcgcacgcgcttttttcaaaaaactttttgggaacatgggagggggtcacacgactttggtcaaatttgacacggacccccattcttaccagtatacttttggacccagatctaccgggtcgggtattgggttttcaaacgggccttgaaaaacccgggtcgggtacccggacccgtctaaccctaaccaatgcaatagtatgttaattatggcgccgcaagtgtcacttttctctgaactttcctccttttggctctgagttcgaatccaaccgtttttatattctacagaatgtattattcaactgtttctttataaacctttttaagaatattttaaatgtaaaattcaacaattttctgatattttttttcatttacgcagaattagtcaagaaatgacgtcgcttgattaaaaatttttcataaatatttccatatgcatttcatatgaatgaacatgtgaagataagattgccaaatattataaatttgctatgtatttatcgatacttatattatttcataaaaaaatttttagaggaaaaataattaaataaaaaatgaaaataaaaataattttgattttacttttcgtatgtgaaaatgtaaagtcggtgataaagaacaagcccgttttcaataatctaaacgaactcggccaagaaaagccctacggcaatggcacaacgaacgaactgcaggagagagaccgcacagaaggcaattagcaccatcattaactcactaattaacactgattaaatgctttagtcgagccgcaaatctatccgccagtacagcagcaaatgaaaagggggcaaggcaatgaacacattttgcaatggtttaatgattatgaaacccagcaaaagcaaagccaaagaaagggggaaaatgccaaagacgacgacggcaccacggaggaaaacccattcaaattcatcaaaatacacatcaatgaaatggcaaacagtttgacaattgacgcacatgtgacggaggagaagggggcagtggtcgaaatttgcttatgtgacgagaaatacgtaaaacaaaaactgttttaattggaaatttaataatttaagggaatttgtgacggtccgtttgaggcgacggaaaattttggtggaaaaattaacccaaaagcaacggaatgtgttaaatttgattataaaactattaacattttgaatcaaatcgtcaaaaaagagaacaaattgtcggtattagcacaatttcgcatgaattataagaaaggcggcaaaaacaaagcaaaaaatgcaatttttggtggtttgttcaaaaaggtaaacactcaaaacgaaaaggaaatggcacagaaaatgatcgatgttcgcaattggcacattggcaatttgttagcggcaaacgatgagcgcaattcgagaagattggaccgggaattcttcctcagaatttcatttgccaatgagagcaaatcaaacccaaaagtaaataaattaataattaatgtaaaataaatttttaaattttgaaggtcatccttggggagtgggcagtgcaaaaatccgtcaaatttgaaatgattccctcgccgaattggtccaaattgtgaacaaagtcagacgaagccaaattcagatgggaatacgatattggtgtactttgtttttgttcataagtgcaa

SEQ ID NO: 6468 - DNA, 2342 bp, Heterodera glycines
  unsure (1)..(2342): unsure at all n locations
ccccccccctctctattaatgatgctatcttttaagaattgtcctcctcaaatgtgtccttttagcagctgtgttatgctcaactcctcctcattttcgtttcatcatcctcatctcatcctcctcctcatctcttcgttcgttcgtcatttctcccttttcctccgtccccactttttcgctctctcttcggtcgcgcgtcgcctccattcgatgaatgttcccactgatcacccccccccccaaccaacaatcatttggtacgaagcgccggactaataaatcacaaatgcacatgcgataggtcccctcggggatggacggcgatcggagtttgtgtggtggggggagggggggggggaagagaagggatggatggcctttggcttcagaaaaggaatattacgtgttaaaatgataaccataataatactaccatcacagccccaccaaaatcaacccataaaaatgatcgccgcctccgtttgtccgccgatcgatcaggccatttgatcaactcgcggtttctgctgcactcgtccttctcgttttgcctctctctctctattcacagtcattccaacagaacaaccgccgaatgccaaaagcgattcagccaatcactaccagcaataactctttgaacaatgccttcagaaatgatcgtcgatttttttgctggatgcctaggaggtaagcagaagagaaacagaaacagaaactgaccgaccggcggaagaataaaatagaaaaaatatttaatttgattttccgtttctccctttgaaggcgtcgccggtgttttggctggtcacccgcttgacaccgttaaggtgcgacttcaaacccaaaactcacattgtccaatctatcggaacacttttcactgtctgaaaaaaattgttcaaaccgaagggccatcagccctttataaaggtgaagaatttcttctccaaattttgttgataaatgaattaaaatatggtttaggcatgtcttccccattgaccagtttggcactaataaatgctgtaatattcggcgttcatggcaacattagcaagcagttcgacgacccaaatgctttgcatgtccaatttttcgcgggtgcggtggcgggtgccgcgcagggattcatttcctcgccaatggcgagcaaaagacattttcggtgtttagtcattgttttttaggaattgcttaaacttcgtgcacaaatttgtccagaaatttcggagaattcaaattcggcccaaaagcgatgttcttcttcgccctttacgatggcatgccaaatttggcgccaaaagggactcaggcatttcagccggtaaggaatcatagaaatcactccgtttaataagtaatcaaaagagaccggaaatcagtgacggaatttcgaggtcttaaaaaatagacaatcggaaaccgaaattctgatatatatttttaaaattcactttacctttttggcattttacaaaatttgagaaaagtttattgttttgacaattgtgattctgcactaaaataaaataaaatttatgtacaatactttattaaaaattttggtgacttggcccatgctgaggaaactcgacttgaaacgagaaacaaaaccgatcgaaatataaaagccaattttttcttgtcaaattcttaaacagcatgaaattatcaaatagatcaagttccaccaccaatatgtaatttcagcggccttctgatcactcagctgagggattgtcctgcgatgggcgtttattttgcttcctatgcttttttgaggcgttcaatggactccgaaaatgaacaatcgcaaggaatgtccaatttgcaattgctttttgctggaggagcagcgggaatgtgttcatggctgagcaattatccaactgatgtggtcaaaacccggttccaatcggacgatgcgtatgaaaattgtgagaaaaattggggaggatggaatgcgaaaagaaaaattttcaaaccaaatttcctgggcgcgtaaatttttttgagaaaaacttgaacaaatagtttttcagatcgagaagttgtcaaaaaagcttactcggaacacggctggcgaacattctttgctggacttggctcaactttgattaggtgctaatttgattttattcgttggatcttaagcttcctaattacctttttgtttaggggctgtccccgacaacgctgccattttcttcgcagtcgagtggactttatcgatatttagcagaaaagtatgcagaccgaagcattgacaanagaacnngagtcacagcagtcaaaagtggcgaaactaaagacatcagcccgngggttttcttttt

SEQ ID NO: 6469 - DNA, 3277 bp, Heterodera glycines
  unsure (1)..(3277): unsure at all n locations
gaaaaaatatgtatttacataaaattgacatccctagtgatttgtatgcatttttcgactctctactaatacttttttcctctgtaaatgtctaagaagcttttttcagcggactcgaattttgattattttaaattagacattaaaaaatttattttaaaatttgccattttttaactcgataaaaataagagaattcaaatgacaactgttcaaaagaaaaacaaagcacagaaatgaatgaatgttcatgaaatttgagtccaaaaatgctttaatttactcaaaagctcaaattttcgccgacacaatttgttgaaagtcggagttttaaaatccaaatgaacttttaaattatttttaagttaaaatttaaagtaaaattttttaatgttttagcctttttctccgctgatcgctgtaaaatgagtcaacaaaatgaagaagcacttggcaaggatcaaaaggaacttcgagcagttcaacacgacatggaacgccttttcaaagcacgagacgcgaaaggactttccgagctgtacactgtcgacgccatcttcgcgagcaatttaaatttttaaattaaatttttacaataattgggtttaatgtttgttaaaatgatttgtttaggcccatccgccgatcaaaagtcgtgcagagattgaaaagctatggatcaaattccttgacacagactctgccgaattgcatgtgaatattattaatccatcaaaactttaaatcaaatacttttgctttaaggtaacttttgacgaagtttacttttgcggcgatttgggcgtcgaaaatggcacttataaatttacgaagtaaaagaattggaaaaatagatttagttttaaatgatatgatttttacagcaacgacggcacagtgacacagaacggacttttcatccaaacttttaagcgcggttcggacggaaaatggcttatccacaacgatttttacacatgttgaaaaagaatgaatcacaatgaaggcatcagaagaaaaagaaaaaacatttatgtgtgaaattaggcataattaggcactcattaaattaaggtgataataatgaccgaattaaacaaataaaaaaaataatataaaacaatttccattttatttcatttttaatttattaaaaacataatagttttgctaatcctttttaaaaaatataaatttattcaactttattcgaaaatataaaaatgatctttattcaaagagaattttataattggaaattgaattaaggtttatttttatgcttaattatccactaattttcgatggcacttccgctggttgtgttttgttgtgtcaaatcatcaccatcaccagcaaaaaacaaaaacaaaacgcacagaggcgaagaatgactcatttatttactgtacaaattcggtaattacaatgcaaagggatttgattgtttgctgttttttcatggcacaattgccaatggatgaatcataaatataaaatgcgataaatattcaataataacaatgttatcattaggaatgatatttttaggttctaaaaaatccaaaatgttgctaaaaacaagaaaatggttgttaaaagttgcaaatttatggtgtaaaatgactaaattttattcaaacccaacaaaattaagtcaaatcagtattcagatacataatataaaatctaaattattgtcaaaaaaataaataaataattttgggaatgaatttttaagtaaatttttcatttcttaggggttattttctggaattttttcgggtcaattcttgggggtgtatttttcgtttttattatttaacaacactaaaaatacataaggcagctcagcaggaaaaaatattcaaaacccctaaaaatatcatccctgttatcatctgcttttgctttttattattattttttttattgttgtcattttcttgccgttgttcccgcgcaaaatgagtctcttgccgagtttcgtgccgattcggaaacagtgcggtgcaatttgtgtgccgcgttgctgccggtgctgattttcttgcgcattacggtatggaaggcggaggtcacctgaaaatgggcatttggtttgaataccgtattccaaatcacttaaaaaatattagccgccagctcaaagatttttttcggaaacaattaagctcaagaaagaacacagaaaattgagaattttgtttataattttggtttatagaaaattctcaaaaaattgggctaaaaatataaatttgggagtttaaatcggtaaatttcttcacagttctttgctccttttcgtcgttctttggccccccttttttgaaccttcttagtttgattaattccaatttgtcgttttcgttttgccaccttttcctcctccccgtcgtcgttggcccttcgctgtgtccctctcattgaactattcccactgttcagtctcgatgtgctgttgttgtggttgttcaggctgttgctggtgttccgtccttcgtttccgtcgctgctccccgtgcttaatgtcggcgaatgggcgtttcgatcgcgcaacgaatgcggcacccaatctgatcaaaaagtgttgtgccaattcacttattagcatcgtatttttaagaataaaaatgatttattgatcactattaccagccgcttcaaaaaggtccaaagctttgtccccatgggcacatccatcggtgtcgaattggacaacgaccggctcatagaaaagcaacacgtacagcttggggccaaacacaaaagcgagcagaatggagccggtcaagtgtagctccaacactgacagatattccatgtgctgaacactgaccttaaaaagcaaaaaattattttattaattaaataattttattaattaatttaatatagccaaattcaagtttgattaattaattatataattaaaaccaaagtgtgaaacaccgcccaagcgataagaattagcgaacaaatgagagaagtgataaacagccatttggcctccttaataagaacgccaaatttgcatttaaataaaacaattcctcccaaatttgccttataatttcgtttgatgctccgattttgcgcggacaaaaacaaagccaaaaagaggaggaagaaagtgtaagtttgggcgagaagaaacaatgccgaagaatgngggcaacggagggcgaaaaagggcgatgccattgacttgngaggagggggagagaggggccaaaaaacgtcggggagaatccaccggaagcaaattacagtc

SEQ ID NO: 6470 - DNA, 1334 bp, Heterodera glycines
  unsure (1)..(1334): unsure at all n locations
cggaggaaggacagcaattcggccatttcgaagttggacgnccttcacaataattacgccgaagcaaatggcatgtgccatagcggggaaggcaattcggagaagacacagctaagattggttgtttaggcattcaattgacaattaatggtcattagcacatacaaagggttcatttgcgccttcggtggtgaacagaaaggcgctgagatgcattgtgatgatgccgagcagaagcaaaatgccaagcgattgactgccgcggattgtgcgacgccatattttgaacagaatgcacagcaaagtgccgacggcaatggcactgagcagcgcggacagtgacaagagaatggcacggattgcccacgccacctcgcggtcgacggcatcggcactcaattcgcggatttcctgcaatggcaattcattagggacacgaacacaaaagaaaattttatactggttcgtcggccatgttttccctcaacaggaattcatcgtcttcgcttatctctgccattctttgcctcgaaggctctctacgaaagaccgaattatggccaagccaagcggagacatcggcaccgaagtgaaagtcgtcgcttaattacttaattggaattgccaattcgtctgtaatcacctcatcatcagcggacatttacagaatggcgatttgcatcgtgaaatcacggtggccgacggcgaatcacgcgtaattgggacaccgtaggcaaagggacggtaatcggccaaaaagttgatggcgatgttcgatattgaaggattattatttggtgaaaatgccccgccggcggacgaatcgatcgaagttcggggcaaagacaaattggccatcagagaatagtcgaaattgcctaaatcacctcagtgataaatccaatatgttttgttttattttaccatgatgatcaatcggcacaaattcgaacacttcgaacatttcggcactttcttctttggcactttttctcaaatattcccgcgttaatttgcgtccgttttcaatgaattcgtcgcataatttttcccgaatacaaagcctataaatttaattaattaaaaatgattccgttcctaattggtncattaattactttttgtgtgccttgtcaatggctttcaacagtctgtccacccctttggccaaattgcccgctttgcttagtcggcccattcccttcacatttaagcgttcttcgcccgtgcacatcccgtccgttgaaatgtgaaaaactgtttcggaatctgaacaattatcaatttngttgttttatttatccgttttctaaactgtcccctccctccctttt

SEQ ID NO: 6471 - DNA, 3379 bp, Heterodera glycines
  unsure (1)..(3379): unsure at all n locations
gtgggcgaacaaaaagcgcaggtaggaaaatcctcaaaattgatttaaatattcaaaattaagatgacaagtttaatggttaaaaacggacgattgtgcgaaaagcttggcgaacaccaaaagggactgaaagcagttcaaaatcggattgaattgctggagcagtgccatctgcgcgagttcgttgcgggtcttccgcccgttcatgaggacggctcattggttggtgccgaaatcaaacaaaatttgccacttcaatttcaggttttgtctcaatttgaaaatggcaattatttcgcagagatgaaaatactgttccagtcgggttctcgcttttgttcgggctttgccatcaaaagctcggcacactttcgcaattatccgtcgaatttattcaaccaaataattgaggtcgctttatgtgttaatacgtcattaattagcacagcatttaatatttagcatgctctgaccactcgccaagttcaaaaaatgacccgttgggctgttatgaacttcccggccaacgaaatgtgcctgtggccccaggcacttttatatggcactaacgatgacaacaacaacaataagtacaactatcggaaattgattcgaagacgcgaagtgctttcagaccgggtgagaaagacaataacagaaacaagaggggtcgcattgatgtgctaaagggaggggacccgctatggattttcctatttaaatttttcttaaaaatttatacctccgtgggagaggaggcgaggggggcgggggctacatcggtgcaccctatgacgtcactgcccaaaaagtcgccggacaattagttctttgagaaatttcaaaatattctcttcaatgcggccctatgttttgagtaaattatttttgtacaatttgtcgcgtggtttttcacgcgtttctctctctctttgggtcgggttgcaggggaggcgtacccttttttgtctgaataacagtgccaatgccttttgcttatgctactccatttcccaggtggtctattctctgttcaaccaacattccgcccacaaattcgttgtgaacatttactattcctccgagtcggatctgttcaagcaaatgcactgcttcaccatccgtcgtcatcgtccttcccgctgattttgagattgactttaatcggctgaaattgttcattcgctttttgttctttggtttcattcctatcaatgggtttaaaagtgcttttctcttttatttgcatggaaaacatctccataatttaattcattattttaaatgacaatttttgaaattaagctctgttggcgtttaccgatatttgtaatttcgaattctttcccattttctaaatgacaaattcatttatcataattttcaacaataaagttcaattcagtgctttgttaatccctctgctgttgattgggtcgcgtctcttttgaaattcggggaatggaatcggtgccaaagttcgtctgcctttgacttcaagtcgtaaaagcggtggcccataaaattttaatgagcattcaaaaaaataaaattgtttgtttaattataatttgcacacaaagcggaaaagggcatttactcctgccgaatgccattacgattaattttccctccgtcctcaaaatttgtttgttctggtgaattattgtaatttgagtcgtttttttcatccatcacgacttgtacacggactcttacagcttggctttttgttttattttcgaccaattttcggctctattccaatttacgtgtccaatcagtgaccatccttagtttcttaggccataaattttttattactcgatacaacccatactttttggtatcaataaagttaaaagtctcgggaattttatgtataactaaattctgagctaaaggaatagacaaaaaaatatactcgaaaaaagttgaatttcattttctcattgtaatttcacggtatatctgtcgtttgtcgtaagttatttctttcagttaatagaaaatttcagaaaatgcaaaaaatatgaaaacttgtttgtctttttattgttttttgaggtttagattccgaataccgtatttactcgattataccccctcccccctcgaatggaagccccccttgtagggggggttgaaaaatagaagcccccccctcgagtagaagcccccttcgaatataagccccctttggaggggggttgaacaatagaagccccggggcttataatcgaggaaatacggtataacatttattttcttcgaattccaatcctgaacatgaattcaatagactcagataacttgatgaaaaaacagataatgaaagtctggcatcggattcatgatcagcgaactcatttacccctaggaacataattttaacatgaaataaaatttttagacgaaaataatttggtaggtttttggccatttctttgatgacaaatttgaggggtgatgttgagcgatcccaaatatttgttgtttttcgtctgaatttggcgtttgtcgtaaaaaccaatcagaattttataataaacgaaaatcataatttttttattctgattggtgataatttatatttcggtgtttgtctctgtctttgtaattctaactgtcgacttcttcggttcttttctgttttgtgaccccccctgaaattttcaaataaaaagtcatttctagggtaatttggggcgctgatcacgaatatgacatttatttttcataattccgaatcccgaacccgaatcgaaccaaaattcgaaattcataaattacaaggaaaacatatttttatgggttttcgaggtcgctgaaaacggttatgacatccattttgaccaattaaataaccttaactcgagaaatcggagttttttttcagcaaacacaaaatcatcaaaatattggccaaactgccgagaaatgcgtaataaaatttgcgctaatttggtggcatgtatctaggcttaggcttcagcttaggcttcagcttgcctaagcctaggcttttttgaaattgaaatctgttttttctttctttgtagaggaattgttgttttgataacaaaaaatcatatttaaataaaataattgcatttttcttaaattaaaaagcttagctaattgtaagcctttaaaaatcaaattaattttctgtaataatttgacaggaaattgaatttaaacgtaaatgcacaacttctaggaaaataccttcttctccncnttctctccattcttttctctttcnttttcnnttttttnctttatggtttttaaagattttatctattttttnaaaaaaaaatatatttttctttaaagatattttttctggcacttaaatttttcatatctctct

SEQ ID NO: 6472 - DNA, 3716 bp, Heterodera glycines
  unsure (1)..(3716): unsure at all n locations
aataattntggtaggtttttggccatttctttgatgaccatttgaggggtgatgttgagcgatcccaaatatttgttgtttttcgtctgaatttggcgtttgtcgtaaaaaccaatcagaattttataataaacgaaaatcataattttttaattctgattggtgataatttatatttcggtgtttgtctctgtctttctaattctctcttctgacatcgcctcggggttaattaacaataatacacatgctattgttatcatcatcattgccatcattaattagttcgttagttgacatctttagtgagtgccttcgctctaattgccaaattgggctattttcttccctatattttgtgtcagtgctcaaagcgtaccattcggacgaccacaaaagcgtcgttcgtttgcttaaggtcatgacgctgcttctccatttgtattcgctactgtaccatttgtgaatgtaaaaaggcgttttccttgcctaagggcggctttagctgaataattttaatggcttagaaataataattaatgggacattctttgaatggtaattaattgagtatttaacgagaaaaggagggaaaggtcgtcgaaaagagtgccgcccatttaaacgaccgacaagtttcacagcccatcacttttcagtttatcaaattcaaaaagggtaataattaacgaactaaaaaccaatattcatacacaaaatacctctcacacctttattaaaccaaatgtgagcattttaattcacataataatcccctcttaacgtggccattgcgaattaaaatttctattttcggtttttgcctctaaaattgacgcatttttccaattttatttacaaattacaaaaattaaatttgacttttggagcaacagccaaaaaatgttttatgttttgtacttttaaaataaaaataaatttcggcggctcttttcggcactgccgggccttcctttattggcacttttctgtcaatttaagtgcttatttgttataatttgttaggcgcttttaaaccaagaattataatagcacgacaatccgccggcggtagacaattgagcagcgacaattgggcaaatttttttaaaaatttcttaaactaaaattcttaaaatatttcaattgaaaaagtaattatttatgaatttcttcgttatttttcacatttggcttttacataaagtgatttgtgaatttatagcttaatttacctaaataaaacagataatttagtaacccctccccctggcaattcaattattccaaaacaattccataccgtaatcacacatcttgttccccaaaaacagtattcttttttcaattaatccctttaaagctgttaaaaaaggcctttccccacaaaaatgtccaatttgtttgtggcttcttctgctgttgtttttctccttctccaattgcatttcgtcgtcactttcgcatcatcctttgaaggggcgccgccaaaagcaaatgaagaagcaatgccaacgacgggggaacaaaacggaggtgccgaatttggtggaagcaagcagaaaatggcacggaaaatgatgcgatacaatggcaacaattttgacaaggtcagaccaaaagaaacaaaagaaaagaagcagtgcaaccgcacacaatggcattttcaaaaatgaaattcgaaatgacacaaataattccggataataattcagagtaattaattaatacaagcggaatgactaaacgatttatattaattaaaatttaatttataaattgtttcatttttttcgttttttcgtcactgcggcgacaaagcaaccaaaaaaagttgatgctgattgtgagccccaggaagaaaataagggattttaatgagtcttaattccctattttgctggtttttaatgtttcgtccgtctgataatttgtcatttacccccccccccccccacataacacataattacctaattaacaccctcaaattagcaggtgtccgtcctcttcattcgacgtgaaatggcactgcgaaaacttcagctccaaatcaacgttttggagcagcaattggccaatgctttgtcgtccgctttcgccgccggctgtcccccctccggcgtttcttccgtttccgatggcatttcgcaccgacgccatttgccaatgccccgcgagtgaaagtgcgacagagaaaggaacacaacccgatcagtgaacgcatcagatgagaaaatatcagaaaagagtctccccccccccatttttgatcatttgagtaatttataatgtatccatccataatcaatggttttgataacgaggattaacaaatattgtaattttgtctaggatattccgcataaattctgtcttttgtttccgtccgtttttttcagtttgttttggcaattcgcttttccctttcccatggcattcaattttttaaatgtttagcatttaaaaaaggaattccaaacaattcaaatttaattggcgttccgtttgatcattcttttgcgattgatcagtcgcgcctttatttctgtgtgccctccgttttctgctcaaaatcggccccggtcgaccaattcctccgcgatgcaatcttcggcatttgaagtgcttctgtcctcctccgtttcccgggtcaagcgaaagtcgaaccattccaagtggggaaaagccaccgaattgaacaccaaatacgcattttggcattgcacgtgccatgggccgtacatatcggaatgacctgcaaattaaaaaataaataaaacatacccaattaatacactttgaaattgcaccaatttgaaaataaccaaccgctgctcaatttgattttaccttcgaaaatgcgtccggtccacatgggcaaatacgcttgtgaggagccggccataacgccgacaaaagtctgaaattaaatgaatattttggatatattaaaaagattaaatatttttatttcaacgaatcagttaaagtttaaattttcaattggttttatgcaatttgaggccggccaatcataccatggtaatttgaccaaaataatgaaatcatttggaaaaagacaaatttattgtccttcaaacacttatgtaagctttccatattaatttttattattttaaattttgaataagagaattattaccgaaaatttagccagggactataaatataaaaaagtaaataatgttataaatatttaacaaattactaatattagagtttaatagtttaatttaatttaataattgcttaattatttaattaatatatttgttaatttatcatgatgaaattattttctcactgtttatttttttaaattttatggataaaattttgtatatttttgttttttaattttgttttttaataaattattgctcccgatttttaaatttctgccatttaccccccccccccccctgcccaaattaaccccctgatttttggtgtgcatccgttccacggtgaaccgcgtcccggttgggatgcgcagaaggcaggcacgctcccgcagctgttccgtattgttcaggcgatagaggcgcgactcgtccacgaaggattcgtccaattgggtgtagcaactgatcggactgatcggagtgccgtcctcggcactttgctgtggcaacagttcggccaaaggccaatcgaacaactgaattaaataggaaattagttaagctaat

SEQ ID NO: 6473 - DNA, 4905 bp, Heterodera glycines
  unsure (1)..(4905): unsure at all n locations
cgataaaaaattagaaaatatgcaaaaaatgcatacaaatactcaaaaaaaaagtttctttatcattaagtttntgcagtagaaaaggtcaaaattgtaaaagaacctccattctaaattggtaatatgttagtatttacatttttcgtctaaaaatcggtttaaatccacgaaaaaccattataaaatttctgtgtttttctattgcaaaaattcttagatttttttgaattaactgaaaaatctttaaaatttttaaatttgttcaatctgaagacttttccttcccgcctttttatttgtcggcaaataaagccatttataaattacgtttgccgtttcataatcattttctctttgtaatttttcaaagttttctctcaacaaattgtcaaaatttgaacggcttaagtcaaatgtgagttgttctgatggtgaaattgcagcagccttttcttccaccctttttggactttttcctatttttgccacactttcaaaaactttttggccaattgtcttttcaccactcacttccgattcgtttagtaattttggttccgcatattttttgaaatatttgtccaatttgtaatcgaattcttttgcataagttgggtcaaaaaagaatgccgcaatcccgcataattcacttgccacataaatcaaagacttaattatgtttccacttccaaatgtaaaatttggcctcaccgcggcaaattgttgtggcacttcggaattatccgctaaatgtttaatttattaaatttgagcgataaaaaattagaaaatattgcaaaaatgcatacaaatactcaaaaaaaaagttctttatcattaagtttttgcagtagaaaaggtcaaaattgtaaaagaacctcattctaaattggtaatatgttagtatttacatttttcgtctaaaaatcggtttaaatccacgaaaaaccattataaaatttctgtgtttttctattgcaaaaattcttagatttttttgaattaactgaaaaatctttaaaatttttaaatttgttcaatctgaagacttttccttcccgcctttttatttgtcggcaaataaagccatttataaattacgtttgccgtttcataatcattttctctttgtaatttttcaaagttttctctcaacaaattgtcaaaatttgaacggcttaagtcaaatgtgagttgttctgatggtgaaattgcagcagccttttcttccaccctttttggactttttcctatttttgccacactttcaaaaactttttggccaattgtcttttcaccactcacttccgattcgtttagtaattttggttccgcatattttttgaaatatttgtccaatttgtaatcgaattcttttgcataagttgggtcaaaaaagaatgccgcaatcccgcataattcacttgccacataaatcaaagacttaattatgtttccacttccaaatgtaaaatttggcctcaccgcggcaaattgttgtggcacttcggaattatccgctaaatgtttaatttattaaatttgagcgataaaaaattagaaaatattgcaaaaatgcatacaaatactcaaaaaaaaagttctttatcattaagtttttgcagtagaaaaggtcaaaattgtaaaagaacctcattctaaattggtaatatgttagtatttacatttttcgcctaaaaatcggtttaaatccacgaaaaaccattataaaatttctgtgtttttctattgcaaaaattcttagattttttgaattaactgaaaaatctttaaaatttttaaatttgttcaatctgatgacttttccaaatggtgaggtgggggaaagaattactctcattttctcacaataccttcattgtatgttcggaagagatattcatacaaaaaattgaaatattttcggaattttgtgcattcttttcggtaattctcaatttccgcacattgccatttgagtctcatcaaataaatgattttaagatagagcttgatttccaatttctgtgaatggatcaatgatttggcattggcacttaatggcgccgtttccaatttggcaccaaacttttcaacacgcatttcttttagaacaataagaaatatgttgtcttcgatctaaaaaaattttttggcaaaatttcgtaaaaaagggcattaaaattgaaaaaacacacacccacctaagagttgagtttttggaaattttcaacaaatatttcacacaaaaaaatcaaaaaattaaatggagatttttttggcactattatgatgcatataaataaaattcttcaaaaagaattccggggcttaaaaagtttttcggacatcggaattccgatcataaaaatattgaaaagcgaaaaacggaaatcgaaagtcgagtccctgccatccctggtgcaaagaacaagtgtgcttgagaccaaaaatttccgagaccgagactcaaaaagccgagacgacttgtctcgaggcgagactctcctcaagcatcactgaaagcgccaaaaacacttccagttcatttaccgctttgtctattccataaaatggcttgtgattaatgtgcgaaatcaatgcttcgtttgttattgaagaacattcaattagggccgctccaaaaaaatcatatcgggacaccttctccagtgccatcgtcttcaatttttccattttgaaatcgaacattttgcgaagacggggaaatgaattgtcaaattttgaattggcatttaatttcaatttcatttttggcatgtcaaacaatgattcttgctcataccaattgtttaaatttattccatatttctcaattagcgtttctttattaattaagcgtgtcgttttagaataatttccgcccagccaatgattcctccaaacgaatgcccaatctaggattgcatcacaaaactttatttctctcccgttgctttctaattttggtttaatgggattctttgtaatggaaatttgttcagctaaagttgggtctactgctagaaaattttacgggatttaatttaatttgaaatttcaatttaaaatttgggttcgaaatccgttaccttttacatattcagcaacatattgccagaagaagtattcgtagagaatgaaagcaaattggcgaaagttgtccaattcattaaagacatttatattgtacttaaaataacatggtaaaatttagagaccgaacaagggtccgatcggtttatttcgatacaggatcggaaaaagaccagatccaaaaaaacgaaaaactaaaattttttcgatcgtattatttacgatacaattgaaaaaatgtcgtaaaaaagatccaatcaaaaattaaaaacacattttccaattggtttgaagcttatacgttgccttttattatggtttttttaaattttgtctccggtataattagtaattggccatggttttgcctattatttggacaattgattgtggccgtggataattttggggcagtgatcagactgaatgtggaggagtacagtaaaaatttctgagttccggtaaatcacgaaattgttgaaaattagttttttacaacaatttcccaaactgttcactgtgggcccagtggttccattgcccaattatcgctaaccatttgtcaagtcgagttaattaattaattaattaatatacagagaatttgcttactcgcgtttccgtcacatgattccatttcattcgcataacatacaaaacgccaaggtgggcttcatatttatcagacacaaattggtttttctcattgataattaatcctttatccgcgcaaaatttgttaaaatattcgggtccttttgcaagctcaaccattgcgtcatcttccatctgataaatgattgataaaagcattaaaaataatgtttaatcagaaacacttacggatggatttccaattgtaaaggcaaaaaaaagacaaagattgaataataaaaatattggaataaaataatccatcttttattcaatatttagctggaattatcaatttgaaaatgattcattactaatggaggaagttttctaattaatcaaattgtcgacactcgggcgaaccatccactaccatatataatacctaccgttttactgaaatcgagtccctgggggctttatttttcgaccccactcaaaagggggtatttattcgagggggtctaattcagtaagtacagaattttgcagtttttatacctattaagtacctaggcatttttctatttctcttgccgaaattcggttttcaattcttaggcacaaaaacggcaatactggaacctaaaaaggcagaagaaacaatcgcaaaataggcattaagtaggcactaaaaataggcaaataaaatttttgtaaatgattttatgttccaaaatacataaaaaaaattaattaaaacgtaattttgattatatttcaattgtaaatgaaataatataacaaatgaaaatcaaaatttatcaaaaaaaaattatattttagggaattaacttttgggaaattttttcatttcttagatcttttgaaatggcatgaacaagtgtatttcactataattattcttttatatatttattgggtaaatcaattcctcactattaatttatctttaagtcaatgtttcactaatgggcaaatcaattcttcactattatttcattttattttttaaaatagaatttttggataaattatattttcactatacgtatacctagggaatcatcttattgaatcgaaattttcaaaaatatttaaaacgtaatttgttgtaaaatatcagccaaagttgtataataaattggttccgagagtccattaaccaccattttttgagaccctgccagg

SEQ ID NO: 6474 - DNA, 938 bp, Heterodera glycines
tgattattttcgaaaaaagaatatggatcaaaatatttttgttttagtcataacttttttgaaacatcataaattttcttgatttttgcttggtaattgtgaatacattggcattttgtttttggctttttagatgacaccaaaaatcccgtttgtttgctgaacaatgtggcggcccagctgggcatcaatctccattaccgggaggaaagcttttcccctttcaacgacaatttctccaaatcgctacaacagtaaattcaatttttttttttttgttaatattaaacatttaaattaattaattaatataatcacacaaaattcacgaatgtgccccttggggcattaaaattgaatttgaaaaatattattatatatattcttaattatcttttgttaatgcctaattattattatcttttgttaatgcctaattatttctatcaaaatgcttcagtccgtcctttctcacttatttgttgctacaagcgttgtgcccggccgctgcgatacaaagtgtcaatgggtcattagcggcaccgcttttcgctaattttccacaccaacaacagcagcagcaaaacacatcggggtaacaaacttttttttgtttaacgtatttctttgatgatggccaatgcaaagcgcttatcgacagagccattattatgcgcataactaaccgtttttatcatgaactatagatatattttacacgtccgctatgttattccaatactataataccgtgtttaatgaattagagccccggggggctctatttttcaaccccctcgaaaggcgggctctaattcagtaaatacggtatatcggtgttagagcgtttcttaaaaactgccacccatgcgcgtttcttaaaactgccagcgcgtttcttaaaactgccaaccatgcgcgtttcttaaaactgccag

SEQ ID NO: 6475 - DNA, 4069 bp, Heterodera glycines
atctttaaataagccttcgtaatttaatcattttgagcattcattctgctgaagcgcagaaggagggaattgaaaattggaatcgattatgcgactcgggggaacggaaagggagggaccaaagaaaggctgcaaaagagcggggagggagatattatcaccaaccaaatgcgtagctgtatattggcaaaaatgcactaaaattgggatctgtaatttgaacaacaacaaaaagcaacaattaatttatttgaatgagaaaccggtgctagcgcgtttcttaaaactgccaaccatgcgcgtttcttaaaactgccacccatgcgcgtttcttaaaactgccagcgcgtttcttaaaactgccagcgcatttcttaaaactgccagcgcgtttcttaaaactgccaaaaaagataataatatgacagaaagagtttgggtaattatttattcaaaaattgttggatgtgttatttttttaatctacataatacaaaactacaattgtttcactgttctttaaagtgttcaccaaaaattttaaccgaccagcataacaaattctaaagataaattaagtctttaaatactgtaaagacagacttttgtcagaaaacaatcagtactttcatacagacatttgcaaaagctattgtcgcaatcatattgtttttgatatttgtttatatagcatatatcatggttataacagcaacgattaactataatatttaaataatacatttataaatctattaaatttataactttttttaaagtcgcaaaaccatattacaggggctatcatgcaagaatcaaatatagaagtgccacaataagtgccacaatatttctttgcaacttacaaaagggaattttgaatacaatataaaaaaataaaaataataattaatttatcttttgtgggtgttttatgagttcaaagtggctgtggcgataatataaaaatattgatgcagtcgactccttttgactcagatttgaaagctaaagtttcaaatatgaatttgcacaattaaacaattctaacccgttgttccaaatttggcgaatacacttgccaacggtaaatttcttccactagccattcacacacaaatatatttattcgaaacattttgatgactgctgctaaatctaaattattcatccatttttcggtttcgtgtgccccagttgcgggtgtgattgctttttctagatgttctctaatatatatattgctgccaaatagcgctaaaattagcatattcactcagtactgatttatattatacttacaccaccaagaattttctgtataagaattttggttaatggtttcttgcaaatactcaatgacatctcttcggatttcggtgtgatttgattctgttccagtcatagcaagagagacagctcgccaaccgcaattaccatctcctaatatactgataacttcaccgagtccgtactcagaagaaacaaaatcaaacggtactggatattcaatcggtgcatcacctatatttgctattacttttgatcagaaataaatcttactaaatctgtaaaaccacgtttcacatagttcttgtctttgatcttcatttataggattaaaaacaaatttaataacagaacgcatcatggtagcaacatgttgaactattatgagttcattaatttttaatattttgattttaaaatttattttggttttaaaatttaatatttatttattagttatattttatatttccttttaagtaaattaaacccccttgagtttcttggctagaaatgctgttttcagtgctttcacttgaaaatatctcttcttcagaatttcttaaaaaattgttaatatattttttataatggttgtatatacgttttcaattttataaatatataattaatgttggcaaatattttgtagttggctataatttaaggctggcaaacaattttccataattttagctaacatatgaaagtcacgtctgttacgtattaacttaaacaaaaaatttaatttatattatcgattagcacgaaatcataaattatttatttatatttaaattaaaaaataggaaataatatgttagtatcttttttggcagttttaagaaacgcgctggcagttttaagaaacgcgcatgggtggcagttttaagaaacgcgctggcagttttaagaaacgcgctggcagttttaagaaacgcgcatgggtggcagtttttaagaaacgcgccagcacgcggtatatctatgttcacgtgttttgtttttattcgctcacatatattttttctctttttccttgttttcatgagtatgcataacaattatattatatttctatgtttatttgtgtttttctgacttcttttacgtgtttggttgtcctatttttacgtgtttttctgctttccaatgtactttatttttattagtttaacaatattacttcatgttttacacacgtccgctttgttgcactaatatatgttctatgtttttttacgtgtttcgctcacttattttatatgtctatgattaatttttctcttttattttacgtatttgttaacgtgttttttcctgcaattttacgtgtttttctgtattccaatgtgttttacaattaattaacaataagatgttttttcgtgttttacacacccgaatatatgttcacgtgttttgtgtttttacgtatttcactcattattttattcaatcttccaacattttcatttatatttaataacaattattcatatctctatgtttacatgtattttttgttccattttcacgtgttttacatgtcaatgtttatacctatatcttttttgacttcttttacgtgtttatttgtttgttctaatttcacttgttttttcttcgttaccattttactattatactaacaacaaaatgtgtatttataatgtttacacgttcgctttttatttaatacatgcattttatcaggcgttcaaatatgttttacacgtccactttttacacaatactaatatatatgttcactgttttgctttttgtttttacgtgtttggctaacatttgtttatttatatttcttagttttcatgaatatgcataacaattatttttatgtctatgtttagatatattttactcatttcttttttcgtgttttcgtgtttattaggtctttttcacgtgtttttctgcattccaatgtgttagctattaaattaacaataagatgtgttttcgttttacacgtccgctttgtcatattaattccaggtatttgtctcgcctatgtttacgtgtattattgtgttttacacgtccttttattgcactaatatatgtttaagtgttttagctcatttattttattcaattttcctacattttcatgaatatgcaataacaatattttatgtttttgtttttctcatttatttacgtgtttgtttgttttattttcacgagtttttcttttttacattttactattaacaataaaatatgtatttacaatgttttatacgtccacttatgttatattaacacaaaagattttatgtgttttacctgtagttttcacgtgtgtttgtttttatgcgttccaatgtgttttacgggccagctttattatatctctaacattgtgttttcacttattttaacttggcttgttattcaattgtttttacacacgcgtttttatgcgtcctatgtttttatattatttgtgtgtttttattgtcatgttttggtgtattttttacttacgtgacttacatgtgtttatgaatagtctctgtaattttctttgaacagcacgtttcaaccgcctccctttggttcgccgccaccacatgcttcggccattctgccaacgtcacaaatgaacactgcgcaaaatggcgctgcagggcttttatcaaatgctttgatgttaccgccgccgccaccgtccgcgttccatcattccttggcattggcaaatccgcaatgggcatctttattcaatccctagccttggtcaattggtaca

SEQ ID NO: 6476 - DNA, 1088 bp, Heterodera glycines
aatcatgcctataaagtttgttgtgatttaaaaaataattaaaacttgcattgaatattttcttaaatatttttattcaatttgaaaaattaaaaattttttttttttgttttgcgatacatttatgaatattctcctttaattcataaatttgtcttgtttttcatggacaatgaaaccgttcttttattaggcggagatgaatcaaattttgactgatcaaaaaaagagaaaatcacaaaaaaccatggctaaattttttgaaaaaatccccaatcattgtttggaaaataaaattactatccacttattcatcacccacatttttaacgatttaccaggtgacggtccgactgagcaaagatggcactgagcacaccgcgcttggtccaacattgactacagccaagcaaaaagctgccactttggcactggcacatcttcgtcccgagttggagcagctgaaactcttgttaaaggaggcggagggcacagaggaagaaaaacaaattgtgccaaaattggtgaccaaaattgatggcacagatcaacagcagcaacaaaggcaacatttgttgggttgtgatgccgcatcaaaattccatcatttatcttcatcatcaccgactgatgaaatggatcaacagcaacagtatgatggactcaacgatgatgatgatgaagaagcagtagcagcagaattggtcgaaccggtgccgctggaagaagcggaaagttgccgagaagagcggcggcagagtgccaacaaaaatggcaagtgctgccaaattttgatcaagttttggtatcattcggtgcagaataacaagttgttgaaaaaagctaattttaactcgaataattaaaatttaaaaaactgatgggcaaaaaatgaaaaatcaaagatttgtccaaatcattgatttttaaaatcatatgacaaacattcgaaatatttcagctgatttggatggcgatgatcatgttggtgatcagcagcagaaaattaatgcaaaatttgctgtatcgactgttgatcacatcaaacagggggaacaacaaaaatgaatcagactctagaggtcccc

SEQ ID NO: 6477 - DNA, 1695 bp, Heterodera glycines
taattctaacaaaaatatttatgataaaaaataataaaaaaacacataaaattattaatgaataataaaaaaaatttaagcaaaaataatgtaaagttttttgactatatggcataaggcaaaaattgaaaaaccccgaccccgaacgatttggcaaccccgatcccgaaccccgacacttccaaccccgacaaccccgaaccccgaattttccaaccccgacgtcggggttgcaaccctagtttaaagaaaactaaaattttattaagaaagaaatcacgatttttaaccaatttcacacattctaaatcatttgttcatctcccaattgttttttccaattttcaatgcttttaatttttaacaatttggcaatttctttgtcattcattttatgtcattctttttttatttgccaatattttttcattttttccaatttttccttctccgttataaatttactcattccaaattgtttcttccatttcttaattactgaacggctaactccgattttcttaccaatttccgcataattttgttcccattcttttgccgaaaatttcttttttgttaaattcattttttcgctaaatcagtagagttatgatgcttcatataattttttaaattagaaaaattcatttttattcccaaaattgaatctgtgaacaaaaagtttcaacaaaagtcatttggcgaaatatttggagaaaaatgggaagaaaaaagagaaaataattgagaacagcaacattcttcggcgtaaaatctctttagatggtagtgaattctttttatttttattgaaaaaatgtttatgatttttgagtgagctccaatagaaattaattaaactttatttaatcaaattattttccaattggcaattatttggtcaataggataaaattattattaatattcattgaaattaaacaggatttccttattttatgagttaaatcagtagaattatgaattacgtcagattttaatcagaaaaattcatttatatgcctcaaaaaatgaattgcgatttaattgaagaaaaaataaaatcattttaagacgacaaaaatgaaattattccctttattatttttaattatatttttaataattgtcaaaattgaatcagaaaagaaaaagttacaacaaaagtcatttggcgaaatatttggagaaaaatgggaagaaaaagaagaagaaaaaagaaatgaactcaaaaaaagagaaataattgcaaaattttataaaataaaagaaaaaataaagcaaaaaggacgaaaacattcaacaaaagaatggaataaaattaattcaaaaatagcgaaaaaattggggacaaatcgaatgaaaatttatgaatggattaaagaatatggtcttcaaaaaaagaaatgctacaaattaagaactgatgaagaaaaactcgcaattgtacaaaaatttaatgaaatggcaaatgaatttaaacaaaacagaaaatattcaagaaaagaatggcgacaaaattatgccgaaatttgcaagaaaattggagtaggccgtgaaacacttagaaaatggaagaaacaatttggcatttgctgcaaaaaaataacggagaaagaaaaaatggaaaaaatgaaagtttattggcaaacaaaaaaagaatatccaaaaatgactgacaaagaaattgcaaaa

SEQ ID NO: 6478 - DNA, 5010 bp, Heterodera glycines
  unsure (1)..(5010): unsure at all n locations
tatttntgtggtctaataattgaaaatatgtgaaacccccccagcattcatttcaatttcttgaaaatttaaatttgctttatgtgaaaattccaaatatgtaaaataatggcattttctataaaaaaaagttatttaatatacataaaggtatgcttttaagtataaagacattaaaatttcatttcataatcaaattaaaaagtaaaattttcggcaaattatcccttagaataaacttttcatttttagtcccaccacttgttcaaaatcgcgaaatatggagataaaattgcgaaaatctcaaaatggacataaaatggcaaaaatatggacataaatttttcaaaattaggggtacaatttcttaaatttcttcattttcgctgaatgtaattaaaattttcaaaaatgggaaatatggtatcaaagccattttagaataaaaaatacacgataaagccaagatttactcatttttagcgaaaaatcaaccggaatttttttgcttatttttgacatttcaaaaagcttttgattctgtccctcacaatttactattatataaattagaaaaaattggtattaggggcaaacttttaaaatggataaaagaattcttaagtaacagaatttttcgcgttaaaataggggattcattatcctctataaaaaaagttggctctggcgtcccacagggctccgtcctgggtcccttacttttcttaatttatataaatgatcttcctgatgttataccatcaggagttaatattaaattatatgctgatgatgttaaaatatatatatgctataaaacaagatctgaaattgaaattatgcataaaacattgcataatttatttgaatgggcaaataaatggcaaataaaagtttcagttcaaaaaacttttatattatatttgggtttcaaaaacccaaaagaaacatataaatttgatgggaatacaataaatgctgtggatacaattagagacttaggggtaaatatcgataataaattactgttttctgatcacattttacaaataacaaagaatgcatattcacatatacgatccttgtttagaataataaaatcaaaatcttcaaaaatttggattattttatacaaaatttttaagccatctggtcgctttaactccccctcttatagacttaacacaaaatataacaaaaaatatattccatttacgtgagggcaaccaaactgtggaatcaattagataaagaacttgcaaaaataaattcattaaaacaatttaaaacaaaaatcaaaaattctttagagtaattaaaagcaggactgaaaaaaattttttttaataaatagttacataagcgattcgataattttgataaatttgagccgctttgacttatctttattttaattgtgtgacttgtgatctctcttttaatattttattcattttttattttatccgaattacttttggacaattaatttatacatatgttgtccacaaagtaagcggattttcccttttgtggaccttttctttattgaataaataaataagtaagtgaaaaaactcagtgaaaaataatatagtagaaaaaacttatatgaaaaatatgtcaatgaaaaatacatcagtgacaatacgtcaatagaaaatgctttaatggaaaattcgtcaatagcaactttaatgctaatattaacataacaaatttttcccaggcggcacttatcggcaccgctggactccaaaattaaataaaatgccgacgctaatttaaaaaatcatttattctggtttttatataaaaacgaaaggacgcattgatttttaaatggccattgccatgcaactaatggatacggtaataatgccaaatcaaatcttaaggtatcaaaaaaattcccaaatattttcggctttgacttgaaaaatgacatactttttaatacagcttttagaccggtttaacattagtttccaaataatgctgaatcctgtcaactgagattttaccaaaatcgttaagattgaccgatattagacaaagttacgacaaaaaacactttgattataaacacatgcatcatactgtatatcagggatgggccaaatcgaatgataccgaaccgtcgcacccagtaaaaatggtgaggaaatcactccaaatggtactcttttaaaacgtagaaccaaaagattttcttgtgtaattggttttcttatatctcttacccaaaaattttacaaattctctgtcttcctcttttaactacaatgtccaaaatgctcgttgaatatcagtccataaagcaatttttggtattcgtgaacgcattaaaagccctgggagctgtggcatttcgattgggccacgaaaaagcatgtcatttaggcatttaccactcctttttttgctgagccatcataaacaatccatggctttatttcccggtgcgaagacacaatgatgagggagaaaatgttcgccaaaccattttattgaagattcttcgacaatttgctcttttaaattttctttaaatgactcttccaacgctttaagctgacttggggttactctcattttttctaacatactcattaaacgccggtatgctatggcaaaatttgttggtaattcttctttagggcttttccatgaccaacttaccatgtatctcccattttttcgttgaaccgtttctttaaacattttcaaggcaatctcatcatccttctcttccgggttatcccatactcccatagtttctaaattccaaaattgttttggttccttattctttacactgattgtggctgttatattttcaaataatgattccaatttacccgaattatttttcatttgaccgcaaataatagggccgactgatgtgtctaccttaaacaaatttcctttaatgtgttcgacccctttaaagaacttttccaaaattctgccataccaatcagtatgtcaggtctttcatcaataacttcagttttgcccgaatcgatgtcaattctcttgagtttacccgtaatctgatcaattctgttgacaattaagctttctctttttccattacttaattctagctgtaccaaatattttggagatttaattcgagttgatgatgtctctctgcttggcaacaagtctacccatttcaattctaggtggactcaaaattctaattaattcgtcactgataaacggaatttgacttccaccatcaaaaatacagttgccaaaacactttttcctgtattaaaacccgaataaatctttatttttttagtcattaatatagtttcttttttcacattattcatcctggtaagggcgaccaaatttacgtttcgtatttccgtctgaaaacgattctgactttgtctgttccccaaatcggttgcatttgtacctgttctgaatctgttttgacctcgtggacagattgccttatggtgatcttggtgagatatcacacaatttttcccatacaactggtcatttcgtgacttttcttaaagatttaaggcatcttccctgctcattaatgattttaagcagtgcttctctgccaactatctgtctgcaatttgctgcccaatgtggtctcccacataagaaacaattcggcattgtccctgtttccctcatatttcttcggtcattttcttggaccgaaaatactctttttacatcgccgactctgttataattatttggtctgaaaccatttcctttgaatcgattattgcttttttgtatttcttcaaatctcttttgagcaaataaattagggtttaagcttaagcttctcgtacagcgcagtgcttcttctcttaatgatattacttcgcttaggcactctctccatctcgaaaccttccatttgaatcccgattctttttccttttttaaaatttctaagattatggtccttgttaaattatatttttcactgccagtaacaaaaattcaccgccttcttccttcatgtttttccaaattatgtattcgtctactactacatatgaattctccatagcaagcattgagagaaattccataatactcttttgatgaagagacaaataaaactatatggattagaaaaaattccggcaccgtaaaaatgttataatttattatcttggatgcttggaatgtactaatttttcgccactatttgcgataatttcgctttttaattaataaatttgggattttttgcgcttaaaatttgcatccgattgattatgattactctcaaataaggattaaataaaatttttgtgatttgtagtttgtttttattaaaaaaaatccaatttattaatatgaaaatcatttcacgaataataaatgcccattcattcataaaattaaatcatattggattttattaaagaaatcatacaacattttgagaatattttgaagaaaatgaaattattccctctattattttgtttaattttaattttcattgccctaattaatcaaattaaatcagcaaagaaaaagttacaacaaaagtcatttggcgaaatatttggagaaaaatgggaagaaaaagaagaagaaaaacgaaatgaactcaaaaaaagagaaataattggaaaattttataaaataaaagagaaaataaagcaaaaaggaagaaaatattcaacaaaagaatggggaaaaattaactcaaaaatagcgaagaaattggggacaaaacgccaatatattcaaaaatggatcaaagaattggggcttaaccaaaataaatgttataaatcaacaactgatgaagaaaagttagaaattgtacaaaaattcattgaaatgacaaatgaatttaaacaaaaaggaaaatattctttaaaagaatggaacaaaaattatgccgaaatttgtaagtaaattggagtaagcaaagggacaattatcaaatggaaaaaacagtttggcattagtcttaagagaataacggaaaaagaa

SEQ ID NO: 6479 - DNA, 1238 bp, Heterodera glycines
agctatatttggcctaccgttttgtcggtccgtccgccgatttgattgtgccggccattgcgctgtatttggttgtgattgttggcattgtgttgaatggcactgttttggtggtcactgtcaaatccaggaaaatgccatggcatttttaaacccttaaatttcattttgaattatttccatttttcagttccctccgcggctccgccaattttctgatggcactgatttgtctttgtgaagtggtccaccaaactgggcacacttttttcttgtttgttgtcatttcgggcacaaattttgtcagtttgctcaccgctgacttatttatgacggtaaattttgcatttttcaaatttaatttttaaattttccattttttagccaatgatttttgctttgaattgcggcttaatggcaatgttttgtgctgcttttgatcgactttttgccgtcatttcgccttttaagtatgttaatgtatttttattgaataaataatttatagaactgtcatacaaatataatataaaatttttcttttctttttttttaattccagtcataatgccattttcaccaaatacaaatcactgtatttgcttggtcatctgtttatttgcacaatttactcatcatttattcagtattgtgtgattgtatatgcatatgaaaatgcgggaaagtatggcacaattaaaatattattaataattgagtttcaacccgtaatcaaggcctgggtttttcctggacctggattttcatatatttttgtccaagataggtccaggcccaggtcaaataactaaaaaaaaatctatgttcagttcaaggttaggcacgaaaagtctgggtttcctggatacttttgagcatttgtcatttcaaaaacaattttgatttcaatttttcaaaaaatgattaaaataaatttagaaacttttattttcttttaaaaataattaagttttttaaacatttgggttactttgtaacaaatttcaaaaaaaaaatccaggtaaggcttgagtccaggatctggactccagatcccgacaagcctgagttttccatagacctggcattttgtcaatatattcagggcagcaggccaaggcccggcttttttaaatgtctaacctaataaaattttgttttttagtccaaccaccggtgtcgtggccgatactttgcatggccctgtcggttatatattcttggcggagcatttgtgg

SEQ ID NO: 6480 - DNA, 1915 bp, Heterodera glycines
cataatcaacatttgattttttaacaatgcagttctgatgaggaaattttctgatggcatccatgcatttaagcgaagcctctaaatattataggcctgaatatggtacctaattccttccataaaatgagttgcatttgccattgtcccgtgattttagtcccaaaattggggtatattcccaacccgtgattagacgaaatgtgaaaaggaaagggccaaaaaacgtatttttcttggctttttaaatttgtaattgtttgccacataattagggacctaattaaataattaaaaggcatttaaatttgttcaagtgaaaccattctttgaagacgctgaatcgaatgaattggcttttgccggcatttttagtgtcactaatttgcagcaggcatttcgcttttacatgctttcgtttgagaaaatgagagagagggtagttaaaaaatacaagaaaatgatggatcgtaaagaaaagttagctttggctttcgaatcaaaaaaatgccgggattatttcccgaaccgaaaacagctcggccaaaaaaacacaatagtcacatttttactaaaaaaagagcaatttcgatattctccttttcaacatgagaagtcaaatgagaagtcatttttgcgcgacagaaattaaattgtcaaattttgaaaagttttagagaagggaatggcgaaagtatcaaagtcagtgcccctgttgttattcgcattggtagataaatatataattacacatacttttatctcgtagaatatcaaaaaactataattaaatataatttggtctgtgtcctcttatcaatgttaagtggagcgaataatacgccaaaatcactttttgatggcaaaatgaaagtgccctttaatttattcgcctcttttaaggacccaaaaattcccttgagttcaaaactggccagaaaatacaataatacaaagttggtgtaaaattaagccaattaaaaataagaaaaacaaaacaaatcaaacgcccatttatcgcatcgcaaaaaaatggacgcgaaaatcattggcagtgaaaaggtgaaaactgacaacgacaaaatgggagagatgaggaggaattaatgaagagaatgggaatgaatttgatgatgcggtgacacgggctaaattggcggggggagggcgatgggacagagagtcattaggacgaaaatgaatggacggaggagaaaagtttgaatcgattaaaagtggccaatcaaatgccaaaaatattccgaaaatagcaaaatgcaaaatcaaatagggaaacgcggaattcaaagattgatttcattcacaaaaaagagaggataattccacctattaaaaaatagttattgatatgaaaacaaataataaaattaggagaaattaatcaaaaaagggaaaaaaacaaatcacgatttgtccaccacaacaacacaaagtactgatgatgaacgcgcaaaatgtgagcgaaaactcgtttcttttctaaaggctgtttgtctgtgagttacgcacgtcattccatcaaatggaaaacaaattattaattgaatcaattaaaatttaattgaaaaaagggagagaaagtgttttgaaagtgaaaattgaaagaaaaacaataatttttaactaaaaacgattaaagaaaggccgagagttttctcgagccgagacggcactctcgagggtgcgatgacgatagtcaaaaaccatcaaatgataatttttttttaatatattagggctatcgaatggggtccacctcgtttgggcgcgctcgtttgggcgccagcccaagtttctggaatataacttttttctttgtaaaccaaatctaacattcttggtgtcattcgaaagcttaacatgtttagaagctttttctaagctattgcttagc

SEQ ID NO: 6481 - DNA, 5511 bp, Heterodera glycines
aaaaaagtggaaattttagaaattttttcttaataaatttttttcaggcttgaaaatctgttcgccttttgtaaggctaatagagcatgtgaggagctttcgaatgataccaagatcgttagatttggtcgacaaagaaaaaagttatagcccaaaaacttgggctggcgcccaaacgagtgtgtccctatcgaatgatatcaagaataaaaatatggttcattttgagcgaagtatgtcaaaaattttccatttgattgtttttgactaacttcccagcacctctcgaatagcagcaccccaaagggcgaacgaacacagcctaattagcacatattaacccccatttattggccatccgccaatggttttcgcgtgaccacaactcaccatcattttgtggccaatttcgactcgagagcaatgtttgttggtcttctcgcgttacacagcaaatggaggcacaaccgagcggaggagcacagagcggcggggcgtgtgaatgtaattattcgctgctgctggagggtggcggaattttttatttttgccgaaatcaatggcaaaaatgggacaaaaatagaggggtataatttctagtgttagtggttggtttgaaatctattttttataatggggggagggcgatcagcagaccttttttgggttacacaattttataaaaattttcatctgttcattgaaaaaatatgcaattttgttatctttttaaaagtgaaacaaaaattttaaaaaatttcgcgacaacgaagcccaaacgaaaacataaaattttaaaaagaaaatttgacggacaaaatttgagtcaatttattaacagtttttgtgcaattttcagttataaacataataatttatttattcttccattttttgactttgaaaagaaaaacgaaaccaaattagacgaaattcgtggaaccttttatccagcagggccgatatttggtggaggagaaaaattttgaaatttttaacaaattaaaggttttggaaatttaactggaaaatagttgtaaaaattcgcctccccccccccccaatatttatttaattttgaatcgcagtagatttggattatgttgtgagttttattcaattaaattttttttttcatttattcaccaacttccccccgataatcttctcatatgattaatcctctctttcattgaacaggttttttcacaaaattcaaaaaataaattaaatccattaaaattattcaaataattttcaataaaatattggaggctaaaaaataaaaactataaaaacaataagagtcgaattttgaattgtgaaacgaaatttgccacttttaaaatgaaattctcaaataaaataaattttaaagaaaacaaaattgttgacaaaacctgcaaaaatgcttactaaaacataatctatgcaatgtgttgtttgttgttggtttatgtcaattaattatgtaataaataaaagttaatttcaaagaaaaatgaatcgaaaaataatggacgaaaataggaaaatgaatggtgaagaatgattgtgcacattgtgctatttttgtggggttatattgcagaagatgcccatcgaccctcattacccctcattaccaccatcatgagcggaatggagagtcgtcagtccatgctccagccatgtgattgatacacattcacgagcaaagaacggcacaaccaacgattgattttcatttatttttattacttataattagatatttttataaaaaaattattattcatttttatccaccttcgaaaaccgaagcaacaagaaaactgctgaacgtgcttagttgtatttttgcatggttttgaagcgaagtttttataaatattttatataataaatagaatatatgcagaacttaataaatctagtttaatatgaactttaataattagtgttttaatctcaagttgagataaagcatttgttggaaattggaaaaatttttatttgggcccaaacgtgagggagggcccaactgacgtagaccgcggtgcaaatgtccaaaatcgaattcaaataaaatgttccatgccctgaactaccaaattaccagacacaaccactttctattactttaggttataagggactgaaaacatggacataggcgcaaatgtcgggtaacccaaaactcactttatatttacttttgtcggtcccgcaattctgcagtttgtccataaataaaaaccttagggaaagggttctccaatcgtgttttttctgggtattcttgtgaatacagtgatcaaagaaaggaaaattatgaataaataaactctggatttttgtgcaacaaaagtgatcagaaaatagtaaaatgaatgtttgttatttaatggtactttatgtaatcagaaagcgcagctgacatgtgcttaattcccgtcccttccgtgctttttatgtacttttagcattagccaataaaaatttttaagtttaatttaacatctattaaacattcaagcgacacgaatattaaaaattttttacaataagaaattgaaaaagtttcaatagaaaataacaaaaaaaaaaataaaaattgtaaatatcaatgatcacattcacgcataaaagtcaaaatgtctttttttgtgattattcccagtaatcggccgttggaagtgaccatcgttgttcgaagactcaacttcctgaacatgtcgatcactgtctccatgggtgtttggtcggctactgtcattggtgcctaaatgagcagcgatttacttcgaattttcttgacaattttttgagaagacccgaagtgtttttataacgtaaaagttacaacttatgtcgaaatggagtcaaatttccaaaaaataatggtaaaatggggtatggaggagccgttaaagcctcctgaatttttttttttgaaattttaatgttttcatttcgggcccacactcactcaccacgtccataatgtggccaagttgcaggggcgcagatacgccagcggcatacgtcgacgcagccgtgccaatgtcgtcggggacgaaggacggagacggtgggagaactgtagcgccgccaccgttgaggacagtgccgtcgtcggccaccaaaaattgcggagggagcgattggctggcgaggcccgcttctgtggagaagtgcaccgtggaattggtggtcacatttggctgcattttgcgtgcattcctcaacaccaagctgagatccattctgaacaaacgggaaggagatgtgtgttaatcacttatattaatattaaacaaataaaatgaaaaaaaaactaaaaaggatgggagcaggtccatgccagtgttatttttcaaatttcagcgccaaagcgaaaaaataggaatttgtggcggttttacgccaaaatggcaaatttttgtcattttagggtaaaaattttcaaaaatatggtggggtccggtcgtccggtggtgccactaggagccgccgagattgacaattttaataaaatatgttaagaaattttgcaaaattttcaaaaaaataattacataaaaccaatgcaaaatgattaccgtgtgcagaagccaacgacgagcatttcacgctggtcgttcaccaccggaaatccgttgcagtttgtgtcccggagcaacgtctccaactcgccgactgtcattttgtgctgttcaatcagtcgcatttccgcgctcggccgcatcacttggcccgcaacggttgagtagggatactcgcctttgttgtccaggaatgggtagccgttcagctcaatgtgtgcgtcgtaaataccctgaaaagttaataatatataagggtccatttttaataaaaaaatattcaaatgataattttttttagtatttttagagtaacaaactaatggaatgaatatatgcttttttgataatcaaaaataaaaaaatacagaattcaaactgtaataataataataacaacaatataaagcaaataaattcccattaatttcccaccattctgtagatggcgtcgcctacccatttggcaaacatcaccgcagccattgttggcacaatgaacctgaaagcaactaatagcattgtttattataccatataaaaattataaattagcgcattaattgtattttttaatctttttaaatttcgccattttcactcactcgagacttccggtcagctcaaacataatgacaaccagcgaaacagtcattctgaattcataaattaagagatacaatccaattttttttacaattctaaaatgtacttaaaattcccagaaaaaaagtcaaaactttcacaagttcctaaaacaataaatatatatatttttttttgatgggatgacggggtgaatggcttgtttcccaatacccaccgtgtgacaccgcctaacactgcggcagcgccgaccattgcgtacagcccgggcatggcacaatcacggccaatctgacaagtccacagctcactgttcgggtaggactgctgcaacgcgtaggtgagcccttccactttgatgccgagcagacgaccagcaatggcaccctgaaaattgaaaacccaattaaaaatgtcattttacaataagttttttttgttaataaaacgggattctttaactttataactgaaaaattcaaaataaatttatatactttcccgttttgtgcctatcccttaaaatattgaaaattgcctcaattttgggctaaaattgatcattctttctaaaatatcgacacgctctttcttttgtgcttccgtatgctgatgttttaaattttgagatatatttaaaaaattataccatagccaagctgggcacaaaaagacccgacggcactttgacaccaaaagtgaaaatggtgaacaacagtttggcaaaaagtgccatgatcaattgaagaaaagcggtctaaataaaaaatgaaaccaaatacgaatggtttttgttactcgtcatttacatgcaatccgttgccgagatcaccggtgtggtaattgtcgtccactttgtccacaacaactccgtacgtcaggtttcggttgtaatcgcacaaatccatggtgtagtcctcgggaccacatcggtcaaacaactgaaacagaaattgcattttgaaaattcctccgtacggattgtccgccagcaatttaattattccaagggattataaggaaaagaaacaaaaaggggaaacaatgggagcagctcgatccatcccggatcgtttcccctccgagaaataaaaaaaaattattagcttagaaaatctccaagaaaaaaaatatcttacaattagaaaggttttatgagaaagttcttaggaaaaaaattttcaaagaattttaagcgatttttttttgaaaaatctcaatcaattatttgttttcgaatcgttaaaaatttagagaaaataaaggctaaattttgaccaaaatggaataaaggtagcaaactggtcgctgcttgcct

SEQ ID NO: 6482 - DNA, 1717 bp, Heterodera glycines
atcccgactttgtccgtgcttcgcttgacaaaagtccgcttaaaattgtcccccgtcgcccctcaatctccgcttttcctgtcgatggttgcaaattcgaatacaacagtcacaaattacgcttggttatcgaatgttccgaaggactcatcgcattgaatggcattgagaaggggcagaaacggactttgcgatggcacaattcgatcagagggcgaatttgatcaatctgagagagaaaaacggcaaaatgagccaaatttattatttattattccatcttttgtattgaacattcatagtaaatattactgaataaattgaagcaaatcgtcaattgattgacccatcattaaatttttccattaatttttttctttattttgcctattttatttttccattgctttttcttttaccttttttcgccaatgcatctttttcaatgtttgccttttcttttattatttttgccgctttttcggcactttttgaacattcaattcgccgtttcatttgcttctgatcagtttctttctgagagttcgtcggaagcgaaccaatgcgaattttcacttcaaaaggtcccaggactgagcccactggtgaaaactgatcggaacggacgtttgtgccgaggagaagtcaaattgccattctgtcggggattgtgcaaaagcaaagaggtgggcaaaggacggggagggagcttaaggagcttaattcctttcccaacactttgtccacaaattgcttttctgtggcactgtgtatttgaatatttctcacttcgtttctttgtttttagtccggtacccatgcttttcctcaccgcgaacaagaaggtgcggtgcgttcgtcttccttttttgattatcattttatttcaacatttttggaccaaattcagcatatttttgtggcattgttactgacaatgcgcaaatgaaaaatgtgactttggacgaatgtgaggagggcgcggacgaagaagcgcgcctcgtgcaaatatccaccgcaacggaatgcaaatgcatcaaaatgacataatttcccgtacatttaataaagtagtttattttaattgattgaattctcaattaaatgcttttgccctttgtcgtcgcattttttcaatttaaaaataaatgacaaatgcaccttttaatctcgaaatggcaccttaatttccaaatgactgataaatacaatgaaacataaagcaatgcattttaattgcattgagtaatcgacgctcaattcagagcgaatgaatttctgacattttggtgattgttggccgaggagaagcatttaaatgaacattcaaaagcacctttcaagtcattaccataacaaatgggattgattaattgttctttgttgaatgcctaaattattcatttttattttttaattttttttattcattttaattaaagatgcttttgtctcctccactgctcttcgtgctcagtctgtgttcattgtgcgtctttggccataaaacgccgaatgcgtcggatggcccggcaatgccggaactgccgaaagcgctgcaaaagctgagcgacgcggagaggaactgtttgttcaccatttacacaatgtccaaactgttcgagaacaaaaaggtgcagaaaacgctggccaaacaggtgaaattggcaaatcatttaaatttgaaaataaaatgccaatgctaaagttaaagtca

SEQ ID NO: 6483 - DNA, 4793 bp, Heterodera glycines
catttaaattctgaaaataaaatgccaatgctacccttcctttcatgcgacagcaaagacacttctgagccggacatttcccaagagtcgggagaagagcaacggatggtgtgaggtgaacttggaaaggatcgacaggtgaagcggaaaaagagcagcacttaattagctgtaattaaaagacaaacaaatgcatttttcaaaataataacagcgaatatggccccgtaattatgcacgcccatggctcaatcgcctctatcaacggcgcccgtctatttgtgaagtcgacctcggggggcatttggatagcgatttatcagccggaatgcctaaaagagaaggatgagtcgaaaaaatcggaggaaggtaaaaaaacaatggaaatggacagccaagcgaaccgaattttggtccgggtttttggtctttctccttttttggtcattttttctcggataattaattggtcaattaatttatttgtttgatttgtcaggtgttgtgagcaacactttggaccgagtccgacgttgggttttgttaaaatgagaagaaaaggaagtgaaagccgacggaccaacaattataaattaacagacaactgctaatgatcaatgattgattttaagtgtaaatttgtttcaattggttttttaaataaaaattattttatttttcttcaaaaatgtttttccatttgttcaaaagtcttgtttgtttgttttccttttatcctttcattttactgaacatgcttttccattaattgattattttttcccaatttcccctcattttcagttaactcttttaaattcaaaagtgtaattagtttataattaattgcatattctgctaatgatggtaattgctcccttatcaatgccatccaatcaatcacttattattctgtgtttatttatgggaatgcagcaccatcctacgcactttgattctttttatcatttttaatttaccttcacttatctttccatctttgcctttttttaattttttcaccattttaaaattattttaaattaaatttgttctttttaattgcccaataatggcattattcgctaattttgctctctccgcttccctcgcttttctcgctttcgctgtttggtttaattcgagcgatttcaaaccaaaagaatttcagtaaataataattaatatccttttaattttcaatttggttcccatttttaaattcgtttcccttttttagtttgccccctccgcccgctttggtcggtcctttggctccaaataaaccaaaaattttggaaaaattattggaaggtcaaatttcgggccccgaatcaattgttatcgagaaaagtaaagaatgaattaaaaaatgaatcaaattaaataattcattcatttttagatgttttatacacttgcacaaccgacggaaaatgtgtgaaaattgtggacggaaaaattcagaaaactgtcccaatgacgggacataaaaattgtgacggtaataattgaagaaatactaattaattaaaaaaatatattacaaaatacatattcgaggcaagcgacaaaccttgccatattgtggccgtccgctgggaatccgtcgttacaatgccaatttattcgtcgttgccgatgccattttgggaatattcgttgtcgatttcgaaaagggtgaaaggaagttcgaattcaaattccaattcgaatttccttttctaggctcggccgagttgttggtctccagttccaagcttgtggatggcaaaaggctgctcttccccgacgacttggactttgtggacaacgacaccattctgttcagcgacgcgtccactcgctttggcatttccgattttctgctcgcttttatggaacacgcggaggatggccggtgaaactttccgatttttttaaagacttgtaataatgttcttttgaccccaaatttcagactaattgaatataaaatttcgaccggacaattgcgcgttgtcgctgatggcttaagttttgcgaacggagttcaaattcacccggacagacaggtgaaactgaggaaaagcccctaattggcgaaaatgaatttaattattcagtcggtccttttctgtgaaagtgccaactcgcgaatccaacggtcacttttttaccattttgaatttgattttgtgcttttcagcttttattatgcgggcccaaaaaagggacgtcaagagattttcgtagacaatttgccgggctttcccgacaacattcgcctttccgccgcccgtcgctccttttacgtggctttgtttggccaccgcagcaaagaccttccggacgcgttagattggcttgggccacggccgtgggcccgtaaatttttgggagaggtgcgtttaattagactcattaatctatcatgcaattgtcttgctattagctgataatggcttttcccgcatcgttgcgtcgctttgtctattctctcgcgccttatggcattgccttggaaattgacctcgacggaaacattttgcgctctttccacgacgaagacggcgaagtgatacagcgcatttcgcaggtaaagccaaaaaacaaattgacaccaattaattaatattttaattggcggtttaattttgaatgtttggcttttaaggtgtgcgacgatggcggagattacctttatttggccagttttgaaaatgattacatcggccgtatttccaagaaaacggaataaaaagacgcaaaataggtcattcattcccatagttttcgcaatttcagcttttctcttaatttgcagtagtaatatacaatattttaatgtcctatcaaaacttttgtcattatttccttttacaagcgataagaaaagcatttgttgtagtaaaagttaaattaataatttatttattattttaattgattttaactttttgttaaatgtgcttaaaagagacggacaaataaattgcggacccacccaatcagtgccattttaaggtgtgccatgttcatgtaaattggagtattattggtaatttcttaccactttaacgaagggggataaaatataaaaagaaagaatttatgcgacaaaaaatgttcggctaatttcatcaatttttccataggcaaagcaaacccttctctaaatgcccccctcttttagcccttttgctgtcctcctcccccttctgtgtttctccgtttgttttggttttgttttagaatgttaagttgtttcattttctatttcgaatgtttgtttgcttaattgtttttgttttgtccatttgttaaagtatttcccccggatatccccccccctcttttttagcttttgttcattgaacttcaattagtttgcccaaaaatcaggcattggtatggctacaaaatttatgcgaaactaaatttgtcactttaaaacaaaccaaaccgaaaaacgagaaaattgatgcggtcattcgcttctgtcaaaaacataaattaattaccgctacacatttttacgcttttctttctgctgataaatcagtaaatgttaaaatttcgttttttgttttgtcaaatttttgcttgcattttttattttattttgtatttttttgtttgttttgttaataatttgctttccatttcctttcggttttttgtttatttttttattttaataatgtaaaaataagaaaatcaaaataaaaaatcaaaatttcatttcaaattcatgctcaattagaaattgaataataataattattattataataatatgataataattatattataataataataatcaatcttatctatttttttttttgctatttttgctttctcattcgatttgctaagctaaactcgcttcctccaccatttattccatttatttataattttctattttttccattttgcaaatggtcgctgtttcgcccctctcggcccctttttcctcccctccgccctcttccgcttcgtcttccgctcgtccgtccctcgtcccgtccctttccgccgatgtccccaactttttcctccgatcggtcagttggatttgctcaatcggcggctttttgttcggatattcggcttctgtcatcaacggatcggtgttttattattgcatttattttctgattttgatgtatttttccttttagcttatgtttatggaaagagaattgggcctcaattcgttcaccaagggggtggtgacaagttcgatcattgtcggcgctgccattggcgcgccgatcggcggacatttggccgatcactttggccgaaaaagggtgatgatcagtcttgacttgctgttcattgctggggtttttgccaccacgtttgcgcctaagttttgggtattttggtgttagaaacttttgtaatggtcttttcatctttttcaagtgcctcattcctttccgtgccattcttggctttgccgccggagggcattgttcggtgggccccgtttttctggctgaaatttccacgcccgaaaatcgttcacaaaatgtgactttgaattcgctgttcatcgttttgggtgaattggtcgcttttgctgtttgtgcttctctcggcaacattttcctacaatatgtgtggttctaacacaaaattaaaaagtcatttccattaaatattttatatttttaagcgatttaatttggcgatggatgaatttggtcgttgtgttgcctgccgtcattttgctgttttgtcgctgccttttggtgagggagagtcctccgttggcttgtcggagctaatcgcat

SEQ ID NO: 6484 - DNA, 2068 bp, Heterodera glycines
tgattggtcaattcggcgccatctgctcccacttggccattgtcgtttgtgcgcaatgcattcccgaagggccaacccgcgcgtgggctattttgggatgccttttggtgtttctcgtctttttccaggccagcattgggcccgtcacgtggtcagagttttgaaaaagaaaagaggggagaaatttaaagagaaaaaaggagggttttaattccaaataaattggccattagccgtggaattttaccctaaaattggtgccttctatttgccaactattttcgaatttctctcattactgagttcgaataatgaaaatgaccaaatgcccatcgacccaattaaaatattttttttaggcttttgcttgccgaaattttcccgcttgaaattcggggaattggcatgggtttgtcgactttggccatttgggtaaggaaattacgaaaatattgaaacctttttaaatatgaacaaaaaattcaatataacacaaaattgaaatgataacactttttgccaaggtcacgagattctgacaaaaataaacaaataacccgaaaatggactctttttttgataagactcacaaatcatttgcttttggaagtttaacttaaatatttaatcaattcctttttgattttgtccaaatgttaatttgccatttgctaattgaggtcactaattgtgccgaaggcctcctctttccgatggcattggatcagctcggctaccccggcacttttctgctgttggctctgctcggactgtttgccttggcatttgtgtggcgttttatgccggagacgagacgaaaatcactggaagaattggagaaagaattccaacacggcgattggcaagcactgaaaaagccgggtgaaaagcggagaaatctgcgacggaaagtggagaggacattaagcaaaattgaggaggaggagaggggggaaaggtactgaattagcagggcggaggagaaacgacgatttgattaattaattggttgatcagcatctgatcaattgattaattgatcattgaaattttatttcacgatttgaccaatcattttttggtagtatctgatcactgagtaattgctcaatgaaattttttatttttggaacgatttgccaattgattatttgctactgttaatacaatttggtgccttctgttaccgtatctttggtaccgtactctctctgtctttgcgtgcctttcattctcttattttttttctttttctttttctcaacaaatgcattttacgacaaattccattttggtttctttcgtttgcccccacaaaaacaatgccttttttggaggccttcgctaactccgccgatcgctcggtattttgcggtgattaatgattaatggacagtgagtgatcagccgaagaaatcaacgaacacagcggcaaaggaaaggcattgctgtagggaataattcgtggaaataaatttgtgtaaaattaggcatggacagctgagagaatccatcgcatcagcagcacaaccctcgtgctattcgagcacatttggaagtataaaataaataccggcaattaaagttgcattaatctaaacacattttgttactgaaaaccatggcaaggaaaatgccaaaattccacgcattaataaatcgagataagcgcaaaaaaacaccttatactttttaaagatgccttttttcggcgggaaacgatacgggtgagggggaactgatcagtggggggggggggggggaggatcagctggctacagccgattgcgtgatcaaagaggctgaaacattgggcgtatgcattgcgcgggcgggagttatataattggacctatttgattttaaatgtttattacgattataaactgaactagttcttaaagaggggaatttgaatcgaaaaatgctcagcttttcgctaaaaaatatgaaaatattattccaggaaatttaggttggaaaatcagaggttgttgaaaaaaggctggatccggacctggctggatccaggaaaaacttatgcctgtgtccaggtccaagtccagct

SEQ ID NO: 6485 - DNA, 1344 bp, Heterodera glycines
  unsure (1)..(1344): unsure at all n locations
attcactactgtacatcgcaataatntaataatattgtgcacaattaagttccagtcattttacacacagcaaaagcattttatttccgctccaaaaagtcagtgaggaaaaaagggggggggcggaaagcagcgaagaggagcgagggggaggggtcggaaaaagtgagctcttttggataataaaaaatgctaacatttctttttttgcgactaaaacccaatagatttacacaattttgtgctgctaatatatcctcccttctgtttgcattataatcgtataattctgccaattaatttccggcggcttccaactaaacattttttggcagaagctgcacccggggcatgtgcacagcagcagcagttggcttttctttttcctcctcccactctttcccccccccccaaattctcccaattcgttccaatttctataaaaaagctctaccaaatcgatgtggttttctgtttttacttaaggccaatttaattgtttaaaaagtaattttttaattttttggcattacaaaatctgtccacggagtcaccgcaataaatcattcgtcctccttttttgacctcaatttccattttttgtcttcaaaatttcagcgattaccttttcgccgtttaaagttaaaattcgttcgccgctgcgcgacgaattcatttcgtttattcgtccgttcattctttcgttcattcatttaccacgcaaaagttgctgggtcggacaattaattttgctgcagcgatttgctaaaaaaccaaagcaaaggcaaagagaaaaataaaggaaggcaaaggaagaaaagaaggaaaaggagaaaatagcgaaagaaaagagatgcaataagggaaaaagagtcgccggagggcattcaaaaagagagaaataatatacaggaaaagagagaggaaaagaaaaacaaaaaggaaaagattaaaataaacgagaaaaagagaattgagaaaaattcaattttgcattatttaattgttggctttttcattttccattttaaatgttcgtcttttcttacgcttttcattttcgtcggcttcgtcaaaatgatcggttgcttttccctcccccgtcattttccgtgccatccgtcaattacccccccccccccctgaattgcccccccccccccctcaaatccgggttaccccgtgctatttttcatttccgatcaccgctctcgatcttttagtccgattttcggcgaaagcttattttttgctgttccatcttcatcatttttgcagcagaaattgctttgacgttacttgggatttgtgctcgctcactgattaaaatgattaaatatcatt

SEQ ID NO: 6486 - DNA, 3282 bp, Heterodera glycines
aaccaaattaaaccaatttgtgatataatatgtacgccataaaagtgatttccttcccagacattatttataattttggctcaaagatgctgaaaattagtcaaatgtttttaaatcccaattcattttttatatttattaattgaaatttgaaattcttttcttatttctcttcacatccatcctttgttcattggcactcttctctcatatcacaacgttgtactattggccacctgctaatcagcccaggtcagagaaagcaactgacgataaagagcagttgacaatggcaaaatgacccctaaattatttgtttttaattttttgccaaataatattataataattaataaaaataaattacaatagagaaaggaaaggacaaaaagtagactgacagaagcgcgaacatccgaatctgttattaataaataattgaaagtattttttgaatttaaaaattcaccggccattggcgttggttccgtcgggtccatcttgtaaatgtgttcgttgcccatttcctccccaacttggccaaattcgcacacgcaatgccaatcatccgactgaggaagcccatggtccactcttacgctatttgccgtgttggggccatctttttgtgggcatttgtcctttttgctgaatgtcgcacaatcccattggatgaataaaagggaatggtctgtgataattataattagtaatttaattacaatcggccagattgcatggatcggtttcattaaattttgacaaatttcaaaaaaaacttatggcacaaaaattatttttaattactcgctacgcagaagaacgcacgacaaacgtcttggccattctcacaaagaacagaatcttttgattgcttgccatttttctccattatcgaacggcttttgcaagtcaatgctttattaaaaaagcaattaaatatattgagattgaaaatgtttttttaccatggcaaaggtccaaaaaagcgcaagtgaaaagtaccaccgctacaaaagtggccgtaatgatgatgcttggcattggggaaattttatagctgaaagaccaaatttaatttaatgcgtggcgtacacaataaaaagtaattaaaaaattaattaaaagcgattaaaaggatgatcaggtttaattcactaaatccattgaaaggtacgttttccaaatttatttcgaataattttttgactatttttattgggattttatatttttgttttataatatctaaaatttaaaaaatattattattatttttggtgaattattattgcataatttttttgaaaataatagtgaagcgatgacaaaattaaagcggcgtaaaggaatgaatcactcgatgcatattttatgataaatatcatttgacagatcaaataaattttttcacaaaaaacctaagctcctaaaaatgcattattagttagttagtaattttaaaataaaaaaatgagaaattttactttaagagttaaataatcataaaatcatacaattattttatggacttgcactttcgtcagttttggtccacaggattaattgatttgaatgtactttttagagaaaattgtaagcaaattgagacaaattaataacaaaaatttcccaccttcgcctgtcggcacagcttaccacaaaatcctgctttatgggttttttaaaattccgaaaattttttaagagaaaagaaattcttcggattccaattcacttctgaccggttaaaagatttaatttggatttctctggctcttttttcataatacatattctatcatttgaatccaaaaaattttcgacattaaaaaatagtgatgtgatttttgattaaaaatattttaacttttgcctttatgaaaggaaaatgaaatctttcattttcaagatagaactttggattttttgaatggggcaatttctccaaaatcaatacgaaagaaagtaaaatgttcataacttttttttaccaaaaagatttccaaatttccattaaaagtcaaaatttttcctcagcgtcgcctagtaccaaaaaactaagtttttttctcaaaaattagctctaaatagcaaaatttggtcatttttggtgtaaatctgttaacagaaaacacataaaattttgctgaaaaatgcgctgtaaaaagtcttttgaaaagcataaaggttgatttagatggcttgacataattctaaactaaaataaaagactaatttttttttattaatcaaaatttccaaaaaagcccggtcaaaattttggaccaggcccgggacgacggcttctttctccttctctttcgaaaaattttaccgtgaatatagaccgagaaataacaaaaaatattttacttgggttgaattgaattagtaatgctaaagtgcaaaaaaacccgagaaatttctcgaactaacactcttgcacattactagtattattatataatttagccaatgctaatgccaagcatcattaccacggcaatttttgtaacgatggtatttacagttgcgtttttttgtacttggacatggtaaaaaacactttcaatcgcaatggattaatatttttaaggttctttcaaatatattttcgcttttttggataattgcttgttattcagtgattttcaacagaatctttttacatgtcaatttacattgtttctgtatgttattgggaaagagattaatttacacatttttgaaaatgtctaacttttttttttatttgccaaaaatacggcaaatagcgcaagagcggaccatgggcttcctccgtcggatgattggcattgcgtgtgcgaatttggccaagttgggaaggaaatgggcaacgaacacatttacaagagggacccgccggaaccaaaaaaaaaaaaaatcaacgccaatggccggtgaatttttaaattcaaaaaatactttcaattatttattattagggatgcgatatttaggcacaaaaaatcgccaaataggcacctaaaatggcattaaaaaatcgcaaaaaaggcattaaataggcactaaaataggcaaaaaaaaattttattaacgctttttaggtagcaaaacacataaaaattaatcaaaaaaattattttgcttatatttcaattgtttaaagttttttttcgttaaaaataatttttttaaaccaaaaatttttatgaagaaaaataattaatttttggggaagaatttttgtaaaatttttttcaattcttaggggtgtatcttctgaatttttttcag

SEQ ID NO: 6487 - DNA, 2262 bp, Heterodera glycines
  unsure (1)..(2262): unsure at all n locations
ttttaccataattttttttgagttatatttgtgtggaaatatacttgggagtgcagtccaacncaaatgtttttgcnaaatcgataaattatttctgtgacatcagctaaaaatctctaaaaaacaaattttcncaactttatttgataaatttttagatctgaaataattatttcanggtatatatcccatttcggttaatgcgcgcaaaataaagtgcgcatcgtaacgccctaaaattttattataaaaatttttaattttttgattttaccggcgaaatgagcataacaatggtttcaaaatgtttaaacgatagcacccattttaaaaactcgaagacgggttcacagttgtcaaccgtacaccatgtgtggtgtctaattccctttggcccgcaaatatcacagtccttgttttccccatcgcaatccgaacatgtaatacgagccgataaaaaaacgactttatgttcaaaaatcccctcatttttcccattttctattaaattatccgtctaaatttgctaagataattttttgtttattattttacatactgaacactctgtgtcgtagcttatgatacgataacgtggcagatttttcggaatgataatcttcttaatataacaaccctctgattttgaatgttttgttttacatatattacaaaatttcgaacctaaattagtaaatttctttatttattttttttaccgcaaatatgtttttcctttgtattatattcactattgcattgtacacatcgtttataaagtttgcaagcaattttaaatggttttgatagcaaaataggttaaagaaatatctattgcattttaggcattcttttaacacattttcctcgtttttacatggaaaattcaaccctaaacatttttatatttaattttatttctgtatttattttaccccatccaccacaccgttgacattttattatgcaggtaacggaatgttttattttttcacgaaatgattgttcacaataaacacagtaataatgttttatatcaaaaaattgttttacactttttaagcctaaaaaattttggaacagaaaaataattcataataaaattaccatctcaatgtccattttcgagaaaaatacatattatatattttttggtccctgacccttaaacatcggttttaaaccccattcctaaatttatttttaaatgttaagatttttcttttttaacctttgaaaatgcaacaataagaaattttcctggaaattctttgtcgtaaaactcttggacagtcaaaagatcatctatgccgtaatttgttctattcgaatcaattttagtctcttggattaattgcaaaacatgaattttttgtcgttttttatttctgtaaattctccgaaactgatcgtatgaaatgccgaatgactcgttggctccaattatttgataaaatctgcttagaattatcccgtaaaaaagacaataattatcgtcatttgcaaccaaaattctgccattttcttttattttaaaataatttgttgaatttaattgattccctaaaaaataaataactgaagtttaattatttttttaattacttgagccactcgggattgcgtatgtggttattattattgagatttgttcattcaataaatcaatttcgctaaagctttgttgaatgtggtaaaacgattccattaccacatcctcattgttctggaccaaatccctagggggaatgattaatgggtcagttaacgcctcacaataaaggtcgtaagaaattttttttatttcccatcctttttcattttttccattgcattttttgttaaatattcgattatctttttgaaattcttttttgagtttttttctgtatttttaaatataaatctcacaatattttcctttattccaaattttctattctcttttatcgtatttgaaatttctgtgtaataacttccgtctggtatattatttgttttcgaaaaataattttttttgtttctcagctgtcttttttctttaggtacttttaaaaatcttttttcatccatttttaatctataataaaactaaatttgcaaattaaaattaagaatttaaatatttttggacaatgaaacctttttttaaactatcaaattaaaatgtttatttatacctaaaacaattaaatgcaaaatgaataaattaacatatgaaaaaagaaaacccaaatctatcgatgaatctgacctgtaacc

SEQ ID NO: 6488 - DNA, 2453 bp, Heterodera glycines
  unsure (1)..(2453): unsure at all n locations
ataatccattaaatatatctatcgaatagattctgacccctatatctaatattcttaattgcaccttagctcttaatgaatggaaaattatcgtaatttcttcataaatttcttcaattatttatttttattcacatataataaagcacttttaatcaaacttttcaagattatccccttttatattagccctagtttttcaccaattgatttgcatattcatattttgcgatttacatgcatatagtgcatatttgggcattctcaaaaaaatcctctatcaaagcggcgccttttgacctcaaaggaccgaaaaactaaaaaaaaaattcatttactcaatttcgtcaaaattcattaatcttcgcttcagtattacttctaaaatgatttttttataccagatttagctatgttggagattcttagcttaaatttaggcgaatttaaagaaattgaaaaattataccattcaattcagaaaatttatgtgcctatttttcactttttgttgcatattttatgcggatattttgagattttttatgcaaatttttgactgccttagttatggcaatatgaagaaattatcctgaaattgcaactatattttctaattcgcttagagcaataaaaaggattaatattagactcagaatctacacgatacatttagaaatagaataaagaatattcatttctctcgcattaagttcaacccgtgcaaaaaaatctgcaaatcttttactgatgtatttataatccgattttttgccgtgccccatgccccatccggcgccggccaatgatgattaaaaaccaaagatcaattgctcaactaggctcttccgaaaatatatgtataataatgagaaggacaacgggaatctgaggccggacatttttaaatatttttattaatttttatcattatggaatacatttaattttagagccggaattttgaaagtactgggcccgggaccgggctcacacaattgaccgggaccgggcagcccggtaaaggcacgccgggcggtgcccggaaaatataaaaacgagttcattgccttttgggggggctcgaaccacgattccggcatccatttcggcgccaattccgaaccccggacccgaattcaaacaaaaagttgaaagtccacattttcgaatttagcatttttggttcaaaaacggcataaatgatttcttattgaagaattaatgacttttagtttgtttccgtgtatttaaacctatttttaataaaaaacctaatttcgaatacttttcgactttttctaagtgtgcctaaaattggcagccctcctgatcagaatgatcgactgttagagtaaatcaaaattcttttaagttttttaaagtcaaacccganaagctaaaacaaaaaagttttatttcgcaaatttggaatacaaaattttttgaattgaaccttttcggttaaaaatacccaaattccaaacactgggactcaaatctccggcattccaaacactgggactcaaatctcaggcattccaaacactgggactcaaatctgcggcattctaaacactgggactcaaatctgcggcattccaaacactgggactcaaatctccggcattccaaacactgggactcaaatctgcggcattctaaacattgggactcaacccaccagcatttcaatctctggtactcaattctccggcattccaaacactgggactcaaatctccggcattccaatcactgggactcaaatctccggcattccaaacactgggactcaaatctccggcattccaaacactgggactcaaatctgcggcattctaaacactgggactcaacccaccaactgtcaatgacattccaatctctaggactcaacccaccagcatttcaatctctgggactcaattctcaggctttccaatcactgggactcaacccaccagcatttcaatctctgggactcaattctccggcattccaaacactgggactcaaatctccggcattccaatcactgggactcaaatctccggcattccaatctctgggactcaaatctccggcattctaaacattgggactcaactcaccaactttcaatgacattccaatcactgaaacttaacccaccagcatttcaatctctgggactcaattctcaggctttccaatcactgggactcaattctcaagctttccaatcactgaaactcaattctccggcattccaatctctgggactcaattctccggcattccaatctctgggactcaaatctccttttctttttgtgtgacttgggatgttcgcggcctcgtacgggaacaacaatttctgcgccaaaagtactcggcctcgaagcggccgagtacgggggccttcggcccccctcaccaatttccgactgcggcttggctttttcaaacta

SEQ ID NO: 6489 - DNA, 4564 bp, Heterodera glycines
tttccggaaatttagcacttgtgacacgtcaatatgtggcagacatgaccagagcacggttggaaggacttttgaacgcttttcccaagcttatcacttcggataaaggtaaaaatgaagtcaatttttgtcgaatttagtttttagctcagcgccaacatactttcgttgagacaaattctgtacgatatgtctatcagccgatggacaacatttacatggtaattctattgttttttgttcatttaacagttaattttcaggttttgatcaccacgaaagcatctaatattttggaggacctggagacgcttcgtctgttttcccgagtggtgggttagggttattattactaacatttgaatcagagcgcgggaaagatttgttctcccttgaagggttcgaggcataactttgaatatacacagtatgcgataaaagggccccctcaccaatttccgactgcggcttggctttttcaaactaattctcattcattcatttaagtgcacgccataagcaaaatttcttatcatttacataaacaaaacaatagctttttacactaaactgaccaaacaaaaaagcaaaacaaacatttcattttacaaatcattattcaacaatgtgctatctctaaaacatgaaagacacagtagtgtgcatctcaaaccaatacattttttaaaaaacttgacaaatttcagttctgtgtctcatggatgagaggcacaatagtgtacatctcaaacaatatattttaaaaacttggacaaaatttcacacttctgtgggtttacaaaacttttagtgtacatcgcaaaacaattcactaacaaagaattcttttgacaaaagttcacactctgtgggtttctaaaacttggtaggcacattagtgtggatctcaaaacaattctaataattacatataacaggtaatatgattgactaacataagccacacaccacactaatgaattttctaaccaataataacaaataattcatttaataaattcaacatttttctgacaaatcaacaattttaaagcgcaattacaaaatgaaaattatatccgtatttgataatgtgtgaggatcacaaatataattaaataacaataacgaacaaaatatcaaaaatcaaacataaaatacgtaatcgaaaaggtatgagtcacaaatcaaatctaagcaacggacaacaaacgaaatactacccatttttttgcgacttcttaattggctccaaagtttccgaactacgacgtttaattggtgtcgtcaaaatcgcctcaagattaacgcgcccagcaccaattttaacggatgaaatctcgcaatggagctgaaggcattcatctatgataataaaaaaaacttgaaaactcaaattaaaaccaaaggtaatgccgacacaattacaattaccttcaactttcacaaaaaaaatttgaagttcgatctgtgtgttcttaacgcatgaaccaagacgttctaccaattcttcgccattgacgtacaaatcagccctcattcctttcttgtccgcaacgactgcagcgaaatgtttcccgactggcgaaaacgatgaagcgagagcacaattcattgctttaaaaaattaaaagtcaaaaacatttatttatctctcacacaaaagtcacagaacaaaccactaatgttttatcaaaaacatgacccacattattgtgtcacacgaaagtcacacaacaaacactaatgttttatcaaaaacatgacccacattattgtgtcacacgaaagtcacacaacaaacactaatgttttatcaaaagcatgacacacattagtgtctcacacgaaagtcacacaacaaacactaatgttttatcaaaaacatgacgcacattattgtgtcacacgaaagtcacacaacaaacactaatgttttatcaaaagcatgacacacattagtgtctcacacgaaagtcacagaacaaaccactaatgttttatcaagagcatgacacacattagtgacttacacgaaagtcacagaacaaaccactaatgctttatcaaaagcatgacacacattagtgacttacacgaaagtcacagaacaaaccactaatgctttatcaaaagcatgacacacattagtgtctcacacgaaagtcacagaacaaacactaatgtttatcaaaagcacgaagagtatattattgctttataaacacttttacaaaccaagtaatatattataaattaataaaaaaaattaaaactcacaataaatgcaacccgaagtcaatttctcaaatgaatccgcagtcgcaatggcacattgaatcacctccattcttgtgaaagtcatcaccacaaattcataatccagtggcgtaacgtaaattgtctttccatcgaaacgctcttgaaagcgttgagctttcagcatgtaaaatttgacgacctgtatttagtaaggtaagcactgtaaaaagaaacagcaaacttacaattccaagggaacaaatttttgaaaatttggacgacacgctcttaaattctgtgagaacaacattctccccagaagcacacgccaacaaagccgtcaacttcttctcagacggtaaaatgcttacaatctgcccacaaaaagaccttaacaattttacttaaaacaaattactaattcaagcacttacgcaagctgagtgccacatggtgtggctttgagctcttccagagtcgtaagcatggcaacaggctggcaccagatttgaaaaagcctaaccggtagaaaaaatgagccgtagcggcagaaaaacaacgataaattgtttagtcaccagatttttgaccaaactggtagaaaaaatgagccgtatcggcagaaaaacaattctctaattgtttaacaattctaaaataaaacaaaaattaaagtaatatatgaaataatgtgtatacaacaaaaataaatactttttctaaccaatacataaccataaaattttacgacaaacagactttgaatttaaaaaaataagcaatattaaacctttaaattaaacaatgaaagacaaaaacaaaaaattaaaatgatgaatggaggtgtggacgattttggcgttatatttgaacatacacaaaaaagcgaataaatgactaagaatgttttttgcaaaacaaactgaaaaatcaaaatcaaacatttccatttttcaaatcattttttaacgcaaaaaaaaaaaaacaaacattttcatttttcaaataatattttaacgcaaaaacaaaacatttccatttttcaaattcatttataacgcaaaacaattacaaaacgccagacacatacatagcctcattcatctttatatatatagattttgatactaaaaagtagagagcagaccggaacggatccggtaacggttttttctggtcccgaatctggattgaccggttttctggattggtcggatttaaaaaataaagggaatgttaaatgctgtctagtaaacataaggtcaataatgaataaaatcgatgaaatagcacttattttagaaaccgaaaaaattgacatccttttaattactgagacttggaccaaagacggggaagaaatcaatttttgcccttgggtaaaagatcattacaattatatttttcatcaaggaaatcaaaaacttgtgggggcggttgtggtattctaatcagaaaagaaattggattttttacaaaattttcggattcaaaatttaattctgaaatcttagttattcagctgcaaaatttacagtgtatcagatttgttttggtgtatagaccacccaaaacaacacttaaacaaacagaaaatttgtttaaatttttacaaaaattttttaatgaaaattcagtgactttaggagattttaattttctgaataaggatttggtatggaaaaatgggcatccctattcaatgagtaaatgtggtgaaatattttgtgactttttcaataaattttcttatgttttggccacgaacgagccaacaaggattaactcctggctagatttgatttttacggccaatgaaaaaattattactgattgtactgttaaaggaggcatattttcatcggatcatttaacacaatttttcacattaattactcctaaaacaaaaccgaaaacaaagatcgtaaactttcgttggttttgtccatcgaatgtgttacattttaatatagtcatagcatcaaggctaaatgccttgtcatatgaatgccttagcataaatcaaaaatattccgcctttaacagcatgttgttagaaaatttaaatgagtgtattccaataaagcgtttaaccaagaatgatttgactcctaaatacccacaacatttattagcatcaatcaaagaaaaggctaaattattcaggctagctaaaactgacccatccaaaaaagcactatacgatagcatttctttatatataaaaatacaaacaaataaataccatagccaaattgagaaaaaggctatttcaaagggaagaaattcaatttatatatat

SEQ ID NO: 6490 - DNA, 3740 bp, Heterodera glycines
aaaaacccattagtgcccccgggcgatgaagtgccatgactttttgtgcgatgagtgcacaaaattggcttttcttgcgggttattttaatgtgcgtgttggttaaagctgctgtgccgcttccttttccgttcacaaaaatcacggcgccatttcaatggcactttggggatatgccgcaccgcgcccagtcacgagggcaatgtgctggctaatgagcgggactaattaggtagggtgcggtaattagcccaattaattaattggtccgggggcttaaagactaggaaggttatattagtatgaagcaaacattttgtattttaacaaatttaaaattggcaattaaattttcattaattatcatctgatgaattttttgtgcccttttcagaattacaggccgtcgatctttcgttcttggcactttttggtacaaaaccagtgctaaaaattcgcctaggttttcggcaccgccgcgccccacccattactcaaaatttcctaaaattatagtcattctcagtgccgtgcttctctcctattagagactcattacgactggtttttccgattccctaaatttttgaaattttttaggattaggcaataattgccgcctccccctccccctcgtccggttttcggcacacgcgatgagttacgattttcaaaaaaaaattgtctggcatgacgctaaatgagtcaattaactgggagcaaatgatcatctacatattatccccgggggacgaaagggaggggcggcaaacataaaaagggcccccaaaggcattaatttcgtcaattgtcagtttttacgatttgcagggggtacaattaggagggttcatgaccaccatcatcatcatcgtcctcagaaatgatttttgttatgtgtttgatggtgccacgcgtggcggcatttccatgccgccatccccgacggtggcggtaaaatttcgcgcaaaataaaattaatttttcttccaccctctttttgccgttgccgccgccgcacacaaaatgccctccctcctcccatactttttgaaaattgtgacttacggcacggcacatttgtgccggtagcctctccgcctcattttatttgtgcactcactacacaggaatacacactaaaaaaatgtagctgaaaattaagcactcaatttttttgtttgcgacatagtacagtaattaccgtactgtatgtttcaaatgaattttccgagaaattttcggtgcccacgaaaaaaaagcaattcaattttttcgtgaaaacccctccagttcctcaaaaattctaaagtttcaaatttttcctaaatgaacatttttacattcaaatgcaaaaataccgatttccaagtaaaatcttgcaaataagtttacaattaaaattttccaagcacaaaagccgaaatccaagtacgtacttggcacatccaagtacataaaaaaaaagcgcgccgcaaaaaagtggcagcaaaaaaaaaaggtcgtcgcccgggggcgttaccttacccatccaagtcgaaactcgaatcttgggaccattcctgggagaaccccgcgctttgtaatacctattttttcacattttgtcccattttttttccaaaaatggtttattaacattttgaaatgattacaaaaaaattaaaaccaacttttcttcgcacattaattatcatcgtctaattgcgtctcatttttactcaaaattttatgcttttttgcacaaactcattaattaatgctaattaactccaattaacttccctctccagtcttttcgtattaaaaatgttgccaccttcgtcttcacccgtgtccaattattatcattttttttgttgctaaaaatgggtgcaagaaatgcgcggcgcgcaatttcccatcactttttttttatacccataaacggcacaattaaccccctcccccgcccattttataaaattttccattttggcatccatctgacggggatggtggcacttttttttgtgtgtgtgccgtcgtcgtgtaatatccggcccaactcatttcccacgccgaaatagcgtaattgttggtcccacgttccgctaccctcgcgcaatttaaggtgtattcttagcacccaaatcagcagtttgtgcccgtgctgtacataggccccaaaagggtgccaatgtcatttttggcatggcatggctcctcccccttaaagtgttaaaaaatttagttaaaatcatttggaatttcaatttttgaatcacataattgtgaccacagtgccattctctcctctcaaaatttttgaaagttaattattttacctgaaatttaattaattaattttttcagtttttctttttttgcgggggggggggctttgccgtgccatcgccggtgttttccggccccccatttaaaagtgcgcgaagccaatggaagcagcacaaaacactttggactgttgtagcacaacgcaaatggcggcacggcacaacccccggcggggcggcagtcatgccattttttaattttgcgtttggcgttccgtgaatttttttttggcatatgatgacaacagcgcgccaaaagttggcaccattcaagtgcttgcgtgcctatgatacaataattggtgataattggggtgccaacggtggatggtggcacggcacacgctgtgcccgatttgtcaggcggtggccccaaactctcgacaaaaagcgcgtccgctgacgagatcttggtctcggtatatgcttgtcacctagttcaatggcacataacttttaaagtttgtaagaagttgacaaaatgatcattgccccatccccgccccctcgccccgagggcactgatgcgagcaaattctcgacataattcttgggccaacaaaatcctatttaaatggccaaatggcatttttttcgcccgcaaaatccatgaaccccgttttatttctccgcatttcaataccaccatctaaatttgtcagttcggcagaaaataaccccaaatcgatgattggatgatccaatccattgtgggataaatatgcttaggtagatcaccctcctctacctgctgatcagggcttggcacaatcacggacaacgcgttacggcaataacggcatttttgtaccacttccgtaattataaattattacggatttcctatctataattgaaaaagctctgtaattgcagattatggattttcctaatccaattaggcccagctcggccccggactcatttatgagcttgcttggtttctagaatccaatcccgactttccgatcccgaaccaattaacgagcttttgttggtcccgaacttcaatctcgagttccaaacccggatcttgccaatcccgaaccccggtctcaaatttgaatttttatcttccgaaccccaatagatttggaaaaatatttttctgaggagttttcgtttttcacataattaggcctcgatttcatttgtctcacttcccttacatcgcttttgctccgagaattttttttttctttttccccctaaaaattcgtcgatgtttttgttgttgattgccggctaatgcattaaaatgagctttaatttatttgggtggggtggtgataaatgcatttccgacctctcattaatctgtgcccgcaatttatggcacatattcccggcaaaaactttctcaaaagtttgtttggcatgggaacgtggggggggggggggggg

SEQ ID NO: 6491 - DNA, 1542 bp, Heterodera glycines
  unsure (1)..(1542): unsure at all n locations
tatcactactccatttatcaatggctccgaattctaagcatttatttatttttgaaatattgagtggttctgtggtcttgggaaagaaaaaattggcaaaaatggccatttgngcataaatctcccaacaatttcgaaaaattccaagcatttttaacggcaattgcctccaggcaccttgggttatttgaacagttcaaaaagtaccaaaaccattcagtgatttataagtacatcatgtttatactgttattcgagctgatggcaattctatactaattaaaataatattatttttcttaaaatgaaaatgccaaaaacgtcaaactgtgctcgttcaaaatgatgattttgccgtcatctctccacccgccgccgtcggcgtctcccctctcccccaatttgtttaattacccttcaaatttgtatggtacaacaccatttaattacacgtaattgcaacttgcattttaaacattggcacccaccagtaaaaatgccgtcaaatttttgtagtccctctcccctaaatgtgccattgtttcgccaattagcatatttttcccgcattttcccgcccccgggcgctggaccggtgccaattgttcgcattttttgccattgtctctacccgtgaagctgttgaggttgggttggcacctccacaattggccgtccaatgtttcatttctcacgcgcacaccttcgcctcccatcccgtctttggcacatttttttcacaccagaaaatttgggcctatttgtccctcaattttggtgccaaatgtttttctcgtccattttacccaccgaatactaaaaatatatggtgggcatttgatgtaaaattatgttttgaaaaagcgtgccgccaatatgtgttaggaaattttgtttgttttcttcaattcagtctcaagacctgctaaagtctcgcctctttgtaagaccccaccattcccgagccttgtcaagacttcagtcttgagtcatggtaaaagttgcgtgtcttaataagattacacatttccgagtcttggaaaatttcgcctctttgtaagaccccaccattcccgagccttgtcaagacttcagtcttgagtcatggtaaaagttgcgtgtcttcgagactcatcccgagtcttggaaagagttcgcgcgtcttcgtaagactccaccattcccgagtcgtctgtcaaggcttcagtcttgagccaagaaagtgccaacaaatctggcattgatccagttttgccaaattttactaaaccgttttttcaaaatgccacaaatttcaattcattcctttgcatccgcacaaatttgacggtccgagaacaaaatgttttgccaaaaaagaatgtaccgtaatttgtacttttttttgccaacaaattaccgtagtaatttatataattttaatttcattttttttttgcctatacaattggccaatatttcgtgactcgctgtttctgtttaaaaaattcttaaaaatgcggacaaattccatcttattttttcttgcgcctgtcggtaggg

SEQ ID NO: 6492 - DNA, 825 bp, Heterodera glycines
gcaatgagcggcaccaattcttcagtcggccgcgctggcgcggcaaaacttcactcgtccgttgagttcctccacccaggcatctcagtaccgatgtggtcgcgcaatccgttggccaatttgttgcgacgctcaaagcgcaaagaggaaaagcatcgtcggattggcaccagtgagcaggaggaggagggcgaggacgtaccacaagcagcacaatgagaaggacggggccagcagcagcaacacgaaaagggttgacaaggctcggaaacgggtgagtgccaacctagggttaggtctcgagtaaaggtatctttttatatccttgtctctatataccggggcagcgttcaggcaattacaaaaaaagatttgattaattaagcacattgttgattattttggtttgtaactttcttgaaatgttagaattctcttgttttctcgtattattacattatttagactttgtgctttcgaatgataccaaaaagataggatttgttcgaacatgaacaaagttattgtataaaaacacgggaatgtcaattgattggactcataaaactcaattggactcataaaagtcgattggactcataaagtgcactagagccaaaatttgtacgggaaaaaaagcaaataaattcttaaaaatgtacaaaagttgcacacttgtagtaaaacgctaaccagtagaatgtaaaaaacaaatacttgagaaattaggaaattttttagcaaaaaatctcaacttaaaatttttgtttttaccgaaaaatcgcatttgtcaaagcagcacaataaaaacaatgaaaaatgagt

SEQ ID NO: 6493 - DNA, 290 bp, Heterodera glycines
cggtgtcatctatgttactagatcggggatcgatccccgggcggccgctcgagcaggacctgcagaagctagcttgatggggatcagattgtcgtttcccgccttcagtttaaactatcaagagagggaggagagggttggagaaggaaaggaaaaaaaatgaaggaggagaaagggtgggtggcggaagaagaaaagggtggggggagtatgagtatgatggtcaatatggagaaaaagaaagagtaattaccaaccgcggcccaagccaaaaacgcagacgcccgcag

SEQ ID NO: 6494 - DNA, 2835 bp, Heterodera glycines
acaatgatactcatatttttgatacgaaaaatgattagtttcatgaatataaaattatctcagcaaattctggttgctatgttcggaagcaaaataaataaaagtaataggcaaattttactttataaatgtaacattatttaaaactgctaaaatcgcaagaatagatacgaatattagctttttttgtgtgcggaatataaaaattgcattttaagtcaagttttaacgcgttttgcatgcatgaatttaataaaattaataattggttttattttactagctgtgcaccaacaagttttggtatgtattgagaataataaaaattttaattctttataagtttataagacctttcattttaatgtaaataagtgatacattattttatcagcaaataattggaccaaagacaatgatagtcatatttttgatccgaaaaatgattaatatcataaatataaaattatttcaagaaattctggttgctaaattcggaaacaaaataaataaaagtaataggcaattttactttataaatgtaacattatttaaaactgctaaaattgtcgcgacaacgcgaaatcctaagataaaacccaaaataaaaaagaggaaaaataaaaaacaatagaaaataaaatggggaaaaataaaacataaataataaaaaatatttttacatttattttggaaaaataatattagaaaaaactatcaaaaatataattataaaaaatgaatgaaatgaataacggaaaattgtttgaaaaggaaaagtgcattccctcaggaatgaaaggaacgaaaattaattaatattaaattgcgaattctgttaaggattgttcgtaaacaaattattaataattaatatattaaagaaattggaattgtaaagggaaaacggaaaagcaaacaattaatgggaaaatggcaaatccaaacggataacacacaaaaacatattttaattaaaatgagaaattgtagcgtactttggtgcaaaaaaaatcgtatttaaaggggtggacttttccggaaatttcagattcgagacaaacggttccctccgaagtttcccggcacccgcccaccgcctttcactgcacccggccttcgctgctctctgtctgtgcgagtgccctccctgtccgcgcctgctcgagtgccctccctttcctttgccattgtgtggccccttttggaccagccgttgcccgaatgcccttccttttcccatcgccgtttcgccgttctgaccccttttgattttgccacatttttcaatttgtgatttatttactgtcaccgtttttgtgcccccttttccccgttcacattatcatgtttgtcccccatttttcgtttccctcaccgtcccgattgggacggtttaattacccaagtttgaggtcgacacaataaacatactcttattaaaattgtgcccaacttggtctatttgcctggacgaaaaccggcacgactcatcgctctccgatcggtcccgaccccctacgttcccccgaccggctactctgcgcgcctcgcccatttcatccccttcccgtccccttcaccccgcagagttcgacgcaaatttcttgtcgccacgacaaaaatcgcaagaatagatacgaatattagctttttcgtgtgcggaatataaaaattgcattttaagtcaagttttaacgcgttttgcatgcatgaatttaataaaattaataattggttttattttactagctgtgcaccaacaagttttggtatgtattgagaataataaaaattttaattctttataagtttataagacctttcattttaatgtaaataagtgatacattattttatcagcaaataattggaccaaagacaatgatagtcatatttttgatccgaaaaatgattaatatcataaatataaaattatttcaagaaattctggttgctaaattcggaaacaaaataaataaaagtaataggcaattttactttataaatgtaacattatttaaaactgctaaaatcgcaagaatagatacgaatattagcttttttcgtgtgcggaatattaaaattgcattttaattcaagttttaacgcgttttgcatgcatgattttaataaaattaataattggttttattttactagctgtgcaccaacaagttttggtatgtattgagaataataaaaattttaattctttataagtttataagacctttcattttaatgtaaataagtgatacattattttatcagcaaataattggaccaaagacaatgatagtcatatttttgatccgaaaaatgattaatatcataaatataaaattatttcaagaaattctggttgctaaattcggaaacaaaataaataaaagtaataggcaattttactttataaatgtaacattatttaaaactgctaaaatcgcaagaatagatacgaatattagcttttttcgtgtgcggaatataaaaattgcattttaagtcaagttttaacgcgttttgcatgcatgaatttaataaaattaataattggttttattttactagctgtgcaccaacaagttttggtatgtattgagaataataaaaattttaattctttataagtttataagacctttcattttaatgtaaataagtgatacattattttatcagcaaataattggaccaaagacaatgatagtcatatttttgatcagaaatgattaagatcataaatataaaattatttcaagaaattctggttgctaaattcggaaacgggaagaaataaaagtaataggcaattttactttataaatgtaa

SEQ ID NO: 6495 - DNA, 1342 bp, Heterodera glycines
acaaaacattaatttaaaaaatgtcctcaagaaagcgcaaaacaattaaaaacgagatcgccgccaaaaaataaaatataatatgaaatcaatacaaataagcaagcgatgggatccatttgaaaaaaattaagtaatcatttttataatggatttttcttcgttgattaatttaacccagctgaacaaggattgttcaggtatttagaattcacttaattaaggtaaaaataaaaagaaaaattggatattttttcaaaataaaagagcaaaaagtttggaattttgtcatcttttttaacaaattcccgaactggcaatttggaagaaaaattgaaaaatggattacaaacaaaatttggctaagaaaaaatgggtttggtggtggttttaagaaagtcacatccgccattttagtggttaaagcagggctcggatcgggcaacctccctttccaaggacgggtataccagtttccaaggacataagggaaaagttccattaaattcaaggacgtttaaaattttatcatatgtatgaaaaatgattacattttatccaatggtttatatttttcgccggaatgaaatttttacaaatattttttttgtttctgttggtcattttcctcatttcaccgcatatgcactttttttgcggcgcgctttttctgaaaaattttcgagttacaggagggttcggcggtgccgataggcgccgccggaaaattttttgagaattagagtgtaatttgttaacacattttcagcaaaaaaaaacaggcggattttgcgattttgaaataatggcgatgaccattttttacttttaactcagtctcttcagtatcatcatttttgtgcgtttttgttgctgttcctcattaatagttggccacattgcgaatgttcgtcacaatggcttggcgttgcaaaatgttttggactgatgtcacctcattctgtggccaaaaggtggcacggaatgcgtgtcgatactccaggcttaatggacaattaatttaattaattaatcattttaatttttaaattagactgtcaaatttaaatattgaattgcctgcaaatgaaaaggattggcgcactgctgcaatggcctatggaaaataagatgaaggcaatgggcataaaaatgtgagtggccgtaaatgcgctcaaattgaaccaatcaattgcaaaaatgaacaaaatggcattcttaacaagaaaagtaatttaaataaacttaaatattatcaaactccgatgtaaaagaagagatcgctatgatcagactgagcgaatggagcagccttttgccatgctcttctgagaaaactgaa

SEQ ID NO: 6496 - DNA, 2503 bp, Heterodera glycines
tttcagcttggtttagatgttctgcgatgacttttataatgcctagttttacggggctttttgtgcttacttaaaaatggaatccctaatcataagaattcgaaaagaatggtctataaataggttgcattctttctctaacacaaataaactgttgattgcatattttccatgtgtaattaattaattgattaattaattattgtttgactgaccctgtgcatttcgacaccatgtgatcagccaaatcattgcgtagcatataagttcggcaacatttataatcagtgtgttgtttgctgtgtaattaatgatttccggatgatttgccggatcggcaagatcacatctgacaaatctaaatcaaacaattgaaaatgaaatattccaattaacaaacgtttcccaatgtttggagctcccgtaaaactggatgcatttgtcaacgatcactttgatcacacaaatgccaatcaaaattttgaaaactgtgtatttgccatcaattttgtacctgaaaatagtcattctttcaatcctttcaactttttaattaactccgataatcctcccatcaaagtttaattattttaaatgttaccaaattggaaatgcaacaccggctaatcggtccaatccgatgcacaattgcattgctaatgcgaaactgcttgcggataagctaacgaattgcatgtagtagcaatgttcaagtgtgatgtaattgatgccgaaaagaaagatgaaaaatttaacacacaatccgccgaggaggaaaatggctaagaaagcatacaaagcgatcagaatgttgcattgggaatggagagtcctgatcagcaaattgataacaaaattaaataatttatattaggaaatccagtcaaattaaaaaaaagcccaagaaattgcaattttattaatttaggttaatgaattattaaattatgaaatatcgaaatatcagcactttcttttcacagtcacatggacaagcgacgcgtttagtgcaattccaataaagcaaatgaacgcatttaggccaattaaaacggcttcaattggtggaacaaaagcaacctcctttttggttgtgaaatgggggaattgttttgttttgtttcatttaatttttaccttctgctgattcgttgaatttgttgacataattatgagcagaaaagatgaaaattacggatgaattataatttgatggatgaaaaaattatttattattttttatttatgattatgaaaaggtaaaaggtgtcaaaaaactaatagaaacccgaaaaaagaaaagaaaaagataaagctgaaaagactctttgaaaatacgacaccaaacttagattgtgcaccgtcatgctccaacttctcattgtttcgttttgttttaattacttgctgttggttcattttagtaattatcaaaacctaatttggtcaaaacattaaaaagcataattaaacattagtaatatgtataatttaaatgcaattgttttatttattttttgaatatcctctcgtacgaaaacggcccggcccctctatcaagagcttttgaatgataccaatattatccaattgataggcaaaaaccttcaaaacaatttttcaacataaccagctaggcgtccgagagcatgcgtgccggcagagggaaccggtaaaccggcacggcacagacagttgcggttgttagtacagtagcattctgcatcacactcattattgtttttaaaaatctaagtttggtgtcgcattttcaagctcccgctgaaaaggtggtcggggttgggcggcttatttttgtcttatgccaaagactcaaaaaaaagttttcggtatatttgcttgaaaaaataaaaatatttattcgctgatttcatttttaaatttttttggttttttcggtgctgataggcgagaaattttcacaaatatataaaacttaaaaatttttatgcctttcccctataaaaatgccattcacagagatagagggtgtaaaagtcattcatctttaactccaaaaagtgaaagatgaaaagtgaaagggccaaaaaggtaaataaaaaaaagaagagtgaaagcgaaactcagccctggttttattaacaatttaacaatattcaaacaaaaaaggcgaatgaattcgcattgaaaaatgtaaatatgaaaagtgtcatttcttctaattagctaattacacagtacacagtctcgtctctaattaaccatttaatgctccattgcattctttgaaaatgtaatattaaaagtgtcatttcttctaattacacagcctcgtctctaattaaccatttaatgcttcattgcgttcttcacagctttgctaattggcaattaaaattctgttttttaccgcatatatttgtatattatattaaataatgctaattgatgatgatgctcaggagtaggattatccaaatggtattttttaccgcatatatttgtatattatattaaataa

SEQ ID NO: 6497 - DNA, 4159 bp, Heterodera glycines
gcggcagaatatctttcaaagacgcggcgataattaaccaaatttattgcaaaggcaaatcaattaaatataattaagtaaattttccttttgttcagactcatgcaaagaccatgaggacaagtgccaaaacgggggctatttgaatccgaatgattgcacaaaatgccattgtccggacggatacggtggcgaatactgtaaagaactcgaagagagtgagtaaaaaatttaaaattatattaaattttacaaaattgaagaattgaattgttagaaaaatggttttattaaatcgattaagtggcagataaaatatcccaaaaatgttcctcccatttattagatgagaactgcgagattttgggcgatgagtcgagggaattaaaatctgatcagaccgccaaagtgttgaaaccggtgatcgggtgcacttctgccggcaaagaatgccgttgccattggcgaattgcggcaaatttttatttattaaaaatgataattaaaatgataagaattaacaatataaaataagcgaaaaggattttagcctatgtctagcacaaaagtgcgaattcaattcaaaagcttgaacaattcgctcatctgctcacacccatgcacaccaccgtacgtcgagatcaaataccgtaccgacaaaagggcacaaggcaaaaaaattaatgaactgattaattattacttagcaaaatgatggctcattaaggtgccaaactttgctgtccccgtgcacttacttgatctgaacggtaatgaatacaaaaattggattgcggcggaaaagccggaccatggacattgtccatttccgcgcacctttcaccaaaatggaccgtaccatcaaccgtattcgaactgaccatttgaatcgaggcgaggaaaattgtaaaataattttatttgttttttaaattaaaaaaattttaaatttgtattttaaaatgctttacatatctaatggaaaattgttctaaaaatctgttaaggcaacgtcaaactcataaattcgagcaaatgcgtgaaaatcgaaaatttgtatgccgagaaaaggagaaaaggaaccccgagcaccggcactttgcgttgttataacccgacgaagaatcaatattataactgctcctgtaacggtgataagaaatgcctcgctgaagaaaaatgggcacacgacgcgtttctttgtcaaataatacgggtgattaattaattaattaatttattattaatgccaaaagacactgccacagaaacatttcatataatattggcaatttaattttttttggctgtaaaaattaccactttttgtatcaaaaagcggaaataaggacaaatgagaacataaatgaaaaaaatgccgccatgtatttattgatttgtaaattcaaggtcaatggaattcaaatccaaattgattatcggtacaattggactcgtcttgatgttgattgttatgtgagttgggtcttcctaatttctcaaaccctttttaattgactaattttacagaaggccgaaggaggtaccgtaagcttttggggctacagtaagccggagaccaaagaaatcattcgtgtggacgaagtccactgtttgacttttgaagctgctggagtaacaccaccgtcacagaaacggttcaagagtttgcaagtcgaagaacagctgtcgatgaaattgaatccaagtacattattggacaatgcttcatcacttatccatgtgttcgtgccatttgttggccatccatgaaagaaaagggggagatcagtgatcagtggatgtgatctgtctgctgctgatcatttggccaatttccaatcagcaaatttattttttttaattttaagggtgtcactgttttatgtaagtccctctcatatttgtatttttaacgcctcatacaccagcatggactatataattttttggctaaaaatacaaaaatatctctcccctaaatagacaaaagtgatgcaagaaggaacggagtgtgggagaaagtgggataaaggacatgggagaaccgctaaaagtagcgcccgtagctcagttggttagagcacggcacggattgctggagtcttgggttcgagtcccaccggcggacgagttaccttttatgtttgttatacacaaaaaaatgacaaattttgatttaaatgtatataaacaattaaaaatttatttaatgcgtgtggagatgtctttttgtttaatttttccaattgtaaataagtattttattcatttaattatttattattttgttctttataaaatccgtgtcaaaatctattgaagacaaaaaagttcaatgaaaaatttacgtacaaaaaatgaatttcaaataaaataaaattaaaagaacaaaagaaaatataaatattttttaatttttgggagtgtttgaaaatttattagaaattgtaacatattcaaattattacccatgagcgaagacgaaccgaacccttcacacatttccctttttggccaatcgatgttattcatcttttcgatattcccccgttcatcatttcattcactatttctcttttctctaactctcacaaatccccgcaaatctccgccccttttccgttcaatttttcccccaccaatcagtcagtcgagtcggaggagatgatagtcggacgttggagcgatcaaaatacaaattaattatttattaattcatttaattattcacatatttcgcgcattataatccgacaataaagagccatacaaacgattggaccctttggacttcttggggatcagggcccgattcctaagattaagacctttcagtcctgggacaatccgtctcctcccatcccactctggcatggatcctcacgtcttactgttagcaccggatggttcgactttcgagtcgaaggaaagacgatccagcgaggggatgaaatccgactggctcaagctgcagaggcttagaatcacatttgaatattttacaaattaatttttatatatcattttttgaaaaaaatcgattttttagggatacattttcaaaaaaaaattttaaattttttacaaaaaatttctataaattctcaaaaatcctcaaaatatgtaaaaaaaatgaaaaatatgtacgaaaaattgcgaaatatgtacgaaaaagtccaaaatatgtaaaatatgtatttacataaaattagcatccctaattataacccggccgttaaatatatttgaaagaaaatcaaaagtcaaaacaaaaaaaatcatcagtaaaagaaatcattcattcaaaagaaaagtttaaaaaaatcagttctaaatcagtcaaaaaaaagagggagttcattcattcaaaaatcattctaacacacacaaaaaaaaccgtcataacttgaacactaataaatattttttaatttttgggagtgtttgaaaatttattaaaaatgttttcatattttttcattattcacttttgttgtgttgtttaattgctgtttaatcttaaaaattagtccacttcgtcctcctcggttgccagagaagggcaacaacaaaatgagcaacgacggcatcaaaggcagcctccgccgggtgctgagccgttataaaaaagccatcaaatgaaaattttcaacaaaaaactagccctaactttgctcaaaaccaactaaacggataattgtggctttatcagctgagtaatgattgatcattttttaagacaatcacaatcctgatcagtcagtccagttaaaatgaccccggcggcggcgcttacgctaatgaagacgatacactttttctatgctttatcttatcacagcatcatttattcaattctatcattttgttttatcatcacaaatacgtacaattattaattatgcaataaataattaattatgtattcattcacattttacgccaaattatccgataaaaaagtgctggaaattgtcgacgaatgattttgtgatgatttggccaaggtgtaaaaaatgaataaattactttgtcatttatcggtgtccacaatctctgctatggtcgtttgtccgctttttcttctgttggtggcttttccccccatttttttacacgtcgacacaaaaattcagtgattggtccaacggattca

SEQ ID NO: 6498 - DNA, 2042 bp, Heterodera glycines
aatttatgacacaatgcgatcggaaaatggagaacaaaatgaaggagttgctccactatcagcagctgatcagcagcaactgaaggcgcgtgaaaaacggagaagggcaattaattgttaaaataaataaaaatgaaaatcgaaattttattttatttattttaatttttttaggaatttcgtcaaaactttggcaaaatgcaaatggaattacgggaaacaatcgaaaaacttgtggctaaagttggcgaattggagaagcaacaacagcgccaaaaagtcaattaaatgggagggaggggacaaagtccacaatattctaaaaatttaatttaatttaaaattttctattttttcaatttaatatataaataaataagaatttttccattaaatatttaaaaaaaaatgttatttcatttgacagaacaacgcgggagtgttcacaaaagtgaccgttgcaatggttggaaataattttaaattataataaattttaaattcagcagcaaaattgttgggatggcaccgcttgccccagagaattggaaatcattggtgccaaacgtttgatggtccaatacaaaggaaatcgcttaaaaggtaattgtcacaaattaacaaaaaaattattaaagaaatttaataattaaaattaaaatcactttaaatacgattattttaattgaaaggaagtcgctcaatgttcacaaaacgctgcattctgagcacaaattcgtccatttcttacgtcgaagtgaaaatcatcagtatgaaaatgtaaataaatcttagaaaaataaaaatataatttaaagtttataatttataataatttttaggtgcgcaatgattggacttgcgaccaaagaaatgccattgtacggaagggttggcacttatcctaacagttacggacaccgaagcgatggccttttttgggtcaacggttcctgccaaattggcagtcaaagtgccaaatttggcatcggagatgtcatcggatgtggcattatattggccacgcgccaaatttttttcacgaaaaacggacaccgtttgggttgacaaatgactaaaacggcatttttaatgggattttttcagattccgccgattttgtggcactttttccttctgaagatgtccctcttttcacttgtgtcactttgcacgattccgaggacaaaattgaggcgaattttgggccggaattcaactttaatcttaacactctctgaagaaacctttaaaaaacgtaatccatttgtatttttcatttttgtaagcctttttacttaatcttttaaaacaatttaattttttgtcatttttaatgtatttaaaaaatatgcgaaaaaggtgattccgagaattaaaaaacaatgacgaaattgaggagggacactgaaaatccggcaaatttgtcgagaacaccgagactctcgcgcggcaccatttacacaccatcaaaattcaatcagaactcaaaaaacaaaatacgctaagtatttaatacaattgatgcagaaaaagcaaatatttgtataccataatcaatatattaacaggcaaataaaaattttctgaacacgaataaaccattttttatattttcaattgaagacaaacaaattcgataattaaataattttataaaaaaggaaatttaaaaatcataatttgtaatggtttacaaaacaaagatttaaagatggatgtttttacctatatatctatttattcaatagttccggtctcataattatcggaagaaatatttaaattttgtatggctttcttggttttcctgatctcattgttatatagttgaaaattctgaatggctattgtaaattctttttccaatgctaattgatttaacaaagatttacatattctattctcagagattattactaaatccaattttcctctaggatttatttattaaaagtttaattgaagtaatttttttctaggtcaacattttggctcgataattaagggaaaaaaaagtaataatggtaaaaggacaaaaa

SEQ ID NO: 6499 - DNA, 2149 bp, Heterodera glycines
  unsure (1)..(2149): unsure at all n locations
tgtcatagtttttttaattggtctaagcttacactttcttggtatcaaacgaatttcttaagcgtctcganaacccgcaatttcagcatttntaaatatattaggaataattttctttctgttgcttataacncaaaataagtgatacaaaaattataaacttcaagtgctttcaatgcgtaccaaaaatgtgactttttagcaagtaatggcctaaaaactgagaattggcattcattgaacgcgtaaagtgcagagagcttaaaaataaaataaatcagctaattgccattaaatgggaagttttttgttaactgcgaccaacacttttgtcttcccggaaaaaatgtactacctttttggagtgggttttttggggtaattaggcactaatctcggatatgactatattggtaggttttcatacaaatcagcaataaatgctttctgccgttcattcattaaatgctaacaaatgaggatggccagaaagtgtaagcatagacaaaaagcgatttatttattttttcaaaaatggaaaataaaaaaaacaacaacaaaagtggtcttcttaatttatgcaactcgcttccatgtttttctgttctctttttaaatgtctgggagaagaaatttgggcccaaaatttgccacgattttgtcaccaaagccacacaaagaaacgaaggaaaacaacggaacagcgaaagaagcgaccaacgaattggagacatctgaaaagcataaattaaaattttaatttaatttttttttccaacccaaaagacgtccgtttttcgtgaaaatgatttgtcggttggccaaattaacgccacagccgacaatgtcttcacgataaaactgattagaagacccatagagcgaggaaccgttaatgtaaaaagtgccattgtttgggtaagcgtaagtgccaatgcggcttaaaaccgacagaaacggtttctgtttagcggccaatccgatcagtacaccgccgtcactgcaaaaagtaataaaaaaaaccattatgcatatttagtgaagtaattttctaacaattccatgtgttcaactccaatttcaaagtaaaaaatgcctgaagaatgatcttcgctgggaattgggtgttctgcgaaaacagtacgccaacctgttgaattttgaattaaattagcaattgtcagagattttgccttaccaggcgttttcgacagtgattgatttcggcagtagttttaaattcatttttctacgaatttactgttcaaatgaattaattttaattttcaaaattttactagacgtaccatataggacaagttttttaaaagcaaaagtttactgtcgaatcaccgctgtcgaaaactaacagcaccgattttgctactcccccaaaaaagttaatttttatgcatttttgaatttcaatttaattggtttgtcctgcggcggcgccaaagacataagggcgtaccaaggatttttgttttccttccatttacctgttgaatgtttttgcttattgaccactgtaagaccgtcgtcgccagtgatttcgagctcattttggcaaaacttgacatcccaataattttgttggagttttagaaaaagcttaaaataattaatttattttaattaaaaatatttaaattaattatttatttcaaattttaatttcccagcccattcatttatcattttttgtcattaatttaccattttctgctgttcttttttcatttgcatttccattgctttgaccttttctgacagcgttttttgggaattttgtaattcccttaatttatcggcagacacttaaaataaaagtattgcaaccgtgctaggatgtttcctgaatccgccatcagaagaagaaaaacaaaaaacatagactaatatcaattcaaaattttggcacgataatttgacactaagtcctactcatttgcaactgcaatcagtgaataaaaattatttttgctcaatttttggctgaaaattatgtcactatttgtcactatttcggacttttttcactattttgtcacttttttggcactttttcgtcactattttagttaactattttgggatttttcgtcactaaaagtcgcgaccctagtgaaaacacttactcacaggg

SEQ ID NO: 6500 - DNA, 2515 bp, Heterodera glycines
cagggttcccagatcaaaaatttcaaaagcctcatttggcaggcgaaaaagcctcattttgtgtcaaaaagcctcatttttataaagtttattaaaacacgcttaaaattttcaaatgatttatttttgattgtccatgatcaatttgagcaattttttgttcgaaataaacattttgtgaaattctaagcatgaaaaaccgaagttgatttttttgcggcgcttttttcaaaaaacttttggggaacaaggtgggccggcggtgccgataggcgccgccgggaaaaattttgtgatttttaatacgatttgttaacagatttgtcgacaaatatggccaaaaacattatgccaatttatcaaaattaatcaaaatttaaaaaatctgacgaattttccccaaaaatcttcaaaatttcttaaaaaaccacaaaaagcctcaaattgaaaatttagcctcattgacctatcaaaaaaccacaaaatgaggctaaagcctcagatctgggaaccctgctaactcatctgacaactgttatgagtaaaacattcaatgatgtgccccgaaaattctccacacagcttgaggttagcttaattaatgaataattaaaaaatagtcaaatttatattttaactgtatttttccatttgaagcttttccttttccttctccaatctgtcaattttgtccttcaactcaatgttttctgccatcagcctttgctgttttaattctgtttgaagcgatttctgtcaaattaaaatttaagaaaatccattttttattttaaataaaaatatttaaggttttttatgttttgctggaaatccccatgcctcttcaagttccattttggtgaacgcgcacatttgtttggccaccttcaattccatttccagtttctctaacttctcccaaaactgaattcaattgaatttatttaaattttattttcatttttttttaccaaaatgccatcttcatcatcgtcctgctgtttgcttttggcctccttcctcagctgctcatctccaacttgttcagcattttcatctttatatccaaagtcatccaaactgaacgcatcgccaatcacttgagaaaagaattcacattatttattatgtattctctaatctttaatttatttaatgtatttttttcttcattttaaaagaatttttattaaattttctgtaaagttttcttttggcctttttaagaaatttcgcaaaaaaaccctaagctttacaaaagtgccaaatagttacaaaaatgaattgcgtttgttgtttattttggcgttttactcgcaaagatcggcatttacctataattccttagtaatttattttcatattaagaaaaaaatcttgtcataataattaatctcttctgaaccttgaaactgctgatcagctgcttctgctggtataaagccgtcatttgtcgaatcattcgaaattgacatttgaatttctgttgaaatttattttatttttttttctaaaataaaataataattatttattatattccttattgttagtttggttgagaaactgagaaattgctgcataaaagcactttttgtgtattagaggtcacttatttgtgagggcaaatggaaatataataaatgaggctaaatgatgaccccaaaataaagggaaaatgacagatagaaaaaaagtttttttttttaaattattaccgcatgcattaaacatttatttatacttaagccaaatctactgcaattccaatgcttatttatccccccccccactaatgggattcagtcactcataccagggatggcacggaattccgacttccgaaaatttttggggcctcggaatcccgacttccgacttccgaaatttttgatgaaaagtcggaatttttcggaatttttttgagtttttttttcaaaaaattagcaatttttgtacaatttatgttaataaattgcatagaaattttcaattttttttccgacggcacctatcggcaccgccggactcaaaaaaaaacttaattttcttgaaaatttgctcaaaatcgctaaattttccattttttggacaaaatttgttaacaatttacattaaaattacaaaatttttcccggcggcgcatatcggcaccgccggacccttccttccccacagtttctcaaattctctttggataaagcgcgccgcaaaaaaagggtgtaactttcccaaaaaaaatccaaaataatgtaaaattacttaaaatattttgatctttttaaaaaacatagaaataaactaaaaacagtttgaaattaccttttacatggttaaaaatttaaaaatttagcctattaaatatttttttaaaaatttattatatttttttttgaaaaattccgacttccgaaaatttttggggcatcggaattccgacttccgacttccgaaaatttttggggcatcggaattccgacttccgacttccgaaaatttttagtgcctcggaact

SEQ ID NO: 6501 - DNA, 1087 bp, Heterodera glycines
ttattttatttgaaagtttatgaaaagaaaaatcaattgataattagaataaggtccattattttgtgaaatgatttttgtttattggcaaaaccaataaaagcacccgtactgaaaataaagaacaattcgttgaaataattaaatgaaataattaaaacacttttgtgttgagatttgctattcaaaaattaagaaaaaatcgaatttgaagttaattatacgaaaaggaccacaaatttcaaggtgaaaaatgcaaccccttggaagcaatgagtgggtgacctttcaaaattcaaagtaaaaaaaattgagataaatttttaaaatatttttgaacttatctctcttctcagttccatttcattccgtgttcgaagacaccttacaaattcatttccattttttaataatttatttttccatttttaatttctcaaattttgttttcatggaattgttaattctcttctctgtcggctctcctatcgatattttggtaaatggttttccagaaaattcatgaatttttttttgtgtggggaaaacccgaatttcgaacaaattcaaaatcttttctatgccaaaataaagacaattatttggtttggaagtaaaaaaattgcaaaagagctttgtttcgtcaacacttaacaaattattttattaagttaatattttttttaataacgataaataagtattgatttcgaaattgacctattgatttattttgccatagataatcttgttaataaattgaataaattttagtcatatcgaatatttcaatttgtataatattcaaattaattaagcaaatccaattttggttccagaataattgaaaaaaaatttcattaatgcaaacgatataccgtattttctcttattatcaccccgggggtattatttttcaacctcctcagaaagggggggggggataattagacacggggggataaatggagaaggggaaattatttttcgaccgatttattttgtgtaaatttaaaaaaaaatttgaatatgtcgccaaaaaatgtcatcgagtcaaagaaaaatcattttttattgtattttttaa

SEQ ID NO: 6502 - DNA, 6472 bp, Heterodera glycines
atttattgcctttttttcgccctaaaaatgactaatttttgccatttttgggccaaattttcaaaaaattgtggtaaaattggggttagggggtgccgttagccgccaccaggagaaattcttggaaattttaatgcaatttatcgagggaattgataaatttaaaaaaaaaattagtccattttttcttcaatttttattctctcccccacacctccgctctctgaaaacctgaaaaaaaaaaatttcaaatcaattttttgggtcaaccgatgtaaaattggccattttttttgtcaagttcatgtcacgactggaccaacgggcgggcaaatttctgcgaattgtgccgttcaaagagccgcgctcaaaccgaaccgaagtgttggcacgggacgcggaaattgacggatttgacaccgccaaattcgttttcaccgacatttcattcgacgccacagatatggttagattcaaaaaaaaaaaatttttttttaaatttcggcgtggaaattttttttttttgttacttttgtttaggtattaattttcttcgttattattattattttttaaatgggtttgactctgaaaaaagaaaaaattctcaaaaagtttggcttgagaaaataagaatgttttgccatcgttcaaaaatgccgagaaaaaattcttgaacatccaatagcttacaaaattagcttattgcatctataacacgcaaaagaccccacccaaaccgatcaattctttgatttttatgatttttttacacaaaaattctcatattttttttttaaatgccgactttctgatgaggattttcacaatttttgaaaaatgatttcaaatgctgagagtcttttggtcatgtttatctcccccaaggatcgcactgtcgttgtccgggagcaggacggaacgctacgaacggcgttgccggaagaacacgatcggatgaatcggctgttttttgtgcaacccaatcggcctgtcaacgaaccgccgctgtttgcaatgaccgacgaatggttacaggtgcccaagaaaccctttttttatataaaaaaacaaaaaaattttttttattgctctggcaaattggcatccaattactgaccattcacaatttttaggccctaacttttttttcttactttgtcaatgcctaatttttggtatcaaacgaaagcttaaagtctcgggaatttataaataatttgcaaatattgacattagaaaaaaaaatgacaatcagagaacacgacaatcaactcttttttttcgagtatagccaagaataatttttgccgttgcttttagcccggaatttaggtctatcaaaaactatagactttaagtttattttgataccaagactttttaggcattaacaaagtaagaaagttaaggcctaagaaattgaggatggtcagtggttggacggtaagctgctgtatagccaaatatttcagatttcgcaatttttttgaattttaaaattttttcacatcctttaactagagtgccacgggaccgggaattttgggcaaacccgggaccttttcgggttgaaaacccgggaatttttggcaaacccgggaccgggaccttttcgggttgaaaaccttttccccttttttccagaagacgctggaccgtgatgagcatgagtttgtgctggactgggcctgtcatttttacgagccggacgctcccaaatttgttgaggtccatcattttttgtcagaaatcggtggcatttttcggggggactggacaaaatctcgccgccggaatctcgccgggacaaaatctcgccgcagaaatttcaaacaaatttttcaaggaaaaaattcctagaaaatttttaataaggaaaaattttcaaaaaaaacttaacaaatattttttttttttgaaattttcttataaaaaattttctaagaattttttccttgaaaaatttctgtttgaaaaaattttttttgaaatttctgcggcgagatttcggcggcgagattttgggatgtaccctttttcggaatttttttcgtaattcgaaaaatttatttcactcccttcttttcttttcaaaattaaacgactttgtttagctttgtaagtacatttttgaccacacattggaaaatgacaagttggacgtgctgtactccaccagacatttcggcacattggccttctatttggtgatcaacggcaaaatggacaaactattggaattctatgagcagaagaacaggtggtcaccagcgttttcatatcatcaaaaagaaaagttaccatttcccacaaatccttttgatcacatttatggccaaaaaggtggaaaatctggttttttggaaaaaatttatgtctcaaatcatgagcaattttcagaataagcataaaaattctatgataaaactcgtacgctttccatataacccgctaatggattaattaaattaacccaccttaaacacaacttgtctaactttttttataagaaaatttaaagaaaaataattgaaaattttcaactatttttggaaaacaaattttaaaaaatcagaaattcatcataaaatttaaaaaatttcaaattctgtgtctccataaagacgacttaattttacattttcttatgtaaaaaattttaaaaaataatccgttttcctcctcttttgcagaaatgacggcgtagatcaaacgcgacaactttggcagatactttcttgttattgaagttttaattggatttctttctaaatgtgtcgacaattttttgaataaattttgttcattttcggtttatttttgtgtttggaacaacattaacctggtgaacaacatgcatgttacataatatttttaatgaaaaaaatatctattttttccacactaaaaaaattttttgcgatgggaaaaaatacgaaaaatttttcgcttttattgcgcaagggcaattcgcgtgtgccaatgcgtcgactgcgcgacggatcagcagcagccgccggcacagatgtggcggccacaacggcggcgagcagttcaacaaatgcggcaggtggttgtacaattagggaacgattaatgggagagtgggttaattaacggagaaaaagtggcctaaaaagttggcacttcagtgtcgcccagggcaacctaattgaaactcatttggctaattgtttttcatttcttgttctgtagttaaattagtaatacgaaatgtggttggctcagtggtggtttctttgaaattggctctaaattgggttgggttcggtgccgccgatgtgtggtgctgcatttaattttaataaaattaaaagcttgagaaggaatgatgagaaaagttttgtgggaatctctctgaagatttcatgattataaaccaaaacaaaattgatccataatctgaccttcttgcaaagaaatgttttttttaaaatttttctcagtttccatggcacacaaatgaacctttttccggcaatacaatcgatgggggcccctaagctgaaaattttggcattttttgtgcattttgttgaacatttgaattttcaacttctattcgagcctagttttcggggttcgaactggtgtcaaaattggatggatgtcataatttcctatgtaaaattattgttttttttttacacaggacagtcgcataataatcagactgaaatggatgtgccgtcgtcaaacagtgaatggaaacgcgtggacaaacgaataattgacatggactggacaatgtcaagatcagctgcattaaaagtctggaaaattgttttcggtatttccgggttttgtcacccccccccccccttcgaaaaaattatatagataactttgtcaaatcgatgaccagatgtcatcagaattgcaaaacaaacaccaccatattcgtgcgtgtcaaattcgtgatcagcatcaaaaattagcctagaaaaaattattagaaaaaaaaaatttaaggggagggggtggcaaaacccggaaggtacccttttttcgataacagcgaaaatagggccaggatttttgaaatccttatcgcctctgacctcaggctccgatttcatggccaaaatctatttaaaatgggacaatctctccgccgttccctctcccagaaaaaaaaaaattttttttttttgagtttttggattgtttaaaaattgttttgccacagattttgctgtccgttcggctgtccgcttcgctgtggtccatcatttcggactgtgacgaggtgttcaactactgggagccgctgcacctggtgctgttcggccgcggcttccaaacatgggaatatgcgcccgactacgcaattcggtacggggctcgaacgcaagttgagcagggacgtccagggtggcccatttccgaaaattcataaaataaacaattcttaatgaaaatatgttaaaaattgtaaaaaattcaaaaaaaaaaatttccaccgcgctggacccctcctgttcctcaaaaattaaaaaaaacgacgtaaaaaatcttcattctgagactataccccctccaagtcgaaatcctgggcctgtccctgaggatgagggtagaattaacgaaaaaattcgctttccgtatttttaacataattttcaaaaaaaatgtaaaaaatttaaaaatacttttcaagttcgtggctttatgtgctgctgtatgcgctgcctgcccaaccacttttgtttttgattggcacctcttcaaagttggcactgttttttgccatccgttttctgattgggtgagttttgcatttttttttttttggttttttgtataattatttagctgctttgaattgtgtttattttctcaacattttaaacctacaatttttgggagcaattcggttccaccccccttcccccttttccccccacccgaaaatgtttttaaaaagaatttccaaacatttttcaaggaaaattgcaaaaaaaaatgaaaattttttcacgcttttttgggaaaattttttgaaaaaataatttaagtatcataaagttttcaaaattgctagagaatttttcaaagatttattagaaatatttctgtttgatttttttaaattttttgttgggggggggcggcgaagaaacgaactgtaccctaaaatttttccaatattttttttttcattttcaaaattaattttggactaaattccgattttttgtataaatttttaaaaatttttcaataaaaaagtcctgtttgaactgtattgtatgtaacatttggctttgtgcagctccgtgtgcctcttctctgagctgtgtctgtacgaaagtgtgtgccgcagggcgggcaattccgttggccgtgcctttctgctgttcactgtgctgtcgcccgcaatgttcagcgcctcgtgcgcctttttgccctcctcgttcagcatggcattcaacgcactcgcaatggcactttggctgcgcgaaaaatggtgccaactaatgttttttgtttagctttttttggaaaatttaaaaaaaatcatgctaaaaatgacaatgaaaggtgttgccactgtgcgtgcaaatagcgcagtcggttaagcgccagtttcagtgcattggtgaagggtttcgaaccctttactccgcgcgccaattttttttcttttgctatttttaattcaattttcatttggcaatttctctttagtttttgaaaaaaaaaacaatttttttttgagaaatattccgcaaagcatgcccaaaaatgccaaaatatatgttcaaaagtagacaaaccaatgaccttattgccattgtaggccaattgtcatgcaaatttgtgcctcgggcatttgcgcccctagcgaaaatcggacatttgcgcccaggatatttttcttttatttttattcacagttgtcccattttttttctcattcataacgacattgaaatcgaaatttttaaaatttagacattatttaaacagaaatgagcatgcattttttccttcttttttttgccaggtttctctccatctttttgaccgcgttcagtgcgctgctcggctggccctttgccgcactgcttggcctcccaattgctgtccaaatggtgctgttgccgctccgtcgggccaatctttggaccaaatttgctggattttccgccatttctggcaccattctgttgggcctgctctgtgccgtggacacgcatttgttcggcaaatttgtcattgtaaatttccagcatttttcaattttttttttgaaattttacaatttttcaaaaatttatgcaaaaaaaaatttctaagatttttcttcattcatcaattaaaaaaaaattcccatttacaggctcccctcaacattgtgctgtacaacattttctctgctcatggaacaactctttatgggtataattagaaaataaaaataaaatgactctagaggtccccg

SEQ ID NO: 6503 - DNA, 6572 bp, Heterodera glycines
gcaaaactgttgatagacaaagaaaacttgactgtttcccaaaggggagaaagtgatgaatttagaccgttgctacacaaaaaggttttcttgattatttctgcgcagtgattaagcgaggtataactttacggcattcactgaattataattggtcaactgcactgcatttatgacatcaaactatatagaatttataatgaatacaaattttttttttaaaaaaaaaatgtaaattaaaaatatgatgcaaaaaaaaaaattaatgcaaatgcattgattaaaaattaattgcgcttttaatcactataatcttgactgtaacctccaagggagcaaatttttttttaaaagactaaaaaataatcgacttaaaacctaggtaaacacattctcaaaatattttgcattaagcacatcgattttttttttaaattcaaaaaagggtaatagttaaaacctttttaatcattctgaaaaaaatgatgcgtctggatactgacttctttttggtgtaaaaaaaaacttatacttgtaggcactttcttaaaaaaactaatgtcttgacagctttcccctaagagaatagaataaaaaatagtttaagtaatgacaaaaaaaatttcggaccaaaattctggtatgtagaaggggagaatttaaatctcgagctaatatgaaataatcagaaagggcacctaaaataatagtttatggaattgtgccaaaaatgaaatccatgtactatcaaacataattttggtatctggtttatttataaatttatataaattttttatccaatccacatgaccaatgataggttaaatagtgatagttggcacctcttggctctcaaccttagctttgcttgacgacaaggttcgttttaaagattaaaggttctcactgttcacttgaggataatcgaactgatagaaatctggcgggttgttaaatcaattttttgaggtattggaccattactgacaagattatacatttactttttttaacactttcgactgcaattaaataatttttttttaatagctcctgtcccttcattcttgacagagttgcccgagggctttgatcataaaaactcagattcgaaatggctcggatgagcggtcaataattcaaatattaaatccttcagcttcccctgtgaggtctccttgttaataagctgttgtgagtcatttgtactgaaagtttcatttcgttttttgctaataaacctatctctatccatgatgatttcttccattaaaaaatcagggatttatcgggtacctaaggagccaaattcgcatggtaaacccagtgttttctgaacctttagattattctcacttgtcttttttggtttgccaatacagttacagtaccccttaaaaattcggaaatggtccatctttggaagctaagagatctccaagcttctcagtctgagaatagacttggtataaaattgatcaggtttaagaaagccaaaaggattaaaaaaacaaatccatgttaggagcctatcaaaaatttcaaaattctcctttcctgtgagcttaatgaggaattcgcaaaatccttccgctttttgaatttgcaaagagccctttgtgattagtgaattaaggcttgatttctgtttttttgtttgtcatatcattaaggatttgtatcattcaaaatttgagattagggtaaactgaccaaaagaataataattataattcaaattttatttctattccataacttgacagattgccctagagccaaaattctgaaaaataaatattcaataatttgtgatgactaaactgtctcacaaaaaaaaaaaaaatcaatgccataattataactccggtacagtcggtgagagtaataaaaaaaattttatgcatgcacgggcaaacttcatggcgaaatgggtatccaatgacccaaaaaataaaatgttttcacccaccatattttgacaaaaggcacaaaagccgtgaatattttttttattcagagatccgagaaagcagaatcagaattttttggccttttttcaactaaattttgccttatgcaaaaaatggatcatcacaaaaaaaattgtacttctgctgatcataacaatgttagggcggtctgaaagttcctcaatgtaaaaaattgaaaaaaaaaaaaaaaattggccgtgagcggttttaattttctgtttaaatttggaagcatataaaatattttttttaataatttgagtggcctaataacttctggagcagtctgttttagtgagtgcacgcagggtaaagctcagcaaaatgtctccaatattatgtccaaacaaaaaacatcaaaagcggatttttttttctcttataaggcttttttttggcgattaaatttcaaaattttaaatcgcccgtttaacaaaacattttctgccttagtttggattcttaaggctctttggcacataaattttcaatttcgccattcaacatgacagaactcccgaaggagcgacgttccttaaatgtctaggcttttgctgatatgaattaaattgcctcacaaaaaagaactaaaaaaataataattattgcctgtaaaaaaaataacattcaattgcattgaagcctcattcactcgaagccattgaactaccaaattaaacgcttgaaatggtccatctttgggtagctaaaagagattcaagtttctcagcttgaattttgtttgtccttaatatatttggtagcctttcagcaaaaaaaagtttggttttaaatttcaaattcttcacaaattatatcgattaatgaattgagctgcttgtaaaataacctatttatgttaatttaatttccatgcaattaaggctctgactggaatagtttcggataaaaaataatggcatccacaaatcattttctagtccaatttaagatagtcccaaaattgaagaattagactaaaatcggaatcaaaataattctctgataaagaaatattgaatttttttaccatttcttgacaaataacctaggtccgcaatttagttaaataaatatttaaaaagatacaggactgaatatgtaagagagacttagaatgttagcctttttgctaaaataaataaaattcctcaaaaatctcaaaaataacaataaaattatattgacaaatttttgtaattaattgcttttgcattttaatttgaaaggctgagaaaatttcagaaaatcgctttaagtggcttgccttcacattccattcttcggcgttttcaggggtgtaatgcatttccggtacagtcggtgagaataatgaaaagaaaaaaaattttatgcacgcaagggcaaagttcacaatagccactgggtattcattacctcagttggcaaaataaataattgagtactttttcatcatccaaaacttgacaaatggcccaaaggccgcaaaaatattctttattctgatgagagccaaaagcgagcagaaacatgctgcttgaatttgtttggcctttttcctcatagacttggcctggcctataaaataattttgacttagcataacattaggcggctctgaatgccttttcctcaatataaatttaaaaaaaaaatagcccggagcgctttgagtttgctattaaattatggggagcagcacagaaaataaatcatcctttcgcttaattatttccggagcagtcggccttttacgcgcagggcaaagttcatcaaaaattccaaatactagggcaaagatttttatgtaagagaaaaaaaacgctaattacaattattaaataaattatacattaaaattgccaaagtaccagttttaaaaaaagtatattaacatataaatctttgccctcttaatatgcccaaacaaaaattaaccaatcggcgcaatcatcaaatctgtggcttcaactgataaataaattggggctgtcctcaaaatttataaatttatttggccattgagcgcgcggcaattcataaaagttatttaggcttaaaataggtcttttcacggcacttcacaaaatcttggccattaaaaaattggaccggtccttgacagaactcccgaaggagcggcgcgcctcattccgttctcgttcccctacacacgcaaattcccgctcgtcctcctggggatggattgccagcggcgtgccagcaaccatccggtgctaccagtgaaggtgctgatgtccagccctgaatatgaggaagggacgagggaaattggggattggatttgggggaaaaaggaataagccaaaatccgggccctggataaatgacctccccaaatttgtaatcccatgggcgcctattagatctaatacgcgtgcggggatgggcgagaaggagtaaaataataatataaatattggccaattacattaataataattccgccgcgttctgctctcggctctcgctcgccgattaactgcccgctcaactgactccttatcgagagaatgctcccgattaaatagttggacttatggaacggaataaagatggggaaaagcggggataaatggtgtgagaaagagattgaacggatgtgataaattgcgccttacaatcgtttcttcattaaataaaacaattttattttaatatttaaaaaaatcactattacaacacattattatataaaaaaatcaattgcaatttaaaataaaaacaaaataattattaattaattcctaacacataaaaatttgaaaccataaatgaaaaaaagaattgacaaaatttttaacaaaatttaaaaaaataaataaataaaaataataaataaatataaaaaataatgaattaattaacacatataaactcatttacctcagaaatggcaaactaaactattttcgtgggagagcatgtgataaataaaaacacaagaaatgaatccaatttatataataaattgacgacattaaaatataaataattaaaaaaaaaagtaaaaaatcacataaaaattttctaaaaaattaacattttcttgtttttttgtttccctatggaaccgtcgccttataaatcagaattattttgtataaaaaaagaatttttcgtttttttccatggaaggaaatcccttatatttatttttagtttttagatcctaaaatctcatgccttttagccccgcgaaggatttgtctgtttttctctggtcccatgatcttttaatcctttttctcagctgttctctctctctcttttccccgctttttctctattctcaaattttcttttaaactgaataaatcttcaaaaatttttcttaaccttttttcatcaaaaaaacgtgataaaaatatttgttttgagctcctttttcttaggtgctgttgttaagctatttttcgagcatttacgccttattttaagtatttattttgggctttaatatccctaaaataaaaatttgttttgaatttcctgagaaaaaaagaatcgtcctaaatgttctctaaattcattatctttttttttaaattaaataaatgctatttgcatcattagcctttcaaaataaaagaaaaaatgataaataaaaatgcaataaaaaaaaataaaaaaagaaacctcaagaatttacaataattaattttttttttttaaatacacccaataatgttttttaaattttattttgcctttttttggcctcggtagtgcgtaaagaacctaaaaataggcattggtaataattttggttggtgagaattattttaaaacgtctttttaacttattagcagcatattatcatttttgctttggttcactccctaccgtcgacaaaattatattttctgttttctctccccaaacgaacaataattataatttcggtattatttattataaaagaaccatttctaacgcgcccctaattcggtttcaaatatcattatgggattttggcttcataaaaaattgcaattttgaaaaaaaaaaattaattaaaaagtatttggaaatatttttagataatattcaaaaataagtatagtataaccaaggcgaatatgaagctaatagagtaattttctaaaaaattaacattttcttgtttttttgtttccctatggaaccgtcgccttataaatcagaattattttgtataaaaaaagaatttttcgtttttttccatggaaggaaatcccttatatttatttttagtttttagatcctaaaatctcatgccttttagccccgcgaaggatttgtctgtttttctctggtcccatgatcttttaatcctttttctcagctgttctctctctctcttttccccgctttttctctattctcaaattttcttttaaactgaataaatcttcaaaaatttttcttaaccttttttcatcaaaaaaacgtgataaaaatatttgttttgagctcctttttcttatgtgctgttgttaagctatttttcgagcatttacgccttattttaagtatttattttggaatttaatatccctaaaataaaaatttgttttgaatttcctgag

SEQ ID NO: 6504 - DNA, 2787 bp, Heterodera glycines
ccccggtgtccaaaaatttttaaggaaaaataatattttggctgaaaattttaggttttccttgctgggctggtaccccccccccctccagacctagccacacccaaattttccaagaaatttcgctaattttttcaaaaaatccacagatttttgatgaaactatgcttaaaatggctcaaaatcacaaaatttggtcattttttggacaaaatctgttaacaaaccggatttaaaaccgtgaaaattttcccggtgactgctatttccagagaccttcccactgtgtatggcaattctttagaaaatttcgcaccactatggataaaagggctcgccatcgatatgtgcataaaaatgggcgaaatctgtgcataggcataactatataaaacacaatagcgatatatgtatataaaacctcaaatatgcactcaattatgtaaatccaatttttaaaattggttaatttttagataaatctcttcccatagggtgaaataggaattaaatggcttattgatagaatcatttttattatacaatattatctgggcatttttttccggtacattctaaatagaaatttcttttttgacaagaaatttctataaattttctaaatcacctagtatttaaaatatgtacgaaaaattagcagaattttggattttttgatgatttctaaaaatttccgtaaatgttcccagaatatgtaaaaaataaaaatttgtaagaattaatttcaaaacaggtaccaaatgtgttaaaatcccgaaatgtaaattatgtataaaagtccccgaaatatgtaaataaaagtcccaatttttgttcgcaaacacaaaaaagaaagtgtttttcctattatttcgaccatagaacccaggggaaaaaatatctatttacataaattcccagcctaattattatcatttaatttaatatttttgaaattttcgtgaatattttttttgaattgaaaaatttgcaaaaatttttaaaaaagggtaaagagataaggggctattagaaattaaacagagaaaattttacaacaaaactttatgcgcttattaaaaaagaatgtggactgaataccatgacaaagatcattcgaatttcaatgcatagcaaaacccgcagactcttaaaacgagttcggcactcagtccgaatttatttaccagcccgttttggcactgtttggccacaacaaagttgagagagccaaagtgcggtcaaactggagaggaaatggggagaggggcgggggaatcgaaccgatgtctcacacaaacaaaacaaaggcactaaccactgagcctagcacaaattcaaagaaaaacaaatgtttgaaagaagtgatgtaattggcagtttttctaaaaatttaatttgaggaaaacatattttttaatgaatttatgaagaatttgcaaatgttgactattttttctaatttgactaaaaaattttctgatttaaaaaaaaaaatcgaatttggcaattgatgagggaagtttaaggccgaattgtgccgacagacgccgaaataataaatgggattcttaattgttttctcagaacacccttggcacagtgccaaatcgaaaggaaaaataaataaaaatgttaaaagacattttgaatagggttgatcgggaccggggaattttgggcaaaaccgggacctgtacttttcgggttggttgaaaaaccaggactttttggctgggaaaaacgggaaaaaaccgggaatttcccggcctcggtctaacgggtcaaaaccgtgacttcggtactcatttgtccatgttttggtcccggtcccggccaaccataaaaactaaaaattttacaaaaaagttacaatttggccaacaaatttgagaaagtcaatgcattcaaaatagtaaaaaatttcgagtttctttttgaacaaaattttggattttttcccccattttcgtaaaatacatctttccagtgttttttcaattttcgccgaaagtttaacgaaattgcctcggaatcccgtacaatttcgaaattgacctcccacccccgttttccacctatatttataatgtcaatagtatatattaataaacggctttttgggcattaaaacagccaaaaaaagcaccaaaagtgagtaaaaagtaacttcaaattttatattccaaaactgatcaaaaaaaaaagaaatcctcagccagtagaaaagcctaaaaaatagttagtaaaattcgaaataatttagaaaaaaaagaaaattgtagactaaatgatcacgtcaaagaacatgaacttcaacgcatcagcggaaccctgtccgacacaacaagttctgcactcagtccaaattgatttacccgcgttgtaagcacttggccacaacaaagttgggagagccaaagtgcggtcaaacgggagaaatgggaaatgatgaagagtggaaccgaaccaacagcacatataaacacaacaaaggcactaaccactttgccaggcagtatacactatgcaaaatgtataaattcattgaaaaacgcattaaaaaatttttttgattttttttggggaatttagggtcagtggtgttaaaaactccgaaaaaaatgggattcttaattgttgtctaatatatttggaaaaatgcgccaaattcaaggaaaaatttaaaataaaaatgtttaaaaagtttattttaatgatgcttttttaaggaagacattgtggtttttaaagccaaagtaaaccctggagaagatttttgataat

SEQ ID NO: 6505 - DNA, 1255 bp, Heterodera glycines
ttaaaacaaaaaaagaagacgtttttggcacatttttttcaaatgccaaatgaatggggaaaagacaaaaaaaaagttaattgaccggaatatttttgtttgaatttttaaaaattaacacaaagtgaaaaataacctggcagccttgaaacagttatatgctcattattagggatgcgatttttaggcaaatgcctaaaattttgcgcatttgataagcaaagataaacacgaaaaacgcgttttccgtttggtttggggtgtctaggatgacttttgatgcctaactttgcctatttcggggtttttgtgcctgaggtgcctattttaggattttgaaaaaatccttaacaaaaatgcaataaaaacgaaaacacacccctaagaaatgacccaaaaaaaaaaaattcagaaaatacacccctaagaattgaaaaagttttcaaaaaattgatcatcgaatttaatatttttttcatgataaaaatttttggctaaaaatttgtccttattcgaaaaaacgttaaaacaattggaatataagcaaaattaagttttttgattaattttacgtgatttactacctgaaaacgttaataaaaaagttttatttgcctattttagtgcttattcgaggatttttgttcctatttaatgcctattttgagatttttttatgccgttttaggtgcctatttcgcgattttttgtgcctaaaaatcgcatccctactcattatcacaacgagttttgaaaaaaaagaagcaagtttttagaaattttgcgcaaataagtaaaataaaatattaaaaaaccacttcgcagagaaaatggcaaaccctaataatccctaatttattccgtacataaaatgcccaaattaataggaaaaaggcaaaaaagaattgacatttctgtttttttccctcacaatttacatatgttgagaaaaacatgaatatttaagaatttttagggaagaatttcaaaagtttattttttacagtttttttatctttcatgaaaactttttctaaatttttaaaaattaaatttgtcgttgaaaaatttttttttgaaaaattatggactgaaatgaccgcgctaaatcaattttgaagccattcaacgcatcaaggaactcggggtgtgaggtgacgagttcggcactaagtccgaatttatttaccagcccgttttggaactgtttggccacaacaaagttgggagagccaaagtgcggtcagacgggaga

SEQ ID NO: 6506 - DNA, 3371 bp, Heterodera glycines
  unsure (1)..(3371): unsure at all n locations
ggaaatccgtggaagcggtgatcacgggggnctttaaaaaaaaaatccgtgacccgtgaaccgtgattataaaaaaaatttctaatgattttttatttaaatttatttagaaaacgcatttaatcgctggaaaaattcccaaaaaatattttaaagaaaccaaaacatataaaccgctttttttgcggcgtacctttttcaaaaaatgactaaatttacgatttttggccaattttttgaggaaaattagagctttttgtaggaatctccaaggaaaattttttattttttaactaagtttattaagaaaatttttcaaatttttcttaaatttaaccaaaaatctatttatgtagagcaaaaaatttcctctaatttgtaagctaacttttgatgctgaacaaaaaaatcttttggaccaacatgatcagattactccttcatggcgatctgaacaccccaaaagatactgaaagtcgggaaaattttagaaaaaatattagggggttgggaaaattttgtgaaaattttgattaggcctgtcattttaaatttatgcgacggagagaaaaaatagggatttttagccgtttttgtgccaaaaatgggctattttttttgccattttggggtcaaaatttcaaaaatacggtaaaatgggggtccgcctgccggtggtgccgacaggcgccgccgggaaaaattttgaaattttgagtgaatttgttaagagattttgtccaaaatatgtccaatcattggttaatttattggtctatggacgttttaaaaataaagaaaaataattttcaatattaggaaatttcttgttaataaaatttcaattaaattatcaaaacaaaatataaaaattatcctatcccaatggggaattgaacccaagggacagacagcgaaagacagaaggcttaaccaccagactacatatatatatatatatatatatgtttactccctaaacagaaataatttatttatttttttctcaaaaaatttcttttcacacaccactttcctattttcgtctcaataaaaattccctatataaaatgccaatcacggatcaaaatcacggaaaaattgaaaaaatccgtgacccgtgatctgagatcacggcaccccaaaaaccccgtgatttccgtgatcacggccagccctggtccgaggcctcttacgacgagaggggggggggggtgtctcgagacaccccttgtatatgatgctcaaaataacagcgataaagaaaaaaatttgaaaagccattttcaagataaaaaacataacaattttttgtttcgaccgagtaatatcgaagggaatttgggggttcagcgggcgctgccagtaattttttttgaaatttaacgaattttgttttaatataattaaaaaaaaattaatttggacaaagatttttgtaaaattagcataaactatatatttttttaattaagaaacattatttatttatttttatttcatattttttgcactttttgttttataaaaatcgacgttattaatggttttataatgtctaagggtagtatttgggggttcggcgctgcgtttaaattttttttttttttttgaaattctaaaggattttgtttttcctaaatccactctctctcacccgccagccctccggtggcggcggacacgccgaagaagcccgccttgggcagaaaaatgtgctccgcgcggatgcacatttcaaagcgcggcgtcgcgctcatcccgtcggacacgtgcacagtgagcgtgttgcggaagtattccaccttgatgtgcaccgggtactgcttgttgcggaagtcgcgttggcatgctgggacaaataatagtggcattttttgttgaaaaaggaaggtgcaattatttttttctggaaaatcaaggaaagaggaatagggttagcaaataatggtgcgcttcatttcccccagaaattttttttttgaaaaacgttcaaacagaaattttcaaaaaaaacaaacttttttatttacaattttggcaatggtaaggcattgtggcccacaaatttttttttctttatttaaaaatattcccaaagatttttgttttgaaaatttatttttgaaaaatttaaaacaaaaccctcggaggtgaaacggcctattccgagcaaagagtggaaagaaaataccaatgaatttttttttttaatttcataggtcgcggggaaactacaattagttaaaagtatttttttaaattaattggtaaaacgcactgctcaacacttggttggacccgtccgtgtgatggtcaaacgcgcgagtgcctggtaaaaaaggacaaaatcaaataatgccattgtaatttgaagactcaaagcttgcagcaaattttcccagcgacttcttaaatgcttttttaatattttgcaaacattttaggttacttaaacgctgaaaatttgggttttcctgtttttagggggttcggttttgagtccaactcatttgtcagtaacttttcccaacgaattcttttttttctgagtccaactcatttgtcagtaacttttcccagcgaattcttttttttctaatttcaattttgattaactgttcaaacccataaaaaagaattaaccaatcggggcaccataatggacgaaaatctctcgccccccctccaaaaaatgcaatttttcaaccatttaggacatagcacagaaaatttgacgaaaaagggcaactctgagcgctggccatgtttttgaggtataactccatttgggtttacttcagttgggccccgaacacgtttgggccacagccatgtttttggactcgaacttttttctttgtaaacaaaatccaacattgttggtatcattcgatagccctaagtgtgctcaattagcctacaaatttccaaaaaaaatcgtaaattttgaacaaacgaatgaccaaaagaatggcagaaaccaggttttagtaattttagccatcactttttgaaccttaacgaaaattttcgaaattttgcaggctactaaggacacttaaggctatcgaatgataccaacaattttgaattttataatccggggcccaaacgtgtcgggtcccaactgacgtagtccgctccattttcatagttgtacaaagcgaaccaatttgctacctataatgaccgtaaatgtttctatgtatattattctgcaaaatttcgaataaatgggccaaaaacacggtaggggtcaactccgtctggccaactccgtctcagcaatgttcaaaaagctataacttttttctttgttggccaaacttcacaatcatggtatcattcgaaagactctagaggtcccc

SEQ ID NO: 6507 - DNA, 623 bp, Heterodera glycines
accctcaaatttccccctccttccctcacccctcattcacttttattctttaaattctccccccccccccccttttcccatataaatccctttagtatacggattacttatgacgacaacaatgaaaaaaaacaaaaattaaatgcaatcaaaagctaattcgaccggaaagatgagaatattatcggttcgctcttttgtcgctttgctcatacggcgaagtccccagacagaacgaatgaatgattgctcaaattatgtccaaatccgattccaaattgcccatgccccgggcaattcttcggcttgtccataatcaacattttccctcgtgcgaaaagtcggaagagaaaataaagggaaaggccaattacgaacggctataagacaaagaagaagaggaagacggagataatggggaaacaagagcaaatggagaagaggaatagaagcagagagagggcgagagagagaagagagaggggggggagagagaaagagagagaggaagagagagagaagggggagagagagagagatgggagggggcgaaggcgccggagggggggggggagaacgaatgccttaccataacgccaatcggcgccgatccaacaatcccc

SEQ ID NO: 6508 - DNA, 2321 bp, Heterodera glycines
gccccccccccatctcaaaacaataatcgatgccccaaggggaaaagtgtcataaaattgccaatcggcggcaaaagccaattaaaagaaaatgaaatttaaataattgttttctccatctactcaatttgaagaatgtttgcgttggtcttgcttcttctcctcctatttaccaccaaaattaatttgtttcttgccgacggaatgcgcgtcgatccaaatcgaattgcggcccggttgagaatagagaaaaagtgggacaacgacggaagaacagaaaaagcggacgacgattttgggatgggaggacgaaatcggcgacaactgatcggagggactcccaaagaggaaacaattcaggcaaaaactggcaattaaatacaaatcggcaattaggggcaattagcggcatctatttgcctaattgggtttgcgagaatcgcccagcaatttttttgtgcgtgctcactttctgaaaccgttcaaggtcaccgccccgctgttctcctcgcgtctctttgaattcggtccaaaattgggcgacaaagaattgagcggaggcattgacatggccaaaagaatgcatctgaaccatccgatcactttcttcgggcattcccactcgaccgtttgggttttgagtaacggaggcatcggattcgacaatggcataaagcagtacaagccaaacgcattgccaagcatgggacagaagctgatagcaccgttttggaacagaaacgacttgagaaatgggggcaaagtgttgttcagagaagtgaacggtgagagagggggggggggcaattcgatcagagatcatgatcaatcggaagtgggcgaaagtgcaaaaacaaaaataattaattaaataaattaattaattgcccacaggcggtcgtgttttggagcggggtcaaagtgaaattcgctaccaatacgacagagaagtgaaggtggtgtccgctgttgtggtcacttacgaaaaaatgcaggtgaagaagaccggttggccattcataaattaatcaattaaacttttaattgtctataatcaattgccaaattgatcaattaaacttttaattgactatatataatcaatgtttttttagcccgtcggttcgtcgcccctcccagacgaagttggtgatcaaatgagtaaagaaaccaaacagaattttaatgttcgcctcccatagaatacaaacagtttccaattggtgctgttcatcaccagcaatggcacttttgccaatttcatctacagtaacatcgggtggacgcagggagccgaagtgaccgtttcaaaattggcatgcgaaaacaattcccaattttcaggccggctttaatgccggcgacggcaccaatcattttgcattgcccacctccggcaccggaaacatcatgtacttggaggagtacgggaacacgggaatcccaggagaatggatgtttattttggaggaggaacgtgtggtacggtgcaaggccggcataaaaggggacacttgcgacgagggtaagcggttactgatcagctattgatcattcagtgatcactcactaaatatcactcggaatcactcataatctcattaatcgcggttctcactgactgatcattcggtgattaatattattcacttggtgatcatcgctcacccaacacgcagtgatcacgtactgacttatcattcgttgattattcgttggcttttcatacggtgaagcctatttaatgatcggccgatgatcacttagtgatcgtatgatactcactgatatccagtgatcactcgttgaataaacatccggggatcacgcactaacttattactcactgatcactcgtttactgtgaataagtccattagcctcgacctttgctgcatcctgttgatcattttcagcatgttcgcctggtgaatggggcgaggattgtgtgaagtgagtcactgatgaatagcagacaaagatattcactaaaatgagaataaagcttaataatctcatgatctccactcatttctaagatgttgccattgtgcgaccggctcgtgccacgaagtgagcggcgaatgcaaatcggacggatgcgcgcggtgttggcacggcagagactgccaacagagggacggcagttgcgacgcgccacgcaaatgcgggaaaaatgcgcagccaaaagtcgtgacgaacatcggcacattgggcagccgttgtggggagccgcctcagtcgcagtgcgaatgtttgccgggttacgagggaaacgcggaggaaagctgtgcaggtgggggggggcaattgaaaaggga

SEQ ID NO: 6509 - DNA, 2200 bp, Heterodera glycines
  unsure (1)..(2200): unsure at all n locations
gtaatgaaattgttaagcaataaatgaccttttgtaggtgttccctttcttcgcccccatcgatttggcccagcaaggacaaatttttgtggaagagaccaccgacccttcgctgttggccaaggccagccgtacgatcaacgaaaaattgaccgattcgcgacagtcgccttttgagggatcacacgcactgatggtcacttacgtaaatgtcagcttagccaacaccgagtcgaaggtgcgttgcggacagagcccatttggctgatcactctctgaaaattctttcccctcgagtcacactgatcacccctttcttttctgttcaacatctaattagttcgttctcctctgatcaccaccggattaattctgatcacttttccccctttctcttccacctgatcagttctccaacactttccaaactctgctaattgctggccgtgacaagttgaaacacgagaacatgacctttgtccaattcctctaccgggacattgcctggagcgaaggggccgaggcgggaataatggcgccggataagtccagctccattctgttgcccggatccggcaccatcggcattgagcagctgtcccagttgagcaatgttcggtatgttccccatttgtaactctctgatcagtgagtgaccaatgatcgccaattgcccgcgctccctttagctcccagggcatttggcttttccgtgtcgacttggcctcccttttgccctgcatgcagcccgacctgcagcctccctattgcgatggtcggtcgccaacgctggtcaatcggctgccgcctttccattcgaccactccgatgatcacgacaatggcacagacaagcgcaaaatcagtggaaaagacaaatgaagaggaaatggcacaatcaaagaaaggaaaagcaaaagcgacgacagccgaattttcaggagatgaaaaagaaacggacgaaggcgaagaggaaaaagacaaaggaggaaaagtagaaaagaaagagaaacagcaaaaaggaagtgacaaggaaaaggagggacaaagacaacagaagatactgccccaattggagcaaattgaagaacagacggaatggcaaccggtgagagaggaggaggcaaagaaagagacagacgacgaaagagcacagcaagacggagaaaatgaaagaggaaaagaaaaggagcgtcaggaggaagagggagccaaagaaaaagagggaagggaacacgaacaacaaaagtcggcacaacgcaaaaagacaacgaacgtcccgggcaatgccattgagccggcaattatcagcagtcggaagccggccattgtgaccatccaaagcaaagagatagaggaaatgccgccggatgcatttgacgatggcagcatcaggacggcaccgacccctcgggcgcaacaaatggaagagttggagagagaaatatccggaagcattgtgccggaactgattgtgccacaagtgatcgtaggagggaaacggaaagaggaaaaaggggaggacgaagaggaaaagggagacggaaggcaaaaaggaaatggaaaacggaaagaggaaggaggaaaagggaaagaagaaaaaggggacaaagaagagcaaaaaggaaaaggaggggaaaaagaaaacggaaaagggaaagaggaagaggaagaaggaaatggcagcaaaacatcggcatttttgcaagagaaaaccgacgaacacaacgccaatggcaatgataaggtattatcgtgttagaagaatgaatctgaacagaaattggttaagggaacaacaaattccaaggcgaaaaacgaaattcgaattgagccaattgggacaaaaggacggacaaatgccaaggcaaagcctacggcaattcccgcggaggaggcagaagagggccgagaagacgagcagaggcaacagcaagccgaagaaaagccggaacagcacgagccggcgtcgtcgagtgccgtgccgccatctccgccacaaaggcaacggccgacgacccccgaggcgaagagaacggcacggccatcgacagaaatggcaacaacggaggaacagagggaaacaccaaaagggaaaattgacaaagaaaaggcaanncactcaggaacacaccagcagaagtgagccgaacattcattctgatcacgaacagcacgaacaagcccaattcgccgtcccc

SEQ ID NO: 6510 - DNA, 937 bp, Heterodera glycines
catcgaacggcgttggggggacagagcgggagacggcgcaatcggaatactttgccaccagtcaagtagaggcaaataacaaattaatactaattgcgaaaacaattagcaaatgtttagagaaatacgaaccgtttcagcagtaataacaacggaaatggacggatttgaggagaaaaacagaaaagaagagaagagatggtgaaaaaggaggacaaaaaggagaagaaaaagcaacttttagtgccattcattgttattttattccaaattccaaccgaacattttgcttaaaggacgcaaatgcctcagtttcataattttcatttttgaaaccatccacacttttgtatgtaaatgaattatttttgaataaatttataaattattaataatttttaattattttatttttataattttgattatatttttgtgggggtaaaaactttaaataataataaattgcgtaatttttttttctttaggggtttaaaatctgaatttgtggggaacacccatcaatagggttccaatttttaggctctaagaaccgccaaaataggtaggctttaggctctaaaaaaccccaaaaataggctctaaaaatggaaaataggctctaaaaaatcttaaatttagggggtgtaaaatgacaaaattcattcaaaaaggtaaaaaaaaataagtcaaatcagtattgagttacattattttttaaattcaaaaatttgtccaaaaaaacttttaaagacgatttttgagaaaatttttcatttcctagggcgtttattttcagaaatttttgggtcgattcttaggggtgtatttttaaaattcccaaaaaagcgattcttaggggtgtatttttcgtttttattgcatttttgttaacaaattttgggcaaaacgccaaaataggcaaaaatagctcttt

SEQ ID NO: 6511 - DNA, 1085 bp, Heterodera glycines
ttttctgaagaaactctcaaggagtaggcaaatcttttattcgttatcacgacgttttgtcctgctcaatgttgaattacacatagttcttggtcattatttaacaataatatgtgtgttaaatttaatgaaaaaacaatctaacgcgtaagcaaaatatgtaaaaatgtgttatcaaataacataaaaatggggttcccatgggattatgaattctttccaattgtggcagatttgtttcttaatttaaagaaggcattaatccgagtccactcacattcgtcatgtattctgtcgtatacatcaataccgggggaagtccgcgtgcacctgcaacgcccatgcatccattccggccacaatgtcccgcacgatgaaccggtcaccagataaatggcctctgccaaaacggtccacgccgaaacgtcctggcccgtcaaaatacggtacattgacctttatttttatttcctatttaaaatttggcgaaatgtttttttctcgttgtgtcctatgatcgaaattgaaaaccaaatttcaggctgattgtaagcttaattgaaacagttttcttactatgaataactggctgcagaatattaagggtcaaatcacagaactcgccaccgaagttcttaacgatgccaccgaagagggacaagtttcggtctccagtgaacttcaggtcagttttgggtaataaaaagttgaaattttcctatttattctaagacaatatttcaggttgagaaaaagaaatgtgccgaagtggaaaggcaatttttgtcagaaaaagcaaaaaacgaagcattagagaagagagtcaaagagttggaggagcaattgttcaacacaaacgaagaaaacgacgccataaaggaaaagttcacgggaattgtcagcgatcgggagcagcaaatacagcgattgaatgtgaattaattggcaaatttcaaactaacttttaccatttaagtgggaaattgaacggttccgatattctgaagatgtcgaattcaaaaacgtacatttgggaagtccgccaaaaacgggctcattttccacgaatgcggaggtttggatat

SEQ ID NO: 6512 - DNA, 6283 bp, Heterodera glycines
ttttgaaacgcctctctcattcattggtcccattctcttctctcagatttgtaccgcgagggcggcgcgcgcaatttcagctgcaaatggagcagtcgcaacgcgcgttccgcgtacaattgtccgctgaggggactgttcgtgccggagcgcaacgcgctcttccgccgacagaatcacaaccatccgatgccaatgacagcgggaagaagcggtaggaaaagccaaacgcaccaccgccgagatggcatggaaaaataaaccctattttttaatttttggtttagaattttaaaattagccaattaaatatttaaaatcaatacatttttatatttttttcaaaaattccgactttcggggtcagatttacgacttccgaaaaatttttgggcctcggaatgccatcactggcacacacccaaaagggcttgtcaaaacccagcgaccttggactgtaatgtcctaattgaactcaagaaaggaattcccgacactatgtccaatttttcgagattttgccttttttgttataagaaaaggatggaacatcttgccttttaaggacatgcagtggtgccgaacagtgtctatgtggacagaaagggcaaggattggcaactgttggcggaaatcctttccaagggcgacttggcgcgcgtgtgccgtgccaacgggctcgtccagaacggcccacgcaatgtggtcggcaaggcgtacttcggctgtcagcgggcaaagagcggcaggacgacgaacgcggcgggcggcactctgtgcccttaccgcgcgctgtacgtggccaagcggaaggccattttccatcggttggagcataaccatgaacagaagaagaagctttgatggccaaatgacgagagaaagagagataaaacatttcgtatttatcgctttatcaaattccaaaattttcattcattcattaattgtccatttatgccgaaacatcgatgacacattctgctgattataaccatttttgacttcctcatacaaaacaaatggacagattaggaaaccaactaaagaaggttaccaaaaaccgaaacaaataaacccgagaatgaagtagcgaaagacgggccttgtcaaatttacaaatacctatatttgtcacacaacaaatactaggtcgttgcataaaaaagggcgcttttttataatggcttataaaaaattttgttgttaacataataaaatgttttatataccgttttgttaagctaattgttgtctacaaaatagtatattgattttgttcatatctcaatttgcaaattttttatagctaaaaaaatgaacgctaataaggagcacgcacataagctattacaccagcaatttaaaaaaggcgaaaaagcggcgcctgcggcgcgaaaagtgaatgaatttctcggcgcggatgtgatctctcctcgtcaagcgcaaaaatggttccaacaattccgggcggggagaaactgcaccaaacgcaaacttggtacataagccaactgcgggcggtggatatcgcttaccgcatccggcgccagcagggccaatttgacggtcccctactctttcaccatgacaatgctccgccacaccgttctcatttgacaacccagtacatttcccagacattgaattggaatgtgttgccccacccgccttatagccctgacctagccccctcggattaccacctttttctttctctcaaaaactttttacggggtagacgcttcactgaagacgccgaggtcgaggaggcggtggggcagtacctgacctcaaagatcggcacagattttttcggtcgcggcattaggaaacttccttctcgttggagaaaggttgttagggtccagggaaactattttgttgagtgatattgtatttacagttgttatgattgttatttttgatattttatttataaaattttttttctaaaaaagcgcccttttttatgcaacgacctagtacaaatataattgattatatttaatagacttatttttgaaaaattctaaaatatgaatagtgaattagaaaaatcaaatgaattattttattatcaatctatactttctatttgggtaaaaatttatttaatattaaattatttaagcaatgaaagcgaagcaaagcaaaaacaattaaaaatttatatcttcaacaataaagtctttagaaagtggtggcacacaccttagaagactatgacttttttatggagaacgaagcattttaaaaatttattaaataaaaggtacgaaaattaaaatatgaatttactaatacactgtgtaacattagaatagggacaccctattttttgggagtttgaccacttcccatgagccgatcgagctgaatttttaactgtacgtagcaattctgaaaatatcaagattctgaaagtgagaaaccgaaatgacgacggaaaaatattttacgaattttttttccaatggggggtgtaacattagaatagggacactttggaaaactaagaaaaatctcaacaactaccaaaaagaaactgataaaacaagctaaataagaaagaacaaatcttttttcacatttctgtttattttgcgtacagaaatatgtcttttggggagagttatgttgaattttctaagttttcaggagaaattaagggccaaaaggcttaaatcgcctctaacatttgcccaaccgaatcaaactgacagcaatcagctctaagataacgtacagacatcctttaagcattttttattcattttatgccataaaaaaggcattaaacacaaaatttttgcgggtgaaaaaatacgaaaatctgagtaaattcgaaaaaaagattctaggaggttgggaaaaattttccgtagaagatgattatgaggaacagaaagagcacaaaattctctacaaaatggcctttgaatgattgctctatagcaagtattcgctgaggggtgccttgttaaataccgactatccaaaaaaagacccaattcaaggcatttttcctcatttttgagacatccattttcagcaagacgcgccttcgcggagacgcgacgtagagacctcattcaatgtgttttgttgaaattcaaaaaaaaaatttaaaaaaaaaaatttgggtatcaaaaattatgttccaccctaagtacttaattatttttctttaattttctgtactctgtttttgttaaagtttttaccggtaaacataatttctttttactttaagagatcgaaatttttatgtcttctctacattcgtattcctgttgggctgatcctcgaatgcaaaaacaatatgaacgagaattcgtccaacaattttcagcctcaaaatatttgtacggagtcagcagaactaaatacgaagacgtatatgaatttatcagaaaacattaaaaattttatatacctatagttgatcaagagagtcggaaacacctgtggtccaagtgacaaaataaggaacgtttttgaagtgagggactgtcctatcaatggagaatgggttgtgagacttgtggacaaggaacaaaaacgcattttacttcctctggaggatgttttttccgaaattgaaaggtttgttcgcttcaacgaattatgtaagaatccaaattcttaaattcgaccggtcccaagtcctcgataaggatttgaaatttggcttattcattgttttaatttgtatggtttttttccattttatatgttgatcaatgttcaactatatcgatcatttcttataacttaacgacttggttctcaaaaaaacccataatacccacggaaaattgaaaaaaaaagttgtccaaatctgtcatcagatttgcccataacttaaattgcttcatatatttaggtaggacaatatttatgagaggcacaaatcaatagcaaaaaaaataattttccaaattaagtgttcatgtgaaaggtaatcacaaggcgaagacaccccttcacaatgagctgaagcaaaattacttttacccaactaagccaatggtggaattcgttttggacagatgtccggtttgcttagaaaagaagaaaaagcaagagaacaaagtgcccgatgaacccatccattcgaattcggcaccgactttggaatcgaacgcgaatttccagcgcaaacaattggtgtgatttgtgttttaagttaatctattcagtggttcctaatttcagaatgttccacaagacccaattactgaaagccgcaaaataaattctgctgccaaaactaaaggctctgtttcggttgaagcgactgcggagagggcctttactatgattaaaaatcttgtcgactcatcgacttctaacggtatgaaaagggatttgtttaatcttcgttggacatgacccgatgaaaacccaaagagggaaccatttgatttacaataataggtcaaagtaaataacatgtacctatttggtcaatgaccctgcaaatataaaatagtttgaaaattaaaaaaacaagggtctctctttggttttgctttttcatcgggccacttaatctgcaaaagtgccgtgctctctattgcttttcaaatctttcactatttagtgccttcttcgtctcgtggtccacttgctccaccccattgtgtgaactcgccgattcctttttttgaaaaacctttgcctgcgactgcccaatcgaaacgcatgccgtcatttttgacgtctacgccagttaatcgaaccaattatggaatgcccaaactgagtaaggttgttaactcattgtaaaaatatccgtttttctctttagttcctcccgagtcttcccccttttctccaaatctgtccttaccaaatgacagcagaatgtccgtggacagcaatttcatccattttctgaacgacagcaataatcagcctggcaatcagtattcgaatatcatccgagaagaaatgatgatgatgaacaactcaacgacaggcgaaatggtccaaggcaacagtaaaaggacagacaaagggacggaaggagtcggaagagggagcagcggacgacgaaaccaaccgaatttggaggagaaagcaccgggttggcacaatttcaacatttaggggttgaaataatggacgacgcgttttgggaaggacaagagtttcttccacaatcacttcgttatttatttttagataaatcagtgcgtccgattggaggagggtccaatgtttgccaagaaatgccagtgcaaataaaaaaagtttgtcgagaaattattattaattgcgtagcgataaataaattattaaggagcccgaagatttcgagtttgagacttctcttcttgtcgacgaggaaataaaggacaaaattctgcttgcgctcgaggaggagaaatttgggggttggcgcaaaatgcggtcgaggtccaatccgacgcatcagtactattacaatgggaggacggggacgagccaaaacgaactgccgaagtcatgggaaaaggaaatccaggaacgagcgaaaaaggcattaactaaaatgacagtccaaaccaactttaattttactgtaggagtccaacaaaaagtgtttatcgtccgacaaagcaaatcccgcccaaagtgagcactccgtcgcaagcgaaggaattgcggacaccaccgatggcaatgccaagaaggctcctgagtttgacggaggtccttttcttccatacataaggggacggggtcgacgcctaattttacgaagcgattctgccatgtaaatcaacgatttctttttattttgcttttaaaagcgttttttgcggcgtttttaaacttcgggaccagaggggtcccatggtgacgataggcgccccccagggtaaattttttgataacagattttgtctgggaatttgagccaatttataaaacaattttcgagagtcctcttcccctcccccctctccttcatttatttttccttcctcttctcggcttcaccgtttgcaaatttagataaaaagatcgctgaagaagtttgtagtacattgccctctgaagtttctgtgacaaggcctttcaacgacactaatgacgtgatgaatatccttttccctaatgacgggaaccaagaaaagtctgcgaatgatccgacaattgaatatgacggggatggagttgagggacatctgtgaacagttccaacaggaatttgcagacgagttccaaattgaggctcagggaatagtgccactcatttcaaaggacggaagtcaaaacatgcaccggc

SEQ ID NO: 6513 - DNA, 4431 bp, Heterodera glycines
gagccattacttatgcgaactatccgcataagtgtccagccctaattagtcaaacgggatggatgcgttgtccacgatgttctgggccacatccgattggatacccatgttttatacaacctctgaaagatgaacctactagcggaagaagaagaagagagagaagaatgcgacaaccaaatcatcataatgataataataataatgatgatgatagtggtaacgatagaggccatgatgatgatggtaatgaagtggaggaggaggaggaggaggaggaagatgatgatgatgatgacgcaaacagtccaaaaaaggcagtcaggctttgtttttttgatgctgaaacgtcccaggatttaccacttcaacttcgcaccaaggttgtacagaagcatgtcccgctgctcattattgctgaaataatctgcgaagcgtgcataaatgaaggaatttcggttcactctggtgttggacaatacgcaaatggatgtgtgtgcagtccccctgtgggaccaaggggacgtcgttggtgttccccgccatttttaaatgtgcctggagatgacagtgctctaccagcctatgtcaattacaacccacgaagactgtttttccatagttttgacaatgccaacaatgacccagtggacgactttatcaattttctcacgggaactggcccgcatggtgtcaaaacaatttgtttgtctcataatggtggaaaatacgacattcacttgatactggagacacttcaccggcgcaatttaccaccaaagcgtatttgcacaacagggctgaaaattttttcgatgactttgaaggggaaccaccaacggcatgtggtgttcaaagattcgctgaacttttttttctgtgagttggatgccctgccacgcacatttggattgaacaccgaagttgcgacaacaaaaccgttttttccttatctgttcattcggcgtgaaaatttgcatcaaagattgcgtggtttaccgcccaaagaattttatcaacctgatcacatgaaagcacaaaaaagagatgccttttttcattggtgggaggccgagaatcgcgcttcacgctttcaattacgtgaacaactcatcctatactgtatgaatgacgtggcaattctacgcgaaagtgtgctccaatttcgcaaaattattgctgagaatacgaatgggctcgatccgttcaaagtcgcatccacagcagctggccttgctttggcaactctgcgtcgctgctttcttccaatgaataagctggttaacgcgccagagggtggctatctaagggggaggagagcatctgctgaatcggcacgttacattcgttactatgaaatgacccatcctggggtgcatgttcaatctgcacagtggtccattggtgaagctaacgttgaggacactggttaccgccttgatggattagtcacacgagatccacctgaacgggaccttgccattgagtatatgggctgcttttatcacggtaaaaaatgttattattctttttctttaattttcataaaacggtgaaggctgtccaaaatgttacgtaaacgacagacaacaaaaattggcgggtggtaagacagctgaagacttgtatgaacgaacaaagaggcgattatttgaactggagaatcaacatgggtttgaattggaggttgtctggggatgtgaagtgaagcaacgccttcgagtagacccagaatttcggcggctgtataatgcctcatttgttccaagaccacttgatccaagagaggatgcactacgtggtggtcgcactgaaccatttattcttcattacacatgcaactcggacgaggagataatcctcattgatatagttataaaataataataattgagcaaaaaaaattttaattatttatttttaggtaagcttgtatccatatgtgatgaaggcattctcgtttcctgttggtaaccctcgtgttcttacccgtgaaacgctactaagcccacccacgtcaccgcttccctggtgctcacccgacgctaactcattctcgggcctgttgtttgtccgtgttcttccgcccgatcctgttacacgcccgctaacaatccctttgcttccataccggacgacagacggacgcctaacttttccgctttgcgcgcgctgtgctgacaatcggcaacaacgggcatgtcaacacgttgatgcagcaagggcatgggtttccgcgtaattttgggaattttttgcggctgtcaatctcttttttttttgcctcaggtacactcatgccgaattgaacaaagccctacagcttggttataaagtagttgacttatatgaggtaaaaaaatgactttcagtgcatcgagcctttaaaaaaaatataggtttggcattatgaagagtgggacaatgaactttttcgtgaatacgttaacacttttgtgggccttaaagtacaagcaagcggctggccacccggttgtgattccgatgaacagcgcagagcatatgttgatgaatttaagcggattgagggcattcagctggaccccaacaaaatttcaaacaatcccgggcttcgaatggttgcggtaaataatttagagaaattttcgtataaaatcgagtaaaaaaaaaaacagaaaattctggcaaactcactctggggaaaacttgcacaacgagttggtggtacggaagtacgttatactcggactccagctgaatttcatgcactgctcgaaaatcacaccatcgacattattgactttcatcacgtctcacctcatatggaccgagttgttgtgaggaaaaaagcggaatttgcgaaagcgccgtcaaccaactgcctgccaattgcaatttttgtcacttcatatgctcgtctacatctttacagctatatggagcaggtgcagacattgggccataagcttctttattgtggtaagttcaacaaaaaaaaaaacgctactttctcattgtgatcattttcaaagataccgactcaatctattacgtggcaagcagtgggagacaacacgtacctgaaggcgaagcgctgggccaaatgaagagggaacattgttcgaggcgaatatatgaatttgtgtcgggtggcccaaaaaattatggctttcgtcattgtgatagcgcaagtggggaggatgagcgtgctgaactgaaagtccgaagttttcgtctttcttattccgcccagcaactgctaaacttcgagtccatgaagcacattgttttggaacattacaacattgatggacaaatgtaattttttttttacaattccacaaaacactccgcctaacattgtatgccacagtgacgatgtgcttaacatggaagatgttcatgttgttccgggaagcagtgcgtcaataagaatcaaatttcctcaaattggtcgaactccctgttcggacctgtacacccacgaagctcacaaagactatcagccccattatgtgaaggggcgcattcgacccggcatgaagacaaccccgtttggattccgagaagcgcaaacagttcagcatcagcaggggcaagaattacagcaatttaatgccgatgatggtggtgatgatgatgatgatgatgatgcctttttaatttctaaccgtcctgggtgctcaacttggaatcaataaaaaaaaatcagttgcaaaaacaaaaaagtgtttattacaattggatgaacaaatcaattatttaagacagctaagaatgaatgcaaagcgtggttcaaattgtcctgccttttagatcctgttaaaatgatttttccagaatgataggctagacaagtgaccaaagtgtgatcgtcgtcgtcgtcaatgactattttacaacgcatggcgggaaaaattgtaggatcatatttgatgttgcggaacctgtgtgggtccagtgttggtaaaaagttcagcatggacaatcgatgtgataaagtgcaagaaccaacaacatttgtaacacgtaactcgtggattcctagctgggagcccaacgcatgctgcaccctccgtctgattttttgtgcctcgcgcaccgctctgtctggacaaggcacaccagtcaacacagcacgggctgatcgaaataaaagacatgcaagagtgcgttttttggggagacgtagtcgtatgatgattgcatgaaatcgttgggggtcgtactcggaattgaagccattttttgcaattttcaaaaactgctcttttgtgaaaggcaacagctgtaatttaaacaccgcggtacaattttgaataattaacattttttatctaggagaaattaaaaaaaaacaacaacaacaataacacagcaaacttaatcacatataaaacacccgatgcgtattaatcaagcatcttttatgacgctcagacactcaag

SEQ ID NO: 6514 - DNA, 2461 bp, Heterodera glycines
caattttttgcaaagaaaaaattggagttttggggggccggcggtgccgataggcgccaccgaaaagttttttcggtatttttaattaatattaagaaaattgttcaaaatttcataaattttaatcctttccccccttcgttgttgaattaactttttaaatttttacaacgctcggagtccccaattccccgaattagtgtcggggagtcggggcgcggaataggcccaaaaatgtcggggatcggggtcggggagcagaaaagtagaataaaatattcctttcattaaggtgaccaatcatccaaggaatcggcaaaatatcctcaatcgcccaccattaaccccagtcggcttcaccaccgtcgtcagcagcaccaaatgcaattgcactcccagcaaaagggcgaaagggggcacactgtcaacagcaaagcccacacagcgaacaataaagacgccaccatggctatgacgtttatgcttgggaaggacaacggcattggcattgttggtgtctcttctgcgaatgccggaacatcgctgcccattgctaacaatgccatcgctacttcggcgtctgagtcggcgagttgttcctccgtgacgccttcaccatcgccttcaccgattgttgccttcaatgctaccaacgacgctctcaattcatcatcacctttcgtaactctccgtaaacagccgtaaggggggggggagcgaaataggcatttgacttaataatttcttttttaggtttatcggaataaagctagttttggtgataatttaattgttgtaggcaatgtcagcagtcgacgccaccgactcagccaatttcgagcagggaaagtgaagcggagcgtaaggccaagtcgcgtctgaagcgttccacccgacgttctacgcaggtgtacttcctaccttacttatattaaagctcttcttatttgatttagggtgttactttggaacaattgggcgaggtgaatatgcgaaatcattcaccaaaacaccacggacgagcggagattggcaaggaacagaagcaaaggatggcaattggacatgacggcagctgcgaattggtcagttggaatcatcttttctttttcatgaagcattttcaagcaaatgccggcttctccctgctcgtctacgtcgtcgtcctccgcctatttgacggccgcctctcaccgcgccgttgaccaacataattccaaagtcgaacgcgtcaaggagaattacaatagcactaaaaatgaagctactccatcgccctcttctaccgcttcactgattgacgatttggaaaagtacaaagaattgtacgaattggaacggagtgaaagcgaaagactgcggactgaacggcgaatgtttgaacgacgtatttcggcgttggaatacgaattggaggtgagatttagtgatttagagtaattaataatgaaaaatgaattcagaagagcaggcaattgcagacggacaatgagaagttgaaggacgagaacattgcgttggtccgagttttggcaaaactttcgaaataatctccgggtccccttttacactgcaaaaccccatatgtgatgcacttatgaattcgaagaccattttttctcgtaaaccaaatgtcttcctttttaatgtcagtagtcagtccgtcttccaaaggtccctaattttcaagcacaaattaactcactctcctaccaattcactgctgctaattttgtttattattggacttttaataaagttgattttttatattattagggaattaagctgagtattatttttccttccaatgttccgattagataggctatctattatgccaaaggcgtggtcattagtcaaaaatgtgacacggagaaataatttattatagcgaccatttaaaaacatcacagttaaacgggagcgttcatattaaaaatcacttcttcaagagcgtcttttccaccttaaacgcaatcttacaaattgtttcaattgttttattgcatttaattcatcacctcttcaacgcttctcatctgctccatttgttggtactcattctctggcgtcgtcaccttctcccaaatagtgcgataagcgccgacgatgtgttcaaaagtgcgtctttggacggactcgcggattctggggattatttagaaacaaaggttttcatcgacacggatttgtcataccttgcagccgagatttttatcatctgaggacagttgtaactctcggggcagtcgaggaacttctcaaagcgaatgaacgatgcgcggacccgcgaaggctccatgttggggattttggacaaaggacccttaggtttttcatggattctccgtacactttccatgccttccccaacttggttcgcctgatgcgcttgggcctttgtgtacagctccaacatgtcgcattccaccaatgccttcgacgcttgctcgcttac

SEQ ID NO: 6515 - DNA, 1917 bp, Heterodera glycines
  unsure (1)..(1917): unsure at all n locations
gtgtctgcgacaattttgttttgggtttatcgtagaattaatagctaatctctttttttggggctgaggggaaattctcgtataaacataatttttgccaaaatttactaatctcgggcttggcccactttttccctccccctcgtttgactaatcccacaggcattggcatcttatcaacgggatctttggtggaaatgtgccgtctgttgttcttccactcggccccatcgcggcactgaacatcacaccccgcccgtcttcgccatcggcccaccgtaccatcgctcgccctttggcccaagcccatataaaagaaagatggatgagtctcgagatcataacactttttcctcatcgttttttgccttgctcttcgaagatcttcaactctcgacaaacccactttttcaccactttcgcttataaattttgggaagaacaaaaataaaaaatcaaacaaaaaaaaattgtctctttatttcatttcgcctttttgcattgctcacattttctttgtcgttttcccttggccacctttgggcctccgattctttgcttttccagcggctcgctctgccgttggccacttggtctcgttccccacccgaacccagcattcctgattcgggccttcccagcttattttgccgttgtccataccatttttgggcatcccaccaaggccagcaattcctctgacttgggtactattgttgttctgattttttggcccctcgccttttgcccatatcctttttttgggcccataccccaccgttaggggtttcattttctgacaccttttgccaccttttcaagtgcaggacgaccggcggggaatttatcctccaacacccattgtttgaagctctcacagaacacgggcgatgcgtcttcgatgccgtgtttttgttggcacgcgacgcgttcaatgtcccaggtcaccggcgtaatccgatcgaccattccgttcggaaatgccacattttccgaaatccaatcagccaattccttttttgggaaaaaaaatatttttgaatgtgtacaggtacatttccggaaaaaaaattcggaggggggcaacaacggaaaaaaacaatttttttggtctttggccaagatttatttttctagtgtaattttaaaaatttaaattatcgctggagaaaaataaaaatttgctcacaaaatggcatgaatttccagaattttgtttatttttcctcgtacattttaatttagggggggggggggggngaatgaaatgtttttcattgttaccactttaacgttgaaaaaacgggtttggagtttctagaatgattttttttaatgactatttctgggctgattatgactttttatttttcgcataatcaagagctgataaaaagacattccaatgaatattggtaaaaattgaaatttctcatcatcagtggttaaattgaagcttttatgaatttgattttgaagaacaaattcattaatacattcgtaaatttggtttcaaatatttttgaattgtttcccgatgcttgttttgattttggattttatgaaatttaacttcgcatttgtctccaaagattttgccaaatgacttttgatgtaaattttttattttctgatacaaatggactaattagggcaattataattaaaataaacagaataacaggaataaattcattttttctggatatatttcccaatatgaattaatataatttttatttaaaatccaaattatcattttgtccattaaaagactttttattcatttgaaaaaataaaaatttacatgaaattccggaaaaataacaattttatttgaaaaaaagaaaaaaatgatcctccttccctacacatcacattaaaattaaaccaaaaaatatttcttaatttaatttt

SEQ ID NO: 6516 - DNA, 2626 bp, Heterodera glycines
tcttttgcgtcctcaagaattgccggatgcgtcgcgttaattggccggtggctgcgttgatgaaatagccgccctccgtcacggtcatcgacacaattcgaatgttcggctgggagagttgggccaaaaccgccgcggaatttgccaccggaaggaagtcgatcatggaagcaacgatctgaataaaaaccaatggaaatttaactaaaaatgggaaattaatgaaaaaaagaaatttgacaaatttcgaaccaaatctgaaaattacaaatttatacaaatgttatgtaaaaacaaaaaccaacttaaacacaacgacggaaaattgacatttgtagttttagtttataagtacctgacactcattctgacaaattccgtatctttatggtccctagtcccaaaaagcttgacctaccatagacgagaaaattttcgaaaaattctataaatgcaatatttgaattttcattttttaccgaatttggattcgaggtttggaattggtcgaaatgagcagcatatcaaattcgtgataagactcagataccttcgcaagattttttgaaacaattttttcaagaaatgaagacacaaaaaaatttgaaatttcttttggaggaagggtacattattcggtggtgccccctcttgtcaccgtggagatggtacacaaaacacaacacctgcaccgtggtgttgtgctcgtcctggctgaccaccgtcgtcatgaagtcctgtccgctcaggtagcaacgcattcgctcgtccgatgccctcattccgacgccaacgacggcccagtccaagtcacggcccgtgttgaacagttcggtgaggtacaaagcctgaaaaccaaaaaattatgttacgacgaatagaaagaaaaggaaatttcaatttaaccattttttggttatattgtttatgcgttttaatggcaggagagttcgtttctggacccaatttcaaccattgtttcaaacaaaaacaaaattttggccataactttttttcttatttggtaaatgtctttattcttagcatcaaacaaacgcttaaagtctataaaagttgttatacaggtaaaaatttgggctaaaagcaacagacaaaaaattattcataaatatactcgaagaaaaactgaatttcatcttttctattgtaatttttttcgttttgtctgtttttgctcttttctggtttttataattcccgagactttaagctttcgtttgataccaagaagataggtttagactaataagtaagaaaaaagttatggccaaaaaactgagaaaattggacgcctaaggcaatggagtcaaaaaattctgaaacaattcgtaaacaaggctaaatgaacttgaaatttgagtgtaaattccaaaaactcgcctgatggctccggtggaaattgccaacgccaaagtgcacaatgccggccgacagggcgtcgcgcgcgaagttcggcaccacaattttcgggttggccgctgcaattgcgcccaaattgagcgcagacaatttcaccgtcgttttcaaagtgtttaccattataattaggctaaacttcgattagtaaagtgaatatggtttaattttataaataacaacaatcatatcatccacgagccttctttctatcaacataattcatgttcatttgtcagcggacaaatgcaaaaattcgacaaatttattatttattgtgtgtgtaaacggggaggggggggggggatttttaagcagaattataaaaatgctaagattggttttctgaaattttagaacgatttgcgaaactctagcttaaaaatgctcttttggcataatgtttgcaatatttaaaaatataagattctgttacaggatcctgctaaaaattagaatttccgggttcctgtaacgcttatctaaaaatccttaataaaaatttttaaatgccttttttcatgcctttttcgggcttttcgtgccgtttcatgcctttttttcaattttttggtgcctattttagtgcctttttctcgatttttggtgcctttttagtcgtgctctaataatgggaaaaattagtgaatttgtattattcgctggaatgaattttttccaatattttttttggtgatcactttgctaatttcaccgcatctgaatttttttttttttttgcatttttgaaaaatagaagcaatttgttaaagactccgtaattgatcaaatttgaacgctttttggggcgttttgggcccaaattaaaaaaaaatacagtgaaaatcggggaaattttcgaaaaaaatccctagggggttgtgaaattttttggaaaattttaaccagcccattggaaaggggacaaaatttgctacgatatgcaaaaaccgcaagtctctaagacttaaaccaaattaggtatgggcacttcaatttcagtgttggtcattttactgtaaaatgcactattttcttaagaaatacagtactttttgaagacacagaaattgaagtacccatatctcagcggatgtaagtcatagacgcaccattcaaaaggcaattggtagagaattttgtgctctttctgattggcctactcaaactttcccaaaaaattttcaca

SEQ ID NO: 6517 - DNA, 3526 bp, Heterodera glycines
ggggacctctagagtcacttttgtgacttgtacttaattttatttatcttatctctactttcgatcttcaaatttattttttctagaatagtacttttttattttcaaattcttcaattaatttggagtgatcagaatttctagtgtacggactatctaatttggactgtacttttttttattacatgatttatttcgaatagtttttgactttttgctgtttgttttgttttgaattgtttgttattattttttgaaatatccagcttaaactttatttaataaaaattccttttaacaatttttattcaacaatttcacaatagtatctgatcgccttcgaaattagtacaattaatggtatctgatcaccttcaaatgaattatgatgagcttggatcgtcaaggacaatttctggtttgacagaatcaggattgtcaacaatgtcgaataattttcgaatagattttacagaacgatttagaccaagaacaaatcgatcaaagtgggtataattgttagacaatgtgtcgaattgcaatttgagtgtttctattccagatcgagtattgactcgtgcgggggaattgattaatgcttgaatttgaccaatcagacgttgattaaaattggaggctttttgagccttttccacagaaatcagaatggaatttgtgcgggtgtcgacaattttcagcttcttttgcaattcttttctcgtggtgtgtgagggcagcgtcgaacagttgctgtttctttgtttggacacgatcaagctcgtccaacacttctgtgttagtcgtcggatcgaatgaatcaaggaagtcctcgaccttttctggtgctcctggcttgatagaatatagtgcacgagtatattctattaagtctttgtttttattaaattttattgttttcttgacctctttaattgcccggtcaagttgacgttttgctgcttcttcctcttgtttgaagtattgcttgagttcagcaatttgttcggccggcaattgtctttttgctggtgcaaatagagctttcggctttttcaatggcggtgtcgaagattttttcacttcggtcgttgtaatctcgtcgcttttggcagcgattgatgaacttctcttgccacgtgtttgtggttttttggtcggctctttgtccactgaatttattaatttttattgttttttttcttttctgatttaaatctcagcgtttaaatcagactttttggtttgaagaacagcggttggcagaagaaggtttttttagttgtttcgcagaacagtgatgaacagatgaccggcttttttgtctgcttgatcagtttggcagctgttgtcgttggtggtgtccgtccttgtgttgccgtgttcccgggtcgtggcaccaaaatttgacgcgaccgcaaaggaatgaagtcggagtcaaaatttattagaaaaatgggacaaggcaatggaacaaggacaaatggaaatgccggaaaatttttgatctctcaatcgattgtcgattgttgatccgatgcctcaattggaccaatcggcgaccagtagttaagtcgtattgtgcgtggtcaaaccagtagtcaagtcgtatttgattggtttgaagtggtgtcggagcgctggattagagctgagacttgtcgaggcatgccaactgaggaaatcgggctccttaaatacctggaaaaatggctggggaaaggggaggggttgtttggggcccatttggccatttgtttaccaggcccatttgggccgttttggtcggttgaattttctcaattttatcttttttccaatttagcttttcgttaatattttattttatttgaatatttatttatttcccattatttcccatcgttccaattatgttttgggccttcttcgccaaacacaattggtttcaaatgatatttttggcttgtttgtcgccgatcgtcaattctcattatttgttattgctttccttcttccatctctcattttctcattctgcatttcccattttattatatgttgaatttcatttttattaaatttatctttattaaaatttatagtaaaaaaccctttatttaatttaaaaaatttatttaatttagaacagatttttctaggtagattttattattttattatatttattttattcattattttgcattttgtaggcaaatttttattattttattttagatttatttttattaatagttttgtattttttcggattaaatccgacaggggatagacatgaacggcaaacctttgctggcaaccgcccgctccacggtggatgagcggcgaatgaccggcttgcgcacattagcaggagtagtgcctataaagtaagggataaaatgggcacgaacagcaccgacgcctaacttatctgcaaccgccctctcaactgagggatgccgaactgctgcagcaggacgccgaggcaccggcggcgtagctcggtcagcagtggcgatcccctcctcgacgagacgagctagcaagaatgctgccggcggcgatgctcatctccgctgcgatgatcgcatcttcagccacaacttgtgccatggctgcttcagccgcactagtgtcggcactgtggccaggcccaggggagggggaattattcaccttcctataaatgtaccatttttatacatatattacttgtaaaaataaaagtgttgccacatacaaaataaatgcacccccttacatacctgatgccgcaaattgctgtttcgcaaccgcctcttgcggctgctgcggcggcggcgagacgctctgccgcttcttcttcttacgagccttcacttcgtcagtgtcgccgaggacgaaactcagcaaggccgggtcgtcccccaagcggcgcaattgttcgtcctcaccaatcatttgcaggattccctttctgccaatgtgacgcaacagcccacgttggaacctcaacagctcaagagtctttcaaagggaatataatatttacccgtattgtctactgccaataaagattaaaaaatacctgtttgacctgcaaaaccacctcattgttgcagtcctccaggtgctcgacgtcctttcgcagttgtttgttgtctttgttcagttgactgatctgcttatccttctgggcaaccgcccagcgcaatcgacgctttgcttcggaactctcagcatactttaaaatgttataatgttggaagtattgttggaaaaaaatacatacgtagtcctgcaactgtctcatctgagcggcgacgcggagcgagcgctccaccagccggttgcagagcacgtttcgctccgcctcagatttggccttcctgccggtgatggcgttcaggtcgtccgccccagcgacgatggtgtcctaaaacaacaagaattatacctttattggcagttgcccacaagggtattctatgtacactaccccttagcctgggactgtcaaaggcaaacgaacctcctcgaaagggtaaatttttgatcaaaaatt

SEQ ID NO: 6518 - DNA, 2095 bp, Heterodera glycines
atttattgttatttttataaccatttgaattgttatatcttctttgttgcatttaaaaaatacatttattgtttgtttttttaattttatgatagaataaaggcatttataatcttaattattttgtaatcatcagaattgagtgtttctattccagatcgagtattgactcgtgcgggggaattgattaatgcttgaatttgaccaatcagacgttgattaaaattggaggctttttgagccttttccacagaaatcagaatggaatttgtgcgggtgtcgacaattttcagcttcttttgcaattcttttctcgtggtgtgtgagggcagcgtcgaacagttgctgtttctttgtttggacacgatcaagctcgtccaacacttctgtgttagtcgtcggatcgaatgaatcaaggaagtcctcgacctcttctggtgctcctggcttgatagaatatagtgcacgagtatattctattaagtctttgtttttattaaattttattgttttcttgacctctttaattgcccggtcaagttgacgttttgctgcttaatatttacccgtattgtctactgccaataaagattaaaaaatacctgtttgacctgcagaaccacctcattgttgcagtcctccaggtgctcgacgtcctttcgcagttgtttgttgtctttgttcagttgactgatctgcttatccttctgggcaaccgcccagcgcaatcgacgctttgcttcggaactctcagcatactttaaaatgttataatgttggaagtattgttggaaaaaaatacatacgtagtcctgcaactgtctcatctgagcggcgacgcggagcgagcgctccaccagccggttgcagagcacgtttcgctccgcctcagatttggccttcctgccggtgatggcgttcaggtcgtccgccccagcgacgatggtgtcctaaaacaacaagaattatacctttattggcagttgcccacaagggtattctatgtacactaccccttagcctgggactgtcaaaggcaaacaaacctcctcgaaagggtaaatttttgatcaaaaattttacaaaaaattgaaaaaattttaccttccaatgggcttactctaattttcaaaaaaaaaaattccgaaccccataaattttttttggtaaaattgaagaatactaccaattttgatttttcatataaattatatatatcattcgattagtctcgatgagacaaatcgaatgaaggagtgatctgatcaacttgccgaaaagatttttttgatcaacctgtaaattgacttagcaaaaattttcagctctttcctacaaaaaatgtcaaaacattgtggcgcttaatttttttctgttaaaatttcaaaaaagtttgtgattataaacataaccttaacggtatatttaagaaattagaacaaaatttgttcactaccccaagatttggaccctccaaattaaaacagttctgataaaacaaaacagatacaatctatatgttcaaaaaccctttttgttcgaaatcgagtccgggcttcgcagttgtcaaaatgaataccatattcgtgattagcgacccagaaaactacgagaccgggaagcgaaaaacccgagaaatttcccgagtcgggaaccgagaaccgagactcgcacatctctaaaaattgcaaataattttgacttttaaaaatatatgtgccatttctaattaaacttttttataatatgctaacaataaaccttttaataaattaaatcttttccaaaattctttaaataagttcaaaatttttctcgaatatacccagaatatgcgtttataccttaaaaaactttaccaaatcataaattttaacgtaaatagctatttttgagccaccttcttcatagcatatgcgcagaagaaaaatacgaaagcatataatttattgttatttttataaccatttgaattgttatatacatattttgcatttaaaaaatacatttattgtttgtttttttaattttatgatagaataaaggcatttataatcttaatttattttgtaatcatcagaaaaatatacatcaa

SEQ ID NO: 6519 - DNA, 714 bp, Heterodera glycines
aaaaattatttatttttttttttgtttaatttggaggtttaaaattttatgtatctccaatactgatttgggcttaattgttaatttttgggaaaaaattttacgcttttacacaactaaatgtgaaatttaattacttttttactgtcgaaaaatcttctgtcgaaaagtcccctcctgaattttataatatttctgtcgaaatgtcttttgctgtcgaaaagtccttctgtcgaaaagtcctctgtcgaaaaatccactgtcgaaaagtccggcgccccccttctttaccaagcaaaagaaataaaaaacttttttttttaaattgaacaatatattttcgtcgttttagcatttaaatgcaagcgaaaaatataatttaaagatggataaactaaaagttattttcgatttttaatttattttcctaaataaatttaatatattttatattttatcttctgaatttagtaaagctagaaattatgaaacaaaaatgaaaagctgtaaaccaaaaaatgtggaatatgtacgaaaaagtccaaaatatttgcatatgtaatatatagaaaaaccccgaaatatgtaaaaatatgtaaataaaagtcccaacttttgttcgcaaacacaaaaaagagtgtttttcctattaattaggattttcaaattttttggcataatttttgtagcctaacaaaattttttgaaaataaa

SEQ ID NO: 6520 - DNA, 2637 bp, Heterodera glycines
  unsure (1)..(2637): unsure at all n locations
tatantttttgatttaataattgtaagttatataatgcatcttcaatgcggcccttcccccaattttttttattttaatatacctcaataagaaaatatttaaaaaatttccagcgaattttgccaggagttaaaaattttaggggaaaaaattatgcaaggatttaaatattaccattttgtcaaggatctgctgcaacaattcggacaaccgttggggcttccgatgctcggtaagcacttcaacattttgtttgatgttgtggttggcgctcagctccaacgagccaacagtcaaatggaccggctgacgctgaaagtcggcggccaatttgcgcacttcctttggccatgtggctgagaacatcagtgtttggcgatccgtctaaattccattttaaaaagtttttggaatattttttatgggtaagaaatggtggatgaccaccgctgtatgagaatttgcggtgttatgaaaaaatctccgatttttcaccaagaatgatatatatataatatatggcaaatttttctctagaatgatacatattttttcccgtaaaatccgaaaaatttccatgtaggatattggaaaggggatgcctaatccaaaatccaattatgatccatagtaggttggacccaaaaaggatttacaaaattttgactcaaaaaatggatttacaaaacacaaattgtcattcaaattgctattcatagtcgcgaaaaaacaaacccgaattttcgagatgatttgccgaatttggggctcaaaacccatgtccaacatgcggtccgcctcgtccagcaccaggaaactgcaccggtccattgacacagcgttggaactgatgaaatcgttgagtcgaccgggcgttgcaatgcagatgtccacgcctaaattttggaaagtttagtgacgaaatttcaggaagtttcgggttatgttggcccgactcccttcggaagaattacatttcaaacaaaataatttttttttgggggggggggggggttccgcactaccaagcaacaaattttttcttaaatgtcgaacgtaccgcgcttcagcgcacccatttggggccactttgatgcaccgccatagcacgcgaccacattgagccgcatcagttggccatattcacgggccaccgtctccacctgttgggccagctcacgggttggcaacagcacaacaacagccggaccttcgccaggacgacgctgctgctgcggtcgttggttgttcagcacgtggacaatggctgaaaatgaaatggtaatcaaagaaagaaaaattgggtcaattaaaacttatgtgcccagtatttttcacaaaaaacccgggacagagagttcctgctaattgtaagtggatgcggaaccctggccatgtccggtacatgtttttatcgggcccggcaaaaccggaccgccactttttgaagaatccggtttgactggttttggaaaggtcgggccatggaaccggttgtattaaatgccaacctgctcggcgaaattttgaccggtttatgatcaattcaaaattcttcatttttcttagtttcattgaaaatatattttttatataatgggtaatgaaacccatagctctcttcgctcccattttcgaagaatacaaaaatttgttgtcctaaaagtttgtttatgaacatgttgtctgggttggttttgagtttgactgatcaccgaacatgaccaccaattttgacaaaatcagaaacatataccatgaatttggatgaaaatttattttatttaaatgatggttgttttgtaaaccaaacaacaggatgaaacttgaaattttttgaataacgattaccaccggcggggcacatttatcagcactaaaaaatcggggaaaggaaatccgaaacctggcaaagtgaagcccagcgttttgccactgcccgtttttgcgatggagatcaagtcctttccggccagtgcgacgggccacgaaattgcctggatggcagtgggcgcggagaacacgctggacagttgggcaacaattggtgctgaaagaaaaaaaaatgagtattttctgtataaaattttagatgacacgagactgtgtcaatgcaatttaggaaaattttttgtaaaaaattttttctccgcattttacgaatcaccaaacacaataaattttggcatttattcaacttgagacaagaataaatttagaaatcggggattaaaccaacttatcccacacaatttatccatatcccaattcatccatacacaaaaatgcctcgtccgcattgtgccgtggatgtgttgggcatggctcaaaaaatcaataatttttgaaaatcaaatattatttttcggttttgctattggtcagtgccaataaaagagggacaaatcaccccaaaaaggtgccccaaatcaccaaatgcaaacctgggaatgtcgactcctggaaactggtcactggtcctgtcaaactatggccactcagtttcacttcgttgtccgccatccatttgtccacctcggcccttggcacggttcagcaccaactcgtgggcctgataatttgtccttttgatcgcccgattgagtggcaaatgatgacgaagccgcctttggctg

SEQ ID NO: 6521 - DNA, 1814 bp, Heterodera glycines
  unsure (1)..(1814): unsure at all n locations
ctttagaaggtatatgcccctaactntggatcgttatccgaaagaaaatgtcaaaaatgaaaccaccgactgataaaacccagtttttttccaaaatttggtgccactggtggcattttttgaataaatcatcactattcggagaaacttatattgccaaaaccgtaggttggtctcaaaaaccaatacctatgaaattgaattgccatcaattccaatcgaaatccttggtaaataataaaaaacaaaaaatggtcgttttcctaatttatgtaaatggtttccacttcacttacactgttccaattactgttattgttgctgtaatttggttgtccactaaagaaatttttgttgttgctttgggtggcccccgctgggcttggctggccattgaaaaaatgataattgcttgtattcagttgcatttcaactgaattaaatcgtcgtccaagtttgatttactgatctgaaaactaggccaaatcttagcaagatttttatggattttgtaaaaattcttggtatcaaagaaagcttaagcacttcaggaaattataaatatatacaagaaaagagtaattctaacagaaatgagaataaacggaacttagtttttgaaaaagttgtggcctaagaaactgaggatagtcattgactaattgattgattgatttgacgcataaactggaatagaactgtacatcatgtatatgtatgtttatcccatccatagcaagtttacttatttcaagacttggactgatttgacggggatgaggctaaaatcttagaaagcaacagtcaaattttacaaattttaaaataattatctagaaagatattttaattaatttagagtttgagaaacaaaaagaaaaatattgattggattaagcagcagagtcagaaggatttggaatgcaaatgcaaagaaattctatgatgaaatgcaattagtccatttctgttttctctctatacgtatccccggttgcatttgttaaaccatgaatttttttcaaattttatttgtctctgttttcaatccctcctcctcctttcacacactgtctaacgaaaaaaaaaggaaaataaacatacaagtaaaagagactagagaaaaaaaacctctcattttgacgtaatatttctttatctctgttagtagagaaacccgaattttctaagctctacaacttttttttttaagattttcttttgaattatttccttcgaatgaaccaaagattgtcaaattggttggcaaaaaactccaaaaattattttaaattttcatggagcggacttgaacctccatccttttttttacataactatactaaaaaacaactgtgccaaacatataatttttttttgtttacgggctcattttcagacgctttatccagccgtagatttaaatttaataattttaaaaattacaaatttggtaaaaattttcaaaatgtttaaaatatttttttacaaaaatatgaacaaatatatttcctcaaccagtggaatctaatttttcaaacttcctgttttctgcctcgcatattaaaattttcaaattcttttggcgcaatgaactgcaaacggcgtggcgatgatccatctatgtatgacattttggcacaaatcgtggcttttatgccattctaagcctaagtaatgaatggcacgcattgaagtactttttgcgcgccattttcttcgttttatttttatttttggtgtgcctgccaccccaaaacaggaaagcatcctccttttgatattctttcataatgaaaggatcatatgtatcc

SEQ ID NO: 6522 - DNA, 2467 bp, Heterodera glycines
cccaaactccgatccctgaagtgccaattttgattacattcatagatggggatattgtgccgatttgcggtgattattggatcgaaaagtccgaaccagagtaatacaaaagatgatggatgctaaaatttctgaatattttaagggtactgattttccaagttactaaattacaggtctccgatacatcccttatatgtcaaaaacatacgtattttgaaaaaaaaacggtaaatgtttaaaaatggaccgacatgcattacctgacgctccatcaaaaaactgagaaaaaaaaatttagatggctaaagaacctcgtcagtggaaacagggtccaggagaactgaccaagaaaggtttaaaaaatggattaaaaaaaaaattttttttttttaaacagtaaattgaaattcgattaggcatgggccaattgtaccgacttggccaatggattcgtcatcgttatgatggaggtgtgtatatataagagaaataaaaaaagaattcaaactaaaatcattaaaatttgatagaaatttcatggttgaaaaaggcagtttaaaaataaatattttaaaatacccaagcctggggaatccatgtttttcgtgccgaacctggacctggattttttttttcatattttacctggaccttgctttcctggataaaaacgcagaaaaatccaggtccaggaaatgtccaggttgcgcaaaattggcgtgaacatggaccttgtgaccaaggaaaaatccagacctggacccaggtccagcggtcaagccctaagcaattaaaaaaactttaaaactataaaaaataaaataaaatttcaaaaatattccaagttacccatgcttgattgaaggctttttatcgccggattacaatgttaatgagctctatgtgcggagttccgacttcaaccggacactgatgtccgcacaggcgctgctcgccggcctctatccgccgaggccggacagagcgttcgaaccgggcctgaaatggcagcccattccggtacacaccgaagcgcgagagaccgaccgagtaagcaatgccgaaaaagtgtgccgaaccggaacttatttgttagcgctatttttcggcaacccgaattttggcacagaaatatcgggtcggctcgcattatggcgggcgctgtgttcgtccttgcttcaaaaaaaaaaacttggaaatttaaaacgaaaatgtttttgaaaagactagaaaacccaaaaaaaaaatgacaaatttctcagagaaaggttttttttttcttgttttttctaaattttttggatttttttgggtcattcttagaaaggaaaaaaattcttcgaaaaatttcttggaaaattattaacatttggtaattttctcaattcgattctcatgcggagggaatgaactgctccgtttcgatgtatttgagccttgtcttgtcgaccattgcaattgaaccaccaggtgatctttgacggttcgaattgtgcgccaatgttggaggaggaacggcgagtgttcagcagtgccgaagtgaaagaaattgagcgccaaaatgccgactttttgcgcttccttgccatccagtcggggttcgaacaaattccgttaccatttcgcgaaacgcgctacgtgttcgacccgctgatttgcattgtaagagacgaacggaagaagatgaattggttcttggattagggttgtccccgtcgcgctgtgacccccaaatcccggactagacaaatccctccatttatatccaattccggaaaacgatacccccccccccccctcctcctaccattcaacattcgacttcgaaattttcgggacacaaaattcggaattcttggcccccaaaaagttcgaaagtcgtaactccattatatatttataaattcttcgactgattttgtgaagcccattaattaagttgaaaccacggcataataatttttgaaaaaagtatcgttttcctttttttcagaaatttaacggggagggcaaagaattgccaaaatgggcaaacgaatcagtaattgaacgcatttggcaactcaacgacctttcatccaactacctttacaagacaacaaaattggtccgttttcgagccggtgagttttttttttaaattttcgacaaatttgttagccctttgtgtttgctatttgcctgcaaaattttataaaatgtcatggccaaaaatagtttttcataaaatgaagctaaaattattttcaaaaaatacacccctaagaaacgaaaaatttctcaaaaattcattttccaaaatttaatttatttactttattgaaaagaatttttaattttaaaaattatttatctcaatactgatttggcctaattttttacttttttgaataaattttgtcattttacaccgccctaaattcgaggctttttagtgcctattttcccattttttttgagccta

SEQ ID NO: 6523 - DNA, 782 bp, Heterodera glycines
  unsure (1)..(782): unsure at all n locations
taattaattagtatntaataattagggctgccaaaaatatgtacaaaaaagtggtcaaaatatgtacataaatatgtaagaaaaatcccgaaatatgtgtacaaaaaaccccaaatatgtaccaaataattaagtaaaatttttttaatggttattattttggaaaaaaattcccccctgaatgataaaataggtacaaaatgtcataaaaatgacttaaatagacttataaaatcaccttttaatatttaaaaaattattttttggtatttcaggcgtacattttcaaaattattttttcactaaattttcaaaaattttcaaaatgtaaaaaatgaaaaaatgtataaaaatatttgccgaaattttggatttattttttaggatttccaaaaaatcttcaaaatataaaaaaaatgaaaatatatatatgaaaaaaatccaaatatatataccaaatatgtaagaaaatcccgaaatatgtaaataaaagtcaacttttgttcgcaaacataaaaaagaaagtgtttttcctattatttagagcatggacgaaaccaggaaaaaatatgtatttacataaaattgacatccctattaattatatttggcataaataaaaataattcttttgagaatgattcatttttttgaataatttaatctgattttacgaagaccaaaaatgaaagaattcgtcgctaaattaaaagtaatttgaaaaatattaaaaaatagacgaggcgggggcggaaacttgtcggaatggatgttggattagt

SEQ ID NO: 6524 - DNA, 1148 bp, Heterodera glycines
ataaggacaaagggtaaccctgaattaaatcataatttgaatttgaattatttaatttatcaaaatgttggcacttttccccccccccgcccctttcccccctttcattttcattttgtacgatttgccccccccccccccgaaattatttatttccaaataaataataaattcactcgccaatcactgtttgttttgttgatctacacataatgttgtaaatagcaattccatccattctctctctgctgtgctgtattattttgcctcacttttcctccgttgcgatttttaaattatttttttatttttattcactgagaaaattaatttataaagaaataaaaataaaatattaaaaatatttctccgtttgaatggtttcctcgtttttggtccctacttttgacaatggttttgcttattttattgtcaatttatttttagcccaccttttttgtccgatttgctcacaaaacattcaatgcctttttttggtttattttattaataaattattattaaaaataatttaatttgtcttttttatttttgttaatgcatttgccctcccaaacaatgctttatttcattttccaattgtcatttattcattcattcgtttattctttcttttttgcgttctttttccatttatttttttgcacttttattttttccattttttaaatagcaaaaatcagcagaaggaattgagtgggttgactttgtaaatcgcattagtggtgcattatttataaatttatttgccttaataatgtaaattaaaaagggaattcgaaaaacggcgaattattttattttgccacggccctcccaaaacaaatgccaaattctcccccccccccaattccttcgtcattttgccctttccattaataatttgcgtgtccttttttggctttgatttggcccattttcattcatttttcattttgttttctcagccaaacattcgttgtcatttcttcgcatttgcagcacattccctcccccttttgtgctccataattttcataataataataataataattattattattattattgttattattttattattcactctcatattatttaatattttccccattttatggtaaatttaatctcccccctcc

SEQ ID NO: 6525 - DNA, 2120 bp, Heterodera glycines
cttcctccaaccgacccatccgctcgcaacggacgccattgaaggaaatcatcacgctggacgacccaaccgagctgcttttggagagcgggaggcaaagactcatcattgaacacgcacctaaccagtttatggcccggggcgaggagcagtgcattcacgcgatgcgcgcgttcatcacgcaattctctctgcgacagaccacggtggccaccatgacgggcgtgtcgcagccgtacatctccaaactgctgaatggaaaccacagggagctgtcgctgcgctgtcgaaagaacatctactgctggtacttgaactgccgcagacaccccgagaaattgggtcagtctggggggcgggcgatgcagcgcaacgcagtgactcgtaccctccagcgatgttcgtgcaagacccgtgcacgcggctggagacctctgccgagggcgagttggtcccgcaacgtcgcgagcgttacgtgttccgacccgtgcttctgcgcgttctcgagacgtacttccaaaaatgcccatttccggacatagcgaaacgcgttgagatcgcaaatgcctgcaacgcgcacttgcaggtggacaaaagaggtggggaggcgagccgacagaggccacgacggaacggtcggccacagttttttaatccgttcgcttccgtaaggtgtccaactgatgccgaaggaggtggtcactccacaagtaatcgccaattggttcgccaacaaacggaaggaaatgcgccgacgcatgggagggacggaagcgggacggagtcggttgaacagtttggtaaggatggacactgagcactctaagcactcgggcctattcagtcggcgggccgctccaactcgccatcgtcgcccaactcagccgcacactctcgggagggccccttcgagttgcgccagaataaccaacagagtggcaacgtggacgaggcagtgctggcacattgtgagcagctgcaggcaatgccaatgtctgtccccactgcgtccaatcagcagcaaatggtgtaaaagccccacttggtcatggtcacccgccccgttcagcttctgatcagtgatcagcccgagtcagtgccatccgcagccgacctggcccttgtgctgcccccgctggggccccctcaccacccaaactgctgcccacccgcaactccgctgctgcccccaaatgttgtgcagttctgcccttccgtggaccagcaactgctccatctgctccaggcccaacctgtggccaatcagctgctgttcctccagcaattgctggtcggcacttcgtcagcagacaatgactacctcaagcaggaccagcaacatctgttgatggccattcatgaccaatgaatcatcacccacttttagccgatttgttttgctttcgcactttcccttttctttgctttttctttcgatttaaatacaaccattaaatttgtgttaattgtttcacattttacttttggtgaattttgaagcgttcctttctcatccgtggaaacaaatcgcatttattagcacttaatttgctaattcgacttttaaaccttcgatattttcggcggcgcccatttttttttgcatcacaaaaaaattcgaaaaaattgattcaagaaatctttgaaattattttttggtgaatccattcagtcattttataaaaataaaacggaaacttaagtccgcaatttgcgagaattcaatgacaagtatataaaaattataaaacaaagaattttcggcgacatgaagtttgggcaccagagggagggatttaaaaaaataaaacaatataaatatataaaatgttatatgtataaagcattaaaatttggcatccctttaacaaatttaagtcgatgcaattgaagagcaatctcataaatactcactctaacgggtcgcgatgatgcaaaccctctctccctctctctccctccactctttctttctttcttactctctcacctctccctcctttctctctcccctctttctctcccccctccctcctcccactttctttctttctatctctcgcactctctcacctctccctcctttctttctctcattctctctctttcccctctctctc

SEQ ID NO: 6526 - DNA, 1661 bp, Heterodera glycines
  unsure (1)..(1661): unsure at all n locations
atattaatattttcaaaattaanttatgttacgtttatttcggttttctaaattttatctctcgagacgcaaacttcgttcatgttagcttacatcaatcgggcattttttgagtaacattaacttcagtgcgtctttttttatcttttttaaaatttatgcatattgcagtaattaatatttgaattttttcattagagattaataatttatttaaatagctgtttaaaaattgaaacaaaaaatatatcacagataaagggaccgaaacatatcataattataaataactaaaccaaaattaatttattttgccaaatggataattacagggctgccatccgtccttgaatggcaaggacgtccttgaaattgggccctctttcttgaaaataaaaaatgtccttggatgccaaggacgtccttgaaaatgaacatttagaaaagttttaaaaaaattcaaagaaatttgataatttttgtaattttcaacaatatttggattaaattatggcattatgtcaataaaatgcaaatttaattgcccaaaatctcaaaatttggtcattttttggacaaaatctactaacaaacagcattaaaaatacaaaattcttccggcgccgccggaccctcccctatcctcaaaattaaaaaaaaaagcgcgccgtaaaaaaaccttttttgtcaacaaaaaaaaaagtcgtcgcatggcttaaaatcgcaaaaattaggcagtttttggtgaaaatctgttaacaaattgcattcaaattttcaaaatttttccccggcggcgcctgtcggcaccgccagaccccccccccctttttcccggaaatttttggaaaaagcgcgccgcaaaaaagcgtttttaaagcagaaaaaagtcgtcgcaaatgaggaaaatgatcagtgaaaacaaaaaatgttggaaaaaatccattccggtgaaaaatacaagtcatttgaataatattaaccatttttcactgcatataataaaaatttgaaatgtccttggatttcatgaattttccccactatgtccttgcaaatcggcatacccgtccttggaaacggagcatggacgatgggagccctgatatacttgtcattgaattctcgcaaattgcggacttaagtttccgttttatttttataaaatgactgaatggattcaccaaaaaataatttcaaagatttcttgaatcaattttttcgattttttttgtgatgcaaaaaaaatgggcgccgccgaaaatatcgaaggtttaaaagtcgaattagcaaattaagtgctaataaatgcgatttgtttccacggatgagaaaggaacgcttcaaaattcaccaaaagtaaaatgtgaaacaattaacacaaatttaatggttgtatttaaatcgaaagaaaagcaaagaaaagggaaagtgcgaaagcaaaacaaatcggctaaaagtgggtgatgattcattggtcatgaatggccatnncacagatgtgctggtcctgcttgaggtagtcattgtctgctgacgaagtgccgaccagcaattgctggaggaacagcagctgattggccacagggtgggcctggagcagatggagcangtgctggtccacggaagggcagactgcacaacatttgngggcagcagcg

SEQ ID NO: 6527 - DNA, 1892 bp, Heterodera glycines
aattcccccccccctcatttgtcagggttttctgcgatgcattcctttggcattttgtccaatcctttccccaattataaatggcactgaccatccaaaatgtccttgagattgttttattgtccacaaatttattcccggtttaagtgcacatttattttcttattgcttttccttatatgtaaaatattcctcaaaaaatgggctaatttaaaatagcttaaagcattaaatatgtggacatgaaaaatggcataaattttttaaaaatttagcgcatttttttttcaaatcgcaaacaatgcttctcctcattttattcccatgcattttcccccaaattgcttctctcaatttcaattggtggcatcaacatcctcaatcgaggcatcagtcgataaaaaatagtaatttaattttattatttattattttaattttaattaaaattcaaaattaaaaattcattgtttatagccatccaaaaatgctgccccaagtatgaaggaacatcgactccaatattttgctgtgtcgacgaaatgttcgacaaggcaccggaatttccccaacagatgtgcaaggacgacaatgttgaaatggtaaaaaaaattatatttaattaaaaaataaataaattataaaaaatattaaaaaagttttcctaaatttgtgagatggtaacaaaaaaattaatttgtatttaataatatttgtttaaaaattattttagtatttaaaataagaaacaaaaaactcatagttttatttttcaaaattttttttttaaaatatttcttttaattaattttcctgaaaattttaaaaagttttttatgtaacttgtatacatatatcctagaaaaattaattgtaaaattgaatttgctcataaaatttaaataagaaattaaaaaaataatattttttattttgcaaaaatattttttttaattttttactttaataaatttctaaaaaaactaaaaataaataaatgattattaattaattcatttattgttttaatttcctacttatttatttaaaaatatattttgtaaaatttatttattataattaatttttgaaaaagcattaaaattatttatttatagtttttttaattttaagacaaccattttcaagacgataagttgtgcgcagactgaattccatcgtcagaccggccgagtacatccgccgacggacatttgccgtaattttaaataatttaaattaaaaataaacaaaaaaaaaatgttttacgattttttgaaattgcttttccattttgtttttcaatttctctagctttaaaatgtttaaaaattttctatgatatgcaaaatgaagaggcagagaaaaataaaaaaaattttccacgaaatttgaatttgtttttttaataaatttattttaaattaatataatttttttcatttccccaggcaattattgctgcgatttgctgatgaatgtccaaggcccggtcaaagaaactgcctgctcccgaaagtgtgccatggcatcgtttgccattggcaaaagtgtcaacagacagctgatggacttgagtaagatgggctgcgatgctgcaaaaacgcaatttgccgtaagtttctcagtactttttaatatattaaattgaaatttatttatattatttattattatttttattttccattattttaaaaatgaattttacattaaaagtttaaaatttttaggccttggaggattgtctgaagggcccggcccagtacttcaacgacaacagcagaagcagcaccaccaacgacgacgagcagcaggacgtggaaatggcaaaaatgatggcactgaatgaagtgtgccgacaaagggcggaggagcaaaattcgtaaaaa

SEQ ID NO: 6528 - DNA, 2299 bp, Heterodera glycines
  unsure (1)..(2299): unsure at all n locations
tgcaggtcataantgacatnnttttttgcccataaaaataattnagggatggaataattaattaatttttttggcaaaattgacacgcgaaaatagtttttttttttttggatttgagaaattctcatgaaaaggaagaaattttgaatttcaaaattttcactgacaaaatatttaaatttgccgaaaattaattaatttgttgtcccatcacactttaatcataataatttttcaatgtaaattaattaatcattttaattcgcgttaattgtcatcacttatgatatttgattgtttttttccattttgtcgttttgctttaattgacctgctattaaaaaaatgaaacaaagtattttgtgtccacttttattttattgaaatctaaaaaaataaaaaataatttgtataaaattataaaaaattgacatgctaaaaaaagcattttcaatttgagaaactctcctgaaaagcaaatttttgagatttgatacttaattaatgatttcgaaaaaaattattattattttaactctaattttaataataataataataattttttattaattgtcagtaaaaatttttgattttcctttaccatttcactttttatacatttatatttttggattatttcgcattattattttgacggataaatcgaaaacaaaaattaattttttttttttgaaaatatctaatttaattacttttattaaaaaaatgtttcttaatataaaataatttatatattgtataaagaaaattaaacaaagatagtgagcttttaagataaaaaaattcaaatttcttgacgattttgccgattttttgaatcggtgcctttatccgtcgccactttcaacgattgggttaaacgtgccgcgcctttccccgttttttccgcctttgaacgccattttttggcacttttgcttcttgtgccctcgtataggtcattagcattgattgttatcgatcggctgtttggcctcctcgtgccgtgctcagcgttagcaatggcacatttgctgtacagcaaatgctcggaatgccgtcggtccgtgaaggacaccaatgtgctgttgttgcgctgggcggtgccaattctgtgctaaatttggttacgaaaagcgaaagctaatgagctttgtttaattaggccgccaggggtcattagacattgcggcatacccagtaattaatgatacgttgttaaagaaataaaaggctcagtcttgcggaaagaacatgccggatttgaaacagtaatcaaaatttaaattaaaaatgtcggggaagtgagcgtaagggttgagctaccgcgcttaaatttatttcaaatttcctacttttggcttaggccaagccaggctgccatccaccaccaaaaccgggtcagccaatatcgatacaaccttaaaaaaataaaacaaaattttccaaaaattttttaggcctcaaaattttgtgaaaattaaaaaaattaattgtttcgcaaccgttgtgtgacgatggtgatcagtgggttaacctgtaaaaaaacgtattggtcgatcagcttttgcatttgactctgatcaagctcaccacaatgccaatgacgagcagataataagaaatgttgatcagtaggccgatcagtggcgatggcctactgtctttgtacagaaatgtgatgccaaggtacagtaaccggtacggtaggcaggtggcgaatgtccacgcggtgctggagaacacgaagaacagctgcttgaacaggcgctgtgaaaaggaaaatgatgtaggaattttgagaaatttaaaaatttttataacgtaattttaaataaaaaattctaataccgtactttttgtctcatagtcaaaatttttgcattttcaaactatgaatacaaaatttttataatgtatggtccgaaaaagcgtctttcaccgtaattttttagtataaaaaattgaataccgtagctttttcaaaaatttttcggctcagttattttcttcatttccacaccataagtttaaatttaaaatctatttaaataccgtagttctatattttaaaaccgtaatttgaaaaaattttgaaacgatttctgaataaatgtttttgaattatactttcccattttcacaaataccgaacgcgttgcataagccgtggatcggattcgtgttgaattccgcgcgatacagtagaccctagtggtacacgatcaacgatacggtaaaaatcgacacccgcgcggctggagatgaacagataagttttgcagacaattcaacg

SEQ ID NO: 6529 - DNA, 1863 bp, Heterodera glycines
tctttaataaaaaaaattcaatattttaaaatacaaagcagtgaaaattgcaaaaataaaattaaataaaggaataaaatataaatgttaaattaattgcaatatttgcaatcaaaaatcgttttttttaaatttcaaggactaattgtttgttcaaaaacagtctaaaaaataaaatttttctcaaaaccaggctttttggcaaaaagtgccaatgccaaccaaactgatcattttcagatacttttaacacagatttaatttagggatttattcaaaaaataaaataatgaccaaattaaaaggttcagcagaaaattatgatcagtgatagcatcaaattattataattaataagatattatttttaaaaattaattaaatttaatttactttaatctccatgaatgagtaaagtgtgatcaccaaactgatcaaacaaagccatgacaatgcaatcagaatgagaacccgatcgcgcttcaccagctgataatagtgcagaggacggccaatgaaaatcaatttgtcaacctgaaattacaaaaaataattttcattaaaatttatatgcaacaattttcaattttttattttcaaaaatcaaaaaaataaataaatttaggcgattttttaaaacatgaatgtttaagatttttcagtttctctttgcattcagttttagttgaaaatgttggcattttattaattacattcaaataaattaattttttaaatttttgtaattattttgacggtttttaaaatttaaatccgaattatataatgaccaaaaaagttttacgttaatccacagaagacataggcaactgcacagttgaggagttacaatgcacacataataagggtgacaaagtgaggccggcagccgattgatgtgtaaaaatttggaaaattaaaattggtaaagtttttgaaaaattcaaattttattgataaaattccgaaaaagttactaaagacaggtccaagacaattgagtcccagtctcgaggtcagaaaaatgtccaaaaaccttttttgatatggttgatgaacaaacaacatgtgccgaaaatagttggggattaattaggggtaatttttgaaagaaaaattagtttttgacatttatataaaaaaactgtgaagattaaggggaatggttttaaaatttagtttggaaaataaaatatcaatccaataaaatttaaattaaaaaacaaaaacttatatggtctggtcagcatgtaaaataggcaagtcaataaatcagccaaagtcatgctgattacaatgatctgggatgggattaaataaattaaaacaattaatttaaaatatatttcaaaattttctcagctgatcacaatgagttgggtgggattaaatttgaaaatcaaaattttttcccacttgtcttggcttatccgcagtgtccactttaagcagtccgatcaacagaacaattgaattcaatgcagcaccaacgaaaccttttaattaatcttttatgaatttaattttaatgccaaatcaatttttaaaagtgatcgaagataatttgaatgggttggagggaggacaaaatgccaacacgacaaaacaaattattgaataatttgtattattttattattcccttgttttttggcataaaaactgcaatataaaaatttaattaattttttaattcgtaataaaatttttttgccgaaaattaacaaatcctccaattttttcttgccttatctcggaaaaaaggcctaaggtattatttgtcttccagccttattctgaccaacaaaaatatcgtatcattcattcattagtcatcatcataccgtttataaggtagaaata

SEQ ID NO: 6530 - DNA, 4457 bp, Heterodera glycines
actagaactaaattttctgatcaacagcatttatctgaatacatagatcgttttcgttgatcaatgattcgagaaagattttcttaatcggttttaggtgttggtcccggccagcagtggtacattgaaatatgagcgtgttgaactgttttatcacagtgagccaaacacgagggcgcgttttcttcaaattacaacggaatcgggaaaaacactttcactgacaggcaattttccattcaatttttcgcggaatcccgcccggaaatgggaaagaatttaaataaattcgattttttaattaattatttatagtaaagcttatttaatattaaaaccttttcttttgtatcttcatttcacaaaagataaagcaacaattaactcaaaaataatagtactcgcctctcttcagctttgcatatgcttccatttgggaactgctctgaaatgcgtgctaccactttagacatggaaggcatcgagcgatggatgcaaaagtcaaggtgaacatttttacagcaattcaatgtttggggtttaatttatgctgtatcaaaagattttactgtatatacaaaaaattatttttaactttttttttgaagcgatggaatgaattgaacttttttttgacagatttgtgtataaagcttccgttggcgattgtgtgttcactttggatgatcatcaacatagcaagccttccatgaaggtggagaggataaataaggtacaaagttatgtgtcagcatgctgattgccgatttccgacatttttaatttggaatccgatttttgattgctaaattttttgagtcttcggaatcccaattccaaaattttgtaggccatcggaatgccgttttccgtttatcgaaaacatccctggtacatattcatagtttaattaattccacttttttcagattggtcgtattttttctgtgggaatttataggtgtcgtttataataattataaaaaagaatacttcaaaatatgtctattttttgcagtccaatgacaatggaaggtgctttgatcacgaatggaattctcagttcatgcttctcccaaattgaaagccatacaatacagaaggtagaattaagtttgcccccaaaaaacaagaaaacaatatgaaccaaacatatttgttcagctctcattcgatttgctcatgagtatctacaggacattcggctacatgtcaggtaaaatttacatggtttcaatgacactagcatcaattgtacccagctttttaaataaaattttaaaatattttcttggccattccgaagtggccaccatcattttgggccacgtgctcttgcctaataccgatttatacgagattttaaaaatatataaataataaaaagaatggacatttgcagtgtgccctttaaatctgaatccctattatacatataaatctatttttacttaaataatttttttccaatccctaagaattttctgaacggtctgtgcgaacacaagccatcccaggacttgtggaactacttcacactttcagccgttacataatcccatttgccaaatattaacctataataatataattaattgtttgttgttataatatgtgcaataatcttttatcattttttcattttgatctcgggcagcatacccaaaaaacttaaatatcaattagtctctttttcttaattatgttcatatatatatttgtatatttttaaatcaactattcaaatttcaacaaaaaatattattgttattattattggcaatttaagacaataaaacattgaacatatttatctatgccttaaattctaaaatttatgcatttgtttagctatttattataatttttaattattattaaattaaaatttcaactcttggtccataaatatttatttaaatgttaaaatagtcttccggattctttccgttagtctgtcgattctattgaattttactctgtttcactttatgcatattcaaaggaaaagcatagaagcagcagcaacagcagcaggcattcttttccaggctttgttccgctgcttctccctcgccccctccggcagttcgctgcctttggcccactctcctcgccccaggggccctatttgcgtgtgagaaaatataatggtgatggttctgttggttggtggttgtggataaaatttggcacgaaaagccgagcatcgaccaaagacaggggaaggcatggccagggcggcaaagtcggagaagtgtaaagaggaaggaacgtgagtgggccaaaaaagcggcaaaaataggggaggggtggtggcgcttgctgtgtatttatacaatccaaagtcctcccatggccccggctcggcttcatctcctccctacttttcctcaacttcccaatgcctttctccccatcttcaccaatttcgtgtattcatttcctattctttgcgcctttgaccacacaacttttgtgccaagaacaatcatttaattttgtcaaatattctgcgagaagccaattaaaatataattttgcattttttaaataattaatccctgtgaaatgatttatgtattagcattgtgaatacatgaatataattaatattcagcgaaaatcgattcaatttattttgttatacacgaatcaaaagaacagtagagcctggccttgaccctggatcctgtccaggccaaacatgaaaaaatcaaggtccagattaggcacaaaaacctggacttcttggatattaatcaaaaatttaaattgataaataacaaaaatttttaatttaaggcccaaaatgttcatagtttgcgccactataaaaacaaggattgttttttctttattactgctattattaattaattaccctcaatgttttgtgatgggccgacatcgaatcattgcggcagaggacatggaaacagtgctaaatcgcctgcgcccttctgtggaccgatttgatgccaattttcagcgcacatttaacgaatacggacgtgtggactccgtgcgtgaagtcagttcaaaaatttgttttatttttttacattgtaaattattttaaattatttaatttttaatttaattaataattttcttttctttctcccttatccatcagaagggatttctgaagatttttgaccccattttccaattgatttttttgggcaactgaatttcattttaataattttttgatacttggaattcttttttgaaaaaaaaaaagtttggacatggaatttcgattccgatttttaatataaacaacccctcatggccataggaactcaagaacacaaaaaagcagggttttcaacatttttgttacaactttttgcaaacttcacaaaattttggaatgttggcagaataatagaaagaacatttaggattatcccatgattcaagaattaaaaaacccaaatccccaagtgataagccaaatttatttggttttctgctgtttctttcagcttcttgaggacagtgtggtgccacggtttactgtggaggagcacggtcgtgttgattttgtggacgcttttcaacaattgcagttacgcattcaacaattttttgacaccaaaattcgcgcactccaccgtttggtgggcgccgctgaaaaggcggcacaaaaagtggacatggacaaagtgatgggtccaacgttgggcagtgagggacgctgccgggaccaaatgagggcattgaatgccagctcagtgcacaacccaagcatttggaagaaaagcaatggaaagacgaattcgggaatccatgttggcattttggggatgaaagtgcttggggacgataagcaattaggacatggaatattcaagactttttgagagattatttaagcattgattatgattttttgaactatcaatttttgtgcaagcacttggcatttggcacaaaacaggcattctcacacatattaatttaaaatttccatgccatatgcgccctgttttatgtcgaatcgggatattagccaatgaatatgaaatagattcacaaaaaattactttatttttttgttacattgttaatcaattattaaccaccgtatttactaattcctccgggctctttggggttgctgtattttagggaatacggtatcttagagaatgcttctaatacttttggaagataccattttcgtctacattaaaaaagggtattgagtcttaaatttggttggtgcgcaatcttaacatgccaatttcgcgcgtcacaggtggcactggacgtgtacaaatgcagcggtgcggtaaagcgtgattttaactggaccgggcaagcgaacatcgaacaagcaatggctgaaaatgcgcaaaatgatgcgacactaatgcgacaatacattggcacgtacagcgggctaactcgaatatttccaggtcttcccaattgacacctgc

SEQ ID NO: 6531 - DNA, 3346 bp, Heterodera glycines
  unsure (1)..(3346): unsure at all n locations
atcttgatcagggaacggatttaagtgctaaaattccctttcttggataaaaagctgctaaaatagggccaaaatggacttaaattagttaaaatccaaattgggccggggaaaatttgtttttcgtgcttgttcaggtaaaaaacacctagaaatttgctccatgatgatgatgagttaaaaaaatttattttttcaattcataaagcgacataagtagtcatacagtaattccgtgtattataattacagtatacatttttatttaaccaggattaattatccaataaagggtacttttggctaatgatgcctcacaggcaggcaatttcacgataattatatctaattatttaattaagaccaagcggtgcttccgccagcgattgaagaaagtttcgcacaatttgtttttgccaatcaacaccagagcagcgacgacaacggcacggcggcacctcctcgccgcagtggtggccatcacttagtgcttctgtttacggatggtgtcgagttttggccaacagatgtggtgcaccggtttcagcaacggcaacaggccgagggtttgccgcccatccgcctgtttggccactccattggccacgggcgcggggcacagccagcgcttggctggctcacctgccagacgcgggccggtctgcatcaggccgaaatcggctcggtggctgaggtccgactgaaggcgcgtgcccatctggccaaattgagcgaagtgttggcattggcatatcgtgaacgtgaggcggcctcagaacggagaccaatttcgtggtcagtatttcagagatacaaaaaatataaaataattgtaatacatataataagacatatgggcaaaatgtcaggccttgggtgggaatcgaacccacgccttaacccagtccgtggccagcagctctagcattgagctacctagacattgttcggcctcaaaatggagtattttctttcactcagcgatcttcaatttcacacaggtcaaccccatacatggacgtgcagaaaggcggtgccgttgtgtccatgtcaatgcctgtgcttggtgcacaaccaggaatttatcgtgacttaaatatgtcacagaaaaaatttgcggatggaaatttgcatgccaaattggatggcttcatcgctgttgcagggctggacattgcatttacagagttggcacgtgcaatggtgctggacagctcggaggacgcaacgttggcatatgcctttttggtggacaacaacggcatcatttatttccatcccaggtcaaaaaagcatatttttatcgctaacaacaccaagaattctggcaaattcatggaaaatgaattgccaagaattctcgaactgcttttaagagactcgacaaaaataattttcccaaaaaattgcgctgattttgaaggctgcacactcgggcagctgatgtgttcgccgtccgacgaacaatgtgccatcgaatttcgtccactctgttacgctccaacactcgcgtgccattcaccaaggcggacgagctggtacaccaacagctgggctacattgactccgtgccacatcgtgacctgcttgaagttgagccggacacaccgctaatgcgccgcttccgggcacgacttgtgcgtcgacagtgcggcattggcacggcaccgttggaggacgcacagcgacaagtcagtgctacgcaggacatcaaaaaaaacaattgttttatgccaaaaaacatttggcacaaattaaaaaaattccatttgagataggtaattaatttattatacagttacgttgtgtagcagtgaatggcacaccgctggtggttggctttgtgttgatgaagcaacgacatcgaatcagcatatcaaaacatcattttcagaacgaagtccgatttgtatgtacaattaaaaaacatgtaaatacgccaaggatatgaaggccaaggtcgaaaaaagtagtagattccggaatttagaaaagtccggattggcataagtcaggataggactaccgaaattaagatcccagttttaccgagatttgaatcaagaccctggagttgacatcatccctattctgtcgggatccattccgggaaaatcccgactggatcgcggtcccctacgggctctaaaaaacataaaattcttaattctcgaaattttctaataaaaaatcagatttctaggcatcaatcaatttttagagtggtctagtttccaacttctttgaaaaacagtttttacaacacaacaggaagatgaggtggacccattccaattggcagaacgcctcaaatccgctgggtttgaatcaaacgggcaacaccagcaacagcaggagggcatcaaagaagaagccgaatttgtcaacaagaataataacaattctcttgcccaacctttggtcggcattctgctttcccctgggtaaaattcacaattcttagtttgctagacacattctctaattagtttaaattagaaacgtgactcagatttatgcattttaagccctatcatgcaatggcaactgtccgccgcactgtcctccgtcctgcgcccgctctcgcgtttccgcgcattgctccgcttgcttccttcattacggcacggacatccttttttggcacatctttccgcgcttgcgcccgactcagtttttccaatctgggcttccgcatggaatagcagttacgcttcactacccaatcatcgcttttctgcttcaacttgcactctgcggccacttccaccgcgcattgatccgcgactgttccggtccgctttcctcctgttccgtgcctcatcgctgcgcgacaaagccgcattggctgcattttttccgcgatggtctgcgtaaaaaatataaatctaaatctctattatactcagggatggcagatctgaggctttagcctcattttgtggttttttgacaggtcaatgaggctaaattttcaaaatgaggaaaaatttgctcaaaatcgcaaaatttggtcatttttcggacaaaatctgttaacaaatcgcattgaaaattacaaaatttttcccggcggcgcctaacggcaccgccggccccccttgtttcccaaaagttttttggaaaaagcgccgcaaaaaaaatcaacttcgtttttcatgttcagaatcccaaaaaatgcttatttctaacaaaaaaaaatgctcaaattgatcatggacaatcaaaaatataacatttgaacattttatacgtgttttgaataaatttgtgaaaatgaggctttttgacccanaaatgaggggggagtgcttgccaaantgaggcttttcaaaattttcatctg

SEQ ID NO: 6532 - DNA, 4316 bp, Heterodera glycines
  unsure (1)..(4316): unsure at all n locations
tgaaatntttcgtataaaaaaattttctaagatttttttcttgaaaaatttaagtttgaaaaattttttttaaatttttggcggcgtgattttgtcccggcgtgattttggggtgcacccaaaagaggtgggcgaggggggtcgccggcgaagggaaaacttctgaaaattttggctattttattaacaaaattattaataattcttaaaattttccccggcggcgcctatcggcaccagcggcccgtcagaaacatatatttcttaaaaaattagcccaaaatctcatttaattttttttttgaaaaaagcgcgcccaaaaaatgcctttaaaaaaaggtcgttagcagtttacatgggtagaccatttcgcaaaacttttagttgaacctcccccccccccatattttgtattgcgtggggtggaaaaaatcaattttttttgcaattttttaggccaaatatttaaagcggtcaaacaaattttttgttgcccttaatgcgctgttaaaatggccaatcaccgacaaattggtaattttgggcgaaaatctaccaaaatggcatgggaataattaagggaaaaatacggaataattgtggttgttgttttttcacctctttgttcgcgtagaacttctgttccccaatcgaatgttcgtccaatttcctcgggtcggtgccctccggcattttgtccacccattttttcatcgtcaaagtgccggacacatcggcacgccatgcgacgtccttacgatagtccgagtgcagtgccaacttcaaagggggggggggcagtttttcatatacaaaggccgggcattttttcagtttggacccgcaaaagttagaaaatctacagaaattgcttctttttctttttttttttgatgaaaccttgagaatgtgtttggaatagcctccgttgtcgtccttgcgaagctggtgcacaagcgaaagtcgccttaaaaaacggagggtaaaaattgaaaaaaaattaatttttcacaattttaattttgttttcgctcaaatggcaattttgttgaaaaaacccaataaaattggcattcctttgggtttcctggaccataacatttcataagtttcaatgaacaaaataattttgactatcatttgaataaaaaattaagcgaaaaaaatgaaaaatttgtcggcatttttttcaaattgcagaaaaatttgtgatattttctctttacagactctgtcttttgacaaatgaatttacaacagtccaaaaaaaacccaggaaattgtattggatctgatgttcttacatacaattagctaaaatcgcatggactcgcaaaattttgatgggacacttaaaagtccataggacgcgtttctgtgaccctaatttttggccggaccgttcctttttcgcgttccttattgaaattttcttgggtagaaaaaagcgcgcaaatttttaacattcaattagtgcctcaaaacattcaccatggaatgcacccaaattcgtggacatccgtcacaattttgggcccttcttttttcgtctgtcccttttgcttctttcttttcccgttgcttttctcgtcactgctgctgctgatcggctccggcggaatgtccaaataggaggcgcacaaaacgatggaaccgacgtcgacgcactgaaatttcaaaaaaataaactattcggcaaaatatcggaagcgccatgaagaatggggggggggggggaagtcccatagaataggggtctcctattcttcatgattgcccatcggaaagcattttcagaggccagatgggaagcctgggatataattttgaaggtgtatcgcatatatttgaaaattttaaaaaatttgcaaaaacggaaaacccaaaaaatcgccatggtttttccggttcattttgccacctcaaaacactccttcagtgttttgggcaacctccgtttcttcttcttctttttttcgtcttccgtcgattttttgtcatcacttttcttggcaatcctttttcgtggaggtctcggcattttccgcgaaaattttggcattttattactaaaacgtaaattagctaaaaatgaacagttttaacaaattaataacacatgaaatgaaatggagtaaatctgtagataagtgagtggatggacaaggcctacagaaatttttaattttggcaaaatgttatttaaatttttaattataaattttaatcgatcagctagggttgtactatcagagtctcggtttttgactctcaaataatgaaaatttctcggtgtttcagggttatccttgaaaatgacaaaattttacgattttgagccaattttttttaaaagaataagaatttttagggggcggcaaaaatccaggttgccgaaaatggcctggacttggattttttaactgaatcatgttattccgtttttttctccaaatttgaccgggaacggagaatggcgatcccgcctgctcgtgccgacctttcagcggtgtccatcttggaactaaaagaaatttgcaaaaaataaattatgtaaatcattttgcaggcaaaaccccaaaaaaatgggtgggacaaaaaataggcatttttggctctttaaaaatattttaaggggtataaaaagtaccaaatttagtgcggtgtaatggtcataatcgtttcttattaaacaaaactttaaaaaattcaattgttattgataaatattccttgcacaaatatttctttgatcatttttgtcgccaattttttgacgaattattttttggccaaaattttgaattaaaaaaaatgtagccgattttaccattaatgaaaaaaaaatgtttcggttaataggccttgccaacgttaaaggatttttcctttttttttgcaatcatttcaataacactgacaaaaagcaattgctgctcgcatcggtttgtgattgtttggacgacgaaacgacgcgcgagattattaaggaaatgtttattaaaaagtaaaataaaaatataatacaattaataaattttaaaaaataaaataaattattcttttattaattaaaaagagagtttgaaacgtacagattgaatatttataaatgaattataataatttaaaagaagtcttcaaattaattaaaaacagtgaaaatagcatagaaaaataatgtacaccgtccggatcccaactgcttgctccccccccccccctcagaatccccaatcacacagggattctgaggtcttatcgatgttaaaagtaaaatctgatcacgtattcgtgatcagcgtcataaaatagccctaatgacatgtttttgaaagatttttggtgaaaaatttttccactcaaaaatcctggtcacccccctttggacccgaagcacaaaatcacttttatttttatatctttttttaaggaagtgataaaaataccaaataaaatttataaaatagagcaaaaaattgcggatttttgtagcattttacttttcctgaatatcttttcagaaccgagttataaatttttttctgaaaatccgaatttttccagaatttctggaataacttttttcatatttatgttagaaaagccaaataaaccccataaaattctcctgatttttctccatttttaatgttttatttactcaaaattggtcaaaccttaggcagatatgaattttcaaattttagcccaaattcccgatggccaaaaaattgaaaaatatttttgaatttttaaaaaaattcaattaaattaaagaatcctggatattattcggtagttcttggatggctctattaacatgaaaaatttcagaaaatttcatttttcagaaagtctgagtaaaaatgtttaaatattgtcatactttctgaaaagcaaatgaaattatctaaaatttctaaactaataaatcaatccaaaagctatcgtatgatacatatcaagattattaaatttggatgtgcttaagaaaaaattatgacgaattttctcgaaaaattttataaaattgtcacttttaacgaaactcccattgtggcatttttactaaacgaaaaccagcaggaacaaagctcagggattgctgccgaaaaatggcctggatctggcggaatagatgaatttactgattaaagtatgagatcatcattgtctgttcattgaaggtattctggtcgactgcccgacacatttgacaacgatcatgcccaggagctaatcgaaattgcggagaagtatggactggaggcaatgaagatcatttgccaggacaaacttggcactcggtaagc

SEQ ID NO: 6533 - DNA, 1036 bp, Heterodera glycines
gcgcccgttttttaatttttgtgtgcttttcggccccttcgcgggccgtttttaaattgtgttgagtcggacgggcgcttcgcgcccgttattaaattttgatggactcagacgggcgcttcgcgcccgtttctaatttttgttgtgcttttcggccgcttcgcggccgttttttaaattgtgttgagtcggacgggcgcttcgcgcccgttattaaattttgatggactcagacgggcgattcgcgccctttttgtggcctttttaggccgatttgcggcctcgaacggccgcttcgcgccgttttttaaattttagaacagatacaaaagtgattaaaagaggtagaactgtgattagaagaggtacaacagagatgagaagaggtacaacagtgatttgaagaggtacaacagtgattataagaggtacaacagtgaaaaagtgatacaaaagtgattagaagaggtgcaaccacggaagggaaaggcacaacagtgatttgaagaggtacaacagtgattagaagaggtgcaacagtgattagaagaggtacaacagagattgaagaggtacatatttgattaaaagaggtacaacagtgatcagaagaggtacaactgtgattaaaagaggtacaactgtgattagaagaggtgcaacagtgatcagaagaggtacaacagagattgaagaggtacatatttgattaaaagaggtacaacagtgatcagaagaggtacaactgtgattaaaagaggtacaactgtgattagaagaggtgcaacagtgatcagaagaggtacaacagagattgaagaggtacaaatttgatgaagaggtacaaaagtgataaaagaggtaaaaaagtgattagaagaggtacaactgtgattaaaagaggtacaactgtgattgaagaggtacaactgtgattaaaagaggtacaacagtgatcagaagaggtacaactgtgattaaaagaggtacaacggtaattagaagaggtagaactgtgattagaagaggtacaaca

SEQ ID NO: 6534 - DNA, 1282 bp, Heterodera glycines
ccgcttaattatggcaaattcattcagagaaagaaaaaaaattgaagtgaatatttcgacgacttaattacaccaataattaatttaattcttcttcataaatatgctgcactttccttcctttcgtctgatcattttatttttattttttggtataatgccaattattcaaaattcggactcagacagagaaaatgagaagcaaaatctttggaatttgcgggggaatggagcaaaagtgaatataaaataatgacagaatattttgggaatattcttgacagaatcctttcgtgccgggcatttttcaacggaaaacgataaattcgttgatgaacagaaaattgaacattttccgagaacgatggacaaatggtggagaaagaaaaatggacaatccatcggaggaatacatggaggaaaatttggggaaagaaatggcacggagaatgggagaaaggcattggaaaaaatgggagaacggagaggaggaggaggaggaaaatgggaaggagccgggagaagaggagggaaaaacatatcggaagaaattggaggaagaagagcaaaaatggaagaaaccgggggaagcgaaggaatggaagaagccggaaaaggaagaggaaaaagtgaagaagctgggcgaagaagaaaaaagccatcggaagaagccgggagaggaagaggaggaaaaatggaagatggggcaagaggaaggaatccgtttccttgaagagtccgcggcatcgtcgtcaacagaacgttccgccggaagggaaaagaatttaaatccctttgaggacacaaaatttgacgaaagattccccattcacaatttgtgcggtccatggaattccggcagacagacgagcgattttgaatggtaaaattgcaaaatgggggaaaaacgaaatcattggacaggggcgaaccagcggacaaactgttgcgattgctgaaccaaaggacgacggacggcaaaaaagggccaagcaatgctaatttcaaatataatatgtttttggcaccaggccaaatgactggtaaatgaaatcagagtaattaactaattaaccaacaaatttattgaatttgaggtgagtccaccaatgtgtcaattgcaatttacatcgaatcgatgagcactttcaaagcacagacgatggttcgttcgttcgttttggttacgcttaagcatgtgtgccactttaggacttcgagatggacatgtacttcgcaatggcatggtctgtctcccctttccctcttttcactctatccc

SEQ ID NO: 6535 - DNA, 2405 bp, Heterodera glycines
ctctctctcctttctctctcctgccacctctctctccgcgccgccttgcttgcgctgatcccattgcccccgccccctccaaaattaggtacgaccgtcggttggcccataattgcacccatccgttgttggtcgctcacaaatccatcgcagaaagaatttggactccaggtcaagaaaagcagagcgtgttcggacaatcaggcgttttattaatttcagatttatactttctaaatgccaaatttgcctatcttcaggaagtgacaatgccaaactttgtgcgttcgtttctttgctaattacccttaatgagttcctcccttacagatgctcgtcatttacccggatggccttgtatttaaaacgttaaggtgtttatttatccatttttgcttcttttgttaccctaataattaaggatcgacgtgactctctcctgcaacatggacttgcaggttgggagcaaaaggcaagcaccaaaactgaacggcacattccgccgccattcagctgttcccattcgatcgtcaggagtgtccaatggtcatccaaccgttcgcttacatcgaaaatttggtgaacctcagttggcacgtggacccaccgtactacccggtacggtggctttgctttcagttttggatttcctactcaacatttaatcataagaacagatcacgaccaatccggagctgaaacttaacgacatggtcatcacggggatgcgcttcgagcggtgcacgagtccgtacactcttttcaggggcattggtcagtcagtgcgcgtcgttcgtcggcatttcatccccccccctttccctcccctcaaggggtttggtcgtgcctgcgcggttacatcgtaatgaaacggctcgtcctcttccacctcatccaaacgtacatcccaagcggtacagtaccaccgtattcccatgctcgcattacggtgtccgtccccttttgttggttgtcctcttcatgttcagccatgttagtctccgtttcgtggatgactttttggttggacccccgggcatcgccagcgcgcattacccttacaatcacaaggcattcattgttctatttttaatgatatttattacataataaagcatttttagtctgctgactttgaccacaatgtctaacggagtgcctttttttattttatttttaaatattttgtaaaataaataaattaattttttaaattaggccagacaagacttaccacaagtcagttacatcaaagcaatggacatttggcaaacgttctcccaagtgactgcctttgaagtgccaattctccccaatttgccctttttaggcactgattttccttgtactgctcgaatattcgttcgtctcttatttcttctcacgacggtcctttgactgtgctcaccgaattttacgcagcgaaagtgccgggaaaatgaaaaagcaaaaggaggaaaggattacagcagaagatgaggaaaagcagatggaagaaggggagaaagaggatcattattattatcataatcaacaaaatgatggaacaaaaacaatggaaatggtaagagaaatgatgggaacagaaagagagtgggagaggaagaaagagacagtgggaaaagagacgaacatttaaagagtaaattgatcagagagagagagagagagagtggggtagagagagaaagacaaagagagagagagaaattgagatgcaaattttagagagaattgatcagagagtgtggaagagcgaaagatagaggagataatgagagacgcacacttaaagaataaattgatcagagagagtgggggtagagagaggaagatagagaagatatagggagtgagagagagagagagagaggcgcacatttcaaatatgatccttttttgtaattctaaattaatctcaagaacaacaacgcccatgccgcgattcggaagcgtggccaacccaaagggacggcggttctgccaaaaagtgccgtttcggcgacacttccgccaaagacggaggcattctcttcagctgaatttggcacaccctcagaaggaaaaaggcgccttttgtgcagaatgagcaacattcgtgaagagataatgacgaggatgggcagaaatcattcggaggagggcattttgatgggattgggaataatggagggggaggagggaatggcaatgccaacgaggaaagggggaggagagggacagggggaggaggggacgagcgcaagggacaggcccaaccccggcagagggggaaggcattgccaacagtgccaatgggaggacgaacggcgcggcagggcggtggaccaatgtgagtggtggcacaattggaacataaatgataaattaacgttccaaaattaccccccccccccccccccccc

SEQ ID NO: 6536 - DNA, 1899 bp, Heterodera glycines
tgcaatattagggggagggggaggaatcgatggaaggatatggagaaaaatataataatatttatgtataataataaaaaataattctaagaggcaaaggaaaccaaaggataaaaaaggtggaattgaaacaaatcagagcatgaaagaactgtcgaagaaagcgagagaatgaaactcatcagaagagagtcaaaagaatgaacaaatgaataaaaggggcaaaaatgaacggaacgaagtcccaacagagcaaaacaacaacaacaattaccataataaatgggggaaaggagactgataaaacagacggccaatttaaggactatcaaacacaacggcatccgtatttttatggcactgcccgacgatgccaatggaaacgaagaattgagaggcaaatggcggtcggttcctcggctgcatcaaaggtgttgcacctgctggtccacgtgaggagtcggattgagctcgaaggtcactcggatgggttggccaagcgtggaacggacaggcaaataagcgacgagttcatcgggaagttgacagttcgaatgaggagaaacgggccgcagagtgaaggattggaggacgaaaggcttcgtgtggtccaacaaagggtgggcaaagccctcgggcagtacaccgccagaacttccggcctgaaccgacacggggctagtcgaaccgctctaaaagagagtaaaaattaaaaaatcctcatacggtaattcgagtggtaccgtatggctgtgcttttcgcctccccccgtgccgccctttgttcgtctctgtgcacgctgctgtcttacttcttcctccactcctccggcgatgtccgtcttttcccccacttctctgactccgtcttcccgatggtgttgttccgccacttcgtcctcttcgccctcctcctccatcttcggcctcttcacttgcggtgctctctcccctccttcctcctcctcttcctgcggttgttcgtcttccgcttcctcttgcttcaatctccccgagcggatgtgcgaaaggactaaatatttgttgcattttggctcagtgtcggtactcaattggcagtgctctcttttaccgtgttcgtcgcattctccgcgacttgcgaaccgtcgcctgcatttgtgacatgaaaacgaactcatcagtttggcaatcttttctgaatttgttactttagtctgataatttgatccgtccccaatgaactcactcggcgaaatgatcgatcgcttcgccggtgacattttggcgacaaaattgtggtgcaccatgcgctggtgcccctccaatctttgcgcacttttgtaaattcttttgcactgtgggcattggtgccttccccctcctcctccgttttcgtcgtctccgtcggcattttcgcctcgcgacagagtgcctttcttcgttttctgttgctgaggcggatgggccgtgccgacttcgccgaaagaggcggccgaagaggacgaagcgccggaggacgcgaccgaagtcttccgtagttgcggaaattgccgttggtgctgatgttgttgttgatgatgatgatggtggtggttgtgactgttagcctctgccatttgcagggccacctaagaagacggaattttctatcaatgatcacttccatctttaaaattatgcctatgataacgtttcaattcgcgaaaagtatcctttgaccaaatatgaatccctaacccgaacaaattaactttagaatggaaatttttgtcaagggataccacttttttttgcagcactttttccaaaaacttttggggaactaggggtccggcggttccgataggcgccgtctggggggggggggggagggttaccagcaaggaaaatctctaaaattttcagcaaaaatactat

SEQ ID NO: 6537 - DNA, 2296 bp, Heterodera glycines
  unsure (1)..(2296): unsure at all n locations
tttactaattaaatgcactttttgtttcccattttgtaattgtaaaacagacagaaacagtctgtccctttgtcagttttccgttcgatggtttcgattaacaaacaaaaaaagggggagagaagagaaaaagggacagacaaaagccccccttttgcgaattgagaagtgttccctcccctctttcgtcccttttccccgttcttttcttaccctttcccccgtcgttctgagcagacgcgcgcccccgacgagcgacggcggcagcgtctcgtcccctccgatgatagagagcagctgtttcattgggttggcccccgccagcgacggctgctgggcccccgccgcttccctcgtctgctgctgctgcggcgagtgtacccccaggggctgattattctcatcatttgcctccgtcccttcgctcgtcgttctccgctgcgtcgattgttgctgttgctgctgcgtttggtgttcaatggcattgaaattcgaagccgccggcgcaaacgacggcagagcgacccttttctgctgttgttgctggtttgtctctgcggtatccatggacactgccgtcggttgcgaggcggacgacgacgtcgcttttggcactccgcgggctccgccgagtggggccgactgcgacccgccgccacccgcgtgcattccatgcgactccctcttgtgcaacttcagctcctctcgcgtgttcatgctggtatggcaaatgtcacacctaacggtgggaccaaaccaatgacaattcgccacccattccctctgctcatctccaacctgaacttcacctcgcccttccgttctttgtccaccgtgtcaatgttcgctatcagctgtttgttctcgtctatgattatgttgtgcattttcagcatgtgcgtcctcaggaagtacttgttgcacacctctttgttgcacaagtcgcaaaagtttttgctggtggaggaatattgtcgtttctgaggcggcggtttgttggactgaaattgtggcaaacattaaaaagggggaatgaatttcaattataaattcattgctttccgaactttaaagaaatttaccggcgccggcgtatgtcccctgcccattgctccgttttgctgcgtcgacggccctcccgtcgattgtaccgttgtggctgaaatagcgccgctttgaccgtgttgtgcctgggcaaccgcggcgaactctgcgctcagtttcgccaacattgcggcaccgtcaaactctgtcggattaattccgccaaaagcggacgaattgttgaacatcagcgaaggcgttgtgccttgtgagaaagggttggagccgagcaactgtcctgaatttaaagcccactcatctgatgctcttggaactttcaattgtcccctcctttctcaccaaataattgctgctgttgctgttgcgtcgtcccacttcccccgttaattcccgcagctgctaacattgccaatgcgttaacagtcgactgagtgtcgttgctggcggtcgactgttgctgctgctggggcgcatcggtgccgccgatgtgagcgatcaattggtgttggaagagggcggattggctgggaaagtgtttggcacactgtgcacaagcaaacgacgaggaggggacggaggaggacacattctgctgggattggtggtggaggtcagagccggagagagtggcgggcggagaacggacggacgacggggaagggcacctgacgaaggaaatggtcaaaggccgtgatcaggcagaaagaaatgccaagaatgatcagagcaaaaacaacgcgtagtcagtggttccccacctgttcatgtcagtgttctgttgctggttttgagcgtgtgccatcagttcggccaaatggagtccgccactgccaagcagttgctccaacgcattcctttcgccttccgtcgcgtttccgccgttggaaaggccaagttgggctgccaattgttgcatcacagccatttgttgtgaatggtccggagagagtgcttctgaatgaatgggttgaaaatattacgttacgctgcaaactttctcttaattagttttattgaaatgccaattcaccagtaaatgccgtcgtttgattgtcccccggaccatttccgctaattgtgccgggcgtcgatgaaagggataatttcggagccaatcgtccaacgggtggcgattcgttgtggtggtgtgccatcaattccatttggggtggctgaactgattgtgaggcggaatgngacgnacggagtgttcgtcggcagagaattgggc

SEQ ID NO: 6538 - DNA, 1220 bp, Heterodera glycines
  unsure (1)..(1220): unsure at all n locations
tttgagcatgtgcgttttcataaagtatcggttgcacagccatttgtcgcacaattcgcagtaaacctgtcaaagcaaaaccaatgaatgaatgctttgtttgtttatttgtgtattgctttgtccactcccccccccctttctcctcctccgtttttctcccattgtttctgcttttttacttgttcagctttgctcggacttccgcccgctccgccgacgcccttcagcaattgtgccaaattctcagaggaagtggacgagggaaggccaccggcagcgaacagttcagcaaaaccggacaaggactgcggatttgcaccaggagaaccaagcatctgcagaatttggagctggtcaatcagagacatggacatcggctgctgctgattgtgggaggacgaagagggggactgaaaaggcattcttcaaatggctgtttgccgcgtccgtttttcccacctgagagccaccgtccgtcttgctttggtgttgctgctgttgttgttggtgtgcccctcccgtgccaaattggtgctgtgccgtcatttgtccgtgcgtttccgtccctccgctattcggcacactcgtgccgttcaccaactgtgccatcagttggctgaccatcatttcctccgccgatggcgttgtgcttcctccgctcatttgctgctgattgcctccgcctccacccgctaccgttgtcgccacctccaaaaactgttccatcaatttctgatgagtcaattgttggccaaggagttcagcggaagacagcgacgaatcggcgccgtacattccgccagaggcaccggtggcgccgcacggcttcccatccgttgctgaggaagtggaagatgccgaactcgtggtggtggtggccgagtcggacgcatgacacaccgccgcggaactcgtcggaagatcagcggacgacgaaaagtgctggaagggattgacagcaccggtggaagaggacgaatcgggcggaggagcagcaccagaagcatcggaagcaccgagaccggccaattggctcaaatagagctgctaaagggaggaagcgatgaaagagcaaagagaaaacggacaaatgaaagaaaaaagaaagcaatgtgaagaaaaaaaattaaaagctctaacaaaatttctgcgggagcagtaaaatgagttttttatgccaaaacttannattaaaagaccnntgcaggcccatgcaa

SEQ ID NO: 6539 - DNA, 5157 bp, Heterodera glycines
aaaattgtttggtagattgtcttctatgtcatctcttctccaaaatggtttttatccaaatctgtcgtaaggccagccgaaaaatttttacaataatgttttttttgcaaaattttgtgataaaaattgcttgaaaatggagaacatttgttcaaaaggcagtgccgcgaagagacgatgtgcggggtagtgctaagactctctagtctcgctcgagaaaattctcgggtttttttggtctcgagcagcaaccaaatccaacgatcttgaatcattcgagagcccttcatatgctctattagcctgcaaaattctggtcataacttttttgaaccttaacaaaattttttgaaattttgaagctaatagagaacacatagggctatcgaatgatatgaacatggatttggttgtaaaaaagttatagccaaaaacttgtactcgtacgaaaacgacccggacccgaccccttgtacaattatgctcttaatgtattatggcgaaaaaataaataaattttagaaataagcacccttggaagtggaattaaatgagaagctaaattggtctcttttatttcagagaaaccctttcaaatctcataatcaacaaatttatttgtttctttttgttagcacgtttgtttttaaagaatttttgttgttttttaaggcaatgtgccaaacttttttaaaaaatttttctcagtgacgaaatgatcggccacccttattttaactattttgagattttgattttatgacaaaatttaaccaatcacacgttttatgaacaaaattttaaaccaatcaattcatttaaatttgatttaaaaaaataattttgagttatgtaaagagtgaagtgataaaaatatggagttactcgtttttgtgggacagacgttcaggctgaataataacttcaaatgacccatttgattataaatgaagatagatggtgcttcgcgatcttggatcggattcaaaagctaaaatgataaatttcacggttatgtatctcatccactctgttccgatgattgttttccccattattagttttagagctccaaatttcgttaattgaagccttggtgctacctcaaatgggtctgaagattcagacccatgcgctttttgtcgcttcgcccacacccatatttttgtcgcttcgacatagcaccgaataaatcggagggggagactaattggttgacctttataattgatattgagcccataaaaacgaataaaataaaatgacagaatggccatgaattggatggtcgtcaaaaggcgtcgtccgtccgtcttcccttacgcttttcccttcggtttgcttttcgtcgctttccccttcggtttgcttttcgtcgctttccccttcggtttgcttttcgtcgctttccccttcggtttgcttttcgtcgctttccccttcggtttgcttttcgtcgcttttcccttcgcttttcgtccgttgtcccccccccccccccgcttcttcttcgttccttccccttttcttcttccgttcccttcacaatcggcttattgtccctccgtcttcgctttgctcttccctctccttcctttgctgttcattttttatttgcagaaagcgatcctcgcccaatgacttgcggaaatggtcttccactgaagtgagaaaagccaaagataaatggaaaagaatgatcagtgatcagtgaatgaccgttttggtttggatttggctgtactaattgctaagtgattgtttcccgcccccaactccctgcaactgtatgagtcaactccgtcccggacagcttccaagacgccaaaatgttgtttttgaaagggttgcagtcaggggaagcggggacgggcggatcccaaggattttcatccccttccccattttcctatccccgcactgaatccccgccggggacggggatgaaaataaacctaaagatgggcttggcgaccaaaaaaaaacatcttttttagagtccggtaaaaaaaaatttccgggagcgggagcgggatcgggagttcaaaattttccgggacgggagtcccgaacgggattcccgtaaaaatcccgctcccgttaaaatcccgtccatttttaacgggagtcccgggcgggagcgggagtaattcgaaaatttaattaaaaactcacaaaaatatttttaatgcacaaatttaaagggcaatcaatttattaaattaaaaatatagaaaaatttataaaggagaaatttgaaataaaaaaatcttatttttgagtcaaaaatcagaaaattttttcaaattgcttaaataaattattttttataattaattcgaacaaaacatttattaactttatatttttgactccctttattaattttacaaaattttttgcggtgtatttcttgaaaaaactttttggtgaccaaggaggaggagggaggccggcggtgccggtaggcgccgccgggaaaaaattgaaaattttaatacaatacattgttagattctgttcaaaaatgaccaatttttgcaaattgagcaagttttttaagaaaattaaggattttaaaccgttaaaaatctcgttcaccgaaaaaagcgggagtcgggagcgggacgcccgtaaaatcccgcgggagtcccgatcccgccggactctactccaaaacattaaatattcccggtggcatctattttcggcacttttttaaacttttcctatagagaaaagcaaaggaagggactccaattttggctctctccgaaatttggttgcggattggaatttgcactaattaatcggcgtgttaattattattgggtaattggggcaattaacgctaattatcagctgtgatcagtattatcacttccactgattaccatctgtttgttcttgtgatagtccgtgctcatccacttctgtatgcgctggttgcccaaatgattggcggtcagcagaccggcacccaaactcagaatttcggtgggcgtgttgaacatgatggacacaatgcgttgcatttgatcactgatcaactcataagacacgggaatgaatatggccacaaagccgaagaaaaagctgaaaaacatcttgtcacggttggagtgccagtggcatggaagggataggcatagttggagttttggaattttttgaagagcctcggatttttattttcgaattggcattttgactataattccgaccgatggagggattgagttggacgaatgattactttaacactattaaccgtatgtattttaacttttaaatgttgattgcttccacctaaaaccttgtcagtcctttcgtattgttaattggtctttaattatcagaagattagtctcagggtgcggaaataccgaaaaaagggatttaaattcccccccccccactgattgattgatcaaatgttatcccatttaacctgatcactgcaccaagacccatcgagttgtaagccatcgatgtgatcgagtcaatttgcatgccgtccgccgcacgaagacgacagtatcctctgaccgttttcgcatttaccgtaccagtgatcaattggtctttggtcggtgcgggaaagaagccaatgtcgatcagtttgtagaaggcagcactgcgcagcttgtgccatttctccacttggagaggcaccatcgcagccgaagttgaggcggcaatctgacagatacggatttgaaaaaaatatttaaatagaatttaaataaattttaaaacaaaatcctttaagtgtcatggttttttaaatttagtgaaaattattattttaaatttttggttaatatttttgatgataaattgagccgtcaaaattgaatttagttcaaaaaatatttctcgaaaactctatttatttatttattatttttttcgggtggaggaatttttcgtcaaactgcacctgatttgtaaaagcgttgagtgcaaatacgccaatgtatccaccaatgtttccggacctaaataattattaatgtctttttaagttttccgctgaagccccctccccccataaaaggtaggaaacagattattggcaaaaactccgacctgattaaaccaactaaaaaccgttataagataagttacagtagtcgcaattttgtcccttacttaatgaattgggcgccgggcaacagtgccatgacaatgttgttggggatggcgccaagcgcggcaatgccaccagaaatcaccgattccttcaggtcctccttgaactgcttgaatgtgcgcggcaatagcgatttgccctccaacgcgccaagcgtccgtttgatgacgaaggaatcgaacgtttcggcaaacagcggggttaatgagtcgaggagaaccatcacaataattgtcaccggatgaaagtggcctaattggcaaaggaagtaatgattagacgggaaggggggggaggggaatttgcttgaaaacgctctcagattctcaaaacatttttaaaaacggcgccatagacatcgctttatgcacatagcccagttggtttatccttttttgccattcaataacattcaataatgtatttatttattgggggttttttcaatcaacctaatataattttctttccttgttccaaatccattccgaggtttgtttggcccctgttttaccactttttcgacaaaattattccatcttttatagattttcgactcagttcagtttccattttggatttgttttacattttccttttttctcattttatccaaaagcatagtgcatttgtcccttatccacttctaaatccaccactcaactttgacctattttccatttttaatttggcccaaccatttgaattttctctttcaatttctcactcttttggcccacccattgtgtcactatttaagctcaccaattggcctctaaggataatttgaaatttaatatttagtgaaaaatgaaattcaataaggcacttaataagtctaatttttgttagcctgtggtacccacaaattttcacctaatgccatggccacatggtgcaccaccaaatgccaaaggcccaagtccaacgcggccgcaatgccaccactcccaaccagactcaataccaacgcaaacaacatgttgccctcgaactgcttg

SEQ ID NO: 6540 - DNA, 2287 bp, Heterodera glycines
tacactttattcaataagaggggattgaatcccctcccccccctctccagaatatttatttttaaaattaaagtgatttattcaattttcaccgagtcgtcccctcaagtccaagctggccttctgccggtcctccattccgtacaatgccaattcaatcaacggcttcacattagcgcaactttggttccgctttaaatgccttgtgtagagatttaacacctccgggtcaactcctggtgcctccttgaacttcttcaacttcctgtccccctccatttcgctcggtgcgaatcggttggccggatttgctgccagttccatcagctgctcatagttgagcccgtcgaacattttgtcttgctgtttttggtctacaattttgttgagaatcgagcggaatggctggaagcaaagaaaggtcagtcacaaatttgctggggcagattaatgaaaatttttaaataaaactagcacactcttccttaagatttttaaaatcaacccaaaaacccctcaaattggccctttttgctgcaaaatcactgatcaggtggagcacgccgtttttgggggtccatgatcacggtttgtccgtgattgaaatccagtcaaaatttaaatttattcgactaccttccaaacgttgtgttcaatgtttcgtggctgatagaatcggatcggatgcttaaagaagcgcatcagctgatcaaattgacgctccgttttaagctcatcgaataaaaagcgcaatttggtgccctgaaaaatttaaaattcgaactcaaaattcattggcatttccgcttttcaagtttcttaatgatttttttttataacaatgtttatttttttttccttacaacaaaaaattcattggtacgctctttgatccctttttttgcacttgctggcagcgtttttctgtacttggcgaaaatgtcgctgtccaattgtccttggaatttcgtttcatttttcaacgcgtccttgaattcttttagctgcacaatttgttcaggagtcaaactgctgagcagttcacttttcttgttcaacacttccattacggtgtccttgagagtgtcgtcaaagtttgcattggccaagtactcattagggttctccaggaacagcagaaattgttggtactgttcggtgtccaactcggccaattcttcgtttgagtctttgtcattgaccacacccatcacctctctgtgtaattaatgaattttttaaatggccaaattatttaaaaatgattaagaatttttggtttattgaatttttctttgaacggctctcatccgcgaaattaaccttttggctcttgatataggaaaattttcttaaaaatcattttaaaaaattctaaaagaatatgtttaagtttcattttcttatgaattggtattttgggtcaaaaatatgcaaaagttgaaattttgccattcattttttcgcttcaaaactaataaattttaattattcatgatttgggtccatattttatgtgcctatttaacggttttattctaaattgctaaccgcaatatcataattgattaattaaattctaaattttgtgttaatgattacctgaatttttgaaagactttaacgtccaatttattgtaaaatttgatgggatcatcgaaaaatgccttcaacttttcataatgttccgttgccctctcttccatttttttgtcatcgcttttgcttttttgtgccaccaattttttatcattaattatcgcgtctttgatcactttttcgttttccgcatatgcttttctgagcgcccttatcacgttctcatccaattgttcagttgagcccaaataatcgttagtgtttttcagcaattttactattaattgggaaaagaaattatttttaaatgttaatttttatgtaatttttttggtttggaattcttagcatacgaaaaattcaaatcttatggatatattttaaaaattgcaatgtattcttaggggagtgtctttttgggaaacggaaatgagttttttgcaaaattaggacagacgccgacaaaagttgaacaactactctcatctcattcccattcacttagaataaaaccatgcaaaattaccaaattaaatcataatgaaatggcatttatagaaaatttaccaattttagaggactgatctctcggcaattgttcgcctctgacaatatattaatacttcccgatacatttttttgtttcattctgcattatcttatccaataatcccatttctatcagtgt

SEQ ID NO: 6541 - DNA, 2415 bp, Heterodera glycines
acaattttcctgagaatcatgtggaatggctggaagcaaagaatgatcagtcacaaatttgctgggacagattaatgaaaatttctaaataaaactagcacactgttccttaagattttaaaatcaacccaaaaaacaccctcaaattggccttttgctgcaaaatcactgatcaggtggagcacgccgtttttgggggtccgtgatcacggtttgtccgtgattgaaatccagtcaaaatttaaatttattcgaccaccttccaaacgttgtcttcaatgttccgtggctgatagaatcggatcggatgcttaaagaagcgcatcagctgatcaaattgacgctccgttttaagctcatcgaataaaaagcgcaatttggtgtcctgaaaatttaaaattcgaactcaaaattcattggcatttccgattttcaagtttcttaatgatttttttataacaatgtttattttttttccttacaacaaaaaattcattggtacgctctttgatccctttttttgcacttgctggcagcgtttttctgtacttggcgaaaatgtcgctgtccaattgtccttggaattccgtttcattttccaacgcgtccttgaattcttttagctgcacaatttgttcaggagtcaaactgctgaacagttcacttttcttgttcaacacttccattacggtgtccttgagagtgtcgtcaaagtttgcattggccaagtactcattagggttctccaggaacagcagaaattgttggtactgttcggtgtccaactcggccaattcttcgtttgagtctttgtcattgaccacacccatcacctctctgtgtaattaatgaattttttaaatggccaaattatttaaaaatgattaagaattttcttatgaattggtattttgggtcaaaaatatgcaaaagttgaaattttgccattcattttttcgcttcaaaactaataaattttaattattcatgatttgggtccatattttatgtgcctatttaccggttttattctaaattgctaaccgcaatatcataattgattaattaaattctaaattttgtgttaatgattacctgaatttttgaaagactttaacgtccaatttattgtaaaatttgatgggatcatcgaaaaatgccttcaacttttcataatgttccgttgccctctcttccatttttttgtcatcgcttttgcttttttgtgccaccaattttttatcattaattatcgcgtctttgatcactttttcgttttccgcatatgcttttctgagcacccttatcacgttctcatccaattgttcagttgagcccaaataatcgttagtgtttttcagcaattttactattaattgggaaaataaattatttttaaatgttaatttttatgtattttttttttggtttggaattcttagcatacgaaaaattcaaatcttctggatatattttaaaaattgcaatgtattcttaggggagtgtctttttgggaaacggaaatgagttttttgcaaaattaggacagacgccgacaaaagttgaacaactactctcatctcattcccattcacttagaataaaaccatgcaaaattaccaaattaaatcataatgaaatggcatttatagaaaatttaccaattttataggcctgatctttggtcaattgttcgtctttgacaatatttttatacttttctataaatgtttttgtttcattctgcattatcttgtccaataatcccatttctatcagtgtttctctaagtgcttttttcattgttttgtccaatttgtcgccacgaagataaaatatggccgggtcatcaaagaaatcgtggatctgtgaacaaaggaaaataaagtattctctcatgtgtatctgtttttattagttttgtatatatttgtgtatattttttattgtatatttttcttgggctttttccatatgtctaaatttatatatttatatttttcatgttttgattccctttaaattgtccatattacccccattttataagctaatgttttaccaaataatacggctttttgtacagctccaccaaatgtttattgggctccaccattttgcgcattatgaaaatggtgtcctcgtctaatcttttgtttttgtaaaattcctttggatttcgatagaattccatcaaatcgtcgtattgggtggggtagagctgtttaaacagtttatctgctggtttcacatgaatatcatagtgaacgcctgggaaaaaatgggtccaatttacttaggaacagaaaacaatgtattggaaatgataattactttctaaatatctaatatacattagagatcggaccggttcggtttttttcgggtttttttcgggtttttttcggtattttt

SEQ ID NO: 6542 - DNA, 4301 bp, Heterodera glycines
  unsure (1)..(4301): unsure at all n locations
ttgttgactttttataaaatttttgtcattttacanccnttaagttcggactttttgggcacctattttcccatttttagcacctatttggggggttttttaaaaaaattttaaaaattaaaaaaataattcaaattttaatttatatcaagtgaaaataatacaaaattatttggttttttataataaattaaattaatgaaaattttcaaacaaattttcttcaattatttcaaacaattaatcatttttggactaaatcatcgaatattaatagaaattcagatttgattttcacatcactttttttcggagcgcttttccaaaaaacttttgggaaagaaggggtccggcagtgccgataggcgccgccgggggaaattttgaaaatttgggtgcaatttgttaacagattttcaacaaaaaaaggttggtttttgcgattattaagctcaattggtaggattttcatttaaaaaaggataaaatatgtatcaatttaaaaaaactatgagtaatcatattttgcccgggggataaatagaatttatatttttttcgaaaaaataacttcttttctatttttataataattaattaattccaagttgaaattctttaaacaatttttttttaaattttcaaacagaaatttttcttgaaaaagcctgcgaaaaatttttctttgaaaattcggtaatagttaagaatgttccccacctttttctgaaaaaaattttcaaaatttttttttcgagaaaatggcgtttttagggttttcagggtcgaggaatccgattctgtgactcaattcgacccattccgaaccacgaacccggattcgaacaaaaattgaaaattcgatttttcaaaaaattaccatttactcaacaaaatcgaacggaaatgcgcgcaaacaacttcttggttttataaatgatgttatagatttttattattgtaatatggctgcattggaagagcttcaaaatttcaatattaaaaaattgcatgaaaagttggcgctagaagacaatgagttcgagcaatggcttgagcaattagggcttttgcattctcgccgcacatgcccacgatttttatccgtgccaataattgattcattcacacattcatgcatttccgttcgattttgttgagtaaatggtaattttttgaaaaatcgaattttcgatttttgttcgaatccgggttcgtggttcggaatgggtcgaattgagtgtcagaatcggattcctcgaccctgaaaaccctaaaaacgccattttctcgaaaaaaaaattttgaaaatttttttcagaaaaaggtggggaacattcttaactattaccgaaaattctattaaaaaattttttcaaaaaattaagcgattttttttttgaaaattctcagaattcgtcataaatttgaaaaaatcgcctgagaattttcaaaaattttttcttgaaaaatttctaaattttaaaattcaaaacggggttctgaattttttcagaaaaataacaaatttcgagaatttcaggaaataaaattctcccgattttctttatttttaagctttataccattaacattgtccaaccatggagtgagcttgaactttgctttattattgacgcgatgacattttttggagaaatattcaaaataaatttcaaaaattttccactaaataaatcattcgaaaaataatctctctgtctccattaatctgccagtatctaattatctccccctttctaagggtgttgataaataatatacccgggcatataattagagaaaatacggtatgtacataagggatggcattccgccgaggctccaaaaatatgcgaaatgaatgtttttgggttagtaggcgaaatgtcaataggcgatatgtcggtaggcgagatgtcgagtaggcaaaatgtccgtacacacagcggcccaattttgtgctctcatttgtcagtgcaaataggtttattatttatttagtaatcagaacgccaaaactttgcaaaacttaaatttttttggggattttcccttgtaaaaatagaagagccgatctcgagttaaaaactagacagctaaaacatgaaatgtttttacgacacttaaacttgaaaattctttgcacccaaatccaacaatcttggtgtcattcgaaagctcgtaacatgctttattagccttacaaaaagcaacaaaattttcaagcctggaaaaaatttattaagaaaaaacttcaaaatttttgttaagctttcgaatgatatcaacaatgttggatttagatgactcagaaaaaacgtttagtggaaaaacgagctggcgccgaaacgaagtggaccccatttcacggtcctaataagtttcaaaaatgggtttaagtgcaaaaaaactccaacatttttttgtcgaaaaaacagtaaaagtcggctttttggcatcattcctctgacatcccaaccccattactcaaaggcctcaaaacacccatcacatattgtacatattatttggaaaagcctgatcatctccatccatccatcatcatcattcaccatgacggacgtgcccgaaacaaaggaccaactcatcaagctgatcaacgtgtgcgagaaggcgcgacgcggcgatgaaaaaggtgtggccatatcccatccgatcagtggtggccgaaaattcacaattttgtgctcgtgaaaatgctttatcccctctccccccatttcagttgatcaaattggaccccaatcttggcctggaggaccgtgtttcgttgtcattggcctacaaaggtgcgatgtcttcacgcttgcgcctaattaaggccattgtctccgccactggcagaagaaacgggacaaagcagcgaaaaaggggcgtcgtctgctgacaaatgagtgacggacaaaacaacaaaaacaatgatcagccgcataagaaagaaatgaattcattaagaatgatcgatcgatcataattcaaatcagtgatcaaatgcaattttatgaagaaaaacctctcaaatatatataaataaatcggatgtataaaaatggcttgctatctatcgaatgaatgcatttttctttcaaaaatacgacaattatttttcgggattttgaagggggatttaagacatccattagcagggaacggatttatatgtttttacttttttttgcgcatatgctatcgcatgaaaagctcaaaaatagcatttttacctgttttcctttcaatcagagcgagtttttagcacatataaaaaacatattttggactttttaggaataaaaacatattttggggtttcggcagtttttgatacatattttggcgattttttgagaaattttgattttttttttacaaaaatttcttttttggcgatcaaattcttggcaaaatgtcccaaaaacgttcaattttttgtattttttacctttttaataattttttcatttttatggcaaaatttaaattttagcgaaaaaattccgaaaataagcattttgctagcgaaatgggtaaaaaaatgagacttttatgcaaatattaagcagtttttttcagtttttggcacatattttggccttttttgggggtttttagcacatatatatgtacatatttggcgttttttaacacatataaatccgttccctgtccattagcaatattcgcaattagtaccgacaaaattaaagtgtcgatttgctgcggtttattggaaagacggaaattgggacaacaattgtaacaatgtgatcatttgtgagcaattaaaaaaaggcatttaattttgtttaaataattaaaattgcgcctaattaaggcaattgtctccgccaccggaagaagaaacgggacaaagcagcgaaaaagggcgaaatgagtgacggacaaaacaacgaaaacagtggtgattagtggaagaagaaatgaacatattcatcagtgatcaaatgcattttatgaagaaaaacctctcaaatcctatataaataaatcggatatataaaaatggcaaaaacgtggactctgttgcagttaacgttttttctttgcacccaattagcaatattagcaccggcacattaaaaagtcgatttgctgctgtttctctctcttttctcctcttccttccaccgaatttttccttttcctctctntctcttccgtctctcctcctttcccacgctatttccctccttttctcctctcccnntgttctccatttttgctgttgtctatcttcatctcctttctcatcaaaattt

SEQ ID NO: 6543 - DNA, 655 bp, Heterodera glycines
gggtgtcagattcatgatcagcgaccccgaaaacccctagaaatgtttaaatatatgattattaaaaactatttttttatggtctgtaaacgacataagtaccgtcagttagttgattggactcataaaatgtaggaaaattaacacattttccgattgtatcgtatatttttttgatccgcaggtgtcgtcgaactcgcaaagggcgcttaccaagaagccatggacatcgccacctccaaaattgcagcgatcaatccgactcgtcttggccttgcactcagcttctccgtgttcaacttcgaaatcttaaaatcggtggacgaggcgcgcaaattggcccaaaaagtgggaccaatttgatgatttccatcatgctttttctttcaatgtggctaaattctccccggattttcaggcaattgacttggcccaggcggagattgccacactgacggtgccattagctgatgacgcctcgatcaacttgcgcatgatgagggaaaacatggaattgtggacaccggagggcggcagccacaccaagacgacctgagaagaaaatgccgaactgactgaccaatcagatggacgatattatgcatacaacaacgatattcaacagattgtgtaaataattatgtatatatatgcc

SEQ ID NO: 6544 - DNA, 3443 bp, Heterodera glycines
caaatgttttaaaaaaccaaaaaattgttttttcaacaaaataagagaaattgttgtgtacataagttgaataaactatatatatatatatacatatatatatatatatatatatttgcttttttttaaattaataaacagagaaataaatttgatttaaaaaaaacataattttttctccatttatttttcgtaataactaaatatgttaattcatatcttgctcacaaatcaacaatgttttgttgaaaaataataatttgttttcccccaattattttgagcaatttgttgaccgtgggcaaagcgactaaaaatgagagaaatttgggggggggggggtcataacgaaacattactttctcctgctgctgacctacataaattatcataaacaaattattggtttttgggtgtgtggcctattagccgattaattctttacgtttttttcgactcgaaaattcctttttcaaatttccttgagaaagttaaatttgcggcagaaaaaaaaacaacttgcgaattggcacaattcggattatatgaattttattttatgcaagtccataataatttggttttttatgaaacaaaattccaaaaaaaaaaatttaaaaaataaaagcatcttaaatattttcattgccaaaaattgccattaataatcagattttgatttttaaaattgttttaatataaattttgcaatctttaattaaattgttaaaaattaattttttattttaatttattcttttgaatttgttatttttaaatgtgagattgttttttattgctttgacaaaatatttttgcaaaaaccttttttctgtttcatttttgtgcatttcattacaaatttgttgtataaaattaaggaaaaaaactattttattataatgaaaagaatcggccaagaaagtgttaatggcgggcaaaagccaaggaaaagcaagaaaatgccaacaaaaacggacagcagcgacgatgagtcagatgaagaaaattcagcagcaggtgggtaaataactaaataatggttaaaaataaatttaaaaatgctatttttttagcattagctttttgtcacaaaactttaaattctttttatgtataataatgacttttgaaaattaaaaacaaaaaagcttatttgtcaagggtgtattattttcgttcaattgttttgaattattttcgagccaattttctgcagaatgttcgacttaaatcatggtgtttggttgtattattaagccgaaatcctccagaaattgacattttttcaacaagattttggggttctaaaatatgaacattttttaatgcgattcaaaaactttaaatagtattttttcaataaaattgaattgttttattttgccagcaatttttctgagaatttttggcttcaaaatattcttatttttttaatattttttgattttgacgtcggtacagctaggagccgacggaagaaattttaaaaattctaaaaatattttagtaggagattttgccaataaaaagcaaatttttaggatttttataaatctattttaaaattctcaaaaattaaacattttttggcaaaatctaacaaatcgtatcaatgtcttcaaaattttcccgccggtgcccccattaccgtcgtttctgaaattttttaatatttaaaagatgcattacggaaattacggcactttttgacccccgtaatactaataacggatttcagtaatttaaattccagttacgcccacccctgctgatgttaagaaccattttgaaacatttatgattgtggatttctttaggacagaattcccaaaaaatatttttatttattttttttgcctgatttttttaaatttacaaatatcatgattatcattttagcagaatcaccagggaataaatggatgaagctaatgttgagcacgggaaagtacgcggatgtgcactttttggtgggggacggagacgcaaaaatggtgagttttaaattgcctaattataatccttttaattgtgaaatcgcccccgacacttcggggaagagattagcgaagatcagggacggaagatgggtcaaaaatgggggttattgttagttaattaattttctttaaagttttaatccttttaagcgcgtgccagcccataagctcattttggaagaggcttccgacgtatttaaggcaatgttccgttttgatgccaaaaaggaaaaagcggagaatggtaaaaatatagtaactaaaataactaagatttaattgtcaattagactctgctaattgcccagctgatgtggagattcccgatgttgaagcagcagcattcaaagtgatgttgagcttcatttatgctggtgatttgagcgaattgaacggagacaatgcaatggcagtgctttacaccggtgaatttattttaaggaaattaaatatttataaattaaatgtttgaaattaaatttaatgagtaatatttttttattagccaaaaaatacatcatccctggcctggtcgaacgatctttgcaaattcccatctccgaattgcgcaatgttttctttgcgtatgcccaggctcgtcttttcgactttgaggtgggagataaataatttaatgataatgaatttaagatgatttaaatgcaataattatttatatatttatattttttataaattttaggactattgcaatgattgtttggattatattgatgggaatgcggacgctttgctcaaatcggatggatttttgcaaattgaccaaaaattgttatgcgaaattttgggacgccaattacaaatccgtgaagaattttcaatttgggaagcagtaatttttttaatttaaaaaagttacaatttcattttaaataacttcctatttaattcgaatttattttcggcactccgttgggccaacgaaaagtgccgtgaaaatggcattgaatgttcagcagagaatcgccgtcaaatgcttggcccggcacttttcaaaattcgctttcctctcttctcacaagaggatttctcggagaaaattggtaaaaataagtcaaaatttcaaatgcattatttgatgactagggatgtcaaaaatatgtacaaaaattggtcaaaatatgcacataaatatgtaaaaaaaaatcccgaaatatgtataaaaacccaaaatatgtaccaaatatttaaataaaattttttaatggtttttttttgaaaaaatcttcgtaaagtgttatataaacacaaaattgcagtaaaatgacctaaatatgtttagaatcaccttataatatttacaaaaatatttttggtattttttatgggtacatttaaaaaaaagttttttttactttttcaaaagaaattctaaaaaaattttcaaaaattctcaaaatatgtataaaaaaatgaaaa

SEQ ID NO: 6545 - DNA, 2883 bp, Heterodera glycines
  unsure (1)..(2883): unsure at all n locations
aaagagagagattgaaaattgatgggaatagtacacccactgggggataaattaagcggcagaatgcttgggaaaaaggctttattacatgagaataaatctggagagggagtgaaagtggaggaaatagtgtgggaaagacaaagaagaggattgtgaaaatgtgtgagagaggcagacaagcagagcaagtgaaaatattatataaatctaagagaagagccccagactgggaaaggggaacaaaatagtgcggtggaaagacggcatacagcgaagaaatagtacggctaacagagagctttgatcaatgaaagaaattcagcaaaagctcggtggaccatgcggcgcaagcagtgaaagctgttgaaagaagaagcgacacaaaaagcagcggcgcgcaatgaaaaaaacgcatccgatcgattgatcgcagcgccatcgccccgcgggcgctttctgctgatcatcggcctttggagttgctgttgatgaaataataaatatacaatgaatgacattgatgtacatctgcttttgcttttgctactgcttcttcgctaccacaattaattttcattaaaatatttatgtataattaatattaaatattgtgagggtggtggaaataatttttcaaaaatttttaaaaatttatttgaacgtaaattatgggccccctctgtttatcaatgtcaatttatacttacatacaaatcatattaattgcaaaaattaaattaaattactgataaatcatattaacaaaggaaaaaaacgcaaaaaaaaaaaaaaaattaaaaaacgatttaataattaattttaaaataaacattttttgaataacccccgaaaaaataattgacatgatctccccctatttcccacttgtccttccttctcttgtgctgttttcataaacaaatattatagctgctcatcggatttcaaaaacgatttattatttatttaatttattttttgcaattattacttttttatttattttattaattattttaaattattctttactctatcctttcccttcctctttccctcattttcatctcctttgacttggaatttaattaattattttattgcttctttcaatttcgaaaaaatccttctttctccctgccattagttttaagatatttccggactagtttttacgagttttattaaggcgatgggcgaataatttatattaataattaattcatcaaattaaaacaaattttttttttattgaatttcatcctcaactcacgcattttcgcttttttacggaatcaatttccaattacaatggaattttaaacacatttaattatttttatttatttttactggcctaaaacattttccataatccgattaacaaatcgtttttatggtttattgatcgttgtaaaagcggcagcagaatatttggcctcgtttcacatatgtttatagattttacaccatcttttttttttgctcactataacataaatgaagaataataatggcattttcaaatgcaaaattttggatttacttaataaaaatctaatctcatccttaaatctctttcttttttttaatccaaaaactttaattttttttaatatataaatattttaatttaaatttttatctgtaaaaatattgcattttttttagtaatcacatcttttagcgcaattcagtaaaaattggaaatgcttttatttattttgaggcacttaggcttagttgaatattcatatttcaaatttttcgcctttaaaaaattagaaatccatcttaatgaagtgtcaatgctttaaaataaatttaattattttacacaaaaatttaaattttttaaatttatttattccatatttaattattttacacaaattttgaaattttttaaaccctcttaaaaattcacattgatttatgaacttggaccatctcaattctcgtcattcatcagcagagattacacaacaaattttatgaataaaaagtgcattcaaaaaaaaactcgtcatttttttcgctttcatttcactgccaatgaaaatgcaatggcgagaataataatttattgtgattgattcattatggttacacattctgaaaattatttgtgatcagtcatcccattcttttttttctgttttttgattgcgaatggaatgattttcaaaccacaattatataattttttaattaaaatttttttctggtcggcgtggttttggggccataactactatgtattgccaaccagggatgtgccggaatgcctttccaatgcttttgggctcggaattcggaatgccgaaaattgtcagccgtatgattcttctgggttctggcaatcccctaagtgtattaaatgagagcaagctccgccccctcaattaaattggcatttggcgttttgttatgagagaaattagagaaaaagaaaaagaaagcactattatgaaaaaaggacatacatagaaattgtttatttctttcttctatgtattatgaaattcaaaaaagagaaaaattgttttcatttattgttttgttacattaaagtgaaagggggctgatctacacatacaatgcttttattgtaggttattatttgctattaatgataacagattaaaaatatatttattatttgctattaatgataacagattaaaaatatatttattatttgctattaatgataacagattaaaaatatataattttattaaaatgttaatattttgtataatacggtttttaattataacttggttatttatgtggttggtgtttcgtcatcaactattgacctttttttaataaatgattaatgaattgaatttccanaaattaaaataaagaact

SEQ ID NO: 6546 - DNA, 5783 bp, Heterodera glycines
ggaaaatgaaatgaaaatttacacgacgattttcccgtctcaaaacgccgcacgattgatcacttatgtaaacgcaaaaataatcagaaaagcaatgatcgaaggcaaataattaattacttaatttaattaaattatcatgcattttagcgctgaacaaaatgataaattcggatgattggccaacaattttagcgacaaattcaatgaattttgttgaaaaagtgagagaattttccaatttacaaattattgcccttttcagtacaaaacttttgtcgcaattaattgtcttggtcaaaacggagctttcgtccgcaatttttgccaatttgtcgaaggtcgaattcgtcttcagatgacttatgacattggccacagaggggcgacgacgaattggcacatttacccggcactattccaagaaacatgccaaatcacacacaaattggagcaaattccagcaaaatttcggtagaatttgcaaaaaggctgacaatttaaatgggaaattgaattatattttaattgcccattttccttccagctcaaattaccaccaatgcaaagtttggctgattggctctgatcagtcgctgaatggtactgaccagcggatgatcaatgggcagctgcgcaacttcgactgggccataaaaagggacttcctcaaattcaacggcaaactgtcgaacaaagcctggggtgttgacattgacgaggaatgccaacggatgaacgtcactttgaagtccgtttttgtggaagacttggcacaattgttgagcagcagcaattagcacggaaagggaagcacaaccgaaagaaagacagaacaaagccttttctaattggctaattaataataccacgaaatgtcacaataaataaaataaatgtgtcataataaaattaacaatttgagcaaattaaatggttaatgagaagagaaaagggactgattgactgctgctggacggggatgggcccggggatgggtcagtgacaattggacaatgattaaattgataaaacttaaatattagtgacgtattgtccattgacagattgtctgctgggcatcataaactcacgtagtccatttgtcaatataaaaattcaggaattagataatcgggaatttattggaatttaattgttccattttttaaataatttttttgtgctatgaaaaatctatgcaattaaaacgggaccagagcgtttgggcccccgtttttgggcccccgcgtttgggcccccgtttttgggccccgggggtcgtttgggcccccgttttttgggccccggggtcgtttgggccccaacccaaaaatcgaaaaatgtgcttttttaaaaattaagattctaaaaactaagcctgagggatccctcgccacttggcataagttaggtttaattaacattcgctcattttttacaattttacttattccaaatcctattattttttaatagttaaccaatttgatgtacattctgatttggacatttttcagaaatggctaacccaattgcaaccaaaaaacaaaaagtaaaattgtcttacgaaggccacctttacaccttcgctaaaatgagttctgatgggatgacaaaattttggagatgcgagttcaaaaacagcaccgacaaatgcaacggccgaatctggacggacctccacgaccaattcattcgcctcgcaactccgcacacatgtccagcagatgcgtcacgtgttgatgctcaaatggtcacgaccgcaatcaaaagttttccaaccgctgattgactggtgtgtgaactttttttaaatttaaaccccactgaaattacaggctattaatcaattacgttggacagcccaggcccaatggcacatggtatcaaccaacttttcgccctgaacaatggaacgtctacacacgcacgcttaatgccgatgcacggaccaacaaccactccgaggcggagcatcatcgtctacagggcgccttcaattgccgacacccgtcgatttttcacttcattgacgtgctacgtcgtgagcagaagacaacagacgtcaaatacgcgtcattcattgccggagaggagccaccaccaaaaaagcgaaagtttttggcgacagatgaacgaattcttaatttggtgcgcctttacgtcccgatgaatgcaggcaacatcaaccatgatcacaattaccacaatcgcaatcaatttcacattattttggagtttctccggggaatttctcgcaactatcgaatgaacccgtgaatttctgttaatttttacattttttattgttaaaattattgttgaatttatttttaaactgtttattttacatttttatgctgaaatttaaaaagttgtttttactgtgatttttcatttttctgtacttggggcccaaacgaccctggggcccaaacgaccctggggcccaaaaacgagggcccaaaaacgggggcccaaacgcgggggcccaaaactgcgcccccgactcgttaaagtctttacaaatcacagtttctgatgaatgcaattctttatgccgtcagaacatttacaagcgcttaattttgacaataaaagaataaaagagtgaattaccaaatgaaaatttgttagtttagtaaaaaattaaaattaattgagatttaattgtttgagcggactattttttgtttttccaagaaaagagagaagaagaccaagaccattcgtcatcgttttccaacagactgttcagcgaagaataggttctgctccgtaacatttttacgtagtcggaattggccacttcttcgggaatttccgaaataatttcattgagcagctgctgccactgggcttcagtcatcttcttgtttcgtgccattgctgacgtggacggctgacaagtcctgacctgctgaggcactgttgacaaggattgcggcaccgctggcacaatcgacggagggggaggaatctgacaaaattaaaaaatataatcatttgaagacaaaacaattaattatagaagtagtataggacccctaaaggttgcgggttggttgcgggtgtttcccgcacgagcccgtgcctatgggaggggtgcagccctttgaagttgccgccccatcaaaaatccacgatggggggggggggggtgtttcaaaaccaaaacctattggaccactttgaagttgccgcctgaccaaatccgatttcccaaattgttgcgggtgtttttttcccgcgccgcgcagcgccgcgggaaggtcatcaatcatccacctgtcaccaaagtgacaggtggaggaaattcaatttaacttttgcaaattttaatcttttgtttcaaaaccttttagcgttttattttctcaatcctgaaattttttttatgatgattttttgatcctgaaattaaaaattctttttgaaaattagccaaaatcgtgaggttttttcatttccactcactccctgccgatgcgccgcgatgccgagtcgcgcgcaaaaaaaaatcgataacggaatttggaagaagtgcaaattaattgatattggcagcaaataattttgattatgaattggacaataaaattactatttaaatccaatttaaaagtaaaatcaaagaatgaataaataaattaaaaaactttttcaaaagtaggtcacctgtcaactaaaaattgattgatgggttttttatttttcttcccttatttctcaatctgcacgtgactttttgttcaaattatttcgcaatatctcccctaaattaggtcaactgtcaataaaatgtgattgattggtttcttatttaaatgtctccattatttttgggtccaactatttcgcaatatggcccgtaattttgcaaacctgtcaaaaaaaaaaatgattgatgactttcgaaataaggaatatccaaacgatttttgcacggtttttgaataaaatgagacagctgtctaccgaaatgattgatgaccccctaaattaaggcaaccccagacagtcatgtgactagacccctcccctctcgcccaatccgtacacccggcccaaatcgcaaatcattcaactaaatagttggatttcattaaactctcttcacgctctaattttatttctctccgctctatttttatttgcattaattaaatcttctattaaattcccgtctttttcttttcaaatctctgctctctttaattcttctgtttcaatttcttgttttaaaatgtcttttaaacgcgtgaactccttccaacccgcgtgccaatggccaaaaaatgggatttccgatcaatcgggtaagtgatttttaataaattaaataaaaaaataatttcttaaacaattataaatacaattataagataataccccttaagaattatttcaaaaaaaaattttttttttgttcagaaataattttgctgaagaaatggaaaattataaattgatggattaccaatcgacaacttgcgaaaaatttggatttacgaaaaatattacggaatttcgtgtcaacccggacgtggaacgccccgatgaagcgatgaaggatgcgatcgacaacatgataaaggtggctttaaaaactacggaagaaaaaatgaagcgaaaagtgcggatgtttggagtggcaattacgggtgctgggcttgctttcccggtatgagtaccgtatcgggcgtacccgcagaacaatgcggatgttattatgcaggaaattaataagttggggcagagcggggacggagatgaaaataaaatgctgttgctctcggagcctattacgatgaaaattacttgcgttacaatgcccagtggagaagggccgaggaatgtccataaatttgactttggattcaaggaacaccagcggatagggtaagtgtttttaataaaataaaattaaaatagaaaaaactaaaataaaaaaaacaataaataaatttaaaagaaatacattaaatttatttaatgaagcaaaaattctttaaaaattaaatttaaaaaatcaaaaaaaaaataataaagtaaaaaataattaattaaaaaatattaaataaataaaaaatatagtttaaaaaatcaaaataaattaaataataattaaagtaaagaaaaaaagaaataattatttttcattaagcaaagcagcaaaaaaaaaacagaaaaaaaatttaaaaaataaattaaataataaagaaaaaataaatggaaataataataataataattttattaaggattacaaatgcggataaattatgtctgttttacgcgctcgtagcctcgaaattttatctggaattgcatgtggacagcttcaggagatttatgaaaaatattgtgagacagagggatgcagctattgagcttttacataattgtggaattgatattaacgaatatagctatggtgtggagcaattaccgaatgttcagaaatattgggtgggtttaaatgaaaaaatgcaaaattaataaatttttcaggatgagatttaccccggaaagtaccgggttgtggcatttgagaagtcagctgatccgcggaaatcgatccgtgttttgtggaagggccagatggggcgagagaaggtcgtaccgatatttttggagaatggtcattgggatggtctgaagaatttcgtctgcttttttaatcgagggaggaagttttgtattgactgtgagtgcttttattcgagcgatgttcacacgccttggagtgctgggcgagatgttattattgcaataaa

SEQ ID NO: 6547 - DNA, 5340 bp, Heterodera glycines
  unsure (1)..(5340): unsure at all n locations
aatttttcgtacatatttttcattttttttacatattttgaggattttttagaatttatagaaattttttgtaaaaaatttaaaaatttttttttgaaaatgtatccctaaaaaatcgattttttcaaaaaataatatatcaaaaattaatttgtaaaaatgtttatcttaaaaaaattctgctctgatctgaaaaattttgatcgaacgccggctaaaataaacaaattaaatattttatcaactcgaatttttcaaaaagcttaattgtataatttaaaattttttatccatcttttaatataattttatttgcgtcaaatttttgttatttttccacaatttctgaaaaaaaaaataattttactcaaatgatgagagtgtatcaccaattaaaatgtgttttcgtgcttatctctgcaataagtgcgcagaattttaggcatttgactaaaaatcgcatccctactaataaatcgaccatttatttagaaatattttatactttatatcacaaatctgatagtatattttaataaataaacgatttttttaaatcattttattttactttatataataattatgcataaatgcttcctaaatatttttgtggtagcgatgattcaatgtgaaagtggataaaattgtccgttttgtccacataaaatgaaaaaaaggcatttgcatcgcttctctcccaaacactgcactgatttgtgaatatggaatggacaaaattccgatcagcagaaagataaagccaataaacgatgagtcaccgtttctattggcttttttggctttttaagcgattgcaaagccagctaaacccactaatttaccaatcattttacccattttcagcaaatttattcctttcccaaaatcaaaatgaatttaatttgcttttcgctcttttttgttgttctggcgacaaatgccatcggtgaagggtaattaaatgaatgcaaatcaattttcaaatgctttctgtttctttagaattgccgaggacaaatggaaaaagtgcgaattgaacggaatgatcagaatgggaaaggacgttaaaaagtaatttgcaaataattttggtgataattaattaattttcccgcattaaaattagtctgctaatttgctacaagagcaaaatggccgataattttggatggaaagtgggaaaagtgttcaaaaggcgcaatttgaataagcaattggctgaaagatgtgttggcacagacggtacgaagggatggcacgcgctaatgatcgaacagaaggaaaacgggcaaaatggtctgatccttaagtcctcttttgggtgagtgatttaattttaaattaaaaacaaatttaattttagaaatgatttatccgtggaaatgggccccgaattttttattcaaggctccgactttttggacattaacatcacaaagggtacagttcgacaacaaattaaatttaatgatcgagtcattagtgttaatgagttcctcttccgctgaattggccgagttccaaaatgctcttccgttcggtgtttttttgaatgatttcgacggcgcagcgcttggaattatcgcatttgaaattcattgtgccattggaacaaatgacgtgaacagttgcaaaacgatggtaaagtgaaatttaaaaaataaatttgaaaattttgaatgaaaaaaatggttggctacgggggaatagaacctatggctacaaaacaactaagatttgaatgtattaagaatttttttttaataaaaattttaattttgtaggctaccgaagaaaaaagtcgaaaattgaccactcggggaattcgaacttccacaaccactcgggcaactccgccaaaaacaaagctgaaaattgtaactccattcaaaactgaaacaccacgcgttgtaatcgttttcattttttaaaaatttaaaaataatgctttttctagtctgaaattgaaaaatcaccgaaactgaccaccctggaaacccatacaaaaacaaacccaaatgtcggaacttcatctgccgtaatcatttccctcaaattaaattaaatttttttagccgaatctgttcactccacgtgattctactgtgaagcatttcggcacaaattgcgtccaaattgattttccagctgaaattgcccaattttcgctgaacgtttccgccgcactattcggcattgcctgtaaacaatacttaaaaaagtacgaaattggacaattgccaaaaaattacgacgaaaaaatggaaataaaagacaaaatggaagcgtgtggaaaagtgccgacagagacaaattgcaaaaagttaaaaaaatggaaattaaaattaaattaacccctaattaaggtcatatgagctgattggatgttatgaaagcaaaagtcagcagaaaattgccaacgaggaaattgccgaagtttgccgaaaacacctcgcaaatgccaagttttcggatgggtttcgaattcggaactgtgccagtcgtaaaccagggacgaaagtgatcgttgtcgaatcaattttggaattttcactcaccgagaaaaagtgaatttaaataagtgttgaaaattttttaatttttttatcaaagttataccatcacccgaaatgcttcaattgatgacgtaaaggaatttgaagctgcaacaaaatcaactcaattatttttcatcgaatttggccaccaaattgggcaaagtgcgctccgtggggaaagcggcggcacgtatttgtcattggacgatttggacaaaaaggcaaaaattatataaaaataatttaaaattgttgtttctttaaatttagaatgaaacaattggccacattttgggctcaatcgctgaacaatcaattgatgggggttgggcgaaatcaattcattttattccgccgtctgacagatttctgaaagcatttttccaaatttggaacccgacgttttcaaggcgaatcaacaacgaaacgagctggatgccatatcaaaacgacccgaacaatgtaagagttgggaaagaaaacagaaaaaggttaaatattactagacgattccgactagttgcgatttgctgggcaaagattgtgatgcgacacgcgaaattctacggaaaattcggaaagttttggagtgctgctccccctctaatgctgctggcccatgtatttgtaaacttccgaagcccgacctggtaaattaataatttaagctaattgtactgtcattttctgttagagtgaatttgcggtgcctccgggtacaaatccgtctcagcaacaaaagtcacgcttcagcagtaacagccaatcggacgacccattggattggtgggacgatattttatatacgaaagaggatgcgcaacaaagatacgactattttatggaaggtgattactgtatgagaaaaaaacattgcttaattggctaattaattaattatgttggttctaatttaagtgtgcgcaccgtgtttcccaccaaaaacgaaggggaaacggagaaggaaaagacaggcaaagccaaatttgagcaaatggaccaaatttccaattgcgatccgtttcagcaaatcatgtagtatatatgtagaatgaatttataaattttttaacaacattcagtgggcgacccgactccgcaacaatatgttgaagctgttgaacaagggataaaattaatcatgtgggatcattttatcaatcattaaaccgataaatagtgagataaatagatactttagataaacttttgtccaatattccttgctttctgttaaaaagccgaaaaataaaacacttctcaaaattaatattgtttaaaaattgtgaactgatagaattattatttagtgaccattttcctcgggtcttcccgcattttatagttttgatcatttaaacaaaaatatactagggacaaaacttgcataacattcaccacggatctgagccatgggccggacgaaggcattgaaattttcgacgcgaaggacggaaactgcggccgatccggggttggacatattaaggaatggcaacgtgtttcaattaactgtaccaatgtttgtttttattatcgttatcaatttaattaagttcatttctcaatttgcagtccgacactgttgcccacgagtttttacatgcgcttgccctctggcatgagcaagaccgggacgatgccaacaaatacatcaaatggaatccaacgccacgaaatgttagccaggattacaagaattttcttttgcaattttacattaaaaaacactggcataatttaatattttagcaaaaagaaccggcgaaaactgaaaattacggctttccctatgattttcattcaattttgcattatgaagctgtgaaaacaagcgggtcagttattttaaaggtataaatgaaaagaaaataatttggcaatgaatcagctattacgacatgattacgctgaaccgtttttaccaacgcacaatgtttcactcaacatatgaactttcgtttaaagacgccgccattatcaacaaaatttattgcgacggtaaatcgaattaattcattataaaatagagtgaattaatttaagaaaattgcaaaaacgttgaaaacaaatgccaaaagggaggatatcccaacccaaaccattgcaaccaatgcctttgcccggtgggatacggtggagaaacatgcgaaatggtcgaaaatggtaaaaaaaaaattaaaatgataaaaattattaatatttcagatggaaattgccaaactgacagggcaaatgaaattgaagcagattggcaaattcgaacgttgaagccaaaagtgagctgcacaaaaaaggatgagtcatgtggatgccattggcaaataaaggcaacatttatatgaaatattaaaaataaaattaaaaaaacgaaaacaaacaaataaaattaatataatattactaaaaattaatttaaagaaaaaaaacatatttacagccacaagatggcaaaaaggtgatcatcaaattgaaatggctgcatgaaaaggtgctcacctgtgatgacccttgcggcacttatcgagtcgaaataaaataccgaaaagacaaaagggcgcggggtaatttaatttaattaaataataattatttanattttgtaaaggtgcatttatttgctgttccaagcaaattgataaagatgaaacaaagaattggattgaggcggatgcacccggcgaggacattctcatttcggcttatcccaatcagactaattttgaaacatttacggaaattgttcgaattgacttacgaaacaagtatggacacataa

SEQ ID NO: 6548 - DNA, 1995 bp, Heterodera glycines
ttttgaacattgacggaattgttcgaattgacttacgaaacgggtatgggcacgtaataattattattttatgctaattgcttttaaattacttagacggcgccaaaattttgccagcgagcgattgtccggacggtgtgaattggaagccggagagatcacccggaaaggttaatatgtgcaatcatcccgataccggcaagcttgttgaatgctgcacgaaggggcacaaatgtccattacgggccaactcagcattcggctgtaaactaattgttggtatggtaaaaaccaaaggggttttagaccgagtacaacttttcactaatcatttacaataagaatttataattcgcatccataatgtactatagactcagtaccctattgctttaacaaatatgttaattctctgggaaattattaaatttttgatcaaaaaaagattttagctttggccatactcttttagacagttttggcacactttgggaaaattttataaaaattttgcgaaatttgggtatggcctagtctcagagagggtatgaataagtaaaatctgaaatgttgaaagaaaattattaagctaaacggccaataccgcgagatcagaggcgtaaacgaaagcaaagtcttctttttcgaatgttttgtaagtgacattaaataatttaattaattaattgtaaaaaaatgcattgtcaattaattaaaaattaattgattaattggttaaatttatttttaaagaggcgagaaggagagatgaaaagcttttggggttattggaaggacaaaagcaaagacccaattcgcattgacgaaatgcaatgcatgagctacgaacaagccggcatcataaatccgccagacaaaacagtgattgattacccattgcgcttcaaaagtgccaacacaaacgaataatgatgccaaagggatgaaccaactgcggagaatggatgtgatgcatagggcggggatttttatttaaaagttattctttttataatattttattttttagtgtatttaactttggttttgtattttaaatttatttgtattgtaaataaattatttaatcatagctctgtgtcccatttcggcactaatgatgaatttaagagtgccaaattcttttattttatgttccttaacatttaatcaatgaaagacaaaaaataaaaagaaaagaatttattattttttagataaaagatactttcgaacaattttatgagatttttcatttaattttcaccacatttatttttttatattttagcacacattttatctttttaagaaatattaattcaagaaaacctttctttctaattatttttaaattaaaaaatggaggattcatttagcataaccatttgctaaaagattatggagaaagaaaatgaaaaagtttagcaaataaaacccaaaaatttgtgaagagaaataacatttaaaaaggaaaataagttttgaagaaatgaatgtgaattaaaaagggatggaaatttaaaaaattgtcaaaaatgaattttataaaataaaaaaataaattttttaaaatttattcccgtcattttgttttcctttttctgaaaaaaatgtcattaattcttttattcgttttaataatattttttggctgtccaattcatcagaaaataaaatattaaatacaaatcatttgatgaaatatttaaaggaaattgagaaaaataataagaaaatttggacgaaaaaaaaaataattgggaaatattcgctgatcttctaaaaaatttacatttcttttaatgcgtagtttattttaaatattgaagttaaatttcaatttgcatttattaaatcataattactgttgttggtcgaccgacgaaaaagtgctaaaatctagcaataatttcatctacacataatttgttgaatttgaaatgaaagttaactacctatgtggaggaaaattaagttttgctgattttcaaa

SEQ ID NO: 6549 - DNA, 8390 bp, Heterodera glycines
tataaattgtaaataaattatagcaaaattataggataactttttacgctgctgtgcagcgctctggcggcgccatcaacactgcggcgcccgctgcttgcgccctcaaagctgttgcggtgggtgctggcgccactaaaactgcggcgccggctgcttgcgctgccatcaaaactgtgcctcggaccgctgtccttcagcaattcctttttgacttcatgcatgaactgctcgaaatccgccacgtcatccatcttcgcttgttccacgtcaaattttatgtcatccgccgccgccggcggtttcacgccatttccgttcgcctcaattgtgtccgcattctcacgcactctgcacgcgggaaaccattcaaaatatttggtgaatttacgtatctcattcgcagtcatctgcttgctgagcacggaaattgcgcgcagaaagactcgcccagggcccgcagcaaacagcaggcgggtgcgcatttcaagcagtgctttcagctctcaaaatttcaattatttaaacttaattcttaattcattaattaaagtctatgcacgtgcagggacacggcccaggagggtacactacttttgctccccgccttccgctccgcgtatcagttgcccccgggtcagtcgccctccgtttatttattagccctccacgctccctccgaaatcaaaaattaattttcaagcagaatttttctaaatccggtggtcattaattataattagtccctgtgttctgcacggcgttttactgcacaaatttgcatcatgctgaaaaactgtgctatgcacaaatgcacagtactacccaatgctggattttcgaaaaatcgttaaaaaagtaataaaaaattttaaagggatgatagaggcaaaaataccttttttaaaaaaaatcagcaaataattctctatcagatagcttgtcgtaaaacaaaattaaataactgaataaaaagattaaaagtgattttaaaatgcgatttggaaactcatagttcgcgaggttcgttagttgtaccggtgctatgtcgattcctaaaaagagcaaaaatcaaaaatctgctttttcctatgattttttttatcatttttaaattataaacatgctaaaatttaattaaattgatgcttaaatacacattcttctaaaagtttttttggttctctaataaaaataattaaaatttacctaatattaataaaatcattaactagattacttaaaattaaagtttcaatggcgcctatattaatattatgtaatttaaatttatttttattctaaatctaaaaaaactttttaaacgaatgtgtatttaagcatcaatttaattaaattctaacatattcttaatttaaaaaattgataaaaaatcataggaaaaatcagatttttggtttttgcacttttttggaatcgaccaatcacggttgtaccgtaccttctccgtcgttgactaagtcatttagctcatcatgaccatgattttcccccgaattgttggtgcccatcagtttagcatcatccaccacttggtttatcccttccgccaagaatttattgttgctcatacgcatgtccttcaagaattcgtcataaaagtcggagaagtcactgaccgaactgcgccgcatgcgttcatactgttcgctaatactgggtaaatttattttgggggtggtgcaggaaaataaaaaaaatttcaaagtaattaatgcgcaagaaaaaaggttaccccgcatttgcgcctcaggcatttggccccagacattgcggctatgtctaaaatcgggttcaaaccaaattttttcgatccctaacatagtaatttaatttattatgagcattaattatgttatttgaataattaagcattaaatgttatttgaataattaacgatttttcaaaaattttctgaagttccaattattagacacaatcaattgctatcatttatttaaggttatttagaatatcagggattgaaatattaagtttgaacccgattttagacataggcgcaaatgtctggggcgcaaatgtccggggcgcaaatgtctggacacgagaaaaaataatattttatttttattttaattgaatgtaatttggcaaaatttatgcaagcttcttaatatttaagttttcatgtaaaatggggcctaaattataaaaatcgtttcaaaatgaatcattttttgcgtgcttggtcttttcgtaaaattcgtcatttagctctttttcgacaaagcatggtataactttgcttaaaacaatcaaaattttttattttttgttgtgtgtgccggtatcccaggtgtattcgcgtatcttgacgatggattaatcgctacaaaaacgcttgatcaacacatcacggcactgtacactctttttggacgcataaaagaatatggtcttcgcatccaactggacaaatgcaaatttttgcagcccgaacttttgttccttgggcatattgtgtcagcaaatggcattcgtcctgacccatcgcgttcggacgcaattcggaaaatgcccgcaccgatcgacaaaagcacgctccgatcattcttgggagctttgaattattatggcagatttgtgaaatgcatgcgtgaattgcgtgcaccgctcgacaaactcctccaaaaggacgtagtttggaattggacgtccgaacagcaaaatgcttttgaaaaagcaaaggaaacgatgacgtccgaccttctgctgacccattacgacccggcacgcccaatcgtcgtatcagcagacgcctccaaggatggaatcggcgccacattaagccacacattccccgacaaaaaggaaaaagtggtagaacacgcagcatgcacattgacagcagcgcaacaaaattacagccaaattgagaaagaggcactggccattgtgtttgccgttcaaaaatttcaccgcatggtgtacggccgaaaatttattttacaaacggaccacaagcctttattggctatttttggctctaaaaagggcatcccgatttatgccgcgagccgcctgcaacgctggtcaatgattttggcgaattacgactttgaaattcgctacgtcaacaccacatcatttggccaagccgacgttttgtcccggctcattgctaattatccgcgtccagaggaagacatcctgatagcaaacatctgtgctgatacagattgcttcataaattctgttttcgaaaatagaatggatcaaatcccagtgacaaccaccgaaattacagcagcaatggcaaatgatcaaccactccaaatggttcttcaatttttaagaaacggatggccaaccaaagtcgccgatccggaaattagtccatattttccaaaacgggacaaaattttggaggtcgacaattgcctattgtatgagggtcgagtgatcatcccaacttcgcttcgcagtcgcatcctaaaggcattgcacatcgcacatccaggcattgtgcgcatgaaagcacttgctcgtcgccacgtgtattggccgggaatggactcagtgatcgaaaaagttgtgagcacttgcgaagagtgtcaattgggccagaaaaaccccaccaaagcacctctttcgccatggccaacgacggacaaagtctttcagcgtgtccacatcgattttgcaggcccctgctcagatggtcaccaatatttaattctggtcgactcattttcaaagtggccagaagtttaccgaatgaacacaatttctgcctatgccacagtatttgtgctccgatcaatcatttttttggctggctcggaatcccagaagaaattttttccgacaatgggacccaatttcgatccgccgaattcgccacattttgtaaagaatttggtattaagcacattttcacaccgccatttcacccacaatcgaatggccaagtcgagcgcttcgttgacaccttcaagcgttcgatgaagaaaatgtcaaaaagcgaaaaggattgtatcgaaaagatgctattctcctacagaaccactccacacgtcgccttgaatggattttcgcccgatcaattatttttcggcagaaaattgcgcacaaaattgtcgctagtccacccgaaaggagaaaaagacgaaaattttgatcgaaactcattcaaaaagggtcaaaacaattacaccgacaaaatggctctaaattttgatcggaagcatgggacaaaaatgatcaatttctttccaaatgatcatgtcctactgataaatatcggaacaacaagacggagtggctgcaaggaaaagttgttgagaggcttcacaaatcgcccacatatcgtgtttatgtgcctgttctgcgtcaactcgttcatcggcacgcgaatcagctaaggcgacgccatcttttggaagaagaagccgaaaaggaggcacctcaaatcgaagagccaccgccggttgtcgaaccgcctcatccgccccaacaaaatcagccggccaattcaccattggttatccgccgatcaacccgagttaaaaagccgcgccaattttattctccaggatgaaaaatttaggcttaaaccttcgggtttcgaatttaagaggggaggtgttagagaaggaagtaattattgattaggtgtatgaccccacgccacttcgccatcttccccctcccattcccctcattcagttttgtgattgtgcccaccaatttgacctctccaatttattctctgcattattttatttatttctccggcaaataaacttatttaatttgttatcttcggacataacagatatttattttttctttaggccttatgtctcggctagacaaagtggtcatcaacctaatattttgcaacaatttgtcgtttaatttgatcaacagtccacaatttcgagcattatgtaagccatggaatgagcaactgaaagatgaatcacactaccgcaaaattttgcccgttgcaagtgaactagtcaagggaaagataaaagaggagttacgaaaatgtgaagcattttcttgtacatctgacatttggagtgggccaaatgaaggatttataaggtagctgaaattttactatttttgaaattttaccatttctgatcaaatgttaagtctaacaatcgaaggagttacgaaccaatgggagcgtgtgagacacattctcgcaattaaaccctttcccggcactcacactggacgtcgcgttgctgaaattttgtccgaaattattgaccagtgggaatgtcgagacaaaattcacgcttttgcaacggatggaggaacaaacatgaaaaaagttggttatgagctaacgagttgtaaatattcgtttgttttttgcaggcatttgtggaagagaacgaaaacgggcgaattttgcctttttatcgatcaaaatgtgcggcgcatttattggaccgtgctgtcaaaaacagttttggcaatcgagagggtgaaatatcgggacttttttgtatgaaatctaaatttctttaaaatttttcttaataattaagcaaattgtcgtcggattgttggaagggttaaacactcgattaaagcatttacagaattgaacgaagcacaaataaaggagggacttccgcagcacaaactgcttcaggtaagctgaaatttcggagtaaaagcaccagtttactgtaaatttaggaaatggcagttcgatggaattcttctctgatcatgataaggcggctttctgagcaaagggctgctattgaccgaatcgcatttgaacagaggaaatttgaattgactttgcaagatggcgagtggcgactgcttaatgcattggagatgctcttggcacctttggaagaagcatcactttatttttgcaaatcaccgctttcaactcaaattccttttgcaaaagcgttaatttcacaattaaaaaatttggaccttcgggcgatatgtgaaaatggatatttacagggaattactgaaattgaagaaatgcgttcaaagcttttggctggacttgaggaaagattcggtcatttggagaatgagaagtgtgtatattttttaaatttcttttaaatttcttttttagattatatgctctttcaacattcttggaccctcggtacaaacatttatttgcaaatgacaatgaccatttcaaactaaagtgcgtatattagggttctaaattatctaaaatgtgaataattaagggtgaaattttggctcgcggaccccggcaacaacgattggaagcgagcaacttttcagtgttgcgcgtgatgtgtttgactatcgtcgatcaaaattgaaggctgaacatgctgaaatgctcatttttttgaacaaatcaattccgaaaattcgattttattgatttaaaattttgcttttttattttttctttaataaacgtattgccgctcaaaatttgtgcattaaaaatatttttgtgagttttaattaaattttcggattactcccgctcccgcccgggactcacgttaaaaatggacgggatttgaacgggatcgggatttttacgggaatcccgttcgggactcccgtcccggaaaattttgaactcccgatcccgctttgatcaaaaaattactaaataaaactgttttttccccataacaaaaaactcaaaatgcctaaaatttcacctcatcggccaaccaaaaaagcctaaaatgaggctaggtaattaaagtaacaaaagtttcccacagagctggaggacggaaaatgaaaaaaggcaatctctgacagatatggaaaaaaaatcataaaaaagattcaaaaatttgatagataaaaaatttttatttatttatttatttattcaaaaataaaaataccaaaagaagggcatatgccacttacacttttggtggaaatgaggttaaatgtgaagtagtgataaaagaaaacaaactgaagaaaacattgtgaaatttgattggaaagtataaagtccgatagcagtgaaataagacaattgaatttggagaaaaatatagtcagacctccaacgaaaagaaatttttttaagagtttaaaaaaagagagagaaaaaaaaaatttttttttttttgaggaaaaattttggtgagaaatgtgaagtactggaataaatgtatttttttgaggaaatgtttgtttggaggtctgaaagaactatttattgaaaagatgagggtattgttctttgagtgattgaatttggtgagaaattttgtcggttggtggcaatgattttaatgcttcataacaaacgatgattgtttggtcaaaaacttccggcggtttggacatgtcttcgctggcctccttctggtttggtgcaacaatgggagtctggtcattcgtcgtttttgggagctgggttggaggtgccggtggagctgggttttgttgacgttttcggagacgcgcttcgtattcctctttgagttgttctttggacagcgccggacggacgaacagacggttcaggttctgttgggaacggagccgaacacgctcgcgcttccatcctccgagtgccacatgttggtgtgtgggcgttggcatgaccaccttgagcgggcgtggtgttgttcgctgcgggtcgtatcgtccgagtcgaaagacggccgttggttgggcctcaacttcaagatggtccagtatttttgtgatggcttccctgtcttcctgaacacgctccaatgggcggatggcattgctttccgggaggccaatgaagaccagggtgcgttggcgttcttgctcttcgagtgtggcagtgttttggtccaggtccagtgcaggtggcattgcacgtttggcgcgaggtggagtgatgtttgatgcgttggttcgcttcatgtcgattaattaggaaagaaaatttgttgtttttttgcgatcttaaggactacagaagagtcaactatgtatattatgtgagattataatttattagtttgagtttatagactataatatattgttttatgtatttaatttgtattaattaatattggtcttttaacttatcgaataaattgaatgactgtgatattgaattgtttttttatgtgttatttctggtcagatttctctaattattttatcattcaccaaagttatggtgcaaagaaagttgcagtttctactaacaattaaatttgaaaatttatattcatttctaatataaatttagtacgcaaatgatttgcaagtaaataatcataatactggtaaaaaattttcataaatttatttttaattcttttttcggcatctctattttattgtttatacaatattctcagtttaacaaatattaaataaaaattatgtaaattat

SEQ ID NO: 6550 - DNA, 1457 bp, Heterodera glycines
  unsure (1)..(1457): unsure at all n locations
tttcgaccctaaaatctgtttttttatttcaactttttgcatattataatttttctgtatcgaataaaatgattgttcttaaaatttgtgcattaaaaatatttttgtgtgtttttaattaaattttgaattactcccgctcccgcccggtactcccgttaaaaatggacgggattttaacgggagcgggattttaacgggattcccgttcgggactcccgtcccgtaaaattttgaactcccgctcccggaaatttttttttaccggtctctaaaattcaccaataaacacagtaaacaatgctaaaaatttaaaaaattgtaaactgcgaatgaatgaaaataaataaatcaaaaagggaaaaaattaaaaaatgattgtcccaaggcattttcatggttcactagaaattttcagaattttgatcgagtatttaacgagttattgacattcaataccaggaattacgatccgaccttaactctgcaaaatgtaatctttttactaatagcctgagctgaatttcttataaaaatttaataatttctaaagtaacatggaaaaatttttgaaatttttattacaatttgttagcatttgcacaacaataaatttttacgtaaatttaactggatatttgaaaagtttaattcagtaaggatcctatattttttccttatcttgaatttttgttttaattccgaaatattgcttcatttaattgcaaccaatttttgaattatttctcttttttctgaacatttacattatgataacttttcgaaatgttcttatcggcataatttctcatttaatcaatttgaccgtttctgttttcttcactatttttatcagaaaaattaaaaaattgcgaattctttttcttcctttaattgatcaataatattgtcattaatgtaaaatcgaattcctatgactattatttttcagatgagtcctgattaacaggcaaataattttcatgtttagtacattatggaagaatagtaaaaaaataaaattcagcatcgacgatttcggcgcggctttcgattgatggtcgtcgttcggccgtgcagtcgcgtcgtaactgctgatgttgttgctgatggagtcatcgatgcttgcgacgtacatcccgcacccggacacggcccaatggcaaatggcgttgggccagcttctccagggttgcctgatctgcggatttatcctcattttgtggctttttgataggtcaatgaggatttttttggaaaatgaggatttgaggatttttgtggctttttgagaaattttgagtatttttgaggcttttggggaaaatcctcagaatcttttaaattttgataaattggcataatgtttggggattatttaatttgaattttggtttttaatagagcatcgtgagggaaatctcacccanaatttagccagaaaannttacaanttt

SEQ ID NO: 6551 - DNA, 3063 bp, Heterodera glycines
gtgcgtcgatgttctgacatttctgcgttttgggaagccatttgtgccaaagataaatttaataaatctgtaaacaattagggagagttaataatattataatttttagaattttattaaaatcctatgatgaacagttggttgtatattgatctttaataaaattcaaaaagagcaacttttaatgcacgcctcgaaaattataggattaatatatgatagaaaatatatgaaaaaatttattattaatataagaaaagacggcaaattcttaaaagttaatataaaaatgaacaataatgcacaatccgacttaaattgtgcataattagcaattttacgactcatccctataaggcccctaagaaatggtcagaaatttccgaatacaactcaaaagaaaaattttctcgaaaattcatcccccgaattttaaaggaatttttattaaattacccatatttgaaaattcgataaatcttcgaaatatatatgctattaattcgtttacaattgaaagattctacaataaaataaaattgtatgttccataaaaacattaataattaaatttaattgcctatttttgtgtgtttatttggcatttgttgtgaatatttaatacctattttgcaatttttctaagcctcgtttttgagttcttctgttacaactttttgaaaataaacgaaattttttgaaatttttcaggctcaaagcgaacacatagcgctaccgagtaatataacgaaatttcaatttttagttttttttttgaaagctgtgaattattttactgaagatttcaagtcgagctgaacatatttgagattaattcttggaattagattaataatttgtgcgaattaaaattccgtcaattttttactgaactcccgacggtaaacaataatgttattttcacttttactaattaaataaatctttttaacgattacgtgtgtatgagaattgattataaaatgttaaagaaaattaattgcttttttgaaatatatttaattcatcaattaatcatccccaaaatattaatagagatattcaaagcttttcgtcgacctcaattaaactttttgctttcaaattggccccatgggacacatttttttttattttaaaggttgacaggctactttaagaaagtataaaggaatcaaaaaaaaacctaaaaaaaaatttaaaaaaaaaatgaccactcaatttcctcttgcgcacacaaatgcatcggcgtaagtctattttttgcgcgggcattgatctgaataatgtgatgtattcatttttgatttgtgctttttgctgttttgtttttgcactgtgttcagatcggatccccaacaccaccaaaaccagtgtggtgattgttggttactgtatctttttgaacttccaccaaattttgatcaaaattcgacatcaaaataatttattggaatttgtggaaaaaatgagaaaaaatttacttaaatgctaaatattatgctgtaaatataaattttaaaattattttttaatgtatgttttttattgaatatgatgtgttattaattattctattgactaatattaaaatgagttgccgctaattaactattgtccaaaaaattgctaatttgtgtcaattttgaaaattttgcgtggacttgctaacagatttgtcctaaaatgtccaaattttggaatttcagccgctaaatttttagttacaaatttcgaaaattatagtcagcttaagaagattctgctaattactcaatttgacgaattaatgtgaatattgtaattggaatttgttgaaaaaaagaagaaaaaaatttataattgaactacaataaaataaagttaatgtaagaaaattaaagttttggtgcatttttaaaaccatccaaagcggaacgggccaactccgtctgagcaaactttgagtcaatataactttttaaattgttaacagaatctaacaatattgatattattcgaaagctcataacaggcttttttagccgaataataattacagaaatgtcgaactgcaaaaaaaaaatatagagataaaaaattttagaaaattatgcttttttgaggttttcaagcgatagatgtttgtgaactgtttcattacttagaaatagcttagaaatatcttctaaacatttaaagctgtaaaatgataccaagtttgttaggtttggtcaacaaaaaaagttatgccttttgaatattgctgagacagagttgaccaaacgtagttgattgaccctactgaccacaaagaactgaaattttaaattatatttctccgacaaaaaatcaatgccaaaaaagagacgaactgaaaacagttacaaatgacactgaagtcgcaaaatatgcacataaaagaaaaatatgcatataaattttctaattaagggataaactttccaaaatttcttaaaattcttaaatcaatgtatatctctaaaaatggcggatttggtgcttctttgtcaggatcgttttgttggcgttcttcccgagcaacagctgaacaacttcttttggccctcatgcaatggacagaaaatttatattaaaaagccatttttatgctaaattgatattatcattattgattttaaataaaagaaattataatatatttcctcaggtataagccacccccctcccactctattagaatccccaccacctcgaatttaaatagttatttttcagaaaaatcgaattttttcaatatttatataataacttatttcattttgaagaaaatacaggtaatttctttaaatatttaattctctcactccatcaaaatcataatgacaagaagcataattaatgagacaagcagtagaattattgttctgaaatttcataactattaggaatttttctaaattgtatgtttaattttgctttttcaaaatgatgtgtttaattttgcttattcactaataaaatcgctcgaaatgaattattagatttttaaaagtataaaatcaatttattgtcatcccaatgtgatttcgtcacagtcag

SEQ ID NO: 6552 - DNA, 1414 bp, Heterodera glycines
  unsure (1)..(1414): unsure at all n locations
ccccgcccacggggtccgaaccctagtaaaattctgaagccgcggggtttgaattcncaattattttcattgagtcgcacacaaaaaaaacgcgaatataagtggttgttggaaccggtttcgggtgcatttaaatatttccaaatttcatatgagtgatcagcgatcatgaaaattttcggatggggaatccgaagaccttttttgctcttcttaccaaaaaattttcaaaaattttaacatcggagcgaaaaataaagaatttttagtggttttggagcaaataatgacaaattttccgttttggggttaaaatttcaaacaaagtaaactgaggtccgtcggtcaggataggcgcgaaattataataaaagatgataagaaaattgtgaaaagtttcaaaaattgcctgtttttaaaaaaaattctgaataaggcattaaaaaaggcataaaaagacagaaaagttacgttcccggcattaagcatcaaaattgcaaaaaaggcatcaaaattttaaattatgtgcggattaaggccctagtaatttagcaaaaaaaggcatattcctcaaaatccggtctttaataataacgagttttatgaattaaataattcaaacacagaagacgaatacggaaataaaatttatttttatttaataattattgaatttgcctaagaatttaaaaaggtaaagcaaaagcttcgtaagggtccgatttaatactataggaaaaatccttttgaaataaatgaaaggaaaaatttttgtgaaaaaattcatcatacgtgccaagtaattcggggggaaagacaaattaattaatgtgactaatccgaaaacttgaaattaattccaaaaacgaggttgattagatattttaatatactgcttttttggtctcttcagtgttttttttttttgaattattcagatttatttctacgtaaaatttgaaatttgatgaaagtctttatcctatataaatccatatttttagagttttcaataacaaatcgagtctctctttttctatttttccttattttggccatttttggaatttttttaaaagaaagataaaataaagccaaattttgatcttttaaagtctaaatatttacacactttgacattaaaagaatttgacagatttaattaattttcaaaattccatgtacaactttgtatgcgagattttatttggccaaattttgatcttttaaagtctgaatattatttacacactttgacattaaaagaatttgacagatttaattaattttcaaaattccatgtacaactttgtatgcgagattttatttggccaaattttaatcttttaaagtctgaatatttacacactttgacattaaaagaatttgacagatttaattaattttcaaaatt

SEQ ID NO: 6553 - DNA, 3805 bp, Heterodera glycines
ggataaattgaaaattcagaattcatattgtttcatatagaaatttggtcatttcgagcaaaatttgctaagaaatggagcaaaactttcaaaaatttctccggcggcgcctaccggcaccctgaaattttctttgaacaaaacacactgccaacattgtgcgaaaagcaacaacaaaaaagctggatgaccccatttaaaactcattaattttctttaaaaaattcgctcgaaataacgttattttcaaataagcacgaaaaatctattgacgcctattttcaggattttcgaaatgaaaatacacccctgagaaattacccaaaaaaatttcagaaaatacaaccctaagaatgaaaatttttttctcaaaaattgatactttattattttttatttatccatttttataaattttttacattgctctgcgtcgatggaataaatgaacataatttttttgtgcctttgcttatttaaaaaatatatgcgcatttatttatagttagggctcgcaactctgctgattggtgttttttaaattcccgccaatgggttcgaaaacaaaaaatgggtaatttatataaattcatatcttggctcaaattcaacctaattaaaatattgtagttcaatagctttaattgttctctttcagaatataattttccaaaatttttccataagtctaaaaaaaattagaaagcattgagcatgctatgttttttgcaatggtcatgcatatataattatttaaaatttgaaagtctttaaaatgcagttgagccaaaactaattatatatttagccctaaaaattctctatttacctttaaaatttcagaaaatttcgttgaatttgagccaaaatatgaatttacatatattacccatttttttgttttcgaacccattggcggatttaagaaacgcaccagcacgctgctgatttatcatcattttgctgcttttcaaggggtcaatgaagatttttttagatgctgattgttgctgcttttttgagaaagtttgctgatttatgattatttttgaaaagaatcctcaaaatggccatttttatgtaaaaaatgctacaaaaaactcccaaattttaaaaatttatggataaatgctaaaaaatcttgttttaacagaacttttcgtcctattgtaagggacttacgaggggtgtgtaccgtgcgtaccagggatgggctttgcttttgcgtttcgaattcgaaaatttcgttttttcggtactttcgcgtttcgcattttggcgcgaaacgcgaatattactcacctaagaatgagagatgaaatttccctcataatttttcagtgaaaacctgtttaaaaaggcccaaaatcgcaaaatttgtaattctttggggaaaatctgttaacaaattgcactgaaattttttaaatttttcccggcgacgcctaccggcgcagccggacccccccccccccccccataagttttttgtaaaaagcgcgccgcaaaaaagcttgtccatcactggtactacgtaccccctcccccaagacctctccacacccgaaatctttgtggaaaaatagcatttttgtcgaaaattttcgattttccttgttggcaccccctccaagactacctcgccgaaattttccaatttgctaaatttccaaaagaatagtgtgaaaagcataaagctgtctccgggggggggggtcctggggccgtccctgcctattgcatttctcaaaagcatacagtacccccagtagggctctgttgcggaaatcacgtacacaatcctgcccaatccggccctgaagatcaatgtgttgttgggaccgttcgttagagtatatatcggcaataaagaaatttatataaattatatgtcgatttttttattgatattgagataaagaacaaacaatcagaaaaagccaaaaaggcaatagtgtgtgtgtgtgtgtcatcagtgacaatcgagattaaatctttgaaactgcgtccaccaatttgtccattttgacctcgtcgccccattgtttttccaaatgtgcaaaaagcattttatcgccattcaccaggtaaacacctgacaaatgaacgtaattactttatatcttttataaataaattttatcatgaggggccggattaactttttcatatgtttatttagaatagagttgggtaaaagaaattccggaagcgggaaaatgaaaaaaagcgggacgggattcccgaacgggattcccttttttcccgttcccgttaaaaccttgtcaagataaaaagagaaacgggaacgggattcccgttttctcggagcagttttcgatttagaacaacttttagcatgtaaaaaggtatttaaagttttggattcaacgccaaatgtttttttttagttggtgtctaaaaatttgttaagaattacgcattaaaatgaccgtatttgatgttcattttgagcactacttttcgtcatcaattcgtaaaagctaagaatttggctaaatggatgccaaattcatactttagcaaccccgaaaagtcctaaattagttaatgttgtttttgaaaatacaaaaaaattcagaaaaaatggtagataccataggcaatgttctaattttctaccgcggtttcatctaggcttcttagtttttaaaccaattttaatttaataaattattatttttccaaccccctaacagtcggccttctccctcggtgttgccggcaaagccagccttccacgctttgtaatagttcacataggtggacagacgcaaaaagcccatccaaagcggaagccaacgctgtgaagggccgaaaaagcgtttctaaaacaaatttcaaaaagtaataaaaaattattaaaacttctttaatagtcaatatttccaccctattgctttgctatttcgtataaagataaagaaagaaaacaaaattattagaaaagataacttttcacccaaagaaaattgttttttagtttttccagaagttcatatctccctagtggttttcatttattgtttcgtgactcagacgtccaaaaatatccatttctaagcaattaaaccaatgacacttatttaactttttacaattttgatggtaattgtgcagttttgtgatttctacgaagaaacacattttttgtgagagaaaatgcgttgatcccgaatctgagctcggattttatatatattaagtttttcgtttatatttttttttattatcaaatattactttttaacacattatccaatgtcacatttttactggtgatagatctaacaaacaacaactaaaatagtgaggaaaaagtgccaaaatagtgacataattttcagccaaaactgagcaaaaataatttttattcattggttgcagttgcaagtgcgtaggactgggatttttatgagcaaaaaacccaaaataattacttaaaaaaatttttaaaattaaaatttcatttcataggagtatattttgaaaaattttagctcgattcttaggggtgtattttttgaaatttttttaggtccatttttaggggtatattttttgggtttattgcatttttgttagggaattttccaaaaaaatgtcgaaaaagagtgaaaaaagtaaaaaaagtgaattttcactattataagtgacaaaacgccaaaatagtgatttctagtgacgaaaaatgacgtgcaaatgaaaaaattttaccgcagaaatgcgttttttgagctcctttcttcaaaacaattgagcaaaaaaagaagttttttcacta

SEQ ID NO: 6554 - DNA, 3492 bp, Heterodera glycines
tcatttttctattagtcaattttgattacctatcttgatgtgtggttataggtcataaacatagcatacaaaggtcaatttggtagagaattttgtcctctttcagataggcttactcaaattttccagaaaaaatttcctaacccccataggaatttttttctaaaattttcccgatttcaagccatttttgtcttttcagatcaccgtgaagaagtgatctaatcaagttggtgtaatagacttttttgatcagcatcaaaagttaatctaacagagattttttcagaattttatcataataaaaaattgagttttggtcgattaaacattttgaggcattacttttgcaccgtcagaatggggggttgtttgggtcatgaccaattttctcgtcagcaaagggagctatcggggcagtttttggctatttattagcgctgtaattagtgtttcttttggtgtaaataagactttttttcaccattcatttttgagaaaaccagttttaaaaaaaaaaaaattttttttgaggcaatactttacacgatcaaatgaatgttcattcggctcgcgagcacattgagcgctaatttgtggcgaaaaatgacgaatattttggagtgtgtgaaaacttttccaattattaaattatttatttttaaaattggaaacaatcattataaatgggaattagcattttaagcaaaacacttcccaagcgaaagcaaaaggacgtcggaaattcctttccacgacggatgacccgaacaataacatcgatttgatcgatgcgaatgcatacggacacaaaacggagattggcggatgggaatcggacgaagtgaggcacaaagacagaactcgaattattttctcagcattctccgatgattgataatgcataatgactagggctgtgaattttaggttttaactaaattttttgctcgattgatttgaaggagttcaaaaaacacatttctgcgttgaaatttttcgattatgttgtcactagggatgggatttttaagggtgaaaaagtccaaaataaggccgtaaataagggcgaaaaagtcaaatttagggtataatttttaaaattgctgttttttacatgaaataatttcagactaaggcaaacaattttattcactgattgcagttacaaataagctatattttagaaaatttttttcatttcttagggtctatttttgaaaaatttagtgtcgattcataggggtatattttttcgaaatttttttggtcgattcttaggggtatattttttcgaaatttttttgggtcgattcttaggggtgtatttttcgttttttattgcatttttgttaataaattttggacaaaacgccaaaataagggcaaaaacttattttaagggcgaacatccaaaataaggatttttaagggcgaacatcaaaaataaggatttctaaggtcgaataagggcgtgaaaacgcaaaattttcagacaaaaaatgtgtttttcgtgtatttctcgttgagttaaagccgcagaaaaaataagtaaaaacttagaaatcccatccctacaaataactaaacgcaaattaaatctcaaaattttttgaggcactcttttaattaagaaaacccaaaggggagggaacttttatttcctaacaaaaaattatccaaaaaattgtgagtaaggaattatttgagtttttagatcgatagccaggatttttaatatccatttttaatttcctgacttttatccaaatactgatcaaaaccctgaaatttattatatttttttggttagccgacatttgcggaccgacatttgcggaccgacatttgcggaccgacatttgcggaccgacatttgcggaccgacatttgcggaccgacatttgcggaccgacatttgcggaccgacatttgcggaccgacatttgcggaccgacttttgcggaccgacatttgcggaccgacatttgcggaccgacatttgcggaccgacatttgcggaccgacatttgcggaccgacttttgcggaccgacatttgcggaccgacttttgcggaccgacatttgcggaccgacttttgcggaccgacatttgcggaccgacttttgcggaccgacatttgcggaccgacttttgcggaccgacatttgcggaccgacttttgcggaccgacttttgcggaccgacttttgcggaccgacatttgcggaccgacttttgtggaccactatttctcggttgaactgtctaaataaagaaaaaaataataagaaattttaataaatttaatattcccaaattgaaattagtgaaggtaagctgatgcaaagcgatctgtctcaattggagagaagtcttatttgacataactatttctttcttttttatagaatttctaacttataattaaactgtgaaattggcgaaaaaattagctaaattaaatataaaagtcagttcaagaattttataccaagaaaattttttatcttgtttcacttccacgctttagttaaccgagagcttaattttttccggcatgtcaaaccaattaaattaacaaacaaaaactaaaatagtttatctttttatcaaaaattgtccgtaatttgatgttattaaaactatgggcccaaaattaaaaatgagcaactacatactatatttatctatggaaactaaacttctttaaaaaatgggttctttcgatgttgattgcaaaaagttgatcgattactcttgaagggcgatgttcaacttggtaaaaatcacaaataaaactacttagtcactcaatttttgaaaaattatttttttttgttttttgttttttttttgacagttcaacccagaaatagtggtccgcaaaagtcccgcaaatgtcggtccgcaaatgtcggtccgaaaatgtcgcactacgtttttttgtcctttccccgaatttgttcttttcaaggtccatcttcgcctcattcttccggcggggcctgccccctctccctacgacctcaaattgtcccgtgtcgatgtcgcagtgtctccgtcaaccacttcgatgagctgttcaggcactgctttctgttcgttgcttacaattaaatccgttggcttttctccttagatttaccggtggatgagtcggcgagtaattcggtgcaatttccgtcttttcggaatggaattttactaaaagacgaagggaacgacagtcctcgtcatcgcagccaaattcaaacccagcaacagcaggaaatgcagggcatggaaacggcagaaatcgaaggaggactgaatgtgcaggtggggaatgggggttaacaagggaacattccgagctgtcagtcgtaaaatgcctataaacgatataccttggataaaggagggtcgacttctattgtgaatttttttattttaacggtgcattttgctccttcgagagttacatggcctcaaaaatcggaaatttggc

SEQ ID NO: 6555 - DNA, 929 bp, Heterodera glycines
cggcccattattccgcaaaaagtgttggtgttgattttggtggtggtcgacggacgcaaatccgccggaggactgtcgggaagggaccttacggagatggcgtcctaaacggcatttggagagtgagtaaacccggaaaatttggacacaacattaccgccgatttcggtgtcctcaaaatggaacactacacggaccaccaaatattcggacaataacaaggggaaggattgcgataaatgccggcggttgaacaacaccgacttggccctgtctccactcaaattgtgcgtttcgtctggcaaatcgatgcgaatgtttcctatccattcaccgacctaaaggggaacaattggaggaccaaccacttattgtcagatttatggaaaagtgagttgccttcatcttaaaagtggccgcaatgtttcgcatcgacgaaaggcgcccattgcactcgtaaacgaggaaacattggacggtcgccattctctggcctaaaaacgaaagtgattattatgacactttaaaacacaaaaaagtaacggaccaaagaaaaagtggttgcagatgaatgagggacgaatggtggtgggaattttgttggaaatgcgcgaattggcacgacgagtcaaatccatcggcggaagccgacaaagggcagaaggatggtggcgaaaatggggagagtttgatgtgttgggccgacggacaaaaccagcgacggaatggccgtcggaggatttggcatgctgaaaaacggaaaaatgtgccaaaatggaagttgaaactcattgtcagagagattagagaaattaatatgaataattttagtcatatttccaaaaatttcctatatttgtgccaaattttgaataggtaaattgaaatttcccagtttgagaaactatgtcatttttcacattaatttg

SEQ ID NO: 6556 - DNA, 2212 bp, Heterodera glycines
atcgcgtcgtccgcaaaacatttgtggattggaaaattaaattttccctcggcggttgcttgcttatatagtacaaatttcggtgcataaacgagcgcaaaacggggctgaagtcgccgagaaaacggtacaaaatgaacgcctctgcaattattatgaacagttatccggaaacaattttaattttcatatatatttcgtcaattcccaaaacaaagcccagcccaataactcaaaaaatgaaaatcatttttgaatatagccaaaaaaagagcaaagtcccaacattccatggtccataggaggaataaccttgcattttgcgctggtacgggtccatgtcttcggttggtcctgtttcgtatgggtttgagcagtcgaattccccagccaatggcttcagagggcgcctttgcagttccgtccagtacgactttttctgcaatgcaagcggtaacatcagcgcaaatttctacgaaataataagagaatgggcctaaaaaacttaaaaacatgcgtttataatttgattggaaacggagtttctgggcgaaattccctttcgaatgcgccgtcgtctgtcccgcttattatttttttattgagtttaattttttcatttacattcattccaaaccttcctccggcgccgagacaaaggcgccgaaaactgaggcaaatgcgacggcatttggtgccgttgttggcttaggggaacggggggagacaacatgctcaagctgttcccgcgcggccactctgtttcatcgtcgctgctaattgcgctgctggaggacggagacgaacaaagtgataattcatccgctgttgatggtgggtttaattgccgggaaggactgtcccctctttcgttgtcctctttttctgacaccgatgattctccggacgagttcatcgtctgattgtgcccctcttgcgtcgttctgctgctgcctcttccgacatgtcccccaactcggcgctgtctcccgccccctcctcttcttcctctgcttcgctgttggcgtcgtactgctcgccctcccttcccttccatttgctcagtttcagaggtcacatcgtttcccatcgccactgtttccaaagtgatgggtccgcctctgctccgtcttgccatgcctcctccccctctcctgcggctcccaattgttgttgctctgccggtggtgctcaatctcagcgccggtgcgtcgttgtcatcattgattttgtcggcagatgccgttgtttggagtgatgaaagacgccctccgccaccacgcggatgacccgccctccgccctctacgaacaggcgaaaaaagcactcttcttccactgctggcccctggtgggtcatccgccgcctctgccagtccaattgcggacgacagggatgacaattcagaagatgatgagccaatgctgctgttgctgtcgtctctcgctggccttctcgccgttcgttttgctgtggtggttgtgttgcagttactcgtcggccttcccgttgtcctttcttcaatgaccgacgaatgctttcttccgttcagaaactcattttgtgttgttgcagtgcttttcggcaacagcgatttcttccttgtgcttttcctcaattggagctgttgagttgtgtcaacggatcgtcgaatgccgacgagtcgtcgcgggcgttccattccattcggcacgggccgtttccgttcgccggaaggcggcttgaactcgtcgagctcatcactcacagtctctgctgatgagtcagtgcttatgaagtcgttggaattgtccagtgtttccacttaatttcattaattttttatttttgtaaacaagttttgtagaccttaaaaattagcgataatttgaagaaaaaacactttgccaaaattttgtttttttgagcaaaaaatttatttgaatttttttgttcttttttcgctgctggtggtggtttacctatatacgactgctcgccctggacctggatccaaaactgggttttcctggatccagcaggtccaagccatttttggcaacctggatttcctggaatatatttagaattggtttttcaagcgaccattgttttatttcaagttatcaaaaaatgattaaataaataaaaacacattattattgtaaattagatatttttagatgttcatataataagaaattaatgatcttttcagttttgtttgtttttt

SEQ ID NO: 6557 - DNA, 1643 bp, Heterodera glycines
gggggataggtccggcggtgccgataggcgccgtcgggaaatttttttttgaaaatttgaagcaatttgttaacagattttgcccaaaaattctccaaattttgtgattttttagcaaaaaatatttcagaaaattataaaattgtgactgtctttaaggaattttgggcaattaaactatttgttaacagattttcaaccaaaaaatgaacaatttttacgattatgagccaattttttaaggaaaaaaaagttttggtgggccggcggtgccgataggcgccgccgggaaaattttttgaaaattagtaattttagtagcatttgtatcagcgaaataaatcattaagcacaaaaatttgaaaagtttgggaaagcccgaaaataaggacaatcttacaaataaggacacttggcagccctgtgtagaaatgatatacataatcatagaggagaaaatgtagtatttggattagcagcagaataatatcaatgaaagcaaagggagagaatgacaaatgggagagtgaaagagtgaagcgagaggcggaatgaaattttgcacttttacaatttacaaatagccccagaggaggaggaaagaaggcgagagagagagagggggtggggggagagagaaagagagacaagagagagtgaacagagagagaaggggatagagagagcaaaaggctgggaaaagtcacttctttaatttgtcgactaattggccaattttggccaactcgtaaaatcgtaccatattgcggaaaggttgcgttaaaattgaattaaatttcaatgcgtctttttgctcgttctttcccagtgtaattggtaagactgctcgaaagttgattctgagactcagaccgagaccgggaattgccccgccggagagtcgagaccgacactatgggtcaagcccagtgttagacaaaattgctcataacgccaaatagcgcatttggtgtaaatttttgcgcgttaattcaaaatttacactggaaaatgcctttttgtattttttattttgatctgccataactcgcttcattcccaactaaactgaacaaatttggtatctaaaaaagtttttgaaaaggagaatctttttctaagcgaatgctaagcaatttgacatctcagaaaaaagttgtgatactttcaaatttttatcacgttataactcaagtcctaaactgctgttttcaccaaaaatgctaaaactattaatttctctattgattctaagtgtccaaagtgattttgtatccttataaccaaaattgttagcatttacgaatttgatgttttttgtgtgttagagatgtgaaaatagtacgccaaaaagagagaaaaagtaatgcattttcatgttttatatatatcttttgaaaaagtgtataaaacataaaatggctgtattacattatgcagaatttttttctctattagtatgtaaaatttggtgtggatttaacaagtagaaaaaaagttaaacagaatgaagtaaatgttgttttttacataattaaaatgaagagatagtacgccaaagagagagaaattacaaagaaaaagagaaacgacgagatagtactaggcttttctctgcacagtggagttgacccatagtgaga

SEQ ID NO: 6558 - DNA, 1487 bp, Heterodera glycines
  unsure (1)..(1487): unsure at all n locations
gtgaattctgtgcaaaaataaatgttcaaatttgtgttagaatccggttggtgtttgaaatggtcaatgtgtcagaatcggttttccgaccctgaaatccaagatttggactacatttttcaaaccaataaaaacattttgaaaaatataagaaaattatttttgtttttaatcctacagtatgtcggaaacaaagaaaaacgaataaaagttttaatattggacagaagaaaaacagaggttgttttaatgggcttgccttacaataaaaattttatctaattttgcgacttttggaaactcggctctaaaactaaggaatttacgctgatcgaataatcgcaagtggccagcctttttcacaacgaatctggcatcctttcgaaccccgaacaaaaagtcgaaatcgcaatttcaaaattcacatttacatataactccaaataattgaataagatacacgaaatgaacattcaaatgcgttctttgattaaaagtctgttcgccttggcctttgtccatatttgtgtttttagtcccatttactattaattcatcatatgtaaatttaatcgaataattttaattaaaacaaataaaagccaaatgcgagctttttctttattttgtggctttttcgaggtatccatgagtatttttttaggcttttcccctacctttgttactaatgcaaatacataaactttatacataaattattgctttttctcattatctttcataaagtgctgctcattttgtcattcggcagatattatttcattcattgtgcacagcgccacacacattcagaaaaaagaagaaaaagaataaataaataaatgcttttcattcagtttttgttcgatgtttttacagcattgccggcagaagaaggcttttgctgctgtgggaatgtgaataagaaaagtaagaaaagggaggaaagggagggagtagccgcaccaaacggcggccggccaaagcgatgggaggcatttgcttcgaaagaatgaatgaatggngtggatgtaacgcatttgattgggacgacatcgaaggctttttttttgaattatatttatccttttcgtcctgcgtttttgaatttgattttatccttcccaccccctacggctcacccaattttaaatgccattcttttaaaaattaagcagttcggtcagtaatttttccgttatgattcctcgtccattaaaaaagaatatgaacaaaacacgcttggtattaacatactcatttggaggctgaaagcaacaatttctgccaaatgggaaaaaactgttttaacagcttttggaaattcatttttgctatcgagcactctgttgattctatttttaactcgacaattgttggccaagatttatgtcagatttatgtctagcaccccggcggaaaacccactgtaccaattttcaacccaaaatgaaaaaagttaaattagaaacccacattcctgagta

SEQ ID NO: 6559 - DNA, 2151 bp, Heterodera glycines
tgacaatgccaattgtcacgccgggacacattgaacaaaatgccgctttcaatgtgaaccgatcaaccgcaacaatcattcggcgagaaatgcaaaacggtgccatttaaagggaaataaactaattagtgaattaaaaagtggtgtcatcattaattgaatatttttagcaattaaaattgtacgaaattggccaaatctgagcatttcattgaatgaaaaatggaaaagcttaataaaggctaaacagttcaatgaaaaggtgatcatcaataatagttatttaaattggttatcaaatttcaaaattttcccacagttttcccatttcattcgcattatttgcaaagccttcgcattggccgacttttacgacttttgtggctacgtggagacgcgaatccgtctccaattgattattaatgtcgtgccattcgatcgcgttcgattggcacatgcgaaaaaagttgcggaaaaggagcaagaaaattttggcgaaaggaataacaaaaagtgatgcgtttgctttttggcaatttaataattagtcactccaatttcggggaaaggtcctaatttgataattaagaaacaaattaccttgtaggaaactatcacaactagggcttatatttttagttttttcactatttttttcctgtgcttcctatggtctgaaacgcatgaaaaactttttttgggtttttgttaagctagtttttattttttcacctaaaaataaaaaatttcacccctaagaattggacccgaaaatttttcaaaaatgcagaaatgaaaatttctcaaaaattcagctccaaaatttatttatttattattgaaaagaatttttgattttaaaaatatttatctcaatactgatttggcataaattactttttggataaattttaatattttacacccctaaatttgaaagattttaacaactattttcccattttagaaactatttttggggttttttagaaactaaaaactaattattttggcagtttttaataactataaatataagccctattcacaacacattcttttggctcatttataaataatttctaatgaatttccaatatttcctctgccgtccccaatttcctcctaattttgctaaatttgctgtttaggacggatttcttcaaaatttggttggttggcctcgaattggacgagaaaatcgcttcagaaaatgagtcggaaagaacaacaaaatggaataattggaaaaaagcattgaattcgatgctttccgaccaatttaatgccgacattctgaaggcttatcggataaagaatggttttggtagtccatttcctcacattaaattgacggcacaatatgaggaaaaatagcagattatatttttagacatttcatcattattttttttcggaaacaattttattcacatttacgcattaaaaaccaagtttgaatcttcaaaatttaatccatatatccaggttgctaaaaaactgaaaaacgccaaaatagctgctaaaaaagttgccaaattggaaaaatatgtcaataaatgtgtgaattttccaaaattgactcatatttatccatttcggttgattatttgtaaatcaaacatattttaagatttaaagacgtaaaaatttttcattgtccgccaaaatcatggccaagatttttgcttttttaaaaaatcgattcttagggatgcattttttgaaaaaaaattaacgtcgattcttagaggtgcatttaatagttgctaaaaagtcgctttaaatcgaaaattgattaagaaaatgtgttttttgcgcttatctcagcatatgataggctaaaaataaatggttgaatatggatttatttccgaaaaccaccaaaatatggatttatatggactaaaaaccttcaccaaatcaaaaaattttaacgtagaaatgctatttttgagcccttttctgcatagcatatgtgccaaaaaatgttaatccaaacaatttataaccctaataataattaaaccaacaaaataatgtgtgtaatattaacccgaaattccataatttttcaggatggatttaaaattttggggaccttttcgccaactcaaaattattaatttttttttttttgggaacagttga

SEQ ID NO: 6560 - DNA, 2925 bp, Heterodera glycines
  unsure (1)..(2925): unsure at all n locations
aaaatagcagattatattcttagacatatcatcattattttttcgggaaacaattttagttcacatttacgcattaaaaaccaagtttgaatcttcaaaatntaatccatatatccaggttgctaaaaaactgaaaaacgccaaaatagctgctaaaaaagttgccaaattggaaaaatatgtcaataaatgtgtgaattttccaaaattgactcatatttatccatttcggttgattatttgtaaatcaaacatattttaagatttaaagacgtaaaaatttttcattgtccgccaaaatcatgccaagatttttgcttttttaaaaaatcgattcttagggatgcattttttgaaaaaaaattaacgtcgattcttagaggtgcatttttgtttttgttgtttattgcatttttcataataatttttttgttgaaagcagaaatagttgaaaaaatagtttttaaaaattttttgcaagcaaaaataattgttaaaaagtttcataagcaaaaatagttgaaaatagttgctaaaaagtcgctttaaatcgaaaattgattgaagaaaatgtgttttttgcgcttatctcagcatatgataggctaaaataaatggttgaatatggatttatttccgaaaacccaccaaaatatggatttatatggactaaaaaccttcaccaaatcaaaaaattttaacgtagaaatgctatttttgagcccttttctgcatagcatatgtgcaaaaaaatgttaatccaaacaatttataaccctaataataattaaaccaacaaaatattgtgtaaatattaaccagaattccataattttcaggatggatttaaaatttgggtaactttcgccaactcaaaattattaatttttttattttgtgaacagttgaagagatctttttcaacaaaattgtatttacattgtgcttcagtccaaaaatttctcttgtcgattgcatattttggccttggatatttttgtgcgattttacagagttggcaaattggagaaagtagcgactttctcttctttttgctgtacttccgtgtccaattgaagaatctgttaattgaccaattaattaggccaattgttccctcggcggattgacaaaatgtaattaaaaaattcactgcatgtatcggtcagtgtcatgtcggagtgtcaacaaatgttgtgccaattcttgcgcactgcaaaagtcgtcggctgcgatgtaagcgtcgtccggcacgcccattccgcggagcaccgcccggcgcagcaccaccggcacagtcagtgcgcggaaagcgttccaaaacttctcagtcacatattgagggcacaccgaattttcaaatgccaaatagaagaaatgcgatgctaaaagatgatttaaatgggtaattattagttttttcaatatttgttaattgtcgttaattggggtagtaaccaattgcttaattacccatttcctgcctgtagcactgttcatcacactccttcccactgcacgcaccaaacacatcgacgggcaccagttggcccaattgcgctgtgagaatgtccctggctgaggaggcgccgcatttggacacaatttgcaagactaatttgctcttctggcgaacgcgcgtttcgatcttgaattggacaccaattaccactcttttgctaatcacttctgtgtccccctccgatcagtcggtggctggtaaattcgacactgagtattttcgacactaagtaatttcgacactacgttttcgacatagagaaatttcgacactgaactatttcaaaaactctcactgttttccagcattttcgacactggaccatttcgacagtgagtaaattcgacactattgagaatttttaaaaattaataagaaattttggtgttagtattaggtatgataaattttcctatttcattttctaattcgtactttttaaaaggttaggttggtataactagagttggtcgggaccgggaaatttgacaaaaaccgggaccgggacttaccgggaccagaaaagtcgggaccgggaccaacttttttgaccgggaccgggatcgggaccgcgagaaaagccgggaccaaccgggaattttttcaagagaaaattttttttgaaaaattttgaaaatttgagtgcactttgttacgaaaattgccaatattcaaaaatgttcccataaatattgtagtttcgttttgggggacgaattcgaagaaaatttttaaaaattttcatttcggggggggggggggaatcttggattttctgagtcccaaaattctggatttttataaattaattaaaaaattttgcgaaaatggccctcacgcgaaaacgaccccgaccgtggaatgggtcgaagcgggtcagttccgtctggcagttccgtcttcaaaagtcatgaaaacatgttttagggtgattttcggttttcgggccctagaagccctacaaagcgctttgacaaccaatgcaaaaaattgcaatgatcagtgatcactgactgatcaggtttttttgaattatcgccccaaaatatcgctatttggcattatgagtcattgtctaacactgacactgggtttgacgttttactcagttataccaacctaaccttttaaaaagtacgaattagaaaatgaaataggaaaatttatcatacctaatactaacaccaaaatttcttattaattttaaaaaattctcaatagtgtcgaatttactcactgtcgaaatggtccagtgtcgaaaatgctggaaaacagtgaaagtttttgaaatagttcagtgtcgaaatttctctatgtcgaaaacgtattgtcgaaattacttagtgtcgaaaatactcagtgtcgaatttacccagtgtcgaaattacatagcgccgctaaaa

SEQ ID NO: 6561 - DNA, 2201 bp, Heterodera glycines
  unsure (1)..(2201): unsure at all n locations
aaagtcggggaccgggaccaacttttttgaccgggaccgggatcgggaccgcgagaaaaaccgggaccaaccgggaattttttcaagagaaaattttttttgaaaaattttgaaaatttgagtgcactttacgaaaattgccaatattcaaaaatgttcccataaatattgtagtttcgttttgggggacgaattcgaagaaaatttttaaaaattttcatttcggggggggggggggggggaatcttggattttctgagtcccaaaattctggatttttataaattaattaattttgcgaaaatggccctcacgcgaaaatggccacgcgaaaacggccctcacgcgaaaacggccacgcgaaaacgaccccgaccgtggaatgggtcgaagcgggtcagttccgtctggccagttccgtcttcaaaagtcatgaaaacatgttttagggtgattttcggttttcgggccctagaagccctacaaagcgctttgaaatcaattaaaaattgcaatgatcagtgatcactgactgatcaggtttttttgaattatcgccccaaaatatcgctatttggcattatgagtcattgtctaacactgacactgggtttgacgttttactcagttataccaacctaaccttttaaaaagtacgaattagaaaatgaaataggaaaatttatcatacctaatactaacaccaaaatttcttattaatttttaaaaattctcaatagtgtcgaatttacccagtgtcgaaattacatagcgccgatcagtcgctccgtttcgcgctcagttggacatcgtccgttggctcttactcgctcagttgggtcccggcacgtttgggaccagaatgtttttggctataaccttttttctttgtcatctaaatccaacattgattgtggtatcattcgatagctctatgtgttctctattagcctgtgaaattgcaaaaaatttcgtcaatttttgacaaacttatggccaaaagtacattagaaaccaggttttcagtcatttttggccataaatttgtttgaaattgacgaaattttgtactaaaaacattttggggtccaaacgtgccggcgcccaactgaggtaaatccccgttggctttatctctctcagcgccgctcatttctgccccccccctcccccactcacttcgtccacgtgccacaattcgaattcgtcttcccccgccagcaacaactcatcgtattttgtggctattgtactgtcagcatggtaagtcatggacaaattgaaccaatcgttagacaatttgttgaaggcacttcccgcgtaatatggcgactcttgagtgaaaaaggcgtatctaaatggactaattaattaattaattatcgcttaaatttgggttttagcatttaaaacttatttaaaacatatgcataacgaaatgttacaattgttcttcactgcgatgctggggccagctccaaaaaggccaaaatccgatcggattcgaccagaaaacgtggaacagcaacactgaggccgaagcctcgctaaaattaaatatttaatttcttttaattattaaaattgaatttttaaaataaaaaaaaattacgccgttcgttccgttgtgtaaatgcattggtagggacaattcgaattggggtcctcgtcataagataaagccgacggccaaaagtcccattggtggggaaagaaaaattgcttattccatgctaatataatgggcaatccacggtatttctgaattaatattttaggtaaattttaataaatgtaattatgcaattccattccgtaaaatcccatttaaattacatggaattttatgacttttcgtagttttttttcatttaaacggatttgttcgagtgcaacaaattcaacaaaatgatttggaactttgtcaaaattcgtttctggcaattcgatttgttgcagaattacagccgaattgcgtcgtttgaatgttaaatatccgacaaaagaatctgaaaaagcaatttattaaattgcttttgagattaattggaataaaaaccttcgcttttcaagaaaaagcatttccgacgagaaaatttggtagcgacgaaaaaggcaatagcattatcagtgccattcactgattttgaccangaaatataagctgtgaaaataacgagggtggtcaaattgagtaaggg

SEQ ID NO: 6562 - DNA, 1934 bp, Heterodera glycines
tcagggcaaaggtccacaagtgattgccaaccgtccacccaaccatcgcaccgttgcgcaagtcaccgttgcagcaaaaactgttacaatgaccgtggaagccttcctgacgctcatgccatatttgtaacttcaaaaaattagaaatacttatttcaacaaaattttggtggctaatttagggttttccatgaaaaaacaatatgtgatatataaattttaatagagaattttagtgttaaattaattatgggccagcagcaattaaactaattgaaaaggcttgactgataactaactaattattagttgcacaaaatttgctttggtgcattttttagtatggtaatgacaactggtaaagtttccgtaaatatattttctattttaaaacttgagtcaactgtataattaatatatgtgatgggacttggcaccaaataaagccagtgtgaaacgacaaccttgcggatttgtgtaagcgtcaaaaagtctccaaccacaaaagcgaaaactgtgcaggttcaagcccgcaccacggcaatgaacattcttaaaaattttatttgaagcaattgaacattcttggtatcatcaaagtctcttggtgaggagaaaccttttcaatgtaaatgttaagcatcttgaagcaccagaaaaaaagttgcgagtctttgaaaatttgcatttgcttaagaaagggtctgggggagttcatgaaaatatagactaaaacatgaaaattggaacaagatttataaaatcctttttaaaaagagacaaattccttaaaatttgtcgctaatcctttgaaaaattccgcaaatagcgcattttcattctaaattttgaatttatttaattataattgaatgttaattagtcccacacattttcaatgatcatcagttttgaattgataattcatatccttttttgtcccattctcctttaatttaaacattttctccaagttttcgtcaattaaacaattttaatttaaaaaatgaaaatttcaattgttggattgcggtggagagtaaaaactgattttgaaataacaatatgccaaatgaatagaataaattttctataaggggaatttatttttattagtcatttttaatggggatgggattgttaggggcgaaaaagtgcaaaatagggacctaaataggggcaaaaaattcgcgaaattaggacgaaaataggggcgaaaaaatttcaaatgtaggggagaaatttattaaaatttcttttttctctatgtaaaattttattcactgattgcagttagaaatgaagtaaattttgaaattttcaggatttaaggttcgattcttaggggtgtattttccgaaattttttgggtcgattcttaggggtctattttcttttgaaaatttttaggtagattcttagggatgtatttttccgaattttttttggtcgattcttagggggtgtatttttcgttttttattgcatttttgttaataaatttcccaaaaatcgcgaaataatattccttaaaaaactgccaaaaatggcttttaaccctcaaaaaatgccaaaaattttgtatttttttctctgctttgcattctccatttgttggcaccagggctggacgtaactgattttcaaatccgtaattacggcaattttttcagttacggccatccgtaatccgtcattacggaggtccaaaaagtccgtaatttggcgtaatccgtaatacgtaatccgtaattttcaaaaaaaatttttaaatttaaaaaatttttaaatttaaaaatccaatctaaaaattgttaagattaatttatgatcagaatatctgcttgtttttttgaggtgaaaatcccaaaatagtttttttcacggtgtgctttttccaaaaaactggggaatgtgggggggaaggggggtca

SEQ ID NO: 6563 - DNA, 2552 bp, Heterodera glycines
  unsure (1)..(2552): unsure at all n locations
aaaaaagccttgttttgggatttataaggctcaaatttttccggattttcttttaaaaaggataaaaatccaatttaaaaaaaaaattaaagaatccattttttttcgataggaaagcccatgattatatataaaaagaaatttcaaacctttttcatttctgtagagggatcgaaccaggggaaagaagaagggaaagtgaaggagactagccactaggccatttgcacagtgggtcttgctactttatgaatatatataattattatttctaaattttttcctttaactccaattttctcactaatttttgcactcagacccccattcttaccagtgcttgtttttcccggttcccggttgccctaccgggaccgggaccgggacctgagcttttcaaaatccgggaccgggaaccgggaccgggaccctcggatgaccgggaattcccggcccggtcccggtctccccccttctttactttttataatagaaaaaaaattcattttataaaaaataatcttgcaagaaatcgtcttgaaaaataatctaaaaagccagttacggatcaaaattacggaaaaatcccaaaaatccgtaacccgcaatccgtaactccaaaaaggccgtaatttccgtaatccgtaattacgtccagccctgattggcacacatctcgttttttgaaacggtgtgtttatgagtagggatgcaacttttagtgatttaacaatttttttgctcgatttttttgaagaaaggagctcaaaaaacgcatttctgctttggaatttttcgatttggatctcactatcggtcactagaaatcactattttggcgcttcgtaactaaaatagtgaaaattcactattttggcattttgtcactattttttcattatttcgacattttttggaaaatatccgcaagaaaaatgcaataaaaacgaaaaatgcacaagaatcgacctaaaattttttttcaaaaatatacccctaagaatcgacctaaaaattttttagaaaaatttctcaaaaattcatcaaccaaattttttttcttgataaaatttttggtttaaaatcagggctcggatcgaaaaattttcaaaatcagaacatcgggcctaaaaaatcagattttggggtcgaaaatcagaacattttgcaaaattgcttcaaatctgttatttttacatttttgtttcacttattatatttttcccctcctattatcgaatttaacaattttgagtggaaataagcatattttaaatcagtgtatttaggatcaaaaaatcagattttaaaaattttttgcggcgcattttccaaaaaattgtaaaatagtgacattatgccataaaatttctaaattatgaggatttaggaaatcagaacaaaataagaacaatagcccaaaatcagaacatttctgataaatcagaacagatccgagccctgtttaaaatgtcaatatttgccaagaattattagaaagtaaatttacttcagttgcaactgccaggaaaaaaatttttttttttacttatttttggctgaaaattatgtcactattttgtcacttttttggcacttttcgtcactattttagtaactattttggaattttcgtcactaaaagttgcatccatatttatgagatatttgaatattttaaagtggtgcaagacttatttgtcactctgtaaaagcatcgtgtgtgagaatttccccactatttataggcaattctataacaacaaataaaggggaggtgctctgatttggtaaaaatggatttggtacaaatgttgaaatgatgagtagtataaaaggaagttggttcatcctttccggccattctattccaaataggcattaattaattcctgcgtattattgcggctgctgttctctgtccgtgccatcatcaaatcaaatcaacgaaagctgagccatcggaagtgtgcacaaatcgactaccaaacgaaactgggcaccacaaaacaacaaaatcatcatcagcagtaaaagtggtgcagaaggaaacgcatggaccaaatgtgagaaaagcggaaatttttttttgtttttgaaaatttaatttgttttgttttagcggcggcactttcagcgaccaaatttggctcgacacattggcgtggattggacgtggcgaggtcggatggcacttggcgctggtcaacgcccgcttcgccgccctggtgaacatgcagctgcagcagaggcggtggtgtttggaggagtttcacatcagtgagcggaagccgaaacggactggcgccgaagtgttgagcttggcaaacaacggctcctacttctcgttgccattggccacctcaccgttgccggacagtgtcatcggattcaacggcacattcaacatttggtcgccattcaatttttgaatttccaattgcattttgttcttccccattttgcaggtatttggacgcagaagtgatcaatttcctnngcacgattcggcgcctctttcacacgtacatctcgctgaaagtcaccattcc

SEQ ID NO: 6564 - DNA, 1637 bp, Heterodera glycines
tctcagtgtcaataaaatatttaaatttaattattttaaagcaatttttttaattgaatattaaataatattaaaaattttaaaataaaacaataatgtaatttcaaggttcaactttcttcaatatgttttttcttcaaagattctgctaaaaaaaatctttctttcgtaccagggatggcattccgaggccccaaaaattttcggaaatcggaattccgaggcccaaaaatttttcggaagtcggaaatcggaattccgtgccatccctggtatacactagcaggattagggctcgtttcggcgccaagccaaaaacttgaaaaatcaaacgaaccagaaatgttcgtatctgatttacctcacagttcgaccgacacgatttagccttcacgtttgggccccgcatgtttttttagctacaacttttttctttgccaaccaaatccaacactgttggtatcattcgatagcccttcagatgctctattagcctgcaaaatttcaataaatttcgtcagttttgaacaaatttatggccagaaaggttagaaaatttggttttttgaattcttctggccataacgtttttgaacttaaacaaaattttgaaaaatttttaggctaattgatgacaatcaggtctatcgaatgataccaacaaaatgctgatttggttgacaaataaaaaagttacagtaaaaaaaacccggagataactcatattaaatttaacagtcaaaattatgagtttcgtcagtttcttaattcttcacattaaaatttgtatccaaaatgttctcccactgtcagcaattgaatggtcatctttcgaagtgacaaatgagtggtcaacaagtacgaattggtctcaatttgcttgccattctccaaatagtcgtccattgtttttgcattgaaatgaccttccaaaaggccctggagagtgaaaaagtgccaacaatcaaaaactaattgctcaattaattaattaattaattaccctgatgaacaaaagaatgatcactgattgtgagccgaacacgagaaatgctcgatagataacacaaaagttgaccatcccatgggctgctccgtcgttgctagtcgacttcttcaacagactgaacttcttgccgagttcggcgtgcctttcccggtccccaaattgtgcccggccttggcccactttctcccccaattctctcagcaatttgatttcttggtcctcattttgctcctcctccgatcatcttggtcaaaagcttttctgatcagcatcaaaagttagcctagcaggaatttttttcagaattttatctcaataaaaaaattgagtttttagtgcataaatattttttgctccattactttttgttctactaaatagggagggggtcgtttgggtcatgaccgattttcacgtcaacaaagagggggttttgagaaaagaaaactggatttttcaaaaaaaaaaatttgctccaatatttttttgactgactgtatatttaagaaatcagagcaattttcgtcttataaaacaaatgaaagccctggtttaaaggccaactttgactcactcttactggctaacgaaatcagatgggtcggggaccccgatcgggtagtgatca

SEQ ID NO: 6565 - DNA, 882 bp, Heterodera glycines
aggaattagaatttttgtgaagggatggggcaaaatgggacaaaggggcaacccaactggcagaaatgggatttttaacaaaggacggcagacagacgcgggcctattatcaatttgaaattgcccgccggggaaaaggagaattacggggggagggggtgctcaaagaagggatcagaaatcaaaatacattaattatgggaaataaaaattcaataatcataattggtcgtctagttcacattatgttgtccgatgggctattctactaaaattgtattacatccatttttaccctagggaactcgttctatttatcgggtttatttcgttttcgtacagaacttattctccataataaacttgatgggtgattctctaactttcttgatcatagcggctcctatgcagtcactacatctttgctaccttgataatggtactgtcattctcgtatctatggcaaacatgatgtatattttttcgaaacataactatgaaggaacatgtttatccggatcataatgacatcattactctcgcttcagcccaacactcgatttcaccaattcagatagtgaagaattgtaagattctccaataagcaacaatcttctccccgcgcgttcccctatctcattaaaacatctgaccctacacgtttccctacccgacaacatgacatccccccccccccccaccagggctgggcgaaactcggcttagcactcgaagcgaagctcgaatcgaaacccaatttttttcgaaacacgaaactcgaaatttttgaaaaaaattttttcatcgcaaaatatattcaacacaaaaatttcgattaaatattaaatttaaagtcataaaaatgtaaattctgttaaaaag

SEQ ID NO: 6566 - DNA, 5762 bp, Heterodera glycines
  unsure (1)..(5762): unsure at all n locations
tacctaatcgtagacatataaccaattacagttgccattttttccggataagatagccctgcaccggggagcatgcctataaaatttggcacgattttattgcttattgcaagagctacagccgaagaaaatttttttaatttaagcctaaactttttggcatgctgaaaaagcaattaaaaattttattcactccctttttgatagtaaaagcatcagagagccttatttaacttgtacataaaatttggtgcgtttaagagcactttctgaaaaaatatttatgaattaattttgcaagttaataataaacagtgaaaaactcagaatttctaaaaaaatttaaaaccaattacaattgtcattttttcaggttaagttagtcctataccggggagtatgcctataaaatttggtacgattttattgcttattgaaagagctagagccgaagaaaatttttttaatttaagcctaaactttttggcatgtttaaaaagcaaattaaaaattttattcatctccctttttgatagtaaaagcatcagagagccttatttaacttgtaaataacttggttgcgtttaagagcactttctgaaaaaatatttatgaattaattttgcaaaaaataaataaacagttaaaaactcatgtcgccaaagcgaccaaaaattgattaaccgatcaattttgttttgaaataatatttatttgtgatgattcatcccctctcccgcctcctccggggttcgcttataaaaggcagccctaacattcattcaaaaaatgtaaatgaataagcagttaatcgatattgttaagcaaaatttgtcccttttttcccattgcatttttatgttttaaatttaattttcaaataaatttggattagaatttccctttttgtaagggaattaaggaaagattctttttccttaaaaagcctttttggtttggtcgaacttctgtcttttctggacagaaattcttaaaacttccccagtcgttgggaagagcaaatttttgcggcctatttgccgacaaaattggagccccgtaggggtcggcttccagttgtaagcctaccctccaacccttaagccaaaagcaaatccaaagcgcagccgtagcgcttggatcaaacgcaacccaaaggggtatattgcgttttcctcaaacgtaagagcaatgagtgagctcctacgtatttccattgcaccaatggtggtgcgtctcaaaatgtatattgagacagcccaagaaaacttgggcaaagagctgacggaccaaagtgtccgtgcagacttaattgcagagagacaaaatctctgcaaaaccatttctcttttggagaaatacaatggaaaatgggaagccattttcttgagaataaagggaccagctcttcaggaggaagagcaaaactatagggactttaagccagaaggcaaagccttcatgcattgggtcgaccaagcccgagggcttgtcgacaccattgaaggggccttaggcctctcagagctgggggatgcaattccccagccaaaccagccagcacaattgtgcagcagcaacaacttgtgcatcagcgtcatgatgtgacgcttccgccaataacattgcccaagttctcgggggaaccccgagagtggcctttgttttggaagctctttgagacttccgttgaaagtcttcagattgaagactttaaaaagcatatttatttgctgggatgcctcccagagaagtcaattgctcggagagcaattgacttgtatccaccatcagatgaaaattatccaagggtagttgaaattctgaaaaagcggtctggggatgaaaaaacgatggtagagtccatccaagcggagttactccaccttcccaaaccagcagaatcagttcagtctctgagacaattctcagagtccattgaacggatttgccatcagttgttggactatggagaaaatgaacaaaataagttcatggcctccactattaagtccaaactgccttatcaccttctcacccaagtggtggagagggaaatgagggcaggaggtgcctttaattgcacagagctccgaagagctatcacctcaatcgttgaagtgaaagaagaagtacagagatgtactcaggttttccgtggagaggaaaaacctcgcaattttccccctcatccaatggggggaagagcccaccaagggagaggaacaccgttccgtttctcccagccgttcagacaagaacggcagtggaggccaatggaacgaaacgaaccggtgaggaggatgtctcctcaaccgaatcgttccttctcggccatcaacaaaccacagacccctatctcagatagggggtcaaaacgcttatgttccctttgtgaaacaaaggggcatgcaccgagcagatgcacaaaatacaccactccgggggcgcgaaggaagcgccttacggatcaagacaggtgtattaattgcctgatgatggggcataacaccaagaactgcacctcaccccgcaggtgcagtcattgtggtgaaagacaccactttatggtgtgttttggagaaaagtctcgagagggaacctctcgggtccaaccaaataatcagatgaaaagagaggcgagaaaatcctctcaaagtcatctgactatgagcgagcacgctcataaaagcgtgcccagttcggaatgctcacccatcactacaaatgtgatgacaagcgtgatggcgaaaaagcctcacgcatttctaatgaccagaaaaatactggtcagatccaaaaataatagaagagtttggatggaagttccattcctcttcgacccaggaagtcaaacttcctacgcctccgaccctctcatcgagaggctcaagccaccgaaagtgacttccgaagaaatggaagtctatggctttggaggagaaaggaatggaccaatgaggttccattctcccgtgtattccatccaaatcagaagaacggatggaaagtgggaagaaatcctcctaaataggacggagagaatttccacgccattcaaaatggcagaatggaattctgaggaattcccactcaaaggaatggacatggccgacgctatgagtttttctcgggaagagcccgaaatactcataggtgccagacatttctggcaattcttccaagggaaggaagaagtttctccagggttgtttgtaattcaaacaaccttgggccctttggttaacggagagtccgactttgggccggaacttccgaacccaggactatcaatgatggccattgatgagtccaatcaagggcaaatgccaacagttaaagaaattgaatatttctttaatttggagtcattggggattaaagacgatccaaatgaaaatgacgaccaaacagcaatgagcctatttaacaagtccatccgtcgagaaaaagacggaaggtactctgttaagtggccatggaaggaggaggtgcctgacctcccttccaattaccgcatgccttttcaaggctaatgtctacttttggtaagctttgtaattctccagacttaatggagcaatacgatgctaccattagagaccaattgcaaaaggggataatcgaagaggccaggaaagcccctggcactcttgagcattatatccctcatcagggagtccttgccaaaggcaagaaattgcgcgtcgtttacgacgccagtgctcacaccagaggaacaaacagtctcaatgcctgtttgtatagaggcccggtaatactgccggatctcataggaatgcttatgcgattccgatgtccaagattccctctcctctccgacatccaagcagcatttttgcaaattgctttggaaccggaggatagggaagtcaccaaattcctctgggtgaaggatgtcagtaaaccactgacaccagcaaatctgatcacttaccgattttgccgagtggcattcggagtgatcagttctcccttcattttggctgcgactttgcagcaccatttgaagggataccattctccagtggccaacgaattggcccaatcattgtatgtggataacactcttcttgagtgtgaatccacagaagaggctctgcataaatatgcagagtctaaagccattcttaaagaaggacacttcaacctaagggaatttgttacaaattccccagaggtaatgaaggcgattcctgaggaggatcgcttgaacaagcccaaggtaaaagtccttgggctcatttgggacacagacaaagacgaaattgtctttgagttcccaactcatggcttagaaaagctggcaacacgccgtcttgttctaagcttcctcgcctcattatttgaccctcttggtctaatggggccgtgcattcagcccttaaagcttttcttccaaaactctttgggaagaaaagaaaggctgggatgatgttctttctgagaaagaacaaattcaatgggcctccttccaagaaaattggaaggatcagaccctcaaaatcccacgcagagcaatgctacaagggaatccatcccttgaattgcatgcttttgtggatgcttccatacacacatttgcagctgctatttatctaagagcagtaaaagataaccaaatatcagtttggcttatcttctccaaaaataggctcaagcctaaaaatgcttcaaaagcattaacaatccctagaatggaactcatggccattctaatagggattcgcggtcttaaatttgtcgccgatcaaattcggcgacccatttctgaactccatctttggggcgattcacaaatcgctctaagttggattgcttcaaaggaagcacagctcattgagagacgagttaaggaaattcgtactctcaatgaatgcgcctttcactttgtccgaacagccgaaaatccggcggacattgcaaccagaggcgcaaaaccaggagaacttaaggataagtctctctggtggaatggtccttcctggcttaaggaagaccatgaccaatggcctaaagaaatggaatttcaaataaaagatcctccagaaaatctggaggaagggtctctggataacgaagagaaagttttcttcgttaataccagaacagaggaactgattgatagtcctctgattgaccccaaaagattcagctcttggacaaagattgtccaagtgactctttttgtgttaagatttctccgtctgaaattaattcagaggggaaatcctcatcaacttttcgagagtcatcgaaaagaaatcgccaaagtgtccgaaaaaggaccattttcagcagaagatgttctcctagcagagaaccttctgatccgcatggatcagatgaaaaaggctgaagattccctcagctatccttctcttaaggatagcgaggggattttgaggcttaaaaccaggttgggacggtgtgaccaaccttttggttttagccatccaatcattctcggaggacaatcctccatccgagacttgatcatcttaaaatgccaccagaaaaggcatcattttggggtggaaggcacactcactgagttcttactcgggtattggacacctcgagcaagaactaaggtcaaaaaagcactgaaaggatgccttcggtgcaanaggatgcaggcataccagtttgcattgccaaaaatgcctcctttacctgacgagcgagtatgccgtcaggctcctttcaagcatcggcatggactttctcggtcaccgaaa

SEQ ID NO: 6567 - DNA, 997 bp, Heterodera glycines
attgtatatattatgaaaaattttaaaagtttttaaatactatgaatatctgaagaaaaaaaaacactaaacattggtggggcatgaaagcgtttggcaattggcaatttgatttcgagatttcgaattattaaatttcccaaaaaatcaatgaaaatatgaaattctcttccattcttgggcctgatcagttgggctagttttgtaggcacaaaaagcacgaaattggcacctaaaaggaaagaaaaaactgtaaataaataaaaagtgtccgtaagaaagtggccaaatcgaattcaaatagtccaaagttggccaaaaaaatgcgtaaataggttttatttaattaattttttctaattagaaaacttttatgagcacgtcaataataattggacattgcaatttttttaaaatcaaattcacaactcaatggaaaaagctaaaaattctttggacacttttttggataaaaagtcttaagccttgacttttttatttttaaaaattttctttgtaagtgtttatttgctgctacttttcttggatgcaaatgatttcgtcgtcagcagccaaagaaaattcaaaatattctttcttcttcgcagataaatgagtataaattaaatttttgtgccaaaaactcaaaatctttgtaaagagaaacttaaatatttacaataaaattaatttttttttcttttggtttttagtcaacaaccaaaatgctacaaattttcacaaataaatcattcaaattgagcataggaattttatgcttgaaaatttctcttcctcttttctctcaattttccactctcttctccaccttctgccctcccccgccccccggggccagtcccaaagccatttgtctatttcagtcccgggtctgtatctcttcagggattggtttccgcaaaaaaattctttcggattcctccattaccgaccgagagatatcgattggtatatatattttgaccattttcggctc

SEQ ID NO: 6568 - DNA, 6005 bp, Heterodera glycines
  unsure (1)..(6005): unsure at all n locations
taaagcagggctcggatctgttcttatttctaagaaatgttctgattttgggctattgttcttattttgttcttatttcttaaaattattcaaaaagcttgaaattttatggcagaatttcaatattttatcaagaaaatataagatttgaggcaaaatttggtcatttttggacaaaatctgttaacaaatcgaataaaaatttaaaaaattttcccggcggcgcatatcggcaccgccggaccccctcccctcgcccattcaccaaaagttttttggaaaatgcgccgcaaaaaaagagtttaaaaatctgattttttgattccgaatgcactgaaatttacgatttgcttaatttctcaccaaaattgttaaaagcgattaatgggaggtgaaaatataatatttaatacatttttgatcgaataaattgtaaaaataactgatttgaagcattttacgaaatttatattgtttaaagtttaaaaataagtgattttaaaatgaaataagaagacaaaaaataaaaaaattttctacattaaccattttgttaaatatttctcagttacaaaacgatagtgcttaaatgatcggtcatcaaatcttcgagctaaaaaaagttttgaaataaaatttaaaaaagtttttctttcttatcgaacctgaaattatgaataaaaattatatctctgaattggtttatttttaattactaattaaaaaaattaaaatttagtagcgaaaaaaataaaaatgaacttctaatttttcttacatgtattaaacaatcagcatagcctggaattttgataaaaatgggtaacggaatttatgcttggaaatagattttgccgagacgtaatttcgccaccgaaatttctttaaaaaatttttcaaatttagaaactttcaagaaaaaacttagaagctttttttaatgtaaaattatttaaaaaactaataaaattatttatttttttaatatttgtacttctttctttgtctgctggtcattattttcattctccacgtcactgtttcttccatcacttttgatggcaactcgtcgccttttttggtattttctggcgatttatttcctttggcaccagcggattcggaataatttgttgcaaaaataaaatcaaaataaaatatgtatatggaaaacatttctgcgattttccttaatttaataaattttcataaaatatgactaaattattgtttgaaattgaaatattttatatgcagatttatgacaattttgttcacatgcaacccaatgattgaaaatgtatattttgctgccatcaataaggaaattgtcatatttttctattttccattcgaattttatcaatctgattttacagtataatacaattggtaccgtatctgtacaaattggtacttttacagcttcaactttggcatcgtatgcttcatttttggttcttttttgatctctgccgaacgattataaaatgttgtaattccgctcaattaaattatctgaatatttatttttgaatgaactggattaaagaacagacaactttttagctagcttaaatttaacttaatttgaagaaattttgtgaaattttaccctcaattggaaaaaaaattgcatattttcaacttttataacgttttttttgaagtttttttttgttttggaattttatgcgattttagttgtgtaatggtgaatatctttaaaatgaaaattaattttatcatttatttataaattaaaaattactttaaatgtgccgcaattaattttccaaaaaaaatactttctccgcttttataaaatttaatttccattatattccgccaggcaaaagtttttggttccaattacttaatttttatccaaaacgacataattttgagattttgagccaatttttaaacagttagtttttaattttccttttattcttttaatggtttacaacacttatcatattaaaaagttcaaaaagaaagttttttcttgaatttgacaattttctatttaattaggttaagcgctatattaagaggaaattggaatataaccaatagcataatttagaattgccttttcatacgaaattttttttcaaattattttaaatatttatttaatattttaataaaattttggagaaaaatatttgttttgtttttttgtttcttctattcaaacatggcttgacatttggatccaacatttgagaaccggacatttggaggtcacgcttggaaaagaattgccaattcaaaaggcacctcataaaaattatcaaatataatattaaaaaaagacaaaaatttttcaaacaagcgaaaggaaacctgagtgataaaatgcattattttatattttagtactaaaaaattattttattacccaaacattttgacgcatttctaaatttataaaaaattatttaattcacgaaattccttaaaaaatgatttttataacaattaaaaaactgtgaaaaaaggaagatctaagaaaaaacacacaaacattggcgtgggagtgaaagcgtttggcaattggcaaaatgccgaggctgggcttgtaatgaattaaaatatcaattttatgggatagagatggctaaaaaagagtaatcacttttataatattttgtaaagaaaatgaaaatgcaaatgaaatgtagcaaaagaaaaaaagccaaatggaaaattgattatgtccaaattgagggaaaattaacaaaaaaaaaagaatttaatgttattaaaaaatctttattgtatatattttctataaatttctatatattcttaataatattataccgttatagactatatttggtctatcaattcttataattgtttttcgtttctccattttgcagtatatttatgatttcagagcgcaaattttgaaaatgatttggcgccgagaactttatacttcagcagaaggaattttataaattttaaaattactttaaaatttcatttagacttgctagaagctatctgtctcaagtgtagaaaagtctaatttgtcatactttttttaaattattttcttagagggaaaaaataccctcaactagattaaaattttatgatctacatataattaaaatattcaaaaataaattttgtgtaaaatcaaaaagcattgaaattattattaattttttgatattcgagttgatagggactgggccgagtcgggaattcctcgggcttcctaagtaaaaaaaaatatatatgtattttagggagaaatttttgggaatattttcagatttttttttgctgtcgattcttacaattagtggtttatgcagaaaaccagaatgtcgcccttcaattattatataatttcttatttttaaataaaatgttaaatttttagttatattatacattaatttttgtggctccataacttttttatttttcgtctcacaccgctaatattaaaaaatcagaatagaagtcgatcctgttctatccaacaataccaaattcattcccaatttttgactaacaattcgcgaggtacccttgtaagtcgatattcggacttttaaatctgttaaatccattgcgttttaaattttaacggaaaataaaattttggtgcaaaatttatataacattctaagtattaatagaacactccataatactaaaatatgaaaaaatattttttgttttttaaattatgacctttcctacagcaagaaagttaaatttttaaaattttttcgttaattttttttacatcgaaatgaataacaatatttttaagtatattttttaatatatagaatatgactaatttttaaatcatttttaaaattattagtgtaggcatttttctgaaatgctttgttgcatttaattataatttttctactttattttttcacacaaaaatagattttattttaactctttctcttttgctgctgatgttatgagaaaaatttgttaaaattttttggtattactaaaatattgttaaaaatttaaataacttaattttacattcttaaatttgtgatgtattatttgaaattgatttccttgtttgttagtcttttcttataatgtaaaatattttattttgatttggtttatttttcaaagaaaatctttttaaaaattagtgaaaaaattttgatgatatgtgttttttatcattttttatttatatttttacgctaatttttttctatttgatttgcagacttttgaatttattctttacaagaatatttaaatcttctttttaatattatattgaacatcatttaaaccagggcttcgatctcaaaattttgaaaattttcatttcagccataaaaaatcctcatttgccactaaaatacctcaaaaaaatcctaatttggcatgaaaaatcctcatttctataaacatcaaaaattacgaaaaaaagtcagttaactgtcatatttttcgtttgaaacaatcacggcgcctatcagcgccgccggacatattttttcttaaaaaaattggcataaaatcgcaaaattggtaatttttggtaaaatcaaaactaatcttatttaaaaactccaaaaaaaaaataattcgattttttttgatttaataaattgacaatctgttgaatttgtttgcttttaaattgctctttttgtggcgcagtttttccaaaaaaatttttggtgacattgtggagagggggtccggcagcgccggaaaaaatttgggattttgagtgcgttttgttaacagattttgtcaaaaaaaatgattttgaccccctctatcgaattcctctttattttttttgaacaaaattatctaaaggaaattaattaaaatttattgaaaaatgaggatttttcgaaaaaaaaagtttaagatttgaagaaaaagttcgaacattttgccaaatatgcctaatttttcaaaaaatcatgcttttttgtcattttttttatcaaaagaccacaaaaatcctcaaatttctcaaaagaccacaaaaataaaatcctcgtttttcaaaaaaatcctccttgaccttctaaaagaccacaaaatgaggaaaaatcctcacatgtcgaagccctgatttaaacattgtattactaaattaatttttcgaacaaaaaatttttcaaaagaaaattcaatttatcaatctgtttgccattttttgtttcataaaaactttaagattaatgtagaactgcattttttctccagtataatattttccaataaatattttaaaagaaactttattaacttttttcatttttaactaatacatttatttaattttgacagtcatttttttattgaacattatttatttctctcgtaatttaaattattaaaaatttgaaagatacttttacttttctttaattttatataactttgatcaggtttatttatattttcatttttttaatgataattagtttgaaattgtcttgtccagtgagacagacacatctttaatttcggataccagaaaataaatattaaatgtaataacgattaaattatttcgctattaattcacaataagcgttttcatattttattgaaacattaataattaaattaatttaaattacaacgtttattgctttgaaatttactttttttacagaataataaatatataaattaattctgaattttataaatatttttcaagttaactttttcgagattgaatattgtataagcggcgcaagtgtcccggcgcaaaagtcggcttaccacaaccgcattagaaactgctttaatatgtaaattcagggttacgattaatccttgaatggcaagaacgtcctggaaattaggccctctcacttgaaaatttgaaaatattcttgaatttaaggtgtccttgaaaaggaacagtcgaaagaaaataaattcaaaagtttacaaaggaagaaaacttttataccanaattttaaattaaattatgaca

SEQ ID NO: 6569 - DNA, 2709 bp, Heterodera glycines
  unsure (1)..(2709): unsure at all n locations
tctgcgagaaattttatgaaatttaatcaatttgttaacagattttgtctaaagttgaccaaatgacgcagtttttgactcaatttctacaggattattaagtaaaagcctattcggcggtgccgataggcgccgcaggaaaatttcacaaattttgaatgaaatttgcgatgaaaaatgagttaactttaattaaatttattatttaatttatttaaaaatatttggcattctgtcttagaaaaattttcaaaaaaatcaataaaatcccgcataatcccgcacaaaaaatcaaatttgcggatcccgctgcgggattgtaattcaaaattattttcgggacgggattccgctggattaatcccgcaaatcccgcattttccaaaaaatgcgggattgcgcactgggattccgcaaaatcccgcgcgggatcccgtcccgcgccggtctctactaaaaactgccaagatagttagtttttaggttctaaaaacctccaaaataggtgctaaaatgggtaataagtgccaaaaagttccaaatttagggcgtgtaaaatcgtaaaattttatacaaaaaggcaaaaaaattaacaatttagtattgagacacataatctttattattctagtataaaaaaataaaaaataaattttggagctaaatgccgaagtattgaccaaaatattgaatcgtccaaaatatttagcaaatttattcattaattacagttgaaaatagttaatcgggattttgaatgcagttttccaaaataatgaattaaaaaatcaaaaattttgatcaacgaaaaaaaaatttagggcggaacccgtcagctggcccctcacgcttgggccccaccatgcttttccactatagctttcttctttgtatccaaatccaacattggtggtatcattcgaaagctcttctcatgttctattagccttacaaaaagcgaaaagttttcaagtttggaaaaaatttgttaagaaaatttcaatatttcgacttttacgcaattttcatgtataacttttttgatatttgtctaatcgcgaagcaatactttagaaaaagcctctaaacatgataagtagagcccggaattttgaaatggccgggaccggggccgggacttggaaaattgacccgggcgagaccccgggaccgggactcccgtttttccgggactcctggtcccaatttagggcccggggccccgctgggaccgggactttttcaaaatttttaaaattttgattaaaaattcgaaaattttttttataattttatattttagcttagaattatatcaagcctataaatcggcctcttctgcttttcaattatcatccaacaaaattaaatcagtatttgtagtccaacattgggatggccttgttcaaaaatatcaacatttctgcggttttcggctttaatctcgaacgtcgataatcataaacaggctaaattcatatttggactttccattttctttacattctcggcactccgccattttgccatcctttgatttttcaaatagacctatttcgagattgatgcattcatttctaaaaaattttattgattaaattttctaaattctttgggaaataaaggttcgggccataaagaattttcgaggttttacaaaatctaggtatgttgaattaaattctacaaattttcaaaaatctaaagtcatatcttgaaattttgaattaaagacatttcgccaaatgttattaaatttttcaaattttgggcagtttcgctggtgaaatttaagcccgttttagcccggtcaaaatgaccgggcccgggctcgggccgggcccccgggcccgtccggtctctaacagattcacaccaaaaaatgacaaagttttgccatttaaaaaaatatatgacgccaaaaatgtgttcgcgtcaaaaaactttcatttttaatttaattctcatctcaacttattagttttctttttaatgaatttgaaaatttggtagtgggatttctttattttctagctaatgagaaaatccctgaacctgctccagaaatcccgtttatttttataaatgttataaataattaaaacttttaagtaaatttagataacggaaaatgaaacagaatttgtcagtattaagcctattattatttgttcaaatatttgcatcaaatctctctgataaaggtattttatatggctattagcatacgtttatattattttcttattctgcacttatcgtttaggcacatttgtgaatggaaaaaatggaggtgagaaaatatttctgaaattaaaacgtaattaatctggtcattgatttaatttccattcagcaggcgttgattatttccaagtcaaatacgaagaaattgaacaaaaaattgcccaactgcaaaagcacaatgtaaggattaaatatgaatgtttaaattatttttgtgtaaaatcaatgcgctaatatttgaacaaacaaaaataattttattcaccatttagaacgaatcggacgccaaattaaacaaaatcgaaaatgaattggtaattaattatagcttanaatggattattanaacaatagaatatttttcagcgacaacttanacaagcgataattcttnncaacgctgctntaaatctgctccaccnantngntgattttttttcgcacagtggcttttccctgaat

SEQ ID NO: 6570 - DNA, 1903 bp, Heterodera glycines
atcccaaccttccccctccccctttggtcccccctatgcaaaggctggttgaggttgaccacatcctatggattggggctttgcagtgtttgctttgctccagaggaaatgaaaattttattaaaattccgaggaaaattgaattttttataaatttactttcattctaaaaaattcctttctaatatgtagagaggagagtaggaatctaagaaattgtggacaaacttaaaaagctgaaagtcggcctttggtattggaagccgatgctgatttgaatttgatatcattaggcatttacagtaccatttcgattggaatttggacaaaatccgacgacaccttttacaaatattcaaacaatggcttcattttcggacacagtgccactggcttgggcggatatccatcttttgcagagggcgacacaatcggatgcggcgccaatttaacatcgatggaaatcatttacaccaaaaatggacaaaaattgagtgagcaaatattaatttatcatgaaattaagcagatgaagactatttttagacacctcaaatttattcgtttttgacaacgaattgcttccatttgtacaagttaatacgcttggtgatgtgattgaagcggatttcggacctgtctttgagtacaagaatgtttcggatttgttcgctacacaaattacctaatttactaaaaaggaaaggaaacagagaagagaaaacttacaaaattaatttttgcttttgtttttaattgtatatacatttaatttactttatttcacacgcattttaaaatttatatattgtttctgcataaaataaatacatatttttcgaaaagataaaaaatgaatcaattatgaaattcaggaaatataattttctgaaaaatttacatttttactttttttatctcgggggaggaggggatgcggtgcttttttgtctttactgcatttttgaaaaaagccaaaattggcattaagaacaaaatagccgaaataggcaaaaaaaacaggcattacaactcaaaagtcagccaaatgatctgctgaagctgaaaacttggataatcagtatccgttacaaaaatagttgaacattcaacactacaaaaatagttggcgttgtcgtgccaattgcctgtgccatctccgaagctttcgtgtccgctaccgaccgagtttttaagctggcggtgctgagtgactaattttctttttataagcaattagtcaacgtgaaattcatttgcaaatttaaaattagttaatttcggtgtgtgatgatctgatgatgatggccaatttttcggtaaatttctaaatcagctaattcctttccaaagggttcaaaattttggtatttgcagctgttcggcatcacgcgagttgctttgaacaaacagaaatcgccattaataaaaattcattaatttattgtgcaaacaaaattcaaaaaatgtccatttatgggataaattggttcttttataaatgggagattaaattatgtcatttaatttcattatttcactgatttgcccattacttttcttaatgaactcctcatttgtcatctgctgctgcttccacaactttgtgttgttccttcttttgagttgtgttgtgccacatgcttttgcttgttgtcctcatggaaatctcagagtgaaaggcaagaaatgacaagtcaataatttttttaaaatatttcccgggcagatcccaattagctctttggagattcattgtttaacttttcacaattctcgaaattgaaaagccaatcgaatttgtcaaataaaactcaataattaccaaaattatgtttttcgctttttgagctgttatttcatatataatttgtttaattacctcaaaaggtgcatagttttt

SEQ ID NO: 6571 - DNA, 3446 bp, Heterodera glycines
aagaagggaaagtcaaggagactagccactaggacatttgcacaatgtcattgtcacctttaaagaatatatattaatatattttttaactttttccctttaactctaatttttcacaaggaccccccattcttaccagtgcttgtttttcccggttgccctaccgggaccgggacctgagcttttcaaaatccgggaccgggaccttggatgaccgggaattcccggcccggttccggtcccattttccatattcctatggcgttaaatttaagcaaaaaatagtcgaaattttaataaaatcgaatcgaatgtccgtccatcaaatggcgaatcaattaatcaattttcagtgttttcttcggttagccgacttttgcgccgcgccatttgtgccgcgacacttgcgccgcctaacaaaaacgacatttgcgccgtacagcgaaaaaagacatttgcgctctgattaaaataaatttatgtgctttatagaataagaattgatagatattcattattaattcctttttcgaagcctttcatgtcaattccatattgaagtgcacgtaatgattgatcaaatcttgatcattttggttttcattgggaccatatgcgataacaagccttcgtattgcctgatcattaagcggcggattttaagcgaaaaaaaaggtaaataaatgagggcataaaaattgcgaaataatgcgaaaaatggtaaaataggagcgaaaatttgaaaatcagtacgttttttcaatgaaattaaattaaaatcgatgaaaataacttattgagaaaattaattacaaaggaattgaatttcattcctttttcgaagcaaaaaaataattggggtttctacagaaaattctttttttcagttttttgttagtttgtattcttaatcattttttcatatctttgatgaacctattcaatgttaagattttaatggttaaaaaattgaatgtcaatctttgtgactagtaattttttcgaattttcaattagttatttttgtcgatggcttatagttttagtaaaacttattgataatagtggaatttttatgaatataatatttttgacagcgcggcgcaaaagtccatttttgctgggcggcgcaaatgtcgcggcgcaaatggcgcggcgcaagtgtcgactttgctgagcggcgcaagtgtccacttttgctgtgcggcgcaaatggcgcggcgcaaatgtctcatcacggttgtttaatactcaccagaagacaccacgaggggtgttcagccaatgacgaaaattataattcatccgcctcattttaatccaatcttatgaaaagttaccaaattcggtccctagcattttctggcactccccacggcgaatataaaaaaaagtgttaaatctctgtccccaaaaggtccgtgctccgttagctgtggaccagggcggctatttgtcaaatccagaacaggttttgtccactgatcacgttgacagaaaataaagagccaattttcaaggagtatgcgaaggtgaagagcgtagtccaagcagcaatcgacaaatgcatgtgagaattaaggggggcgagaaatccatttaacgagaaacgagaccgagaaatggagagagagagcaagagagagagagagagttaaagagagagagaccgagaaatgaccctgaaaagtgccaaaaatcacaataacaaaaatataagcgagaccacgaaaatcccgagaaactctcggagaattaattctctcccccatccacctgtgttatgctgaagagcaatctctttaaacgaatttttacaattttgaattgggacaaaccctcaagatatgtgctgattgattggcattacacgagcagtgagaaatatacggacaaagcgaaggagttcttcggcagaattagcactctgtgcgctggcaaatgcaactgtttgtacgaaacatggaacgaacccatacaaaacgattggtcctcgcagttgaagccgtaccacgaggagctggttaaagtgagattttaaaatagccatttaatgggtgttggcggaaaagtgattgatcaggaccatgttttggaggttctcatttttaggtagcaccgtaataattagatctaagccattgagacagtatattttttatcattggaaatcaacgtttttccctcaggtgattcggcagaatgacaagaacggagtgataatcgctggaacgccaaattatgaccaggatgtgaaggcggtagtcaatgacccaatcaaagagcacaatataatgtaataaataccgaataaatgatagtgggggagggggggggatggtgggccaatatttatccgaatacgaggatttgatatcctacacctcttccccgccgcacaaaaggtacacattgcatttgtacgcggcatcgcataagcaagaactgcgcaacacggcacaacaggcaatcgacgcgggagtgccgttgtttgtcacggagtatggcacaagttcgtacacaggcgatggcgggccagaccttgtcgaaacacagaattggtaattttccagggaccctatttcgaaaagtataaatgtttacaaattagagagggctttgaacgaattggaatatcgaccttttgtttcaaaggtacgactttttcaacaaaaactccctctcgtacatcaactgggccatcgacgataagcaggaagcgtcggcagcgctgcagaacacacagcccccagtcgggccggccgacgtgtgcagcaccgatcggctgaccaaatcgggcaaatttgtgcacgaccacctcatcggtgtaaaccagaagccggatggctgttaaacatcagacaaatggcaaatgatcggaatcgcgcgctcttttttttacttttctgggtcatttcatctttagcattaaaccaaaacaaaggcgttgagatagagaatagaagcctgtctaccttgctgatgagagcaacatacattttagtgatgctcgagagtatcgactcggcccattaatttagattttggctctaattcgcgcgagtttcggtctcgatttccgagcaaatcccttactataacatggtgacaactgacattccaaaattcatactggcacgactcacgtcaaaaatttttttttttggggggggggtattataattcagaggagagttcaaattctgtaaatacggtattcaaatttaattacgataattctgaatataatatatttattatataattaatatttaaaatatcgaataaaaaggaatactataaaaatattgcgtcttcgaccgaaaagcgaatcacgtctaaacgaaaatttcggtttcgaatcttgaacccgactaaattgattcgagttcccggtcccggcttctcgggtcccggcgagtcccggtcccggttttgcccaaaat

SEQ ID NO: 6572 - DNA, 2487 bp, Heterodera glycines
attgatttgtcattactacattagataattatgctatttttcttacgatgattttatttattttaattaaaactcattttattacaattcatattaatcttttatttatttaatcattttatttaattttattgtttgaatggtcgttcatgatcaaattttagtaacccattattttatatagactgtcttaaagtggtatttcattcaacggtttagaacattattatttttttttgcaaaaatatagacgaattttggtcataagatttttgcacaatttggtatctttttccaaaattttactattttagaggcgtattttccaaaaatttcaaaattttccatccttaagcgtgcttttttcgggtttttgtgaaaatacagaaatatagatgtaacatatggaaaatggacaaatatataaaatatgaataaatatggaaataaaaaggaaccatagatgcaccaaaccaagctaaaaataattcttacttgattgattttgaggccgaaataagtaaagcaaaaaatatgaaaatccatacaaatctggcccaattataagaatgcacaatgaacaagcattcattcaattatttgtgtctaatattcgataagtaaacgttcaattatttgtgtctaatattcgataagtaaacattcaattatttgtgtctaatattcgataagtaaacattcaattatttgtgtctaatattcgataagtaaacgttcaattatttgtgtctaatattcgataaataaacattcaattatttgtgtctaatattcgataaataaacattcaattatttgtgtctaatattcgataaataaacgttcaattatttgtgtctaatattcgataagtaaacattcaattatttgtgtctaatattcgataagtaacattcaattatttgtgtctaatattcgataagtaaacgttcaattatttgtgtctaatattcgataaataaacattcaattatttgtgtctaatattcgataagtaaaaattgtttttcttaaggacattttcaatttttgatttttcattttaatttcggatcgtggtaaagtggtacttctgctattaatattaaaatgtatatttttattaaatacaacatatttcttaaaataaagggtcgtctaagaagtggggagatctcctaaaaaacttttctgttgatttttttatttggaatacataaaatacaacaaaatgctgaaaaaaaaaattaattttcacttgttttcggctaatttagagtcagttttcgtgggtttaatcggtttataatgacgtcggattttgtgttataaaaacacaacttgattttttctacttaaatggtttaacttaatttcttttctcttttttgtaaaaggctttctaagaatttttggaagcaaaatcaatttttacctatgtgcctccatgcctctgtaaccggggggggggggggggcaaggggggcaactgccgcctccccctgagatgaaaatcgatatttttttaaatttacctaattttattaacaatttgagccaaaattttctaagttttccccagcggcgcctaacggcaccgccgagtctcaatttccttatagccaaaatttagtctcaaagtggccaaaatttggctaaatttcctgttaaaaaaacactggcaaaaattttgtgccggaaaagcaaaaaaataaataaattgttccattatcgcctaatcctttcccttcctttccttaagtcgaaaaatatgatgttatcaaattggggtggacagtgcacaaaaatatttataatttgtatgagtacttgggcaatagttgggtaattataaatcaatcaaatgttttttttttattattttagattgcagcgccctaaacgcctttgaacaaacttttatcagtcccaggtccataactcggtccaaagtagtttccgccaataaattctctttgattcatgcattacagaccgagaggcgtggaatgatatatcatttgtgagatttggtttggtacaagttttctagactttttcccataacctaaaagtaccccatctatgaaccttcccaacttaaaatcagtcggttatttttttaatttttaaaaaatactgaaatgtaaaaatcccttttcaagatggggttccattctgctggtgaagactgtgctcgggttggcatggaactccttccccgacttgtacaaaaacctaatggaattgaaagtcttccaaacggctgccatttttgaagtgagttttctcagtgaaagtgtgaggtttggtggaactggtccgcttttgggagttctgtccgcttttcacagtgattttggccaccaatatttcatttgttcaaagattgttcacaatattgtcggtttggtccgttcgctggtgttcaacaccattgtccaggttagcttagcagcacttacctataaatgccaagatttgatt

SEQ ID NO: 6573 - DNA, 2200 bp, Heterodera glycines
taattctgcacatcatcaagccaaatcaaggcatatttgcaaaatcttgaagccaaatcaaggcataattctgcaagcctaattttggcacttcaaaagcctgggcggctttcatcggacatcgacaaaaactgatcacctgggtggtgtaagttccgctgggtgcggtttctcatcaacaaaaactgatcacctggggggtgtaaagttccgctgggtgcggtttaatcaacaatcaaaatggacgcacaacaacttcagcaaattttggacgcggctctaaaaaaatcagcagaagtttttgccgccgcactcaacattcaaaatcaaaacccaaacccagggtcatccacaacggcatcacttgcggcatcaatcaatgcccgcctcgaaaaattcaattataatccggaggttggacagacatacgatgcttggttgaatcgatacggaaaaatcgttcaacaagacggcgcttcgctcccagagcagtccaaagtccaacttttggtcggaaaattagacgaggaggaatacaaacggtacgttgacagcattgcccctaaagccaccgaacaattcaactggctcgaaaccgtggcaaatctgaaaaagatttttggtgagacgaggtcgctcttcctccgccgtttcgactgttttcaaattcgccaaagccaaaaccaagacctttcgagtcttttggcacaaatcaattcatcgtgtgaaaacgccgaattagatttgaagaaagaagagctaaagtgcatgattctcatcatctctttacgcgacgaattttcggatttgaaacagcgatgtcttcagcgaatggaagaagcccgaaccaatgggaaaagcatcaccctgcaggaattgggcgaagaatgcaaaaagtaccaaattttgaaggaaagcacattggcactcagcacaaaacagtacaatgccaatgccattcgtgccaagccacaacaagtaaaggacaaggcagacgcaacaaagcaatatgccaaaccaaaagcggttccaaaaccgtatgagagcaagcacaaattgccaaaccgtccatgccaatcatgcggaagcacaaatcattggcgctccgattgtgggcacagagatgccaaatgcccaaaatgtggtaaaatcggacatctcggcaaagtttgtcgaagcaattcttcaattcgccacatccaaacggtgaatacaactgaaaggcatgcacaaatcaacacagtcatcatcgacttaaattgcatggaaatcaacgcagaccatccaaaatggtggaaaataccaatcaaagtgaatggcgcagattatccaatgcatgtcgattccggtgcacaaatcacattgttcacaatccaaacatggattcaaatgggcaaaccgcctttgacgtcagcaaatattcgcgtcaaaaattgcaatgaccaaacatttgcaattaatggacaattcatgtgcaaagtgcaatacatggatcgtccaccaatgaaattgttggcatatgtgagccccgaaatcagtcataatttattgggcatgccatggatagaagctttggaggtgatcccaaaagagattatgcatccaaatcttcatccaaaaatcaatacaatttcaacgaaaaccaacgaaatcaaagacacggagacattaatttcggcgctcaaatcaacccactccgatgtcttcagcccagaattaggtcattgcaccaaattcaaggccaatctcattctgaaaaacggtgcaaagcctatctattgcaaggcaagaccagttccacatggcgctttggacgacgtaaatgccgaaattgaccgtctattgaaaatggaggcaataaaacccattgaatttagccattgggccgcgccaattctggcagttaaaaaaaggaatggcagaacacgcgtgtgtatcgatttttccacgggattaaacgacgcacttgagctacaccgccatccgctgccacgtccagaggacatttacaatgcaatcgcaggctctaaatatttctcacgcctcgatttgcgcgacgcttatctgcaattggaattgtctgatgagtctaaaaagctgtgtacaatcaacacacaccgcggactcttccatgtcagcgttaccgttcggcgtaaatcagcgcccgcatttttcaaagtttgatgaacaaatcattaca

SEQ ID NO: 6574 - DNA, 2037 bp, Heterodera glycines
attaaaaattaattagtttattcaaattttacgttatgtgcacagtgtgtgttccggcagtggctgggttgaaagtgaccagaaatttggcggttccgctttcgatttggctgacatgtgatgggattataatgccgtcgtggtcctggcaaaaaaaaataaattaattaatattttagagttaaataaatagaaagtggtgtatttgttaattaataatttttattatcgttaagattggttgccacaaaaacatattatttttattttttaaagtttttacaacttcaaaataatttcattttttggtgtattgtaaaaatggtttatcaattaattaattatttttaataataaatgtgtaaagtctattcaaatttgttttaaattatgaaatttctaattaatatattggaaatagaattattttttgtgcaaaatatttgaaatatttctcaacaattcctccacctttatggccatctccaagtttccaaatccggccctgccagcgtccacagtaaattccaccgtatcattgacagtcgcttcggtgacaatgtcttccaccacaatttggccagcatcataaacccgaattgggaacggagtttggggatggggctaaacattttaaaaatttattaaatttaatctaaaaattatttccaaaatgccaccatgttgttcacgaacaccaacactttgtgcgttccgacctgaaaatgacacatttgttcagaaaccttttaaattttttgaaataaaaattcgtcatttaaatagtttcttggtataattcggtgtttaaatgttctataacaattttgaaaaacaacaaataaattttttctttggttttaccagtacaaaaacacttctggcggaatttaaatgacctaaaaccaattctttccaaataatgaaatattaaatgtcttaaatatggcacatttttatggttccatttttaaaatttgtgtttaagttccaattgacaaatgcccattttcacctccgttggtttgaagctgatctcccacgttttgctgcccgtcttgcggagtcggtgaacaatctcaacggcttgcggttgtgctgcagttggttctgccacgcgttgttcgcctgcaatttgagcgctggcggcactcgtggcgggaggagttacaagcaaaaatggcaaatttattaattaaatttttaaattaattatttgtttaaattaccactcgcaaaacgtcttctttgcccaacttgagcccgtccagcttcacctccacctctttaccacgacggacgacctgagaaaaagagacaaaatattttccaatttttattccaattaaataattgttcaaattaattgttattataattaaataattattccttttaaatgaaaattatttcgcttttctcaccgaatgtttgctgctcagtttcgattttccccactcaaaaacgccgtccgttttgtctttgccccggaatttcaagctcagtcgcggcgttgtcgcttttgaagaatgccttgaactaaaaattgaatattatgattaattgctatatttttaaaatttttccgctaacctcgaatgtttcataaacattgtaattaatgaaattattatttattattttttaatttctccacttgcctcggtgtttccgactcagcctcgtgatccgttgttgtggctgagcctcgtccttcgactggtgaaggtaacgtttcctgaattttggtgtgattgaggggggaggggagcagttcacgcgatacaaccatttccccaattgagaaagttttcacaaaaaattaatacaataattataaagataaaaagtgaaaaaaaaaagtatttgaacattaagtcaaatggattgggctttccttttgagacaaacggtgaaaagttattatggtcatacatgaaaaaggggaaaaagggggggggggtcaaccgaaatttttgcgaaggggtccagccatgcaatttgacgacctttttgtttttttttgccttttaaaat

SEQ ID NO: 6575 - DNA, 1428 bp, Heterodera glycines
tttcttgtacaatttctcttgtgaaaattttaagggttaagtgaatggataccatgcataattagtaggtaattaattaattaattaattgctttttgttgtttttggctgtgtgtggttgaactttttctgctgtgacgacggatttggaaaggaaacacaaaagtgaatatgaaatgaatgtgacaaagatgatacagtatgacaaccatatgatgacaaataaatacgcggtggtgcgcaaagcaaaaataaatttaaatgacgacgacgataatgatgatgatgatgaaattaaaataggatttgtgttgcagggatgggaaagccaatgcgaaaaaaaattcggaaattggaatttctgggcttcaaaaacgagcaaaattgttggtgtgccgactccaaaaatgccggaaattttattggtccctaagaatttgatgggtttccgtgtgaaatttttcaataaattggcaaaatttggaaactttttggaaatttaaacaaacaattttagcacctttttttgaaaatttgcccccaaaaaggcagaaatagtcgtttaaaaaatgtttttgactactgacgacacattggttcaaaaccaaatccatcaagaattatttcaaaaaatataataatccatctccaattatgaataaaaatgaatgctctattttaactgctctctttttgaattgaattaaaatttaaaaaatttttgtctaaaaatccctctctttccacgcatttagccttgctggcccgtccgtggtgcggacccgaaaagccgaaatgcgtgccgaacgggtggtgacgatggcggcggcaccgaaccaccattaccaacccaataatgccacggacgatgatgaagcggtggatgccgacccggatgttgccggctcactgagccaacgcgcggcggagattgagaagcggcgcgagtggcgccatgcccgcctgcgctccatggacgtggaatcgaagcggaccgatgagctggtgcgcatgattaccgccgcagcagcggccgccggtgcagcgggcaccgcttccggcggcaacggtgccgcgacggacagtaacaagaacaacaacaatggcaccggaagtgccacagcaacaacaacaacaacgagggcattggcaaatggaggcggaggaggagcagtgaactttggcaccaccgcgccaacgtcgacaccgacagtaaacccatcctcaaacaacagcaacagtacaccgtccccgattccaattgcaccctaatttgatcactaaatgcctattaatgctcgtcccgcaaccgggcgaccatgttgcagtgcaagtcgaacagctccaggctgacgagacagtccatttttgggcggctgcaaaaaaataaacgctttttttcaatggaaaattccgggaaaaataata

SEQ ID NO: 6576 - DNA, 2615 bp, Heterodera glycines
  unsure (1)..(2615): unsure at all n locations
ccataaattcactgaaaattatatgtgcgatggatttacatataaaaaatngatagacctaattattaatttaagctatcaaaatttttggttgccttttaaatatttatttttatatttttaaatttaaaaaaatgaaattacagtgcagcaaattgggtcacttcacgaaaagcacagtttccattcatttggatagttatactgataactttttcgtcaacaacaaaaaattcgtcaaagatttccatgctttaaatgtatttctgcagaaaaaatcgaaactatttttattaaatccaaagacaaacaggtgaccgagacgaacgagtaacaagaacagcaacaatggcaccggaagtgccacagcaacaacaacaacaacgagggcattggcaaatggaggcggaggaggagcagtgactttggcaccaccgcgccaacgtcgacaccgacagtaaacccatcctcaaacaacagcaacagtacaccgtccccgattccaattgcaccctaatttgatcattaaatgcctattaatgctcgtccggcaaccgggcgaccatgttgcagtgcaagtcgaacagctccaggctgacgagacagtccattttgggcggctgcaaaaaataaacgcttttttcaatggaaaattcgggaaaaataatatgaaaaaaaattaaattaaattcgaacatcgagaaactgtaaaaaaaaaagattggaattccagggaaattttttgaaaattttgttgcaaaaatttcgagtttttccctttaagagggagaagatgggtgaaagaccatcgacaagaattttttgataatgtttagggttaataagtgccatgccacgccgagggaatattcccttaaattcgggatattgcccaacaattttatgcaaaaaaatgtaaaattaagcaatttttaatgcgggaaaagtttttttttcaattttaaccgttaaaagaattgtatgaaattcaaaaatttgcccgttttttgggtttcattggcgctgtacaacattcttccccatgaactgctccctctctatgacaacagcaatttatcattttatagcgtcttctccttagctcaatgtgatgatgaaaattcatgaattgacaattttgaaagattttttggaccaaatatcgaaacccttttccacctaacggtaagcaatttggtgggtttagggcattagaaaaaataaatatttttcgtgcccacttttttgccaattcaatcggcaccaatgccaatgccatcgtcggcgttgttcaacaatgacatcaattcgggcgttgaaaggtgcgccgtttgagcaccgaacggagtggccgactctcctctaccggtggcacagtgccagtaataccgccaggggcggtgccagaaatagtggcatttgccggtgattggctggatagcgtaaagccagcagtttttccggaataggtgccaactacgtgcgggcattttttaaattttttcggaatgatctaactctgtccttcgtaaccaacttattcctcgaataaaaaattttttagcaatttcccaaatataccgtaatacaaatattttttaaaaataatagcgtaatacaaatattttttaaaaataataccgtaacctctatattacattataccaaacggtaccggagtgatggatttttggtccaattttttaatgatttttgttcgagaaacccgctccggatgtgtaattcccgagttcgaatgatcctgatccagattttggctcaaaatcattttattcataattggagatggattattatattttttgaagggcagttaaaatagagcattcattttattcataattggagatggattattatattttttgaaataattcttgatggatttggttttgaaccaatgtgtcgtcagtagtcaaaaacattttttaaacgactatttctgcctttttgggggcaaattttcaaaaaaaaatgataagcaaagggtccgatgatgccgttaagctcccatgaaattcttttaaaataattttaatgcaatttgttaagaaaattgtttgtttaaatttccaaaaaagtttccaaattttgccaatttattgaaaaatttcacacggaaacccatcaaattcttagggaccaataaaaaatctttcaatttaaatttaaattttgccaatgctggaaggaatttccataaaaataaatataattttataaagtaaaacttaaatgtttaaaataagtacaagaaaatgcgatggaaaaaattttaaaaaattagacgtgcgttcgcgcggactcgaactttcatatatttaattgactgctaaagcgctaccgactgcgctattttgcacgacagaaaaagtgaatttaatatcccttttcaatgatacttaatagtgtaacgaaaacaaaaataattgtatttaattaattgtttcttgtacaattttttctgttaaaattttaagggtcaaaattntattatttaagtttttcgttttaatttcaatattttgaggaaagacatcaaaaaaaaaagaagtgaaaatgcaaaaagaattaatatttttttacgagaaaaa

SEQ ID NO: 6577 - DNA, 2266 bp, Heterodera glycines
  unsure (1)..(2266): unsure at all n locations
agggcacatttttaattcgtactttaaaatggtgaaagtaaacatttaaaggtaaacatatgctttggaattgcagcaaatttaatgaaaaaaaaattgaacatttgattaaaagtgattggagaagaataggagcaatttttgatcgaaaaaatgggggggggggtaagaaattacaacacaaaacattaattaataagtgaatgaatgcatgcataattagtaggtaattaattaattgctttatgaatgtgacgatgatttaaaataagtacaagaaaatgcgatggaaaaaatttaaaaaaatttgccgtgcgtccgagcggactcgaacttctatgtaatttcctggcagaggctatgcgctaccgactgcgctattttgcacgacagaaaaagtgaatttaatatcccttttcaatgatacttaatagtgtaacgaaaacaaaaataattgtatttaattaattgtttcttgtacaatttttcttgttaaaattttaagggtcaaaattttattatttaggtttttcgttttaatttcaatattttgaggaagacaatcaaaaaaaaaagagttgaaaatgcaaaaagaaattaatatttttttacgagaaaaacaaattggtaaaaactagaaaaaaaaactaaaaaaagattttaatttaaaattcgttggaggggaaatatttcggcttttcgggtccgcaccacggacgggccagcaaggctaaatgcgtggaaagagagggatttttagacaaaaattttttaaattttaattcaattcaaaaagagagcagttaaaatagagcattcattttattcataattggagatggattattatattttttgaaataattcttgatggatttggttttgaaccaatgtgtcgtcagtagtcaaaaacattttttaaacgactatttctgcctttttgggggcaaattttcaaaaaaaggtgctaagccgagagtccgatgatgccgttaagctcccatgaaattcttttaaaataattttaatgcaatttgttaagaaaattgtttgtttaaatttccaaaaaagtttccaaattttgccaatttattgcaaaaatttcacacggaaacccatcaaattcttagggaccaataaaaaatctttcaatttaaatttaaattttgccaatgctggaaggaatttccataaaaataaatataattttataaagtaaaacttaaatgtttaaaataagtacaagaaaatgcgatggaaaaaatttaaaaaaattcgcgtgcgttcgcgcggactcgaactttcatatatttaattgactgctaaagcgctaccgactgcgctaatttgcacgacagattaagctaatttaatatcccttttcaatgatatttaatagtgtaacgaaaaaaaaaattgtatttaattaattgtttcttgtacaatttttatgctggaaggaatttccataaaaataaatataattttataaagaaaaacttaaatgtttaaaataagtacaagaaaatgcgatggaaaaaatttaaaaaatttgccatgcgttcgagcggactcgaacttactgagttggtaatggtggttcggtgccgccgccgtcgtcaccaccagttcggcacgcatttcggcttttcgggtccgcaccacggacgggccagcaaggctaaatgcgtggaaagagagggatttttagacaaaattttttttaattttaattcaattcaaaaagagagcagttaaaatagagcattcatttttattcataattggagatggattattatattttttgaaataattcttgatggatttggttttgaaccaatgtgtcgtcagtagttaaaaacattttttaaacgactatttctgcctttttgggggcaaattttcaaaaaaaaggtgctaagccgagagtccgatgatgccgttaagctcccatgaaattcttttaaaataattttaatgtaatttgttaagaaaattgtttgtttaaatttccaaaaaagtttccaaatgttgccaatttattgcaaaaatttcacacggaaacccatcaaattcttaaggaccaataaaaaatctttaaatttaaatttaaattttgccaatgctggaaggaatttccataaaaataaatataattttataaagaaaaacttaaatgtttaaaataagtacaagaaaatgcgatgaaaaaatttaaaaaatttgccgtgcngtcgagcggactcgaacttccatgtaattt

SEQ ID NO: 6578 - DNA, 1231 bp, Heterodera glycines
ggaagcgctgaatttggcatatcgcgaatcatacgtattcaaggtgaaccaatgggggcataaaacggggtaagagatgagccagggataaagccgaataaattaatgggacactcagccaaaagggattaacgaattaacgggattccgaggggacaaagccgggcttggcaattgcactaatttgtaagttataatggttgatccccaaaagttccgcgatcgcgtcggagtgcgcttctcctgcgaaattaaactttgcatgaaggcggaggacggatgtgctgacattaccgtaaccaaagaagcacaaagctacagtgtgttctaatacagtaaatcccctgcacagcctccgaactgccaggaaagcagcagcaaaagttacccggcagaacattacaaacactcgcgagacgacccattggggggaggggccaatcggacgaaaggaacggcacagaaaagggttagcggaattggcatcgaacagcgattggactgatccctcccctccccggacagagccgccgatcgatcaggacggtcgatgcagatttgatttctcaatatgtgttcgttctggacgaacccgttgagggtgaagaagacgacgacgacggagagcgcaacggcgccgttgcggcagcaaaagcgggcgttggcacagcgcctgggaaattgcgtggtgagtgttttgtcggagcattctttggtctctttttgtcgaaaacttcgcaaatactttttgttttatgcacgattcttttaatacatcccccaattctcaggtcgaacaacaaacaatgagttgacttcctccatttgcatcaacttcgccctgttcgtcgccgttctgttcgttgtgctcgtctctttcggcttggccattgcagtcgttggccattcgttgttccaacgctccaagtctgtctctgtccatttgtctgtctgtctctgtccatttgtctgtctgtctctgtccatttgtctgtctgtctctgtccatttgtcggtactaattcagtttgtatcccgggtttgggtcaaattttttcaaagtgtagccagacaggcagacagagcactatttccttcttttcttcaacatagctacaggggagaaagaagaaacagtgaactgtctgaccaaaactgggatactaactgaattaatacccatttgtctgcatgtctctgtccatttgtctgtctgtgtctgggcatttgt

SEQ ID NO: 6579 - DNA, 3580 bp, Heterodera glycines
cgatggttcgtcttccccaatcgcttttgttcaacgtacgatgaaaagcatttaatgcaaaacaattttcattcttttcgctccatcggctgccttttttcgggtgccccccccccaaaaaaaattcattcacttttctttcgctttttccaaattgacgaatctctccctgaattgctttactcatttttgttaattgttcgcaagtgctttaactcttttcgatgctttcagtcatttaaaatttatacaataattttaatttcgtaatttaaatataacaatttcttttgttttttttttgcataataaataatctatttttgttcatcataatcataattatcatctttgggttgtattttgttggatttgatttctttgcttctgtggtttcaatgctggcgaatgttcactgccctccccctctccccctcaatccttccccttggccagtctcttccatccgagtgatcattcgtccctttctctcccttccccttggctcttcaactctcccctctcctcctcattggcattcgtccggcacacagctcactgttgtccgtccgtccgccaatgtccgccttcccaatgagcacccgcgcaccattccctttgccgtttcaattgggcaacactttttcgtctcgtcgcacttttccgccgccgttttggcgctgtgcccatcttctgaatgggatcaacttttgcagtttacttttctctgatcaatcggtgccttcgctgctccgttctgtgcgttctgtggcgcggtggggcgttccgaagaaagtgatcgctttcttctgttgatggtcataatcccgctgctcgccactaaatgataaaattccaaaaccatttgcaaggccttttatcggctgattatcctaagcttttgcctgtcttcctccgatgccatcgctgggccgttaaagcgtttggccacttcgaaattgggcgcgactgccatggccacgtcctccgttgggtgtggtgcctttttttgcccgtcgtccccgtccccgcgttttcccttccccgcttcgtctttgccgcataactctctctcaatctccacacactcttccccgtccccttcatcctcttccgctccattttccgtgcagtttttcttcctccaccgctctccgccgatgcattgactccacgccaaaacattgggcgactccgtcggcacgtcgtgaagccgaacgcgagctgaggagcacaaaacgatgcaaaattggaagaggaacactaattacccggcagttggaagcacggcggcatttccatataatcgaccatttcgcgcctctccgccgcgtacaaattcggacgagagaggcgcgtgaagcgactcagaaaacagttttgggaagtccagtcgaagaagaagctggccgaagcgcagttaaagcccagttcgttctgttgattacgtatacatataattgtattttttagtttgagtaccgtagaagaattatctggtacagtacccacttttacctttgcccttatgcatttcctcacacattccagctgactgttcgccgtttgtaccgtgccgccgtcagttgcccggcgcgggtccaaatggtgttgagggatacggtggatgacgtcatcacagcccagggccaattcattgcctaattaattaattaattaggtttgagtttgatgaacaaaaaaacacttacgaggaatgcaaattttctcgaagtaaagcgaatccggattgggcacgtattgaagggcgccgtttggagagatggagtccgagagaaattcacagcgaccgttttgacgatggaaagtggcggaacggcacggggacggaagacgacgcccatccaaaaactaaaaagggggcgaagggggaataatggcaaaattaatttaaaaaagaaaaataataatttaaatgacaaaaaaagaaaagggaatttcatttaaaattatcaaattattaaaaaatcaccgcattttgttgacaaatgtgcagacaaacatctgccgagtcgactttcgctcttccgcttggcctttgtccgttcactgcgattccgtcgatcagttgcacgcgcgcacgcgcgccgtccgcgggacagtccgagttttgatcagttgcaattccaatggcgccggcgggggacaactgaattggctaattaattggtcaaaggaccctgctaattggtcaattttgccaattaccgttgtttccctttcggccattccgtttcccaccgttttctctcctcggctgctaccgtagttgccttttccaccgtgcttatggcccgacgacaatactgtagaggagtggaagggctccaatgattcgcccgaccattttcgggtgggcgtcggcgcagtgagcggaggcggcggaggcggaagcggcgccggcaattggttgtcctccgcagcagaagccgaagttgggtcggctgtctcctcactttggtcatcggccgacaaaaacggatcggacgaaggcgacgaagaagcggccgaagaaaaagcgcaagcggagtcaaagccaacgaaaacagagccggaaaagggctcaagggatggcacgcaagcggaggcaaaaacgggcgaatggggtgccattctgagcacaaaacataaacgggagaagtgaggggggcatactgtgccaacgtgttgacgccagcggccattgtctgactttggtggtccaaagggacgccgctctgcaaaaagaaacgcttgcggcgtcggcgttggcttttgcctttcgctgcgcttttcccccgccgttttgccactttttggttccattgctctgctgttaaattggatttgtttacgccaaaagtcaattcataacagaaccttccgcgtaattttggcctctgtttggactcaacgaatgttcgaataaatcgcaaacactgccagtcgagtcgaattggaagctgcgacagcgcggcctcgcatttgaacagtgcctaaaccgactttggcattttcacttttttcttttaatcgccttgcctttggcattcgctttcgtcgcttggcgttctccgctcaaaaggaaatgcgcaactgaggcgtgtgtctgcgtagcgcctcgtgcaggacgagtccgaattggcggaagcagctgtatgggtggcggacgaggccatggccattgagcgcgccttcgccgcgtaagggacggcgggttgggcagggtaagaggggtaaacgtaggcaggggaagaaggtggggcaaagggtacggcaccgccgccatcgccacaacctccgggcatgcagcagccgccgccgccacaacccccgccgggggacattagcggaaagcagccttacaaattaggggagggtgagggggaaagcatgcttaatagcagcaaaaagtggaacggaatggcacctttgacgacggaagcaaaaagcaatgccaacgcggcaaaaagcgactgaatgccaaagagggcgttcaaggaatggaatgccattcagaaaaatgaaaaggcaaatgaatggtggacaaaacgaaaaagcctaaaaggcatttaaaatt

SEQ ID NO: 6580 - DNA, 475 bp, Heterodera glycines
tttttggccgatctcagtacaaaaatgaaaattaaaattcgatttgtcggtaactttcacagaagttcaataaatattattttgtactaatctttgtcctcatttcacttcgtttctgctcgaaattcgctgttccttccgcgccgttttttccgcgtgttgcatttccctgtgggcacgcaacgcttctcgcggtggtgaagccggcgtcgcagtcgacgcaaacgtgcggacgggccaactgcgccacgtgctgctgcagccaatgggtctgaacggccgggggagcggtgggaggcaattcgaaagcgaagcgaaagccgcgctttggcatttggaaatttaatcattgatcgactgacttggagagcttggacatccgccaactgagcaccgcaaaattggcaattcagaagagaagggacggacgaagaagacaaagtgttagcggaaggaggggacactttgtcagcag

SEQ ID NO: 6581 - DNA, 1124 bp, Heterodera glycines
gtttcagcgacagggccaacggcgaaatggtcgagaaaagcgttggcggtggcatttgtggtcggagtgggcggcaaaatggttggacttggcatcgccgcgggataatcagtcgccgtagggtgggaggagacactcgccgcggatgaacaaccgctgatggacgttgttgtcgacactgtgccagcagtggccgtctcaagtccaagctgttcacgcatttttgccagcaattctgcaactagctaggtgggattggtttccacaatttcctaattatccttcctatttgcttttattgatttcgttggcttttcctctgattcccccattgattttgccattacgctttgtggagtgcagcgctttctcacagtccccggcatcgatgctgcccaatgctttggagtgctccttggccaacagatggtttgcctcctccggcaatttgccaaggctgaccagtgttttgacgtggttttttgagcgcaaatgtttggccaaaacgccgtgcgatcggaagcccaaattgcaatcggtgcacagaaagttgcggtggtgggcgtgcgcaggcgcggaaccgccaggggcggcagtggcgacggaaggagggagcataagcgaagcggaaggggacgcggtggagcaaagtaacagtgagggatccgccgtttgtgagttggccacggatggggccacatggggctgaaggggcggcacacggcacggcactgcgctcactgtaaagcataatgtcaataatgttgtcctgcaccggcagcactcgccttcgtccgatgcgacagcctttaccccgtggacactctccgaatgccgtgccaaaagtgccttcgatcgcacgacggcagagcaatcgccgcattgaaaggcgccgcccgcgcccttttgacgcgccaccgccgcattttgttcgataaaatgcgtttgcttgtgcagagacagttccgactctttgcggaatttacgaccgcacaaagaacacaaaaattgttgcgcatcagtggccaaaaaagcgctgagggtcgactgaccgcgaagcaacgaatctttgggaatgaattggttaattaggcaattaacgagcaaattgcttaaccgtaatt

SEQ ID NO: 6582 - DNA, 1288 bp, Heterodera glycines
agtggacaaaatgttgattgctttaatttgtaaagagaaaaatttggcgaatccaaattatggtgatcaattataattaacgagaaatatattgcttaatcatttgccatcattttgtaaaccttaatttggaataaacaaaaaatgcaatatgatgaataatttttatattcgaaaattatatttttgaacacttcagcttttcggttgattaattatgcttgtaattaataaatgcttttttataacataaaaaaaagtgtaattataaatttatattcgcataaaattattttttagtttttgattttttcagcttggaatttatgttaaaattttgacaaattcgtattatagaaaatacgctttaaataaaattccatgaaatgaattcttatttcgcaacaatttataccgtaatataagtgaaaattttatagtaaaaacatgaaattttatagttttttgcttgttttatgaatccaatcaaaaacatgtgtcggttcgaattaattatctctccaatcaaattcattcaatgctcattcttcacattcacttagcattcacttttcttttttttcttttccgctcttcttcattaatttagtcgtgcgatcatctaagttatttgaagtcaataaatagcaaatttaatttattttggcttaattttacaacaaaaaagcttttcggatttttgctgatcgaaacaaaatttattaaaaagattcgatttctaattttaaatcgttcggtgacagaagaattatataatattttgagtttaaaacggctttaaaattttattttgcgagttttattcgaaaacagaaaaacaatttttgtaaattcatattttcaatttttttaatgcgtttgttctaacattaaaaatagctttttatggttggcttcaagtgctgctcgagcattttttggtctcgagtcgtcactcgagaaaagactcggactttttgaatctcgataccgaatgtccgggttgattctcgaaacaaagtcttagtgattgattatcatgatgctcttattttaaataaagctttagtcattatcatggtactcagtagttagtctcggtctcgagagttagtctcagtttgagtctgggtaagtctcggtctcgaagagcacttgttggctgatacctttttttgctttgttgcttttcgttcggctcatcgtttttgttgattttccatcattactattcccatctgattctccataatatgttttcgtatctgagtcaactttgggttttgcc

SEQ ID NO: 6583 - DNA, 2162 bp, Heterodera glycines
gagagtttgggcagtgatttggatgataattaattctgaccgtggccataaaggaaaagtttcccacggaaatcaaagttaaactctatgataagaaatgaaggaagggggccttggacgtccaaacaatggtgggaacggttagcccgggtggtaaaacttaaagaggcggtcatgcgccctgggaaaacattcccattcccaccccacactcgcctcccaaaccaccaccacgtccttctgagccagtcagacgagcttttccggtggtgggtgaggtaaaaaggaaaaacaccgacaaagaatgctcactttgtctcggggagggtcaccaaccctcgaattgtgtggtttaccggacggtggagcagagaaaagctcgacttttttatgtacgtcaggtccatggataaccccgccgacttgggcacccgggggctctctcccagtgaattgagtcactgtgatttgtggcattatggtccagaatggcttaaacgctctgaaagggaatggccaaacaagtaccgggaaataattctgccacccgaggtgaccaaggaccaggagaccgaacttgtccaaattgccgtcctcattttagagccacccatgtgtccttcagttcttaatccccgggactttgggagttggtcaaagtttttagcgtccacaacttttgtcttatttctcttgtttaaatttgttggtaaaagtgaagcagttaagcaaaaattttccttttttttctaaacttgagggggccgagccgtcgtcattggcggccagaacagtggcgaaaaattggatcataaaaagggaacaggcgttcatgtcccctgggggtgacacttatgtgggatatgacggactaatccgcctccgcacccgtctcacttatgcccataaatcggcacttccctaacacttttaccagtaggccaaagagtggaattagtgtttcatactccccacacactgcccatgggtagcttcgtgtcatccatcctccgttgtccggcagcaggctcttgtacgggctccttttgctcagaattggaaccccatcattcggtccccgaactcggcgcaaaatttcccggcttaaatttttgtcgcgaagcctccgggtttattcgtagagactgttttcacccgaatatgcctgccttttctacagggtgttcgctgaaccaatttccccatttgcctatgagttatttcaatgcccaatttggaaatttcacctattcggccagcagtctccccccactccccttcctcggaggcacatttattgccaatcagactcatgctgctttagtccctgaatggcactcacaccttagttgtccctcggcattgtcggccgaacgcttgagttgagctctctcccatgaagtgtgccattcgtgtcacacttatcatgaggcagcggttgtcaaatgcaggtgccaggaccacgacgtagaaagtgcccttagggacccattattaagactgcccaatcaatttggccaactccaggttttccacagggacgcaaaaatatgggtctccttcccatactccccgataaatttggttgtaaaaatggaccggatccacttggccattaaacattcacccacaaaatgtacagtgtcaccaggtcggcttttaggatgccacagttgtaggacaggcgggagatttagctattcatgtgcctcatctaatggagaatcatttgccagtattgtgtgtgtggatggtactatgtgggtaacacggtgtacacccaagggcctccctcactcagtggtcatttcctgggaccaccccgaagtcaaaaccaattgtcaagtcgattgcctcggggagaagacagcattcaaattagaagggactttaatgttttttttgataaaaggcgaagagtactcccccatcagtacggccaagggagggaagggcatttacaccggaggggtgaccttccctcagattcagttagcccttttccgatccgtgggatcgcttccacagatcctatttgacatcgtaatctacttggcatggcgcattctcctttttctcgccattcgatattgccccatagcagcattgacggtctgctgttgtccccaggcgtccttaggggctatttatggacagtgcag

SEQ ID NO: 6584 - DNA, 1291 bp, Heterodera glycines
tccccaggcgtccttaggggctattatggacagtgcagttagaaggcgctcaacgagggcgcgaaatagacgacaccatgcgggcacgatttgaaaaataccgctttccctctttcccctccccctccccttttttccctttttaagaattttcgataaattcgtacgcatattttagtctttgtcatttttagcaaacgagcaaattcgccccaattgacaccatgaacaacaacaacatcgcttcttaccctaatcaatcctttcctcttcccaacactcaaaccaacaatactttttagttgcgcaacaccctcttcctaacacggtcctttaggagtgaccgatcaacagccgcctatcaatgcccacttggccccaccccaaccgccaacccatcatgggcatgtgctggcacctccccaactgccagcacacaatggccagccgccattccatggccccgttttggggccccagcaattcgcccgaaacgcccttccggcgccccctaatcttaaccacccccataacagctaattgcctctgcagttccgcggggatgctctgccaccacaatcccgaagtgcccttccacccgttccgccggttttcactgctgacccagctaatcgccgtcagtggggatgcatgaatgaagctctctctgagctggtggcagagtcaaaacgtcagcgagcactgttggagagattggtttcggtcgttaccgccaaccaaataactaatcaggtcacggggcgttttaagcatgggaatgataagcgtcagcgtaagcgtcctcgtcgtcaccagggtccggccccaattcctcttagagacattaaaggtgtggccgttgggaacccccaagcaagttttgtgccaccaattggggttgtgaacaacccaatactggctgatgctacggtggctgctgctcctccggtggttcctccggtggttgagattgcgcctattcaaggatcgaaggacatggccagcacagcggtggagtcgcgccccgcgtctgtttaagctccccctcccccttttctttttggcggggaggccggggaggcttgtctccgacaaactatttaaaaattaaaataataaaaatcacaaaaaaaatattattaatgttaatccgtaaaatttggggagaaatttcaccataaacatttcgtgctaatcttcgggcttggcccacttcccctcccttttttccccagtaatcccccaagaaattcgccatctcaatgctatcacacaatctcggacggatttg

SEQ ID NO: 6585 - DNA, 2363 bp, Heterodera glycines
  unsure (1)..(2363): unsure at all n locations
tctacgatgacttttataatgcctatttttgcctatttcggggtttttgtgcctaaagtgcctattttaggctttttgaaaaaagccataagaaaaatgcaataaaaacgaaaaacacacccctaagaaatgacgcaaaaaaaattttcagaaaatacacccttaagaattgaaaaaatttttcaaaaaattgttcccaaaattaaatattttttcttaataaaaattttttggtttaaaaatttgttcatattcgaaaaaaactttaaaatattttataatttcatttacaattgaaatatttaagttttaacgtgttttgttacctaaaaacgttaataaaaaattttatttgcctattttagcgcctatttgaggatttttgtgcctatttcgcgcatattttgtgcctaaaaaaggaagcctttttaggtgcctatttcgtgattttttgtgcctaaaaaaggaagccctactaataataagccttggttgatttttagtgataaatttaaaaataccattttttaagacaaattttaccttaaataaaatatgttttttttattggcgaatttatggaatgccaatgatggctgaatttcgaaacgactcagcaccgtaataacagcatatatcgtaataatcatatcactaattaacctgttgctccgcattaccccagccaaataaattactgttccagtcatttaccgtcctctgactgttttgctttttttgttgcagtttcttccatgctttgaccacttttgctacttttttttcactttgaagtattaattgtgcgtttaaaagtgcttcatcataattatctgaattcattccaccaaaaatatctttttcaaaatcatccaattcgcttccattctctgattcgtcctcagcatcggtttgcttaatatgaaaaatattaataatgttattttatagcataatcagcacaggcatattgctcatctggcttctggtatctcgctttctcgccttttttggggggttctcgttctcgcattttagcgcgaaatgcaacaattttatgtacttttatgaattgggactttgttctcgttctcgaattctcgttctcataatttatgcgtcttgcgagaattttatgatgtacaattatgaattgtgatcggaatgaaaaattaatgctagcctttttttttggggggcgggggttctcgttttcgcattttaccgcgaaaaacgagagttttatccactcttgagtcataatgaaaaattattttataaattgaaaaaaagtaaaaattttatgggtccttggaaaacaagcctattgttctgttgtgttttcagaaaaaaacttaaaaaaccaccaaattcttgagtattttaagtacaagcaattctcgctttttgctttcttgcatttccacctttttgtgcttctcgctttcggttttttgttgtgccgccgcagctcttgcacgctgctccgccgatttgctgctctccgccctgtctaggtgcggtctaccatatacggtaccactgtgtcctgctgggctaccaagagcgggaataccgtaacctgccgaactaccgctaccaacaataccaccaccaattttccatgcttgaaatcgttctttcacttttgctctactttcctcatcaagatcgtgcatcgcctgatgtttcagcccatacatacaaagttggagcgcagccgattcctcttcattgagaccacgaaactaataaaaatggattttaaatttgaaaaaaatactgcgaaaatttttcattaagagccaaaacatttttaaaaataaataaattcccatatgctaggcgggatcgattcgtaaaaagtgccaatattacagatttttgagaaattctcgccataactcagccaaattcaataatttggttctagtcggttttacgcttcctaagacattttacgcgtcccataacattttacgcgtcccaaaaacagtttgttttttgaaatggctactcgtacaattaaaaaaaatttaaaaattaagcctatgcttaggcctaagtctaaagcttagcctagtctaagtaagccattgtataagttgcttgtgtacgagttgtgataacatcttaggtttaacaatccgaaatttttagtaaaaactgagtaccgggcaataaaacatgtttcttcttagttattgngacggctanaatacgatggacatagaaaatgcacggaactagaatcaataattttggtatcattatgataattcttggattactctattagtgtaaaatttcagtaatttctttcattttcagaaatgcaaaaatgccataactttcaaaaaact

SEQ ID NO: 6586 - DNA, 704 bp, Heterodera glycines
cagggttgccagatgaaaattttaaaaagcctcattttgggtcaaaaagcctcatttttacaaaatttattcaaaacacgcttaaaattcaaaagtgttatatttttgattgtccatgatcaatttgatcattttgttgttagaaataagcattttgtgagattctgagcatgaaaaatcgaagttgatttttttgcggcgcttttccaaaaaacttggggaattgaggggccggtggcgccgataggcgccgtcgggaaaatttttgtaattttcaatgcgatttgttaacagatttgtccacaaaatggccaaattttgcaattttgagtaaaattgaaaaaaaaagaaaaaggatttttagggtacggcggtgtcaaaatggtctgacgtattcgaacacgacctgctcgctagcaatctttaacaaactttttttattcaggggccgccgaaaaacggtcttccctttgctaccttgtccccagtattcctagccttatttgccattcatagtcatgttgaacacctctttctctcctgttgttcgtgcctatgtgagcgaggctattcacaaaaaattatggtgcgtaaaaatccggactcaggtagttacagaaaaaacatctttaccaatataagtaatcataatcccaagattgacgataagctgtctctccactctctaaaagttgaaattccaa

SEQ ID NO: 6587 - DNA, 6134 bp, Heterodera glycines
cctttcatttttgctcttctttccttgttcctcatcctctcataattttgtcctccaatctgcttccctcctcatcctcctctccctcattctattttctcccactccccaaccattttgcccatgcccatacacccaaagtttaggctccaaactacaaatcactccccactaattacctaattaccctccacacccatgtacctcctacctataccgatgtacataaataattttgcctaattaccaaaatgtcatcatgacaggacacaaaacagcgccgccgccaacaaacagttagttaggaccccgcgggtcatccgtctccgtcaacatcaaccggtggctcactccgttacattcattaacctgttcctcctccacctcctcccctcctcttcctcctcctgccccctttcgtcatcatcaacatgtccccccatcggcaccacctccatggccccgcttcaaattcgtcctcccccgctgttgctgctgcgggtgcccatgttgaagttgttgtcgcccccggtcgtcttcggcccgccggcggtggcgttcctcacactgatccctttgtacgtcttcctccacctcctcttcctcctccctctgttcgtcttcctcccactccccctcctcctcctcctgctccctctgttcgtcttcgtcgtcttccgcgctctcttctgctgctgttcgtcttccttttccaccgtcctcgtcctcctcactcttcttctccgtcctcttcgtcttcgtcctccatcttttcacggtttgtcctcccctcctctctctttctcttccctcccctccccattcaccccactctctcttcgtttgtgttgtccccttgtgtatttctcgcacttgtctggtgtccgtccttgcccttttttgtacaaatttttaggtgcaacacttaattccccgcctcctcccccgcccatttcatcccccgaagggtttttcaaagaccgtaacttttttgtaggaatttcctccccgacccaaagcggggaatttgcgaatttttgtttgttgcattccaaatcagatgaaagggtctttttaaatggtttctaaaacttttttgcggaatttcttcctcaatccccgacttttttctccccgagggtcggagaggaaccctattttttggcgaacaaaatttgttaaagaaataggccagcgtcggggaaactttaaaaaaaaaaaattttttatcgagttttgtttaaaccagtgattgaattctgcactaaaatgccaaatttatttttaaacttcaaaattgtgataaaatatttatgtaaaggcttaatgatattttagccatttttgtacgtacaaaattggagaaatgagaataaaagaaactaaaagatggatgataggctgaaaagggcacattttttggatatggtaaagactaaagagcacaattttgcaaaacccggacacagaggacccgccgccggatttccgagacgaaccctgacagggtccctgatgaaaactcctgttttaacacgactccgggtcccgccgttccatttttcaaaaacacacaagggccccggacccggcggaccaggccattttcgcgccgcccgtttttgcgcgggtcaagttgttgaatgaactataactttttttttcattgtcaaccaaatccaatccaataatcttggtatcattcgaaagcactaagtgtcctctactgcaaaatttcgaaaaatttcgttaaggttcaaaaaagctatggccagaaaacttcaaaaactctggttttctaaacatttctggctataactttgttcaaacttgacaaaaatttttttgaaactttgcaggctagtagaggacatttaggactatcgaatgatgccaagaatgttggatttgggcgcccttagctcagtcggttagagagcactccacggtatggaaagggcatgggttcgaatcccaccgggcgaggtcacctttttacgttctacagtactcaatttgtccttatatttaatttgtcctttaatttgtactcagtttgtccctttcttcgctaaatttgtgctctttgtgccttgtgtcctttctctctccccacttttgtcgtcccgcccaaaaagtttgaaacagttaattcatttctcatttcatcaatttacaaatttccgccctcccccgcggcgttattttttttttttgggggaggacaaaaactacgacgttacgttttgttaaatcaatgcacctaccgtccaattcattataaaaattactcatttattctccattttttgccgggggttaaccaaattttcttttcttcctccacccacccaatggaatttcaaacatttaaaaattttaaaacggtaaattttttttaaaatttagtaataaattttgtctgggccacgaaaaatatgtatgtgatgccttcaatagggcaactcaactcgtacaaaaaaagaccaaaaaatattttaaaattttttgaatcttttaagaaaaaaaattaaaaatttttataaaattttataatccggttgtttttcaaaaaatcttttagtgttttttgatacatacaaattgccatggactcaaaaaatcgaattttagttcatggcccttgtgggcatacgggggataaaacttagaaatggattttggggattatgacaccgaattgacctaaatcatggctaaaaactaatgataaaaccaagaaatactgaaatggtttcgaaaaattttgaaaaatgggtaaaacttcttagaacaatgccttgctttttcgttcagaatgttcgactcgaccaatgcccgttggggccttttcattgcgtgccacccaatccggcacattctgatcagtttgctgtttgtcctcgccctgtccattcatctgatcaatttgcgaattggtaattttgccaatgggaccaatttgaatggcatttttagtgcaaaattttaaaacaaaaatttctttttccaccatagaatacgacattcgggcttcgttttcgcccaaaaattccaaggcaatgcggtacgtttttgattaggtattttttgcggatcaccgggaaaaattctcggcattttttgagtgctcgaaagtcttggccatgtgtgttttggcccgagaattttttcaggaaaatttgggttaacgaatttttggaaattttatgtattttaaacaagtttttttcgagaatcggtcaaaaaaaagtgtgcttttgtggccaaattctcgtgctccaaattcttagtctcgagtcacgcctcaaaaatggccactaattaatgataatttcccctgctttagtgaagaaagaatctatcaacaattctacaacctgagcaattcgccgctgcgctcgtaaattctctttttttattatcactgcatgatagaagaatgacaaatctctaatggatcattcattattgattgatcattacactgaggaatcagtgatcactgatcacttttgctcatagttcattgatcactatgttaggtcgttatcaaagacacggtcatttttcaaaagtctggtgatagatcattattaccaactgagggatcattatcaattattatcgatagaacatccattatgatagagaatattaatcaaaaatcactattggaacattattgatcactgcactgagggatcaaagatcacttaatatcaatcgatcatcgtttcctatttgatcatcaataaaagacatgatcattgatcgctgtactgagggagcagtgacaacttttttatcgacagatctttttggagtttgaaatgccataattgcctgtcgcaaatgccacacaaatgtttttttatttttgccagttttgtgcttttctcggcaaaggacggcggttccatgctgcgcccggcacatctgcgcgaggtgctttcattggatgccgaagtgaatggccaagtattgcgcagggacagcaacacggggtacaaactagcaaaatttgcacagattccgagtcgaaattttgaactcgagatctcgttatttcatttctgaaacgggttttttccagcatgcattagttttttgaaaatctaggtgttggtgttgaatttcacgaaaaatttgaagccccccccctcgctcgcaaagggcccagagagggggggggggagtggaaattttcttaacaaattcattaaaaagtccaaaaaattttcccggcgacgcctatcggcgtcacccaaccccaaaaatctcaatttttcttaaaaaaattgactcaaaatcgtaaaaattggccatttttggtgaagatctgttaacaaatcacaaaagcgtttttttaaaggttcgggaatacagactcgagaatctcggccgtattaggagattcctctcacccttccaaaagcaaaacttttttgtaaaaaaaaaaaaatcgaccctaaaacccgaaaatattcttacgcctgattttaattcaaccgtcatcgagactctcgagtttaattgattcattataatggctattacaataaataagcatcatattaatcataattgaattcatccctccacagaatgcgtgtctgtgacccgttgtgctcgctgaatgggccatttcatcttgttgcggtaagttaattacacatgcctgggcattttcatttatacaacaattattttcgtgattttgtccatttaattgtgattaatgccaaaaatgtgctaaaacccaaaaaattgccaaaaatgtgctaaaaatgcatgaaattgttcgggattataccgaattgttcgggatttcgaataccgaattgttcgggactcccaatcccgaaagttttctgatcacccttttggctttgaagccgactgatcagtcagagtgattggtcccttccagaaagcactgctcccttccaaccgatcactccaattggccgccaatttgtcatcgtcgtcgtcggcgccactgctgctcgactatccgatcgcttctttccatggcagtgatctgttcctgggtggccatattctgggcgttcaaactgccagtaggttccgtccgatcacttatcacgtgattttttcaacaatcagatttcgagcagtaaggcatacctaatcatttcttacagagctgatcgttcaccccgaaaattttagaaattcaattttattgcaatctagaaaattcagatgacgttttgaaaactctttgtaaaaatacaaaaaatttctcaatgataattgaaatccttaataaaaattaaataaaattctacataaaattttttaggaaatttttgaaatttaaataaatctttaaaaaattacaaaatttttcctagggaagaatgtaaagaagtgaggacagggggcttcttattttttgttttcctaccacatggcggtttttaggaaacgacctagcacctcttacagagctggtcgttcaccccgaaaattttagaaattcaaaattttcaacgattttttgagacctagaaaatttagattagtgaaaatatttcactgaaatctcttcctaaaaatacaaaaatttttcagagaaaattcaaattttcattataaaaaataaattaaattttacataattttattaggaaattttgaaattttcttttaaaaaaaatctttaaaaaatttataaaattttttcctagggaagaatgtaaaggagggaggacaggggcatgatcattctgcttccgttttctgatcacttcgatctgatcagcctttattacccttttttaaactctccgtttgttcgtctttttgatcacgtttgaattttcccacccttaacagatcacacttttgccaacaacaattcacgcattgtttccgctcaaaaggtatattcattcattattttgatgatctctgcttcaaattggcacacatccaattccccatttcacagatcattttgtggtatttcaatcgggcagacactgcggagaccaaaaagcgaatgcgagaggtgagagagagagaattaagagaaagagtgagagtaacggagagaatgagagaaaaggcgaatgcgagaggtgagagagaagagagagagagag

SEQ ID NO: 6588 - DNA, 6497 bp, Heterodera glycines
caatgaaaaatttaaggaaattttaaaagctaagaaaagaaaagcagtgcaatattaaaaagaaaagcaaacaaaaagccaagaaaaaataaatagaaattttaaagtcagaaaagaaaagctgcgcaatatttaaaaaaagcggaaagccaagaaaaaaataaatagaaatttttttaaagttaagaaaagaaaagcagcgcgatattaaaaagaaatgcaaacgaaaagccaagaaaaataaacagaaatttttctaaagttaagaaaagaaagctacgcaatattaaaaaaaaacaaattttctattttttttttacagcgaaaaattcaattgtcctttattttatggctcagcagctaccaaccgttttcggccaaatgccgccctttggccaagtcataatttaaaaatataaaaaaaactaataatttattattttaaaggttgcgcagttggtgcaacccatcctcgtcaacgcgtcccaccagcaaatggcggtgcttacttgtttttttttgtcttttttttaaattttgccttttcaggagcctttctgtgcggacggcacgaacaaccttcaatttttgaatggctgcgtttctgcattgggtcagccattgccgtaagtttaagtttcaaatctagaattaaattgtgcgcgagtattttttagtccgctgtgcctgatcgtcgtgtcgattgaccaccgtccagcgcagccgacgccagctggcccacttgccgtgaccaactgtgtgcttcgcacgggtgacggccaccgcgttgaggcctcgggatggcaggcgcacgcaggcgcgttggcagcattgtgtgttggcaccgcctactggttcaccaactgcgtgacccgtgccaaataccagcgactggactgctggtaccgcattggggttggaggccccaatgcgcttgtggtgccgcacgtggccccagaggtaagttttttttttaatttttaaattgatatttttttatgaaacttgtgtttaagtctccggcaaacattccaccaatggtgcccgttcaagttggcgcagggcgcgatgcggtccgtgtgccaacaaacgtgaccaatgccgttgatgaacgcgcggatctggacaacaataacaatgtgaggaaatgatcttttaattacgatttgtgtaatttgttgctttatgaagaataaacttttggtctcaggaaaatgttggtcttgagccacgtccgagtcgttgtgcgagtcgtactgctggtgcgcgatcaacacaaagacgtgctgctgaaccggttcgtttgagggtccgattcgatttgtcccctgatgtcgaagaaattaggggggtggaaagacaaaaaccatatcccgcccataaaattcgtttgctgcccaattttgacatttcacccattcatattgaaaaattccttgactgcccaatttgcatgtgctcctttgtgattggggagggggccacttctctccattgttttcacattttccatacttcttgtattgtcccctggctgagaatcagccgtagctgccccgtttgtaaatttgatttgccttgaataaatttttttcattgtaatgcttttcaaggctggccgccaaattggcgagtgcttcgtcattgagcgctcaacagccatgcggaacgtgccacgcaacacacgtggagagatttgtgaactacgcttcctgccgctggaggaagcgcagcggcccgatcttttgatggaggccatcatccagcaactcctcgaccgtgtgctggctggtcacccgcgcccatcgatggtcggactgcagctccacccgccgggatttgatcgcccatatgtcatcgggcttcgtccgccagagcaaaacaacgcagcggcattggcggcagctatcgagcggctcaatgagcagtcggcagccggcattgacttgcttgccggaacaacggtcaccaaagtcttggcggtctggccccttgactccattcgtgctgatccacaaaggggaggtgagatgccattcttatttcattaacatattttggttaaaaaaataggagcctgtgaccgtgacgtggagcatcatgtttccaacaacgtgcagtcacttgtccggattcacaaccccaacgaccggctctgccttgcgcgtgccattattttggggatgcatgaccgcgagacgcgaatggctggcggtggcggcaaagcggcattcaacctgttcgccagtcgtcaagaccaacacggtccggcagcagcgcagatgctgactcgtgccggcattgctgccaacagtgacatgtacacgctggacgatgtccaacgtctccagcagtggctcaacaatcagcatggtgtgggccaaattcgcctggcggtgtttgaaaaggagcaggaataccgcattgtattcaaaggagatgggtgagttttttatttcttttcttgttttgggtaaattagttaattgaagattggcggcgagattcaacctttgccttgtgttggagcgtggccacttcaactacattggaagagttgagcagctgtttgatgtgcccaactactgcatcgactgcgagcggagggctgacgcgcgttaccacgcgttcggatgcaaagttgtgtgccgcctttgtttgcggtacgggcctggttatccatggcaaactgaacaggtagattaagctccaaaaactacaaaaacaatagcaaaaaaaacccaattaagctaccgaatggtggaagtagtgctcgaaagtgcgctgaatgtctgttcatcttcccaaatggtgggtgctatgactaccatctcagcaaccactctccagctccgatggacggccgtggtcagcgacaacgtcggcccatctgtcaatggcgccgggtgtgtcgtgcgtgtggacgtatcgcctacgtggccacacatcagtgccacatgaccagccagccgacgatggaatctgtcggcgctgcaatgggccccacaccgtcgatgagccttgctacatccagcccattgacgacggctcagttcgacaacgtgcatcgattgctgttgacaacgacgattctgatgacgacgacgacgatgaagaattgccgcttcgtctgtgcttctttgacgctgagacgtcacaggatacgccattacagctgaacaaccgcaccgtccagaagcacgtgccgctgctcatcgtcgccgaagtcatctgcgaacgttgtctgcaggctggcatcagcgtgagcgatggccttggaagacgggctcctggctgcgtctgcatgacaggaatggtgagaggtcaactgtttcgccagtggtcttcgccaccctttgccaatgccccgggagacaacagcgcttcgccagttggagcaccagcgttcaatcagcgccgcttcttcttccattcgtttgacaacgacggcaacgacccagtggaccaatttttggattttttgctgcagcatggcccaaagaaggcacacacggtgtgcatcgcccacaacggtggaaagtacgatttccatctcgtacttgaggcactacaccgccgaaaccgtccacccaagcatctgtgcaccaccggattgaagatctactcgatgcgtctgtccgggcgtaaccaacgacgaatcacgttcaaggattccatcaactactttttttgtgccttggacgcgttggtgaagagcttccaagtgccggaccatctggcgacggtgaagcccttctttccgtatctctacatacgacgacaacatctgtcacagcgcctcaacggtctaccggctcaagagttctacgcaccggacacgatgaaggcagagaaacgggcgcaatttctccgttggcacgccgacaacaacggcaatggattccagctacgcgagcagctcataatgtactgcgtcaacgacgtggccattttgagggagtcggtcatccgattccgccaactcatcgccgacaatactcaaggcctcgacccattcctccacgcgtaaacagctgctggtcttgcgctggcaacttttcgccgctgtttcctgcccgccaattgtctggttcactcacccgagggcggctacttgcgcggacgccgtgcttcggcagaatcgcagcgctacatcctcttcttcgagctggagcacccggaggcgcaagtgcagtgcgccagctggtcggtcggagaggcgcacattgaggacagtggctaccgcgtggacggactttggcgacgagaagcgcctctccgtcccctggccattgaatggcttggatgctattatcacggtaaaggcttttttccgtttccaaaatatcttaaaattgaggctgtcccgcgtgctttcccgaccggcagcaacaattggcggcggggcgaacagcggaagatttgtacgaacggacggagcggcgcctctttgagctggagcacgaccacggctgcgaaatccacaaagtgtgggcctgccagtggacggagcggctccgtcatgacccagacctgaaacgccgttacgatgctgtgttcgtcccgtgcccgctggacccgcgcaacgacgcactgcggggagggcgcactgaaccgttcaagctccaccacgtgtgcagtgacgacgaggagataatgtgcattgacattgtcagcctctacccatacgtgatggtcggtttttgttttaaaatattcgcatattcatgatgaaaagcagaaggccaaccgcttccccgtgggcaacccacgggtcctgacgcgcgaggtgttgctccgtccgccaacggcaccgctcccgtggactgcgcccgaaaacaacatcttccgtgggttgctgctcgtccgggtgcttgccccacacaacatccgggtgccgttgctcggctaccgcacaaaggacgggcgattcactttccctttgtgtgcgtggtgcgccgaccgtcggcagcagcggccgtgccgacatgaagacgacaagcgctcgtgggtgaccgcctacacccacgtggagcttaacaaggcactgcagctaggctacgtggtcaccgatctttttgaggttgtccactcattaaaattttgagttcaagaacacaaattaggtctgggactatgacgaatgggacggcacgctgttcagcagctacgtcaacaccttcgttgggctcaaagtgcaggcgacgggctggccagaaggatgtgtgacggatgagcagcaaaaggcatttgtagacgattttgagcggacggaaggcatccgcctggactcgaccaaaatggagttcaaccccggcctgcgcctcatcgccaaaacattggccaactcgttgtggtaaatattttagggggtgaaaatttaaaaaaaaaaattgcatccacagggggaagctagcgcagcgcgtgggccagactgagattcgctacacgcggactccggctgaattccacgcgctcctcgacgacccaacggtggacaagttggactttgtccacgtgtcagaacacatggaccgctgcgtcgtgcggaagcgaccggaattcgccaaagccccgctgaccaactgccttccggtcgctgcgtttgtcacctcatacggccggcttcatctttacgactacatggagcaggtgtcagccatcgtcggtgcggagctgctctactgtggtatgtttatttgtcacgaatggttttttttggacagccctttgttttagacaccgactccatctactacgtcagcaagatgggtggtccgtgtgtagcagagggcgaggctctgtggcagatgaagcgcgaacacaccgaccgacggatcgtcgagttcgttgcgggtggccccaagaactacggcatccgccacactgcgcgggacggcaccgacgagcgcgccaacctcaaaatccgcagcttccgcctgtcctatactgcgcagcagctgctcacctttgaggcgatgaaagacctgacgctggccacttacaacattgacggcccaatgtgagtttttaacatatcattcttttacataatattaaaaaaattgaattttagcgatgatgctttagacaatgacgacctttacgtgtacgggggcggcgaacatcgtgccatacgcgtcaacttcccgcaaattgatcgcaatgtgtacgccgatctctacacgcatgaggcccacaaagactacaggcccttctatgccaaggggcgcgttcggcctgggatgcagacgcgtccctttggctatctggaggatgatggacagccgaacgaaggacaacggacgcatcgacgaaagagaaattttgtggagcaagatcccacacagcccggacactctgggtggttctgatgttgtgattttttgttagtttactattttgtttatttaaatttgtacaaatgaaaataaattatttacgaaaatcacttagatgtaatattagacaaattggtaaatgactggtgcaaaata

SEQ ID NO: 6589 - DNA, 1131 bp, Heterodera glycines
atctaattgtcagccaactttccgaattcgccccccccccccccccttccctccctttatactcgcttatgccggattacagattatccgataccccgcctatatcgcacgttacaaaatggtcgaacatgaacatgagggagtggaacccgtccaatgagtgagttgtttggattgaactccgctgcatgccaaattcggaattggcacactttgcagttgccgttgggaattgctcgacaagaccagagagcgatggcgccaggacggactgtccaacttgaactacactatgttggccaccacttttcatcggatgtacacaaactttgtggtcgatctgttggaggacgactcgcgcttcacaccgagagcatgccgatcagtgatgccaccgggtgacatgccgatgacgaaactgatcattgccatcatttgcaacggtgtgctgctgctgacaatgctcggccatcacaatggcggtaaaaataatgccaaaaaacatggcaattgtgcaaaattcagtgaacaatggggacacttttaacttaaaaattttaaatataacaattaaaaataattttctataaattctaaaaatttggaacttcaacattttaagcaagattatatgttttttttttactttttgttgtgttcttgccaatgaacacacaaagaataaacaaatttttattgatcggtcggtggacaatgcaaaaatataataaaaacgaatgaatgagggaagagacaaaaaggaggggaatggtctccttataaacacaaagaggagggttggggcgtggagaacaaagtacagatatgaaaataattaaaaaggtcaaaacgccaatttaacatctccaacacctcccttctcaagcttctaattccttcagcggccggaaggcgagaagcgaatcaccggcttcggcttacgctgcgatcgtcgaagagccaatgtcggcgggtcatttgcggcttgttgatcagtccgttgatcgaccggatcagcaatttgatgcgccaaattttgagtttgtccgttggctggtggaattggctgctgaccggcaccaggattatgtttcgaattctcttcgaaaacataatttcgacgaagttggt

SEQ ID NO: 6590 - DNA, 4800 bp, Heterodera glycines
  unsure (1)..(4800): unsure at all n locations
tgccgtccatcgaatgtttngccatgtgtttcgagtagtccttccttcttttgttaagctgaatnttgtcaatgttctctgaattgtttttgtgctcttgcgggaggactaatgccaatttcgttcggagttttcgtccgaagaataattgatcgggagaataaccatcaatggcattatttggcgtcgtcctgtaagcgagcagcaccttttcagtccaatttttatcgtccgtcgatggattatggaacgaagtgtgaaaactgtggacttggccgtaattgaagacatttgatagacttccggccatttggaaaagtatacatactggcgtgccaaggccttcattcgcacaattcccggatgtgcaaaatgcaatgactttaaaattcggccacgcagttggcttggaacgataacacgacttttgtagagaaggcagcccccaatttccaaaatttcatttcttttcggatgaaatggtgcaatttcgggttccctgcacttcgttggccaaccagaaataacaaaattaacaattttctggagtgtctcatctttggttgtcgattccgcaatttcttgtgccgtgactgtaagatgaacggtttgcgattgtaaaatggtgttaatataacagtccgtttcgacgcaaatgttggcaatcaacacatcttcctcaggctttggataattggctagccttgagaggacatctgcttgtccaaatgatgctgtattcgtgtatttgatgtcgaaatcataatttgccatgatcaacgcccaccgttgtaatcggctggcggaataaaccggaattccctttttggaaccgaaaatggcaagcaaaggcttgtgatcagtaaataaggtgaatttcctgccgaatagcattcggtggaatttctgtactgcaaacactagagccaatgcttctttttcgatctggctgtaattttgctgggaatttgacaaaacacatgatgcgtgttcgatcactttctcggatttgtcaggaaaaacgtggccaatcgttgcgccaatacgttttttggatgcgtcagcggccacgattattggaagagccggattataatgagttaacagcagatcagaagtcatgatcttcttcgccttttcaaaagccttctgttgctcttcgctccaattccaattttcgtcctttattaggagctgatcaagcggtgtgagtatttcacgcatttttttcacgaatcgcccataataattaagcgctcccaaaaacgatagaagtgacgttttatcgtgtggcgcgggcattttgctgatcgcttcagaacgtgccggatcgggacgaatgccttttgatgacacaatatgaccaagaaaaagcaattctttttggaagaatttgcacttttctaactgaatacgcaggccaaattccttaattttcgtgaaaagctggtaaagtgccgaaatatgtccttccaacgtcttagaagcgatgagcccatcgtcgagataggcaaacacgccgggtattccagcacatatttggtccataagatgttgaaaaatggacggtgccgactttactccaaaaggtaaacgttggcattggaataggccgcgatgcgtattgataacacaaaggtccttggactcctcgtccaactccatttgcaaataggcatccctaaagtccaaatttgaggaatatgacgctccattcagtgcggcataaatatcatccggtctcggcaaagggtgtcggttcaattcgagggcattgtttaaccctgttgaaaagtcgatgcaaacccttgttttgccattcttctttttcacggcgagaattggtgcagcccaatggctgaaatcaattggcttaatggcaccgatttccaaaagtcggtccaattcagcgtttacggcttcagttgcaccgtgtgggattggccgtgccttgcagaaaattggcttggcatcctgtttcaggataagatgtgccttgattttcgaacattcgccaagtcctggttcaaaaacttccgaaaaatccgttttcaaagcctcaatcagtgatgcttcgtccttgatgtttgcctttggcattggtgccaatgtggcatggatgctgattggctcgcacatctttttttgctgaaccttaggaaacatgacttcccttgggatcagatcaaaagccataatccatggcaatccaaagagattgtaattgacagcactgctaacatatgcagttagcctttttggcggcttgtcaaagcaactgacgacacattgaaacattccttcggtgggaaatggttcctcattacaattatgcatttcaatgtccgacagttccaattttggtcttcccaatttaatccatgtttggattgtgatgattgttgcttgggctccggtgtccccattcatctcacaatcattgtcatttatcttcacttgaagcttccaccaatgaccgcgattcagtccgacattcaagcaatggcttgtcactttgactgtgtgcacagcccgattttgacgtcttgaatttgatgtcgaagctgatctttggggacacatctttgctatgtgtccctgtttttggcatttatgacaaattgcactgaaaaatctgcaatcagatcgccaatgatcagaatttccacaagcgccacatgggtaggtcggctttctttgatttgctttgcctcccgttgtgtgctggtttgctgtcgttttcccagaattgtaattgcctttctttgatttgggctctctccattgttgtggacgaagttggatggcatttgttgagattggcggtgaaagaagagccaatgcactgtccttaataagctgcatggctttcaactcttcttcaatttgtccgagagaaatccgtgtgccacttttctctgcctcctccacattttcaaacatttttgtctcatgtcatggtggtcatcgctcaatgcgattaccaaaatcatgcattttaactgctcttttgtcaatgacaaattagcattctcgcatgatgcattgatgtgagcaattaatgtcgacacgtcttggtttggctgctgacgaatccggaaacattcataccggcggacaaataatgaccgggtttctgaaaacaaacccttcaatttgtcaatggaatctttccaattgactgtgtccggttgagttggactaatgctgtccctatatttggcgtactcgccgtcagccaattttccgagcaaaagtctaacttttgctgactccggtaaatcctttccgtcctcttctatcaggattccaaaccttttaaaccattgctcaaaggtatttcccgactcagagtcgtaatgaaattttgaaattcgtccatcgattgagctcgccaaatttgcatggcttaggctctcagaaggtccaacattttgctgcgcattcatcatttgttgaatccgcttttcggattttgccaaaactgcatcgagaatttgcttcagttggtccgcccgcgtccattgccaaattgttgaaatccaaataaccacacctggtggctccctacacttgctgagtgttaaggatttttaaagatttgaagataaaaccgcgtattgcggaacctcaccacaattgcgtcttttggtttttagttgaattgaactgctatattagcagacctcacaccacctgggtgctattggttttcgatgaattgcagtgtcttcagtagagaagatggctgctgactgcgccaatttgttgtgttcttgccaatgaacacacaaagaataaacaaatatttattgatcggtcggtggacaaatgcaaataataataaaaacgaatgaatgagggaagagtccaaaaaggaggggaatggtctccttataaacacaatgagaaggggggaaaaggcgtggagaacaaagtacaaatatgaaaataattaaaaaggtcaaaacgccaatttaacatttccaacacctcccttctcaagcttctaactccttcagcggccggaaggcgagaagcgaatctccggcttcgtcttacgatgcgatcgtcgaagagccattgtcgccgggtcatttgcgcattgttgatcagtccgttgatcgcctggatcagcaatatgatgtggtaaattaagaatttgatattaatatgttggacatgagtattggtgaggtgctaggggtgtgcttgatgttctgctacgtcactcagtggttgagtcgtgaaaacagtagatatatttcctatcatttaagtgaggcattttaactctggccaaagcagacaaattttttttctttttcattggggcgcaaatgtggaggcgcaaatgtggaggcgcaaatgtggaggcgcaaatgtggcacaaccagtattatgtataattttttcaaattaaaaactaatgggatattgacatgtcgacgaataaacaagaacaaattgatcaaacattccaaaacttaaataatattaataaattttatttcttaataggttataattcttaaaatgatttaaagatagaaaatctcttaacatgaatcaaacagtcttcctaattaagaacatttatttttaattacctaaaattaatatcaattataaaactatgaaattaataatttctaatgtcagtagcgggtgagagctttggttgccccgttcgaccagttcaaaaaatttctattttttgtgaataggaatacaacgatgaaaaagcattttaatttaaatttgctttaatatcattaaatttaaagatcaagaaaatag

SEQ ID NO: 6591 - DNA, 2892 bp, Heterodera glycines
  unsure (1)..(2892): unsure at all n locations
cgtccctacatatgagcagttcatctntttgcaaaaaaactttaattttttagtagattacaccttaatttgggattttggaaaacttccatattaaaaaaatatttttttaaatttgaacattttataaaaaggaaataaaactatcgtaaatacaattttgtgtttaaatccttacattcggaaaaatatttgaatccggaaaaatattattagggaaacaaaactatcgaaaaatttaattgattcgatactttttttaaatattttaatccaagtttttcataaaaatttcaaattaatttttttaagaaaaaactaacctattaatttttttctaaaataattcaaagttattgagaaaatcgcgattttttttgtaaattaaaaaaaatatatatatattgtatgaaatgtccattgtacgactttccttgaccttggtattggatttcctcatagacaattgaagtgttaggggttctcctattgctgagtctcggaactcaaatttatcccaaaaatttagaaaactgcatttttggaagttgattataaaaaatcataaaattttataaatttataataaatctatgtgaaataaggcttattaaaaaaccaatgtttttctttcaaattgccaacagttcggtgatttatccaacaaattctaaatccgatcattcatccattcactttgctttctctcctttctgttgtccgatcgtttgtccgtcgattgatcagatcagcgaccgatcaaattccactggctcaatttgactgtttccattgctgtccatgtggccaaaccattcactgttctttgccaaatggtcagccgaagtgccattctttgtctccaccaaatatgcaatggcttccttcatcgaaatggcaccgcttttgtccgcatcaacctaattaattaatattcaaaaataaaaattagttttaggggcaaatacaataattaccgtatcaaaatgttttcgcgcagtttccaccttcttcaatgaatgtacaaatggagagttttcagtgagactaaagatatatagaaaatgaaaaaaaagagagacgcaaagtaaaaataatttttgtcattttattttcaaatgtccaatagagtacacttttgttcaaattgttttactacccaaatgtccgcttttcaaattgtacactgttgcgaatatccggtaatcgcccgtccccttaatgggacagtacccaatctcgctactgtagttgctgcttgcgagccgagccatcggcgtgtggttctccggacatccgccctcctcataaaaaccgtcattgatgcaatttttgcatccttgtggacaatgcgcggcgtactttttgtcgcaacagtagtaacaactgcagcgtgttgcagaaagaaagcactgtttgcttttgtctttgccgatttcgacctggcagatcacacagtttctgtggaaaatgttgcaagctgggtcgggaagatcgacttcacatctaaacaagattttgcattttcgggcccaacatttagttatccgacatttagggaactgacagttggcgaaataacatttcaagatattttggaaagcgaaatagcatttttgaatctggatattctttgttgctccatgttgttttctatgatgcttagggttctcggcatagatgaaaaaagtctcgattgggctttttgaatgtctcagagaactctctacatatttaagcctctgggcccgatcgctggtcaattgggacatttgcgaattaaccctcctggataattattttaaaaatcaaaaattttacacaagactaaatatgatgttatgacaacatcctattgtaaaataaacatcatgttggcatggaaaaccctgaaaaataaaggaatacgatgaaaagataattaataaataattggcttacttgtgggacaaaattggcgagaaaaataactccgatggacagaaaatttgtgaaaaatgccatcttgacaaaataattaaaatatattttaattaccagtaaatatttgaaataagaattctgtgattttatgaaatttgtagttatgtgctcagtttttacagctaaccaaattataatttgtttttcaaagaattaaaatagagttgcacgggaccggaccgggacttttaaacatttatgaatattgggaaataatcgtaaaaaagtgcactcaaattttcaaattttttttcaaaaaactttctcttgggaaaatttccggttggtcccggtcccggtttttgtcaaaattcccggtccgtgcaactctaatttcaagtgaaaaagaaaatttttaaaattttatagaattttataaaaactttggtgaacgtggctaaaagagctaattgcatgttggcttatttctttaccacatttatacataaatggaagtgtggatcagaataatttattaatgcttcttaatttattcacaataatattaaatttattcaaaataaagcatctgaaaaaactgttttgattaagaaaaagtgcgacagaaagtaaaaagaaaaaattaattcagagcagaaaaaagaaaaaataaattaaataataaaaataataaaattatgttttaataaaatatattcattaattgcgctagtttataacttttaacctaaattcatacatatttgttgaaataaaaaagtgcatttcatttagacatccacataatttattgttaattagtttaaaaatttgcttcagaattcaattaataataatttggtattcatttttatgaatcgtttatagaaaatccgctcaaacctctgggcacttcacaaacaatcaggtcgctttcaaagccgttggtgttttaaatccgctcaaagc

SEQ ID NO: 6592 - DNA, 3113 bp, Heterodera glycines
  unsure (1)..(3113): unsure at all n locations
acttaacgctgtctcgcttttttctgtttctatatttactacataatagtacgagttgggtttcgtccgttttatgtcagcatttggacaatcacaattatgcacttgttttattattaaatcgggcttcatttatgaatttataaactataaaatagaatgaaattatttgattatattttttaaatattaagaatttataaatataaatcacaattataatattgaattgggcttcatttatgattttataaaataaaaatcacaatgatcaatcttttgggtaggggtatcataaatttcaaatcacaaaaattgcatataaaaaggctggatagagccttaaaaatcataattttccaacaacttcaatcattctggacacttaaaatatttcgaaaaccaaattcattaatccattcataaattttgtttcgatttgtccctaattttcttccgatttttctttcaattttattccgttcttttggtgagtattttctttctttttgcttgattttctcctttattttataatatttttcaatatttctcttttttcattcaaattttcttcttccttttgttcccatttttctccaaatattcatcaaatgaattttgtttaatttttttatttgctggttctgtttattaaacacaaaaaaaactgccacataaacaaagtttccaattaaaacaaattacaacacattaaaaatactcgtctgagctctcggaaaaaaacatttaaagaatttttttttttttgcgatttttcattttttaattaattctaatccgaatgccatttagaatttgatcatttaaaatttttaaaaatttaaaaattctctatgcaaggatcggatttttggcacttttttctcccttttaccagaatgcctagaattccggcccatattgggtagaagagattaaaaagacaaaatttatgtatggcataacagaaaaagaaaaataagaatttttctgttaaaatgctgtgggagcaaaagcaacaggggccaaatgaaggaaagatggtttcaaaataacatccatccctcaagtggtggatttggtctagtggttattacaacggatccaagtaagcggccccgagtgggggttcaaacccggtcttccacccccaatttttcgcctaaataatagggacttttgagctaaaactctcaaaatcctcattgcaaaaaagcctcttttacccctccaaaaaactccttaaatgtgagaaaagctttgatcaaaacgataaatccaatcctgcgattaaattggaatgcgaactcttcatccacaaatagtttgtattttattttattattgttcatttggcactctaataaacacaaaaaaacatcgcagaagaacggagggacaatcaaaattcaaacatttgaatgcgatctaataactagggctccaatttttaggcactaaaaaccgccaaaataggtaggctttaggctctaaaaaacacccaaaacaggctctaaaaaatggaaaataggcactaaaaatcctcaaatttaggggtgtaaaatgaaaaaaaatttattcaaatggtaaaaaaataagtcaaatcagtattgagataaataatttttaaatcacaaattcttgtcaagaaaataaataaataaatttatgagatgaatttttgaaaatttttcatttctcttttctctggggttttgttcaatgttcgcatgcaaatgctttttgtggtaacatttgatcagtgaaagtgttcacttttttttattatgctattttggcatgccaacattgacaaattgtaaaaatgggccgactttggcaattgacattcagacatacacctgcccaatttgccgcattgttctatcattatttttcccatttctgtttgccttttctttctttctttctttttcatttctttgagataaaagcattttaaattttgtcgtttttaatttgttgaattttttatattgtcttttggtcgattcaaatgactgcgactcgattggacgtcgtttaaatttgggggtcagccgttatcggatctccgggattttcatccccgtttttgctaagcgcagaaacggggacccccgcaccgcaacccccgaggacggagataaaaatacaccccttagaagaagaatggactcaacaacaaaaatcgtcaaactagccgtcagtcaatccaacataggactgttttgaatttagcatttattaattagccaaacaaaaattgctgcattaatttgtttcgcatttatttatcggcggaaacaaattttatgcaaaaattgcatataattttttcatctcattttccactattactgagtgtgactttttcatcattgctaaaacaaataaaagggatccgatattttcaaatccaaaatttgttggccaaaattctaaaatttttatatgcattatatgacccaacaagtgtcagtgaggtatcttaattaaattctgggccttattcaattactatagcctgtacaggaaagggtcatgtacggaattttcgccaggtccgaatccaagaaatggtataggaattcaagagtcagtcctgttcgagcaggactgttgtcctgtcttggtacgtatgggaatcttggtccaagtccattttatttttaaaatcgggggctctattgatattgcattgtgataagcgtgctcctaccagatgcctcgtaggcattggtttctaattgccctcaacagtctgcaaatatacctaaatgctttatccgcttacaaatttgcaaacattaaaaataccattgtcggaaataacaatagcaaaaaatgtgccgaaaaaagcaaaagtggacggagagtaaagcatcgagcttctcgcattgattgaggcgacattgactgtacacaccatcccaaaaaacgagaagtgtaccaataaatagagagtgccagagaaaaacaatatcttttttctctaattttttgtctccttttggcgtactatctaatattttcattattaggaaaaacaacattcacttcatcctgtttaacttttttcctgcttgnntaatccataccaaatattg

SEQ ID NO: 6593 - DNA, 1454 bp, Heterodera glycines
tcatcggcggtgacagtgccaacagtaaagtagagtaacaaccaaccctcagtttactacggtatttaacacgcactaccgtaccctgcgattttagcctttcttggcacagttctgctcggtggcatgttaacccgggttaaaaattttgaagaagcacggtgctctaattaaaaattgtgattaacataacggttcgaacagcttcgacacattaagcgattttatcatttttaaattttccgctgcttattatttgctgctctcttcttcatcataaagcaagctgccggacaatcaatggcagtgttgtgaagcatattgcaaacaattgcaatttttgcaaatttttctttatttcaaaatgaaaaaagccaagaataaatttagaccgggttggagcctacaaacttatttattaaacatttccgtcagttttaatacattgagtatgaaaatgaaagtcttaaagcgaacaaataaaatacaattaattttaatataaatataagcactttttcctttttattgaaattaattaaattttaaactcacgagaagtgatttttaattaagttttttatctgaatatcatctcaaaagaaaaaaatagtaaattttgtagttagatacaataaggaaaatattgattttataattttatttttcatatttaaaaataaaaatgttaataaattatcaaaaaaatttttaataaaaattcatttgttagttttgaagaaaatgaaattgggcctagctagtattattattatggctttcaattttaagcaagaaaattgacccaaaaaatgggacaaattgaaattaagtctaaagcttgaccaacaaaaaaatcataaacaaaaatgatgaacataaacttgaattgccttattcaaatactttttctaagtaaatgcaaattttcaaagactcgtaacttttttctggtgcttcaaaatgcttaacatttctccataaggagcatttgaatgatttttgagaaaaacattcaaaacagtttttcaaaaacaaccagtttttaattttcttgaaataactaattaaaaatattggtgtcgtggagcgcactcgatcctgacccattttacttttactgtctacaaaatccacttaaccacaaatgaaaaagtttttttaggtaaaagaaccggtaatactgacttttactggtcccataaaaaaaggaaataaaaagacggccttttacgattattcgttctattcgagggttatcgaggccgctgatcacgaatatgatatcataattgtcatatgacatcatctaatctttgatttttttgtcaagtctgattttcttcaagtatttttttcattttttagaattatagtcataaaatatgttttgtggagttatcggggtcgctaatcacgaatatgtcatctatttcgaccaactcccaaactct

SEQ ID NO: 6594 - DNA, 2737 bp, Heterodera glycines
gtaattttgtagtagaaaagttgaaattcccaatgacgctgtgaaatcctggatttttgcccaggagatccaggtacagaacaaaaaaaaacccaggtccaggctaaacacgaaaaagctaaatttccagacaaaattttagagtttattatttcaactgaccgaccgatctttttcacaaggtttaaaaaagggattagataaatttaaaaacacaattttattgtcaattagatatttttcttttgatggcggatttactaaacgactcaaaatcaatacgattttaacgttgaaaataagagcattaattaaaggggcggtggtttgcccataacttactatctgacaacaattggttgagtgttagtattattccaattaattgatcggtctttgatcaatttacaaatgacaacgtttaaagtgaacttttatgccgaaaaaaaagaaagaagaaaagtcgaacaaaaattgaaaataatcaaatacataataaaataagggatagaattaaacttgaaagtgtcggtcggcattgggtgaacataataacaaataataaatttaaaagaaatgtttgatttcctttaactgttgatatacttaatttcttatttctctttttctctctcttatcctctgatcattgttcgcccatcaatgtcatcccgggggcggaccttcttttcactaatcgagaccctttataagtgttcatccgcctcttctctcaatgattggccggatgaagtgtgacaaattgatgctgtttaccgttaaatcaatgtccccacccccttatccattcaaattcactctttttgaacaaatatttaaattttcatttccttctcaccccgccccgacttcttttcaaattcacaaaaatagttaattctccgaacacatctgttcatcttttaattgctccgatcgcagaagtggcgagcaaaggccgaaaagcggctgacggcaaacgataaaggcgcctattgttggccgaaggggctgcttggataaaccaatgacaaaaatgttgatgtttaatgttgaaataaaagaaaatcacgagaaattccgatggaaaattgagctcaatgaataaataattaatggccaaaagtaattaacgaaaaattaaaggaacagaagcgaaaaagcaatggccaattgtttaacaaaaataaagataatgagaattggcaaatgttgccaaaaataagatgatcgggaataaattaattggcaattacgagagtcagcagttgatggaagaaaagagtcatttggcaaatcctaggcattttgcttaaaacaatcgcgatcggacgcatcttcacttttttttcttatcaaaagggatttttccatttaagccaaataattttaaaactactaaaccaaaacaccgaagttgtcaaatcatcaatttttgatcgaacggaacatcacacagtcgaaagtgggcgagatcggtactgatcagtgatcacagcggaacatttgcggtgcggacgtgacttttcgaagaaggcaattacggacggcgtgttcaactacgaagtggaccaaattgaagcagtcgctcgaacggacaaaaaggtgaattcagtttttgaaaaaagggttttaaataaagggccattcgtttaaaatacaaaaattgcctgtaatttggaaagagtgaaaattaataaaattgaggagtaatttgaaggagtgtaaattaacgacagtaaggtgaaggatttgaaatactgtcgaattgtgcgatttgtgcaaaatgaccaaaagtgattaaaaagtaaagtttgaatcttgaacgacggcagaaaaaaacaaattattaaaaacgaaatcctctgaagtgcctgattatttacagaggggataaatttgccgtcgggcgtcaaaatacccaaatatagcgccatgggcgattttcacaaatttttaaaagaatttaatattttggctacggcgtccaactggcaccccagcgactgtgttcgcatgttacccttattttttagagggggaggcaaaagaaatttttatgaatatacccgcggataaaaagaaaacttggcgggaattaacggaagcattggcggaccatactaaaaaggtggatggaccgatgtgggcaaagaaagtgttagcaaaaataaagatgggccaagaaaccgtgactgagtatgcaataaaataagagagcttgtggaacagtcttctccagaccccgcgtataccaaggatgccagagagaatgagtcaattcattactttttaaatggcttaccaacttccctaaagcgaaagttattttttatggataagccgaaaagtctaatagaagcaatttctcaagcaaaaaaggtccttcagttgaaggaagagcttgaaaatgacgagaaaggtgatgaatttagacaccaaattgccgagttaaaggaacaaattaatgcaatttccataaaaagtaaaacaaatgaagaaggaataaatagggaatttgtaaattcaaattacaacagagggagtgattaccgtaggccaataagaggaaattggcagcaaaaccgaattatacgagaggtggatataacggtggattcgtaccaagaaatccaaattttatcccgcttggtcaaaagcgaatggaaataattcaaattctaacagatttaacaataatgagccaaggggaagaggattcgataacaggggcaat

SEQ ID NO: 6595 - DNA, 2254 bp, Heterodera glycines
aaaggtccttcagttaaaggaagaacttgaaaatgacttctaaggtgatgaatttagacatcaaattgctgagctaaacgaacaaattaatgcaatttccataaaaagtaaaacaaatgaagaaggaataaacagagaatttgtaaattcaaattacaacagagggagtgattaccgtaggccaatcagaggaaattggcaacaaaaccgaaattatgcgagaggtggatataatggtggattcgcaccaagaaatcctaactttatcccgcttggtcaaaggagaatgtggaatggaaataattcaaattctaacagatttaacaataatgagccaaggggaagaggattcggtaacaggggcaattttcagaataatcgtggtaatttccgaggaaatggtaatgaaaaacagagataccgaataaatatggtgggagatgaacaaacacagtcaagttcatcgagacgttctccgactccgacttttacatttttaacaatttcgatggttttgtctattttgtttggtacttttagtctgtcaaatgcacaatatcaaatttgttctgaacgagttcagactaccgcaattctgttaccaaatatcacgaaatgctctataccaaaataccaaaaggtggctgaaaacaaaataaccttgtttttaccagtgcgtttacctaaacaatttgccgtttataaatgctatcaaaaattaaccaaaatatgcaccggaaactttttgtttttatggaaaggagtaaaaagtcaggagacaacggtgaggggagtgtctcacgaaacttgtcaaaaatttaaacataaaatgggcggctcaatgaatcgacttagtgagaatctttgggccacggaaaatcctgaaaagttgacatatgcctggactggcgaaaaatgcgagacaacagtaaatgactttttagaggaaggaaaagggggaattttggactttttcctggtcacttcttttgggcataatttaaacccgtataaaaactgggaagaactgccaagaaagacattcatttgggaaatccctgagccaaatgagaaatattgggctacacatttttcggttggcgaattcaaggccgaaataactgaaaatgcagtggtaattgaaagtgagcaaagtgtattttatttcgaaaaagaggctaatgacgaaagggagggcataatcggtgtccctgaaaacgcctacaaaatgtcaaatgatgcttttattgtcttaagcaaaactgaaatacgggaaaaacgagaaacacctaaaattgagccgaaaagaaaggaaagcccggtaaaacagtaagttcaactgaaaagtgaaatcaataaaaaggaaaatgttttgaaaactaaggaacaaaatgctacagtatctgttttaccgaaaagcactgtaaagctggtcaaggacagccaacaaaaaatatcaaatccaattaaaattttacctcaaagtacacaaagtacagtgatcacaacttctaaacctcaagtcaaactctccacaacagtaatgcctgttacgacaagcaccactccgaagccaattactgttcaaagggttataacatcaaccagttctccaaatgttaattatgatggacattttgagacaatttcagtgaaaaggcctcagaatgagcgaatttatcaggcaaagggaagagagtttaaaaatttgggaagtcgttctgaaagcactaccacaaaaaagcctattactgtcacaaaagttgggacgaatatttcaaaaaaatttgaccgtgtctaaacctgttaaaattcacaaaattgaaaggccgttggtgtcaactgcgacaccaacaaaaaatctaacaattacacaaaaacccaaaaatggagtcaaaaaatctcatctcgtgccggagttcaaaaaattgttaccacaaccataaccacttcaacggtaaagcccatggtaacaagtacttctgtcactacgatttctacaaaagtcacgcaaaatgcgagtgaaataacagtgttgccaactgacaaaacaaatacaagtttaatgattggctcaccaattaattcaaatattttctcgggattggagaatgtcaccgaagttattaagtcagaaatgggtgagaacattgagactgaatatgaaactgaaaaagagattgagatacgtacagaaaatagttctgaaaataggagacttgaggaaatggaaattaattttataaatgaggaa

SEQ ID NO: 6596 - DNA, 3235 bp, Heterodera glycines
gcaagagagtgttggaaaataagagaaaggagggtaacatctcagcgacaattaggagatcaacgagcgattaattcaaccagtaattaatggtaataataattttaagaattttcatgtttatgggcatttgtaaaatatttgggtgcgaaaaattaatttttcgcactcgaaaacttttgacgtacaatgtgaagagaagaaaattttaaaataaaagaaatataaaataaaaaattatttggatatgatatttttaagaaaacaatataaaagaaagaacctaatacttaattctataagcttttaaaaatattcagcgaagcaggttttttaaaataataatgctatgaagctggagcttttcaaaaaataactggtagacaaatgttctacaaacagaagatttactaaaatatttttttaaatcagtcaaaaaatttaaaaattatcatatatttttcaagtaaattctaataaataaaaaataatcaataaatatcactccattattggaattaacataaaagtaaaataaaatttatgagttgaaccacagataattaaatcaaataattaaacaataaaacgaaataattaagtaataaaatagcaaaaatacataacttaagcgaatttaaaagcaatcaaaaaatataaaaaaggtggagccagtcttgaagttgcttctctattcatagcattcaaacttctgttccgcgagaaaatcgagatagaggaagaaacaaatacctaaactaagctaaaaaacgagtaaaaaagaaaaaataaaataaaaataagaataaataattgtcaacgacaatttttaatcccataaataattttctaccttattaaaaattggttcataaaaatagcaaaaaatatcaattaaatccaaaatcttagcgtaatgttaaaaacaaaagtaataatagtatcagccgtaattaaaatagaatttagtaaaattctgataagtaattaaacaattttttcaaattttgaaatatctttatataattaaattatcctaaaaaaagttgtgaatttatttgatttttttgccgttggaaaaatttcttcaattgtccgattttcttaaaattttgcatagtcttagcccattcatcgaattctcctttgttttttgaaaatttcttttctaactcgagatcggctcttgcctttaacacgcgaaaatctcaaattttttttaaattttgcaaatttgactttctgatttaaaaaattaaaaatgaaaagcttcaataatcggcgaggcgttaattaatctgctaatttataagaacagccaccagcagcaggcatttcaatcattttaaaagatttgacgaaaaagagaattgtaatacccgacaccaacattggagagcggatttttgaagttaacgggtaaaaaggttacgagttgtgtacccaaaaacccgtaaaaagccacatacgggtccggctcctattcaatttttaattttcacctaaattttgaaccgaacccggttttactaattcggaaatagccacaccaaaaattggaaccggactcggcttttatccggacttcaacttgtaagcggacccgaactaaaatcaactattaaatttaaactcttagtaatataaaagcataagaaaaagagcaaaaatttaaataaagtaatttaataaaaaattaatatttttataagaaacaattttaaaaatgttcaactattcttaatgaatgagaatatacactatataatcttttttgttttatttacaaacagtaaaatataattttcattcagaaaatttataaataaagaaaaaatatataaaaaaatcatttataaattcttaaaataaaaaaattcggttgggtaagataaaaaattaaccaaattgctaaaacttgtgattgaaaaccctgccattagaacattcaacctcatcatatgtgcacgatgccataaacgagattaaaaaatggaatgaagagagaaaaattaaaattaaaataatatttggcaaataataaatagcaatttttgaatagtctaaaataatataaagaattgaaaaataatattttggctaaatatacacaaattatttttacgacaatttaaagaaaataattatagtctgaaaaaagcaatgtttttcatttactgttatttttgcacatctgaaattggaagatgagaccataatattctcattatgttggagttatcagagataattaaatttacaaatcattcataactgtcacccatttcgacactaatggcagaacgtactcgaattttaaaaaagtaaagcgatattctcattatgttggagttatcagagataattaaatttacaaatcattcataactgtcacccatttcgacactaatggcagaacgtactcgaattttaaaaaagtaaagcgaatgaggatttgaaaatttgaggaatatttaataaaaataacaaaaataaataaatagaataaaacctatttaaaacaaaagaattaacataatatgataatgaaattagattcaaaaaggggtaatttaatagaaaaattaaaaaatattttcaaaataacaaaaacaatgataaattacccaaaggagaaataaacattcttaaagcattctgaaaaagcacatctcagaagcaaggtaattttcgttcggttcgtggacagatatacttttgctaaaactatttactgcttgaaaataataaaaatgaaaattcaaaaattttaaatttattaatcattcccacctaaaaaataaaaaataaaaatttattgagagaaatcttaattttaataaaattaaataacctaaaatgccttttctaaaatgttttaatagataataaacaaataaaaaaatatttatattcagttgaaaaattattaataattattaataaaaaacgctttagaaaaacttaaaccatttaattattttaatataattaaagaatatatgattaagcaacattcttataagggataattacatttttatgtcattatgagaaaagtattgaagaaaaatgctttattaaaaaacaaaaattcaaatagttcaaatatctgcatgaacatagcaaaatgaaataaatatgtaaaatgttatataaatcattaaaaatttttaacaacttgtgtttaaaaaattatatttccttaaaattaaaaaatttgtatatggaaact

SEQ ID NO: 6597 - DNA, 4115 bp, Heterodera glycines
tttatagacaataaaaaatatttttattttttaaatcctttatttggtgcgctaacttcctaaagattaagtcgcgaattttagggaggaaaacccaaaaataggtgcagaaatttttaaaaatttcgattaagggtcgaactgaaattatactgttgtttataaaagataaataaaaggtttttcaagagcttaaaaatgccgattaataaaatttcttttatgttcaaataacaaagttaattagattttaatttcgcccctatttcggcattttggtgcatttcttccctattttcgcccacattcgcctctgttttggtattttcgactctgtttaggcctctaaattggaatttttcgcccttaaaaatccgtgtcttaatattgtttattgtttattcataaaaataaaattcatcacaagggcgaaaaccacttactctgacgactattcagataaatgtgtcgtagagtaagtgacaaaaatatatggatgatcacaggaaattaaaaagacaaaatagtgaaataaataaaataaattgaggtcaaaagtcaaatgaggtcgaagcataaaaattacaccaaaaagtcccaccataacaatttttccgtgattttcctcacgcaaaacctgttcgataaatcaatgcgggtgccaaggtcgaacgcccattacatcttcctgatgcgggctcccaacgacatgcttagcattcgtaatttggccagccagatgttccctcgcgagcagggattcctgatggatgcctaccgacaggcatgtgccctaccgtacggctacctgttggtgactctccacgcgaacagagacaacattatacgcctaaggacaaacattttcccagacgacgaggagagaatcatttttgcccccaaaaatggttaagcgggaacagaagatcggtgagcgggttgtgcacaactacgactatttgaagaagttgggaaagacaacgtcggagaagaagcgccgtcatttgttgaacagtgccggttgtgaggaactgttaacgctggtcgagatttgtctcaacgttttgaacgggagtttctgtctgagcaggaaacaaaagcagagacttgagccatttgccaaagacatcagacagttggcacgtgtgcgaagcgagaggggtgcgcgaaaactagtgcagcagtcaggcggatcactttttgcccctttgttggcccccattctgattgaggctgcccgatacctgctttcgcgcagcaataatggccaataaacttattctgctgccatacgagcactacaaggggctggttgcagcgagggagacaaagaatgacgacgacattgctgagcggacaaacttgggctttgtcaaacgacaggtgaccgctgcagtacagaagcggaagggaaacgtcagcgagcggaacgcaatgtacaaccagcagctgcgccggtacctgaagatgcgcaaggaacataaggagcggcccgtccgagtacagctcagcaacggtgctcaactgctaaataaaacagtggagacgggtgtgcaggtacggcctggtccggacgaaccgaaggacaagtccgtgatggttaccgacgaagatgaagaggaagaaattgaagtgccaaagtttttaaccccaacaagccagacgcagggaagcagacgatcacccaggaccaataagaaagcagcaaaacagcaaaaattgatcgagaagaaggaccacctgttggccatcattatgtctgatccgcagagattcggcgcaacagaccgtggaaaaatcattaacccaaagacaggccgagagttcattgactcggacctggcctggtcaattgaacgcctggtggaccctcgcccggagaatgccccttcgccaagcggaaccaaagagttgaagaggaaactcgcacagaatccgcttgccagtagcctactcaatcgactgtttgttgggtctgggttcgtcggacaagtcaaacaaagcgggcgttttattccctcaaaatggacaagaaaataaacaaaatatacaccgacccggccaatccgggcgggtatgcgggggcgagtgctctgtacgcggcggtgaaggagaagcacccgaagttgaagcgtaccgagtttgaagactttttgcaaaggaacaccacctacacgctgttcaagccaaagagggagaagttccgacgcctacgcactgtgcctacggggttcatgaccggtaagttgtaccggggcttattgcgcacaattcagggttcagatgttcaggcggacttggccgatttccaagccctttcgcgcaagaacagcggctaccggtacctgctgttggcggtggatgttctatcgaggcgaatgttcggcgcccccgtaaagagtaagcgcccagtggacatgaaaagggcgtttgaggagctatttgagcaaatgccaagggtgccggacacactgtacaccgattgcgggttagaatttgtggcaaaaccgttgaaggagttttacgcggagaagggcattcaaaagtttgagaccagttcaaagaagaaggccgccgttgcggagcgtgccatacgcaccctaaagactcggctgtacaaatatttttcctccaacaacacatcggtgtgggtggatgtgctgccaaagtttttgagtgccataaataactcggtgtgccgcgcgaccggtcttagaccgagagaaatcagcgacaccaatgcgagggaggtctggaagagggtgtacggcgaagggcttgtacaatcgaacaagacaccaaaaatcagagcaggggaaacggtcaggattcccgagcctaagcacattttcgagaagggtactgtatttcacacattttttcggtcaatttattttaattttaggttatatacccaattactctgatcacgtttacacagtagacgaggcccgctcaaccaacccccagcactatttgctcaaagactattatggcacaaagttgaagagaaaattttatttgccagaattaacaaaagtacaagtggatgaaagcacaatgtatcgaattgaaaagaaatacaaagaacaagtgagagatggtaaaagagaaatgttggtgaaattcattggatttccggaaaaatattgggtcacaaatgaagaaataaatgaataaaaatattacaaatttaatgaaaattaaaaaataaaaacaattatggcataatgtcggggtcatcagctcctcttctgtgaacatgttcacattgaggtctgggttgaacagacaggtacaagcgccagggcagttccacttacaccactcttcgtcgctgtacccaaagggcaccaccttcaacccgtgatccctgaccacccccttattcacggtcgggttgaactgcttgaccaaggggacggtgaaaatctctcccttcttggtgatccgaaagttcttcgttgggtagttgaagcggacgttgttgtccggctgtcccagcttgttcttcaccatgtccttcatcttctcgaaagttatgcgctcgcaggcatccgagtcgagcgtgatgccgcgcaccttgagcttgtactcgtcctcccccgttgcgttgttgcgcagccacagtccgtacgccttgggtccggctaaacaaagtttccatttattttggtcaaattttaactaatcttaccacaaataaactccatgatcgtatgattcgggtactcgtccgcgagttccccgagctgctcaccacccggaagtgggtcccccagccgcgtcaggtagtcgtaaaagatgctgtccgtgtcctgattttaaaaaattacttcacattttcattttattttctgaattttaccatgtagagaatgcgggtgtcgaagcgctctacacctggtgcagggccatacacctttttcagcgattccagcaagtggattcgcgcagcagaggtggtccatagggcaatggccacctgagaaaatttcaattgtcttttttaatattttaaaactttcttacattgcttgtgctgtgctccaccacatgctcatctttggccttgtagcagaccattcagaaccttttccgtcagctgatcaatg

SEQ ID NO: 6598 - DNA, 6008 bp, Heterodera glycines
  unsure (1)..(6008): unsure at all n locations
aaaaaaatttggcaacaggaaaccgaaattctgagctttcctgtgcggaaatcggnactcgaacccaaaaatgtcggacttcggctttcacgaaaccaaaaataccgaaatcggcatttcgaacccaaaaatgtcgaaatcgtcatttcgaactctgaaaatcggcattccgacatattgctgatagtcatcatttttctttgttacttccaatttttttttgtgttttgtgacttttgaaattttcaaaacacaattgcccacagtcactcattaattagttcataataactaacagacttccctctcattatcattattatcctcatcatcattaggcaattatcgctttgtctaatctctgatctttttttggaatgccaattaaacattttgtcaaattaattgcctgtcgtcttcccatgatcatcatttctatcaactccatctgttcgtattttgttgcgattgggtcagactcggagacatggaatttttaatttttaactttgtttaatttcttgccctttcaaggcttgggttttgactttcgggatcgaaaatttcccgaatattcgagacggagtgccaaaaaaagttccgatactttttcgaggcgagaccgagactctcgaacagcacggggactattagaatggcaccacaattagcccgactcgttatatttaattgtttttttaatttttaactttttttaattccttgcccttcaaggcttgggttttgactttcgggaccgaaaatttctcgaatattcgagacggagtgccaaaaaaaagtctcgataattttctcgagtccgagactctcgaatagcatgggactattaaaatggcagcacaattagccggactcgccatatttaattgttttttaaattttttaatttaataccaaggtcaccataaatttcatgaaaattccacaattttatcccccgtctaaatttttaaattttgtagatttaaaaatattgccctttttcatcatcacaaaatttgccaacttttttttcttctacattttgcttcttcaacagctttgacacatcttccaaaaacatcatcatcatcacctcattagcaaccagtaaatgatgccaatgccattcctcccgtcatcatcatcattctcggcatttttgacgacaattaacgacaacgacgacaccgccaagttcaccaacaaaaactgttgtcgccattgttgttgctgttgttgaaccatcgtttttgtatacccaaaaccatggttgagtcgacattggacacattgttggacggctcatttttcggcacggcattggactgcttgaaaccgttggatgaacgcgaattgccgccaaagtccgctttggaagccgtgccgccgtcatgctgctcgtcattgttgtgtccgttatctttggcatgttgccgcacaattggcaacaatgacaacaccggcagcaggggacagaaaaggcaccggcacaatcaccacctccaacatcaccagcatcatcagcagaagcagcaacagctgcaacaacaacagttggagttggacgcggacacaattgtgatcggtaggtaataaattgaacgcggcattttcaaaatgatggcattgtgtatttgtcgggaatggctgggaatacagcgccaatttcgaacggtattttgatggcaacaattagaactcattagctgattactagggatcggatttttagtgataaaaaatcccaaaataattaactaaatagtgagaaaaaaattccaaaatagtggcaaaaatagtggcgaaaaagttccaaatttaggggtgtaattttttaaatagctgttttttaatttgaaaataatttaaaattaaggaaaaagattttattcactgattgcagttacaaaatattttcttagaaaatattgaacaagaaaaaaaaatttgggggaagaatttttgtgaaatttttccaattcttagggatgtatttttgaaaatttttaggtcgattcttaggggtgtatttttgaaaatttttaggtcgattcttggggtgtatttttcgtttttattgcattttttgggaaattttccaaaaaatgcaaaaatagtagcaaaaatagtgacgaaacgccaaaatagtggaaaaaaatgattttagtggccaacttccaaaataattttttttagtggcaaaacaacaaaatagtgattcctggtgatgaatagtggcgttaaaacgaagaatttccgagctaaaaatgtgttgttcgtgcatttctcgtcgaaataaatccgcagaaaaaatagttaaaaaactaagaatccgatccctactgattaccagtgttggttttatgccaatatatatggccaaatttggcaaaaacatttctttttttgaaaattcaaatttttaatggacgctgaaatggtattttcaaaaacggcattttgaaggcatagtaattaggaacgcattgctatttgctctcctcactgtccctattttgataataggaaacggcccggcgggcattgcgctgtccgcgctgctctccggctggcgccccttctacaacaaacgcgtgccgcacccggacccgcatctgcacgcgcaactcacgcgcatggcgagcagcagcagcgacgacaattgtgacctgtcactgcttgaccaggtgggtggtgtgttgctgttgtggaggagtggggtgccccagcaagtgggagcagtcagcaggacaaaacatctccgggacataacgtctcaccgggataaaacgtcgccacaaaaaaaaaaaaatttttttttttaaactttagaaaaaattcaagaaaattataaatttttagttgcctagcctatcccggcgacgtttgcgcttctgatcacttttcgaaaaattatgagggattaaatttttactaaaaatatgccttacaataatggtgtaattaaaaattcaaaaaaaaaaaaatttaaaattaagaatttcgagaaaattttaaaaccaaaaagcgttgaaatattttcatgttaattttattagctatagaaagggttaattaagttcaataaaactttaatttaaccttaaggaatacggcttcaaaaatgtgacgaaatatttttttgtttacgtaatttaatttttaaaaatttgatcatccacaactaatttgtaattgtgatcagaagttcaccaaattttgcagagatacataatggaaacagtacaaatgtttacaaattttcctataaatttttcacccgaggaaaatttgtttttaatattttttttaattgacccatgggaatgttttcaggaaatgggataaattattttaaaatagaggttgattcccttccttttagtatccccctaatttttttttttgttgccaaattcaaatttttggcattttgccacagcaggaccttgacgcgttggcggaccaacattttgagcgcgcgcaaaacgccggcggcgccggagggcacacgccgttctccgtgctctacgattgcctcgcgcggccccatttaagcgcctcattcgcctcctccgcttcccataccgctgctggccatcatgcggcggcaaacggcgacgacgacgtcgatgccgagcagttcgtcgtcgatggcaccagcgctggtggcgacgattgcggggtaaaaatgtgcctgctgccatccgaaaccggaatttcacgggacgcaagatttagcgttgtgcctccctgggatatatgtaatccacttatcatcccctccccatccactctcaattactcgagacttggttcgagacccgccccctcccccctcccaaaaaaagagctcggtcttggcgagattttattccgtccccccgatttttacggtatcgaggtattgaaaacagtttgcggttttaattgtataaactaattgatgtgtgccattctcccccccccccgcttccagcaacggcatcggtcgccctcccccgccgcttcttccccggtcccctcctcctcctgcctttgctggagacgacgcgagcgcgatgccatttcacacattgtgctcggcgatcagcagattggcggcagttggaccgaatatgacgaccatgtgagagaacaagagtggggcgcagattgaatttgagaccagtcagggctgaaatggcgggactcaatttcccccatttattttttctaaatattttccccaccgtccgatatgttccgtttctgttcatcatcaacatatcaatcatatcatccccgatcagatgctcactgtgagtgcggtcgagtggatggatttgcccggcttttccctggccgcggattttgtcggcgacgctcagctcgcgcagcagcgcccgcgggccggcctctacaaggcgtacttgaatgcctacgtggacgcaatgggactgcggcacaacttcaagctgttcacacgggtcacccacattgaggtgtgatgattagggcttcgatttttaggtgctaaaaactgccaaaataagtaggttttaggttctaaaaaacccccaaaataggtgctaaaaatgggaaaataggtgccaaaaagttccgaatttaggggtgtaaaatcgaaaattttcatcaaaaagcaaaaatattttgccaagtcattaaggatatacataattttcaaaatcaaaaattatcgtcaagaaaataaaataaataaattttggagataaatttttgagaaatttttcatttcttaggggcgcatttttgaaaattttctggtcgattcttagggatgtattttttgaaaaaatttttgggtcggttcttaggggtgtatttttcttttttattgcatttttgttaacaaattttgggcaaaacgccaaaataggtgaaaataagtttttttaaatttttttaggttttttaggtgctaaaaataaaaacctagaaaataggtgctaataactcgaaaagtagcttaacaacagcccaaaaaaacatgtttttcgtgcgtttcaggccacggggagctcaggaaaaaaatatgtaaaaacctaaaaatcgaagccctagtgatgatattgatattgtcgtttgtccgatattttggggatcggaaatacagaatttttgaaaattttcgattctatgctcagaatttcattatgtaacccgattttttggtattttcttccgtccctcttactctctctctctctctctctctctctctctctctcactctctctctctctctcttatctctctctctgcctgccttaaactatctctatgccttcccttccaacattaagatttcttcgttgttatttctctcccattcctacactatttctgcttttgtctctgctttctctggccataacattcctccatcgagtgcatgcactatttcgttccctcttgcatttgctctcccatctctgccagttttatctcatcgctgccattcacacctcccgaaaaagatttgtggcaagaaaaatgactttgaagatggcattagaaagagtgctttttgtgatggaccaaatgccaaatttactctaaaactgtgattttttaattacaaactataaaaaaagaagcagaaaattttttttttattttttgaattttttttcgattttttaaagttttcgcttttaaaaacagagattcacaatgaatgcccaatagagagtcacagaaaacactaatggcattggcaggctaattgtaagctctagaatccttttcccgggagtaaatcccaaacagctaaaaaagcaatcgcaattttttttttgaatttttctcgaggctctcgggttctttcgagtaatgattttcacccagcagtgccaattcgttcattatcccccactcacttcggcacaactacctcccagcctcttttggacttggtttctactgtttcaaacacacatccctccccccccccccccgggggaaggggggagggcaaatcg

SEQ ID NO: 6599 - DNA, 1472 bp, Heterodera glycines
ctcggattcgggctcattcgcattctccctctcattctccctcctctccattccccccttttctcttccactcctcgcacactctctctccttctccctcccctcctacttttgtcttcccctgctatttctctccctttttctcttccgctcctctttcactctctacccttccctcctctttttgtcatttcctactttttctcttccgctcctctcacacactctctctccctttctgtcctcccctacctctttttgtcttccctattctctctctcttctcctctcactctctctctctctctttctttttctcttccctcaccaatcagactttctttccttatcctttccaccctctctttttctcttcatcagctcctctcacacacactccctttctccctccctccctccctcaccccgcccattctctactgtcccaatgtctttcacagtttttccacgatttttacaccaacacaccaacccacaccacagggttaattatgtaattaaccccagttaattacacatataattaactccttttatcgtgcattcctccgccgttctttcgtcctttccctttccctttttttctctctttttcactgtctcttccgctgtccctttcccttccccaatcattcaattgcctgccattcttctcacattcattcattgttttttgactgatgaaggtcatcttttcgtcacacagtagaagtgggaaagtaaagaaaaatgaaaaattcaaatggaaaaaaaatatatttaaaaagagggaaaatgggggggggccaattaaaacgataaaagactaattaggactaattaggccacagcaaaatgaatgcatggcaaacaaatacaatattatacacatatgaagggtatattacattcacaaaaaaaatgcaattgagattaaagtgatcatcggcttcgagtcaactttccatcaattgctaattttatgaatttttggaaaaattgaaattttttgtaaaattgggtcagggaggccttggagggggtaccaataaggaaaatcgaaacttttctgcatacaacactatttttccattaaagaattgttttcatttgtttctcacttgcaaaaatgaaaatttggcaaaatttcagaaaatttgccacccctcctttgtcggcacatgccattggctgctgcacggcaccgaaacggtgccaaagacggcggagcagcgcacctttacactccgttgtaggcacgtcgtgttggcatgcggacgacaacagcccaaactgttaggggtacgtttttcaaaaaatcgcttcccgctgtctcagtggtctgtgctcttggcacggcgcattttccgggtcgccggttcgaatcccgtccgggtgaaaacaatttttcctgtattttttggatcagaattttttaaattttttttggcaccatttgtgcaggtgcccgg

SEQ ID NO: 6600 - DNA, 679 bp, Heterodera glycines
cagtctcagctcgtggaagcagcgattggaggagacagagggcggcgattcgggcgcgacagagacggcaacgacaatgggcaccgcggaccgaagcgacggcgaccacaatggcccgagcgactattgccgccactgcggagacggaagaagtgtccggcgactgtcccgtggtggtggtcggcgacggcatttccgccgcggacgcggtgctgcactgtctgagcattgaacagcccgtgctgcacattgtccgtcgtacagagcgcgagctgagaagtgagtgtttcgatgaataaccgtggagataaataataatgattcatgggttgatctttgatcgtttccaagagaattttgagtttcgagaaagatctcgaggtttcctgggggaaggtcagtctcgaaagtacaagtctccagtctatatcgggataatgcttccgctctctctctctctctctatctctctctctctatctctctctcatgctctctctctcatgctctctctcctttccccctctggggagagggtcgtttcggcgccgccgtttcggcgcgatcccaagtttttggactacaaatttttttgtaaaagcctgctccgtccgtcttgttcttcttcggcccccctaaaaagggtggatcaaattcaaataatcattatccaaacaaa

SEQ ID NO: 6601 - DNA, 1243 bp, Heterodera glycines
atccgaaagcgaaatttgctttttgtttattttaataatttattcagggtttcgagaaaatttactaaaatgatttttcggaaattttcctgactttagggtcaaaaacgccattggggccattgttgcacataaaatatggccataatgccaaaatatgggataaatatggaaatatggacataaatcgcgaaatatgaaaaatataaaaaaaacgggtatagaaatccatcctagaggcttcataccaagctaaaaacatatctttcgtgagtttcaggcctaccacagtccaggaaaaaaatatagatttccataaattgggaaccctattgatcagtgtcagcttctccctaaaatgggcaaaattaattatattaatttgatcgaattttccatatttatttaatctaaaatgcaaaaatgtatcattttaaaacagatcgctgcttcttctttatctccgcgaaccatcgctgaatttgcattttttaaaattattttttcccatcgtttgtccgccatttctcccgtcccatttccctcttttttgctcctccattaattttttgttggccttcgtaactttgcaatatttcttttaaatgattttatgtcccaacttttaatgtcctccgtccgcttacgtttatcagtttaaatccaacaattcaagcaaatcatttgttgaatgaaatgactgaattacattttttggaaatttgcaatttgctgccatcgaaggggacgtgctgattcataattattttttaattgactgaccaataaaaaaggttcccaaaatttaactctgtatgacaagccggctaacatttcattatcacatatttcgaagtcaaaaaattttacaacttttttaatgctttaaattatagtgaaaataatggggtacggtaacccttcgctgttccttttactttggctcccggtaaattggacaccagaaaattggacaccgaaaattggacactgttgtaaataaaaattaaaataaacaaaatatattaataaacaaaaattttggcttggcctaaaagatctttatcttaatctgcacatatgttgtttataagcgtaaataatatggaaatgaatttgatattatttttgtaacatcagcacgagaagaaaaacatcatatcattcctaaagaaaaagttttattacccatttttcgtgcattatttggcacattgatcaatcaccccccatttttggtgca

SEQ ID NO: 6602 - DNA, 1401 bp, Heterodera glycines
aatttaagaacgaaactgcacttgaaaacatccgtgatgaactgagcgacctcggcttggaccacatttcgtacgcatttgttaagggcgtcgagtgagtgaaaaagggaaaacgtgaaatattttaaattaattttattttaatttctctattaaaaattgactaaaattgggttttcaacacgttcagagtggacatggtctgcaacaaatgtgccaccaaattggagaaactcgacgacctttgttattgtgtggatgccaaagagagatgccaccaccgcaaatggtaggagaaaaagcacattttgattggggaatttatgtgcattaatggagtttctcaattgatcaattttaaatggattttaaatgggtttgaaatgtgttcgatcgcctctaaagccgaattgtaattaaaaatattgtgaaaatttgaaaaattattaagggtaatcaatttaattaataataatattttatatatttttgcttttcagctgttctgtccgcaacaatctcgctttgaattttcactgattttgttgatgcaaaaaagaaaatgaattatttttcattttatttattgagttctaattaattggaagaaatttattgcgtaaatttatgaaaaattcttttcggattttcccaatttacgaattttaatacttttcatattgagaatttaatttaaatgttttttccattttctcactttgttcaaattgaaaacaaaaaattatcatgccctttgatagctgctggtggacgccttcaaataaaagcaacattttcagtggaaacagtgaaaatgtattaatcccttaaaaatttaaatattttaatttaaaagcattattaattaattttcattttcattttaatttagttgcgtcctcatgagtggctttgcgtgcgtcaaaatgccacacccgaggagatcaacaaaaattacaagaagctttcgcttgccacacacccggaccaaaacaatcaatgcagcgacaaattgtttatggtaggactaatcgctgggattactgtacaacgaaattttaaaaaataatcaataagaaattcctttttattatcttaagctgatcaagaatgccaaagatgtgctccttggtcaccccggaaacagctgcatggcgatggtcagttattttttactaattcatttttatgtgtccccaatattccatttcaataagtggtggtatttaacgagaatttttaaaaatttattttatttttttccctcttcaattctttcaaaaattaagtaaaccttgccaaaattttcggtagtgtcaattggcaggttttccaaactaaaaaatgggtgctgtgtcaagggacaaaaagagtgcaaaaatttgcgtaaatttctgacga

SEQ ID NO: 6603 - DNA, 1418 bp, Heterodera glycines
aagggctatcgtagataccaagattgtgcaatttggttgcgtctgagaaaagttatgagttgatttagtcaaaaatttagcaaattttgcactttttgtccatcggccaaccacgaaaaaatgtactactgttttggtgttactgtacagcaggactatgaccagcaaatggaaatggtgctcgtgcctttcaccacggtgctcaacaagcccaagtatcaagcgattgttgcccagctgaacacaatgccaaaaagtgctgctgattgtgcgacttttggatacggtaggacaaaaactaaaatcaaaattttgtgaaaaaatactttaaatttacagatgttttcttggtggaccctttgatcgaatatgctaagcatttcgcattggaaggaatgtttaaggcctacaaaaaagtacagtttaatttttgtcaattttctaagagaaatgaggcaaaatattagagaccggacaagagggtcggtcggtcggtttcggtataaaaaccgaaaaaaaccgaaaccgaaaaactcaaaaatttctcggtcggttttttcggttaaaaaccgaaaccgaaaaataccgaaaaaaccgaaaaaaaaaccgaccggtccgatctctacaaaatatggtctcggctttcccacgcctcccttcacattttctcattaactaattcttccacttatttattaaaattatgataaaaaactcaaattggcatttttgggtaatactgaagaatggcggtttcccttttttgggataaaaaattcatatatgggggtttaacgaggtgctcaacaataaaatcacatcaatcaatttggaccaattcctcctaatcccgaacacgagctcgaacaaaattccctcgaaaattgaatttttgacacctttatttgattgagttcgggttagggattaggaattggtcaaaatttatgtcagattcatgatcagggaccaccaaaaccccttggacacgacttttaaattagcgcaaaatcatggattaaatgatgtcatacgatacattttacccccatctaccaatttttcggtgccaggtcgtttcgtaaaaactgccaaattatagattttcgcgaaaaatccacataacttttcttaaatacatcctaaaaaaataatcttggtatcataagatagctacttcattatcatgaaaatttcagaatatttcattaagtttacagagttatgtctatttttttaacatttttggtcagaactttctggaaacccaatgaaattttctgaaactttttaggctaatagagcaagccaagagctatcgcaggataccaagattattttttaggatgtatttaagaaaagttatgacagatttttctcgaaaaatctgctaaatttggcagatttacgaaacgacc

SEQ ID NO: 6604 - DNA, 2730 bp, Heterodera glycines
  unsure (1)..(2730): unsure at all n locations
tagttaaatgcaataattattaacaanaatccaatgttagtaaaattattcggaaagcattttggaccaaattacggacccggaaatgagatgttcaaatatcttaaagacgcattggctgattgcatcgcatattaaactcgaggagaaaaaagtacggcaccgaaagtgagcgaagcaaaaacatatgaaacccagcaaaagtgccaaattctgtcgcttaatgaacatttgtaatttaatgcacaaactcatttatgctacatttatttattcaaaatatgagggatgctaaaacaaaaataatcacggaagagtatcacagaactcagaattccatgcaaaagtccagcgcaatttggcgtccaatgtcattgaccggcgaaaccgtggtggtcgtaggggctgtcggtggcgcgggtgttgcggtgccatttgcctaaaccattgaaaatggcacgctgagaatggtgagtcgagaaattggacgccaacaaattgggaaaatggaaattggcatcaaagacaatcggaaggcacaaatggaggaaaataaaatgaaatgatcaattcatatgatttagcgaagccagctggaaaggaatctgaaaagcttcacaaccctcgggtttttctcgacagctttcaactctcgtaaaactattttcttgggacaattttcgattcctataggtaggtactcacaatcagcttttttcacatttccgaactttgtcatattaacagtctaattatctttttttacaatttttttacctacggtaactcacctcttttaaaagagcaagagatacgcgatactttaattcgtatcattttggctctcatttagccgttttgccattttgatttgttccgtttcaattttttggcttctggccttttgcccatcaccctcccctcccactttttccgttttattttacgttttgtgcgccttgcggcttctgctgttgtatctgttggctttgttgggccaacatttgacgtgcaaattcgtccagctgtgccttttccttctccgtcaattcgcgcgcaaattttcccgaaatgtaaactttgtgattttggacggtacaaccggccaaaatgtacagtgtcgtctgaaattgggggagagggggcggagggatgagtcaatttacttttttagataaggatggtttatcagcccaagaaatgaacaaaaaaaattaaaatttttagagcaattggatattttaaagtcgggcatcattcaaatttcacaaattttttagggtttcatggttatgaacctgaatttctctaatacttttggtttgttcaaatgctttcgataaaaatgactcatagccaaactaatccggatttattcattttgtttttcttggctcttgaacggattccctagttaatagcatttcgatatttcgtgattcctcattttaaaaattgattcatttataaacaaaaatccttgaacttaaagtcccaagaatcgggacctgatttgatgtacagaaagtcggaagttgcggacgaggcggaattgttggcaaagtggtggagtttcgttgcacagcttgctccaaactggcatatgcatcatcaaccttctgaataattttttaaattaatttgggcacaacggagattggccaaaattggaaaatgccattttgtgttcttttgtaacatatttagaatattttcggagttgttaattgctgtaaatttgctcattaattctccacctgcttccattcaaccaattcacgtttgtacttctccatctccgccaactctttggcactcagttcacggataaaattctgccaaaatttaaatgaataaaatgtttccataagcgcataaaacatggtcgtttggggggggtattgttttcgtagggttattttggcgagatttaaacgtagggatttaaactgacaaaggcaatcgtaacgcctgacaaattaggcactaattcgagaggggcgaagagcaacaaatttattttttccgtttggtttaaaatccgatgaatcatcaaaaaaaggaatgaatgattcggctgctgggcttaccccatgtgagtacagcttgttgccggtggccacgcagcccgagccggtcatcatcggcgggctgtagtactgggcattgccagcgctgggcaaaaggagcagcgacgggagcaagaaaaagaggccaacgcggatgccaatttttggtgccattctcccttatttttggtaatgcccacagaaatttacaagtctactgaagatgaagcagaattgagaattggattaaggaatggccaaactctcgagagattaatgggtattggtggtccttttattttgatttgtctgactaatccccccgcccatttaattgtgctagcacttaacagttaatttgtaccaacaaaacaacaatgcgtctttaaaagattatttagcagtcaaaaatttgcgggcctcagaaattgggcggttgtagaaacaaagaatttgaattaaaagtgaatgcttggatgaatgcatttaaggatggccgaccaattgaaagcgtcacaaaatgagtggccggtcgactgaagtggggctataagcagcagaagaagcagcagaatgaggaggaggaggagcagagattagcaaatgaccacccattattcaccgatctccgagaaaagcaaacattggcagcccaacagag

SEQ ID NO: 6605 - DNA, 2482 bp, Heterodera glycines
cggcggtaggaaaatggcggtatgaaacggccagtatgaaaatgggtcgatcccaaaatagtgattactagtgatgaatagtggcgttaaaacgaagaatttccgagctaaaaatgttttcgtgcatttcagtggaaacaaagccgcagaaaaaataattaaaaaactaaaaatccgttccctactaatcacactgtaaggccgcgaatggaaagactgattcttgagaccgttttgttttcatgactttcgaacaaaacttttctcccaaaaaagtggggagcataggcagtatttttcgacttcagggtttgaaattggtgcaaatgaatgtcaattcgtgatcagcagctatcctgaaaacccttgagggtaatactatcgatggtgccccccccccaatttttggaagaattttttttttttgttctgaaatgtcgtggaaacatatttacggggggttttcagggtcgatcgatgatcgcgaatctgacatccattttgccctatttcaaagaaaattcaaaattttgaaaattcacttttagttcaccctctaaatccactccctagttcactaagttattgctcacgaactgtacataaatgttgaagaattttttaagtcattgaattcacagcctttcttccatctctcttttattatttcgcgaatttttgtgtgaaatggactctacaaaaccgatcgtgtttttgaaggtcagcctaaaaggaaagccggcaacagttgtagggcgagtcggtgagttgtaagctcttctgtatgaatgattaaaaatggcttatcaaaaattctgggtgattgtttgtattttttcagatacgaagacgtccgttttgtcaaaagcttttgcctctaaaattggtgacattgattcgaacctgcgtggccatgtgacgctcccaactgccgatgtgcccgttgtaggatggtaggaaatgttcgtacttgtcaaaaaaaaatttaatttgttagggtggatgacgtgtcagtcgctttgctcaatgccgaaccatatgtctttgcacaacgttttggcgtcgtggcggatcatcacatgatcgcgtaagtttttgaattaagttaattttctgtgcgacatactgtaaatttaagcttttgcgaacgcaaggtcgatggcgtctttggagccgacttactcaaacgcatgggcattttgaacgaggaacagattgacgccattccgctcgcttctggagatgttcctgaggaataaatgatcgtttttgaccgccaaaaaagttgtgaagttttcagttagggtggtcaaaaatcgaaatttcttttggtggttttgcctgtgtacacgttgcatgacacgtgtacacatcataagttacatattgtacatgcataaaacatgtacaatatgtaacttatgatatgtacatgtgtcatgcaaagtgtacatgggtaggttgctaaaaacattttttaaatttattcttgaccactttaactgaaaagtgccatttgttttcgttatacaatttctccgcagttatattcaggccaattttatgccctttatttatgtgtacacccaaattataagtgataaatcctttgcagggctttttgttttccgatttttcttttgttgatagctcacgtgtaaatttgcacaaaaagtttattttaaaaatgacatgtcaaaaaattttgttgcccggcctctttattagctcttctgcattttgtcggacgtaccgacgctgagcacgacgaatcagcaatacccgtacaaagaacagactccgaagggtattttcgagaagatgggcttgcagaaaacgccggacggcgcttcgctcggcgaatttgcagtgatgcgtatggacgacatgatgaacttgatcgggcgcggctctctttggttagcaaacatttttttaattcgatgcattaaacgtatgttttgtagccattgataaccaaattcagatgcatttcgccgctcctcgttatgacatgacgcggtttggcgatgtgtttcgtgcaactccttgtcaggtttgtgaatttaatacacaaatgattatgtttttgaaaccgggtgaacgcagagccgagattttttatggcaattcgtaaataccagagattggaggccctaccaaaaaaaaatttgtcccttttccatgacaggtcaaagagccaccgattgacgtcgcgccgaccacgccgtactcggagcaccgcgaaccgatggccatttgcatgtcgccccagacacaaatgccgcccgcccaccagcaacagcagccgatggttggccaagtgccgtccccggcacagttttattgtgagaaagaaccgctgatgatggtcatgatagaggagggggagatgttcaattaaaattgtaatttgtgtgtcgtcggcacagaccacccattttttggtccgttaaattctttgttcttttttcatgatttt

SEQ ID NO: 6606 - DNA, 2597 bp, Heterodera glycines
gagtcaaaatggtcaccatggacggtaaaaaagaaaaaaaagcgacaataaatctttttatggataattatgggaaaaaattggcgttctgtcacatttactttttatctttatttctctcacttttacgtactatctcttcattttaattatgtaaaaaacaacatttacttctctccatataacttttttcctatgcatacaatttgcaccaaattttgcaaacctatagagaaaagaattctgcatctttctatagtgaatttaattttgtctatggtcaaactcaaaagttaagaagttcctaataaaatgtatttcttttcctctccttttggcgtactattttcatgtctctaacacattaaaaatcatgaaattcgcaaattctaataattttggttataagggtacaaaatcactttgaacatttagaatcaatagaaaaaagaataaatttagcattttggttagaaagagctggctaggacttgagttataacatgataaaagtttgaaattccgacaacttttttctgagatgtcaaattgcttagcattcacttagaaaaagattctccttttcaaaatctttttttagataccaaatttgttcatttttgttgggaatgaagcgtattatggctgatcaaaataaaaaatacaaaaaaggcatttaccagtgtaagtgcatatactttgtttttgcgtgtgttggcgttttgttttacgccaattattttttggcaatttttttcgttttttaccgtccatggaataaaccggtcgataattccaatataaatttttggaaatttgtaaacattttcacttccgacatccaacattttcgggctcggaaatagtgttcataactaaactaatttaataatctgcatatttaagaagcaattataattttaaaaatgtctacaaattcacagaaatacggtaagggttgaagtgatggttttgaattttgagtgagtaaaacaattgtttctttagtgtttttaattggtaattttgtggacaagggatggcgtagccaccgatccttggcttcgggcggggagctaaaacccctccacctactccaacgataacgaccttataattttgcatttttcccaaccaaagtatttgaaaactagagagttttatcgaatcttacccaacatatttaggataattaagttgtcttagagtcaattatctattttttacaccatctttaagtttccgtcgaacaatttcaaaatggtcagaaggcacttttggaacgaatcggtgaattggagaaacaattgaaagaacggccgcacaaacaggaagaggaaacggagccaatggcaaagaagggtaaggttttcagagagcgcggtgcgccacgtaatccgcgggtgggattgggactttgagggacttccaaaattgcgggaataatcccgcgggaatcagtcccgcaaaaattaagagttctaatctcgcaatggaattcgaaaagttacaatttctgggtttagtgattaataaacaaaaaaaacattaattggttcggctcgcgccgtaaaacggtttttttgttaatcaatctttggctttttgtgaattctttgattgtttaagcattggtcgacgaacaattcgcgcagttgcaaaatggtcagaaggcaattttggaacggatcggtgaattggagaaacaattgaaagatcggccgcacaaacaggaagaggaaacggagccaatggcaaagaagggtaaggttttcagagagcgcggtgcgccacgtaatctgcgggtgggattgggactttgagggacttccaaaattgcgggaataatcccgcgggaatcagtcccgcaaaaattaagagttctaatctcgcaatggaattcgaaaagttacaatttctgggtttagtgattaataaacaaaaaaaacattaattggttcggctcgcgccgtaaaacggtttttttgttaatcaatctttggctttttgtgaattctttgattgtttaagcattggtcgacgaacaattcgcgcagttgcaaaatggtcagaaggcaattttggaacggatcggtgaattagagaaaaggggacagccggacaattacggtaggtttacgcattttgaattttgaagaaacaaagtttacgcaatttcaattttcgaataagcttttccaataacatttaacgaggtcagaagttgttccgatttaaatgtgtacatttatttaaatttgtgccgtccattctggattctttgatcaccacaggcaacgcaaaagaaaattttacattttttcaattttttagtttctgtcgatcaattcaaacgccgaatagaagcaatcgaaaccttcttttatgcatcgatttgttggggttgttgtttgaatttaaaaaataaaaatacttaaattttttgttgttcattatcaggcgaaattccaccaaaggaggacgagaagggaaaatacggtaaggaaaaaagagatataatcgaaaataaatcctaatctctaaaaaacttttaaagtatcggctgagcaattcacacaattgcaaaatgatcaaaa

SEQ ID NO: 6607 - DNA, 1972 bp, Heterodera glycines
atttttaaaacgaaacagtgcacaaaaagagagggagggttagacgaaaagaggaatttttaggaagggacgcaccccatctgataattctccttttctgttccataagaggccagaggcgactgtgttcgttgacaagtaattgtccaattaaggtacttggactttccacagtaaaatgtggtacaaattttggaactgtccctcctcacggtgggacttaaaaacatggttaagccaagttcgaaacttcagaggagaattttaagttttgaatttttacaatttaatttcttagagtcaaaaaatttcggaaccaattttttaaacgaaacagtgcacaaaaagagagggagggtagaagacgagagtaattttttgtaaggatcgcaccccatcgaatatttccttatttctttttcataactgtccaaaggtgactgctgccattgactcttttgtagtccttaaggtacttggactttccacagtaaaatgtggtacaaattttggaactgtccctcctcacggtgggacttaaaaacatggttaagccaagttcgaaacttcagaggagaattttaagttttgaatttttacaatttaatttcttagagtcaaaaaatttcggaaccaattttttaaacgaaacagtgcacaaaaagagagggagggtagaagacgagagtaattttttgtaaggatcgcaccccatcgaatatttccttatttctttttcataactgtccaaaggtgactgctgccattgactcttttgtagtccttaaggtacttggactttccacagtaaaatgtggtacaaattttggaactgtccctcctcacggtgggacttaaaagcagggtaaagccaagttcaaaacttcagaggagaatttaagttttgaatttttacaatttaatttcttagagtcaaaaaatttcggaacagaagtattatttaaaatcaaaaataattttagtaaattttttacattttagtttcaaaaaaacaaacaaaaaaatgttcccaattttgaaaatgaaatagtgcacaaaaagggagggatggttagacgaaaagagaaatttttaggaagggacgcaccccatctgatattcacccttttctgttccataagaggccagaggcgactgtgttcgttgacaagtaattgtccaattaaggtacttgtactttccacagtaaaatgtggtacaaattttggaactgtcccgcctcacggtgggacttaaaagcaggatagagccaagttcaaaacttcagaggagaatttaagttttgaatttttacaatttaatttcttagagtcaaaaaatttcggaaccaattttttaaacgaaacagtgcacaaaaagagagggagggtagaagacgagagtaatttttaggaagggacgcaccccatctgataattccccttttctgttccataagaggccagaggcgactgtgttcgttgacaagtaattgtccaattaaggtacttggactttccacagtaaaatgtggtacaaattttggaactgtccctcctcacggtgggacttaaaaacatggttaagccaagttcgaaacttcagaggagaattttaagttttgaatttttacaatttaatttcttagagtcaaaaaatttcggaaccaattttttaaacgaaacagtgcacaaaaagagagggagggtagaagacgagagtaattttttgtaaggatcgcaccccatcgaatatttccttatttctttttcataactgtccaaaggtgactgctgccattgactcttttgtagtccttaaggtacttggactttccacagtaaaatgtggtacaaattttggaactgtccctcctcacggtgggacttaaaagcagggtaaagccaagttcaaaacttcagaggagaatttaagttttgaatttttacaatttaatttctttagagtcaaa

SEQ ID NO: 6608 - DNA, 2542 bp, Heterodera glycines
tccctttttgtgggacgataagagtaaatattttcaaaataaattaatttgtaaaataaataatggctcaagaaagggactaagtgaattaacggagagagtgaaagagagaattatttgttaattaggcaattagagagagaaagcgaatgcaatttgttgaaagttggtatagtcttggtttgtgtttttgcgttgtttggtatactttgaaattgttaagactgacgtcgtaccggttttccctttggtgttttgcctatacatataaaatttatggggcgaaaaatcccaaaataagggcctaaacaagggaaaaattgcgaaaattgggccgaaaaatggcaaaaaagaggtgaacaattttgaaaactatgcttttttctatgaaaatatgtatattaaaatatgtgcaaagaattttattcattttttatgaaatttacttggtttattttagcattttaatgcatttttataaatttttaatttaatagaaactattggtattgcggtttctccgagtcctatagtttttgcagagtatgtcaggaggaccaggaattttatgaaaaccaggaacagaaaagtcgggagcttgaccaagaaaaaaatatactcaaaatttatgtaaactaataaataaaatcagtttttcacaattgaccaaatatttcatgaaattctgaatcaggggagaccaaagttgcattatgtatgatcattgatcaaagatgcagttccgccccaaaaaactttgaaattcggaagctgtaagttttttcaaccaaaaattttgttggtaatttgggaccgatatttcctttaattttaaagttttcctaaaacctttaattttggtggtacctacgaatatattttactgcccaatattttcccaaaattttttggtggatagagagggccggcgctgctggagaaaacttgaaaaattcggctttattagttaatagattttgcgctcaaatatgttcatttttgggtttttggcagaaaaattttataacaaaattataataaaacaacgttttcttagtaatttcattaaaaataagaagttccattgatcacttccgaaaacctgtttgaactttaaacagaaaaaatatttttcacctttcaatccaaatctccattaacatcattcatcatcacttcactttttttgattcactcaacgcaaaaacattaaaactccccgagaaattggccgaaattttcaccccctcaaaaattggataaacattaagagggaattctcgttcccgccaaaattacgaaaattaatttggcaattattgccgtgggaaagaaaaccgataaatatttttgtgtatataaatagagttgttatcatgagaaaagtaataaaagatacaaaattttgtatacttagtcaagcgattaatggaaaatgcaatttttatttatttttaataaaaaaatttgatgattttttttttgttttttcatatatagaattaaaataaaaatatattttactcgtttataaaatggcaaataaattgcaattttctttgtttgttgttttggtcctttgctacggttccacggcttttccgcgtctcaaccaacaacaacagcataagcaaaagcaaaagcatggaggtgaaatgttcatattttaaatttaaaattaaatccacttaaaaataaagctcattaagttaattgtcgttagggatggttccggaatttctgggataaaaccctaaatttagacattgccttaggagttccctaaactcggtggtataaacaaacaaacagaatattagtcttaaagatactgtatttgcagtaaaaaataacaaaaactgttttgtcaacttaattttatttagaaaatgatgggaaacagcagcaaatggcgcgtcgtgtgccatttcctcacccgggtcaagcgccggaatattttcaggaagccagcgacaaagcccaaatggaatacaagcaaatttttgaggatgaaaaaggccaaatgccaaaaggggagctgaaggaaaaactgaagaaatgggctgaaaacaatggcataaaggtgaaaaatatgtaaaaattaacataattcaaaaacggataaaaattaaaaaaaattttaaattactttttaaaaactttaaggatgaatacgaaatgtcccaggaagaaaatgaacaaaagaaggagtcattccataaaataatgtcagcaaatcttggcggagacgcactgaaagtatttaagaagatttgggtatgttattgtcaaataatggcacatcgcagattttgtcttcctccctcattattattggtttttcatattttatttaattttttttttcacgacatatcattaatatttcaggaaatcacgcacacagatgaactgtcacgtcaatgatgaatgccaacaattgcaggcattccaacatagagttaaataatactgacaagaagattataaaatttaaagggtggagggccacaaatttatttcactttttcattgagataat

SEQ ID NO: 6609 - DNA, 4142 bp, Heterodera glycines
  unsure (1)..(4142): unsure at all n locations
tttaattagttttttataggggctggattttagttcctcctggattgtcattaagattactcaaaaaaaccctaaataccaaaatttttatcaaatatagacaaaaaattaaaaatattttataattatttatttatgaaagccgaaaatttttgtgtttatatttacgttaaaataaaacatttacgatttgaaaaaatggtgttttcgtgtatttcttctcaaaataaaggtgcaataaatagccttaattattagcacatttaaatgcaaaaaactttgccactaaatcatcaaaagtacggcagaagcaactaaagctaaaggcattttcggcacatttaaagcggcgttgccatcggcatcaaattccgtggaaaggtccaccggtgaaggcggtgaactgcttggagatattggcgttgatctgcttggggatgttgaagtgggtgactctttgtacaaagcatcgcattgttccttccccccgttgcagcaactctcgtcacaggcaaagggttccgagaatttgcactgtttgtacattttggtcaagtcgttttcttcgtctctgctgcatcctttgattgtgtacaatggcactcggtttttgaacatttcgtcgttatcgattctggcatagaacgactcattgaagcagttcatggtgaagcaccactctccctcctcacacactcgcgcagtcagtccaatggcacttcatttgcacaggcgatcgctggaagaaaacgcatggtcaataaatacaatttgagtgagggtgataccaaatgttatttaattaggaggtaattgcacagaaccgttaactcgagtcaacaataaaagagtaacgggataaaccgaaatacacatttggccttaattttgttagtggtcaattaaatgtaattaatgtaaggtattttcgaagattaaattctgtttgcctaatatgcggcttgaaaagtttgttcattgtcaaattgcctccgtctcagtttttccaatttatttttacttggtctgattccatatgattgcatggaatatccctttggccacggcattttccgcatttcgacggttttcctccgtcttcaatgcactgcttggtcagctcgtcacagtccatgtcgctgttcatctcctgctggcatcctctgaccaaacttagcgtcagcccatcgttgcttgttccaaccgtaatgattaatttttccaattttaatttgtgtcttttctcaccgatggaacatttaaactcaatgcgagtagggttgagctcaattaggaaataaaacaattttaattgaaaaattcattaaaactcactggcgacacaaaatgcaattccgccaaacaacaaatggaaaaggaaaagaaattccatagcaataataaattatctgaaaaaaataagtcgggacaggaactctggtccagatttttaaaatgaatgaaataatttagattcaaaaggacaaatcgttcactatcatttctgattgaatattcattaatattttctgggaaaaaaagaattgatgatcataaaatttatttgttattaattttttcattaattaaaaaaaattaaccgtttaattaaaaaagaattttatatgaaccgaccataaaatttctcttcgagctgttgtgctggttaaaatattataaattaagttgtctttggtcggcatttgcgacgtggataagcataaatatttttcttttttttggccaattcatttttatgtcgacttttttatgactaatcctttttagtagctaatacgtcttttggctttaattgtgaaaccgagattaaagtgataaaattttaactatttttgatctgtttcaactcaaatttttatatatagattttactatttaatatttagtatacaaaatagaatttttgaattttctcaaacgcatttttaacgaaatttctattgattccggggagctttcaaggtcgctagtcgcaaatatcacattcgttttaaccaattaaagaggaaggacaatttttttttatctttgagtttccaaattctcattaaacatccaataatagcaaaatgttttctgctaattgagagatgaattttcaggaaaaataaaataattgtgcattgaatgagttcgataatttaaatatccaacaaattttatttagcgaaaactttttcaaaataatgttaattttctcgagttaagagaaggatttaaactcgttgtcacacatacagtcatggtcatcatatctttagcaccacttaaaacttatatcaaatttgttttaaattgattataaaataccaatttgatatacatgtgtatatatgttttacatttcttgtagcattttttgtgttgcaaattgctcgtttatgcctacttaattattctaatacatttttgttgctcgaacctcatttctgcttattaaatgatgaatatcgggaaaaataaaataattttgatgttattaaattttacttagtgaaaactttttcaaatttatgttaattttctcaattaacgaaggagtgaaactgtttgtctggttcaattttattaaactaaaattttcgaacaaaaagcttcccagagaggtcaactgtgtattttaactaagcatcaataatttatagaaattcattgtgtaaaaattaagtattttgtgcaaaaatgacaaagttttttgagccaatttttaagaaaaatttaggagttttcgggcccagaggtgtcagtggacaattgcctgcggaatttgccccgatttttaacatattttaaccaaaatttgccattttaacgatttggttcaacttttagtgaaattttggggccgaggtgccgatttgcgccgtcgggcaaaatttctgaatttttaataatttttttacatctaaattttcctcattcacccccaccccttcgcatttttaaaacagacatagttcataattcttcttacataaatatgaatttttttttcaaaaaaatagtttgctctcgaatcggagtgaacttttcattggaataattgtaaaaaatttttttcaaaattaaatattattaaatacccattttatccggtgcctgatctcggttaaaaaaagttgtgtccaaaattcggcttttctttacccgggcaaattcgagttcgactttgcccaaagcccttacgcgtgttgttatccattcattcatttattacatccatccgccaattcttttggcgttttctccgccgaccaaaaacaaaacaatgatcacaaattacataagcttactgcattatttacataaacaaacatatgatcaaatagcagagaagcggtctctttcgacaacaatttctccccttgctgaagtgccttttccataaatatttttgcatcgttttgccatcggcgattccattctcttccaaagtccgcccacagcccttaggccttagtgctttaaaaagcctaaacatatggccctcttttcatacattggcacattttaaatttcatcccgatttgtgctgggtccgtcccgtgcatccgtcttttttttaacggggcggaagggcttgccagcgggtgccggttcgttctgacccggggtactaattatcctgtcgcgataatttgttccccagtccgtgcgagagtcggtctttacaaagcagaaacgaaacagaattgcggttcccgaaaattttgggctttctcggaattcctttccttggtgtacttaaacaaatacccagttggtgcttttccattcaattatttctgacgcgcaaaaaatgggcaacggtttttcgtcatcttcggacaacggcttttcatcatcatcgggatcatcttcgggccatggttggtacgagatgatgcgcgactttggtgacaacgacttgccgatggacgactattttcaggagcgttactgggactatctcgagcgtcgtcgccatgactaattacgcggtgcgcaagaatttcttgattataaaatactaaggcatgtggtcaaagatttagtgtatttatggntggcttagttacctgcttattaattacttttgaccacccttttttggcaattatcgcactccaatgggctaatga

SEQ ID NO: 6610 - DNA, 3484 bp, Heterodera glycines
ttgttgcgcgccgcctcagagttgttgcgcgctgcctgggcgtacatatgtcccgtctcaattagcatggacttaaaaatgtgaatgtaataataaatcaagtaaaagtaataaattataattttattccttaaatcgtgaaatattttttatttaagtctgatatgttagatcaacctgttcgtatctggccaacctatccgaacaaaaaaaaccaggctcatccgggaactcaatttttttgacacaagtcatgttttaggatttcaagaaaatgtttatgcaaaaatttccaattttattatttattaatttggcgttgtattttttttcaaattgcacgaaaaactagtataaaatgggaaaaacattcatttcgttttcgcaacgactcgtttttttattccaattgtttttttggaaagaaatgtaaaaaaaactaggtatacccgatgaaattttatagatgtttttaccttatcaataaatttttaaaattttatggattattgttcaaaattaaaatgcactaacccgttcctggcttatcgtcggcatggtctaagaaggaacacaacatttataagaacagggcaaattttgttgtataaatatgtttgatacataaaacgacaaaaggaaaattgtaaaattcaattggaataaaacaaatttattatcaactagtataaaaacataggtaatttaggcaaaaattttcaattattttgaaaagggtagaacttaagacatggcacttttgttgaccgaaatttcgtcaggcacttcgcccacctgcagttcttttccgtccgaatcgctgatgcccggccacagagtgtcaaagcgctcgatcagccgaaccggcattttgttgggctccgcacgaccgttgaccaccagcatcacctgttgaaacaagaaaaaggattcaaatgagaaaacgccatgtttaattgttgtaatttattggagtctgtccaattttaaaataaaaatttgggagcagatcgttacctccaccccctccgaaaaaaatttttttttcaacctagaaattttcattaaaaaatctcctaaaaatttcaagaaaaatttttatgaaaaattttcagcgtttttttgaaaaaaacatagtggttcatcataaaatctcgaaaaaaccgctgaaaaaattttcaaaaaaattttttaactaagaaatttttttctgaaaaatttctaggtttgaaaaaaaaattttcgggggggaatgaagtgcaccaaaaaattcggatccggtatttgacatcggtaaaataaatgttatcacgatcagtgaatgggcgtaaccagagagaggctaaccgatgagggcttatagtcttattggctaggcctttaaatcattgaaatacacaaaatgaaaaaacggttttaaaaatttgttgaaaattaaccccttcgaagcacatgttcaattgcggattggtggcaaacgcaattggaccgactgctgacatcaacgcatgcaaaaccagtgacgaaccgaaattctaaacaccaaagttaattgaaagttgaaaaaacgagttttaacccatttgttggaaccggcaaaaacatgacgacaatttgcgacgagaccgagacggtcaatcacctaaaaataaagaaaaattcaatgccaccgcctaacccatccttcacctccttggcacgactgtgcttcgtctgttggctgtgtgtgtcgtcgtcgtccatctgaaggcactcgagtgccatggcacggttgtccgccgtgggcagagtgcccagaaacaaatcgtccggttccaagtgatgctgaaatggaatccaaattgagggcgaattttcaaaaaccattgaattgcagtggttaacccaaactcactccgccaaactgagcgaccaaacggcgaaggaatgaaattgcgtcgaccggcagcaccgcggtttcgcccgactcattcgttttgcgcacaaatgcgacgagttggcgaccgtcgacacttccgaagtcctgtagaaaaaaatgcatcatttttatgtaaaactatataaaatggtttgccctcgcggatggcttaaagaaagccgggaaacgcgtggatttaacaatgcttttgctttacctgagcaatttgcggtggtggagacaatggttgtttcagtcgcgtcggtagagccaaggcattgttcgactgaacaacggcactcatcctcaaatatcagacggtaacggtggtcagcaaagaatatgaactcttaagtttgggaaaacgaaaacaatttataaaaacaacaaaaaagtttaaatgtcgaattcgacagcggctcggccgttaacggaccaaaaaaatttgttttctccctaacttttgcacagtttaccaaaaacaacaaaaatggtactcacagtcgaaatctgtgtttaattagaaagttttctttaagctgtgcattcttaatagggatgggatttttatgtttttacatattttttttgcggcttagttatggcgagagaagcccaaaaatagcattatctccgaacaatttttgatttagagcgacttataaaaacataaaaacacatattttgacattttggcacataaaaacatatggcacatatttcggggttttggcacatattttgcacatattttggcatttctgagaaaaatttgcaataaaaatacaagaaaattgaaaaatacaaccctaaaaatcaacttttttcacaattcttatagaattttcaaattttttaaattttttttcgaatgtagaaagtaacaaaatcgaattcattaattcgtcattggatttcagttctctgctggaactttcaatttataaaatgattaatcaaaaaaagatcaattttaccccaaacactttgaaatgtatttgatttgcgttgtatgggcgaaaaatgataaagaatgagatttttgggaatttttatgcaaaaagacacttgatttttccaatttttaacacatattttagcacatattttggcatttttggggtttttagcacatatttaagcattttttagcacatattttattacatatttcaggatttttagcacataaaaatcccatccctaattattaatgatggcactaacgcaaaaaccttttgtttgctggtccgctaatgacagtggaccagacaaacacttagtttctcaagttaaatggctctaagaacaaatgtgcgcatgttaattaccaaccagctttttcgccattagttctaggtcaaatccaaatttattaacatgcaaaagaatgaatgggtttttctaaattttccgtcctttcgacttttgtcagatcctttttttaatattcatattcaaataaaaacatttatatttttttggcgttttgttactttcctttcagttagccattctttccacgataatcgaaatgtgtcaaagctaaaaaataggatccgagat

SEQ ID NO: 6611 - DNA, 895 bp, Heterodera glycines
taaaatttcgaactcctaaccccgaattcaaatatttttcgatttttttttgcaaaaaaaaaaaaaatttgttttcgccgtcgccttcagtgaaattccaatgaattttgttaaatttcgctttttcagatgaatgagttgttatctcttacatatttcattaccatattcatgatcagcacccttctcaaatcgctgtatattcattggaatttcactggcgacggcgaaaaaaaaattcgaaaaatgttagaattcgtggttaggggttcgaaattttattaatctgagtcagattctgtcccagcagaaagaaggacattcaagaaaatgccgctacttcaatttgacttttcaaaattaaaagttcaaaacttattcaaacgaaaaaaattagaaaaatcatgccagtatgtctttcgaagttgatcaaaaaaaacactttcaccaccgtgatcagtttaatccttcacggtgatcgggaatgatcaaacgggaaataggtggcggaaaatttcttgaagttgcaatttgaaaagaagcattatgactttttcttcctcatcagaaaataaaatatcaaaacgattgcctttatcgtattattagctgaaagaaagggagagaaacagactgcttgctcttcgtcttttccctttgcctaatgcgtcgcaatttgcgatttcttctttctcttttcccttttgcgcgcagtttaattgatttgtgatgtggaaaggcaggcaaagaacgcacatttttgttcagtcagtcgcagacggacaacaaattcaaagagagaaaccgagggaatgtgagggaaaaagggacggaggggagggagcacttttttggtgggtttgtcgtcgctgtgactgacactgacacgatgatt

SEQ ID NO: 6612 - DNA, 1712 bp, Heterodera glycines
  unsure (1)..(1712): unsure at all n locations
cataacttttcaaaaagcatcaaaattagacattcttagtatcatttgatagccctaagaatgctctattagccttcaaaaaatttcgttgagtttcaaaaaagttatggccagaaagtttcaaaaggttggttttctaaacatttttagccataaattttttaaaacccaacgaaattttttgaaattttgcaggctaatagagaattcttagggctatcgaataatactaagaatgtttaatttggatgcttcttgaaaaagttatgatccattaaaatttcaaaaaaataaaaataatttttatggccgtgtcttttttttatggttgtgtgaactgcaatagagccgtaattgtttttgtttttcttccattttccgtccctctgttcatttgccactcactcattgcctttgaaggactgatttttgtcgtggacagcaacgaccgcgagcgtgtgggcgaggcgcgtgaggaactgatgcgaatgctggcggaagacgaactgcgcgacgcggtgctgttggtatttgcgaacaaacaggtgaaaaggggggggggacattataggcacatggcatttagcgggaaggacacttccgtgttggttgcgattgagaatcatttaattattattttgcaaattttaggatttaccaaatgctatgaacgccgcagaagtgacggacagactcggactgcacactgtaagcgttggctgaatgggattttgttaggtttgagttaacgctatggcaaaacaaaacttgttgttacgtatgagtttctcttccttttgttccgtttagaaccttcgggcaaatgggtgctttctgacttccacaattaatcactgaaaaaggaacattgtttcgccattgcaatgttttggtgtttcagcttcggaaccgcaactggtacatccaggccacctgtgccacgtcgggcgacggactctacgaaggattggactggctgagcaatcagctcaagaacagaggatgaacagcgagcggaccatgcgaattggaagatgacggaagggaatttgtttttgcgcgcagctctgttttggggatggccgtttaatttcgataactatttaatgttttttgtgacaatccatcaaaatgacttctgacacattcgacaaaacctttgtgaaaagatttttaaacatttggactcactcccaaaatcagctaaagtgccgtaggagtcattgtctatttgttaatcagatgggtagtgtggccaaactacacactgattgtgagcatcggattcgtgtttttatatcaacattttccccaccccattttcgctcatttcttgacgttatgtcgcaccttcaccaatacaacacgttaatgtcattgtctaccttcgggaatatatttgtttgcgtatgatgaaaattcaaaactaatcaaaaaagctaaattttgtttgtgtgttctttctgcgcttattttattaagaaatagactcaaaatcacatgaatctttttatgggtagcaaaagtggccaatttctgaaaaattttccaatactcaaaatattgcacgtgngaaacccgcatttttataattcaaattttgcaaaaaaaacaaaattaacaacaacaacaattgatcaaatggcgttttgatcaaccaanaggatgtgtattctggcgggatggtatattttgacgttgtgtttctcacc

SEQ ID NO: 6613 - DNA, 1372 bp, Heterodera glycines
tcaaatggaaacggcacaaacggttgcgcaaattgactaactgaaaagggacgctgaaaaggtacaatttgacgctgtcaaatcattttcttgttattcccacctcaatttgtgcttctgttccttttttgccttcttccccaatttgttggtcgcccttttccatctgtttgatttttgctggcgaaacgatggaaatttgcggcacttttgccatttcggccaccaattgtcgctcaattgacggatggacccaaaggaggagacggctgaattttgaaattgctttgaaaacttaaattgtggttaataatatatgcgtttgaatttttcaagttaaaaaatcgacgaattctgacccgtcctccgtccacatggctcggccgggccccaaaaatccgtgtgggtatttgccgggcgaaaaaagcatcaccggcacttccaaatgacccgaaagggcgccaaaatgggcaaaagtcggcgaaaccttctgaaaaaattaaattgaatattttaaattttagagtggaggattaatttttactttttcgcaaaattgggccaaaacttcggaaataattttcattttacaatcagacgaaatttgggcggacacaacaaattggagacagcataggtaactttggtcaagagagctgaaagcacttttggaattttaaaatttaatgtaaaaattacacggccgaacggacggcgcaacggtaatttgggcgaaaaccacgctgacagcttttcattggcaatttgtagccccaaagttccctttaaaattctggggaagagtttttaggagaaacatttggggttacgtcatgtgaaagcgtttggcgtgccaaatgtgcgtttccaaccaaacgtttttcctttgttcgcgcacccatcgctaaaatgtggaaaataatcatttattgactagggtcaatttaggtcataaaatggattttaaagactgatgaaagtgtagaatgcaaagtatttattcgcctcccccaatagaatttctatttccacccaatttcccatttttttgccctttttcacttaatttgagcattcgcgtcggcctccgtcgccattttcggctcggtgccttttttcggtgtgccgttcgctgtgtgtgccgagcggcgatcgggcgcaatgcgcggggcaatcgcttcacattgtgcgacatcgcacgtcgacgcatgtgcctaaaagctgatttaagaataaatgagagagggcaattcgaattgacctcggaagtcgctgaaaaaccgtccttggcccggaagtgacttcgccgagaccaagcgaaggattgtccaccacctggggggaaaattggggacggagatagacaaagcag

SEQ ID NO: 6614 - DNA, 2362 bp, Heterodera glycines
  unsure (1)..(2362): unsure at all n locations
atttggatgattgtattatcggttcgatgacagaggactaacacttaaaagacatcgaaacatttctgaaaacgatggctgaggttggctttcgattaaagccagagaagtgccgatttgcacttggagaaatacgatatttgggacatttaatttcggaaaaaggtgtgcgaattgaccccaaggatttggagccgatacaaaaaatcaaaaaaccaaaaaatataactgaattacgatcgctgattggtgtcttatcatactttcgaaaatttatttacggattcgctgaaatactgcaacccatttatgaactaacaaaaaatgaaagtacgacggaatggggacaattacacgagcaagccctggaagagttaaaagaaagattgatgacagcgccagtgttagctccgccaagatttggacatccattcgtagttgaaactgacgccagcaccaaagcaatcgccggatgtcttctacagaagaacaaaaaggaggaaatccaccccatttgctactttagcagagttctaactaaacatgaaaaacgatattcagtagtggaattagaagcacttgccatttgcgcttcattaaagaatttccgcccatatttggagggagctggaaggtcaacggtggttacagacaattcagcattaacatcactattccgaagaaaggacttagaaggacgattaagcagatatcagctggcaattatggcattcgatgtagatattattcacagaccgggaaaacgaaatcaattctgtgactatttatctcgttatctgcacgacaaaactgagcaagaagttaattctttaaaattggaccagaaaataaaacgagaagaaatgatcacagcacaaaaacaggacaaagaatcacagagaatttgcgaattaataaaaaatgcggacgaaaaagggaattctgaggggacattcggaagatggaagctttttgagggccttttatgcattacagacaggggagagtggaaggtttatgtcccagagtgtatgcgacaacgattaatgagtgaatatcattctgaccctttccaaggaggacatttgggggagaaacgaacgaaagaaaaaattagacgaagtttattttgggaaggaatggacaaagatatccaaaaccaggtgaaaaactgtgacccatgccaaagaaggaaaataattggcgtcaataagagcgttgaaccaatttgcccaatagaaccggcagcgcgaccatttgaaagacttcatctcgacttaatgggacccctaagaatgacaaagggaggattccaatatgttcttatgattattgactcattttccaaattaatggctgctattccattgagagaacaaacagcaacaatcattaattcagcatttgtagataaattcttatgtctatttgggttaccaaaaattgttgtaaccgactgcggcacacaatttttgagtgcgacttttgagtcactcgctgaaaattggggatttaaacaccaaactacggtaccgtaccatcagtccgctaatggacaagtcgaacggtacaaccgaacattggtggacatgctcgttacaacaacagggggaaaagattgggcttccgcccttccaatgctttgttttgcgtataattcttcaattaattcgcaaattggacattcaccgttctatgtaatccatgggtttgacccaagaataccaagcgaagctatttttgacaaaaaagaggaacaattctcagacatggctatttacgtccaggaactgacaaaaagaatgggtgaagtaagaaaggtagtacaggaaaggctaaacaaatgcgcaggacgaatgattaatcagcaaaaatggacaaaagaaataaattggatggagggaatgttggtcctgaagacaaaaaatgacaaaaaacataaattggaggcgaattatgaaggaccttttcgcatcataaagatcgaaaaaccaaatttaattctgagggctttgaatccggatgatgagagttttgctgcacatatgaatcagtgtaaaccatattatactgaaccggaagaagcaacggaaaagggagtagggcctatcccgaagggaccacggaaaattggggaccgaaatatagaagaatcagatgaggaaagtgagaaaaacgagaccagaattgcatttttgaataccagaggagacggggctacgaatgaagaagaggaaatatttgccgagcctttgtacttaatggaaattcaatttgaaaacaatactattctgtcctacatcgatttttcggacgattttgaactttcccataatccgctacaaatcgantgtcccaggac

SEQ ID NO: 6615 - DNA, 1934 bp, Heterodera glycines
aaaaaatgatttgagcaaaacgtcggaaagagagaaagagcaaaatgtaataaaaggaattgtgagaaggaaaatgaccgaggaggaaaaggaagaaaaaacaaaaagagaagaagcgcaggaagcagcaagaaaagaacgagaggaagttggcaagaaggccaatcaaaagggaccgttaattggcgctgacgccaaaaaattattcatgacaaccgtcgagcagccctatgatcacggaagagtgattggacaagtctttgaccccagagcggaagtggaagcgccctgggatatgactaaagccctcgcaaatcgggaaaaggaggatgaaataagagtaaaaagaaaggatgaaagggaggaaggttggaggaatttcgttggcggggaaagaagaccggaaacgggaaatgaaagttggaaagaaaggcaaagaaatgagggaaatagtggggaaaggtggagagagagaccgagggttgtcgatgcttttgcgcggaacacaatttggtcagcggagaatgatgtatccacaaaccccggcattccgccggagggatttcggggaagaagaccgacgcctaatccctgttggaaccgtttccgcaagagaagatacatgagtccgattcgatacaatactgagcagcatggtgtggggacccaaacaccgacatggccgacaacagaaagttccgtcgaacaacttcgatcaatccgcttgatgttggatgtggcaattgcgggactggtgcaaagaaacggcaaaaaggagggtgaagaaacagaaaatggggaagacagcaagggaccaaaatgaaatcgccggcaagataggtccttctcagcacgaggtattgcgtcttattttatgtattaaagatatccaagtattgtaatgaaaattctttctgaaactatatttaaaaaatgaactttaactaaataaaacgacaaataattaaattttaaataaataaataattaaatatgaattttttccggtatttggtaagaaaattgcacgatatataattgccaaaatagaaaataatgtacgtaatcaatcgagaagaagtaattatatttgtatgttgggaattttataaaatttttattttattaaagcaaaataataactaaatcgttataatataattaaagaatttgaaacataaccaatcgagttcagaaaaattcacacttttaaaaattcaacaaggatattgttttaaaacactaactttcgaataataatttactgtaaaaaacacaaaaataatacttcgaaatgaaactaaattttagtactgatgaaggaagtattacaaaaatagaagtaaggaaattaattcgtttggtgaagaataatgtaatatcaaaaattaaagtaagaataatatctaaattcgataaatccttgcagaatctttgtatgttaatgaataatttaaaaaagttcttcaaatcacccgattgcagtcaattttctatttaattctgaaaaaaaaaatcaaaattccgtaatctcttataagctctcgaacgataccaaattttccattgtttgactttggtccaaatgatacatatttaccatttattttagtttttatatattttcatttttattatattaaattaagttttaatatattgaatattaattgttataaaaaaatacaaattctaaaatcactaatttaatgatgaggaattggtttgattctctgctaaaaatactgggactcaccatgaaaatttttaaaaaagatcattctatatatttttgagttcttcatacaagaaacaaaattattaaaacttggggtaaagaaatttaaataaaatcataataaatgaataattaccaataaaccaaatttaagtaccgtacctagcacaaaaaattaacagcctataatgataga

SEQ ID NO: 6616 - DNA, 6040 bp, Heterodera glycines
  unsure (1)..(6040): unsure at all n locations
aagcaaaaagatttctaattaattatttaaaatattcatgctcaaatgatatcttttgatatttatcgtaacattaatgagtattttttaattaatctttttgatttaaggcttttaatataaataagttttttttatttttcttaaataagatttcatagaaacatttttagaatttctaattgtgaaataacaattatatattttttgattcagagttttacagaaatatattgttttggtggtaatgatgattctttttcaaagtgcagcttcatcaagttcattagctgcaataatatttggtcctaatttttacaaaatcaaaaaattaataccacacagcagggttaaaaaaaaatttttttgaagcgattgtatgaatattcaaaatttctggaaacttggactatttttctcaaataattcctttcagaattccaatttttcccgccagtgctgacaatctttgaatttctttaaaaaaattaggctttaaatcacaaaataggtaattttttaacaaaattccttaaaaaatttacatcgatttctatccaaaatggagccaaaaattataaaaatggcaagatagagtttggttaaaaaaattccgtaaaagggaaaaatattgaaaaaattaaatacaaaaacaaaaaaaaaacaataaacaaagtagtaaattatttttattaaataataaaaacgagtttcgaatttatgttattataggttttttttacttcgtagtatactacttaatacaatattttacaatttataatgttatacaaaaaatataaattgagcgttggacagaaataccgaacagcggatatcagcatgataaaaaaagaataataaaaatttaaaaattcaattatgatagaaactttgacagaggaaaatatgaattttaatattaattctaattttagtttacatgaagccgtttaaaataccaatgtattttcaatcgcatcaattaaaataaaaacaaaagttaaaaagataataaataaggtaattttatatattaaatataatttgtaataagtaccatttatgaatttaactaattattttaaagaataacagatgaatacttgaaaacgaaaattgtcctaaaataattcagctgagaaaaataccaattcaaaagaaatggtcatatttttgaaaatttaaatttttttaaatcacataaaataaaacatatgaaatgttattaagaaacataggacataattcattgatgaaatacttgaaaaaattcttaacaacaagtctacgtgaagtaatcttgattaattatataatcatattagattattgatcggagaaaggattgtacaactaattagtcaatgtcatcacattaactactaatctttgctgctgtgtatatttcatttatttatattctaattttattaggcactttatttaaaaagcgtcgacacccacatattttgatttggtgaattctattttccatgctattaatgctatttattattcatcaattttttatagatgatcattgtttcaaattcgaatttgttagttttttaaatattttttcgtattcaattctttcattaatttgaataattatataaaataataaacgtttttttgtttcctcattttttaaacaagcgaggtaattaaattgtaaccatgaatatattttaaaaattattattaataaggaaataaacaaattttattctatcagtaattaaaaaaagtcccaatataggtttttcattaatttgggtttttatcataaactgtgtttaccttgaccttgtaatgtaatttgtcatttggagcaaagtggtttgggattgtgcggcagcttcagatgtagtccaataggcacgggtttgtgagcgggcggcaccttcaaaagaaaacacccctcccgtaggtttgggtttgtgcgcgaaactcccgcaaccttttggagccatatactacttgcaattttatttgtgcacttctaattgatcccttttgtccttttattttccaaggtattccttggatgttattcatcttcgattaaaataatttcaccttcttttggctctctttttttgtgttttaggtcctttgtggtgccatggctccgatctcttagtatggtcaaatatacttttggccatctgttccaaaagtattctaaaattttgttcgttttattcctttgaacttttaatttgtttcccaatttttcttgctctaaattaaattcttcgttatttttatcatcatcagcgttttgtaagttattcctaattctaatcctggtttataaaatctatcgggcggatggctctttcgccttacggttcaattgatgcatgagtgatcggtcggatattcattatccattcgacttctgttataaatgtgtgcaactcatccaaataggtaccatttttccaagagatgctttaaacgcgtctttacaaacttttataattgttctgctctaaaattagcccacggtgctagggctggtataaatctccaaataattttgtttttaattaaatatttttctgattcattttttccttttattcctcttgcgtcatataatgaacacgcacaatggattaagttaaatatttaattttttttattatgtattattctaaatttcaaaataatgatttccgaggtaaaaatactgatcataaattttccctattgtactgcctacgagttctggacagggagcggtgtggacaatttctttgtgaattaacttaaaaattaaaatcgataaaaaccttttaattcgtgagagtttactagaagtataatgaaattttgaagaattagttaaaccaaaaataaataattataaatataataagttaaataattaaatgattaaatatcgatttccaaaatagtttgatgaattaatattgataaaaatatgtatctatttcttaaagttcaaaattaagaaaaatttatgaattattttaaaaatcaaagatgttattgcgtaaaaagtaacagaataaaatgattttaaatcttcaaaattcaataaaaatacaataaataaagtacaaagccttagtagaaattcatagcttaaattttttttgtcaattaaatcataaccgatcatattattattaacataaataatcagactaatttttacacatattcttacaagcatttatataccttataaagtattaaatattaaataaataagttaacttttaaaacgaataatctttaaagcattctactggcttgcagaaattaagggatatctcgctcgttataagttatgcaatctctcaattttaaaacctcacgtaaatgaacatgggaacctctcaaacttgctgtttagaaatgtatcttaagacaaaactatttatagaataagaaaaatgtattaaattaacttatttgtcaaactcgatttattgaaaatcgtgttagtagtaagagataaaaacaaaaatgagctataagtaatagctaacaacaaaacaacttacgcagctctcgaattagcgcacataataaagtaattaaaaggaatattaaatgatgaagtcaaacccaaacttagaataaaaaaactttaaaaatcaaatactaaaatttcaattcattttaaatattgtaatacttaaacttttctaatgaaaatccgtagaagaattttaggtgcattcagtaaagaaacaattgatatatttattaaaaatggaataaaaccgaaacttacatcgagccatcgcaataaaatttcaaatgatatataaagacaaccagtttaaatgtattattacgtaaacatacaaagttaaaattatctatcatattatttaaactaaagataacaaaaaatacagttgactaaaaaagaagtaaataaaatatgcttacaaataattatttaattaacttatttttaagaaaaagttaaataagacaattaaattaaatattaccaaaagaatttcgaaaatacaataaataattagtttataaaaagaaatattttaatttaattctaataataaaataaatattttaatttaattctaataataaaataaaggattcaattacctaatcaaaaatttgtgagttcttgcggtcgagcgcagttcgaaaacagctaagaccaaactaatggaaatgtgcatgggaaccgattcatatcgatttagaagtaaaatcataaaaatatttgaaaatgaaaatgacataaaaactgaattaaaaaaggggaaaatatttaaaaatatactttaaaaacgcatcctttgacttttaatcatgcctagacaaaaaaaatcaaacaacagttgataagcgtggtaatgcaaagaatttactccttaaaattttaaaacggatatattaaaatgataaaaaaatgcattatttaaataataaattatgaaactttttaacacacaaatcgcttaagtgaaattacccattaaagtaaatttatgtataataaaaaccaaattaaaatgggtaaatcagtaattttcaatgtaatttaataaacaaaccaccataaaatgatgctttcttagaatattaatttattaaaataagattaaattttaaacattaataataagctgaaattattgatatcatttacaaaagtaattaattataaacatctgtctaaagtaaatgaaagaattagcatgaataaaaaataattagtaaaaaaatatgtttgctctcacttataaaatatttaatacgttaaaaactaaaatatttaatactttaaaataactcatattaatttaaaaaacattacatttcttgttttccaaatgattttttttcagaacaatttggattttgtatttattttgtcaaaatactaagatgggcaaaagtcggccttttggttattttgctacacatcattttagtttttattttcagcaaacaagcgagttcagattaaaatcaaataaactaaattattattttttattcaaaatgattaaatatctataaaatcaattaaaaatatttatttatcgattaaatgatagaaataaaacaataaatttgtctaagaaaaatatttaattaatttaattttttaaagctattaagctagactttgttgaaataatctttaaaacatactcaataaatgaattaaaatgaaaaccataaagcagtcattcaataatcaaattttaccagctttttaacaatcaagaaaatatgaataatcaaaaatagagcccgttttttattaattcgatctattttgaaataaattatactaagcaagattttgcacgattttaaaaatgtctggtgtttagcggttggttgaaaatttatgcaaaaaaatatacagaaaatattatgctttaaattatcaaagacaagaaaaatcgtgatacatttttgggcccatctttgcaagaaaagaaattattaaatgaacattcttaattttaaattatataatatagaaaattaatttattcttaaaaaacggaaataaaaaacctaacaatcaataaaaaaatgaaattaaacaaacttataataatttcgattaaaaaaaaattaaataacttaaaactcatttgatgtaaattgataataaatagaatcaattaagcaataaaatcaatacagtggcgttcttaaaataattcaattgttattgttcaaaatttataaatgcactcatttgtcagaagagcaaaaatttaaattaaatttttataaacattggactattgcgcacacgaagtaggtcatgttgccgtgaatgcaagaaaattaaattctcgacattcttaattacaaataacagttaaacacgcgaaataacaaactacatcttaaaaacactaactacatgattcgccataaaaaatgtaattttnngtaaaatcaattaattctgtctaaagttccaaaagcatttattcatttatatttttatgctatttttataattaatagtatatgtttttaa

SEQ ID NO: 6617 - DNA, 1723 bp, Heterodera glycines
  unsure (1)..(1723): unsure at all n locations
aaatccaaaaactcaaaaatctgtcggtcggttttttcggtcaaaaaccgaaaccgaaaatcgaaaaataccgaaaaaaccgaccggtccgatctctaattattacttagtaataaaaaaactgtttatacaataaaaacattgaatataaaaatgtttgttgacttttattccaagattatgatacctaatggcttgtgttcaaaaattgaaaaatgatacaatcaaacatatgttatttaattttttatttttacattcaggcatttttattttttttaattggcgtatcttcattgttttctttatgaattgttaatgatagtaagtataattttatatttattttttgttcgtagtagaaaatattattagaatgagttttattaaatttatgttattataaaatgtatttttgtttagagtcctcgtacgttattatatggttaatatttttttatgaataatcaagaattttaattattactattaaaaattaaagaaatgtggcgaacgcattttttgagtcagtagatagaagatacctttattattttgggcgaagtaaattcaatactattaagaattttaaaacaacgagtactttatgcaattaataaaacattattgaaaaggatggcaaagattaaaatttaatttatattaaaaaatcttttgacaaaaatattcaacatgtttatattcttcttattagaaattaattaaatatcctattttgcgagccattcgaaaactttgaataatatgaagttataaaattttaaattaacttagaaattacgatttttcaaattttcaaaaaatttaaatctctaaaattttctttcatacaataaaaattctcaaaaangtaagatacaggtaaaaaagatatagcccattgccataccctgacatttgctaattgtcattgcgctaatggtaattaattaaaagccaaaaactaggcactctctagactgatcggttggcacataaacacgaaacacctcaaaaacacatgaaacgcgaatttttttaccgaaaaattctaaaatatttcgagtcatttaactaaggtgtaatccttacaaatttttcattttttgcagaattttttccccaaatttttgtggatgaggcggtgcccataggcgccgccaggaaaaatattccataattatatgatttttcttgtcaattttcttcattattttttcaactaaaaattcattcaccggcggtgggaacaaataaggcaaaaaagtgctcaaagttcaaacgaaaacaattttatcttcgaataccttttacatttaaagtaatgacgaaagccgcttcaaaattaataaatattaacgtatgactatgaaataataaaataataatattaaaaggtgtaaagattttaatattttattaatattactttcaacttaaaaatattgaatgcacccaattccaatatataacttattaaaattccaaattccttggaaaccccatcaaggtctccactcgacataattataaataaagcatctcttccattttcgacttactcataaacacctctatatagatgcaagtgaataaaattaaattacaaggattaatgtaatattttatgcatatattgaataaaaacttactgaaaagtactcaacattgaaatcaaaaattaaaaatatacaatataaatataatattataataactagta

SEQ ID NO: 6618 - DNA, 2958 bp, Heterodera glycines
tgattttaataaaatccaaaataattttcactttttaacttacgttaattaatgttttaagtttttagaaaaatttcccaattttttgttcaatttagcatttcaggaaaaaattgtatttatcaaaaaattttccgggttgggagagagtttaaatcagaatcacaaattaaacattttaaactaaaacttaaattgaattcttcaaaagtgatttttttataatagcatcgattccgtattttctcaaatcacacaagttgacaaaataaaattttcgtcaaaataactttcatttttaatgccatttcgctttcttctaatcctgacccaaaaatgtcaaaaatattcagggcggaaaaaagaaaggaattttcatgggtttcgaaataacccgaaacaaatgcattaaaattaataatttattgaaaatattatgaaaaataagtaacctattctcaacacttcgggaaactcttcttcgaagcgaatgaaatggaggccaccgaccaaaatgagcaatttgttttttgcaatttcaatttcgctcattcctccgatgaattcaatttgcttcgactcattaatttcttcaaaacgtcccttctcttcggttggcattttcaaattgcaaaaatggccccgcaattgctgcgacatttttagcgactcgcgaaatgcgaaagcggtgaactcggccacttttgcacggtttgagcacagtcgggacacaacatgaacagaagccgcatcggaagcacacttttgctgcagccattgcgaaagatcaatccgatccatcgaaaagatttgatcgtcctgtgaagtgatggaactgttgcttagatcttgttatataaaatctgagcctcggactttagcgagggttcatttccatccgagttacccatttattaatgtatttttggtaaaattctgaaactgcatttaaaaaagcagattttcttacaaaaaattagggatggtacggaattccgatttccgaaatttttgataaaaagcttttgaatttttttttcaaaaaattatcaatttttgtacatttctgttaataaattgcactgaattttcaaaactttctcggcggcgcctttcggcaccgccggaccctaaaaatctttatttttcttgagaaatttgctcaaaatcggtaaaaatttttgaccctcggaattccgatttccgaaaatttttggggcctcggaatgtcatcctggcccttatattaaagtatttatctgcaaaatttcaagtcatttaacaacttaaattgaataagaaaatctgcttttcaaacttccaagctcacgacttaaattcccagcctagttatcaattcccatcttaaacaattatatttttcaatatttttaagatgcctcgtctatgataaattcttcgtagagcaaagattgccgccattggtccaatgttttggcctcacttttcactgtgtattctatcagatggtacgccacacaaatttggacacttttgctttgatttgtgaaccctttttccatttccttttccatttgctgtagaaaattggttaaagcccataaaattgtgctcaattcaatggaaaagcattgtccaattttgttcataataatttgggcgtcgtcgttttccacttggaaaaattcaatgaaatccgacgccaaactttgatctgcttaagttaaaatgacaaattaatgaaaatcgaaaataaaataaatgctattttaactttaaacaaaaagttgtatacctttcagaatgaaattttcttcattaaagggagacaattcgcttggtgtttttctgtcggggcagccaaaattttgattcttaaataaatatttattatttttacattttatgtactttaataattttatattaaaatttttctattgtcctatatttctcattactttttccttttgtcgtccctttgaattgtttgattttgcgattttttcctcctcaatttccttttccgattcgcttttttccgtttttccaatttttccaattttcccagttttatttctttttgcattctttttatgttcatccattccataaagtgtttcccattcgttaataaattcagaaatctttacgaaaagcgaaaatctcgaaaagatttcttctgtgtaaactaaaagaaaggaattgttaagacaattattttttttctgcaaaaattaattgtgatatcttttgttttttagcttattttgtggaaagcggtgtaaaacgaaaaactttctagagaccggacaacttgggtcgggagggatcccgactctgagatcccgatgaaatcacgatcccgatcattgccgatgaatttaaaaaaagattcgggatggatcccgaggtcggatcccgaatttaatcccacggaatcccgatcccatccgttctctaattctttcattcagttttgaaacgaacattctctgaatttgtccattatgtgctcatgacgtcccatcagtccaaagatttccgcttggtgaattttgttcaaaaatttgttccatccctccattttcgtcgccttttcccctcctttttcgtcacctttttggccaattgctttttcccatttgctcttcaacatttcctgttcataatttgaactttgtcctagttttttgcccaatatttcgtcgtccataaattgttccgtcttcgtgaaaattctgcccaattttaaaattgtttccatcgcgtcccaattttgctcctccaagcagacaaacagtgcgtcgtgttccaaatcaaacaatttgttcattcgatcccatagaatttgcatgtttcgttcaccaaccaattgtcggtgaagccaacgacaaaaagtaattacatcggcctgcattttgcttcgcagtcccaaggccgacttatccaaaaatgtcgtctcgtaatgttccc

SEQ ID NO: 6619 - DNA, 1542 bp, Heterodera glycines
agagaatgtgccggaggcattccaaaatggtcgactggcccatcagatcttacatgaagagtgaattcaattttggaatagatttttacattcatattttaattattaatatcaatcccaaagcattcgattttaaaagtttcattttaaattattaacttttagtttaaagaaatttattgaatttatttttttatataccaattcgcaagtgttccgggaattgctcctcaagtcgcatcaattccaaagtgcccaccaatttttcaattcttggctttacaattatctgcaaatcatccatgtctttgctgcagagaaagtgccgaaattgttccgattttcggatggcccttgccaaattttcggcatggattatgcttaatttttgctcagaactgctcaattcttcaacagttttttcgtattcgtcctttgaattacaaattatgtccaaccattttattgtcggtacttcaaaagtatcaaatgaattgacctaacaaataaaatgaaaaacaaaataataataataataatttaaaaaaatataattattaattaggaggattatttatgtatcttttataaacgtggaatttgtcttaagcttttaaatgccttgccttgaccaattgtccaatgcgttttttctccacaaaatctttccacacagttttgtccttcgccaatttgtatccattcgcaacaatttcttccacaaaattgtaatgatagcacagtgcctttttcgtgccgtctatgcctttcattttgccatttttggctacaatttttttgtgttcttcatccaatttcgcaatgtttaaatttggaagtgcttcttccacaatttccatagccaatgcttgaaagtgccaattcactgcttgaatttcaaaaattttatggctgtcatcttcggcataaaataaaagtttctcgacatggacgaccaccattccctgtattattggtttgctcagatactttttgtaatcagtgataattgaatcttctttctctaaattgtcactttaaaatatattaattgatattatgtattttttgataaacagatttaagtgccaagcctcgaagataagtatttttaggtgtaattattttgtttttttaagaaaatgctcataaagctattctattcaatgtttttgcatttctcttgctaattatgagtcttaataaagtcaaggggtatgaaaaaatgtaacacataacttggctcagtttaaaccaaattaaaatttatggtatcattcaatagctttaagtgttgtctaacagaatattagatttttttacaaaattataaaaagttttgatcacaaaatttcaatgtcttaagtcaaaattttttacccataaatttttgaaaatgaatgatttttttggaattaaaaagttaaaaaagaattcgaatataagaattagtttagctcaatttcaatttaaatcaattaaaattattaaacggttataataaatttgcataaccatggcaaaaagcattgcatatttaat

SEQ ID NO: 6620 - DNA, 1398 bp, Heterodera glycines
  unsure (1)..(1398): unsure at all n locations
ttcattcgcttaaatttttaatccgttcaacttttttgctctccgatttaaaaaaatactatttgtcattttcgtatttacgcaccgtaataaatatttgtcaccgggacattatttgaaggttacggtagaggaaaatttggtactaaaaaacgtttcactgggaaacgggaaattggtccagttttgagtttgggaaatatgagaaatacctatttatccaatttttaagaaaaatagggttcttgatggaaaatttttgaaagtttgttgggctttaattaattttgcccaaaataactttatttcgatcgagttttttaaaaaaaatttaatgagtttttctttaaatggggtcatccttgaaaagctgctttttacttgtttttcgcacaatataggtagttgactttgttcaaaaaagtttcaggaataggggaggtgtgataatattgtgatttaaaatatgtttggcgttttgttgttctattttgtgttattttgtttgtgattttgtgtgatagtgagttgagttagtttatgcacagtcgtcagttctattgattgtcgtcgactatttaatttggaattaaacgataattgttcttcagcattgtgttttgtatttgctgtttgctttgggcagttgtcttttgctgtgtgcaacaacaacaatcttaaagcccctgatgacacaccttctttcatttttacgactgaggaggccggcggtgccgataggcgccgccggggaaatttttggaaattttgctctgtttcttagcaactttgcccaaaaaatgaccaaatttttcactgaataaccgtgaattagcaccgtgaaacgtgaccgtgacagtgagtgaaaaaacccgtgaaattcacggtaaccgtaaccgtgaccgtgaatcacggcacccctctactatatatcagggttgccgcgggtcgagaaaaatatcaggtcggcagaaaattatcgggtcgtgtttcgggtcgagaaaaatgtcgggtttcggcatcgggtttcgggtcaattgacaaatttttataatatattcaaactcgataagaatttttttatcgaatgaaaaatcaataaaatttttttttcaaaatttctccttgtccaccgatttccttatctacctagtttttcacccagacccctttcttaccagtgcttattttgacccgaaacccgaacaaaatcatcgggccgggtttcgggtaacccgcggcaaccctgctatatattacttattacgaataatatatacaatatattttttatgaattgacgtgattgtatatgcaaagtaaaatgtcaattaaatcgatactgttgttttatttcttcaaaaaaatatttcaanttaattttaatgcaatgaaaaa

SEQ ID NO: 6621 - DNA, 1160 bp, Heterodera glycines
aaaatagatgttgaatcattttgcccccgcaatgatttgggactggaaagtgccaatgttgcggtagtgacgacggcaccttcttctactatcactgtcataatcacatcaccaccaacaacaacaacaactacaacaacaacaaaaccgacaacaacatcaacaacaacaataatgccaattaatgtagtagaagtaaacaaaacaacagaaaaggatgtgcctaataatgaaaagcccaaggatttgtgtatgaattcaagaaaacaatgctcataattcttatgagactcataattatttttaaatatctcaattaatctttccattcccaaagcatgtgccgttgcgccgccctccgtcgtccgtccgtctccgttggacgtcgtcctccttttggatggttccggctcgatttcctcttccattttctatggccaaattctgcactttgccaacgaattggcacaaaatttgaacctttccgccgagggaacgcatttggccattgtccaattttcgaatcggccacaattggagtttggcctaagcagcggaaatgacgcgcaaacggtgggacggggggtgaactaattacggcataatttttgcttattttattaaattattccataaattggtatttagaaatcccataaagtaaaataacccataaaatgtaaaaatatacaatttaaaattgtttataaaatccgaggggagggaactctgatgaaattccattaaaattctaaatatttgaaatttggtttgtttagattaaatcttatattgacaacatttcctacctcgacggaggaacaaatatcggagaagcattgcttttcacacttttccacgtgttagcgaacggcgacgcacgtgccaattcggaccgaatcgttgtggtggtcaccgacggcgcttcatcggacgatgtcgttgagccgggtgctttttgttctttcgaattaaattcagtaatttccattttggtaatttagccgataatttgcgcaaaagtgcaaatgtcgaactgatcgcaattggaattggagaaaacattgaccaacaacagctgaatttgggcattttattacgccaaaattaattaatttaagaaaaaatattaattttattgacagatcactgacaatcca

SEQ ID NO: 6622 - DNA, 4110 bp, Heterodera glycines
  unsure (1)..(4110): unsure at all n locations
attttcgttgtgccgcaaaactttaagcgtcgtttaacaaaaatgggaatgacgcgggagggcattattggcaccagagaaagttaatcacagctcaaaaaaagtggtgggccggcagaattatatgctggcactggagatatgaaaatgattggctttttctaatgaacataaactttgcacccgtggtccgtccattcccttgacgatgtcccatcattaacaattccaacgttccattattatcaccattatcattatcatgatcatcatcatcatagatgctttcggctaatcatctcttcacttcattacttggtcaaaaacaacaaaaagcatcagcttccgctctgttccggtgaggaattagtgctgctgctgctcgaactgccgctcccggcggtgaaaaaagccgttccgccgtcgcccgtggtcgcatcggttggccgttgctgctcctcctcctcaatggcgatgctggtcgaagtgacaattttctgaaaaacatacgtttaaaatgatgaacccaaaaacaaaaagagagagagagagagaaagagaggaggggggaggcggagagggggagagagggagggagggagagagaaaattcattctattgcatttgtcaacaaaaagctgttcaccaccggtctacgtcagttgtgcgccggcgcgtttgggcgccagcatgtttttgcactataacttttttctttgtcaaccaaatctatcaatcttggtatgattcgagagcccttcagatgctctattagctgcaaaattccaaaaaatttcgtattgtttaaaaaatgttagagccaaaaagcttggaaaatctggttttttaaattcttctggccataacctttttgaacctcaacaaaatttatcaaaattttgcagactaatagaagacatttagggatttgaatgataccaataatgttggatttgattgacaaagaaaaaaagttatagctgaaaacgtgctggcgcccaactgacgggttccggttcaccacacctttggcggagttcgcttgtcctttccgcaacaggtcacgtcgccgttctccagcattgcgcaattgttcggaagacaggcgaaggcgcactccaattcagacacactgcctgaggtgtccatctaaaaagagaaaccaaagtgaaattatacaatgaaaaaaaacagtcaaaagggcctttgattgctctatttattcgaatagagttcatcggaacgggtgggaaatggaactctaaagcgatgagcaatcccatcaatgtaaggggatgttggaatgtgtgtgacccattaataattacgcataattccttaatggatattcccagtcggctcccccccccccccctccacgggtcccacttcggcaaattctggctgaatggtggtcgagtggatgtgattgtcgtgaaacaatgaacggatttgctccgccgccagcacatagtggcgcagcgtgcggaaacggatgtgcaccgtggcgatgatgcgctcgccgacgaggcgccacacgtggaactcgtggaccgccacaatgccgtcgatgtgcaacagtttggactgcaacgagtcgatgttcacgaagctgggcgtagtctgcagcagaatcaacgcagtctcatgcactgaacagcagaaaatgacgcaccaaaagattaatttgtgatttgtattttatggagaaaaaaagccctatatttctggataaagcccagaaaaattcaagcgatgaaatccccgaacaaagcctatgccaaggcccattacaattagtattgtattacatcgttatttttttcttaatttacatactagtaatattttcttaccaagtggcaaagttgtacaaaccatcagacaaaccaaaacgatgctgaaaatcaagaaaaatagtgataaacaattcataaaataggagactgatcaaaaaacagcacgcataaaaatgtaagaaaataatccctttctaattttttaaaaaaaatgcatacctatataattataataattcatctaactttaaatgttgaatatgagtttttcgttcctcaaaattaacacctgagcatcgggtccatgtacagcttgagccactcgaccccttccactttccatgccaccaatgcggttgcgatgacaatcactgagccgaccgcgtcactgagcacgtgcaaaaagacggcatgcatgttcaggtggccagcactctgcgacttggctaaatggaaaacaaaaatttagctttttttcccattttcataaccttttcccatctttacgtgtttttctattttcgccgaaaattttgcgatgtcccgacccccgtatgattacgaacaggttggatttttatttgaaaattaagaattgagttgtttggattcccccacattagcggggggaggaggcaaactctgcccgatacaatcaccatccatccgatcttacaatgtttgtgccgcggaacgcgggacatcagcgactcctccactgcctccaagtcggacatggaaatggccctgttctgttcctcctcgtccacttcgttgtgtccgcctcgctgctgcgcccgctttgtcccgtcccgacagcagcggtggttccggcgccgtccgtccgcattcccagcgccgaacagcggctcgtccgccttcgcggcggctgcagccgccgctgcttcggccgccacttcgagcacttccgagcggacgtcctcaacgccgtgagcggcgtgggtgtgccctaaggagggacaaataattttaattaaaacaagttttttgcaagttggttccctaattggtggtgcaagaccgattcagtgacagtcactcaccaacatggccacgaaacatgatcatcccaatcagattgataaagaatccgatcagtccgactaccaacacatgaagcggatttttgatcggctccgggttcagcagccgctggatggactgaaaatgaaaaataaagaaaatcttaattttttttgaaggatttgcctcgatgaaaatagtgaaacaaagagccaaaaggaaaacgccgttgaccaacgcgccgagcacttccgcgcgaacccaaccaaaagtattttttgagcttttccttcgctcggcaatctgtggaaaaaagtgatcagaaattttctttgaatgcaaaaaaatcgcagctaaatccatcactttgcgagaaacccaaattaaagcgacttaaaaacagttttggccattttgacccaatcaagaatattctttttttctcatttgtttcaaaaaggttaatatcttttaatacagatgtcatatgggaggagttttaaaataagaaaaaagagattcttctagccaaacttttaaagattttttcattttcaataaaaagcactttaaaacatttacattcagttaatgatacaaaaacagaccttaagacatccaaacgcaatgcacaaagcaatcacatcgctgagcatatggaaagaatccgcaataagtgccattgagtgggaaatataaccgaaaacgagctgaaacaaagcaatttggcgttaattaaagtgcaatttttaattaaacaattaatttttttgtgcttacttcaatgaaaaagaaggcaaacgtcagaaagatcatcaccaaaaggcgacagccgcgcgaaaggtaacacattcgccgacgacaacagccaacggaagagacactgctcatggacagtttgggctgaaagtgggggggggacaggatgaattagaggaaaatgaattcgaatttaccgcaaaaatccggcactatttaaaaagaggggtcttttgaaaagtggcttttatgttagaatctgagcaaaatggtcatttttgatgttttaatgattcatgactacttttagcttttttaaataaattttatggcaatagtgagaattttcataaattcgactttttgttcgaatttggtttaaggggttctatagaatgacctgcagtctattacttaaaataaataaaatgacctgcagtcgattagcagccgcctgttgctcagcgcgatggccggcgcccatggcacacgganatttgtgggttg

SEQ ID NO: 6623 - DNA, 947 bp, Heterodera glycines
aaaagggctcattaaaagcacaaatttaaaattgaaaaatagaaattattgcagagaaaataagcaattcgaattgaagtgaaaacaaatgctaataaaacaaattcacaattaatccaaataaaaaatgcaacgaaataatgaatccgaacttagtttaagattttgcggtaaatttgcaacaatttttgtctcttttcagaaaagctaatcggtcaggattatctctcccattaaaatgtttagttttgtcgtcagtgttcgctttcgtctttgagtttgtgcacagtgtcttcttcggcccgtttaaatgctgaagcccgaacgtcggttttgttttttccgcgaatgagaattttttgatgctaaccgaaattcttcggagcgttttttcctgtaattaaaatagaatacatgcaaaataaggcatacttatgttaatagtaagtttggtgtgaaagaaaagtactagcgatatcgacggttaggcccaccgtttttcgatttatgagaaaatgccccgttccgataaattcagattttcccaacgacgcctaatgacagtagaaagttgtttgttttagatgaaatgatacgataaattaaaatagtaatgaaaagaattttttgaaaaagcatcgaaacagggttccccgatgccaacttttggaaattgggtcggagcaaaaaaatgaaattgtgatggagtcgccgcctctacataaattaaagatctggctaaataaataattcaaaaaactaacaataaggcaattaaaaaccgagtttagaaataaaaagctttctatgtttgtccatggaaaattttcgtcggtgcctaatagggcatttttgacattgaaaatccatcccaccgttcttccattaggctgatgtgttgtggtgaaacgtgcgttcggtgctcttccttgaccaactcctcggag

SEQ ID NO: 6624 - DNA, 1111 bp, Heterodera glycines
ctagaaataggtaaaaacctaaaaatccaactcctaactctttataatcatacacaataggcgatagataatgcattcattaaatttaaaaaatataactacataattaaatttttctctttaaatttcatcaatattttttttaattaatttattattttttatattcattttattatatttaatttgatattttaaattttggcgatatgatatagtcgtaaatggtcattgtcgaaaaggtattgtcgaaacggtcattgtcgaaatgtccagccaccctcgaaataaggataattttaaaaaatcaaagtcatcccaaaattgtggttttcaaaagcacattgaaaaaggttttgagccattcaaggagggagccaatttaaataaactgtcgttgcgttggtcataaagtgcagaaagcaaagccaaattcctctcaaaatgccaaatcggttcttccaaacccccccccccccactaaaatgccaaaatcggctctccataaatcctccacctgcgtttgtcggcgcggccgacgtgtcgttcgctgtgccgttgctgttcatcacccgcttcattatcacatttcccacccgttttgtggtgaacgtcgtttgatagacgcgtgggtccaccggagaatgagcggtggacgcggaaacgatgtccgactgggaggaggcggtggacgagccggcgtcgtccctttgcggtgccgcgcggcggtgggaggcgcggagccaaccgacgcggtaggaacctgagcaaaaagtggaaaataacatcagtgaaaggaataaatttgccataattacaaatcatttaaaatcatcaccctccgattgattgtcctcgcgcagctcggccgcgtaatggaaattttcgccgctcaccgatttgtgcgcattgtgcagaaacgaggaatgtgaagatggtccggcagcggagacggaaggcgcggccattttggaagtgccgaggaaagagtcggtggccaaaacattgggcatggacatgcacatctgtgacagggaagaacgatgaccaaaatggaaatgatttaaaagggacatgagccgaaagaagtttaaggccgaagaaatgccgg

SEQ ID NO: 6625 - DNA, 4236 bp, Heterodera glycines
actaagttcgattgattcactagcaaatgcttttttctcaccccgttgtttggttcattttttaaatttgtgaaatttacttattgcgtaaagtaaaaagtttacaatgaaatgcttaatttctgattggctaatttcgatgaattcccttagcaaatgctcttttctcattaattttgtttgtttcacttttttgcttaatgatgtgtacctatgaaagagatcaagatcaaaaattcacgcatgcccagtcacattaaattaatgagcaattcaaaacgaataataaacctctgcatttggtcttatattggcgacacaaggcgatattaaattattatttatctcttgtttaaattttttcggtaaattttatggatttgttaaaaattaatataattaagaaattttcgaatccaggcatcatcatgctactcttgctgggtgagttaacgaaaacttcctaaaggcataaaaaatttaagacagaaaattctcattaaataacttaaatctcgggaagtagaccatttgaccaaatggtctacgactcagtcacaacaaaaagggaacttcaagatttttctcaaacacagagcactcagtcacaaacgaatgcacacagaaaatacgcctcacccgtttaatggtagggatattggctcgacttttcagtgccagtgctggacgactttgcacctacttcctcccctatatacacacactacggtgctttttcggccaataagactattgccgtggcggcctaatggagttttaaatattaatccacactagagaccggaaatttcaaatttgcggatcccgctgcgggattggaatccaaaattttttgcaagacgggatcccgcgggattaatcccgcaaaccccgcaaatcccgcatttaaaatttgcgggatcccgcgcgggattgcgggattttggaaattttgaaaaaatttcaaatttcaaaaaatttccaaaaaggaaaaaatacctgacattttgaaaaagaaatttttaggggctggcgggatgcattggcgactaaaattttccgaatggatcagacggtaaaaagagatcgggcgggaatcatatctgttaatggtcaataaatttgacatttttgcttttcaaaaccgcttttttcggcacaattttttcaaaaaactaggaacaaagggcccggcggtgccgataggcgccgccggaaatttttttgaaaattttgtcaattcctaactgattttgtccaaaaaatgaccaaaggttgcactttttgactcatttttacaggattaataggtaaaagccgatccagcggtgcagataggcgccgccggaaaatttttgcaaattctagataaaattttgagatgaaaaaatggatttaatttgattgaatttattataatttataaatttattcaaaaattttggcattctattctttaaaattttcaaaaaatcaatgaaatcccgcagaatcccgcacaaagtcaaatttgcggatcccgctgcgggattggaactcaaaattctttgcgggaccggatcccgcgggattatcccgcaaaatcccgcgcgggatcccgtcccgcgccggtctctagtttaaaccacacgaagagattgggtgagaagctaacgccaccgcattggaggtcgtgggaccgaggccaactccggacaacattttgccaaaaccttacttctccgccaaagaaaatggtcgttatattcttaatttccctccccctcaaaattcgggtctttgtccgaccgggtccatgtgttggtggaacagtgccatcgcttcatcattcagtgagttcgatgcaccgatttgccccgtaccattgcgcaactgttaacaatgccatgatattttcgccatttgtgcctttgtcttgcctcgtgctgttgtgccaccccagcatggtacgaattgtgcatgtcaatttgcctttgctgcttctgaggttgcattttgttgccgtccttttgcccccttttgtctcccgccgcaacgatggcactctgtttttattttaaatgaatttaaattaattaaattttatttaaattattttcattttcccacctttggtcgtccttttctgctgtcccttccgttttgttgctgcgtttgtttctgttggcacagtgagggaaaagtgcacacgaaattgccgccattgtccgtccgtttccgtccgttcggttggccattgccctcaagcaattgttttgtatttttgaataaattcgaattttaattttcatttttaaaccattactcctcccgccctttcgttgttcgttcggtcggacaccaaaaattgggcacggcccaaagaatttgtgcctccgcccggcacggcattcccacgtcgtaagggcctgaaattacacaaagcaatggcaaaattggaagaagcgatgggagagagagagcggataattgaaaaagggtagttattcatccaaagaattaattagagacaatttgggggaggggggaggaggaattgagacggggaaacgttttcacgagaaactgagtcagacagagttgtggcctcccgagtatcgagtccgaaacaatacccaagtttcgcgagagccccgccggagagtcgagaccgcgacttggccccgatcagagttggtttgccgtttttggtatcccgcttttccctaattgccccccgtcttccgtctttcatttttggcatcgcttttcccacctctgaaagggctctctcctctttcggtgctctctcacgtaatcgatcagctgtttctgagttcgtcccctgtattggaagttggatcccctcgtgaacagattatgctgttggtggtgttgctgctgctgcgtgcccttccgtcctccccccgttccattttcctccgtccgtttggcactgccggcgaccgaatcggcacatccaaaataaaaaggaatttaaaatgccaggagattattttgctaattgaagctggcaatggagagataaacaccacctgaagaatgagtgatgttccacacatttcttccaaaagtttttgcagtcgtctcgattttcgaacgaaaattcgattgtttctttgtagaattggaagctgtcgggatgaacctcaattcggataaaaataaataattaaattaccccaaagattacattaatgcaattttttcctttttaaaatttaattattgttcttccgcctcactttgatcatcatccgtttccgtttgaagctcaatttccgcacctttgcccatgaaaatgtggtgacacaattcatttggtggaacactttaatccccatatgcgccacagccaaagcgacttcagtgcctaaacaggcgaaaaactgctgatcaaatataaatacattagccatttttaatcaaataaataatgcaaatatcacgtaaaaaatagttcaaataaattgggtggatattttaaatccccccccccccaccttcgatatctctcgccgggtgcagccgaagtccgtagaaatcgcagcgccgtgccgtctccagcagaacaaagtccgcctcggccggctccatgccaatcagtcgccggtgctgctccaacacggcctaagaagaagggcaaatgaactgaggaaaaatcctcggattatgtaagttcacatggtattatttcaaaaagtgaatgaagggcaccgggctatcaagtttaacggagtgatcagttggaaattgatgatcgataagcctgggatattttttgattagtacggcttaagcagtgaatcctctactggtcaatttgacacatcaattttggcattttctgatcatcaaatcgttcttctgactctgatcagtcaacttcaattgtcgatgggtccgacctgtgcaaaagtgggcgtttggtgcggcacgaaatgagtgccggccaaataggcgccggcgtccggatagtccaacggagagaagtcgccgcactccgactgcacaatcagtgccaccaacagtgcagcggtgttctcgttggtacagattagctcaccacaggacaaatcgcgacggatctgtgccggaaatttatttaatttccatcgaattttaataatagagccattcttgtatgaaattgaccttgggagagaaatggaactgatcacttcgggaactcctcataaaataaatagattttctgaagggtttgatcctcaaatt

SEQ ID NO: 6626 - DNA, 1933 bp, Heterodera glycines
ttaagtcttttttgatggaattttccaattcattcacttgaagagcaaaaaggtagcgcgtgtactcctcctccaactcggccgggttcggcgtgtaaaatttcaccacaaagaaaaagcgggcgtccgattgggcgaccataatttgacgcaaaatgcttttgtccttgtcgagccaacactgcgaaagtgatagccgtttcaatgatcattttatagcataagaatgggaccgccggggggggcaaagaaaaggcgtttaaaaaggaaaaggcgtttaatgttaggtaattaagcggggaccgggtcgtgatccagtcttatttctgcctggttaagttaaggaacgggcgggcatttttttgaaacggatttcaacccagaaaatcaacccaggccattctaaaattcagaatttttgaaatttcttgctttataatgaattcccattagtccctcttgctaattactctgttcccatagctgtcgatgaactccaagccgaaatagtcactttccaacagattcaaataccgacaaacttcctcaaacagtgcttggcccgccgctttatgctgtattatcaacataattgattttatttatattttactgcttttgaataaccaaccccgaggtgaaaaacgcccaccgaatcgtccaacatacgaacctaacaaaattaacaacttattattggaaatatttaataaatatatttttattttatttaaaaataaatagtatttgtgtttaatgttctgaaaatgccgttccaaatggcactgcttgccttgatacacatcaatttgcctttgccttttcgcgggtccatccccggcggaggtgggcacccctgaaaatgccaatgaagacatatatatgattaattatttatcaatttcctttttaccactcctcgcggaatattcgaagtcaccgccttttgcattcacttcaatttaaaaaaaatgcgaataaagcaactttttacgataaatgaaaaatattaaaattaaatacatttaaattcaattaaatcataaaatggcaaaaaaaacaatataaaaaagtgttaagcggaatttgcgcctaatgaaaggcttttgaatggtgccccgggggagggggaaggagagaaggtgatgatgatcagtgccagaggcaatggagatcaatcaggccgccgcaggcacaatgtttatttttatcccatttggcacagctgttccaatagaaaagggaaaaagagaatgaatagagtggagagaagaagagagaaggagagcaaaagggagagagaaagagagaaaaaaagacaaaaaatggaaattaattcgaaaatagctcattttaaaattagcaaataattcaaaagttgaatgaaacagtccgtcttctgtcgcaaatgtcagtttcggtggtgtcaattggacgagggtcaaccaaaaaaaggccccgggggaatttaaaagttggcaaaaactgaggaaagaaagataaatgggaaggatttgacatgggacacaaagggagatttagtgggggggggagggaatgggacggatgggccgatgattgacagacaaaccacaaacagtgcaactttggggagacaaaaacaaaaaaatgtcaaacttttggatggagttaaaaggcgcacaattttaaacaaacccattttaaacattaaaagcattgaaagttttcttctaccaaaatgcccccgtcccttggcaaatttgccaagccaagacaaacacttcaccagagtccatttgtccgcttttggcagcagaagtgccgcctgccgtccggtggtcactcgtcgccggcaattccgtgccaccaattcatccgtccgtccctttcccgacggacgtcgtcccgggagttgcctcaatgcttattaagaagctggaggggggggggg

SEQ ID NO: 6627 - DNA, 1268 bp, Heterodera glycines
  unsure (1)..(1268): unsure at all n locations
aaatagcaaatttttggtccatcccaaaaatttggcgctgaattccccgggggatcgccgccccgggcattatttggttaacgcagcagaagaagcaggcggcggagaagagaattaatgcgagaaatggtgggtggccaaattggagaatgtattgagttgttgttggcgagtgaataaacagcggaggattaggaaaagcaaattgggaaaattcggcacaattttacaacggcagaagagccgggcacagcacaccccggcaaatgggagggagtaaaagaaccggattttaaggctttttgagttattttaaaaaacttttttagaccaattacctacttcagcagagggatgttagaattttggtccgaatgatttggcattttcgggataaatgctaattaaatgccaattgcataaatctcaaggcgtctgaatatgccgtccggcgggtgggggaaggaatatgacaacattatgtattatttattcacctaaattggatgtgacacggaaagttatcggatgaccgcaacggcccctctttccaaggtcgaggagagagagaaaaggtccaatgatgggattttgcacgatatcataataaaaataataattattattaattatggattgaatgcaatcaattaaactttctttttcttttgtctataaaaatgactcattttaatggccaaaaaatttttggcaaaatttgagaattatttttggaatttgaacagagttcaatcaggagcaaagataatattttatctttaatttacaatttgatgcctcaaattttgcgctaaaaataaaattataaatttgcacaggcgcaaaacattttaaacataattaaaaataatagcaaaaattcgaaattgctaaaaaggccaataaataaataaagtaaagtgggagaattttgttgaaaaattaaaaaagcgatttggtcatttgaaatggtttttgttttcagaatgggccacccctttccaagttcaaaatttcttcggcacttttgtgtcttttgcccgccgggggcaaagggtgccgccgctcgccgccgccgtcgcattgaatggccacggcatcgccacggggcatacaaagggctaacaaaacggggacacctaatttgccgaagggcaaaatgactgctgancgcgagagtcactctcgagacaaacaaagagagagagggagagagacagcgggagcgagacagacagancgagaaaagacatgggcagcaaacgaag

SEQ ID NO: 6628 - DNA, 6230 bp, Heterodera glycines
  unsure (1)..(6230): unsure at all n locations
attccttgtttcttaacccgatcacagaatncgtccctacaatggtaacaataaagtatttttacaggaggcggtgcctttagcaagctgtagtgttttaaaagtttnaatagncattgagtttttccacttcccgtagcgccggataaaattaatgtaaacggtgcgttgaacattttttttataaaatttctttgtgtttttttttgcttacaaatatccctttatataggcaaaacggagaatgtcgcctgcatccccctctcccgtccatttttgactcttgcgacactttttttactacataattgacaaatatcctttttcggatgactatgtcctcggtcaattggttgtgcggtggatttgacctcttgggttcgaatccccctcctgttggtgaattatttaatcgattttaaattatattatatataattgctaattatcctttttcggataactgtatcgctggcccagtggtagtggtttggattagacctcttggattcgagtccctctgcctctggatcaattaatttaattaattctctcatggatttggaccccggcacctgggacaaaatcatgatgaacaaaaatgggtgtttttttaagcaggggcaggggtctggaccccggcccctgggaccttatactactagcatatcatcttcggtttttcatgcttagaatttcacaaaatgctcaaattgatcatggacaatcaaaaatataacatttgaacattttaagcctgttttgaataatttttgtaaaaatgaggcttttttacctacaaaatgaggcttttgaaaattttgatctgggaaccatgatttaaacctattaaaaataaaataaaacaatagccattttcccttcctagcaaaaagctatcctctcaatttccatttccataattacttacaattagactggttttaagcttttttaacaagatttctcattttaaatttcggagtttggttttcaaaaatgtcatcgtcctcaaagcaggggaatccgattgaacggatgaagcatttgttgagctcgggagaagacgcggacatccaatttttggtgggggacggagacaaaaaagaggcgagttttttttaatatttcaatttgaaatataatttatgtcaacttttaaatttttcagcttctgtcggcgcataaactgattttgaagcacgcttccgaagtttttgaagcaatgttccgttttgactcacagaaagaaaaaacagaaaatggtgagaaaataaaaatttgttgattattttttttgaaattaacccctgctaattgccataattagggatggcattcttagttttttaactattttttctgcggctttaactcgacgagaaatgcacgaaaaacacattctttttcgaaaatttttcatttttagtgccaatattcatcactaggaatcactattttggagctttgccactaaaaaaagctatttcggaagttggccactaaaataattttttgcaactattttggcattttttggaaaatttcccaaaaaatgcaataaaaacgaaaaatacacccctaagaatcaacctaaaaattttcaaaaatacacccctaagaattggaaaaatttcacaaaaattcttccccaaatttttttttcttgttcaatatttgctaagaaaatattttgtaactgcaatcagtgaacaaaattgtttgccttaattttaaattatttcaaattaaaaatagctatttaaaaaattacacccctaaatttggacctttttcgccactatttttgccactattttggcattttttggtcactatttagttaattattttgagattttttatcactaaaaatcccatccctagccataattacttttcaattagcctctgttgaaagtgccattgtggaagtgcccgacgttgagccaacggcgttcagagtgatgctcagcttcatttactcggacgatttgagtgaattggacggagacaacgcgatggcagtgctttatgccggtgaaaattggcacaaattaatttagggggcggttgtaaaggagggggggggggggtagcttcttatggaaaacgcaattgcagtgctttacgcgggtcaaaaaatttggagcaaattaattttaattgggtgattaatttataatagttatatcttatatatataaatagtaagaggaagagaattttcctatttgaggctgtgaaatttttggaaaaaaggaatagcgccattcaaaaaagcatttttcagccaaaaatacggcattgatcggttggtcagtccatgtttgcaaattccaattccgaagctgtccaatgttttcttggcctttgcccaggctcgtctttttgacttggaggtaacaaaatataatattatattttgttttttatggtttatacatttttaggatttttcccaccaatgtttgcgtttcatttgtcaaaatgcggtccaattgttcggatcagaggaatttttacaaattgatcagaatttgctctgtgatttattcgagcatgatcaattgatgatcaatgatgaatttgatctttggaatgcggtaaaataaatatttaaaatttaaattacatttgtttattttccaaggcacttaattgggccgatgaaaagtgccgtcaaaatgccatcgaatgttccgatgagaaccgtcgtgctgcgcttggcccggcacttttcaaaattcgtttccctctcatcccaccatatgcatttgtgaaggcaatcggtagaaattcaactgtcatttatcaacattacccccttttttacagttccttctggcatttttacaaacgatgaattcgtcggcgtttatcaattcaatttctaccctaattttcgtggtgtgcccgagctttacccattaaaattgccatggcatggacgaatttccgattggaacacagccaaaggcaacagagggaccctggcgatggaaattgagaaattttctgaatttgcacgagaggaagtggggagtttccgaaaaagtgaaaccgaagtgtcaataaatggactttcttggaaaatatcggcacaaatatatgagaaaagaaataaaaaatggtttggattttatctttggtgcaccgatcctacaacagaaagtgggcaaagaatattaatttggattaaaatttaagtggcattaattaaggtggaaaatggagctgcaaatattcggcgacctatcgaattgtttcgcaaaaaagcgggacgaaggatttaattggcaaaataaatgatcacattattagcaatgaaactcctgcttggggatttaactttttcattacattttcggttagaagacaattaaaatattttttcgcaattaaatgagcaaaattaaggaattgatggacccgtgcaaaggcttttacgacaaagacggggacaaagtgactttggtcatcgatgccgttgtggaggaagaaaataatgagaaattcataaattgaactttgagcaagactatttggattcggcgtatttccctgtcaatgagcaattattttcgtccgaattctttatggaaattctacagtatttatgctttggaaaatacaacaaaaatttggctccaaacgacattttaattcatacgacaaataatgatgttgtaaggaagagagataaatattattttgaaattgaatttttaagtgcgctgcggtctcgaaattatgtgggcgggtgattgagtacgtcgttgggtcatccaacccattcagcgtccgcaaacgcatcagcttgggcacaatgcagccaaccgatctacccgcatgtctgaagcagccggcgagagtgatggtgcgcggaggaatccatcctcaaatccgttcagatgaaaacgaagtctaccacctctacaattcaaatctcatgaagaaagttggatacatttcgatgttctaccatgtacgaattggtgattgtgtttggctcagtatagacttggtattgtattattaaaagacaaatctctttcaatttatttccgattttattttattttgtcgcataataaatttggtttccgatttatgtgcaattataataatttttgtcaccaaataaattctgtttgattacataacgaattggatgatttggtatttcttccactccttccgcctttgtatgaacagtaattttaaacaaaaagttatctacttatattatctaatatgttaatccaataaaagcggcaaatttatttgatgcataagtccgccggccaaatgaccttgttttccgattctcctcccattcaccaccaaataaatatgcataaaaagcacctatcgtcttactccattcatttccgtttgccaaaatagtaaataatttggggttaatatttagaaatgaaaattaatcgccgcttcaccagtaagccgagtcgcgcggaaacgagaccccttttccaaattaaaataaaaaataagaccaacaaagggttggtggcctcaaaaataatgaaggcaaaagaaaaacaacaacaacagcaacacaaccagccaaaaattgatgatctgctcaaggacttggcccgactccagctcaaccaatcacagcaatcggccggagttttgatgaccgtgccaagcccgcaaactacaatgtcttgctggcccaaattcaactcaatcgaatttgatggagttgtcacggtcgacagcggctcttctacccgccaacattgcggagggtagaggtcccgttgactttggtaaaattaatttgaaagagatagaaatgaaaataaaaaatattttaaattatattaaaaatggtttctcaaattcgttaataatttatttaatatccaaattaattttttgtgtcttttcaacatgtgttttccagcaaccgccttcgccgaggagcaacttgtgaaaaaaaaaacgcgttgctcgattgcattgctctggcggaggagtccgcaaagttgctgagcgcggatgcgcgaattcgctgtctcctggatcttggagaagagctggaggctgggtttcagcgaatacttagtgggtttttaaagaaggaaaaatgatcgggggaaaatcgggaacgatccaaatgaactgtttacagttagttaaacacattgataaaaacaccttttaagcttcatttattttatattgagtatttttagggctttattaatttattttaacttagaaaatgattttaaaaatattattctaaacatgaaaatgaaaatttaaaaccaaaaataattaaatttaatattttaaattcatcatattaaatatgcgcactccgtgcgcatggtctaacactctttctcattgccttcgagaatgactgaaataatagtaagtaaaaaacgataaatttataatgccattttcactcaccctccaattcctgctcggagatttccttttttgccccgtcctcgtcattgtcacgattcgccatcggactccccaattcgatcaccacgtcctcctgtaaatgacaaaaaatatttataaacaaataatttaaaaattttgactcatagaacaaaaaaaatgtaatttggaaagaaagcaattaagtttaatttacgttttttgaaaacatttttcaccttcccacgacgataactgcgcaagattggctctgagcattgaggacgacgacgtgggcggcgaacgcaaagaatggccgcgagaacagcacactaaaatttttgatggataatttcgtgattgggataagagtgaactttaaggataataatgaggatgaaaagcagaaggagaaacgggaaaacatcaaatcccccgtttccggtgctcatcggaggcgagaggaggtgagcagtgacatttgagagcgagcgggggtgaatgcactcaattggcttagtgtatggcaatggtctcgcacatacagtaagcccaggacaaccagagcaattttggacaataatccattcgggacgggtggggaagataggggtagagacagacattcattactttcgaatttcggtaaagtttccgcggaatttaaattaggaattaataaaacataagttcttattatttatttatttattataactatttttattattaaatgcttaatatctgccgattttgtggtgatttggcagtatgaatgtcattggcgctgcgtc

SEQ ID NO: 6629 - DNA, 2230 bp, Heterodera glycines
  unsure (1)..(2230): unsure at all n locations
tgtcttcctttcttataaattaatggttgaaaatgaaaataaattgtcaaaatagaaataattgcttgattgattgattgaataatgattgagaatttcaaattgatagcaattcagcgtccccggctagccgaactccctaagcacaggagtccgggttagctatcctttcaggataggccgcaataaaaagccatcaaaagaaatgagagtttagaaatgatgagcaaatcatcgtcctaggccaaccggactccataagcacaggagtccggctagctatcctttcaggataggccgcaatgaaaagccatcaaaagaaatgcaagagttaagaaatgatgagcaaatcagcgtcccaggccaaccgaacgccataagcacaggagtccggctagctatcctttgaggataggccgcggtgaattaagccaccaatgcaagaaatgagagtttagaaatgatgagcaaatcatcgtcctaggccaaccggactccataagcacaggagtccggctagctatcctttcaggataggccgcaatgaataagccacatgaatgcatgagatatgaaagtgttaagaaaatgcaaaaacatgagcaattcagcgtcccgggccaaccggactccataagcacaggagtccggctagctatcctttgaggataggccgcggtgaattaagccacatgaatgcatgagatatgaaaatgttgagaaaatgcaaaaacatatgacaattcagcgtcccgggccaaccgaactccataggcacaggagtccggctagctatcctttgaggataggccgcggtgaattaagccatatgattgcatgatttgagaaattggtcgagaattaagaataatataataataataataaattgattcaataaaatgagaaattacgaggcaaaaacgccccatcgtccgctgtcgacagaggcggattaatttgccttcggaaaattatataaaaaagaaggaattcatatatatataaataaagaattcattcaattattatctaaataaataaattcaattataataataatttagcattatggctgtttgtaaatgcaaagtgtgcgacgagtgccgtcgaaagcaacggctgcatgaaattagcgaacggaaaaaaattattgaaagctgcggtggggaccaccactatataaaaatgattgaattacggatgcgcgacttaaaattatataaacgagcttataggcgaataaaatctgtgatcgaccaagtggtggaaggttggtaatataaggagggtgaaattttaaaaaaatttagggccattccatgtaaaatgcacttcaaagtgcaaagaagaatttacatattatttgattaaatgggaatgttgcactgaggattatggatggggagtgggctgcacatatgcagaaattagtgatatagtaagaaaaaaaataataattaaaataatatttaactgttagcgccaaaatgagttgttggcatattacgatcaggaacgggtgctcggcgatataattgtaggccgtcagggcagagatgcgcctagttaataaagcgggcgcgacgcaaaatacaaaaagaggggcggtaagtaaggtaaataaaggggatagatagaggaggaggatagaagaagaagcagaagatgagggggaggaggaagaagtggcagaagaggagggggaggaggaagatagcaaatgacagtgtgcaggggagcagtatatggtccgggtcaattgactcggccattactggcttctccacaatgtcggcaacgcagcgaaaaaaagtgctagggaggagccgacaatggttgtttaatataaacggtatacattcgggtgtcaaaaantaacatatattttaaaattttaatacataaaaacataaaacggcataattgattaatttagttaattcattattcacaaaaacaaaaaaaaacgatttttccgtgcctgtggtcagttagtgttccctcaatttttccttttgcctctgctcaataaccccccccccagtccatttttccgttgcctctctctgagaatgcgtcggattaattgggtcaaattcaaattatatgatggctcccctccccacattgtacttttttttgaaaatttatttaaattaaattgtaaaattgattttttgaaacccgcaaacaaattttttacacctactaattggccatttaatta

SEQ ID NO: 6630 - DNA, 1360 bp, Heterodera glycines
ctcctcctcctcctcctcctcctcctcctcctcctcctcctcctcctcctcctttctctccttttcttcgtcctctttttattttatggcctttttgctgcctgctgctatcgttaaaaaaaggagaagaaaatgcgggtgacgatgagaattgaaatgattctgatgatgatgagtcactttttggcagaatttccccgccggggtgggcggggacggggcgcggcgaggcgaggcggggtctccgtcttttgattaaagttcgatgggccagcagcaagcctagcctgaattttctcggggctcatgtgcaaaattgtgttagttgcgtcggcgcgatttccctaagaatccgatttgtatcggcccgtcccattatatatttccagttaatttgttttaaaatttcttccttttttttgttaacctaaaatttaatacaattcaatttaaaaatctaagaatctatcttttttctttaacaagtactgagttttttattgcacaacaatctttgccgtttgtatttgttggtcctgccgatttggcaaacattaaaatttaggccaccgcgcgacgcatggaaaaggacgacaatttttataggttgaaattgctgggcggattcatgaatggggggatacacaattaaatgcaaaattgggaattccaaagtcagaaattgtaataattttcttcttttaaatttaaatttttattttcttcgcaattttttcgaatattcatattcacatttttgaaaaattaatcttagaattccttgaaaatcttacaaacaaattatcgcatatattctttttaacaattttcctgaaaaatatgacttttaacctgtttttgctagcaattttcgatgttttaaaaaggagggttgttttttcattccaaataaggcttttttatgactatgattgaggatttgaaaatttgagatcgaagcttggttctatataattatatgaatatgtataaaaaattgttggacatataaaatgccaatgtttgcgttggtgtagcatgcatttgttgctacaaaattgctggccacgccaactaacaagcagaagcagctgcagcagtacaagcaagcattacataggccaagtgcttcattccccccaacatccttctcataatcatcatcatcgtcttcttctcttcttcgtcttcgtccattgcttgttggacaatttgtacaaatattgtcccaacactgactgactgactgttggcccatggcgcggccggcggtgcataatgacggcttttgctttcccttccccctctcctccccctttgcttcaaatggcttctcaaaatgttttggacccccgccccc

SEQ ID NO: 6631 - DNA, 3923 bp, Heterodera glycines
aaattggtaaaaaaccaatttaaaatcacataatataaaaatggacaaaaatattttgatttaaattgattactttttcaatatcgcacgcataaacaacattaaagttaagaaaagcagctcttgaaatattagggttcattattcataatttgaaatgtaataattgggttttcgaattaaaaaacgaaagaaaaaatgagacaggactattgaaatataatcacatcattaacacacttatagagttttgttaatattattgtgatagaaaacatagaatttaatttaacgaattcaaataaaaaaattttacactaaattattgacaaaatagaaaatctgagtttaattaattttgcaaattaagatccctggttcctgggccttttacacgctgttttttgcgctaattgccgtgctcatccttctctcagtgctcatcataatcaatttaatcataaaaattcaatcattttacggcacaatgcgcgggggctcgtcaagtaaaagccatttaactattttaaaattataaacattaacttatttaggagcgtcgacgccgcttcaatcgctggttcaatccgagtcaaagcagccgcttcacacgcaacaaattccggccatttatcacgggcacattccaacagaagcaacaagcagattgaggtgggtgttttgaatggctcaactgatgcagttcacgcgaccaaacaatgagtattccacagtttcttatgcatattttttcttacttttcataaaccattcatttttggtataacgaagacttgaaacctattcatatttcaaattttgggcttaggacaatagattaaaaaatgctgttgaatacactcgaaaagatattattttggatgcaaacagataaaaatttgataaacctttttgtagaataaacaatcaaaaaatctaatgcgttctgtaattctgcaaaattccaaaaaatcagacccataaactaaacaaaaaatgtcaagtcgagttttcgcacctttttgtcataactgttttttaaatggaccataattttttaatttggaggcttacagaagacattttactatgcgaaaaggagccagacccacaaatttgtaataaaaaatgttattaaataaattgtaattttggccaaatattttcctttaaaggcaccatctcgcggtcgaaatggaggctgaaccaagaagatacggacttggcatgccgacctgtaatattttaaaatgtgattaacagaaaccatctgactgttattacggtcagcaagtgcaaccactacagtataccatccggggccgacggtcactgcacggccaatggagtaccacggacgtcgaaatggtggtggaggaggaggcggagagggcgggcacagtccaaattcggagttgaggggccgaagccacgggggcagctgcagtccacgcacacaatgacaaaaaaaatgggagagaagcgggtgctgaatttattaaatgaaaaaaacaaaagtgctctggaaaatatttaaaaatgggtggagagtaaataattagcatttacaattatgtacagagaaaaaattaacaaagcataaaagttagttctatgtatgtatatttctaataaatttcgccaaattactatgttattaaatgtattattttgaattatatatttgattaatgacagtttcgcctatgccctaaataatcttcaaaatcatatgttttttttcaatctcagatagttaaaaggcatttaatttattagaattacatcaaaattttgaacattattttgaaacgcattttgggcatatgagtaaatttttgcacacattctcttttaggtcttctaaaattattatgcttttacattgcaatactttgaaaaacgaaatgtttaataaaatagcatttaattgtagaagcataattttatatgttttctttttccttgagttactgtgctttgaaaataatatacatcgtaaatatatcgtatcaatgtttctttcttacgggtttgacaatgctttctttctttctttctcttggtctatttcattttatgcaatatttgaagttgataatatttaattgtcattttaactaatgcctaaactaataaatttattgtacatttatttatcttttttttattttatctacattgaatattttggctaaaagtattctttttttttaatctttttgcagttaaacaaatgaaaaatttctctttatatgtcgacgtacaaattcaaagtctatgaatttttaatgacactgttcacctgtttaccatttaaagtttttgatatccaaaaataataattttagatccattttatcagcaactgactattaattctatatgccaatgaatgcaatttcaagcaataattagataaattacttttcaattcgatcaacttctttgaaagttaattaattttttaatttttcaaccgacttgcgatttggaaataattttgttaaaaaaattccaaatttttcgctgattcattaaaaactaataaatttttctctttcaattctaaataccttatcaattattgttctgggttaaattaatcaaaaagaaaaatggattataaaaagactatttaattgttttcaattagatccctttcgcttacgaccataccacgttgaaagcacgccatcccgtccgatctggcaagttaagcaacgttgggccttcttagtacttggaacggagacgtcctgggaatcgaaggtgttgtaagcttttttcttcttttttcatttttataataaaaattttataattattttatattttacagactttttttatttaatattttcatatgatagaaatatgtatttttagttttaattaatttttacagttgggtaaagggtttgagaaaaacgttttaaattgtaacacaatgggacataaatgaggggaaagaaaaaaagagattttttgagtaatttaatattttaaaaatttctttaagtttttaatctcttcaggttcaagagtttcttcctgttccattttttccatcaaatttttacatgaaaaaatgaagacaaacaaaaagaacagtaaaatttatttgttaacaaatacgcatgataaataatataaaaaactgaaaataaatgtgaaaaaaataaagtgaaaaatggataatgaattaattaattaaatgagtaatcgccctttccgttgtttcttcagctttcttcaaagagtggccaaattgaatttgaaacttggcccaaagttcgcctcaattttgtcgccagtccacagagaaacgcatggaaacagagaattgatgggagttgtagtgaaaaaagaggagtcatctgacaaattgaaattgaaattatttgcttttttcgttttgtgtttggcccaccgattcgtcggccattcttcgtcaaaaagatctgtcgagtggccaaacaaacgccgcatccgaccacatctccggtggaaaatgctggcgattggaatgccaatgcgccgtccgatggcattggcacgggcacaaattccaatggaaatggccaattggcactcccaacgtagcggcggtccctctgttgtccaatcgccgcgttgaatggcattggcatggtgccaaatcccattttatcagtcggccttttgggctcggcagatcgaagagatccgatcatccatttttgcccaattcgaatccattaactcaataccaaaaaaatctagaacttttatttgtattcgaactcgaagtaaaaggtaaatacgcaacacgaaccaaccctaacttacaacaataatactggcaatctttcggaatggcggtcccgaaaaaaaaatttcttttaattcgtaccactttttctaggcctaaaaatacgaag

SEQ ID NO: 6632 - DNA, 2755 bp, Heterodera glycines
  unsure (1)..(2755): unsure at all n locations
aaatcatatgtttttttcaatctcagatagtaaaagcattaaatttattagantacatcaaattttgaccattatttgaaacgcattttgggcatatgagtaaattttgcnacacattctcttttaggtcttctaaaattattatgcttntacatgcnaatacttgaaaaaacgaaatgtntaataaaatagcatttaattgtagaagcataattttatatgttttctttttccttgagttactgtgctttgaaaataatatacatcgtaaatatatcgtatcaatgtttctttcttacgggtttgacaatgctttctttctttctttctcttggtctatttcattttatgcaatatttgaagttgataatatttaattgtcattttaactaatgcctaaactaataaatttattgtacatttatttatcttttttttattttatctacattgaatattttggctaaaagtattctttttttttaatctttttgcagttaaacaaatgaaaaatttctctttatgtgtcgacgtacaaattcaaagtctatgaatttttaatgacactgttcacctgtttaccatttaaagtttttgatatccaaaaataataattctagatccattttatcagcaactgactattaattctatatgccaatgaatgcaatttcaagcaataattagataaattacttttcaattcgatcaacttctttgaaaattaattaatttttcaatttttctaaagacttgcgaatttggaaataattttgttaaaaaaaattccaaatttttcgctgattcattaaaaactaataaatttttctctttcaattctaaataccttatcaattattgttctgggttaaattaatcaaaaaagaaaaatggattataaaaaagactatttaattgctttcaattggatccctttcgcttacgaccataccacgttgaaagcacgccatcccgtccgatctggcaagttaagcaacgttgggccttcttagtacttggaacggagacgtcctgggaatcgaaggtgttgtaagcttttttcttctttttccgtttttattttttgttttgtaagaaaatgaattattttttgtttgtttttgttaaattattcatttgcttgaaattacttcttcctataactttgtggcttgttaaaaatctcttcttatttttaataatatttatttgttgcctatggaagtcaaaaatttaataaaaatttaaatcgctttgagaaagaaaaatagaatttgctgaacaaaaaatgtgaaatgaaaagtgaacaaattttaaaagaattttcttttaccctaagggccaaaagaatctttttaaattcgaaagaacagctataaaagtcaggctaaacatttgaatttttttttaattcattaaattttccaatttaggcccatcatttttaaatgtcattcgctttatgttttttatcgtcataagcttgaaaaaacatttttagtttggttttgaactattaggatgaatttttcgtcccaattttgactatttgtgcattttgtgccgaaattgtttttttttttggttttttatcggaataaaaaaaatggcaccttaaaaaagagtgacttaaaccactaagaacggaggatacttgtcttaaaaattgacaattagaattaatttttcttaacctattttctgattctctagcttttttagtcatttgaaaattcaaattttcgaaaaattacgtataggaaaaggcttttgtataggttttaaagagaatttgtgaagaaagtcaaaaaatgttatcaattttcaatttttctaaagacttgcgaatttggaaataattttgttaaaaaaattccaaatttttcgctgattcattaaaaactaataaatttttctctttcaattctaaataccttatcaattattgttctgggttaaattaatcaaaaaagaaaaatggattataaaaagactatttaattgctttcaattggatccctttcgcttacgaccataccacgttgaaagcacgccatcccgtccgatctggcaagttaagcaacgttgggccttcttagtacttggaacggagacgtcctgggaatcgaaggtgttgtaagcttttttcttcttttttcatttttaaatgtaaagaaaaagaattgtttttttgttgaatttatctgctcaacattacatgtttttatgacattttgtataggaatctatacaattttcacttttttataattatactatttttatatttaaaaacattttttataatgttttaattttagaaattattttttttacaattggacaaattaaattgaatgtaactcggataatatgattattcaaaaaatttatttctcgcagtttttataaaatttataaaatatttcatttgtttcttttctaacaaatgatagtaaattttaattatcatttcatgagaataccaagaaaaatttgaagaaaaaaagcataacagacaaaaaaaaatataatggaaatatttttatgataaacatcgaaggtcagttgctcaaaatgatgcatatttctttttccaccttctcagactttcttttccaatttttaatttcttaacaataaattcgtcactaatttttggatatttttctaagcattttgtaatatttctgcaatattcttaatttttggtcaacggaatatttattttttgctaaacaattctcattttaat

SEQ ID NO: 6633 - DNA, 580 bp, Heterodera glycines
tttttattcagaattgtagtcataaatatttgtgttcatccacatacagtttgccattcgcctctctccatcaatctttagtttgcccaagcgtcagttccatttgattttaatattattgggtgagacgatgggagctgagcaaaattgaaatttgaagtgtaaaaaaagcagcaattcagcgaatttcgaaatctttttaatttcaataatttttattccataatcatttaatttgtttgttttacgagacgttcagccatttttcgaccaaaaattcctaaaactaattttcgaaaattttagactgaaaatgagcgatcgctataatttataactagggttataaattgtatgattttgcatattttttctgcgcatatgctatgaagtagagtgccacgggaccgggaattttgggcaaacccgggaccgggaccttttcgggttgaaaaatcgggaatttttggctgggaaaaccgggaaaaaaccgggactagtcccggtcccggtcaaaaccgggaccttggtactcagttgtgctcagttgtccgctaccaggtcccggtcccgtggcact

SEQ ID NO: 6634 - DNA, 1949 bp, Heterodera glycines
ttcgaaagagaaaaaattgagctttttgtactttattttagatttttattttggttttcgaattttttgaattttgcaaattatatatgcaaaaaattaaaagtttaaaaattttttgaatcaattatatttccgagattccagtttaaaaaaacgaaaaaaaatttccaacttcaaaatcaacaaaaatttatcattcttggtataattagatagcatattcttcatatttttaaacaattttttttattgcctttttagtggaaccaatgtgcggtggtgacggatcagcagatgatcaatctcaagccaattcactacaaaatgatcccaaattctaccatcggctgattgaggcacaaaaatttgcatacgctcaacgcgccaatttgggcgatcaagcatttgtgccagaagcgaaaaaattggccaagcacatgacaagcaatacatttttgcataatgtgcacaaaaaaatgttggacaaagcaatgccggacgagcattacactgatgatcggcccatcaaggctgatgtgcgtttaatttaatttttttttttaaatttattttcatggcatttattttaatggattttcatattttcacgaaacttcttttgtgctaacaattttcaaaatttcattttctaggttataagcctcttcaaaattagccttttatatttagtaattaaaattttttaattttgttttacgaattattacttttttaattttgtgaaaaattaaactatttttatgtaaacagttcatccatattttttgagttatatgaggccatagtacagtaaattaaacaaaatttgttttttttttaaaatttttagaaagatcatactggaacatctcacacatccatattagacgctgatggaaatgccgtttcagtgacaagctcaatcaatcaatggtcataatttatgggatttaaaaatttatctaaatggacaaaacttattccgttattttataggtttggggctgtgattcaatccgaaaatttgggcattatatggaatgatgaaatggtaaaaaaaattatttaatggttttttaatattttattttatttgcaggaagatttctcatttcccgatgtgaaaaattggttcggatatgccatttcaccaaccaattttgttgcacccggaaaacgtccaatgagctcatttagtcctatggtcatctacaacaagcacacggggaaagtgagttgcaaacgaattttccatttttttaaatttttggggcaaaaatgaagaatacttgaacggaaacctaatttggggaaatcgtctttaaaaagtttcaaagacttttttgaattttagaaaatttcctgtaaacttttctctactttttatgaaaattttgtcgctgactaagatgttactcgtcgatagttttgaaatttcccatgccacttcatgacaaattttgtcgaagaatttccttccctaaccccgacttttctctccttgatggccgtggtttaactctacttacaattaacagtgtaaaaattccccgctgggtaacgaatgtcggggaggacaggtccgggagaaggcccaaaaaggtcggggatgttgaacgggagttctgggtccgggctcaaccctaattgatatcattaaatttatcaggtgaaatttgtcattggcggctccggcggtgccaaaattccgtcgtctgttgccaaaacagtgttgcatgtgttgtgcctgaaccaaacagtgaaagaggccattgatgcgccagtgttgcacaaccaattcactccgaaccatgttatttacgagaatgggacaccgccggtaaaaaaaaattatataatttattgtttatagggtcagacatgggtggagacagagatttttggaaattagaaatggattagccaaggaccaggaaagtcgggatccg

SEQ ID NO: 6635 - DNA, 5928 bp, Heterodera glycines
  unsure (1)..(5928): unsure at all n locations
tcaaaaaaaaaattctggtactagtgcggtttgcggtttgtcccctttttcaaaaaatttttctttgtntaaaaatagttggtttctgatcacgaattagggattaagttcgaccaattccgtatcctcaagcccgaatttgaacaaaaaaaccaaaactttcagaaattttgttttatgcccaaataaaaacaaattgacacgcataatagaataatatgattcttttaagcaatttttgagtagtcgccatattcggggtttgggattggtcgaaagggatgccagattcgtggccagcagcaacccgtaaaactccgagaaacattttttcacaattaaaaaaatataatattttttttttaattggggcgcggcaaatagcactattaccgaaagtttttggtcttactaaagtttcttttgggttagggatttttttctgaaaatttcccatgtcaacaatttgatttaatttttttttttaaatttgcgccgtgttatttatatattcatttctagaaattgatcaaagatctaaacgaaaacttcgggcacattatgaagtcgtacgacaacaacaacgtggttgtgcaagctattcatgtggccgatgacggcttcatctatgcaaatggggacttccgtcgtcgaacttacatgcacccggccggcttctaattggcgtggcacggtgccatgaatttgtggacggacccccggagttttctagactgaatatacaatataacaccaccatcaacgcataacaccatagattatagacaaaaattgaaggcgatgggaatagaaaataaataatcaaaaaaattgatgcgaaaccaattattgagtagcataacattgcatttgttgtattgtttgtttatctcaataaataattggatttatttgttgttttttttgcggtattttattatggtaggaaaagtcagcgcgccatgcgcaaagtgtgccataattagtgcacctaattagtaatgctcgcgagtctcgatttcaagaaaaaccctttctactaattttaaaaatttaatattttcttaagaatttttataatgaattctttgataaacaaaaagagatttagttcatacggtgctattgtcgttataaaagccttcaaaaagggcattaaaaaccatcaaatgaaaaatttcaaacaaaaaaatgccataaccttgctcataccaaacaaaattttaatcttttgccttaacaattctctattagcctggcaaattttcaaaaaaattcgtctagtttgaataaagtgatggccaaaagtacccaaggaaccaggtcttcaaacatttttggctataacttttttgaaacttaacgagattttttaaattttgccggttagtagaaaacacttggcaagaaaataaaatataaataatttataactaaaagtttttaattagaaataaaataattttgatcataaaaattctgatgaaaacttcttataactaacaaaattaagtgatcttgatatcattcgatagccctaagttatgcgtagatttttaggggtttatttttctgaaattttttaagtcgattaagaaattttctaaaaaatgtcgaaatagtgaaaaaatgccaaaataatgaattttaactattttggtgccgaagcgacaaaatagtgatttctaggggaacgggtcgtttcggcgccgccgtttcggcgacgccgttttggcgccagggtcgtttcggcgccagggtcgtttcagcgccaaaaaatattccgatttttaaggacctgtaacttttgaagcagacgaaaatggttaaaagttaacaataaagtttacaaaatccaaaatgcataaaattaattattagatcgaaaggatccgaacctgaccaccgccatcccttcagaatccacagatacggatggatttttaggccttaacgaagtcttaagatcattctgatcatatattcgtgatcagcggcttaaataacctctaaaaacaatttttggaagattttggtgaaaatttttcccactcaaaaatcatgtgctccccctttggtactgaatttcaaaatcatttttattgaaaatagggaattcaaataaaaagcacaaaattctccagatttttctttatttttagagcttttttgcaatataattggtccacattgaagtgtcaaatatgcaggaaatttataatcgttttggcaaaaaaattttttgggggtggcttctaatttagaggggtgtggttctaaacgagtaaaacggtaaacaaaatgaatttttgtgaaattttcttttgttagtttattgttattctacatttttgttaaaatttttaatttttgaaaatttaaatcgctcaaaaatttcgcactcattcatgattttttatttttggcttggcgccgaaatgaccctggcgccgaaacgaccctcgcgccgaaacgacggcgccgaaacggtgtcgccgaaacggcggcgccgaaacgatacagactcatttctagtgacgaaaaatgacatcattttttaatgcagaagtgcgttttttgagccatttcttcgaatcaattgagcaaaaaaaaatagtttttcaataaaaatcgcggccctatttataagccaaaaatttcattgagtttcaaaaaatttatgaataaaaaatctgactcaagatatttgaaattaattttaagacacaacttttttatattaaaaaaaaattaaaattcgaaaataatcttctcatatagaactcctaagctatggatggactgatactgtgaatattaatttggttgtatttgatacaaattatgaatttatagttacattttttgttttcgtacatcttcgctgaatttagaaaacgttctatcacccaatcgacgacattcgacaattcgccgaacaaaagtcatagagaacatttttgagcagcgattttgttgaacaattttcaattaaatttgtaaaaatttttttatttattttttcacagaaatttattgaattcaacatttgtggagctaacaatgactaatactttttcagtttagaaattcgtttttatgattttttatgaaaaaagagtcagtcagtcctctgaaaaattgttgtaaaaattcgaatttgcgtgtttttgattaatttttttttttgaattttaacataatgactcagacatatatgaggacaccacacttagttaatatatgttcttgaactctaatctaacaaattgtttatgattataaattccaaaaattcatcagccattctccaattcccgttccaacacatccagcgaaaaacttcggtgacatcgaaatttctaatagtcactgtctgaatcggcaaaacgaacgcgtgaacgtgatctcactaaaaaatgatttttattaaaatcaatttagttaagttaattagagaggagcaatatatttttttatcggaagaaagaattgggtttgaattgatttgatcaatgatttttcgtcaaaaacaaggccggatgtttttctgcttgatcagaaactttcaattttctttattttaagtaaataattgtgttttttttaaaaccaattcataaaatttacttagattttttgtaaaaaaaaaaattcattaagttttaatattcttaaaatattatacaaaatattttggcatttttattaattataaatcagaatgctcaaaattgctgttaagctagctgataagaccaatgaccaaaaatggactcttttaccttaatttttcgtttttctaattttaaaaaaataataaaacttaattttcgttttttcatttgtttctgccaactttgttcgttcattcattttgtcccttttacttaattcgtataatttttcagcgactttatccgccgaaagtgcgtattttttcccatttttcaaatcaaagatatgcacatgatgccaatctgtcacatgcacatattcttttgtccaaacgcttgcctaaaaatttaaatgcctttttaatattagtattagtgtggatgaagaatttttcgttacgacacttatgattgaattctcattattttaaagactgagtaatcgataagatttacgtgatcaattagagtgcttaattagtcttcttagtttatggcgatcaaaaaattggaaaccggatctcgatacttatattttttgggaattgaactttgagtccagaacaggaaatcggctgctttactgatcaaattcttccccgttattccggaaattgtgagtcctaaaatttttaaaattctcatagatggactgcaatntaattattaaaataaaaaaaataaaaagtgaaattattntaaaaaatgtaccncaaaaatgtacaaatgcacaggcgggagacgccatcgtgccacttctctgctcttattctcaatntcatattccaatttgaatttnccattctcatcggtgaagcaatcgtgtggcacatttaattccgatttgatcaatctttgcgcttcatccatttcaaagccttttacgtcccaaaaaagtttgtacttgccttcgggccaaactcggccatagaatgtcaattctttcgctgtattcaattaatagcgggattcaccatgccatttttatgtacaaaaaacccacaaaatgccggtttttttacggttaactccattcatttattttcagaaataaaaaatatatatttactcacaaaaattttatacataaatccactaaattataataattaaacatatttttgggtttttaatttttgaagagatattcgaattcataaaaagtttccagaattttatagataatttagaaaatatttttcatgaagaattttaagttataaactgaaataataaaaggagttacaaaaaaaaattgtctttttctacataaaaatgggtgaatccctttattataaatttttatttaaattataattattagaaattaataaataatttgaatttttttaaagccaactttctccactggcaacactgtctcttagctttagaaattccaagtccaaattttgttttaacacatcttgtacatcattagtggccaaatccacaatgtaatgattgtcccaatcgtcaacgcgtattttcttttcataatgtgttccttttcgctgaattgaaaaaaatatgtatgacaattttaaaataatggcaaaaattaaattatttgaaatttggatattttaaatttcttaaacatccaaccgttctcgcaattttcgaaaaaaccggaaacatgagaaaaaagaattattcagtcaaaaattaaaaaaaaatattgtatattattagagaatagatttttagtttctattttttcgcggatagtttttgatgatagagtcacgaaaaaaaattaccctcggttttcgaatttgaccaatttagcaatttttagttaaaatttattaataaaaaaaatttttttttaaatgtgtgaatttttgatttattccttgatatgaaatgaaaaattgcatttttttttctcttttgagtgccaaaactagaaatcatattctcgttgattcggcactggatttcaaaattcctaaaagtgattttggtctttttggcaactattctaataagtttcttcctcggttttaagtaattaaatatcggcattatgagtaattaaaacaaaaaagaaaatccatcaaaaatcatagaaaacttctaatttatttatggactaaccagggccccaaggggccctgtgaaagcgccacgggcgctttcaacaccggggccagccgggaacagttgaagctaagtattttaaaattagccgagtgagtacgtcaagcgtttgaataatagcaaaaanggtggtgtacttaaaact

SEQ ID NO: 6636 - DNA, 4078 bp, Heterodera glycines
tttcaaatttacaactataggaagtcgaagttggtcaaaatggatgtcagattcttgtgcagcgagcgatccctaaacccgaaaagcaattttcacatttttttattacaatttacaaagcataatggtctcccccccctctttggtttttgataaattcaaaaacggtaacttttaaagtagcgttagtttttttattttatgttgtaaaaaaaacactgctttgtcccttgtccttgatggggccgaacccgaagccaggccagaaaaattttgtattaaatttaagaattgcaacgggttgttacgggtggaaattttccggcgaatttgggccaaactgttgggcttcctgttgcgccgaacgaaacggacatagtaagaaaatttcgaagacagatagataacatacattattagttgtaagcgaaaaaataaaaattctggttttttaagaaggaatggaaaatttttgaaaattgttacgaatcggctaccccaataaattcgattcgttaaaaattttaaagaaacgatgaaaagcaattcggtagataattttgtcatcactctttctgacagacctactcaaattttacagaaaattttcccaacccactaggaattttttcgaaaattttcccaatttttagtgtattttatgggtgttaagatgagagatgaccatcaaggagtgatctgatttatgttggtccaaaagacttttgatcggcatcaaaagttatcttagaaggaattttttcagaattttatctcgacataaaatgtcggggcaatttttggctataattagtgcactaattgatgttttttcttttgacgtaaaaaagacctttttgccaccattcatttttgagaaaacgaattttacaaaaaatgatacaatatttttgagactaacagtaattaacatttttcataatttataaatttacaaaaatatcgaaaaaggaaaataaaattcttctaaaacaaaaaaatcttaaaaactcatttatctcatccgatttggagtgcaacagaacgacattcgcaaatccccgtatcgaatctggggcttaaccatagtttaaactagagccagggaatttctaatttgcatgtcccgctgcgggattggaattcaaaatagttgctgctggacggttttccacgagattcatcccgcaaaatcccgctttttccaaaaatgcaggattgcggactgggatcccgcaaaatcccgcgccggcctctagtttcaaatcttgaatggaaatcgaatttaaaaatatgtttttcatgattttcaggccctttaagccaagatttgcttacaaacctgaacatattcaaaatatttttgttttaaacaaaattattatttaatctggttcaaaccaattttaaatttccatacatttaattgtttatttgactatttaaggcgaacttgcaactgaccagggccattcaggtggtcaaaatatgttcagagtgtcctgcgatgaccgttcaggaattgacgaagctttgtgcatgtaataaattgtaatactgtatttactgaaataggttccccgtgggctttttttttcaatgcccctcaaaagggggctttatttgagggagggctcttctatttgaagaagtgtgcgggcgcactttgacgctatataacttttcttagaagcgcccaaatttacattcttggtatcattcgaaagccctaaatcctaaatgcctctattttactgcaaaatttcaaaaaaattttcttaagtttcaaaaaaattatggccagaagaatccaaaaaacctggttgtttgaacatttttgtcataactttcttgaaatttgatgaaactttttgtaatttgaaaagctattaggggcgcaccacttagagctttcgaatgatatcaagaatgtaaaatttggtcgcttctaagagaaattataaagcatcaaacggaaccgcactagaacggcccgcgtggtaaagattaattgatctattaatggatatgtgccaggattgatggatttggtcgagagaaaaaaaaaagaagttgaaaacaaagttacaacccataaaatcgggttctgctagtgcgaggacatttcttaaatttcggcaagggataatgaaaatgaaaaaataaaattcctaaaattgcttaaagtgttaaacaaatttaacattcttggtcatatatattgttctaaggattctttatctgaatatttaattttaaaaattttgaaaaaatttttaaaaagttatgaccagaaaactctgaaagttcgattttttgaatttaacaaattatacacataatttatttttttattttcaattattttttgttaaaatttttcattttaattatctcatagagcgcaacgcatttatgaaacgtcccaacatgaaccctattgatgatatgcttacactcacttattagtttaaaaaaaaaaaaaagcccttaaaatgctatactaattagagatcggaccggtcggtttttttcggtatttttcggtttcggtttttaaccgaaaaaaaccgaccgagaaatttttgagtttttcggtttttttcggtttcggttttttcggttttttaaccgaaaccgttcgaccgaaataattaaaaaaccgaaacaatcgaccgacttttttgacaaatcagttggccattttttttaacaaaattcattaaaaattcttaaaattttcctccggcggcgcctatcggcaccgccgacccccccaaaaagctatcttttcttaaaaaattagcccaaaatctcaaaatttggtatttttagacaaaatctgctaacaaatagcattaaaattacaaaaaaatttcccggcggcgcttatcagcaccgccggccctaatgttatggctagagctcacaattaaggcaccaaaaagcgcaaaatggcactgaaaaaaaggcacaaaaatcccgaaaaaggcatgaaaaaaggcatttaaattttttttattgatgatttttagggagcaaaacacgtaaaaactaaccaaaaaactaaattttgctgatttattgataattcaattttataatgtttttcaataaggaaatttttaaacctaaaattttttatcaagaaaaaaaatgaattttggcgttcaatttataaaggtatattctctgaatttttttagatcatttcttaggggtgtatttttccgatttttttgaatttttaatggaatttttcggaaaaaaacgccaaaaaaggcaccaaatcgctaaaactaatctttgtggtttttttagaatcaaggagcaaacacatgttttttggctgccttttctatcattttccaaacctttagtacaccattcaatagagtttcaatagctctacaattttattcagaggaatttttgctttttctattaatagaatagtttattgcttttttgaaaaaaaataaacaaatttaaaaaaaaaccgaaaccgaaacgatataccgaaaatttttcttcggtttttttcggttttttaaccgaaaccgttcgaccgagaattttttgagtttttcggtttttttcggtttcggtttttttttcggtttttaaccgaaaccgttcgaccgaccctcttgtccggtctctaatactaatgttaagaatttaatattttatttttaaagttctatccaagcgtgcgctcaatctcagcgccaaatactgcttgttgccaccggcggatgattagtgtaaaaattaactaattttccatcaaaaacaacaatttcatgcttttatttattaacaattgaataaattaatggcttctaatgctttggagacttaaaatttaatgtgtttttattttaatatttgaaaattcaattgactttaacaattacagtattttttattgcttgtgaattttgatttttgtacaaattttgagggtttacatttgtcaaatttttgaaaattattataattttttatttgttgttgttaaggctatttgggtagtttaccgagaaaatagaggcatcacttttttgtcacacct

SEQ ID NO: 6637 - DNA, 974 bp, Heterodera glycines
atgatatttaaagttcgaaactaatcttaatatattcaataagaaaagcgattaaaaattttttaaatttattaaattgtgatataaacagaaaaattctttgtaaaaacagaaaataatcaaaatataatttttattattgtaatgcttttgaagaaaaattttaaaatctcggcttaactgcaatttgaaaaaagccgcacgcatatagggtggggtgtccaatcctttttagccaaaccatttcaaataaaaatagttttgttttttaaaatgggggacatcatttgtattattttaaaaacatcaaatttttaaactaatgctcataattgaattaaaaaagactaatttaaatataaataaaacgaaattttgcaattgcattataaattgattaaaaaattgcaattttcgttaattttttaaagtataaaccataaaaatgtaaacaatatgattattgattatgatgaaagcaaaaaatgaagattatttatgataaaataataaaaaaataacttattatgatttttcagcagcccgttaaaaatttattatcatggaattgcagagaaactattggcttgcactcggtcgtgtatggttaattatgtaatttcaatcactttgaaatctgtcaaaagaggtgtcatagggggctacccgacttttggggatttgcaactttgggacccgactgttgatgatcttgacattaggtgacccagatatttatggtgatatcgactacttatgaatcgcgtctttaggggatggagagattagaagggttgcacggactgctacaggctgatcttaggctgaatcacaagaatgctacatcacccacatcccacaacaatgtgcgcgagtagaactgtcgcattgacttgggtatctgtgagaacaaatattgcagtttgactgtgtgccctcggcccaaggatttcgggtcgttgccatgagaagtg

SEQ ID NO: 6638 - DNA, 2472 bp, Heterodera glycines
catttggggacccgacacttagggaacccgacatttgggagactcgacatttggggatcccgacatttggggacccgacatttggggacccgacatttggggacccgacatttggggacccgacgcttagggaacccgacatttggggaactcgacatttggggacccgacacttagggaacccgacatttggggaactcgacatttggggatcccgacatttggggacccgacatttggggacccgacacttagggaacccgacatttggggaactcgacatttggggatcccgacatttggggacccgacatttggggacccgacatttggggacccgacatttggggacacgacacttagggaacccgacatttggggaactcgacatttggggatcccgacatttggggaactcgacatttggggatcccgacatttggggacccgacacttagggaacccgacatttggggatcccgacatttggggaactcgacatttggggatcccgacatttggggacccgacacttagggaacccgacatttggggaactcgacatttggggacccgacttttggggacccgacacttagggattttattaaaacatttaaaaatttatctcaaattagacaaatttacgactgctttagccagagttaactccattgcaagaaaaataaaataatattttctaaataactctgtttccgaactctaagaaaccgaaaagatgacctcagcattttgttgctgtacgcaattagactgtaaagttctttaactttttgaatgcccttgatgaatttctgttcccgttggcccttgggaaaggcgttttaaataaaattggaaagggtgtactgtacatactaaaatgtattgtggtttgtctattgtgttgtggttagtatgggctcaaaattctgcgcctcctcgcggtgagtccggaaacagagttaatttttaaaatattaattaattttttttgcaatggaattaactctggctaaagcagacgtaattttgtcaaaattttgtggcttagaattaaatttttaaatttttttttgttttattgaaatccccaaatgtcgggtccctaaatgtcgggttgccaaatgtccgtggttttcttaagtgtcttttgctcaaatgtcgttcggtccccaaatgtcgggtccccaaatgtcgggatccccaaatgtcggatccccaaaagtcgggtccccaaatgtcgggatccctaagtgtcggatccccaaaagtcgggtccccaaatgtcgggatccccaaatgtcgggtccccaaatgtcgggatccccaaatgtcgggtccccaagttgcaaatccccaaaagtcgcaccacggtcatagggatgtcaatttttatgtatatgcatattttaaaaatggcctcttctattaaagtcgcccttttgacctcgaaggaccgaaaaattttttcaaataccattttttggtattttctaataaaaaatgtctttttgaaaatgtatccaaaagtaagtccaaaatggaaaatttttctgttttttttgagtttttttctaaattaataagtttacttttatttatattcatactatatttagctattttcgggattttctagctgcttttaggggttactattttgagttttttggatgcagttttttatagatttaatccgaaaatggaccatttgaagccctttttaaaagcaaacaaaaaaattagtttgtccccgactgaaagcactgctgtagaaatttggaggatttttgcctgattttggataattttttggattttgatataattttaattaaaattaatcatttgggctcgcggtaccaatagacgccgccgggaaaattttgaaagttaattgtgatttgctaacagaccttcactaagaatttttaattttgagtcattttgttacatgaacgtgccaattcctaacaaattgcaaaagtttttcttatttcgaaaaattatgacaatttgctaccggccctacacatccctgctgtgtagtagtcagtccggtactgaaatgactagcccaaattttgtttttgcctttcccccgaggggcaatctgttccacatatttttgccccattcgcttttctcttatcattccatccaaattgcccaatttcggattttcttatctccttccacatttgtgaccagctgcttctctcatctcccgtcgtcgttctccgattggcgatgatcacaagacacacccaattcatcacataacataaatcaacaacttttttgaaacgagaataaataatatcgctttatcataaaagccaaaacgaaaggaacgctttttaagcaaccaagaagaaaaatattaattagggaattgtagtatttgtaatatttgtcatttttaatatttaaataatatattttaagtgaattaaatgattttgaaaa

SEQ ID NO: 6639 - DNA, 1453 bp, Heterodera glycines
tcatttaggccaaaaagcttcattataattatgttgccatacaataattaaatttggacattcttatttttacctttttcccggaaacgcataatcctcaaaaactccaaatccataaaaagcatattttaaaaatttatcctcctcgatcacccccaaaaatcacaaaatcaggctaaattctcacattttgcttgtcttacgtaaaatattctttttttttcgtgacaatattttaatttaaatcttgaagatatttaaattaattgcgtttgaatataagatttttgtgatttttttttgtgcctaaaaatgccatccctaataatgaaaatttaagtctcttaactagggctccaatttttaggcaaaaggctatttttttcctgagctccccgtggcctaaaacgcacgaaaaacatgtttttttgggctgttgttaagctacttttcgagttattagtgcctattttctaggcttttatttttagcgcctaaaaagcctaaaaaattttgaaagagcctatttttgcctattttggcgttttgcctaaaatttgttaacaaaaatgcaataaaaagaaaaaaaatacacccctaagaatcgatttttttgaattttaaaaatacatccctaagcagagattcaaaaatttctgaaaataaatcccctaagaaattaaaattttctcaaaaatcgtctttaaaaatttttttggacaattttttgaatttaaaaaataatgtaactcaatactgatttgacttatttttttaccatttgaataaaattttttcattttacacccctaaatttgagactttttagagcctattttccattttttggagcctattttgggggttttctagagcctaaagcctacctattttggcggtttttagtgcctataaattggagccctactgatgacgatggaataaatttttttaattaaaaaaacagaaattttaatggcttattttcatttgtcgtctctgttagagtttatcggaatttcgacaatgaatattttgcgaaatggtggggatcgtatgaaactgctaaacatgcgatcaaaaggacaaatggccgaggaattgaagtggagaagaggcgaagtatggaaacattgcgtggaccaaacattgaccaaaatcaaagaacatataaatatggtggaaaataatatcctatataataaatagacataaattaattaaggacactgagtaccaaaaattggccaaggagaaattccatttgaatttcccaggttgggacgcactctttgccaagagccgctttttcttcatcaattcgctgcccgatattgattttgcccagtccaaaatttttaagggcgatcagcgggtcaaatttattggcggcttaaattttggacgtccgtcggacattgacgaaaaaaagatggaaaatgtaaaataaaaa

SEQ ID NO: 6640 - DNA, 1330 bp, Heterodera glycines
cagctgagtttggcactccaattccggcacttttcagcctgaaaaagggcaagcgtgcctctaattctatttttccaacccatttcgaatctttttacatcgattctgaccgtttttaagcatttttgagtttggggactatgaccaatatttatcggcggtgttgttggcatgaatgctcaaaaacacagaatgcgaacaaattaaagcttttaaacgttttaacaatttgtgataattctgatttaaattcattgaacttaatctttgaaatgaattaacaaaaattcaacatttgcttgatcacaattgcgatcatgctcatcaactttgggggttatattcgaattcttgtacgatttcatcagttgtcttctcagcagaagaagttgaaattcaataaagtgaggattggatgagttttcggcgtgtgccaacttaaataatttttacaaattttgtttgtccgacccagtttttgcgaggtcatattttttcatgacagcctatttctttttttaccaaatatcgcccctcagttgtttcacagttttgtcattgaatcggggatgtcccaattccgcgcactcttcggcaacttcgcgtcaacaatactcaacattgagaaaatcggaccccattacagtgtgaaaaaagatttcgtgtcttttctcgacagccttaactcaaacggcttagacaacaaacacatctcattttaaacaactctttacgaaatcatttatcactctttagccgcacatttttctaagttatcccaaaatttgccaatttttgacaaacatgtgtttattatttatttccataaaaattcagaacaagcgacaagcctctgcaaatttgttaattctaattggacgacaattcgacgaacttgaacgacaaacgatttatttttttgtcgtgacaacaaattaggtaagagacaaccgaaaaaattgtcgttcgtaattctgaaaggcaccatcagcagtccctttctgccagttcttttccaggtaaacttaagaagccataacttttttctcaagtgatcaacacttttttttgagaattgttaagcaagtctaatcgattaaacacttataattgtttcaatatgaaaacacaagtcagaatattcctgcaaatttatttataaaatttttatagctcaatattacttataacagtgctaaattcggaaattaggaacttcgattttttgttcgagttcgggtccggaattggccgaatggataattcgtgatcagtgagacctcaaaaccccaggaattgtttttatatattaaaatttccactgacgcat

SEQ ID NO: 6641 - DNA, 1426 bp, Heterodera glycines
  unsure (1)..(1426): unsure at all n locations
cccacggtcacaattcacggggtcaattcacggtttttcgtgaaaaatttacactggataaaattgaaaatttacgaattacatattgttttcatagagaaatttggtcattttttgggcaaagttgctaagaaacagagcaaaattttcaataatttccccggcggcgcctatcctatcggcaccgccggctccctcccctattcctgaaacttttttgaacaaagccaactacctatattgtgcgaaaaacaaataaaaagcaaggtttcaaggatgatcccatttaaataaaaactcattaaatttcttttaaaaaatcgctcgaaataaagttaatgtctcacaaaagcattttaaaaaggttggaatcgatttagaacgcaaaatgatgagaaaaatgcaaattataggcgcgcgtgccaatgcacacttcagtacccgattttttttactgaaaaatgacaagcctatagtaatttacaattttttcatcgtttgccttttataaatcgattaaaagtgcaaaattggttcattttacgacaaaatctgttaacaaattgcaccaattttagatttttctcccggcgaggctccaaaagtttattcgtttcataaaaaatggttcaaattcgcaaatttggccttgtttggataaaatttgtgcacaaattgaactcaaattttaaaaatttttgcagcggcgtctatcggcgcccctggaccccttttcccaaattttttttttggaaaatcataccgcaaaaagacggtatagaaatcaaaaaaattggccgacagagaaattaaaatcaaaattcaacggcatcttcattggaggcaattttctttttaataattttgggaaattttcattcacaaacttttttcttttttgcagtttaaattttaaaatatttaaggtagcacttccggacttaccagtagaagttaccaacacattgttaagcagcgttaaaaaaaagttgatgaacataaaaagtcataaatatacattttaccctgctggccaatatgaaattattgtggcacttggaccatatggtaagtttttggggaaaggcgtttaggaaaaaaatccatgcattttgccaacaagtaaatgtacaaaatattaaaataggtgctagcagctgcaaactgaaaagtttgaatgaagtttcaaaaaactcacaaaaatctatttttgggcaggaaccttttctaaaaaccttacaataacagattgattgattaaggacctacttttatgattatttttcagacttctgggccagtattcagcttgagaacaactatgttctaaagaaattgaaatattttaaaacagtggatttttaagcaggccgtctaaaattanagaaactttttttacatttatttttttgaaaaaagcatctaa

SEQ ID NO: 6642 - DNA, 2896 bp, Heterodera glycines
ttttccctgctttaatagtaggaaaattttttttacatattttatgaattacagatattgcgattgagaaataattttttttaaatgtaccctaaaaattggtttttcaaaaaaaagatataccaaaattaatttttacaatagaaatacatgaaaaccattaaaaagccataaattcatttcaacaaattttaatttagatggttcaaatcgtttcgcatttttcactgataaaaagggtaatctctattggaatttcaagaaacatattcacaccaataaattaatcagaaaccgatatataaaccataatttacatgaaaaaattaccattctggtggagaaagggtccgataagcgaattatgagtgaattcttgaattatgccgatatgacaaagactatggaagacaccaagggccaattgtgcaattctaagagcattaattttaacaaactagcggtatgcttttaaatttaatatgtttgttaatatttgcattaaaagtaataattatttgaaaaaaaactaaattttataaactcattaattaaaaaaagtttctttaatgattattttacaattaattatcaaatgttatcaggttgcaccttatgacactttttcaccagaaaaaatgaacaaaaaattcggagaagtcgaacagaaacttaataatgtgcatgagcaattaattctcaagcaagcggatattgaggaattaataaaccgagaaaaaagtccattgaagttagaaggacaggtaataacaaacaaacattttgtaaaataaaaataaaagtaattaaagaatgaacagcaatcaattgagcagtcggccgtagaaactcagattcgcaatgagcaaactgcagaaccaaagtcatttggccttccggtgcttgttgatgtaaaagatttaaccccgacccatctaattgaacctcccatcgaccaaatcgcggcatctcctaatcacaaagagccgaaattaaagccaagatatcataaagtcataggagacggcgattgcttctacaggtcgttgagcttttattttatttttttgaaagaataaaattttacagagcaatatgctattcgatttttcaagttgatgaaatcgaaaactctgatgctttacgagtggcagcaagcagagcgattgaaaaaattgtgaataacaaagagatattcccgagaaaactgtatgaaactcatgcggaattcatcaaggagttagaattggcacttttggagaggccgtcaactaaggactacaaccaaagtcttagtgcctatgccaaacacatcgcaaaaccggcacgaaatggaaaaggccaatgggcccagcttgaagatgcgcgggttgcttctatccttttaaagcgcaccgttgtaattcttcatccaaatgaggaaaaggagttgcttgaagaacaaaggccaaaatatgacgatccatcgataaagaaacgcattaatgtttatttcccagacggggacacaatggttacgatttatttttaagttgagcgaattagtgaaaaattgataatttagggaaaaaatggcatgattgatgctggagaattgagcaattttacaataaaatgtgaatggtgccaagacaatcaaatgaaatgtccaagatgccaggataaggttttggaaaaagcagtagagaatccggtagtaatttggtttaatggactagaccattatgactcaattgttttcgtaagttattaatatcatttaattattattttttttcttattgtatggtcaggacggggttatgaagtttcaaaaaactatcaaaataaaaattttgcttataactttttagaaaaggaaaactaaattttaattcttgatagttaccgattgcgcttaatgttctcgggcagctgaaaaaattaatgtacatatttactttttataatttgaacatacataccacagcactgcttatttttttattttctgttataggatccaagaatgccaaatgcttcagatggtgccgaatacgtaaaagcatatattgccaaatgcacaatcatacctaaaggagagtataaaattatatttgcgatcggccactatggtatgtgatattggaattaggggagatttaaagcattagaaaggaaatacaatggtataatgtgacagacactaccaatccatagtatttgatcagaaaataaaaagtaatttaataaccagtcagagaaagtcaattaaatcatttatccttattagggtattataaaaaaatattaaaaacataaaaaagtggagtccgactgcgccaatatgtgccgccgggtgaaaacttgaagattcgggtctgatttgactatttttgtggattttaggcagaaaattaaaggaatttaagaaagagatttatgtatgacccggcatcattttaatgaaagaaaaatcagcatttcagcaaagaaagttagctttgacccccttcaaaagcagcataatcctgacttgagaatcctgggttctaattgatttatgaaaaatgaattgtgtatttgttgtttaagacggcccaaaacagtatactcttttgactgacaaagaaggcaatctcgaatgtaatttctacaaaaacatacacaacaataattttttaaaagaaaattacataagcactaaatcggcagaaaaaataacgattttggcggagaagggacccgataaacgtattataagcgaatttgttaattacgctgaaatgaagaaaacgatggatgaaactaacggacaattatgcaattcaactttcatcaattttgacgcacttacggtatgcttgaatcacggacggaaagtgacttctttgtgaaagtagggatctgtgtgagt

SEQ ID NO: 6643 - DNA, 1750 bp, Heterodera glycines
gctaaaaatgcggaaaatagtaaaaaacttttaaatttaggatgtaaaatcgtaaaattttattcaagaagtaacaaaattaagccaaatgaatattattgaaataaataatttaaaatctaaattttttgtcatgaaaataaatgaataaattttggaggcgaattttcgataaaatttttcatttattatgagggtattttcagaaatttttggagtcgattcttagggggtgaatttttcgtttttattgcatttttgttaataatttagggcaaaacgccgaaataggtgaaaatagtttttttttaattttttacgtttttaggtgctaaaaataaaaacctagaaataaatgctaatactcgaaaagtagcttaacaacaaccgaaaaaaaacatgtttttcgtgcgtttcagatcatagtgagctcaggaaaaaaataggtaaaaactaaaaatcgtagccctactcataatattttaccaaatacgaatctgtttgccccctgcataacacttccattttttattctcacaggaagcattgccggacctaccaccaaaactgacaaaatccgcataaggacagaaagaaaagctgatggggaaacagcagaaattttatttgatgagatgaagcagacttctatagtattttttattcattaactaaaacacctctctatatgttttatttataatgccattggtttattctaatttatgcaactgaaaaagaagttaggtaaacgaaattatggtgattatctgaaccatatcatatgacccagaggcaaaaacccacaaaaaatcttgtttaaaataccttccaatttgaaagttttttgcttttgcgctttagcgaaccggtgtatcgacatttgctcggcatcacttgcgacgccctacaaaacccatttgcaccgctcattcagattttaaaataatcaaaaaataaataaataattcgacgtgtctatcgttgtgtttagtttttttgcatttcttttaatttcttttatgttgctgcacagtagttttgcataaaattcgttgaaaaattggtaataatatttttttctgagcggcccaaaagtccattattgcttggcggcgcaagtgtcgtggcgcaaatgtccgcagcgcaaatttcgcgtcgcgagtgtcgcggcgcaaaaatcgcaacacggctcaaaaccccgaagaacattatatgaaaccattaaaataattgtaacttgaaacattacataatttccggtttaggttttaattatgcgctaaaagccagcgcactttccactacggcggccagtaggtgcgcgagactacgaaagaagtccgcgcgtgatttgagtggggcacattatatgtaatatatttctgctgcagcagcaggtgaatatttggtccaccgccgtaaaacacgctttttcttcgccatcgctttggatgtcgttgacatggcgaatttgtccgcgacaggagcgagcattggaaagacactttttggggcaaaatggaacaaatttggtgataatttttgttggttgatggcgttgtgtatgatcaccgctaattgataagcgggtggagagagcggcggccggcggagtatttaagcgcaacggcgagagcctggcgaggacgaaaaaggttaaagaacacttggagcatcgaatgattatcaagaagtaaaaaaaaagattgcttttttagcattttctgttccaatgaaaaattcatta

SEQ ID NO: 6644 - DNA, 2153 bp, Heterodera glycines
ccaaatcagaaccattcttataaataataacatagtaattttctaagatttgggccttccaaatcagaacatttattagaaataagacatatagaatataaataggttgcaagaattattattaaattagtaattgttaaataataaactattaaaataacaattgttaacttaaataaattgttgaaatatttttggggtcatttaattctgcgccgcaaatgtccttttggctgggcgccgcatgtgtctgcgccgcaagtgtcgctttgactgggcgccgcaagtgtctgcgccgcaaatgtcggccaatcactaaatcgactatgctctacatgatagaagtggctaaaaattgatttggacactcacagttcgcgatgtttgttctcttgttagatgatacgacccattttttaattgagtttgtgataaaggaaaatgtcgaatattttaggacaaatttgtcatttgtttgtctatgtcattgtcgttcgtgattgtgattggcgcctctcggagtcttggcataattagccacaaaatattcgttaataaaaaatttaatgatcgcctgataggtaattatggttacactcggagagtataagtttttaatggttattatacttttaaacaagatggtctgaaaaccaccaaaataataataaaaccggtcataaatcccctccgtccaggaacccttttttacatgtctgtggaaaaaattttaagcccaaatcagtttatagctttattaggagttaaaactcaaaaagatatgagatatggctccataaaattctaccataaaaatgtgtcccagtcaaaataagagcttgcgacaaataacagaatcagctgtcctattattatttattacgaacctcattaagagacagaagatatacagctgtgaggagaatcattgaggcaaatgtggaacaggtaagccattagtaccacttttttcttactctggtcaatacccatattcttggtaccaagcgaaagacaaaagtctcgagattttataaatgcaagaaaaaagcaaatgctggcattaaaaaagaaattacaatgaaaaaatacgaaattcaacttttccgagtataattttttgtctattgcctttagctaaaaataaagttatacaaaagcttctatagaccttaagcttttgttcaatatcaagaatataggtattgaccaagtaagaaaaaagttatggcctaagaaactggcatgatcattcatgggacgcataaaaccgactagaaccaaaaaacccacaaaattggcctatttagctcaaaatctgttagcaaatttggcaaaaatcctcaaatttctccggcggcgcctgttggtcaccaataaaattaatttttttttctttttcttttaaaagcgcttccaaaatggctcattaaatttgtataaaaaagctgcattcaaaaaaactataaatttctcatcatttttacacattggccatatattttccaatttcgttactctctttttccatttcttttccttccgttcccttaaaaatctctttgtctatcttttctctggccattcatctgccgactccgtggcgcaatggtagcgcgtctgactccagatcagaaggttgcgtgttcaagtcacgtcggggtcaatagctttttaatttttttttttgttgctttgtttttatttctttttaaattgcgccaaataaaagtatttacattaaaataagaattgggacataaaaaaaactttttaatattttttattgaatgaaaagacgataaatgcatttttaatttgtaaaaatttttgaaattttttcctggaaaagccaaacattttaatgaatttctcgacaaattgttgacttctcggcgtcctgtttgtattttagatgtcgaaaattggaaaaaaatcgctaaagtctactttacgaatgaatatgtttagcgaaatgacaaaaaaaaattgtgtatttttatcgacggttttctttccgtttttctatctcgggttgaacgtgtgcgtgtacagctgcagcgcctcccattcggactaaaagtgtaagggagaaaaattcggggaaaacaggattaaatttcaagatttcaataaaaatgaaataataaaaa

SEQ ID NO: 6645 - DNA, 3169 bp, Heterodera glycines
atgtcataaaaagagggaggaggggattaagagtgacaacattcggcaagcggattttacgtcgacaaggacaacaaacagcacatgaaaatgaaatgggcacggtacaaaatgatgccgtcaaatggacaatggtgaaggttgtgccaataagggcggcacggaattccgatttcagacatatttggggtcggaatcagatttttctaaatttttgggggctcgaaatgccatccctggtgccaatggatgaccggggccgcccgtctccggcggcgggtgccaaagaattatgtgccaccaatggacggtcagtcggatggacgaacccgcgtggtgacgaagccggaaaaggtccagttgatccaaccgccgatgaccagcatgggcaccatgttcagcatgttgcccttgaccatctccgtcatcgtggacgggtccagcatcttttaggaaaatgaagggataaattgaaaaaaactgcacaaaaatggtagtaattcaatggcgcggcgcctctgtcggcggcacctccccttcctttagtgcccgattttcaaactcggcaagtgcccgatttttctgacttttagaggaatggcacccctttggatcggagaaaaaaattttttaaaaattctaaaaattcttttctgttttgcccccgcccccgggctaaaccaactgtaccgggttcggctgcgtgttctgtttgtcctgccgcttgaccagctggccatgctgctcgtcacacagcagccagcgccgctgggcaaacgaatcggcgggcaaaaagcgcccattctcacgcaacagacgcgccttcagcagccaatggcttaacgaacggaaagggctggtagaaatgaaaagcgtaataatttctcaaaaaatattcatttgtaaaacattttttaaacaagaaaattcaggaaaagaatttttgaaaattttttctggcaatttttcaaaaaaaaaaaaatgcttaaaaattttttcttatggacaaaaaaacgcacctgtcccgcactgactgcaggtcagcactcttcttggtgaccagcaacaggaacacgtagtgccggacaatgccaaccaaaaaagtgattaactaaaaggaggggggggggggggagaattttgggatggaaaaacagtgcaaaattctgatcgcggagtgatcagaaactaatttgggcacgatttgtgggaaatgagactggtagaaaattttttaatgtcattttcgagccccctgacacggagcgtgcttagagaacccggatttgataaaaaaaaaacggcataaaacggccggcatttcggggcacgggcgctgaaaagtgcaaacggctccaaaaggaaggccccaaagtggtggcccgtcgacgacaaaacaaaacaaactgactgaccacaatgggcacgaacacccatgtgcggatggccgggtccagcaacaggtcggtcatgcgccattcgcccggcggaagcattttataaaaatagaaaaaatgctaaataaatttaaaaaataaattaaatagattaatttaaaaaaatataaatagattaaatttttaaaaatgtacaatttgattttgttgggacaaatcaaaatcgaattccaaatgaacaataaaatgtggtaaaatgtattattgttattatgcgaaatgcaaacggtaaaacaaaaacaaagtgataataaaagggcaataaattttttcaatttgaaaatttcacttttttttttaattttagacggcaatttcggcaaaatccaattttaagtagggaccgacgggccaatcgatgcgaatattggtaaattgggaaagcaatcacacctaattgagtaatttaggggtagagccgggcacacaattcgcttgtgatttgacgggcgggaaaatggcaaaattacaaaaaaaattttgggaaattttcgggaaatcgaacggatggacactcggaaatgacacggaaaacattttttcgtaagaatgtggcaccatttcatcattatcatcgtttcgcggcacatcgtttcggcatgatcatgcgtaatagttgcaacagcggcgccaccgggcggacaaattggtggcgtttgggtagccgagacggaaggcggcgtccgccgtcgacttgggcccgccgcccgtgcccgacgcgtccaagtggcccagctcatcgtagtgacgcttcaggtggtgggccaactcgtggaaaactgtaatttttataatttttcaaattaaaagtttttcaaaaaaaaattagaaaaattttttgtacgaattttcaaggaaaaaattgtacagcgatattatcaaaatttatggtgaattactgttttttctaaaaacagaaaaaaaaataaaccactgacaaatgagtgccgaaatgccatttggccaattaattgcccaatctctccgccaagaaaaattgcaaccgaaactcgggcgacaaaatgaatgccatagaaaaagcttgaccgaccacatttttcggtgcctatgccagtccgaccttatttgttagccccggcactccaaaatcgcttgcttttaaatgaccatttttggaaattttgagaggggggggggtgggaattttctggaaaatccgcaaattttaatgcaattttactccctctcccggccctttaaatttgtcgctttgctttaccctttcgcttacttgtgtcaatgttgacgttggtcttggaggacacctccagctgggcaagcatggcatgcgcccggcacaactgttccgcctccaactcgtccacccgccgtcggcatcggccagtaaccgcaccaccaccaccacccgccgctgctggtggtgttgaaccaccaccaccgttgtcctcttcgccgtcttcgtcatttttgccatggttgacgtcaacaccatcttcttcgaccaggtcagccttggtccctacaaaaaaattttttttgtaagttgttaagtttaagcggtttttgaagtttgaatgtgaatttttggaaaactcttcgattagctcaaccaattggactgttttaagttaacagatttgttttttttctaaattggtattaaaaaatcttttttagaaatagtaaaaaataaataaattttttggtttttttatttgaatttttttttt

SEQ ID NO: 6646 - DNA, 3163 bp, Heterodera glycines
cgcactcacatagctcaggatgatgccgttggcggaccggtagtaggactgggtgatggtgcggaaccgctcctgacccccggtgtccctgaaagacgacattttagtggccatgcggtcggagagtgatgggaaaaacggatttaaaaatgagggcttggccccctctgccctcagtttcaaaaaaaaaaattttttttatcaaaaaccgaaccataaaaattctttaaaaattttcggtttgatttcctctgactatgccctctaaacagccttaaaatttaattggtaaacattttttgattgcaattcccccggtccccgaaaaaccccgaaaattggcccaccaaatttgcaatttgatccgtttgccctccaccatcagcgttttcatggtgaaatcgacgccaattgtggtgccctgcttctcaatgtacgtgccgtttttgaagcgttggaccacgctgaaaatgggaaagggaaattaaatttttaattttcaaacttttggatttgtcccggtaaattttcgtgtcattgtttaggggttgccatgccattgcttttctcagtgccttcccatacagacaattatgttaattaattttaaaggtgatggacatttacgcttttttaccatgttttgccgacgcccatgtcgccgattaggaccacctgacaaaaaaattttttcaattttttttaaattcgagaggggctgctaggggggggggggtggaaacaacgaaggaaaatgaagtttactcaccttgaacaggtagtcgaacgagtcgtcagggtccatcggatgggtttcgtcgtcgtacacttttgacggcccaattttggcggtggcacttcagcagcagaacgacgctaaacaattgggaccattttaatgaccctaattaaacaactaattagtctttgatgaagcggccaattggcgaacacaaaaaggttttaattccttaaccggacaagaatcttggaattacccgaactttaacccacggagaattacggaatttaaagatttgggtgcggacgaaagcgattctttgaccgatattttacaaattatgaaaacaatacattttgggattggtaattaaattttcaaattaattaattactcctatgaataaatcaattaattaattaattgccgacgaaagccccttgaggggacgaaaagcaacaaattacattggatgaatggcattattaatgccaaatatacgctaattgtaagtgtctgtcccctcatttggcaaacgacgcaacaaatggccatcgttttgcgccatttccatcttttgtgtccctcggcgcaattggacattttcccccggtggcattcgtaaaaaatataaataataatatttccgttttctcaccagcagcagaggaaaaatgaggaggtgggggaagggagagggaaggcatttttgacaatttgaattggcaccaccgctcaatttttaatgcatgagagagagagagagagggtgagagagaatgggtaaagagagaggggagagagagagagagaggggggagaaaaaagagagaaaaagatagagatgagaaatagaggaaaaaagaaaggagaaaacattttatggctcaaaccaaaaaaaaaatttgaaaaaattccaatgaaaaacattttctatgggtttaatcgtcgccaaattggcaaacgttcccaaaagtttcaacaaaatgaccgaacatttgatggaaaaaaacgtataaatttttctaaattgccaaaaaatcacaggtttttcaattatattatttccccactttcacaacgcaccaccagcagacagcagcagcaacagcagcgcagagcgtacgacaacggcgacagatgagcaaaaagagagagagagaaaaaaaaagcttaatggaaaataaaactgtgaaaacatttacaaaataaaaaatggtaaatgattgcaataaaacgggttttaaaaacccaaaaaataaaaaacaattagaaaatttgatttttaatttgctataaatgattttgaaaatgggaacaatgaaaaccaaacaaaacaaaaacgaacataaattaaattaaataaaaaggcatatgtaagaaacagaacaaaaaaacaacagaaaccatcgatgagtgacaaattttccaaaatgatcggtttgatcaatggcattttaggtaaattattgattgatcagtcggtccacgcgcgggccgcgcgcaacgcgtcccacgcgacgcgcgcgtagcgtttcgcctccgcgccgacgtccgccgcgccggtgatgccccggccgaccaccacaatgtcgcacgcgtcacgcgccaccgcttccgcgggcgtacgccagcgttggccgagtccgtcgcccggggcgccgctgagattgacgcctttggtggaggggggggggggaattaaattaacaaaataaaacttattttaaaaaaatgattgactggaattttaaatttgaaaaaaaattttttttttttaattaaattggattttttctgagttttcttttttagttactattaaaatttaacattttgagattagcctggacctggattccatgttggacctagactttctggacaaaaatccaaggcgaatccaagtccaggttgccaaaaaatggcatggacctttacctagaaaaaaactcaggcctggatcgaggccaagtggagttctagctatcgtttttctaaaaaaaattgggtccttattttttagttaatttgatgcatttggttgccatttacccaaaaagggatgtgcaaatgtaagataccgtatatccggtatttgaaggcccccccttggtagaaggcccccctctaatttaaggcccctttttgtaggggttgaacaatagaaggcccccctctggtagaaggccccctccaattaaaggcccctttttggaggggttgaaaatagaaggcccccctctaattaaaggcccctaaaaaagacttcatggggcgatcaattttattaaaaaagaaaataaatttgatcaaaatattattcattagcaacgtcgacagagacatcgctttcatcttgtcctaaatcaatttgttcaagtgctttcacaacattttcttcattgcgacgttggctca

SEQ ID NO: 6647 - DNA, 1296 bp, Heterodera glycines
gcattccaatcgccggaactcaattctccggcgttccaattacttagactcaaactcaacaatccttcggcattccattcactgggacttatcgcaccaattaaccagccgattccatgcaaataaatgactgcccgtcacacggatgaccatggcattgatgagttgaacgtattcaactagcttgttgagatggactgatcactgatcagcggactgatggatgaggacactctttttaaggggggagatgttgagaagggtatgatttatcccgtttattttattttcctttctatctctgcctcccactctctctctctctctgttgcccgtccataaatacccacgtcctttgaccatccgttcattccctcatttatttgttgtttatgtcccttctccctcaatcgttattcgcccccatttctcttcttttatttaattgtttcttcgcctaaattggaataaagtatttattctttggtcaagtgcaaggcacaacagttatctacatttttctactaaatttttaataagggtcgtagaatccgaatatggccttaaatttgtcctatcttttgaaccagagcttgtactgcttcaacttcgtgcatgaagttctagctgtacaggctcattgagaacccagagctcaaatctaaggccatattcggactcagtgtgcatgaattaaccaaaattatgtaaattcagtgttttcaatggcattgtcgctaatttttggatttccttttttaattttttaaagtattgcttcatcttttttaatttgtcatcgttggaataattattttgtgcttaataataaaaatttaaaataatacaaaacaaattctcttacttttattataatttggcagcaattcttttttccatctcgtaaatgtcttttcattaatgccaaattccgtcacaaattctttctcttcgcctaggcaatgtaaatttttaaattcaccaaattgttctatgaattcgcgcattttcatgttataaaaattcgtttctttatttttatttaaatttaattcttttaccgggaaccgcccagttcggcgccgaccgtttcggcgccgttgctaacaatttctctcattatcaacctaattaaatatttttgggtatcttctgagagcttttaaggttctctattagcctacaccccaaatgattggctttttgtaaattttaaattaatatattttttggtagatttttgttctatttattgtattttctcatatgcgtgtctagtgggttgtacttttgcgg

SEQ ID NO: 6648 - DNA, 2563 bp, Heterodera glycines
tatcgtatgatacgatgattattgcatttggttgataaagaaacaagttataggtcgaaactcggcccacgcgaagacgacgccgacgcgcacttttgtttatgttattcatttttgcgttggatcagttccccttcaagtagttattttttcttctaattttcaaaattattcttttttcggtgagaattcaatcacaattttaacaattaaaattataaaatattgttatttttgggctaaatttgttcacaaagtgcacaaaaaagttaaattcccggcggcgcctatcagcaccgcctgcacccaaaattcctattttctttttaaaaattggctcaaaaccgcaaaaattttggacatttttggataaaatctgttaaaaaattgcactcaaatttaaaaaattttcccggtggcgcctatcggcaccgtcagacccctgttcccgaaaagttttttgaaaaaagagcaccacaaaaaaatggtgtaaaaaagtcaatcatatgaaaatgaagaatggatggtagcctaaaaaaggaaagaagcaaaaaaattgtgagaaaaaacctcaaaagattgatttttaatcgaattataagtttgtaagaaaattttttggaaaagtctcggtctcgagtctcgactcgagagaagtctcgggttttttgggtctcggtctcggtatcaagtctcgggatcaagtctcggaatcggtctcgagtctcggggtcaagtctcggtctcgagtctcgggaaattttcggtctcgaacatcactagtattttgtgcctatttcaccctttacgaagaattttccaaaattaatctattttgggctttttgcacatattatatttcgtgattataattttttttacatatatttggaatttagttgaattttttcataaaatatgtgcaaaagttgctttctggtgctgatttgtccagcgcttagtatccccattttgttaacgaatccgaatttccaattaaaaatacacccgcactaaaggattaaccttgtgccatgaaggttaattaactaatgaaatgaaaaaaataaaataaaaatttcaataattagttaaattattttctgtcaaaaaattatgactccgatttggataaatgcgtattgagtgagcacccatcgatgcgaaaaaatgcggcagaaatttaaaaaaaaattaattaggtgaaaattttttaaatttgttccaatttaattgggtcatacacatgcgcgcacctgcaatgaaaacattcatggagctaaatttaattccaacacctagaaactggaaagaaattttttagggagattttattgtatttttgcttgtgcctattcgtaaaaaatccatggaaaatgcttcattgaatcagaatttcttgaaaaactagaacggtagtatgataatttttcaaattttaagcgtgacttataaagaaactaaaaaatttttttattttatatgattatggtaatttttcaaactttaatacttcagggctttattttaaaaatattgaaaaatgattaattttccgggaagcctaaaccaaagttcttttcaagtacgtaatatgctttatttctaagcaaattaatgaaattttttaaaatttatgtaaaatgcccaaagactttctcacagttaattataatagaaaaacatatgaatgtataaacaatttactttacccattttgtacgctataaaaatcacattttcgaaatataagcaaatttctttttccatctgatcaatgttcgtgcggtaatttgaataaattttttaaaataattagtggataataaaaaagatgaatgtgaaatgaattcacaatatgaaaaattttaggatttttttctattttagcaactacaatccaattattataatcgacatatttcataaattacagagttgaaattaatgcaaatttctttttccatctgcgcaaagtttcacttccaattcccaatttcccagcaattattacgtcgctaatttttggatttcgttctttaagtttaaaatattgcttcatctttctcaacttgtccttattggaatagttcttttgtactataagtacaaaatttaattaattttctaaaaatttcacttacttttccgataatttggcgccaattcttttttccattttaaaaatgtgtctttggaaatgcccaattccttcgcaaattctttctgtttgcgttggccatataaacttttaaattcatcaaatcgttcaatgaattcattctttttcccctcataaaaactctttttcttcgttttatttagatttaattcttttttccatttgtatattttttggcgattttggcctaataattttgcaattttacattcaattttgttattgtttttccattcatattttcctttttgcttcaacctttctttaattgcttcaaatttttgaattgtttctcttttttgttgatcagttggaccatttccattttctccatccaattgatcaacaaaatgaatattttcattttgcccattatgttca

SEQ ID NO: 6649 - DNA, 2782 bp, Heterodera glycines
  unsure (1)..(2782): unsure at all n locations
aaatttcgaaaatcccaaccctttgccagcagttggcccatttcttcgccggtgttttcctcggcgcccgcgtaaaccatggacaaagtgacggcgacagaaaacggcgaaacaacgcacgaacggtcgtcggtggacacctcacgcagcaaattcaacgcaaaatcggcctgtgcctccaaaatgagcgcggcatttggtgttgggggagaagacataattggcggatgagaggcaatttgaaggaaatcgaagagattaagacgaaaatgagataaacgctaaaaataaataaataaatataaacaatatcagagagcacaaaacccatacactttactcgagtggggaggggtcgtttcggcgccagaacaatgttttttggactatagcttttttgattgttcaacaattgtagtatcattcaaaagcttatcttgtttggaagctctttctatgttaatgcttagcgattagataattagcaaaaaagttataacatgaaaattgacaaaaagtagaaaatattaagttttttcttaatggttgctagaaaatttatactttttgtaatagaacgtgtgaaaggtttaggaatgataccaagattgttttggtttggtcgaaaaaaaaattataacccaaaaactttggctggcgccgaaacgacccagtcactttttttacggcgcgcttttttgaaaactttttgggaacattgggccgataggtgggtacactaatgcagtttgggtcccattttggccagaaattttcaaatgtttttttttttgttttttattatcagaattgctttaaatgacaaataaaaggtgctttatgttttatggggtacattcagcgatttgtgacacaaattataanaaatatncggtcctcgaattgcttacgccacaaaaatccgaaatatttccaccgtcgcacctgctgcgcntnaacttatcatntaataaaacatttgcaaacaaacaaaaaaccgattttgattggatttctgctgtaaaattctgatgtcacatctctcatgaagtttttccaatcggtcactgtatcacttcccaatatcatttgaaacataatttgatcatttgcaaatttgtgggcccagtagtacgaaaatttaaaaaccttaatataaaattgattcatgtaaatttggccttttagaaaaacttgtttaggcgaaagatgtgctccttcaaaaaaagtgccggtgaaatatccagcagttggccgtttgccgtcgtgattcttcctcgaatagcatatccaaagtggttgttgtcgatcttgcttccatttgtagctcatttcattgccacagtcgcaaaaacgggtggtgtgtagaagcttaagttctttgagccattcttcgaattctttgtcttgaagagccaatactttgaataaatcgtcaagagtgaaatttttaagcgtttccattaatctaaaagcatttctgataataaaaaagaaaaaaaatttgaaaatttctggccaaaaaaggggacccaaacccaattagtaccacaaaatgcttatttccaaataaaaaattgctcaaattgatcatggaaataaaaaaaaataatatttgaacattttaaatgtgttttgaataaattttgtaaaaatgaggctttttgacccaaaatgaggcttttgcctgccaaatgaggcttttgaaaattttgatctgggagccctggttttgagccgttctaattcggtcccaaccgtctgagcggtttcgagtttggggagtcagattaattcttccaaaagtttttttaatttttaatatttttttatttctgccaactctttcgctgtttcgtccgtcactcattccccccccccctccccgctatttttgtctctaacaaattttatgtaaccaggcaattttcttcatctcacacaaagcgttcatttttatttccccaaaaattcgtgcgttttcaaatattcctcctttaactctctgctatttctttgtgctctccattctttcatcatttgttttacgcttttgtccaatgagagaatgtccctcatcccttcattttccggcattcccctggaattcgtgcgcttccttcaatttctctattttattttattcactctttccctatttctttggttagccatactattttcttcttttccatttctttcccctttttcttccaatggatgaaattccctctcccttcctcattgcctctttttccctggaattcgtgcgctctccatggtttctccatttactttctttctctgcaacatcaaattgcacaactattttctctttttcctatttctttcccactttttcttccattgttttccaatggacagacagccccttgccccgcttaattgtgttccttccgccacagccgcgccctttcgcaaatggcagggaattcgtgcgtccttaaacaatttttccccccaccattgcgagacggtccccgtcggcttgtacttatataaagcgcctgtgtaggcctcatccctcggaattcgtgcgtttcccactatttcctcgtgtctcccaatgtctgccaccgctaaactcttctcagcccattttacacaaatgcattgaaggacggtcccctaaagccagcagcagcggctaaaagccccatttgtgtgtggtgtgttgaaaatagcgcgcgctttgtgcgactagagtgcggaggcggtggaagagaaaaaaagcgcacaggcgcgcgcacacgcgtgcgcg

SEQ ID NO: 6650 - DNA, 1439 bp, Heterodera glycines
tattgtggtcgggtcgtaaatgcccggcatgcgcatcaccggacggttcaagtagctgaaacagcacacaatttaggaaaaaacaagatataggaaatgtaaaaagacttttttgaaaagccaattaaaccgcaaaaaactcgagttaaaaagaaaatttggaaaaaaccgtagtactttcatgaaaaaaatgaaattgatgtataatttattttaagcagccccgaaaataaactaacattttcaattttttttttaaatttttgagagaagaatgcaaatttttttaatgtatattcatgaaattttattcaacggggtttttggggttcccgatcacgaatctgtcaactattctgaccaattcccttttcctaacctaaatttgaacaaaaaaaatcataaatcgaaaaattcaaagttcgatttttgttcgggttcgggattagaaattggtcaaaataaatgtcaaattcgtgatcagcgacccttaaaaccccggagaaccaattttaacggttctttatcacaaaaaattttttgcaaaacaaaagggtccctcccccctattgtttttgataaaattcaaaaaggaccttcttttaagtagtgccggcccgtgcccccagaaaaattcggtgcaattttatgggttttttcatgaaaaattccgtgtgcaaaaatttgtgtgccttgcattttttcgatttgcccaaaattgtgcacaatttgcgcttttttcaattttaaaaagcataaaaatgaatcttacgtaaaatttaatgcagttttatgctatttaaaatgtaaaaaaaaatgaatttaaaccaattttggggtatttgagcaaaaacacggtaggacacaaaaaagtcgggtaaaactcccaacaaaacaaaccgcatgacgtggtagatgagcaacggcaaattccaaacgatggcgaacagttgcatggagagcaggaagaagaagaaaatgaacgagtggatgctgtactcgggcaaaatcagctaaaattgggaaaatggaaatttttggaaaaatggcaaaaaaagtttttttaaacgaaaatttccgcatttttcccttgaaaacaacatgccgtttttggcttggaggggtacctcccccgggcgaagaccttttttttgttgaatttcacaccctcttttttgcggctattaaaaaaaaaattgggagaaaaataggagttaatgccataattttttaacagaacttggtactttctttttttgctaccgcccaccgctcgaaaaattttaaattttcaaaaaatcataggcattttgttaaatcaatgaccagatttcatcaactattataaaaaagaaagaccattttcgtggtcaacgacattgaaaactcacaagatatgaaatttttaaatttttcgtgggaggggggggggggggggg

SEQ ID NO: 6651 - DNA, 3886 bp, Heterodera glycines
atcgggttcttgtagtccgttttcagctcgtcaatgcaaatcacctaaaagcatcaaaatttcaaatatcttttaaaaatggtcgtttggcattttgggagtgcgttgcccacccaatttcgacccatcgccctaaccctgacatacattcgaagaaaatttttgaaaattgcaatgttttcccattatctgttgattatttgctgtggataatatgcctttattagccgtgtgaacccaaaaggcatgggaagaaaacgttgtgttttgcgcttcttaaacatggggttggtggaaaacccggaccgcatttacctatatttttaaatttgcagttaaaaaagaaacaacattttttgatgcattaccaaaattaagtattggtttttaatgcggatttatatgctatctaagattgagaaaactgaaatttttgaagcccattttgggataggcgcaaacattgggaacggcttggcataagccattaatatgcctttttataaatatttttaggctatttttcagttttggggaagcttttatcgagcaaagtttcaaaaatttctttaagttatgagaaaaaagtggaaaaaagcaatttttcaagcttttagccgtattttttcgaacttaacaaaaatttttgctttttaatgcttatagggaacaattaggacaaaatgatggtctttttaccgtataaatggcgaaaaatacgcaaaaggcgacggcgatcagtgcaaacaaatagcagaaagcggcaaatgtaaatgccattttgttgggcgcaaagcgtactcaaataaagcaaaatcaaaaaaaaaaattcttgtttataataaattataatcaatcgatcacaaataaatttttatgcaaaaaaataaagataaggaattctaaggcaaggacttatgacccttggctatggtggggggggggactgaattcaaaaattcgatttttgatagcactaagaatcctctattagcatgcaaaatttcaaaaaaaaatcgttgggtttcaaaaaatttatggccacaaaatttcaaaaagttagttttctaaacattttggccataaattttttgaaattttgcaggctaatggaggattcttagggctatcgaaggtgccctgacatttgcggtccgacttttgcggaacaaatcccgcccatttgaattggatcaagaagcgaacttaaaaatacaaagaaaaacgtggaaagtatcagatcgagatcaaaaattttgcgctatgaagtgcttggaaatctgtgatatatagtcaaaaaattggcatatgcaaaatttaaagaaaatctgtgcaaaaggaaacatttttcagcatatcaaacattttaatttttttttaagaaaatttaattattattttttattgtcaaatcaaacgaaaccttaaaaatatatatatgtatataaaaaattaatcgaaattgacaaatacctaacttagtgggacaaaatttttcggcccctcccattgggaaaaaatatatttttgaaattgacaaaaaaaatgaacaaaaaattagatgtgaccaaaatcgttgtcctctccgattcttaaaatataattttaaaaaataaatataaaaaattaaaagaaattgataaaagaaaataattggctaaattcttctcttttttccatagcaaagaaaaggtttatcaaaattagcaatgaaaaagacttacaataaatggccattttttttatcaaaatctatttaaaatttcaaataaacttttaaaggaatacattgatgaataaatttgataccaaattcgtaataaagcagtttaatataaatgaattaattataataaaaatcttaccagacgtgacaatttttgcgttttggaaaactagcaactttttgtttttttcaatgaaaaaatgggggtggattatcagtagaattatggccaattggggtggatgatcagtagaattatggccaattggggtggatgatcagtaaaattatggccaatgggtggcggccgttaggagaggataatttttttgcctctttctctcgcttttatacaattttcacctctcctctgttactactgcttctttaaaccctgacttttcccgtaggataaatagtgatttatccttttatttattatttttcatgacgattgttttagcgtaatttccctatttaaatattctttgttgtcaattttaccttttttatgtttgtctcttcattcgaaaattgtattcgaattatatatcaatgtttttatgttttcattttatattgaaatattgaattcattatttatgttttatgaaattctcctttaatttcctgataaattccccaactttgattacccttaactttaaagctgccgttacaaaaacgagcagctaatatttgactaaaactaaagtggtgctgaattggaattatcccctcaaatccaatccccaactctgatttccaattccctccccacaataaattccgcttttctccaacgttccaaattgagctgattttctacttttttaaatgcgtatagaaaggcctatatacaactgtagcgatttatatattcatcatcagtcagtcattcatttcatttctttacattttaaaaatattttttccaactctcaaaactcattcggataaaatgatgataattttatcaaccaaactgctcacaatgtccgttctgctgcttccaattttgcttggcaatgcaaatgccgctggcattggcgaccgacaaaaaagggcggtggaggaggaagaacaaagaattgtgagcgaactgtgtgccaccccacccatgcacagaagttcaaggagttattcaatgctgaaaatggaagtgctgaaaaagaagttttatggatggaaaacattgaaatgaaagcggacaaagaggaggaaaaggaacagcagaaaaaaaatgaaaagcaggaggaaagggaaaagcgggaagagaaagcggcggaagttacaatggatgccaaaaatgaagcatcgcttagcactttgttgagaaatttaactcattcttaccacttcggcttttgtctgtcctcctttaggttgacgaaaatgctgttttggaatatggaaaaaaaattacaaccctagcaaaaaaatttatttccgacaaagttccaaaaatttatccttaaataattcaccagagtttggtaaataaccatttaaaaaaatgaaaactaaaaattttaaacatgaacctgaaaatatctcaataatacatttaaccattaacaaatatattaattagttcgaaataattgcaatcatttttgttgaaataaagaaaaaaattactaatattaattattcgttcttaaaaaatggtcatttttggtttacagttcatgtttttcttccaatcggattcagtttgcacaccgaaccgtcgaatggcattttttggatcggaggacaaacggaattcgacggttggtcaaacttaagggaattaaatttgataaagctgagttatccatttcgaaaacaattctttaaaatgtttcttttcagtaactcactccaacaacctactaatttctttgcaaaatttaatctatccaaaatgaaaatgaactaaactagggcctgggaaaatcctgtacaaaattttgtcctatccaggctataataatgcatagccctaataataatttaaaatttatacttgagtttaataaaataataaaaaatggaaaaatattttttattttcaaaaagtacaaaaagcaaagcaacaattatcataaagaaaaaaaactaacaatggaaccaaattttatctcattaatcctttaatcctcatttaattcttct

SEQ ID NO: 6652 - DNA, 1032 bp, Heterodera glycines
  unsure (1)..(1032): unsure at all n locations
ggcttaacggttttttcaaataaagaaaaacaggagccagactggggcctgggaaaatcctgtacaaaattgtgtcctatcaaggctctaataatgcatagccctaataataatttaaaatttgtacttgagtttttaaataaataataaaataataaaaaatggaaaaatatttcttattttcaaaaagtacaaaaagcaaatacatcccctatgtgcaaatccatgatgacgtttttggacactgtaattacgcattacggttcaacctttttgagttgaactatagnnntcagagnnngnnttnntttanttttnncatnncgtttggtggcgggcngnnnnntagtttngngcccctgcgctccttcgttttgttctnnnncncgnnnntgggttcnnntggnggngnnntcntgnncnnnnttctgtgtgtccgngttgcgngtgcttngtcccnntcntgngtttnnctgtgtttttgcgttttgcttcnctctncgtttgcnnctgntgttttgtttcctcgngtntntnttntctntntgtnnngccnntcngngttntcntgntnnnnnntcgngcgntggggcgggatgttnttncctctttaatgttcatttgattcttttccaaatttctcttccaattgaatggtccattgattaattttcaatatttttgcatttttgctttctccgtcgttctttcacccattctaaatcatttcttccttctcataattattctacgattaactccaattttcatacagatttatacatattttttcatccattcttttgttgaatactttctcccctttttaaaattttctcttttggtttatagattttcgtaacaatttctcgcattttctgatcattttctttttctctttccaaattttcttctttttcttcccatttttctccaaatatttcgtcaaattcattttgttccgcttttttcttttccgctccaatttcaatttgaataattaaaaataatgcaattgaaaagaataatatg

SEQ ID NO: 6653 - DNA, 1582 bp, Heterodera glycines
  unsure (1)..(1582): unsure at all n locations
atattgacattatgccaatttaaaataanagaaatgaaatcattttattcgtttcacacacatattttagttgtagtccttaattttgaacctatcaacgtccaaaataatcgcttttataaaaattattgatggaaattgtttttgttgaaaaaatgactaaatttatatgaaaaatttaattcaacgataaaaaaaaaagaaaataaaacaaccggcaaaattttctcaatgattaaaaatatgtttgaaaaacacttaaaaggagcttaattcccctttatcattcagtaagaagttcttttccaaaagctctgatgaatttaaactagagtagtgcggaaattttggacaattcctggactgggatttgccgggagtagagaagctgggacagggacggaaaactcgattttcgtacgggacgagaaccggagcaaaccgggaattttcccaataaaaatttaaaaatattaatatttagttgtttgaatctttcaataaaattttctttacgccaatttcattcacaatttttcactcaaatcataccccatatctttccagtgctgaaagtaattttaggtgttttttctccctaaattattatttcttatcaaagccattttcggaggttttgaggacccataaaaaatatttgtaatgggcgaaaacggctaagatctgaggctttagcctcattttgtggtgttttgataggtcaatgaggctaaattttaaaaatgaggctttgagactttttgtggttttttgaggatttttgaggcttttggggaaaaaacgaaaatctggcccaaattttccaaaaaaatttgttaaatttttcataaaataaccaattttttccaaagttcacaaaattaagaatttttttcaatgaaaatctgctaaaaatatggtcaaaattcttaatttttcccccgcggcgcctatcggcaccgccggccccccttgccctgtccccaaaagttttttggaataagcgtgttttgaataaagttgtaaaaatgaggttttttgactcaaaatgaggcttttgaaacttttaatctgggagcctttttttttgcattttaattttgattcataatttttcagttgaataaatgcaattatttcaaacgtaatagtaatttttcataatttttaagaaataagaaaatttttaaaaaaagtaattcccctccaagtagttgtttttcttctaatttttcaaaattattcatttttcggtgggaattcaatcataattttaacaattaaattcgtaaaatattgttatttttggactaaatcagttaacaaattgcacttaaattttttgttttgtgcgtttttgaaatgataaatattgtaccaattgaatcaaaattaaaaaaaaccaaaaattagttaagaatagagtcaaaaaatgtttttaacgatttttaagcgaataggaaaattttttgaaaaaagtctcgagtctcgggttttttgggtctcggtctcggggttttcggtctcagtctcgggtctcggagtcgagtctcggtctcgagtctcgggaaatttttggtct

SEQ ID NO: 6654 - DNA, 2348 bp, Heterodera glycines
ataattttggcatcattttaaagtcctatatgtttagaagctgttgataagctatttataagcgattgaaatccctataaaaaagtcgcaacattaatactgcacaaaggttagaatttttgcatattttaatttataacttttttacatgtcagtatatctttgtgatttttgggaagctgatagagcttgttaagagctttcgaatgatatggatttggtcagtaaagaaaaaagttatgatgctctaaacttggctcagactataacggcagactatagtgtcccagtccgaagttaagggactaagcccctgtcccggtactttcaattttttgtggtttaaacgggttcaattttgagtctgggagctcagaacaatgtttaccaaaacattatttattgccaaagaaagaaagataattaatttgttcatgtccagcaacagcaatacataatataagtaagaaataatgagatcgaaaaagcaagaaaatgcatcaaatttaacttttctatggcgtaaaattatatggaaaaacaatttttttttttccccgtagactgtgggaggttatgaaaagcacgaacctagagcagggaattttgaaaaaatcgggattgggattggcaccaggccgggataggattactgggatatgcaaatcacccgcgttatgccgagatttgaattcagactccggcattcaaattccgattttgttgagatcccgatttccggttgtcattttagtgccgagatcccccggcctagaactgggaatttttccagcgataagcgccgtatagaaaaattctaagaatttttaatgaattctttaagaaaataccgtagttggccatttttttccttttaccaagtaatgaatttcaagaaatttttttgaaaatttttcccctccacaatgtccatcataatttttatggccatatttcacgcacttttatatcacatataattttacgcccttgtcatcatcatatgtaaattaattaatttttgatgcttgccaatttcgccgcacactcaaaaaaaatgtctgtcaatttttgttttttttggcttttccctcatcaatttttccgtggcttttgctttcaaagatgcgcaattgatgagctggtgtaggaactttgtctgctccggctgttgttgctagcagagattgtgccaatgctcagcctgttcacctgcattttttttttttttgaggaggaggaggcgatgtaaaattttaaaatattttcaataaaagagtcgattgatatgccaaaaagatgttttatgcattcaattgagttcggcattttgaaaaaagcctgaacttggacattggacctggttttcctggacaaaaacaaccaggtccatgaaaaatccaggcttgtcatggattggatcgagcgaggcgcctggattttttggaaaggcgggaggggagaacgagctctgctcctcgccctccgattcacctgcgcaccaccaccaccaccaccaccaaacatgtccgcactgtcctcctcctgcttgtgctggttgccgacaatggttgttgccgattgtcgtcgacgacgtcccgtcatggcggcaccggcacaaccaccatcaaagtgattgaaaggtaacggcaaaatgcttgttgtgactgtgccaccaccaccacaatcaccatcagcagttgcggtaacgacagtagctgctgtcttcggagaatggtcgtctactgtagctgttgtgtctaccgtattcccaaccaccaacaccaaactgttactggtgttgttgttaccgcaagcatttgcagctgttgctgtgccaccaccaccaccaccaccaccaaaaccaccaccaccaccacagcttggacccattgaaaatgtgccggccgtactcattgatggacgctgctgtgccgtcagcatatatttgatgcgcttaaatgattattttttcaaacactaaaccagcagcgattttcgcggcattttgggttgatgccatgtctcattttgtaaacctacttgatcagtgatttgctggtatccaaaaaattagtggtctccgagattttattgttacggtgtttttgaaattatggtaaattttttttaaattagttagttatttaggtccaaaaatatgtaagaccttgtttttaaatttttggaaaaagtgtttaaattcgaatgaaaattaattatttgagaggataaaaaaaaaattcgcattccgttttttgaggttttgatgtatgtatgttgagggggtgcactattttgccatgcccgtgtccacaaaaaattctcggggcggacactcggttttt

SEQ ID NO: 6655 - DNA, 1807 bp, Heterodera glycines
  unsure (1)..(1807): unsure at all n locations
gaaaatcttcttgaaattttctttaaaaaaatttttttaaaagaaacggtggcgaggggggggggaggggtgagtggagaggaacagcataactgctccaatttgttggttgatcatgtgcatcacctgcatcacgttgccgcgtgagaagatgaacaggtacagggcataggcgggcacggacgcgcaggagagcaagcggaacagccagccaagccacacggaccatgcgggatatgtgtagttggggatttgcatgggcgaaaacgaggtggagtacagtgccaacacgaagatgatgccgatgaacaactgagaaaaatttgaaattaaaaaatttcgcggatttctccaaaattaaatttttttttgttggtctagcatatatttcagtcaaaaaatttttaatttttaaattgatcagtacaaatcttaaaaaaaaataaatacaggaagcatgccaattcccaacaaattgcacatttttttttctcgtattttcatcgaaaaatttcgttgggcaaccggaaattggaattccgagctcaaaaagaaaaccggatttcgacatatccctgctggtgtgtatatggcttcaactatagagatttaaaaaaaaaacttgaagatagtttactaattttccaaaaaatcgctgaaaactttttcaagaatttttttctagaaattctttaaaagttttttttaattccatctttcgagggggggggggggaggggtaagaaccagtgaggtggaaacccctatttccaagccaaaatcttgggcagcctgtctatggccaaaatctagaaaattttgctaaaaatcgcaattctgacataacaaaaaaaaattttgtgctaattttactgggcacagtgtccaacagcagcgccaatagaggcccgggtagaagccgagcatcgagtggatgtcctgaaattttgtaaaattttttaaaaaaaaattagtgaaaaattgttttttcatttttctttttcttgcctcgctgaaccgccgaataccgtagaaccaacagacggcaatcatttcgcacattacgatgaacagcacggacagtgacacaccgtactcgtccaggaacggtatcacataggagccaccctaatgaggggggggggggagaagaattatttgtggaaaaaaaatttaaaaaaaaaaattttgtatataaattaaatgggcaaaattgtaaaaaaatatataataataattaagaaattaattcagaaaataaaacttcgtaaaaaaattaacttaagaaaaagaatatctatgtaaaccaattaattttcttcgaaaaattatgtgaaatcgaaaaaattagtctaaaccatttaattttaaaaaataataaaatttttgagcgaaaaatttaaaataaaaatattttttcctagaaattgtctagcctaaaacggcataaaattcgatgatttaaaaaaatagctaaaatagaaaaacaaatttttatgaaaattaaagcaagaaataaatggcctattaaaattaaattgaaaaatttaacaaaaaaatgaataaatatttattggaaaactaaacattttccaacacatctaaaaataatagcaaaattttcattgttttttttttacgtaagttgtggccggcaatgagccaacgtaatgaacggcgatgacgcatgcgacaaaaatttcgcgccgacgtgccaacagtcgcgggtactcgtcgcagaagccggtgatgaatgcttcgatgcagggaaactgggggaacattatgaacacacantatatgcaaa

SEQ ID NO: 6656 - DNA, 964 bp, Heterodera glycines
  unsure (1)..(964): unsure at all n locations
cagggaaatttactttgaaaattttcttaaaatttttcaaacaaatttttcgacggcggttaaagaaatgttcgaattttcttaaaatttttcaaacaaatttttcgacggcgattaaagaaatgttcgaattttcttaaaatttttcaaacaaatttttcgacggcggttaaagaaatgttcgaattttcttaaaatttttcaaacaaatttttcgacggcgattaaataaatgttcgaattttcttaaaatttttcaaacaaatttttcgacggcgattaaataaatgttcgaattttcttaaaatttttcaaacaaatttttcgacggcgattaaataaatgttcgaattttcttaaaatttttcaaacaaatttttcgacggcgattaaagaaatgttcgaattttcttaaaatttttcaaacaaatttttcgacggcgattaaagaaatgttcgaattttcttaaaatttttcaaacaaatttttcgacggcgattaaagaaatgttcgaattttcttaaaatttttcaaacaaatttttcgacggcggttaaagaaatgttcgaattttcttaaaatttttcaaacaaatttttcgacggcgattaaataaatgttcgaattttcttaaaatttttcaaacaaatttttcgacggcgattaaagaaatgttcgaattttcttaaaatttttcaaacaaatttttcgacggcgattaaataaatgttcgaattttcttaaaatttttcaaacaaatttttcgacggcgcttgaataaattttttcgaattttccctacggtgctgtcaatgcccaaagtgatcagcatcaggaagaagatcagtgaccagatcggcgagtagttcattgtggcaattgcttgtggatagacgacaaaaatcagtgatgatccatccttttttttggggggggagggtggaccnntgcaggcccatgcaa

SEQ ID NO: 6657 - DNA, 2163 bp, Heterodera glycines
  unsure (1)..(2163): unsure at all n locations
aatagaacgaacgcaacgacaaaaaagggaaatctctccgtccgcccctcggcacgcgctgtttaattgctgggcgactccgcaattgtcacctccacgtccacgcccggctcaatggaaatgcccgtgattttcttcagcacgtcgctggagctgttcagattgatgatgcgtttgtggatgcgcatctgtggggacaaaatagcaaaaattaaaccaagttcaccttaagaaacagcaaatcggaatgccactttgagtgtgactatttgccacggtttaacaatgtactgctcgaaaacgatgacataaatatttggatttgggttggggttttgttggaaaaagacatttttgtcggtctaacttgagtcctaatgctttttcttaagaaattccttttcgggggaaaagggagccgtgcgtatatgggcacagattaggacccgctcattgtcagttagcgcaaaaatatgtataaaatatttattaaacacaaacacctaaactttcaaagaatttgatgttcgggtgaatgctttacaatagcttggcaaatcagatgatcgaatgtcgacggaactttttatttgtcatccgttatttttccaagttatagtacttgatcagtacggtttagagctcggaacttttgtgtcttcctggattttttcgtctcttcaaatgcgcgtgctctctccgctctctcgtaaggcagagacgcatatagttcactgtcactcactgtccgctgagaccgtaagtcagagatgcatacggtcactcagtggtcactcgctgcgcgctgggattcgatatcgatctctggtgcagagtgaccagtgcgtgaccatatgcgtctctgtcctacgagagagcgccttcatgcagcgcctctgaagagacgatacttgtccaggaagacacaaaagttccgatctctacctatcatgccaataccactcatactggacattatagattattgttctttttgtttgaatagagctgtttataaaaatatggatttaattttatcaataaagttatttatttcaatattttttaaaatattttatgaaattctattttgaatttgcattttttttaatatatgcgcacaatttcttggttcataagcttattcgccttcccagttttgagcttactatttcttctaatttattattaaaattcttatttatttactaactcttgataatgtatctaattctgataattaccaatnaagtttttttttattaaattaaataaattaatgaattgcgcattctaaacttatatttcatataaatanataaaaaagtttctcttatttaatttaatttaactgaaattaagaaattttaataacaattttttcttagatttttgcatttttcaaatatgttgattttacaaataaatcatttttttaattctttaaaaatacttttttcattaatttaataatccaagaaaactcttttctttgcatttcgagatttgcagccaaaaatttttgaaaagataatttcggagaaaatttatttctaaattatttaatagtaaaattttattaaataaaaattagcatttttaatctttctagtcagaatgtgaatccgctttaatgttatactttattaaaatttattcaaacatattttttctattttagtttaaaaatttacttaattcatggcaaacttttgatatatcacatcatataatgcacccgttttgcaattattatttgttgcgtcttacaataaaaaaatttattccactgtttttaagtttgtataataattatttatttataaaagaaaattaatttttatgttttatataggacatgcaagttattgcttttttcaattttttatgagatttaataaataattatttgttaatgcatttctttaaattatttgcattctttgattttgaagtcttaaatatgctagaattttttcaataatcatgattaatgcttataatttagtaaaagtttaatattttcgcatttttaaatctaatttaaaaaaatttgtcaattattaactttattttagttggttttactttgaattaattttttatttattatttaatcaattaaggaaaaacaactatcattatttaggtttttgctttttt

SEQ ID NO: 6658 - DNA, 3997 bp, Heterodera glycines
tctgaagagacgatacttgtccaggaagacacaaaagttccgagctcttagttcggttgcttattgttagtgtttaacaagaaagttttctttggacatggcaaatgcggttttctctctaaaaacgtgtcatttatcagcaaatatttaccatgctttatatttttcagtaactgattgtgagtgggcctaatctgtggcccttttgcccaatttccctctccgtattctgggaccactgctggtttttaatatatttatttatttgcttttcttggtgccaaattattaagccataatattctttattgtaaattctaagatttccgttggtttgtttacctggaaacggtcccaagtcttcgacccctctccgcacggcgttttgcgtgtggtaatgcgcagaatttttgtgggcattctcactgggcctttgaccaccaaattctcgtcctttgcgccgcgaataagctgctcacagactgacaaagaaatattgtgaatagtcggaggaaaattggaacaaaatgggagatgaattgatgtatttccaatttgttaacggacgtttaattgtaaaaattaatgccaaaatgaaatatcagccaaaagtaggtgaaaacgccatatccttggagcaatggacttcacgggattactttaaaagtttaaacctttttcgagcgatttcacgttctgtgatgttagggtaatgcgaattcggtcctcaacgggcgctgcctcttgcggtttgtcatccttataaggaaaagcctaaacagatttttttttattgggaggagcgcacttcgtgtgtttaccatgttgtttttgtcgtttgttgtggcgtaaaacaattaaaagagacgatagaaatcgcaattcaatagcaacgcttatatcataaaattaggtaattgcaattttgaatttaaaattaaaaaaatcagagcaacgaaataaaggcgacgggtccaaaatggctttacggcagtttacgcgttcaatcgatgaccatctttagtttcttaggctataacttttttcattactagataaatgcttatatcttatatttttggtatcaaattaaagcatacagctgcggaagtttgtaaatacactgtctttaaccaagacaagaatccaattaggaatataaaaataaaacttattggttgttgttgattgtttataaaaacgcctttacaaaaaattggcattttgtcaacgcgctttggcgcttcagcaatggcgtcagtgtcagtgcgtcagcgcagtgcgtaatgcccaggcgtccttcactccacttcaaaaagaagtgtccaattgacacctactttgtggcggtgcaaaaattgggatccataacctttctttgctgttaacccaatatttaccactcgccgggcgagcttcgctctatctgcattttaaatttattattacaaatagcatctaacttttgtagtttttttcccttttggggccacacacagatttaaaaaagtcaacaaagagcgcgttgaacattcgtatggttcccatattcataaattaacatatttaaatggcggactcattcgatgttactttggcacagataaagggggggggcgggagatcatcgatagtattatccttttaaaatgaatgtgtgaccctcaaacggaaaacacccttttgtaacatttttttaaagaatatttttgttttgctttgcttcctgaagagaatacgcaactgaagatgcaaattttcgtcaaaaccttgaccggaaagaccattactttggaagtcgaggtatcaatttaacaattaagaaaacattagtactatttgacatcttaaggcgagtgacacaattgaaaatgtcaaagccaaaatccaggacaaggaaggaattcctccggaccagcaacgtttggtaaaccaagcaaatctgagaaagcggataatggaaaaaatggccctttcagattttcgctgggaaacaattggaggatggacgtaaaattctttaatcgaatgttgcgggtgtaaaaatcggacctttttccccttttcaggcactttggccgattacaacattcaggtacgccgcccaatttgaggaccacaatttttactggttcgtctcctctgttccagaaagagtcgacgctccatttggtgctccgtctgcgcggagggatcattgagccgtcgttgcgcatgttggcacaaaagtacaactgcgacaagcagatctgtcggtacgaattggcacccatttcaagcaacttttcacactttgttttgcgatacttttgcattttacatgtttttaagcaaatgttacgctcgtctgccgccccgtgccaccaattgccgcaagaagaagtgcggacactccaacgacttgcgcatcaagaagaagctgaagtagaggaccaaatgtttgctggacgaatgggattattgttgatcgaattatttgattttgtttgatgtcgtgagaagacaattttatgttgacgacttattcattacttctgaatatgcaattgctattttgttttagcaactttatcttcgtattttccatcaaatttttcatctttttaagatattattgtaaagcaaacatcaaaatgccagtcaacaactttttgcaaaaggatgatgtaagtcttttcatatttgaatgactgtactgaattagttctttaagatttcgctgagtggtgagagtgctggagaggaatacgaagttgaccaaattctcggtgtgcgcgttcttgaggacggaacgaaggaatataaggtaaggcgaatttttgggttctcaacattgctttgtattagtactatatttgtcgaatgattgctaaattatttatttttgttgagtttaggttcgttggaagaattacggaagcaatgacgacacttgggagccgatggacaatctcgttggtgcaaaggatgcattggacaaatttctcaaagcgaataaacaggccaaaaaaacgccgaaagcatcgcgaacgccggtgagcacatttagccgaacaaataaaagaaaagcccaatttaagaaggcaacgaagctaggacgaaagcgcggtgggggtgacattagtcaggaggccgaagacggggagaacaatcggagcagcaacgaggacgagtcggacgacgacttctcggtgtcatcggccagcaagaagaagaagacaacgtaagtgcgggagaagaacaacagcaaaaagggctgctggtgacaattggaaaatggggcgacagaaaaacagtcaattaatgtgggaaaataattatggaaattgaagggataaaaagtcgaagaaggctcccgtccgccgtgctgtcactgcctccagcggtcgtccgtcctctcgtccgaccccccacaatggggactcactggtgccgaccgattccgctttgccccctgcatttgttgtcacttccctccacccttagacaatggcaatcagtcggcgtatgaacttgggtcagcacagctcttggctggacagcggttccgagtccgactcgaatacgacgacagcgaaaaagaagggggccgcagatggagaagggggaaagggaggggcagcagagagacgacgagacgaagggaacaagcaggccaaagagaatgacaccaaaatgccaacactcgctcctgccgagaacgacgacgccggccatatcagtgacgacagtacagcgaccgaaaaattggccaattctccgtccccacattttgacaacgaagccaaaggcaatggagacgaattgtaatgccaattgggcaccataaaataaaagacaaatgggaaaattgggaagggggggggagggtggcggagtaaaaaatttacgactgaattcaaatgaatttctgtttaggaatatgccaagtgaacatgacccaactccagccaatttgtcgactgtttgaacggcgggaccatctccaaattcggca

SEQ ID NO: 6659 - DNA, 1075 bp, Heterodera glycines
aattcggcagcaaagagggttggacacattttatatttaacaaaaaagttttagcttttttagtcatcgatttgggaccattctaaaaaatcttcgagagcgaaacgaaacactcggtcgaacgtgggaatggtgaccagatttttgcaatgagacaatattttgttttgaatttaagtatgcaaagcgaagcggacaaacgccgacgagtgagtgacagaaaaggggggggggttgcaattaaagcattaattaatggaatggttcagcttccaaagcgtccgaacatcacctcaaattcgacggaatctatttcgacaagaatggtgtgcttaaactcgtcgaaaagggaggaacgcagcgggtgtttaccttcgaaggtaattttttgcttcaaactaaattcagattagtttattgattagcattacaattctttcctttttcagaggccaaggataagaattcgagtgccttgtgcgattacatgtgcgacatggtcacattcacggaaaagggcaagccgcaaatccaagtggcaccgcaagaaatggagacggaggagggacagcatgaggaagaggaggagaaagtgttggaacggacccatgacgacgacgggaaactgaacttcgacgattaaaagggcagagacataatttgagaagtttgagacggcactttacttcattcctcacggattttactcaatgatatattatcttcaatgtttgtttgtagccccacccaatgaaagtgaactcacataaaaccgaatttggaataaaaatgaattttgatttcattggaataaaacataatggatgcattataatacgaataattggagagcaaaacacaagcaaataaatgtatttgaatttatttctctaccagtttaaaaaggttgagggaaaacagagggggactgaaaagaaataatattcaaaaactatatttaaatcgggagaaaagattttggaaatcaacggatcggtcacaagcaaataaccaccaaacagaaattaacaggacaaataagaagcacaaaaatactgtaaattaattaattgat

SEQ ID NO: 6660 - DNA, 5923 bp, Heterodera glycines
aataaagctttaaaaataaagaaaaataaggagaattttatgagatttatttggttttataatgttcaaaagaaaaaaagttattccagaatttctggaaaaattcggattttcagataaaattttataactcggttcagaaaagtcattctgtaaaagtaaaatactacaaaaaatccgcaattttttgctctattatataaattttatttggtatttttatctcttctttaaaaaaagatataaaaataaaagtgattttgtgcttcgggtccaaaggggggtgaccaggatttttgagtggaaaattttttttcacaaaaatcttccaaaaacatgtcattaggggttatttgggccgctgatcatgaatatgtgatcagattttacttttgacatcgttaagacctcagaatccctgtgtgattggggattctgaggcatcatttttgggggggggcaaagttcgagtccggacggtgtaacattatttttctgtgcatttttacgttattttcaatgattttaattaatttaaaatattttgttgagttaataaataaaaaattatatttaaattaattttttttttgatgaatacattttataagtttaaattaattatttttttaattgatagaatttcttgtatttttttaaattaaatttgttaaaaaatattttcattttaatttaatgaatttactaattaatcactgttgtacccctctaatcaaatttgtactacttctaatcactgttgtacctcttctaatcaaatttgtactacttctaatcactgttgtatctcatctaatcactgttgtacctcttctaatcactgttgtactacttctaatcactgttgaacctcttctaattactgttgtacctcttctatttactgttgtgcctctctaataactgctgtacctcttctcatcactgttgtaccccttctaatcaaatttgtactacttctaatcactgttgtatctcttctaatcactgttgtacctcttctaatcactgttgtactacttctaatcactgttgaacctctcctaatcacagttgtacctcttctaatccctgtaaggtcaacaaattttgaaaaacgggcgcgaagcgcccgactaaggccgcgaagcggcctaacaagctaaaaaacgggcgcgaagcgcccgtatgagttcaacggatttaaaaaagggcgcaaagcgcccgtccaaggccaataatttgaaaaacgggcgcgaagcgcccgactaaggccgcgaagcggcctaacaagctaaaaaacgggcgcgaagcgcccgtatgagttcaacggatttaaaaaagggcgcaaagcgcccgtccaaggccaataaaattgaaaaacgggcgcgaagcgcccgactaaggccgcgaagcggcctaacaagctaaaaaacgggcgcgaagcgcccgtatgagttcaacggatttaaaaaacgggcgcgaagcgcccgtccaaggccaacaaaaattgaaaaacgggcgcgaagcgcccgtcttgagcctcgatgtggactaaaaacccataataattttttaaaaattcaaaaaaaaatctccaaccaattcgatcaatttgaatcgcttcacagtctaggtagcgaagctccgaaagcgcgaagcgctttttcccagctaaatagccgacggttcacgcacccgctagttactatatatgttatattgacaaggagtttcgtttgcaaaaacaaaatctctcggccgaaggccgggagcgccctgaaagtagtggaagggtctttaaactttttgaggcgcatctgggaaaactataggttttttgatccgagggccaactgagtaccagggactgaattctcacttttgtttgcatttgaagggccctaactttttttgtaaaactcgaatcaaaaagtgcccgctgtgagggcactccgccaaagtgtcctctaaatgctggtatttttttaaaatttttttttgagcaaacccctggcctgcaaaaaatggcaactgaagcgtgctcaaaaagtacacttcagtaccaggtgaataccgcgccagggtttgatctgagcggggggtggtcagcgaacttattgtagagctttcaaagctcgattttttgaaattttaaaatttcgaaaattttcaaaatttttcgagttaggcctaaaaaacggttttcgggtttttgaattttaggattttttaacgatttttcccagagaaacggagaccacttccaaaacatagtttttcgagctctatcgactggtatttttttcggaaaaatttcgattttttcccggaaatagaaaaaaattttggcctgagcgggacatttgagtcccgggcccataactcgtcaggcgtcggttttagacaaaaaatgccttagagcaaaattgtagagctttttaagctctatctaatggtatactatatgtagggaaattttcaaaaattttcgagctaggccccctagaaattttcaaaaattttttttgggttgaaaaggagggtgaaaaatatttttctggggtaaattagggtcctgagcacaaatatgatgtttattttaagtttcagattttttggaattttttaaaaattcgaaaatatttttaatttttttggtccttggaaatttgggttaaaatttgaaaattcataactcaatgaaggactgctcaatttaagtgaattaaagctttaaaaatagcaaaaaatcgggagaattttatgaggtttatttgaaatttataccacaaaaacaaaaaaagttattccagaaattctggaaattttcgatttttcagaaaaaaattcagaactcggttctgtaaaggtgtttttgaaattttaaatactgaaaaaatccgcaatttttttctttatttaataaattttatttcatccttttatcatttttttgtaaaaagttataaaaataaaagtgattttggaattcgggaccaaaggggtgagcataggatttttgagtgaaaaaattttttcgacaaaaatcttccaaaaacatgtcattagggctttttgaggctgctgatcactaatctgacatcagatttcagttattacatcgttaagccctcagaatccctgtgtgattggggattctgagtcatcttctgggggggggggggggcggcaggttcgaatccggacggtgaacattatttttctatgcatttttgggttatttttcagtgcgtttaatttatatttaaagatttgttatttttcaaaatatgctcctatgaaatgaaaaaaattttcccaaaaatttactttcttggcaaaaatttttaattttaaaaatttttttaggtaactattttgggttttttggtcttaaaaatcccagtcctactcatttgcaactgcaaatagtgaataaaaattatttttgctcaatttttggctgaaaattatgtcactattcgtcactattttggacttttttcactattttgtcactattttggcactttttcgtcactattttagttaactatttcgggatttttcgtcactaaaagtcccggccctaaaaattaatttcatattaatttaaatatccaattcttgtacatttcaaaattctctttgtaattaataaaaggaataattaattttattttttaaagtttataataaattgcattcaatttttgtacctcttctaatcagatttgtacctcttttatcactgttgcacctcttctatcactgttgtacctcttctaatcacttttgtacctcttttaatcactgttgcacctcttctaacatttgttgtacctcttctaatcacatttgtacctttttaatcaccgttgtacctcttataatcacttttgtacctcttttaatcaccgttgtacctcttttaatcacttttgtacttcttctaatcacatttgtacctttttaatcaccgttgtacctcttctaatgacttttgtacctcttctaatcacatttgtacctcttctaatcactgttgtacctcttcaaatcactgtcgtacctcttctaatcactgttgctcctcttctaatcactgttgcacctcttctaatcactgttgcacctcttctaatcactgttgtacctcttccaacacatcttccaacaatttttgtacctcgtatgagctcaacaacatttaaatacgggtgcgaagcgcccgtccaagttcaacaaaatttagaaacgggcgcgaagcgcccgactgaggccgcgaaacggcctaataagctaaaaaacgggcgcgaagcgcccgtcttgagcctcgatgtggactaaaaacccataataattttttaaaaattcaaaaaaaaaatctccaaccaattcgatcaatttgaatcgcttcacagcctaggtagcgaagctcccaaagcgcgaagcgctttttcccaggcccaaatccgacggttcacgcacccgctagttatatatatgttatataggttttgagtttcgtttcaaaaaacaaaatctcccggccgaaggccgggagcgccctgaaagtggtggaagggtcttacaactttttgagtagaatccgggaaaactataggtttttttctccgagggccaactgagtcccggcggctaatttctcacttttgcttgcgtttgatggcccatttaaaaaacgggtgcgtagcgcccgtctgaggccgcgaagcggcctaaaaatcgctgataattttttaaaaattccaaatcttttcacaacccgatagctaatctaggtagcgaagctcccaaagcgcgaagcgctttatcccagctaaatagccgacggttcacgcacccgctagttaatatatacgttatattgacaaggagtttcgtttcaaaaaacaaaatctcccggccgaaggccgggagcgccctgaaagtggtggaagggtcttacaactttttgaggagaatccgggaaaactataggttttttgatccgagcgccaactgagtaccggggactgatttgtcacttttgtttgcatttgaaggcccctaactttttttgtaaaactcgaatcaaaaagtgcccgctgaaagggcactccgcctaagggtcctctacaaggtggtattttttaaaaatttttttgagcaaacccctggcctgcaaaaaatggcaactgaagcgtgctcaaaaagtacacttcagtaccaggtgaataccgcgccagggtttgatctgagcggggggtggtcagcgaacttattgtagagctttcaaagctcgattttttgaaattttaaaatttcgaaaattttcaaaatttttcgagttaggcctaaaaaacggttttcgggtttttgaattttaggattttttaacgatttttcccagagaaacggagaccacttccaaaacatagtttttcgagctctatcgactggtatttttttcggaaaaatttcgatttttttccggaaatagaaaaaatttttggcctaagcgggacatttgagtcccgggcccataactcgtcaggggtcggttttagccaaaaaatgccttagaacatttttgtagagcattttaaatgctatcgaatggtgtactatatgaaaggaaattttcaaaaattttcgagctaggccccctagaaattttcaaaaattttttttgggttgaaaaagagggtgaaaaatatttttctggggtaaattagggtcctgagcacaaatatgatgtttattttaagtttcagattttttggaatattttaaaaattctttattttttggcaattttttggccctcgggattttggcctaatatttgaaaattcataacaaatcgaagggttgatcaattttacaggaataaagccttaaaaatagagaaaaa

SEQ ID NO: 6661 - DNA, 3835 bp, Heterodera glycines
  unsure (1)..(3835): unsure at all n locations
aataacacggcacttcaagagttcttgccgtcctttctctctgatgtttatataaaattttgtcgacctattttaaaactatacatttatttaacaaaatgtctcacagtaagatttaaaaactttttatgaagcttcttctcaacaaatacaaaaaaaattattgaaagttttttatcttaaacaaccaaaataagttttgtaaaaaagaaaaatgcaacaaattgttaggcagacatacaacgccgctttctctcgacaattctttatttgcctcaaaagcgctgttctcgcggcggtttcggttgcgcgttattttcgcccttgctgctttggggcgctcttcgtggtttaggacaatctttcagcctatgtccagcgccacaattccaacagcgcagaggttcatggcagttccaacaggtgttctgcttttgcgcacgcccttgcagtttggtgtggcaattccaacattgagttgttcctgaattgtaaattttataaaccgcgataatttggtttgtcagtactaagccgagactcaggagccctataagggcaatcggcgctcatgtgatcggtattgaggcaacagacaaaacatcgtggttgcccgcccctgcgaatgagctgcccaagtgagttgcgagcccatgaacccccaatagggcaattagatgctcgatgcccagctaagccacaccgccagcagcaaaaaacttcatcactctgggggtttggaggcaccccttgcgtttgctgtgcaatcagctccacaattcctggcggaattggatagtcctcatcaaactaaagacgtcaagaattgtcgcaaaattttaactaaaacctcctgatcttggtgcgccccctcttcaaaatagacgtcccacaaacccaataaatccatatcttaatttacgtttcttatcaaataaatatttaataaaaacctcccaaatattcttggagtgaaaactccgcagaaccactgccaaaagcaatgttccaaatcgcgccgatcagctgcgctctccgcagaattcgcccttgctcatcttcgccaagattgttgaagtctggaaaacggttcgtgtgatgctccaactgggcttttctcattctgcgccgcacttaaacaatatgtttaagacttaaattttcgcttaatatttaaatttaataaaactcacactcggtaatatccgaaatttgactgcttccgcccctgcgaactatcagatcggcagcgccaacaatagcaaagagatttatggtcccaaattcgcccttgctatcacggaagatacgagctcttcggccaaaaacagtatcacgcctcatcagcagttgctcccattgttcttcactcagcattttttaaacttttttcaaattaaaattaagctgataaaaaattatatcgttgtaacgatggtagaaattttatatacaaagtaaaaatgttggactacaaaaaaaattggcatatttttatagttatataagatagccgaaaaaagaaaagaaataaaaagtgaatatttaaatatgaattttattttagaaaataccgctattttttcaaaaataggaacatttcagtttaatgaaaaattatttttccttaattaaaaatgaatttattggaataaatttaagtagagggaaagatgtaaccaatgctcttgcaaatataatacgttggaatcaaaatgagtcttatgaacgaatgattttaaattttgtctttcatgctcttttcgctctttcatactgaacattttttgcaaattaattttgaattgtcttttcatataaaaaactgatgaaagagaagcattctttctcagattatttataatcagaatatgtacattagatatgtacattaaaaaaatgcattattttaaaaaaaaagtagtttcacattgccctgagcaattctattgactgacgtttttgagttagaacttaaagataatccaattcgttaagaaagatgtgagacagaattaatatataaatgaatttaaatttaaaatcatttgttcataaatatcaattttgatcccaatgtattatattaaaacagcatgggttgcatcttttccgttttttaaatttattaaaaaaaattttgttaaaaagagcaatttttattaaaaaggaaatattcgtttttaaaaatagcggtagtttttaaaaaattctttggatttaaaattccctttttttgacttcttgttcctttttcaactacttttatttttaaataattttgactatatttttttaaagagaaataatattaatggctgtacgcaaaatgaatgacaacgaatttgaaacgttgttgcaagggcgcaatttttttgcgcgtttctcctctttgatgagggacatgcgagctgaattttcaactataaatatgttggcaatagtggaagctgaagacctcatcgtctgcaagggcggagctgggacgcaaatttttaatttggcagagtgtaatttttttttgttttttttttaaatttattaattaagtgcgccagcgtttgcgtagagctcaaatggtccatcatacggacagaattggcaactacaatgaacttccactgtatgagcaagggcgaaaactgaacaaagcccaaattgttggattaatttggaatatttggtttggaacggggtcaaaaccattctcaccggaagaatatctgagaggtttaaaaattgaaaaaaggtaatttaacaatttaattctattatttagaaatggaccgtcataatttatgggacgtctacttttaagcaatgggcgttgtccaaatagcaggggctttatcaacttggttgttgacatttatataataaattaattttgatatgttgttatgtaattgatatattttttgataaagcattaaatataaattaagcagttatctaaatgttatattttgtgtcgttgatacagccatacttttgccttttgttaatataaaacttcataaagaagcgttatttcaaaatctgtcgaaaaaatggtgcaaaaaaaaaccacgaaagaatagcaagaagatttgtatgggcgcattttttatgaccaaatagcgtcgataatataggatatataatttttgttggccacaatattgttggttatcgagcatttacacgaagtagccgacaataacaaatttattaattaggaaattaaaaacatttaaaaaatatcaaatcacaaacataaaaaacaatatctcatttaaattaaataattttattaaggtaagtttcttgcacttagagagtcaaaagctgtttttggggaggccactccttaagtgttgggcatattatcttcctaaacaaacaatagttagtaaagaaaataaaatattattccaccatgtttttatccatttgtggagaatcggtcccagacgcccctgcaagcaggggcgcatcctaatagaaaagtaacgattattgtgcttaacagaattagaccaccataagatccttatcactgtcgagacgcattctttttctgatcgcccctgcaggcaaagtatcccactaaaaaaatgtaagcaaattttttgttataatctagtttacctgatttttgtacttggctttgttcattttttgggctaatgggataagttcagcttgcccacggagggcccatttgtccgcaaaatccttgcacatctgttgaattggtgcccgttgaagagcccaaaaacgtgtaatttcacaggaagcgcgctgcaactcggctgttatttctttgtcaaattttttgcgttcaangtagaag

SEQ ID NO: 6662 - DNA, 1848 bp, Heterodera glycines
cccgaagctgggctttgggcactggtttctattgttttcgcttcttcgtctgagtctgacacgtccaccaacttggtatgcttttcgttggtcacaaattgctctacatcgcccttgccattgccttaagggttggcaaataaaaacttattcccaatcccgcacttttaatgtagaaatgttaaattaattaatccttcaaacctgtgtcagaagcaggcggcaaattacaaccaaacacagcagtattattaatatccttttcaccaatttcctcttccatagtaactaccaaaaatatatatatgcattaaaaagggaaagtattcaagaaaatgttaaatcaagcagtaataagtcacaattaatttaaaaacgatattgttttaaatttaatttaaatgcgtgcttcccactaagcacaagacccatcttttgaagtgtctgcccttgcgacttaaatacgaaaattaaaaaaaatagaatgtacaacaccttattgactgtcatagcaaagcatggacgaacagggaattgtatacggcggaaacgtaagcctcgatgatgacgcccctgcccgtattcaaacttaacacgtggaatgagaaagtcttgtccttcgcgagagcccgtcagaatacggcagtgcaaattttcatccgtcatcgttttgatttgcaaacgcgttccattacaaaggccacacgttacatccagatttctgataagcatcactggagcccctgcctaatttaaaaaatgaaactaaaaaataaaaaaataaatgcctttaaaatgagtttatgtggcggtactccagaaggggtttcgttatgaatcgcttcgagattaaagtccgagcgaaaagtgccaaattcctcttgagcttcgagtggagaatctattgactcgtacaatatcggagcccctgctaaacgatcgattgcgaggtcgttgattctctgcacatcattgttagtggggcatagtatcgctgaatctttgatgatatccgaatgacgatttggatcgcaaaacaatgcactcggaaaacaaaaatcgatgatagattccaaagtacgcgcaaccatttcctttgggattttgagacgaaactgtttgttcgcccctgcatcatggaggccgttgccgatggtgtttaaccactcgcgaaattcaatttgtcctggaacaacgcgcatgttttgcgttaaactgaaaaagattgaacttattaaataagggaaaaataacacctgagctgtttaaaatgatcaaaaaaaagtgtctccattttaatgctctcctgcacttgatcttcgcgcgtgccgtgttcaacaacaggggtcagttgtctccaatctccgccaagaacaaccacttttccagcaaacggtttgtcaacggcacaaacatccctcaagagacgatcgacgtagcgaaggacttttttgctcaacatgcttatttcctaaaaattaatttgtttatttaaagcggaagtgataattacatcgattatgattagttctacagcgcgtagttgtttcgcccttgcagattcaaacgcaattttcggcggtgaatcatcatcaatgtcattaggcacggagaactgtcgatgtaccgttccaccaccaattagcaacaacgcggcgattcctgtgcttgctgctgaaagcaccgtgccgtttaggagctgaaacaaaaacagagatgaaaatagtcgttatagcatacctttcgcccttgctcattattgttagcaatttgatcaatttctggctttccagcgaggcaccaacggatcagggaattgtatagataagtttacctatttataaataa

SEQ ID NO: 6663 - DNA, 1585 bp, Heterodera glycines
  unsure (1)..(1585): unsure at all n locations
cattaggtgatgcatcggtgaaaacatgtaattgaatcttttccagtgttaattcgaggcgtgaagcgcgctatgtgcatcgtttttgccgcccagagggctttaatttcatcccattctttggtctcttccgctgggattggatcgtcccagccttttgaaccatcccataatttttggaaaaacaatttcgccccaaccaaacaaggcgaacataaccctaaggggtcaaaaaatgacgcaactccgggttaaaccgtccggactaggaaccgtaggaaaagtcaaagacaaattgtcctcacaaatagtccattttagtccgagaggtgcctcatttcggaggcgatcattttcaggtatttcgtccaaacttgacggatcagccgcaatgaattcgcacagacgcatttgagccgcggcgaaaattttttgtgcttcggctgcctttctgcgtgcttcctcaggcgaatcagccaaaagcagaaggttatcaacgtaaagcagagatttttcccggatttcctctgctaactcactgggaaatgcttccaaatgatgttggagtgtcgctgccaatagaaaagggcaagacactattccaaatgttatcctccgaaagcggaaaacgaggagattttccccagaaagtggtgcaaatatattttttacccacaaaaattttgaaaattcacggtccgattctttcagacttaccatcagaaaagccttttctatgtcggcccaaatagggtattttgtggccctaaactgaatgagttttctaagcagttcgactaaatgcctacttcgaatatttgactgttataggcaaagaatttctaagaaaagaatattgtacggttcccaaagagcatgtatttatgacggaaaatcctcagaaaattaatgagtcgcttcaatgtccaaacatcctaaaaatatcttttcataaaaatattcattagcaaagaattcaaaaccgacttccttttgccatttgattgataattttattgcaatatttacaaattaatttctccttttagtactaattcgaattttaaaattttgttgccgtaataaccgactacaacgacgcgtcaccaatttattttagaatctgattataaaatcaatgcgatacaaatgattgggttttaactctaagccgttcgattaaatgcctacttcgaatatttgactgttataggcaaaggatttctaagaaaagaatattgtacggttcccaacgagcatgtatttatgacggaaaatcctcagaaaattaatgagtcgcttcaatgcccaaacatactaaaaatatctcataaaaatattcattagcaaagaattcaaaacagacttccttttgccatttgattgataattttattgcaatatttacaaattaattttctccttttcgtactaattcgaattttaaaattttgttgccgtaataaccgataccacgacgcgtcaccaatttattttagaatctgatgataaaatcaatgtgatataattgattgngttttaactctaagccgttcgaataaatgcctacttcgaaatattgact

SEQ ID NO: 6664 - DNA, 4297 bp, Heterodera glycines
ttttcataaaaatattcattagcaaagaattcaacactgacttccttttgccatttgattgataattttattgcaatatttacaaattaattttctccttttcgtactaattcgaattttaaaattttgttgccgtaataaccaactaccacgacgcgtcaccaatttattttagaatctgatgataaaatcaatgcgatataattgattgggttttaactctaagccgttcgattaaatgcctacttcgaatatttgactgttataggcaaaggatttctaagaaaagaatattgtacggttcccaaagagcatgtatttatgacggaaaatcctcaggaaatttgtcggcaatttcgttgccgacgagagggccagaggaggacgaagcggaatattggtgttcaacgccgacggtacggcgagggaactgtcagaggatgaggaaaatgagtgggccggggggatcttctgccacccccccccccccgcccaaccgcgggacccgaacaaaggagggaagaagcgccgaggaggacggcgctgatcgaaaattccggaggggacattcccggataaaggccattgccgtggtgaacgatccattttttaaattcgacgacatttttcccccctctttatttctctctttatttaaacttttcatttcctttcacttttgctcatttacataatgttttccttcaacttcaccatttgccttttctttccaatttttttgcccattcacatctgcctccgattttgattcctttgttcacactttctccgatcgccatttccattgggccgtttttgcattcatctcattttttccctttgtttggcatttttctccccgccgatttttgtacccttcggcgtcgcacttttgcatcttaatctttgcccccccccagggggaaaatgtttttggttcttaagtattgtttatcgtctaattctccacacacattcacctcttgctcttcacttttttcactcctcaccatctttttctttttgctgaatcattcccaatttttgaccccctcaataatccttatcgcccttcccttcctccaattttcaccatataatccatcaacatctcgcatataatcatccacctatttttgaccatttttatcatcatcatcaccaataaacattttgtcggaaaagtgttgaaagggtcagagggcaaaaaaaggggggaaaaatcgggaacgaagtgaccaaggggagccaaagccccgagaatcgaagcgggggacaatcccccgcagagcagcagcaaacaaggacgggagccagttcccggcggttgacgcagttcgcggccggaagtccaactcttctcccgaacctcaaccgggagcgccggcagctcttcaaaaagtcggtggtgccgttacagcaacaacagccaaccccatcttgtttgtcctccccaccccctccccagttcactcccttgggcacggacccaacggcagcagtagcagtttcaggaaattgagtgaattgggcccgagggacgggagagaaactcccgcgcacagaccccctagccgtcagcgccggccgagttttctttgccacaaacaatttggtgccgttagcagggggcaactgcagccaccaacaatcggtctacgagcgaccaacgagcacgaattcgagaagctaacgacaatttggtgccgttagcagggggaccagcaacaacaccccggtcgcaaaggaccagcacaaccaccagcaacagcacttcagtcgccgaggaccaacacaacgcatttgaacaaaaatggagcgacacgacgacgaccaattcaacgaaaacgcgaatcagggggatcctcccccctctgatcagcaggacgagaggcgagcgatcggagctcagccagccaagcccaagacagtcttggaagcgcacggacttgggacaagccaaccgggtgttacacccgccgtgacgaagaatttgcgtagcggactaatcgcagtgcggtcggcacgggaccaaatcgaaagagcagcgggcactcttgccgcgcgaatcgtcgaagcgcgggagctgatggacgacgattacacaagggggcgaagcgctcgaccacgccgctcggatgatggcaatggagcgggggctcggagaagtcaagcgaatttttgaagggcattttgagaagggcatagccgaagcgggtgcagcacccgaggagcggcaggatttcttctatgattccattgccgcccctttgccagctgcaacgaaataccttcgactgcgggagcacccaactcccgccgaactccttcaaattgcggccgagcacctcggggatctgcgagcaatgcggcaaacattcgaggacgaagaaagggagagcatctcccgatcgagcagatcagtcgagaccgagaacaatcaggcggaggaagaactcccacgtgccatgccacgacggagcatgcaagagtgggagacatcgttcagagaagcttatgttcgacagcatgacgaactgttcggccagcagcaaccattggtcaaccaagcggaacgggtggccacacccgtaatgtcaaacatggccgcgcttatccaacgacgctcaaatgctccctcggtggccagtgttcgtgtgaacaatccggtcagggagtggatggcaaggaaccaaggggtcgggaacggacccccggcacaggcccaacaaccaacacaagcgcaacgcccgctacaggccgtacagcaacgcctcgaacaacttacgctcaacgatccaagagccaatttccctcgggcagcacctcatttccatgtccgacgggaggaacctcccactcgggaccgtacccgagctcagggggtatttccttcacggcctcatcgcccagacgaatcagctggcatgttaacgacctttgaagcagtgcgcctacaaccgccgacattttcggggaggccggaggattggaccactttttgggcctacttccaacgggccgtggacgacaagcaaattcccggcttcgagaagcagcttcatctgctgcggtgcttaaaagaaggatcgccggcacggagagcggtggaagtgtacccaccgtcggatggtaattatccggtcgtggtgcagctgctgaaggaacgatttggggacacgaacgacttgcaaagagcgatccgagctcagcttctacacttgcagccagcaaaggacaacgtgtcgagcttgacggcagtgatcgacgaattcgagagaggagtgtgccagctcgaacaactgggagcgaacgtggacgacgagtcgttcggcccgttgttggaggccaaactcccggtccacatcctcacagaattgaggatccgggagagtacgatgggagcaaaatggacagtgcgagagtttcggaaagcggtgggagtgcaagtcaagtgcatgagggccgccgaatccgcgttggcagcaatgaaaggacccgaacgccgacatgagcagcgatcggagcccgaacgaggcggacggaacgcccgaacaggacaaggattccagcgggcatttatgatcagagatcagcccccggagaaacgaacgacgaacgaagcacacaccaggaccgaagtcgcgatgccacccactcgaccagcgaatccgaatcgtgtgccgctcgggagttactcccgaccgatgggagcgcattcccaaacacagaatggacaagaaggacaaccccgacaagggtgctcgttgtgtggacaaacgggacaccaaccaagccggtgtggcaaatatgggtcagcacaagccaaaaggaggagactgatcgagcaacgccgttgtctcaaatgcctgggatccgatcacaccgcgcagcagtgtacacggaaaaccgcctgccggacgtgcgaacaaatggatcaccactggctgatatgctggaagggggagagaaggaacgaaccccctagccactcgagaacggaagatgcacaacaaaatcggacgatgatcattcgggaaattgaagcgaagcacgtgcgcactccccctcccaccgagtccagcaaggacgggatgggggctaaaggggaggacccccctttgctcgacggagagcagagagcattcaccaccgtgggccagcaactcccggcctatttaatggtgtgcccggtggtggtggcatcggaggatggcatgacagaatgcaataccaaatcttcttctcgacccagtcagtccatggcgactacggggatgcggctcctgatcaagca

SEQ ID NO: 6665 - DNA, 6111 bp, Heterodera glycines
taagtatcatttcatcatagaaaaatgtgaaatattcacctgagatttggtacattatacacatattcataaatttgtacacttcctattttttgcaaaaaatttgttttcaaaagtctcaaaaatagcgagtaattttggatcttgggctcccagtgccagtgcaaatattaattttttattaagtaatcagaacgccaaatttgtaaaattaaaaatttatgggattttcgcttgtaaaaaacaagagcagatctcgagttaaaaatctaacgttcaaaaataaaaatagggattcgacagagggaataaaaaatggatctaacaataaacaaaattttaaaaaattggaattatagtaaaatttttacaactatgcagaaattttttctttttctctcattttggcgtactatttccatgtctctaatatataagataactagggttgtaaattatatggactaaaaaacgtcaaatatggacataaaatatggactaaaaaagcccgaaatatggactaaaaagctcaaaaatggccaaatatggaccaaaatatggacaaaaactgtcaaaatatgtgttttaaaccctcaaaaattccaaaaaaagtgtttgtgttcaataattgcttaaataaacttaaaaaaacaataaacaaccaaaaatggatttaaaacataaaaatgcaaattttttttattgtcgtccatcgtataaaaaatatttccaagtttgccaaaatttcaaaaaaattcttttttaaaaaaagaaaagttcgcaaaaaatggcaatgacgacgaaaactcaaatttttcggattttttggggtctaatttttttttaatttccaaaaagtccatctttaggggtgcatttttcgcttttcttgcatttttttttgtgaaaatttgccaaaaacggccaaaatattgactaaaaagacaaaaatggcgaaatatggatttattcccgaaaacccccaaaatatggatttatatgatggactaaaaaccttcagcaaatcaaaaaattttaacgtagaaatgctatttttgagccccaaaaatatgttaatccatataatttacaaccctaaagataacaaatggttaatttttgctaataaactattttaaaatttttaccaaattttagaaatgttaggcacttttgcagttagagggcgcgaagaataacgacagagaatttcagaaagagatttatgaaaatatatgtggaaaattttgtaaaatatttttcgggtgcccttcagtgcaaaagtgtcaatagtaattgttaactctattaaattgccttttggatggaggatctatgatctatgacatatatctgctgggaaagaagatatcaaattttgcaactcaaaaatgtctaatttctaccgtatttcaagggaaagtgattaaaaatgatcaatttcttcagcgggtcgaagtcgtaaatcccccatttttggcccactaaagccccaaaggtattgtaaattcggttttcgttttccaccaaaataaaaaggaataataccaccacatcttttcactttcaattatcacaattgattagccatctttttaaacatttactacgtctaatttttcatttctttttacagatttactttgaaaatttcctttgggtcctaccgaattttctctctctgaatcaaatggccttatttatgtcgcagaacaatgaaactagcaaatctataaatttttgttattatttttgcttattttgcgcttccttctccattaaatccggtttgttttgtcaggagacaccaaatgagtatcaattcgctgtaattttgcgcggcgtttgtccttccgccgtctcattattgccttggcgggtcggcccattattcactttcacttggcgattcgttcgttttcgccgtcagtcggccaaatttcccccagcaaaatatgttttaacgcgtaaattctctttcactttttattatcttttcacatttacgctgaattttaaaatatttcactcttttttaattaatttaatttaatttttttttttttgcttcccttcgtcacaaatttaactttcgtttcgtttccttttccaaaatgaattggtgcgccgttttgtgctttttgcttctcatcgaagtcgcctttgtgccaattgtgaacagtgcgccactgtaagcactttctgtgcttaattgcctcttctatcccatttttgccttttccaaaaagtgagcgggaaaaacggctgactgccagccaattgggcaaaggcgccgtcgtcggtgccggcgtcggcttagtcggcgccgcactttacgccggcggcaaaaagttttggaacaaccgaaaagcaaatgctgcggcaggtaaaaaatggactgataaagcaaagaaaagtaattggaatttaagccgacgcaggcggagccgacgcggccaatttaaaaacaaagggccgaaaatgaaaggatgccaaagaaagacagaaaacggagagaattttaaatgaaatttatgaaaggacagataaaattttaaaggtgcaaaagttgagaatgttttaaaataagaaataaaaaaataaaaagaagaaacagcaattcattagccaattgctaaaggacttaaaatattttaagaattcattgaatcttaaaataactttattttatcttgccaaatatattcgactaaatttaataaaataattatgtttgctttaatatacaaaaaaagaaaaacttccttttttctgcccattaaaatcaaatgatggaagcgagctgagcaaaaacggccaactcagcccacagttattcctttggaggtgtctatttttgtttgtttgtgaacattgcaaatgatggacagtacgaactcattagtgggtaataatcccttgcccgtaattgtgttcgcccgctttaatggcggtgtttatgcagcgggggggggcaaaatttggccattgctaagggcgccattcgttgacgccaccttttttggccttataaataatcgcaaaagaagcgcaaatgcattcattccctcaaaagcaaagccatccatccatccgatcattcgcttcatctgccaatccgcaaaatgtcccttctccgtcctcaatcgctgcttcttctggccgctctttgcctgtcctttgcgctgctctttgtcacttcgtcggaagagggagggcgagtgaagcgcggcggatggccttgggattgggccggcaaacaactgtgcaaaacatcggcaaattgcaagtgcaagtgagtcgaagagagtaattgcgctaaaaatagtttggaatgggaataagggagggaatgggcgacgacgacgatggcacttcacttccctttttagggatggcaaaaattgggccaaatgtgtaaagtcggaaggctacgcggccagcaattgttgcgacaaaaattacgtgtgggcatgttgcgggaagaagcccaaacattaacgaggagagaagagaaagggagagaatgagaagcgagttcccataattcattctgttttggatttttagtctttttttctttttgggtttttttggtaaatattttctttagttattataaattgtttggcctaaattatgccattggaaaaaaatgtatttgttttctattacttttttctcttaactccttgggcctgtacgaaaaactttttttaattgctgctgtttaaattactttttgagttatttcatcttttttagcgcatttattttttaggtacaaaactcctaaattttgaaaattcttattgtcaaattttgccatttgccgaaaatttctaaagaaaaatgtacaccactgaaaattgacttttaaactgtaaaatgcaaccaaaaataattttaaaaattttaagaataattttggtgtttccggtcctaaatcctaaaatattttaacggatttcggtagaattcaacgcaaacgcgcagctcatttttaatcaaagaagtcaaaaatagtttattcatttttgtgaatagcttattgtcagagaacttaacttttttatgcttttaataaaaaatgtttttttttcatttttgcccatttggcggctttataaaatgcattagcatcattgatgatgatcatgaaatagcatgggcatcaatcattctctacttccaaccgtaaccgtatccgccaccgtatccatatccaccgttgccccatccaccgttgttaccccatccgccaccgtatccatatccaccgttgccccatccaccgttgccccatccaccgttgttgccccatccgccaccgtatccatatccaccgttgcctccccaattattgtacccatagccgtggcctcgttttggacgagcaatcgcagggcttaaaaaatgaaaaataaattttgcctaaatcaaatgccgaaaagtatgtttaatgttgatgcgtcactgactttttctgtccgtcctccgttttttgcgctttatcgtcagccaacacagaaaagacgagaagagccaagagaattgagagcagaatgttcttcattttgagggccacgagaatgaattgtccgagtcgcaattccctccccttttatttgccatttcgccttcgaattccgtcaaattgtctgacctttcgccgttttttgtttaaacttttgtcaatgttctccgatttacaaagtcaaatccaaactccaaagctcaaggtttttccaagatgttcccctcctagtccaacccaaggtcaccaataatatgattagcccacaaatcattcgttcgctaaactgtctcgaattggtcatgacaaaaccaaagaaaattagggacttttaattggttctttgaaaggtggagcaaagtcgggaatggagccgaaattcttatacatacaatcttatcaaatttacaaatattctgaattattccaaaacctatcgttatacctaattacggaccattttatacggtcgagaatttttttgcatttccgcattcgactgacctcattttatttaatcctcaactttaatctggagaataagaaaggcgaccatgatcatttaaccctatggccatgattaaaaaagataccacgcgaggggagagagggcgggggcagaaacaacagccattttagtccctgataaaattagacacaattaattttaaaaaccaaaataatatttttgataaatcaaacttttatcttttagtatgtacatactaatcaacagggcttctttttttatgtaaatacatgtttttttcctggattctccatagcctaattagtaggaaaatcactttcttttttgtgtttgcgaacaaaaattggacttttatttacatattttgagatttttctacatattacatatgtacatattttggacttttttcccattttttcgtacatattttttgagaatttttaaggaatttttttaattaaaaatgcccccaaaaatatccaaaatttcgcaattttttcaaaaattttgagaatttatagaattttttgtgaaaagcaaaaatttttttgaaagtgtgctccaaaaaaatatatattttttttaaatactaaaagatgattctaagcctatttaggtcatttttattgcaatttgtgcctgtttcaccctttagtaggaattttttccccaaaaaaatcaccatttaaaaaattttatttacatattttagtacatatttctggatttttgtacatatttcatacatattttagtgttttttatacatattttatttacatattttgcgatttttcttacataataaaagccctgctaatcaattaaaaataatttagattaaatttaacttacctatttagtttaaaaaatataccgtaatttataaaataataattagaaaaataaatttgtttaaaatgttaatacagtcatatgcaaaagttttgagtaccaattttctcgaaaatggagactgctatgaaataattacgatatcagaaaaaacccttgcctgtaattaagagaaaagagcgttatttatatttttgctagaataagaatttggctgtggcaaata

SEQ ID NO: 6666 - DNA, 1295 bp, Heterodera glycines
  unsure (1)..(1295): unsure at all n locations
cgaaatgaaaatttttaaaaattttccagcaaataatggaacattttttcgaattccccccccccctaaacgaaaattaaaaaatttaataggcaattttcgtaacaagtagcactcaaatttccaaaaatttttcccggcggcgcctatcggcaccgccggacctccattttccactatttttacaagttttttgccttaaaacggccaaaattgggtcatttttagtgaaaaaaagttattggttaaatagcaaaaaaaaaaggtcttcaggtcgggtccccccccccctcccgaaaaatgtttctagatacgcccctggtttccagtttctttttttcttattatgtaagtgaacaacaaattctttaaatattggtttgtaatccctatgaatatctaaaacaatttgagtgggaaagcaatttggaaaaaatggggggaccttgcgactntaaagatcgaaagtntaaaaattccttaattttttaagtgaagatgttatatgaagaattttatgtaaaatttgcaaaataattaaataagtgaatcaaaagggacaaggcaacaaaaacacaaattcacagaatcaagtaaaaaagtgccgcactttgcagttcaaatgtttgataaacaatggcaacgtctcaattgtcctgggccatcgctccgttgtctcttcaatcaaattcccattacgaaatccatcaatcttaaaaagtgcaatcacaatgcaaattccgattccatattttttcccaattaactctcacttgaatatgatccggtctgtgtgtaagtatcagcaaatcgccatgatgacggagaccattcccttttggcgttctgctgaagaggaaagagccgctaaatcgaagcttaatgcttattcatcactaatcgtccgagattaacctcctttcctccaaagacagcttttgctcttctccgattcgtttcagaacagaaaaagttgcggcatcatttaaactgaaaagtggcggctgaatgctaacaatgccgaaatcgagctggtgaagcaaatcattagaagaaacaaatgcaacgggggaagtcggcgatggaaatcgcttcatccgatggggacgagcagcggttgttgtggcctctttcatggcttgtcgcctcgtcaccatgcgcttctttaccagtggcatcccaccatcgctggtcacttctccgtctgatgtgtttctggccatgtcttctccacgtcgcttcccccttttccttcggcacattctttccattggcattcttttcgccgttctttt

SEQ ID NO: 6667 - DNA, 6051 bp, Heterodera glycines
agagggcattagggacaataaattaatgaattaattaatcagagcagtgaatcccttcccattggcagacaatggacaaattcaattgtggcaattccttttggaactgctctcaacgggcgattcgtgcattacgtgggaaggcacaaaaggtaatttagcaaaaaaacgaaggaaatgggaaaacattttgaggagaattcaaactgttgaagccggacgaagtggccaaaaagtggggagaacgcaaaaggtaaggcgaaaagagaaaaaatcagcaaacgaagggagagcaattaaatggaattgattcatctgttaggctttacggattcggcttaatcacccgccgtttcagcaagccgaacatgaattacgacaagttgagtcgcgcactgcgctattattatgacaaacagttcatgagcaaagtgcacggcaaaaggtacacgtacaaattcgacttggacacattggcaaaggcatgcgaagcggcggcggagggaccgaaagaaatgccaaaagaaggacgaaaagggacggcagaaacaatggcagaggacgaaagggcagcgaattggggagggacaaccgcaggtaaaaattaaacgaagagcaaaatcaatgggtgccaatggaaatgggtgtggtgccatcattaattgtgcccttacctcccatttcagtgtgccccttcggccgatcatttggcatttcctccgcaccgttaaaacccttcgaattgtgccaacttaacaacccgtgcaattcgactccttttccaactgctgcacttccgtgccacgccgttgctgatttccctgcatgtgtgcctgattcgacccccttttccccgtggcactccgtgacccatgccattcccggccacgcgatccctccgtccattttcactccttccgccccttttggcacttttaattactcttccaatgccttttattctcccgaccgatgaaaaatgagaatttaataacaattatattttctatatgttttattttgtaatcaaataataatgcacatttaatgaatgtttcgttcgtttatttgccaatgcaaaccaaaaaatggcctattttgggctacccgaattgccctggcaaatgccccccccccctctcagcaaaggacgatgctttccgccacgcccatcccttctccgtcccctcgggcatcgttgtccgccgatttcttcgcccccagccgaagtgccgttgttttgtcctttcgtttcttttttattcttttctcgtttcccggtgtttgaagacattgggctggcgaactccgttcttcccaaatggaggtgaaatttgaggaggaagaagaagcggacggacgagtggcgatggcattggcattttgggcactgttaagctgctgttggacggagtggtgcagggaggacgagcgggacaaaaagctttgcccactcatgctttggttcattctcgcactgaaaaaagccaagaaaattaatccgaaaaacggagaaagtgattcaccgcagcttcgcctcgtgccaaatgtaaaaacggagatacaaagcgcggaaacagaggagggcactcagacagaaacagaacgccaaaagaatgccaattgaaatcggacttagcgaagtccaaaagccgagcggttcttccgtttgaacgtcgatgcaagttttgaaaatggatgaggacgaatcagccaaatgaagtagaaaatggacgagatggtactccagacagaaagtgtaattctgaaataatacactcattggagagacattggagggcagagaaaaagtgggaagaaaaaaaacagacggtgaggggacggagacggacgacgttgtaactgcgccagggattgtgcagcgacaattggatggtccgtctctgttgggtgatcgcatcgcgcacttccaacgacaaatggactcgctcagcagctcgaatctgatgacaaaggtggaaaatgaagaaaagcaatagcaatgggaagaaaagaccttcaaagagtcattccaagccaaagcaacgtaatgagagccaatttcaacggcactgagctcaatgacgggcttttcaacgagtagccgaagcacaaccacagcaccattcacgcgacacgtgtaattgccggaatcctcaaaaaagtcaatcaaacagtccaaatgatttgatgggctaattggccaatgattattgttggcctaattagtatcaatcccagtccccgaaattgtcaaaaactaaacgcacttctgagaccaacacttcaaaccgaagttgctctccgtccgcttgaatccttgactttggccgtggcatttgggcaccgttcgtcgaaattggcatcgatggggatggacgattaagctgaaagtgtggacaaaaaaaggaattttgacgagtttgagtgctcagaaacgaccttcagttgaaagagcgacggatggacagagccaagaaaaggcgagtcgaaaaggggcgaagaaaacaccggcggactgcgcaattggacacgacggcggagatcggcagactgatcagtgggaggggatgacggacggacttcgatcggctaaaagggacttccatttgggccgatcagtcggttttacgtctccagcagaggacgcgttcgttgctgctgccacatttttggcactttcgtccttcgtctccttttgatcagttccgtgctgtctctgctcatctccgatcagtttcgtcccatttggcattgtccattcagtccctccctcttttccttctccgtctcctccttttccaccgtctctgtccattctcggcgcacaatacaacgaaaaaaactggccaacttttgctctaaattctttgcccatcggcaaaatcggctcgcgcggacactctcccgttctttggtcggtgttttgtctctccgcaatttttgccattgaaattcgccgctgattttccccctcagctgatgacacgcaaatagcctcattaaggtcagttattttttggaaaatatttggcatccaagcagaaacgcaagcgcagaaaaagggattggaactgagatgaagacggacggggagaagcagaaggttgggcgagagggtggacagcgaattgttggagaagtcgaccctaaagagtaattattgagaggagactgatcagtgatagggaaggatgaaaggactgatcagagacggaattgtaggagcaattggaacatactgatcagtgatcgagagaaagaattgatcagagaaggcattagagggtaattggacaatactgatcagtggtccgaggacgggggaaaggactgactcaaaaagaagtgagttgttggagaaggcgcccggggacacaaattggagctttggattgttggccaatcggacgaattgcaaatttggcaatgcggcgaacgcccgcctttcgaccaaacgcagaaaatgacagtcgcaaatttgaagcgtctttaggcgaaaagtgaagcggattaattggttaatgtatttttattgcctgaagcattggctgggccaattccccttcggcaattttctcgatgggatttccgctgaaatttagcattcgcagggccacaaattggcggatgtccggcggagttgcggtgaaattattccaggaaaggtcgagagattccaactaaatttaattttaaaaaataactgaataatttaattacttggaaaagtggagaaaaggagtcatagtcgaatttgtggagtcgattatgagacaaattcagaagacggagatgttgggcagcgaaaaaagacgaactctgagggggggggggggagtgatcagagaaaggaaggacaaaatcagactctgatcactttgagaagagtgaatcactcactaatgagccaaagatattttggtggataagcgaataattaattagtcaattaattattaattttgctttggataattaacccatagattggtgattttgtgacctgagctgaggccaaataattatggctaaggtccaattcttcaattgccggactgaagcgcagaatatgttcactgatagtctaaaaaaggcaaaaaacggtgaaaagattagggaaaagggaaaagccaaccaaaaggcaattagcgctgagggaaaggcgccgcaggcgaaacagtcgaaaggcctcccattcgacgctaacgatgcgattggtgttcaggcgaatttcttcggcattcggaaaggcaatgaaactgtgccgggaaatactctgagagagaagagtgatcggagtttaaacatccaaagttaccgtaattaaattttggctgaggtcgagaaaaaccaatgcgggaaaagcgggcatgaaatgagaagtcattcgacgatcggtgaatgagaaaaagctaaaatgaaggtggaagcaaaagatcgttaacgaaaaagaaaatacataaaatttcccaattttggcataatttgccttaattgccatcgtttgactggagtttaaggtgaatcccctccccatttcgtaaaatgccaaaatgatctcctctgctcaccttttctctacccgcaatgtctccactttctccaatttattttcgcgcaaatccaaccacattaagcgttccattggcggcaaaatgtccaaagagtccaattggctgcggacaatgctcagattgagcaaagtcgaggcgaattgttggccggagggagtgccaccgaaaagagaaagaaacaaatgaaaaaaattgagaacagtggataaaagatagagaagtgcctgaaccgaagaggtggcgcaaatcggcacggcttaaatcgctgcaggcgatggaagagccatctgatcagtgaccggaagtcagagggaaagtgatcggtcaaaacaaaataccctgcgaacagtggcatttgaggggacaaatgcgaatttgctgatgaaattggaaggacggcggagaaacggagggagaggagggcaccaaagggggaaggagaagcaatttgagcagcacaaacataagaagcaccggcaaaggcaatggcatggggaagagagggaatgacatcgatggcaaagagttatggcattttgggaacattttggaaaataggcaagcagcggaaaaaagacataaaaatggggaaaaagctgaaaaaacaaagaatttgaaaattaaattttaaaacgcgtgaaattttaacgaattaatttgaaaaactgagaaattaaagcaaaacaattgtggacaaaaatgaaaacagaatgaattggcgaagacggaggaggaaaagcgcataaataattcagcgcttccccccccccgccctcctcactcattttcaaccaattggtccttttgtggacaaagagtatggccaatttaaaacggaagtgtggcattgataggcaattgcccataagaattttgcattagcaaagccacggaaagcccaacggaaatctcgaaaataattcaacagataaattggtctaattgggtgctaaataacctaattaaataaggtaaggcagccacacattttctcatcctttggcacttctcgaggaacgatagccgtgggaaagcgatggaatggacggcaccgccggagggcatggccaatgcgacgcctatcgcaccctcaaagcttctcatttaaagcaatttgaagggattgcgggaaagggatggacagcataaattgaagggctttctcttcccaatcaaattttacgcttcccgaaaatgaaaagcgaaaagtcttagcttataaatatgtttttgagagagacagaggagcagcagaaggccatttccgttgtttttgttgaaaataaaaagcgaagggaggggcaaaggggggactgaccacaactcagccaaacccaagcccaagcccatccaattcactcactccgccgcaattcgactgactttttttttacctttccatcgcaatgccacgagcagaaaaagcaacagcagaagcagtagcaggtgtcaacgtcaatttttgtgatatgag

SEQ ID NO: 6668 - DNA, 1117 bp, Heterodera glycines
ggctcgtccaaaaacggacctttagtccggaccaatgatcaagtccctcggtcccgttcaaattccgaactactactattaattaccaatatatattggggtttttatttattatatttgataatgtaatttcaggcattaaaaacgcaatcggaaaatgccaggaagtgaccgatggccaatccgaacaaataaatgcggagagaattgataaaacaacgtcgaggcgaaattcgcaatttgaggacgaagaaagagaaaatgaacaagaaataagaaaggcacttctgccaaaagcacaacagaaagacatttatttatccgaaatttaattaaaaaataaataaatttttaaattttagcattaaatttttctgtttcgggcggagaccaccgaagagaaatgagaaaatgggccaattgggaggagagattggccaacccaacaaagtcaaaactgagccgacttttgtcgtccatctgaacaaaaaagggagaaaaaggggaaaaacgaacaaacaaacggacattggcaatacgaaatgcctttaaagaattcaacgcatttttgacaatgtccgaagaaacaatttgcatgggaattgtggcattttgacgcacaatttcgatgagtttctaaaaattaaaaatcggagaataatttgtacgacaattaattaattaattacccgttggatttgacgagttaatactgcactcgttaacaagtcatttgaacggttggtgagaaggaaagcgaagattaaatgataagcgatgagaaagggctgaaaaataaaatagtaaataaaaaaagcaattgtaatttgagtgtactgtacgagtggtggtacggtacaaaatggccgttcatttaaaccttcaaaatctgtgccaaatgccaaaggtcggaagtgtccatcaattcagtagaagaaaattcatcaattgaggaagattcagtgggaaaggaaacaaattcgtggtcaaaaagacggcgaagaaaactgaaaagaggaaaactaattgactaattagcttaatgagcaaattaagcggcgcactgataatgattattaaattgatcgtcggcgcacaatcggacaatggcaccaaa

SEQ ID NO: 6669 - DNA, 1303 bp, Heterodera glycines
taattaaggaattaaaccccctttcaaaactaaaaacattatttaaaaaaaaaaatttaaaaaaaagaaaaaaaaaatttaaaaaaaatagaaaaaaatcaaataattaaaaagatcctttcgtacatttttaaaaaaaaaaaattaatccagataaacaattctaacttacgtcgaattaaactaatttcacgtttaaaaaatagaagaacagtctaaaaaagaaaaaaaactaaaaattttacttatttataaaaaacaacaccgatgtaaaaaaatcctgttaactctagagaaattttaaaaaaccaaaaagggtcagaaaaaaataaaaaattttaaaagaaagaaaagaatgacactataagcggtgctatgacgttatataaaaagcatcaattgaaaatttctaacaaaaaaagcctgttgaatgccagatctacactctaagtgccttcattattccctacacatatttatttttcaacctaattccttggtttattctaggaatttggtgtcaatttaccggtccccgaattagtaccggtttcggttagaataatggtaccgggtcgttcatcaaaaaaccatcaaaatgaaaatttttgacaaaaaattatttataactgcgcccaaaagcaaccaaattttaaaaatttgatatttttcaatagccctaagaattttctaatatcctgcaaaatttcaaaaaaattcattaagtttcaaacctgagaaactcaaaaaactttttttgattgggcccctcggtttcgataattttcggttattgcgctgccagtaaattttttgaaaatttgagtgaaaattgttacactttttgtcaaaactaaattgaagaatattttataaacatattaaattatacataagaaatgaaccaaaatttaaaattttaaaggtaatgtttccatttgtttagagtgacgtttccgattttaataatttggcaatttttctgtcagttattttcaatttggtcgcttaattgataataattagggagcggatttatatggataaaaaaatccaaaaaatggattataatatggatgaaaaatcacaaattatggacaaaaacgctgaaatatggtcaaaaaatacgaaaatatggataaaaaatttctgaaaattggtttgaatttaaaaaaaaattctaaaacccataaattttttgtcaagaaagaaaaaaatcattttaatatatgaattatagaatttgataagtgagacctcatatttattcttaactaaaaaaattaaatttacttagaaaaaa

SEQ ID NO: 6670 - DNA, 5560 bp, Heterodera glycines
catccaaaatcgcatccgaaattccccgccctcagtgtaatgtccgcgtgctcaattgttccccgcccccctttggccatggatgaaattgtcaggaagaaacaaattgccgtaaggaccattccgaacctaatttgccaaaaatacagttaaacccaccaaataatgggaaacagaacggcgtccattgtgaccggctcgaggtccgccaaaacggcacttaatgcgagaaattgcgaaagaagcgccggttttctgcgaaccgtgggacaaatctgacgtcagctgcttccttataataaacattgtcacgttccaattgcaagtcagagtcgccccggtaaaagccatccggggaaattccatattcgtcggagatgagttcccaagactaaatgtgtcacagctgaaatgttgccccgatggggaatcacctatagtctgatctaatattgaatcaggtaaaagaaatcaaataaacgtttatgtcccaaaggcaaatatggtatcagtggaaagcccataaaaaatggtatccaatggtatgctacttatctgttgaaattggaaaatgacaattttatacgcaattgtttttttcaaagcatgatgggacaacacttatgaccatgactgtattcactgctttccctcaacaatatttccaaagtggagacaattcactttatttaaatcagcaacaataaaaatggggggaaagtacgaggaaaataactgataacaacaatataaaaagtgctctgctaacagaatgaattgaagggaagccggggggaacattttctgctgggaaaggagtggcaaaatatagattaggcgagagactacactgacagacaatgagacaaaaattaagaagggacaacataattactaaataaaatgccaataatcaaacattaacacatcccgaccctccgagaaaaaggcgtcccctgccttttatgctcattcgcatccaataggtggtgggcgagttcagcttgtgccggcgtccgtctcctagcattccacgatcgggctctttacggcattttcctccacgataaaaaattctttggccaaatttggtgttagtctcgccgcgatggaatgatgattggggacgagagtcagggcggcgatcgcatagatccaacctcccatttgccgacgaagccgttgttgggctggccttccccctacccaaattttcagttgtccccaactgaaattggtccaaaattttccgtctccaaacgcgctttatcgcccaagcaatttcgccgttttccttccgctgtcgctgcttcttccgctctcctaaattctctgtggcattttgaattgtcgttttctccacagttgtgtgcttctgttgccgatgtttcttattatgtttcttcgtcttagtgccattttttgggcccgactcgtcctttctcttccctccaaagtttcgcggtgttttgtccaaattttggccatcaacaacaatttgacttttgatcacatctttctatcgtatctgatcttgtcatgggacacaaatgttttgaaaacgattaaaggcgaattttcgggcttcgaagctggtgtgaagtgtacgatgttgttgttcactacatcgagcatttttaagcccaattgattcaaggcattcgtgccgaaaatcaaatcgtacccaaaacatgactctgcgacgaatacacgaattttcgtgtttaaaggcccgcgctcaattggcagagaaacaattccatagcacttcacttcctttccgtttatgtcgatgacttgactttcggagcgggagatcacatcctttttgctaactttatccatgatttgagagaaaaatttggccgaaatcagtgaaatttgggatccgccgtccagcatggcatccaacttacgtccaaacaccgaaactttggtcgtcaaaattataccaaccgccgggctttcttccaaaaatcgacccttatccgactcattcgttgcttttccgaagaatttctcaatctcgggacggtgttccaagtttatggcgccaactaacaaatttccctttttcggcggttcgtcattttgttgattcaatagtggtggtggtgtcgactggagattgcagtttttactgatctgatgcgtctgatgtgtcggctgtgaatagcaatttcgagaagtgtgtccgactcggccacaattatagcaaacaatatgccttcgttggttttggaaacagccgttgttttggctgtttcgccaagaatttcgtgcggcattttgaactgcctcggctcgtgctgcttgtgcgatgaactcatcgaatgttgcacccggtttacgagtcatctccaaattcattgccaattctgagttagggagtgccctaatgaaatgcatggccgaatattcgtcgtagagctgttcgctgagccccggatatgcacaacggaccaagcgcgaaacacgttcgccaagctgatcaatgccttcattcggccgaagccaaactcctttcatcagttggtcaaacgccgtcaattgtttggcgtccgtgtcgtccaattgccgaatgatcgatgttctgatcagttggtagtcatggcgattttcagcaaccgcggaattgaaagctctctcagctttgccaaaacatttggaacgcagcgcccgaactcgcttctgttcaggccattcttcagtcgcaatatcaaattgcttgaaaatggcgttcaccgaatcggagcctctactgccgtccaaattcggaattgtgttcagcgtcattgtgtttgaaaaaccatccaggcttcgaatggcctgtgccatcatgccgtcaaatataagccctggatttggaacggtcgctcgttgtcttcgaatccgtttggccgatggttaattgtggcaatattttgactgttatgtcgctgatgaatttggttgccactatgcatcaataagtgtggatttggtggtgtccgtcgcggaattgctggccgttgggcctcatcaaaaagtggcctttctttttctccgtggccaatgttctgattgccatgtctcgacaaatctgcacttccatcttgtctcatcattacttgaagaagtcgacgccgaatttcgttttcatccatttcgttggcgaattgcacatttccttcgtgtataattgacgaattagtccggcgaatctgctcgagttgtgttcggtcatccctctaagcggcggtgataaaattcggcgtttcgaagtccaagacgttcgcaacaatgcgttaataaatcggtaccaagtcctcacttatcgcagcaatgcgttagcagtgggacgaaatcggtgaaattcgcagcaatgcgttaaaaagcagaacccagcaatgcgtttgttctttccgcaacaaaagaaaaatgcagaaccgcaacaatgcgtttgttctggtcgcttcttcaaatcagcttcttctcaatagtccaaaatttcataatgccggcacagctaactcttcgccaggagcgccacgtgctaaacttatgctgtttgggtcggggcctattcactgctttccctcaacaatatttccaaagtggagacaattcactttatttaaatcagcaacaataaaaatggggggaaagtacgaggaaaataactgataacaacgatataaaaagtgctttgccaacagaatgaattgaagggaagccggggggaacattttctgctgggaaaggagtggcaaaatatagattaggcgagagactacactgacagacaatgagacaaaaattaagaagggacaacataattactaaataaaatgccaataatcaaacattaacacaaaattaatttttacacgaattttgctgatgaaaaatttttttcacaattttttttttcgattttaggacgtattttcaaaacttttccatctttaggggtgtatttttcgaattttttgagaaaataccgaaatatggatatcaaatatgtaaatatggacaaaaatctgaaatatgaaaatgtggaagcaaaaaggcatactagaagcatcaaaccaagctaaaaacactatttacgtggtttttaggccgaaataagtgtgcaaaaaaaacatggaaatccatacaaatccggtccctaataataagtagggatgggatttattgttttttcagtatttttttcctgagctccccgtagcctgaaatgcacgaaaaacatgtttttagtggggttgttaagctacttttcgagttattagcaactattttatagttttttatttttagcaactaaaaaactataaaattttgaaaaaaactattttcaactattttggcgttttgtgctcatcttgctcaatttttttttcttcttctgttgagtaccgattcctatccttcaataataaaataaagatttgaaaattaatatttaaaatatgaaatttttttcctttttccatctttttagagtgctgcttccgatttccaaaaatctggcaatttctttgtcacttagagaaggattttctttcttctttttataatacaaattcattttgactgttttttcttcatttgaataggcatttgcttctgaaaagagaaatttttcaaaaaaaattttaaattaataattttacttttgccaatttcgatgccaaattcttttttccattttctgaatgtttttctgtgaatgcccaattctttcgcaaattgcttctgttttccatttttggacattcttttaaattcatcaattctttcaataaattcctgctttttcttttcgtaataattcttttcattaaaattcttttcataaattccaaattcttttttccatatgtaaatattctttcgagaaattcccaattttacgccaattttttgttcaattttatttctgtttttttccgaatattttcctcttttattaataccttcttttatagcgtgaaatttgtggacaatttcgtgttttttgtggtcattcaaatcactggcaattgaataatttaattcattttgattattttgataataatttgcattttgttccctttgccaatttgaattttccgaattttcattttcccattctttgccaaatatttcatcaaaatttggccgaattttcccattcttttcacacaaaatattaacagtcaacgttttgtcatttaaattgattgtgcataataatagcacagaaattaaatgataaaatttcattttcttcaacaaaagcaaatgaattttgtaatacaaaaataataaatattattttgggttttatttttttaaggaaatgaatgagtagcgagaattatttatttttatttttaaattaattttgcatacaaaatatagttttttgtggttttaatattttttttacgtaaataaggaaaggaaatcccatcatttctttcgggcttcattaatcaatatataaaattgtccgaaacgaaaaatattttaataaaattgtataaatttctatctctctctctctccttctctgtctcttttctta

SEQ ID NO: 6671 - DNA, 1037 bp, Heterodera glycines
tgagtgtacctccgcggtcgatgctgtgttttgtcattccattttttgtttcggttgcgcaacattcgatggaattgtttggtcgaccaatcgaaccgattttatcacttaaaaagcaaaaacaaaattagatcgttttttcgtacaataaaatgtaaccttcttccaccggaacatcggaaggtgaaatgatgaggccacaagtttggaccacattctgtaaaaaaatgaagaaattattaaatgacacaactgtttttgcaaaatcaaagatttgaaatgccatggatttacgaattcaatggaaattctgtttgttttttagctgtccgactctcttcaattgtaagccaaaatgtggaaattggaataaagtgtgagaaataggtcacctaaatccctttttttaaatttagtcctgaaatttttaaaattttcggccagtttagaaccccaaggctaaccgaaattaaagtaaaattgggatttttaaattttgggaattcgaatgcgagtagtgtcaccatcgctttgtcttgtctttgtccaccaaacgcacctcgccttcgtccgccacactgccgcattcgtccgcctcgctgaccggggccgaattgttggtcgcctcatcgtcgtcatctgcgcacagttcaacaaaacgttgctgcaccaactgttgttgctgatgtggctcaacgacagcggacgactcggcaccgacggacaaagtgtcgacacgacgagaggacaacgccgcggcggtgcaggaggcggagggcgaagaacagacttgaaaaaagccatttaaatttacgattttctgtggcacctgaattggtacgagcgttgaatttgatgatgccaatgccaatgctggtgggtcggtcgcgactcatggattaataagcgtggaatctaaaatttattgggtggattattcgagatcagtgatgactgtgattttggcggtgtcattatatctcaagctgtcatcaaaaagttcaaaataagcacatatcactcgtacaaaaactaca

SEQ ID NO: 6672 - DNA, 1497 bp, Heterodera glycines
gttggatttggatgccaaagaaaaaagcttaagtggaaaaacgagctggcgccgaaacgggagcgccgaaacgcgagcgccgaaacacgagcgccgaaacgcgagcgccgaaacacgagcgccgaaacgcgtgggtcccacgcgccagtgtcagacaaaattgctcataacgccaaatagcgcatttggcgtaaatttttgcgcgttaattcaaaatttacactggaaaatgcccagacgcaactggccagacgcaactgacccgtttcggtacccatagtgaatgttgcgggccaggacgttttcgtaccgccattttcgtaccgctgttttcgtaccgccattttcgtaccgccgttttcgtaccgccattttcgtaccggggacgttttcgtaccgccgttttcgtacggggacgttttcgtaccgcaggggggtcgttttcgtaccgccgttttcgtacggggacgttttcgtaccgcaggggggtcgttttcgtaccgccgttttcgtacgggggacattttcgtacgagttcttgtacaagcgtcagattcaaatagaaaaacttaagaactaataaaaccaaaatttatcattttttgtttcccattcataaaattttgtagaaaattcataactttataataataacaaaatccgggacaaactaggtcgcatctattaatttcggaaaataccagcgagaaaattgttaaggttttcgggattgacattggcattggcataattgtgatcattttgagggacaatattgttattgatatcgttatagcgtttgacgcgacgaagaatccgtgcgtcggcatcgcgatacttctttttctatgcaccatcatgcaccaatttatcattatttagttttgttttaattacttgctgctggttcattttgtagttaataaaagcttaactgtcaaaacattaaaagtaattaaaaaaaattaacaaattatttgaatgcaatttttctttttgcatatccactcgtacgaaaacggcggtacgaaaatgtcccccgtacgaaaacggcggtacgaaaacgtccccggtacgaaaatggcggtacgaaaacggcggtacgaaaacgtcctggcccgtgcgaaaacggcggtacgaaaatgtccccggtacgaaaatggcggtacgaaaacggcggtacgaaaatggcggtacgaaaacggcggtacgaaaacgaccctgaccggaatgttgaatgttatgaatagggctgccaattttatgtaaatacatttttttttcctgacttctccttgctctaaatagcaggaaaacactttcttttttgtgtttacgaacaaaaaccgggacttttatttacatatttttacatatttcgggattttcttacatatttgtacactgtgttttttttacatattttgagtattttttacggaaatttttggaaatcctcaaaaaaaaaatccaaaatttcggtaaatattttggtac

SEQ ID NO: 6673 - DNA, 1067 bp, Heterodera glycines
cagtagtttttatagtcccagaaataaaaggcggcgtatctcagcgggcctaaatcgtagacccaatattccaaaggcaattcggtagcaaattttgtgctctataaaatgggcctactcaaaatttccagaaaaattttcccaaccccctagaaattttttttgaaatttacccctcgttcccagccaaaatgggctgatcagatcaccatgaaggagtgatctgatcaacttggtgttgctaccttttttgatcagcatccaaagttatgcttacctgaatttttttagatttttttaatgctgatccagagaagcaatattttaaaaatgaaatgggacaacacttttgaccacctatattttgatcaaattgtgaatatggtaaaataaatcaaataaatgtttatgtcacaaatgcaaatatggtatcattggaaagcccataaaaaatgctatccaatggtatgctacttatctgttgaaattggaaaatgacaattttatacgcaattatttttttcaaagcatgatgggacaacacttatgacccatgactgtattttgaagatttataaagaaaaaataagtttgaaaatgttgcctaaaaataccaaaaaaagtaatttttatgtcattttgtggctatttggttgtaggacatttgcggtccagacatttgcggcctgctgaaaatcgaacatttgcggcccgacaatgcggtcggacatttgcgcctcggacatttgcggcccatttcttaagggccattttcggacatttgcggcccgacatttgcggcctgctggaaatcggacatttgcggccaacggaacgccaaatgatcacttttttaattccaaaaacgatatttgcggctcaactttttcgaccccaacaaaatataaacctgagaaaattattttccatccaatttaaccgattttatgctatctaataagcttccgattcaagtcttctagaaaaaaataatttttaaccccacccaacttgaagcaacgaagaggaggaaaagaataccagcgaaacaagaccctaaattatga

SEQ ID NO: 6674 - DNA, 2322 bp, Heterodera glycines
ttagggctgccaattttatgtaaatacatatttttttcctggcttttccatgctttaaatagcaggaaacactttcttttttgtgtttgcgaacaaaaaccgggacttttatttacatatttcggggtttttatacatatttacatatttcgggattttcttacatatttgtacatattttggatttttttcatatatattttcattttttttacatattttgagtattttttacggaaatttttggaaatcctcaaaaaaaaatccaaaatttcggcaaatatttttttacatattttgaaaatttataaagaaaaaataagtttgaaaatgttgcctaaaaataccaaaaaaagtaatttttatgtcattttgtggctatttcatattttacggggattttctttcccaaaaataccattaaaaaaaattttatttacatatttggggttttttgtacatattttggaatttttcttacatatttatgtacatatttagaccactttttgtacatattttttgcagccctaataataaaagtcaacgtagaagcctcaaaccaagtggaaaatgtgttgtttatgcttaatatatcgaaactaatgcgcagaaaaaaaaggcagctctagttattacgtaatgaaagtttgaaactcccacaaattttttctgaaatgttaaatttcttagcatttgctttgaaaaagattctccatttcaaaatcttttttaatatcaaatttgttcagtttagctggaaattaagcgagttatgccagatcatcaaaataaacaatacaaaaaaggcatttagcagtatattttttgaatttgcgcgcaaaaaactacgccatttatgctatttggcgttatgacgcaaaagtgatcatttttgaacaaaaatttgttaaaaaattatccaaaatttcaataaattttcacctgcattagacactacccataccctaaaattttttaataacttttaaaaattccattttttcaaaaaagagatcctaccataggcagttttacaatttttgtctttaatttttctggttcaaatggctgttggcaaacaggtaaaactaaaaatacaaacatatttcaaaaagaaaatatcttattttaattgaagaaaaaatccgcggagaatatcaatgcgcggctggccatggtgacaaaatcgggcaaatactgcctgggctacaaacaagcgcttaaaacacttcgttcgggcaaagcaaaattggtgatcatctccagcaacacgccgacactcaggtgcgattttgttttgaaattgttcgattttttggagaaaacttaaaatggtggaaattttttggatttttgaggggcagatcaggccgatttaaataaattttctcggcggtgtctactgatactttgaactactaatttctctgaaatttccaattttgactcaaaagttcacatagcttgacaacttttggcataaaaatgagataaatttcataaaattttttattaaatcaaaatttttggtaaggaaaaagtctttgtatttacaataaagttgccatttatttattcgattgtcacaattattgttttatttgttcatggcctttagacgcagtgaagttgaatactacgccatgctgtcaaagacgggcgtgcacgagtaccatggcaacaacatcgagctgggcaccgcttgcggcaaactgttccgagtgtccatgctgtccatcactgacccgggcgactcggacatcattcgaacaatgccaaccgaggcctgacaaatctctgtgagctgttgtgatcacacactgtgctcatcgccgttgaatttggccgaccaacatccgcccaccattttgcagaagcaatgcgcaaatacgtgctgatgtgtgccgactgggtgaacgcgctgttcacgttggccggcctcgacaggaaaaggtgtggaaaagggcaaaaaaattaaatatgagaaagaaagcacaaatgaatgccgtccacctcccgaaaaaacgggtttcataatcttcggattattgggtaaaaatgcgcggtttacgccaaaatttgaccgatttgaacgtatagtcgccgacttgctaaaaaatcgcaaaatttgacagtttttgatgaaaatctgttaacaaattgcacacgaattttcaaaaattttccccggctgcgcctaccggcaccaccggcccccttttgcgaaattttcttgaaaaaagtgcgccgcaaaaaaaagtgcttttaaaagcaaaaaaaaaaaaggtcgatttacatggccgtgaccccttcgcaaaa

SEQ ID NO: 6675 - DNA, 7629 bp, Heterodera glycines
  unsure (1)..(7629): unsure at all n locations
cttttgaatgtttctattaacaaacaaataaatttatttattatgaattttcttatcaaaattttctatcagcacaaattaattccagtacccataaaaagggctaaaacaaacaatcaattatcaaagggaaagaatgcgggaagggtgaccaataaacaaatcaattaacggatttttgactaatttcggtttgaatgaaaaaaggaatgggggaccgtataattaaaattatattttattattattaaattaattattaaaagattaattaatattttaaattgtaaaactaataatgatattttataaaatctcgaaaataattaaaattatttattttttcttaataaaatgttatttttgatacataatttatacagtccctttttagcttttcattttactaaaagcagtttatttggtttattgttaaagaacttttctcaagatcatcaaatttgtatttctattcgctcaaattaataacagtactccttaagcgcgccaaataaataaattatcaaaagggaagggtgggggaatggtacccaataaagaaaacaattaatggatttttcctaatttattaataggttttattaaattgttttttctcaaacaatacttataattttttatttttaattcgcaaataaaaaatttaaataaataattaattattctataattaataaaaaaattccatggaaggagtacccaataaagaaatcaattaacggaattttcctaattaattaattaattaaaagaattatcaaattggtatttctaaacaatataataatttaattttaaattcacaaataaaattataaataatttaataattattctaaaattaataaaaaaaacattccattttgaattcgcaaatatattttttctttctcaattaaatattataatatcatgcacaatttattttcaattatcaaaagggcatggtgctggaagggcgtcaaataaacaattcaattaacattatttttgactaattttcgcttttgaatgtaacgaattgggggactgtaaaataaaaattaataaactaaatttaatttaaaattgattaattaattattattctaaaattaataataaaatattcatttattcttataaataatttaaaaaattattttttttcttaataaaattcatttttaatacaatttaatttactacctccatcttaacttttgattttattaaaacaaatgaatttatttatggttgaagaacttttctcaacatcataattaaattttttatttctattcgttaaaattaattacagtactccttaagcgggccaactaaataaataaattatcaaaagggaagggagcccaataaacaaataattaacggaattttccaaactttaaagttaaaggaaatgatggaccaaataattaaaataatatttataaattaaattaataattaaaaagatttatcaaattattattattatttctgaaataataattatattttttattttaaatttacaaataaattatttatttttctcataaaaatttttttataacagttttatttacctacatgattacttttgtacgattttattatttattttgaaaaattttctcattgtttattcgatttttccttgttttcattggcggtccgtcgttctcatctaacaaccttattcatttccctatttttttcaaatcaataaggttctttattctttgccattttcggctgattgtcaaaacttaacccaccaaaacaaatgaaccgaattcgaaaagcatcgacagtacacagcagaaatgaatcaaaaattccggtgttgaaccctaaagccgatgtttgtaaaagagcaaattaaaatgagtcatttctcggtcttataacctcaaaagcaaaactttgtttatgtagcagcaaacatgttcaagggggagtacatcatgtgcatggaaccgcgggtgaataggaaacataattttgaattaccggatttttaggagtacaccccaaatctcaccggcgaatttttttaaataattaaacttattattataaaatttttttcaagaaataaagttgaaatgtttttcacgatttttcttgaaaatttcaaaaaattagtcataactttgtatgcgcattataaaaaggtgctgtccgggctcaattttaacctcagcgtgccatactccatgcagtttctgcgtcgctatcgcttctacgatttgccgtcaaaggtgtgtgggcgtttgcgaagttgtcatggtctgctacgcgctggcccacatcccaccttccgttgttgccgccgtatccctccatttggctgcgtttgcgtacgcatgttcgctgcggttgcccgagctgtttgtggacacgttccgaatgcccgaggcggtcatggatcgcatttcacgctcattcgtcgaccatgttgttttacttctaaaataatcagcccgggccggccttttttgaaaaattctgtccttaacaggcactacaaacaaattttattttctgccccgacaacgcttctctgagtataagagggatgagagaaaacagcttgaaggcgtgcaggctctgggccaggggtgcaacattgacatgcacctgcccttatattccatagaggaatatggagaaataattcaggcacaaaattttttattcttcgcaatatttatcattaaggactattatgaggtgctccatcccggaatgtttcggcttttctgctttgagacgtttggaaaaatgaagccttcgtggaaatcaactgtggaaaattataaacatgaagtctgcgttatttttatcgacggtgaaggcggtgttgaagggcactacgacccggttaaaaatgttggaaaacttttcagtgcacgcaactattgttttggggtatttatagataattagaaaataattttttttaggctgaaaattatggcactgtgctggacaccatgccaccaattgagaactattacccaggtggactcttcccggcagatcgcgcaaagtttgagcaatggtacgacgagaaccgggaaactgggtttgagctcaccgaagtgatcgcggattattgcaagacaggtacaatttttgaagaaaaaacatgcaaaaataacaaaaaaaattgaagatgtccaaatcctggcacatggtatggtaaagatgaggcagctgtttttgtctgagacgcggcacgacataaccgactcggtcaccatcccgtccggttgcatgaagtattgggtgcagttggctcaccacgacaaagaacgggttgccatcatcccacacttgggatacgagaagcgaggcaaacagagctccatcgccaggaaatatttgaaggtgtatccaaattattttaattttacattttgtcgactctcagtggcgtgccgaagaagaattgcgggagaatggccgagtccaacgccatgtcgaaagccctggaggggagttcaaattcggaaactacagcttggacgggatgatggagcgccctgatgaggacaaaaacttggccatcgaggtcaatgggtaaggaaagaattcgaaaaatgtgccaatttacccattcaaaaggtgctattggcatggatgcccaagctgctttcccgacgatgcggcaattgtgggcggtggtgagacagcaggagccccagggcccgggacgcaaaacgaacccgggacattgcgcgggaattcgaagtggaagtgatttgggagtgccacttgaacgcaatgctggaggacaacccagccatgaaggcgtatttcgacaattgtccggattctggcccaattgacttccacgatgccttctttggcggtaccttttccatttaatttttaactaattttccggcacaggtcgaactgggcccgaatacttgggcgcttcagtgatcaacccagagacgggcgactggaaaagccgaacgatcaaagtgaaagactttaacagtctttacccatcgcggtatgaaaatgcgaaaaaaaataattaaaatctttgaaaattacagaaacatgttcaccaattacccggttggacaaaccggacgctgttccccctctgtcggacgtgttcggaaatgtacccgcgcggcttgatcgaccccgagtacaattgcgatcatcttgaggactctgaaaggggtgagtttgaagcttgtaattaagcaaatattttttcttaataggcttttcgacaacagtcacacacattgagctggaagccgctctccgctcgtggtacaaggtgacgcatgtgtaccgtgcctatatctggcctctggcgtgcgattggagcaatgggctgttccactcgtacctgctgaagtttctcaaaatgaaatttgaaggtaaaatttaaaaaaaattaataaaaatcattaacaaaaatttaagcaagcggatatccggcgtcttgtacggaggcgggcatcagcgaggaggagtcggcacggagaaagcaggaacacatcgacaaggccaaagaaaaggcccaagtccctcttgaggcggaccgaatcaaacacaatcccgggctccgctacctgtccaagttgtgtttaaactcgctgtggggccggtttgcacttcggtaaaattttggttaagaattatgaaaaaatacaaatcatacagaaaccggcttaccaaaaccgaaatcgtcgagtgctatgccgagctggccaaactgctcaacgactcgaagattgaggtcagcagcattgatcagctgacggaaaagttctggatggtctgctaaaaggccaaagatgagcatgtggtggagcacagcacaagcaatgtaagaaaagttttaaaatatttaaaaaaaacaattgaaattttctcaggtggccattgccctatggaccacctctgctgcgcgaatccacttgctggaatcgctgaaaaaggtgtatggccctgcaccaggtgtagagcgctacgacacccgcattctctacatggtaaaattcagaaaataaaatgaaaatgtgaagtaattttttaaaatcaggacacggacagcatcttttacgactacctgacgcggctgggggacccacttccgggtggtgagcagctcggggagctcgccgacgagtacccgaaccacacgattatggaattcatttgtggtaaaactcattaaaaaaaaatagatcaaaataaatggaaattttttgtttagctgggcccaaggcgtacggcctgtggttgcgcaacaacgcgacgggggaggacgagtacaagctgaaggtgcgcggcatcacgctcgactcggatgcctgcgagcgcatcaccttcgagaagatgaaggacatggtgcagaacaagctgggacagccggacaacaacgtccgcttcaactacccaacgaagaacttccgcatcaccaagaagggagaaattttcaccgtccccttggtcaagcagttcaacccgacagtcaataggggggtgatcagggatcacggcttgaaggtggtgccctttgggtacagcgacgaagagtggtgtaagtggaactgccctggcgcttgtacctgtctgttcaacccagacctcaatgtgaacatgttcacagaagaggagctgaacgaccccgacattatgccataattgtttttattttttaattttcattaaatttgtaatatttttattcatttatttcttcatttgtgacccaatatttttccggaaatccaatgaatttcaccaacatttctcttttcccatctctcactcgttctttgtatttcttttcaattcgatacattgtgttttcatccacttgtactattgttaattcgggcaaataaaattttctcttcaactttgtgccataatagtctttgagcaaataatgctgggggttggttgagcgggcctcatccacagtgtaaacgtgatcagagtaattggggatatagccttaaaaatttaaaaaatgaccggaaaatgtgtgaattacagtacccttctcgaaaatgtgcttaggctcgggaatcctgaccgtttcccctgctcttatttttggtgtcttgttcgattgtgcgagtccttcgccgtacaccctcttccacacctccctcgcattggtgtcgctgatttctctcggtctaagtccggtcgcgcggcacactgagttgttgatggcactcaaaaactttggcagcacatccacccacaccgatgtgttgttggcggaaaaatatttgtacagccgagtctttagggtgcggatggcacgctccgccacggcggcctttttctttgaactggtctcaaacttttgaatgcccttctccgcgtaaaactccttcaacggttttgccacaaactccagccctcgatcggtgtacagtgtgtccggcacccttggcatttactcaaatagctcctcaaacgcccttttcatgtccactgggcgcttactctttacgggcgcgccgaacattcgcctcgatagaacatccaccgccaacagcaagtaacggtagccgctgttcttgcgcgaaagggcttggaaatcggccaagtcagcctgaacatctgaaccctgaattgtgcgaaataagccccagtacaacttaccggtcatgaaacccgcaggcacagtgcgtaggcgtcggaacttctccctctttggcttgaacagcgtgtaggtggtgttcctctgcaaaaagtcttcaaactcggtacgcttcaacttcgggtgcttcttcttcaccgccgcgtacagggcactcgcacccgcatacccgcccggattggccgggtcggtgtatattttgtttattttcttgtccattttgagggaacaaatcctctcgtttgtttgacttgtccgacgaacccagacccaacaaacagtcgattgagtaggctactggcaagcggattctgtgcgagtttcctcttcaactctttggttccgcgtggcgaaggggcattctccgggcgagggtccaccaggcgttcaattgaccaggccaggtccgagtcgataaactctcggcccgtctttgggttaatgattttcccacggtcagttgcgccgaatctctgcggatcagacataatgatggccaacaggtggtccttcttctcgatcaatttttgctgttttgctgctttcttattggtcctgggtgatcggctgcttttctgcgtctggcttgttagggttaaaaactttggcacttcaatttcttcctcttcatcttcgtcggtaactatcacggacttgtccttcggttcgtccggaccaggccgtacctgcacacccgtctccactgttttatttagcagttgagcgccgttgctgagctgtacccggacgggccgctccttatgttccttgcgcatcttcaggtaccggcgcaggtgctggttgtacactgcgttccgttcgctgacgtttcccttccgcttctgtactgcagcggtcatttgtcgtttgacaagncccagtttgtccgctcagaatgtcggtcgtcgtcgtcattctttgtctccctcgctgcaccagccccttgtagtgctcgtacg

SEQ ID NO: 6676 - DNA, 2131 bp, Heterodera glycines
  unsure (1)..(2131): unsure at all n locations
aaattatccaattaggaaatcaatttgggatttactcagttcttctgagttttgcgcacggaacagtgtccgactcggccctttgagtgccgccgacccatccaccgccattgtctttgtgctcgaatatctcgtcgcttctcgcacggcggccaatgtacgaattgcacacgatcttttcttcttcaatcaatgcttgcttttcgggatatcctttccgatgttcggatggtccgcgtcggttgggccgcgtggactccgtcgccccggggggcggtcagtctcgcggacactgtcacccttcaggtgggccgttgttcgacgggggttcagttcgaagttcggttcagctgcttggcgggccccgtcctgctcccttcgacggcttctgtcttcgcgacctttcccattgcgctttcgtccgccattcaccgattgtccaacgccaattcccttctccgtttccactttcctgcaccaaaattcaaattcgcttcaattttgtgccattgatggttttgttgaacagccgaacacaatggcatttttggaacattttggcatttctaaggaaagcgatcgcatcggcgcactctctctgctgtcctcccatcagcaaactccgctgcctcggcccgaccttcggccgcgctcctccgctgccacccgtcaagtcgaacacgtacttcccccgttgccacccgcggctcagacaaaaggcacttcggaatcgcaaaagttggcatttgaagaagacgacagagaagaagcggaattggaggaattgttgtcacccgtcgaagaatgaccttatttacataaaaaagcaattaattgtttaattttagaaaaaagacgaaacattcgcacgccacagaacaacaacagaacggcactgttcggtgtccgtgctcgaaaattggcaaagtgccatagaagtcgaactcccttcggcgaggcaaatcagcagcaaaagcctctttaagctttgtcttccaccccttcagagtgtcggcttttcctcgtcgagtcgttcgccaattcatgcgatttcctttcccaaaaatcatcgaatcggaccaattcacgcacatcaacccgatggaaaaacgacaaattcgtatggaattggagcgaattgacaaattcggggccaacgaagtgtccattcagtttttggcattcaaaaagtgcacagatttggcatcattttctcttttgttcgcatattttaatgtgttcagattgggctccttanacacaattccttcttctcatcgtctctttttctccttccaatttttctcttttgagcccattatcactgaaaggtgtttttcttatttatttctgatcagtgatcagtgataaaaggtcattgattaaaattctttccttctcagtctttttttggacgccgaaagtgccgaaacgaacgacggcgaagagccaaacgtactttaccgaaacggcggagaagaggagcaaaaggccccggggcttatcgtgagcaaatttaattgtcaatcaaattacaatttgcaaattttaggttcgtttcgtcgttggcagtcaaaaaaaggaatttttgcgttatttgttagaagaaaacgtccatattcacatttgggaggccgattcattgtgagtttcttcttttaattttcaattatttctaattaactattttaggttttacgtcggctcaacttccgtgccccttcaggtcaaaagggggagagagagaaaataaaaaataaacaaatttatgttaattcggtcaaacagccctcggggggtgccgccggtccctcccattcacatttgcctgcccttttgccccctccccgtagtgccattcccactcccctccccttttaagatgtttcgccaaaattgccatttttatataaaaatttatgagtattttaaaaagcgcattttggttacccttttttatttcgtaattttatttataaatgcaggaattgtcttttaactttttgatctttcgtctgtggatcatttgtctctgtgcgtgcttttgcttcgataaaagccacaactgtaccaaattaaaaaaacacataattaaggcaaagaacgtgagtaactaacaaaaaatgaggag

SEQ ID NO: 6677 - DNA, 1477 bp, Heterodera glycines
caaattgggggggtccatttcagtcctgataactttagtcccttccctttttgatcattcctttcaatgactcatttctcagtctttgccatttcagtcccttccccttttgaggtgttttcctccgtcaccacttcccttcgtgcggaagcaattggcggccaattggttcatcttcaattccaacttcgaaatccgtttcccgaggattgcatttgcgcaatggaagtgaacgataagcggctgagcccggtcatttcgaaaatggagttggaatatctgagaaaaaagcaccaaaagggagaccttggccgtttcgtattcgaatgggaagaagggacaaatggatggacgaccgttttgaggggaatggaaagggttggtgaggggaaagagaggatagagatgaccaatcgaacaaacaaaggtccaaatggcacttcgattcgacacgggcaccgccgaaagggcgtgggcatctcccacggaagcgagggtcggcgcaggcattggcactgaaatgccaaaccttttctcggtttaggcatttttccggcggcttccccacggcaatccgttggccattttggaagtgtccgtttccgtctcgcgctccttcctcagtgaacacttccagtggttctccgacgaaggtcggaagttggttcgggcagtgcccgtcagtcggtcgccacttccgaaggcgtcgtctgtcagagtgtccgacccggcggtgctttgttcgcttcagccgagtcattcctccgacgatgccattcagcttttgcgaattgaagtgccgtccctttttgacacatttctctcaacatttctccacttaagtgcctttctcgaggactgtccgaagtgcgcgacttttccgtctttttctacgccgatcctttcctttccgaactttttgccgtccatcgcttttccgtccattcaatcggtcggctccattccgtggcggtccaaggccaagaagtccgtgtcccactcggcggattcgtccgccctccgtctggggaattggtccgtctgttctgctcctctgccgtgccgtgttcctcggtcggccttttgccgagtccgtctttcgcctcctctgcccattctctctcccaattggccgtcctttttcgtcctctttctcttggccattgtcagcttctgatcagtgcggtcgccacaagcacttgtgcaatggtaagaatagcaaattgggtaaaatgaaactgatgaagtgaacagttgggccaatggcttctcggagtaacggtggacgagccgaacattgccaaagtgttcgaagtgattgtgccgcgggacagcggcggcgtcgttcgcaaagtgagcgatgcggctgatttggcccgacatatgccaatgacgatgatataatttccattattcagcgaatcccattgcgcgggggcgttgggcatcccccgtcagttccgactcgtctcttccg

SEQ ID NO: 6678 - DNA, 1381 bp, Heterodera glycines
ccctccaatccctcccaattcgtccctccctttgcttctgctcatccaaactccccaggccaggccatgcactgttcaggtgggcaatgttcggcattttatttttatgtgtttcaagtgcctttctttctttcttttttttgcgcatttactctaataatcgttttgctccgcaacagactctgctgttcgtggaggacattcaaacgggggccacggagggcgcattcgctgtgaatttgcgattcgaatgaatgacgcggcagagaagaagagaagagagcacagtgcctgcggatgttgttgttgttgctgggatgggacggaatgttcttcccccgggaacgtggggggagtgggacaactgctcgcctttctcttgctcaacttcctttttcttcctctttcttcctcatttcctcctccctttcctcttcctttttccttttctttctttccctcttccttttcctcttcttttccctcttccttttccttccttccttggcccatcgtcctacacttccccctccccttcccccccccccctccaccaattaaacacatttcctccgtatccctcaaacttttgcctcaaacccttgcaaatactttctttcgtttggcaaaggcacttagtcgaggagaagacacagctgttgatgaataatatggcggcaggatcgagttcatccaaacaactcaactcagctcttccgacgccatttgcccagcaaagcaaagaatgtccgtccgatccgtcggtcccttctttttggatcggtttgatcggagggaaagagcatttggcgaggagagagcggcagagagggagagacatcgctgctgagaaggagcgccttgggcattttctcgaatttcccgactacataaattgaatgattggagaggggggagagattggattgggtggcgatgcattttttggctgcatgggataaagccaccacccgggcggagaacaagcaccgttgttggctcatcgtccgtccgtcccactcggcccacccccggcccaattccccgccccccgcccaccccacgccattgataaactcatcccccgacccattcagagttttatccgttcacaattttctccacctaatcattggtttaatgaaggccaaggctttaatctcagtcaataaaagcaaatgttttaatgaatttatattgcgaaaataatgcaaatatcattttgatatatggctcttaattcgatgatcatataatcgtcactaaaattataaaaatttatactgcagagattatccattattgagtatgtttttcctttctaattacactaaacatgaattacattgttcactttactaatgcatggtattcaaaattt

SEQ ID NO: 6679 - DNA, 2362 bp, Heterodera glycines
agggactcattcccgggaaatggccgcccccacacaacggacacccgtcgaatgcctccgagtcccgtcacatctgtcggcttcgcccgtcttgccgacgccgatcggctccctctcccccggcttttccttcctccccaaatcactcattcttccgcccccccccctccgtcttcaaaaagcctttcatttctcccaccgccccctcctttcttagcaacttccattcccttaaggggcattcgcacttccgaccattttccgccgctaatcaccaccgtttcatcttccgtcctttttccattcttccgcgagcacaaaaatgagcgaggccaagtcgtacccggaccttgagggggacccgggcctcccctttctggccttgtcccgcgaggatgtgatgcaaaatatgtcgcaaacgtacgactccaagaaaaactgttgggtgccggacgaagaggaaggtcatcttcattgacttgaccatcgacctttaaatcctcacaaattggaaatgccctctttaaggattcgttgccgccgaagtcaaatcggccgatggcgacaaagtgaccgttatcactgccaaaggaaacgaactgacgctgaagaaggaggagacgcaggagatgaacccccccaagttcaccaagaccgatgtacggcattggcacaattggccactctctaattgctttggcatttctcgcaggacatggccaacttgaccttcctcaacgaagcgtccgtgatgtccaacctgaagcagcgttacggttccatgatgatctacacatattccgggctgttctgcgtggtgatcaacccgtacaaaatgttgcccatttacactgaatcggtcatcaaagcgtacatcggcaaacgccgtaacgaaatgtgagtcgacaattttggcacacttttgcgcttgggctaaacatgccgcttccttttcaggcctccccatttgttcgcggtggcggacgaagcgtaccgcaacatggtgcaggacagagagaaccaatccattctgatcaccggagagtcgggggccggcaaaacggaaaacaccaaaaaggtgccggagggggaatgaatggcgaacaattaattaattgggcgtgccaaatcggaattaattgtgccgcatttgcaaatgctttttcttttcctgcgcgtccgtccctttatttatgctgcttttttctttcatttggtcttatcgcgtcccgttcaggtgatctcgtacttcgccatcgtcggcgccactcagcaggcggcggagaaggagaaaaaggagggccaaaaggggggaacgttggaggagcaaattgtgcagaccaaccccgtgctggaggcgtttggaaatgcgaaaacggtgcgtaacaacaactcgtcgcgtttcggcaaattcatccgaacgcatttctccgccgcgggcaaattggcgggcggagacattgagcactatctgctggagaagtcgcgtgtggtgcggcaggcgcccggcgagcggtcctaccacattttctaccaaatcaactcgggattcaacccgggactgaccggccaactgaagctgaccaaccccctctcctactaccacttctcatcccaggcaaaaagccaaaacgcaaacggaaaactgacaaagcaatggcaatttacaggccgaattgaccatcgaaggggtggacgacaaggacgaattccgagtgacgcaagaagcattcgacgtgatgggcttcacggacgacgaaatcaacaacttgtacaaaaacgtggccggaataatgcacatgggagagatgaagttcaagcagagaccgcgcgaggagcaggcggaagtggacacggaagacggtgagtggggcgggaagtactaattggccaattaattagtcaactaatgattgccaagtggtcgaattgcaaattgaccaattgcactaatgtaaaagcagcagtggaccgtttccaagttcagacgccaaaaatgcgtccttttgctttggaatcgaccacgaagcctttctgaaagcgctggtgaagccgcgagtacgcgtcggcaacgaatgggtgaacaagggacagaacttggagcaggtcagctgggccgtggccggtctggctaaggccatctacgcgcgaatgttccgctggttgatcttccgctgcaacaaaacattggaccaacgttccaccgaccggaaactttggatcggagtgttggacatcgccggcttcgaaatcttcgacctgaactcatttgagcagcgtaagtcagcagaagcacaaaactgaacgcattggcacccttttcagtttggatcaatttcgtaaatgaacgtctgcaggtgag

SEQ ID NO: 6680 - DNA, 1425 bp, Heterodera glycines
cattggcacccttttcagtttggatcaatttcgtaccttctagtctgcaggtgagaaagaagtgaaaagcgattggacttggcacggctttgccttttccttctgctaaatcggcacgtgcccacccctctccctccccccccccctttagcaattcttcaaccaccacatgttcgtgctggagcaggaggagtacaagcgggagggcatcgcgtggactttcatcgacttcggactcaacttgcaggcgtgcattgagctgatcgagaagccccttggggtcatctccatgcttgacgaggagtgcatcgtgcccaaggcctcagacatgactttcgtgcaaaagctgatcgaccagcacttgggcaaacaccccaacttccaaaagccgaagccgcccaaaggcaaacaggcggaagcgcactttgccattgtgcactacgcgggaacggtgcgatacaacgcgaacagtttcctggagaagaacaaagacccgctgaacgattcggcggtaaacaaaaaggggcaattcgttaattaattaatgagctgctaattgatcattgacaggtgtccgtgctgaaagcagcccaagacaatgaactgttgctgaacattttcgaggattacgtgacgcaggaagaggcggccgagttggccaagacaggccaatccagcggcaagaagaagggcaagtcatcctcgttcatgaccgtgtccatgatgtaccgcgagtcgctgaacaacctgatgaacatgctttaccagacgcacccgcacttcatccgatgcattatccccaacgagaaaaagcaaagcgggctgttggactcggcgctggtgctgaaccagttaacctgcaacggcgtgttggaaggcattcgaatttgccgcaaagggtaccccaacagaatgcagtaccccgacttcaaggtggccagtcaatttaaaactattgccattaataccaaacaatctcagcaccgttacgccattttggccgcggaggaatccaaagttccagacgagaagcaggccagcaaacagatcacggacaagctggcgacggatggcgagctgaaggacgaggagttcaagctgggcaacaccaagattttcttcaaggcgggtattctggctcgtctcgaggatttgcgtgacgccaaactgtccgtcatcatgaccgggttccaatcgcgcatccgctggttcttggcccaaaccgacgtcaaacggcgcatccaacaacgcgccggactgctcattctgcagcgcaacatccgcggatggtgcacactgcgcaattgggactggttcaaactgtacggacgagtccgcccgctgctcaaattgggcaaggaacaggaggagatgggcacactgcagcggaagatcaaggagttggaggagagtctgcagaaggag

SEQ ID NO: 6681 - DNA, 697 bp, Heterodera glycines
taattaaaattacccattctttccgaatatcaattggtgattgcctttgccccgtttggcactgccctccccaacgttctaattcctcataactgaatgtctcctccccactcggcacgtgaattactgtttaattggaaaatcggttttagtccacaaataataaaatttaaatttaatattttgattcgttattcaaccgggttatttgtttcagaaaaattctgtatccttttgaaatcaagaaatgcaaaacatatttacgaaaatatttataatttaataaatattttttaaagaaattcagattattgatggttttgataaaaaaagtgacaaaatgtgaattattttttgaactaaattctttgacttgtttttatgattttcctaaatttttcgtctttttgtgccaaatgctgattgtttaagtagtgttgagcgggaccgggaccgagcctggaattctcggtcccttctgtcccggttgggccaccggcggtagggaaaaatatgcgctgatcaaaaattcactcattagacaaaaaatttttaatttattttttgttcataaattgataaaaaaatagtcctttttttggcattatccgttaagcaataactagggatgcaaattttaagtaaaaacctaaattttagcgcatataacacgcacagatgagcatagcaagagcat

SEQ ID NO: 6682 - DNA, 2502 bp, Heterodera glycines
agcattttccacttggtttggggcttctaagatgacttttataataccttttcttgcctatttgggcgtttttctacttattagctaggtacctatttttttacctatttcggcatttttgtattaccttttttaaggattttcagaaaatccctttacgaaaatacaataaaaaccaaaaatacaacccctaagaatcgacctgaaaattttcaaaaaatatactcctaacaaataagatctggaaaattttctcaaaaattcatcccaaaattttgtttacaaatttttctaccattttcgggattttggtatctatttaaatacttatttcgcgtttttccctacctaaaatttgcatccctacaaataacaatataaatttcaaaattttccaaagtgatgcctgtcgtacttcctgttttcaaaagcaaacgattttttctgatttttttcatttggaaaaataaattgattttttttttttgaaaattatagttggtccaattccctatttaaaatccataatcccggccaaggtttttctggtccatgtttttccaaaaattcccagtcccgttaaactctttggtaatgttcaaatttggtcgaccttaccttctcgtggtgctcttccctccgggtggcaacaccgaatttgtgtgggcagaaataaaatggcataaatgacgcaaaaccattggtaacagaaaaaacggcacatttttgcgaaattaccggcggaaaatgacaataatttgttggaaaggaacaagcgaattatttttctgcaacattaaaatagacacttttacacattcgccaagttgtgtttgtagttacaagtttcaattaaatatttttacatttttaaattttatatcggcatacatataaataaaaaagaaaaatatgtgagtagttattatttattttttctaaaggacatcatctcttaatcttttttggtcattggcatggaaagaccaccaattccgcgcatttttaaatgctttgaagcagaagcgcttttcccgggtggtcatcaatgacaagtgatacctgcttaatcggtgatgcgtcttcatcgggcgggaggaagtgcctaatggagcaacaataatgtgctaatatggaaggaactggatatttatcatccatgccctgatcaaccgttatcatttttgactttttattgtaccgctcaccttgcgccaccaaaacaaaagccgttgtgcaatggataattaattaattaatccgtgcgagtaccaccaaaacaaaagccgattgtgcaatggataatttaattaattaatcagcgagtgccaataaacaaaagccgattgtgcaatggaactggattttcaattacggaatccgtaattacggcgattttctcagttacggaattccgtaatccataatgacggaggtcaaaaaccccataatttcccgtaatccgtaatccgtaattttcaaattttaattttatttaaaataattttcaaaattttgataaaaatattcaatagactttttaaaagcgatttaaaagtaattaaaaagattgggcgtgtccggcagtgtggatagacgccgctgaggaaaattttgatgatttgagtgcaatttgtaaaagattttgcgctaaaatgggttaaaaaattaatttttgtcagaaaattaattttgaaaaaacctattttgacattttagaaaatttattaacaaaatgcaataaaaactaaaatatttatttattttcttgaaaagaatttttgatttttaacattatttatttcaatactgatttggcaatacaccccaaaattttaggatttttagagcgtattttccatgtttagtgcttatttttggggttttttaggacctaaaacctatctttttggcgattttcagagcctaaaaattgcatcactaatcattagggttagatttagataattatttcaatattgaaaagattacaaaaactaaaatgaagataaaaataggggcgaaacaacaaaaaagggacgcctctattttctaggctaaaactaaattagggtgtagcgttaacaacaaaataaattaccaaaataaatgatttttaattcctaaaaaatcgaaattcgggtagcctttgaataaaaattaaaaaattaatttttataaaaaaataatcttacaagaaaacgtctcgaaaaataatccaaaatccagttacagatcaaaattacggaaaaatcccaaaaacccgtaacccgaaactcctaatccgtaactccaaaaaccccttaattttcgtaatccgtcattacgcccagcgctggtctgcatttaataatccttttgttataaatgattaaaatagtttttcctagggtttatcaaacctggagggattgatcttcatttttcaattaaaattgtcaagctcatttaagttcctccgtgccatttccttcaataccgattcaaatattgctatttaag

SEQ ID NO: 6683 - DNA, 1805 bp, Heterodera glycines
ttcctccgtgccatttccttcaataccgtaattcaactatttgcataatttaaggttttttttgtattctatacttacttaatgacgtaaactttgatacaccaaaaaaaggtgcgagtaaatttttcaacattaattgtcaaataatcaaccaaaaaattttaattgctctgtcattgtccaaaatatttgtaaaaaaagacaaaaattttgcataaacgaggcaaggctcaaaagaaaaatgcttaatgaggtagaaaatattcagacatatttttttgtgatttaatttgagtacttaccttttgtgtgtttttcttaccgaaaagtattttcatataccaatgaataatttccaaattaagtcaaaagcacagatatatttatatacaatggcaaatggaaaagcaacaaaaataaattacaaaaactgattttctaatataaattattcttcttttttctgccttcaaacgaattcatttaaatctttttaaatttaataaattattataatttttatcaaaaacaataaaaattttatttatttattttttgataatggatttgcttcttttccaacgcgataaatacgctttggcgtacaattgtacgaatttcgatgccaatttggtgccaattgggcaacgcattcacactgttcacggcatcatcttaatcattatgtttttcgtgttcgaagtaagtttcagcagaagattatttcaatggaaatatttaaaatgtttgccaattaaaatcttagcattttcatgaaaaatttttattttatggtgaaaaaatctgaaaatgatataaaatttatggtaaaatcgttccaactttttttttttgaattggatcaaaatctgaaacttaaatttcttaaaacagtcaaatttaattgttttcttattggttaaaaaccaagcacccttgtttttacttttttttccttgtctatcaaatccaacaatcttggtatcattaccaagttgttttaaaacgaaaattgaaaaattcggaattcttaagttttttttcttccttttatatgcttgagcgaatagagcttgtaaagaatctccgagtcatgctaagattgttggatttagacaataaagaaaaaagttagaaaattttagctgtcgccaaaacgtcggcacaaaaacgaccttttcatttgtcacatgggcatgagtattttttttccattagttgttgtacattccctgcatgatgtccatgtaccacaatttgacaactggtatcacagacatggtaaataatagagaccggcgcgggacgggatcccgcgcgggattttgcgggatcccagtccgcaatcccgcattttttggaaaatgcgggatttgcgggattaatcccgcgggatcccgtcccgcaaagaattttgagttccaatcccgcagcgtgatccgcaaatttgattttttgtgcgggattatgcgggattttattgattttttgaaaatttttcaaagacagaatgccaaatatttttgaataaattaaataataaatttaattaaagttaactcatttttcatcgaaaatttcattaaaatttgtgaaattttcccggcggcgcctatcgtcaccgccggatggactccaccttgttctcttttaaaaaattcggcaaaggtgtagaattatggtcccaacggaaaataaacttaaaaattttatttttgtttttctgcgatgaaaaaatgtgctgattacgaatctgagatcagatttttgtaaaatcactgattttgtctttgatttttcatcaa

SEQ ID NO: 6684 - DNA, 1424 bp, Heterodera glycines
tgtattcagtcacactttatccctcgacatttattattattattaaatttatgggaattaattaattttacgtttgggagaaaacataagaatttaattacagctgattctgatcatttaaatgttaagtgttttttttcactttgtgccaaataattaaataattagccgtggcactattcattttctctttgaaagccatttccgacggataccaaaccactttttttagaaattacaaaatttgaatgattttgtgttttaacatataaatttggatactgatttaactttgcaaatctgaacaaaacttatacttacttacttttctttccgaaaaattcaaaaatttttatttttcaaaatttatttattttatccgcagaggaaaattaaaatccgacaaactgggaatcgatcattattagctgcgattaatttttgttctggcagcgattaaaaagcttaatttatgaaaaaatatatatttttgagttattttttgtattttaaaatataaattcgttatatgtacgtaaaggtttttataataaaatggttcataatacaactttagtctttttcttggaaattgcacgcactttaaaacaatgcgatctaaaaagcaataaagtgcaatcattttcttcaaagtgattaatccaatttgcatgtaatttttgagtgaaaaactcgacatttctatgtgccgtatataaaagaatgccaatttaaattcaaacaatgccaaattcactcataaattttcgacgccagtgatcaatgttttcgcggtgataataaaataatttcaggatttttttttaatcaaagaaaatgccatctccgtccgtcacaatcgtcaacattgcatatttaattttgtcatttgaaatgttcacagatttatctgtgttggccattgcgtgcctgaatttggccgtgattgtgcccaacaaactgttgcacaccaacctgaaaagcattctgatcacccaaagttttgccgttttgtattttggcattcttcgcttagtaatcatatgccaaagattaatttatgttgagccattaatgtccgacgatgtgattctatcggtaactttttaagatttccaatctatgcaaaatacagtagtcactgaaattcacacaggattactgtaccatataaaaattttaagccgtggtcacatactttttttttcaaattttagatacttatgaatttcaactcggtattccgtcgattgctgggccatatgttgatcattgaacgttttcttgctacttttcgtaccaattcatatgaaaaattctcgaaaacctattttactgtgacttggttcagcattacggtatttattttaatataattgtgatattgtaattaaaaaatattcatgattttcaatttaaaacca

SEQ ID NO: 6685 - DNA, 6639 bp, Heterodera glycines
atttagaaaatcagataccaaatccccgacaggtatccaatcgttggggtccttgggaaacccaacccactttaccaggtagtgttggtggccgttgacgcgcttttggccacatattctttcgacctcgaattcgtggtcagaagaatacgcagccgaaaccgcgtcttctaccatctccactacctggtcgtgcgggttgggacccaattccggcacttcgtcgacatcttgaccaaaggggacggtgtctgttggcaaagagttggctggagaaagagactcgtcgtcgggatagacgggcagttcgaaagattgttcaagttccattttttgataatgggaagggtagagagagctacttaaataggagcaactcataggagttttttgtccgatcacaaacattattcgtctctcagggcacctagcgcaacgttctcatatgaaaagagcaacagttttttgctctccgtcgctcgtttttgtccgaaacacccccaggcgcttgtacactgctcatgttttttgaacacagaagtttttgtcacatacccacgacaaaatgtacaaaggcagagattgtcgtgggtagaggaaccagtcacacccgttttttgcacatcgcccgcgggccgacgtcgcgcaaaatgcacattattttttgcttgtcatttattttggcatttaattgtcttttaacgaatcttttcaaaatatttttcaatttccttttttttgctttcttccctttaaagtcccaaacccatgagcttgaggatccgattcgtggcttaagttgtcgtcaccctcgggaggggtaggccgggtgtatggcgttacctgccaacaccaggcagcggcttaggagggattgggaggcttacgttgcttcccacccgcggatggataggccgggtgtatggctttaactgccaacaccgggcaggggctgaggagggattgggaggcttacgttgcttcccacccgcggatggataggccgggtgtatggctttaactgccaacaccgggcaggggctgagggattggtggcttaagttgccaccactgtggattgataggccgggtgcatggctttacctgccaacaccgggcaggggctgaggagggattgggaggcttacgttgattcccacacgcggacagataggccgagtggttgccggcactggagggtgattgagaagattgagaaagtttggtggcggcatgaaacaacaccaaccaaagaccgattaagctcgggtgtgaggcttaagttgtcgaaatctaatgaggggcaatatcactcagtgtgtgaggcggtcgcccgtacacggaccaactcaaactaccaatttttatttttccaagcgtttccgtaaatttctgtgaatcattttatcccctcacccccattacatcaaatgtagaattgcaatattaaatacgcaaatcaattttattcaatttgaattctccattcctctgccaccatgttattcaccacagtcctccaccttcaccatgaattttattcatagcatttcccattgaagcagtagacttaaatgaaaaattcaaatcataaaaacacaagaaaaaattttcattgccttgaaaaacgagccgtcattgtgccgacgctcgaagtggccttccttgtagccatcccatgtgtgctccaaccgcaaatcccttaagcggcgctcctcaccggctcgcttttcctcctccaatattcgcgcccaatacaccgggttttcacgctgtagtcgcttcctttggatcagattttcctccttctctcgccaatcgttggcaacgagcggttcgttccatgctggaaaccgcgtccaccccgtgcctgttcgccggacaagctgttgttgctgctgctgcacctcgttttgctgttgttgttgttggtgttgttgatgttgttgttgttgttgctgcacatgccacacgtccgtccacggcgcatagagcacaacactgccatccccccgttcctcaccgatccattcaccaactgagttgctgacgggaagagttacatccatttgctcgaatgacgatcacaataactttctaccgtcttaaatagccccacaaacggcaaaccgaaaccaaaatgctcacaaaaaacatgttttttacacaaaaactaatgctcatttggttaataatctgcccattttgactgatagtcgaccatcatctctatttattctgggttttcatcatatttctcccacaaaatacgcacccacaagttttttgctatgtttttgcccaatcataattgctcacaatcgcacaaagttttttgttccattatcatttttgcccaacataatttgagcacaaacgcacaagttttttcctctcatttaaattgtgcacaaacgcacaaaaattttttgtccatcgttactatttttggtttttttgcaatcgcaattctttcatccttcgcatttgaattttttatgaaaattccgtttggtccttcaaattttcttttttatgacactgaactgtcaatcaaaactaaacttgcgaagaaatttcattttctttcagtccatttttgccctcccatcgcagtgggcaataacggagtggtgcctggcaggggagaagcgcaccgaaatgcaaaggcatattcaaatttccctatcaatcatccaacgaaattgagaaaaaaatttcttttgcccactcccaacagtggcgatgatgggggagagatggcacagaaagacaaaagcatattcaaatttcccccatcaatcattcacattattgtttgctgtccgtggcgggctgagggtggagccaatcacagccgggctgagggaggagccaatcgcaatggcacggcaaagggaggagcaaacttaagcggggtaatgcggctctattcatttccacgttcattcttcaaaattctttgctgaccaaattcaaaaatggatttcgactattccgcgtattataacgcatgggtttttgactttaaaaaacactatggccaaatgttcgatccatcccaaaccaatcaccaaatgccattccacaaagaggctgtttctgattttttgtaaaccattcctttaaatgtattttatcaaccagttttgaaggaaatggcgcaaagactggcacaacatgcaacgcagccgacgtgacccaactccaccaacatctcccaaaagaatgagggccccaactccgcgaccaatcgttggactaccaattcctgttgtggagagtgagtttgtgctttgacaatgagagaaacggtttcatggttggccattttatcccccaaaaatttaggcaatcggccagcggaagatgtaagctcagacgatgacgacggttacggcaatgtcgcccaccaaaacattgtgcaaagacaggaactggacattggcgcacgagctgtccaacgtccaattgcccgggtgccgcctgcatttcgtcaaggccctgttcgccgcccctttccaccacttctactgccacgtcaggtcagaaaccaaaggcttttgagctttctttgcccagattcacagctttgggtcttagggtccacaaatgccacatcgtgtattcccagtcccgcaccaccatgtccaacaccctcttctccacgtccgaccacttcctatgccccgtcaggtcgaaatcgaaatcgctttttttgctttgccacaaattgtcaaatttgggctttagggtccaccaatgccatacaacgccctccgtgccccacaacaccccatccggtttccaattgtgaatgttccgccacttccgctgccccctcaggtcggatactgttttttgaccctattttgtgccaacatttctcaaacttttgagttcttagggacaaccaatgctgcgtaatgttgttcctgttcaccaccaccatcatccaatcaacggcctaccacttccactgccccatcaggtcaaaactcatgactttttttcgccttctcttgaccaacatttcccatctttgatttgttaggggccaccgttgttgcgtcatgttgtacctgttccgcatcaccatgtccaacctccaccgaatggtctaccgcttccattgcctcatcaggtcaaaaaatgacctttttttcgccttctcttgaccaacatttctcatctttgatttgttaggggccaccgttgttgcgtcatgttgtacctgttccgcatcaccatgttcatcatccaatgaacggcctaccacttccactgccccatcaggtcaaaactttgaattcttttgacccaaatttctcatctttgatttgttaggggccaccgttgttgcgtcatgttgtacatgttccgcatcaccatcatccaatcaatggcctaccacttccactgccccatcaggtaaaaactcatgacctttttcgccttcttttgacccaaatttcaccgctttgagttcttaggggcaaccaatgttgcgtcatgttgtgcctgttcaacatcaccatcatccaatcaacggcctaccacttccgctgccccatcaggtcctaaacccgcagttttttctaagacaggagaaatttaggctcatcttgtgccgccccaaccatggcatttcccacctgtcatcgttcgcgtcccgcccgtcgcacaaaggaacgaagctcttcaagttcggaactttcaaaacacccaaaatcatcatcgtgaatttatttaggcgcctccaattgtcaatccgttggggcaaaatccacagcaaatgatccgttggccaagacaacaatggattgggagaccaattgacccccgctcacccccacattaatgagaaaaaagaatgcatttgttaataaatttttattgattgatcgttttatgtaaagggtttgagaaaattccctgattcctaaaaatttaagtgacagaattaagttttagcaaaatgttaaacgacacagaaattaatcagaaagaaaataacgaaaaaataattggattggctttgattttagtcatttattcgttttcgtttttgtgtttctgtgccgttatcgttagagaatgccaccgtgtcttttttagctaacaatgccactgccccctgagctattgtttgaaataattgaagccttcccctcctcaaaattgtctacagtcttcttgagcaatcatctcctgtcgtcgtgggctcaaaagcgtctcagagggactttcaattcgctgatgtcacagaaacaagaatggaaaaatctgttaaaaatatctcgtttggtttttgaaagtcacaacggattaaatgtgtaataattggtttttagtttttagtggttttatgctattttattgttaattcttaacgcgtttttaattagttttcagcaaaaatgtcagaatttctcattttccttttgggtttctcctttgccatgcttctcatgttgtgtttgctggtttcgctggtgctctttgttctttgtgcagcatggtattattggacaaaagaagaagaaccagaagaatttgatgattttccagaatacccaccgccttattaatgaaataaattttttgttgaaatgtgtcatgaaaaaacttggtttaagccatgtacattttttctgctttaaaatttccatttcaaatatctaagctttgaaaaatgttcaactcatccttttttgctgatgtcaaagaactagggcgtattccaacaccgaagggaaaatttagtgagaagaaaaatgaaactcaatttatgaaaatatttaggtatattttatgcacttgagttcgctaagctttatcaaacggttggacgtgaaatttctcgtgataaattccgacatatcatgaaaacagggaaaaaacaacatgaattagcattggttttcatggaaaaggctgggataaatacacaggagaaaacttttgggcttaaacacctcgaatttgtgcaaaacttttgggacaaagaattcccagatatatttcgtatcgttgcgtttgatatggtaaacgaacatttcctaaacttcgtgtgattgttttatttagaaaaccggacttagaccaattttcaaagggaagggagtaagaaaaaacgaagtttgtgtgataagagagggcgaacattgggatggtttaaaatctgttactcaatttttcgcagtcaaaaatttttgtgtaagctgtgaggtgacattcgatcgacccgaccgtcaccgaatggaatgtagggagcgctgcaaaaagtgttgccggatggggttcgggttcccctgtttggatgtttgtgaggcgatacactgtggagaatgcaatcggaatttctacaacaatgattgtttcgagtctcacaaaaagacagcttgtagggagtacaagaaatgcaacaaatgtggggaaacatatcaaacacgatcaaaacacacgtgcggagagaaattctgtagaatttgcaaagactatcatccgggtcggcaatgtttcattaaaaaaatcaaactccgacagcagaaagcataccgaattgtggcttatgacctcgagacgacggatgtagggcgcgaacacaaaccaaatcttgttagagccgcgcatact

SEQ ID NO: 6686 - DNA, 8129 bp, Heterodera glycines
  unsure (1)..(8129): unsure at all n locations
atcatttgtggcgtaattaatatgtatggtgatggacacgaatgaatatttttaatacacaacgtacgcttcgcatgtgacatgtaatttttgataggggaatgcagcaagcagcccatcgatcggcaaagataatgagataacagcggacagcagcatgcgagggccatcatgaccccgaggacactttgaaagcggacgaattaattacaggcacagggggggggaatcataatatgaacgaatgggcatgacgagttgagtgaaagtgaaaaaggtaaatgacagacagacagcaaatgcattgtaaaatcaattaaaacaattgaaaaacaagccgtttattcatcgatgtatgctaatgactgtggaaatgtgtgttgttgatcaaatttataagatgaaaagtgtgtaaatcaaaagcataaatatcgatcgcgaacataaaacgccaaaaaaagtaccaacagaaacttccttcgaccactctgtcctgtcctttgtcctcccctcctcctctttcaccagcattttcaacgccggcgatcgcgcgaacggctcctgcgactgctgcgctcccgggagcgacttcggctccggcgtttggtgctgctgccgccgctactaccaccgcggtaaggggagaaaccacgcgagccaccgccgccgccattggccatcatcgccgcctcttcggccaactcacgcgccaacattgtcgccttggactcgcgcattcggcgcgtgtcccccttaccgccacccaaccgacgcggcagccatttcttttgcgtgcggccacgctcgtagtccaccaccacgcgacgtccgtcaattttggtcccgtcggccttcttgtaagcggctaaaggacccgaagcaatgcatttggagcggatttttagcccaaacccaaacagccaacaaaaaacagaacttaaacgtggcatgacatacaacccaaacacttttttgtgtctctgactcacgattgggagtgtctttctgtgtgtcgtccgatcgagaaggcctctctcgttcgacttacctcactgacttacccgaattttcatttttttaaatccttaccgaattttcttaccacaaaagccaatttttcgaattttttttaaagaaagagtcaacttcttgtcctgcttaccattacacacaaaaacactcatcggagaaagcgtaaaattcgattaaattataacggggacaaggaatagcatcattttccaaaagacctatattttcgtaatttgaaaataattcttcaatgttttattttaataatgctcaattagcgatcccttgccccgttattgcgtattaaaataaggtttacccgcgcgttttccaaacaaacctaaggactttttgagtaatttttaggtgagcacagcaaaaaatgtgtgccaatgcatgcacatatttgcctgagccccgcggaagctgcaaaaatttcaaaaaatgtaggcaaaaattgtttttattttggccgtcattttcaggacaccgaaaaacccgaagcttaccgccgctgtcgcgtgcctttccccaattttcattgttataattatggtttatgggtaaggaaagagcaattcgaagtgttattgccgttcaatttataaaattcactgaaaattgtcaacaatttgctactcttagccatgctcttcccatttttggcataatttagttaacatatttacaacatcttcacaaaagtgaggacctgacatctccgacttatgggcatattcgataaaggcgtaaccgcgcggtttgctgtttttgtcgtgcaccataataatctgaaagtgtcataatatgacacataccataaacgatgttaaaaattgcctaccttcgttattttgccgtacttctcaaattcacggcgtagtttggactccgaagtttcataattctaaatgaaatttttaagttttaccatgtatttttctttacaattcggccaataaaaagtgttttgtacgggtcaacggtcgccttcggattgtccgcaggtgtccaagtggcaatgccttgctcaattttgtaggccattagctcctccttttccttgcgctgaattttaaagtttcatccaaagtttttgttgcaaaatgcgtttaaaactgacttttcgcgctctcttctcctctcgggtctcaattttgggttttggaggagtgtccttcggatcctaacaaataaaaaatccaattcattaaaggtgttttgtaaacctcaaaaccatggacacactcggccatgccccccatttgcatgtgttttcggtggatgaatagatcatctggcggcggtttgaattgaatcggcggacgaggcgcaaacagagccaacaaattgtcggggagaaattgcgtcattatgttaacaataagaattactgaaagtgaaggctttaagaaaacatgtaactttcttgtgagcatttgtgagtaaagaaaaacataacttttaatttatttatttgacgtagaacaattaataatttaatttgcaattgcaattgtattttcttcattaataaaattatttaaaaacctacaacttcaatttttatgcattttcactcccttcgctttgtttaagctctaattcgattcaaagttttgcaaaatcctaatttacccaatttacattaatttctcattttcttacgaatgaccgaagaatctgtaatcctcagtttttcctgtctgtgagtaaataaatacctatttaatttacactttatatttgaaaacaaaactttacaagaaatttgccacttgaatgttctgatggctgccgattggtaattacagcgcgatcggataatgacgcaaattttgttgaggtgtctttttttgaatttaatttccttttttgattagcctacctaaaattgtttcgctgttcaaagattggccaaacagaaacacggaatggcattaacccgaaattcgaggcacgggtttcgttgcttctgcggttggacaaatgccaacagttgcgcattgttttgtgagtccacttgatttgcaatttacaattcttttttcaatttcttatttattaaatcaaaaatgcaggtactccgtcgatgttcagtctggtcttctgcggacactgctcgccgacgcgcatgttttgctgctggcattgctttgtgccggttctaagccggtcgctgtgccgctggcacttcacttactacaaaaagccctacaccaacagtcgttggtgctggccgaagccgtgcagcaggaggaggcgagcggaagcgccggcggaacgcgtgagacattgacatttttaaataaacatccaacttttaaaatgaaagtttttgtctcacaatcagttttccaatttgtcggccacaatttggaaacgcccggactgctcaccgccccttattttgtgttggaattggtgccaaaaagcgaaactgacgagcgaatgccagtaaaaattagtttttctaattctgcaatattttcattctatcatcagattttgctctatcgcagtgaagtggcgcaccaaaacgcaaatccccgctggcgcgactttgtgcttccgtccaaatttttccccagctctttggaatggatcttgcgaatttcgtgccacaatttcaattacaatcgcacaaaggacgaactgatcggaagcgcaaccaccaatttcttccaattgctcaattcgaacacaaaatatttggtcagcgacgagggaggcacatagtcggtgaaaaacgaagataatttattttttgaggcttaacttggcaatttgtttgaataatttgtcgtctttccccttcagttgaggccgggccaaaagagcaaagacccttccgccagcattgaacttgtccgcgtgtgcggtgcccccgtgccgacatttgtgagccgactgaaattggggtgcaatttgcttaatttagttcggcatttacctaatgctgtttcagtcagcaattccattgcacaatcgctgtcgacttcacttccaacaacggcggcccaaatgaccccaattccctccatttccgttagtttattttaagaagaaacaaaataagtaattgtcccttttacccttttcaagtgcatccccatgccatgaatatgtacatgaatgcgctgggtgccattgccccgccgttggctcgactcgaaaagttggagcagtacacacgacacaatgtcgctttgtctgatatttttctgattttccaggctgggcagactttcactgctcggattcggtgccaaagtgccgcccacttttgcgttttccaatatttttgctttggtccgtgtctttatatattttttattgaatgaatttctgatttttcagaacggaacattggacaattcctatgtccgtggagtgagcgacgcactaaacagttacaggtggaagatttccctgaaaatgtttaatgggtcaaaaaatccctcagaaaaatggcgatgtccgtcctcccatacgcacccactgaatacgcccaagtgattcaccacgtcgtaaagtgtgcttataatcaacccttttaatctgtgcaacaatggacggacgttttccaggttagcaaaagcatccgagaaggcacagactggccacttctttctgctggtcattctgacgaacggagtgatcaaagaccaccgggatacggtggacactatcgttgaggtgagttacggtacgacaccgtccgtggagaaacactcattttggcataatccatggggaaacttcaaggagtacaaattgtttgctttttgtctaggcctcttcgctacccattgccattgcatttatcgccgtaagcaacgcgcaccatccatcgcaggtaaatgctggagaaaaacgcccaatttttttttattttgattgtttttgaaatgactgactaataaatgcccctcatttgcttagttggctgcactccgtcaacaatttgccgtccatacgctaaaatcgtcgcgcaatgtgccgcttgcgcgagagacagtgactgccgtgtcatgcgcggacccatccatggcataccattttctgatggccgttcaacgacagctcattttgcatctgctaagggcagcgacggacgcggacgcaatcactgccagcggatgaagacggaaatgacttcaattcttcaaatttcacaatttcaaaccaatccatttattccatataatccatttttgtattttccctctcaaaacactaaaactgtgcctatagcccatcataattatatacttattgttagtaaaaatatttttgcatggataacaaaacaatttaatccatgccatgggtcagcatgtgctaatgccgccactttctgttggctgagaagcgcattaacacaaaaagcacttctctgttgaagtgtctgtcaagttcagcatcccctttctctgtgtttcctcggcgagtggaagaaatgctcgaggggagggagggggaataacgccttgatgcttgacacgctgatgacaatgaactggacttgtcgcgaatttcgaatggcgtccgttggtcggtcggtcattgctcaccagcggacggcggcgaattcagcaaaaaaacatgcacaggctaacagttgccaaagtgaccacatttttgggcaaatgttttgtttttttcgtttaatgccttggaattttgtcactccgaaactttttttgaaatttataaaaatcactgcctttttgatttcatttgcatatccatcctttctttgttaagctttgcctctctcttcagctgtttttttgtctcgaaagtgtcttaatttccctcggggcatttgtccgtcctccgcttttctcccccccccctcccccttttcatctccgccgtccgattcgctgctcctctcgtccaaatgattttatcagcggaacggcactttttgcttaatttcacaatatttttccgctgctttgaacaacgccaacactaaaagagaaggaaagggaaaaggaggcgaaggaggagcagtatcagcagcaacacaaccaaaagaagcgtgggaaaagagcaattaacagcccatcactgagttcgttcgtcgtcataattctcgccattgctccgttctccaattagtcccaacaatcgccgcttcgtcgacttcgccaatcgctcgtcccgataatccatcatttgcttcatctttatcgtcaccgccctaagcgcaacagcacttcttctgtccctccgccactgctgctaatttttctacccaatcccccgccgcgtccgccaaaaaaggctttcccttttttccctttcatttacctccccatcccatcggctgatttgtcttcttatcccattatcttctccattatcatcctcacttttgccttcgtaatcgcatctcgacaaatcagtcactctcgccaaatccatcgcacaaatcgacggcggatgtaaacgaaggccaatgctttttccaccggcaatcgcaatgccaatgcgcatggcagtcattttcatcattttggagcagcaagtgaggcaaaagtgggaaaggatcagttggacgaaaattggttcacttggacctctcggagatcgaatctcaaaaaaagctaattaatcttccatttcgttttgttccgagtatttctctttctgtcccaatttctgtaaaccgttttcaggcatccattttcggcattgaccagaacattaggtcaacaattagcgaaggtgcactgacaacatcaaatggaaatggtttgaccacttttgaccaactgatggcacatcgtgagcatttctttcgaacactccgacggcaaaaacatcggagaatggccaagaaaatgtacgaaaaggcgcgggacagagcggaaaggggacgcgttttgttgagcaatgagcggggcattggtagggcgaaggaaaagccaatttaaaacaaaagaaacacattttggacaccaaagaacgttcctcaatcattctgatgccaattgatcagccaaaagtgctaaccgcagaaacttttgcgagcggacgaagtcgacgagtgaaaggcgaagcgcaagcgaacggtggccaaatgagggctaattagggagcaaatctaaattattaaataaaaaggtggggcccacacggagagaaagcccatcaacggaccatctgcggcaaaaaggccagcgaatttgcaaattgcgactgacaaacacgcggacgcaaatgcaaatgcatcgcaaaacaccgtagtctacgggccaatgtcagttgggcaaagggatacggtacatcgacctgtctcgagaagaactgttcgcggatcttatgttttcttgtgtttgctgttcagctttcccgccgactattggcaattgcccccagcgcttttagccgcgcggctgaggcgtttcagcaaggcggacattatgcgaagccttcggcaaaatgcccgacggatgggcgtcgatggaggcaaactgcgtgcggtgatgcgacacatcgaaataatgcgacgggaggaagcgcagctgcgcaatcaacggcactatcagctgcctgaaagaaaggtggcgcgaacaatcgatggattgggggggggggggaggaaaaggattctaaactgatcagggtgatggaaccgactgagaagaccaatgagcaaatcttgagaccgaaaatctccaaaacttgatattttctcggtccaataacgagactctcgaattgtaataggcacaaaaatgcaaaagtgctcaagatggtcagaaatgcgctttttcgcagaatcacacgccgtcagtgtcttttctggtcgaccgtgattcgtttcaccgttccgtcgacgtcatagacagcgagaaagtccagtcgaaaagtccattcgcagccaacacaaattcacacgcaaaatttcaaaggaatgatgacgggtcaaccaaactgatggcgagggaagagtgtaagtattacttaaaactcaaattctaagtcggtaaaaagggaggggaggggaccgcatcaggtaattaagcatcattatttaattggctccacaaaatgcgcattttttcagccgnatttcg

SEQ ID NO: 6687 - DNA, 2633 bp, Heterodera glycines
aatgttttttttgtcaattataaagaaggaaaaacttataatatctatgtttagctacaatataaatgaatatcccaattagaaaataaaaacaaagcgaaaccttcagtttggcaccgcctttttatagcttcaggcaaagtaaaccctaattttttttcattcaacgggcttttgcttgtttatatccaactgttttccgcttcatcaacacaattcgatatgagaaaagtcaattgatgcagacatcgcccgatgcatcgctggtgaagtccctcctctaaagaagcccaaacatcgtgccgccgatgcgagaattcttcgacttttgcaggaatacaatgccatcaacaataacccggctatccaaaatgaccacaattaccatgccaatgttaatcccgataatatcatcaatttgctcgttggtattctcgaaattatgaaatgcgcccgtaatttttcaatgcttgttatttttttgttgttgttaacacattgataaatatgttatgttattaattttaaacattttttcggaaaaaatcagtagaatctattttggacaaaaacagcttgccgtactaaactgaccctcgtactaaaccgaccctcgtactaaaacggccgtactaaaacggccgtactaaaccggccgtactaaaccggccgtactaaactgacccggtccgcctttttttgacgtttttttccgattttagtgcattttttggcgttttttttccgaaaattccatcaaataaaatacacctttaagaaatgacttgaaaaattttcagaaaaaacatccctaagaattgaaaaaatttcagaaaatacacccctaagaattgaaaaattttctcaaaaattgatcgccaaaattcattttttttcttgataaaaaattctcggtttaaaaattttccttattcgaaaaacattataaaatatttaataaccatttaaatgaccaaaattaagtttttggttaagttttacgtgttttgctccctaaaaaaccttagaaaaattttttaaaatgcctttttttcatgcctttttcgcgattttcgtgccttttcatgcctttttttcaattttttggtgcctattatagtgcctttttcgcgatttttggtacctttttatccgagctctaattataaaattaaaaaataacacacgattaaaatgtcttttttcaatatttttacattattttcagtaccgttaatttgccattaattcgacttttgttgcgtaagggccatgtctttcttccacttctgcaattgtcttgtcttggcttatgctccccatttcatcgttttccggtattcatcgctttccgaatataccaatatttggaagtgcggccaagcagcgattggtaaaattcttttccaattatattcctaattaccccattaatttaagtttatttaattactcaattcgtcaaaatggtatttttttcaatttttcaaataaaatgtacgtctttttcagttgacattagcaacattttttccaattgctgaaaatggcgagtacagtttcacttatgtaagtgcatgacatttttactgaaattttgttattttaaagtattgcaattggtaatcgttcacatcattggtcccataaaaaaaagtgaaaaaggggtcgttttttgcgattgtgagaactactaaggggttatcgagggcgctgatcacgaatctgacatcagatttatcatatgacatcattaaatctatgattttatctcatgtctatgaattttcatcaagtttttttttcattttttaaaattatagttccaaaaaatattttattgggttatcggagtcgttaatcacgaatatttcatccattccgactaattcctaaacccgatcccgaattcgaacaaaaatcgaaagttcaaattttcgaaatttggatttatgtttcgaaaatgcttatatgatttttttttaattgcaggaatgatggtttttggtttgtttccatgcatttaaaccattttcgaaacataaatccaatttcgaaaatttgaactttctattttttgttcaaattcgggtccgggtttagaaattaccttgcaattaaggagatgatgaagagtgcggttgacataattgatgtgatgggattgcatttcgccatcgcttattttctgtccggcaaaggcgaagttcgaatgctaaccgccggcttgggctggacagcggcccactctttgctcacttattttgtggtgtttttcgtcggtgcacgcgccacggggttcagttggcgcttcatgcagacggcattcaaagcgaaccttgacttggtgtgaaaattagagcggagaaaactgccgaacacaaataaaataatagcagagacaatttttgggcaaattgagtgggccattttaaagtatttaagaaaattatagcctatgaattgtttgcatatttttgctgtccctgggtttcctattttctgtaaagcttcacccatctgttcgctgcctgtctctcagcagcgacaatgcgtgctgactttctccaacggacgcattcccgtcctgaggacgggaagcggctgaatgttcccaacaaaattaaagaacg

SEQ ID NO: 6688 - DNA, 876 bp, Heterodera glycines
cgacaggtggggctcgctcattttttcctctaattaccaaatttacggggtcgttttgaaagtcgaatctatagcctggcttgctaaggattgaaaattctcctttactccaatcatttttttgtttctgttttagcttcctaccgtacggcgggaccgaaaacgaaagtgccagacaaaaacgaatggatgaagcgatgtgcggcggaatacgagcgaaagtactgcgttgagacggacaccaaactgaaacagcagacgacgaagaacaaggagaagaagcagcagcaacagcaagacgaatcgccggaggagtattacccgaccaattacgaggtgggcaccggcgaacatggacagataagaccgtcttcacatcaggcttttcctaggaccaagccatgatggtcctaggggggggggttactaacccccaagacccctccacacgaaattttatgcgaaaaaagcatcatatgcttaaaattttcgttttttttgataattacataaacgcttgttttttcttggatttaattttcttttttagcccgccttcaattatgacaaattgcatgtgtccgatataatccttccgtaagtctattgcaatctatttaaaaaacacacatattacgtacaattagacactaaaacttcattttgtagactgacaattcatcaaaaggataaatatcaagcccaaaatggaccgactaaatacgaaccgaaggcggaaggacagcacgtgacgagttcagtaacaaccgcaggtgttcaatacaataatatcctgacgtttcaaaacattttttgagctaactcaattttttgtttagttttgattctgtggaattgtgtcgggattgacctttt

SEQ ID NO: 6689 - DNA, 1941 bp, Heterodera glycines
  unsure (1)..(1941): unsure at all n locations
tttcttccccccccccccccccgcatcatttcccccgagaaattaaaaaatagaaagttttttaataacaaaattaaggaaacaaattttagaaaaatttatgatgaattactaaaattttctcaagagaaaattgctgaaatttttcgagtgtttgcttctcttacctacttagattatgagttatgttcttccacattttgctttgaaaaacaacaattttgggttgttgttattccatttcgttttaccctttcttttaggactcctattcgagggacagaagtcggtcgacaaaacagcggaccaaccagccttataagtccgacgaaagagatgaattggaccaacgtttggggagacatttcggaaggggtacggatggttttattattagcatggcgtatttttactctgccaaaaactaatgggctgggctcatctcattatgtctaattatagggcaccaccatcgagcgcattaccgccggccaagcaacgcgccgtatccgccgccatcgatggtgacacggcaccgttaccatccgtaccaccgggcccggcattacccggtaacattttcacactgtcttttccatagcattggcaccgccgttttgggttcagccttcgtttccaccagcgatggttttccggcaacgttcatcaccaactgaagcacagcatcaacagtctgccgaagatcagcaaaaggcaatcgaagaaaagaaggaacaaacgcggccagaacaagcgaaaaatgttccccccgaccaacaaaaggaagagcaaacggaggcaatttccaagcaggaacaacagcagcagcagaagaagggcacggacaatgaacagcaacaccaaacaacatcatcatcagcaacatcatcttcaacttcaactgaggtgcccaaacaacagtcatcatcgccgccgccacctcctcctttcactcagttgacggacaatggctcagcgcgacggcaccgtcgtccgtcccgctgtgtgcgcaaagcggtggagaaatgcagttcgttctccaggtgcgcggacggaacgggccgagtgcaaaactgttggcacaaagggaacgacatggtgtttgacgaaccgacgcaggaatgccgaagtttcatgacattgccggactgtcagagaggcaattttggcattttctaattttatgccattttgctgttgtcctttttagaatcgtattgtgtcaatcgtccgttgggtccaacttcgttgggcggtgtttgctcaaaggtgctaaaacgattaattatgacttgagtatctgaaattggaatacatttcccgttttcaggtggccatcatttgtgggattccgcggcagcaagacggcactgacaccgcgcccttcgtgtgccgtggcgtacgggtgctgcatccgcggaacaaggagagatgcgtgaatgacatcatggtgccgcaatgtgctgaactgctttcttagcagattcattgttgatcaattacaaaacagatttatcagtgatcaatcagattatgatggcacattaccaaatgtttttttaaccggattaaagtgttatgtgcttgtgctggttgattcagttttttgttcggatttatctttttctgttttaatacccatcattttgtactattcttttctattatttttttgtttgtgtattttaaaatacctattttaatttcgatggacgaactgaacagattggctgagagagcggtcgagagtgatcagatgggacgggttgatgatgccattttatattacaaggtggggtggttggatgtggagtaggacaaatcatcgccgtgtgaaatattccaaaatgaatataaaatttttgcctttttcgaggccattgcggtggtggggcccaaattctanaaaacagttgaagactgtcggctctagaggtcccc

SEQ ID NO: 6690 - DNA, 1184 bp, Heterodera glycines
aatatttgacacccaaatgggtggcattcattggactcggtgccgtttcggtaatgataatttttttaattaattttaattttaatttaatcaatttttcgattaatttaaaatttcttatttgatttctcaggctgctgtgatgtcttcagcagattcatcaattttgtcagctgcttcaatgtttgcgcacaacatttggaagctgaccatcagaccggaagtgtgcttaatcattaaatttgaatttaaaatttaataataaaatataaattctattaattaaattgggggctttaaattggtttatgtgtgaatttgaaattttaaattttttataactcaaggccagcgagcgtgaggtgatcatcatgatgcggttcggcataattgctgtcagcatattggccaccgtgatggcactgacaataaattccatctatggactgtggtatctgtgcgctgatctggtgattattttgatgcatttaatcattattgattggatcagttagtctcatgtcattttaatgattgctctaatccgagcataattacgtttgtctgatcactgaacaaatgcaacaaatgactgtctgtcatccatttttctctagtctcatgtgtatttgtctgatcccggacataattaaagtttgtctgatcactgatcaaatgtaccaatgactcacctgtcatccattttttgtcccatgtctttaacgattgatccgatccgggcataattatgtttgtctgatcactgatcgaatccagtcaatgactgactgactgcctgtcatccatttcccctttaatcccccttcaagatctatgtgattctgtttccgcaactgctttgtgtggtctacttcaaggagagcaacacgtacggatgtctgtgcggatatgcgagtatggatttttaaatatttgttttttaaaatttttttaaataaatttagttggcatgctgttgcgattgtccggcggtgaaacattgcttcacttcccagcaattattcactacccatggtgggacaaaaaaaaatgttttttaatttttagattggattttttaaatttaaaaatttttttgaaaattacggattacgtattacggattacgccaaaattacgcctttttggacctccgtaatgacgattacggatggccgtaactg

SEQ ID NO: 6691 - DNA, 2524 bp, Heterodera glycines
cgtgatccgagatcacggcaccccaaaaaccccgtgatttttgtgatcacggccagccctgattctgaggaggtttaaaaataatcccccatgggctataattagagcatatacggtattcattcttaggggtggaaattccgcatttcgcgccaaaaagcgaaatgcgaaacgccaaaaaatgcgaaaagcgaaacctcggcccatcttgctggagacatattttttcgtgcatagctcctcgagacgaatcgattggtaatatcatttgtgccgtttttttacggggcattgactaaagtacacccgtgtctttttttatggtcgtgtgaactgcaaaatagagccaatttttgattaaattcagcttgttttgatcaattttagaacaagtgagaattttcaaaaattttttaatttcgacattttgtttgtattcgggttctccgaccctgaaaacccccaataccaatgttttgacatagtttggtattattcaatagccctaagataacagcagagccagcaattgagttttaaactgaataaaataatacgatataacccacaatatttattacaattgagccgaataataatgaacaatgaatgatgttctaatttgataaataattcaatctagcatcgcttctacgcaaaagcaaacccctctgaacattcgcgactggccaaaagcagcattttgtgaagagtttcgtaatcagggtattcgggcaagtccagctggttgaagcacgtgtgggcggatgggagccgactgttggaacgcgtgtccttttgtatacttaagtgcgtgtttgttagagaggaatgaatttgtgtgctaatgcttacgtgaatttctgtacaccgttcattccatcgagatgcgcgaaaccctgcagcggaaccttcgaagtccctgtgacaaattgaagaaatttggccttgtcctcggcatcgaaagctttaagagcgcgccagaacctttaaatgtatggcaatagatatttaatttgttcaatatgttatttgttgcactaccattgaatttgcggactcgtccgtgtgtatgttttgtattcagtgtttgcacaaaggtcgtcgatgtcgatatcgggcaggccggagataagcaattccaactcttgctcgttgaaaatcgagatgagctttttggggatgacctcgtagaaaccctcgagaaacgcgttcaactgttgccgtattgagcctaaaaatgttttttttgtgtaagaaattctctttcccctccaaattacctgtcattttcatttggcacatcaaatggacgtattcgtgtttattggcatcggtcaccgttgtcttgttcccattttccaacaactgccgagtcgatcgcacaccaaactcctccacctcaacagtaaaagtcagctcggctccgaggtcctcaacggcattgttcagcaaaaattccagcgatttgaagaggtcggggtcctcactctcaatgtcctggtaccgaactggaaaaaatttaggtcggaattaggttctcaggttcttaaacacaacgtccggtgttaccatgcttgttcaagatgtgcttgtaaaaggcacgagtaaagtagcaatcaagttgtttgttgtcataaatggccttggcgatcacacgaccaacaaactgaaatcaaacaagttttcccaagtgagctagaggggagggaactgaaccaggaagaactgataaagggtaaaggcgggggaggaagggggggggggggggggatgataaattgctgcattccgaatttctataagtataattaacaaaatttgcaaaaatatggcaaaatatttgctacaaaatagtccaaaaaacaattgcataaaaatactcatttttttttcttatttcaatttgtccatagattagctatcttgcaaaaaaaaaaaatgccatggcccaatggcttgggcttgtaacccgatacccccccccccccccccgcctcgttgccgtcgttagtttggttgcttcgtttgccgattttcccatccaatttgagccatacttgagccgaccaacatcggcagggagcagcaacaacggcaccactactctcagtcgagggaagaagaagaagaagcggattatgcccgggtttaagcggatgcgccccagccaaggcatccgagaggaaaagcatttattaattttttttttaattaaaatatatcaattgaaataaattttatttggtgaaataaatttttttgctaaaatagtgtgcaaatccatttagtaaaataaattttgtaaaaattaatttatatttttagtgtaaaaacccgttttataaaaaaactagtaaataattgattaaatttattttttattttcatttatatcattttttgaaagaacttcatacttcaatttatttcaaacatttttgtttcataaattttttgcatttttaaaatttttctttttcaaatttaaattgctcatcaacaacattacgccaaaaaatgc

SEQ ID NO: 6692 - DNA, 1339 bp, Heterodera glycines
  unsure (1)..(1339): unsure at all n locations
agggggggggggggggggctgctccccaaaatttgtacccggaagaagcccaaatgctcgggattgacataagagttcttgttgatcatgtaagtgactcggtcgccgggagcagtgatgaacagagcgtaatccgggtggaagatttcccttgtgatcaatgagtaccattcgcgcaacagaccaccttcaacagaatttctggggtattacaaggcaaaaaaacaaaagcaaaaaaattagacccttgtcttgccccttctctccttcgaaaatgatgtacagtctcgccttccaatcattcgggcgcaatcgatagagctcgcgaaaactgtcaccgaacaaatgagaccggcgcacacggattgcaacgtcttcgtgacgatatctaataccaatttaaaatgagctagtttgaaatacgtgagctttgtaagggagggggggggggggggattatgggaaggcattggcgagcttaagtaaactttcggcagaaaattcgaagcggggggatcgacccttcccctaatgtttttctgtaaaaaataaaaacagtgtaattaaaatcaattggcagcgaaaattctaacccgcaaaagtgaacatttccttctggtatcggcccagctcatcctcgccggagttgccgcccgcagcagaggaggccaactgaggtgaagaatcgccagttggtgcagtttcagggagtgcagatggagccaattgagcagtttgcggtatcaccaacgaataagagaggaaaaacgcctcggcagctaaaggacaaaattatttatttatttggtgcgttatttatccaatgaaaaaaacccgaccattttggaaatacaaaaccgcaggttgcgaatcttcggccttctcgagaagggacaggcaattgctcagctcctcccaaagtggcgccagctcatcgaccatgttccggaccagtgttgcctcgtcactttcctccttcgcgtgtgtgtcggcttgaggtttcgatgtcgttgcctgctgctgtgccgcggctccatccttctcagtgttgttcttttttttttttttgagttgcgctttcttccgttgtttcttcacctttttcaactggttgcacaaatattgaaactgaaaaacaccaaagatatataaataagttgtgataagtgatgcaatcgcaacaaagaaaaactcaccgtttccagcgacttcagaaatttgccgggaacaccgtctagaccccatactatcgngnnncagcaacaagctttgttgtccttaacggaccatgtcaaaatgcacaagggaccaaacacaccggctccacactcagcagcac

SEQ ID NO: 6693 - DNA, 1730 bp, Heterodera glycines
  unsure (1)..(1730): unsure at all n locations
ctatatatttactagatttcaatgaaaaatcattattttacaaaaaaaatcaattcttaccagtacatttttactcccgtttttgggtaaanatttccgggagcaggagcgggatcgggagttcaaaattttccgggacgggagtcctgaacgggaatcccgtaaaaatcccgctcccgttaaaaatcccgttcaccgaaaaaagcgggagtcgggagcgggactcccgtaaaatcccgcgggagtcccgatcccgccggactctagtataaacattcaaatcaattttctgggtaatgaatgaatgataaggaaggttgttcttcaattaggttgctgatggagcgcaaaatgtgtacgcagtagaagaatttgcacaattaaacgacgcattggtcggacagcttaaggctaacatttacgaaaaaacattgaaagacgaaaagggcaatgagaaagatgaggaggaaacggaagaacaggccgaaagtcagccccaatcggtgagggcactgaccgacgccaaaatgggaaaaacgaaggacgaaacaaagagcagacggatattctccgaagaacagacttttcgcgaattttaattgatcaaattaggcttaagactggaaagaaaaaggtagaaacctttatgggcttaattcctttttccacaattttcaaagctgggtaaaaccacggcttagccgtcactccgggggcagagtcttggaactattgcaaatggaattgtgaatttataaaaaaattcttaaatactaagaacgaacagcaggcaaattatatgcgtaaagtgatgcgatggattattaatttcaaatatgacccaaaaggaaaattttctctaagaagggcaaatttgtgacctcggcattggcatcactgtccgaaatgaatctgtgggaaatgagcaccgtaaatctcctcacctcccaaagtccatctgttcattctcctctcactaacaaatgagttcattcttctcaaccccaactcctcctgccataatcaaagcaattcaattttttctctttggaaacatttgaaaataaaatgtcttaataaatgcatttcgccaaaataaaatgttttttaatttttttctaatttttcgtaaaaatcttcctctttcccggcgagatttcctttaaaaattgacgatattttacggggtcggaagaaaggtgggaatctcgttcccgtcccgctttgaaaatagatacctacctaatttttattcacaagtttaggttttgactaaagacaaacaataaatttataaaagactgcattcaaactaatctttttttctctagctttgttgttccatttttgactttaatttgtattttattttgcgtctattcttcaccatttgttcgaatttaaaaatgtcaaacaacgaaaatgaaaatgtgatgaatggagaagccgtgggaggggtggaaatcaaagtggaagccaatgaagaagtgaacacggaatcgcaggaggacggagaggaggcgaaaagtgagcggaaaatggcatgaaatcgcttacgcttaatttgttaattggaagttctaacaaattcgcaaataagggatgttttcagttccccagttcagcaaagagcaaatggaacgttcggtgatgtgctgcacaaacgaaggcgaaattgtcaatgtacgtttgggatttttaatttgtgtgcccatttaaagaaagcgaat

SEQ ID NO: 6694 - DNA, 2999 bp, Heterodera glycines
tattctttttatatatttattttttaatttatatacttcaagggccatttgtttgttcttttcgtgatgaatgttcttttttgtcctttaggtgcccaggaatgcgctcgttgcataatggacaaatcggcagaagaaattcgggagatgctttgtctggaggatgtgagacttttcagtctcaacgacttcttttctgtttttgctcatttttaaaattttaggatttgaccgaggaagaaaaggcggccatcaccagggaatacgacattccgcgcgactttcccaccattccgttgccggaccaacccgagctcagtgacgtgccggggacgagcggaacgtcgtcaaattcgtcgaacaatgagggaaagaaaatgaacggctacgcgaaaaggtgaccgaagggaaagggcatcgaaactgaatgaatttctaagaatttttacatttatcgttcgcgtttttcgtgcgaaatttaaattcttttatttttagcgccgggggctcccgtcagtcgtaaattttcaattggatgaaaaaaggaccaaaaaacattttgattttgacgatttgtacaacagcaattgaaggacggcttggattctcttaatgactttgtattgttttcatttgtttctcattttgatttgcttcttcttaatttaacaaaaataaaagtgtaaatgcctttggaaatgctctaattcgttttatgtcattaaaatatttattccacccatttgagtgcgtccgatcatccgattttatttgttccccgactcggtcgagggcagtcctaattttaatccttttaaaactcgattacactttttttgttgctatttcagaataatttaaatggcaaactttccgcctaattctgacgaagagttcgaccgtggcaatttttcatcattgtcgggaatggtcggcatgaaccaacgacacttggactggttaatgaagtgagtcattacaaagttcgggtgagcactgacagtttcaattcttcagaaacatatcccgcgaagacatggccgaactccaacaaaggacggggcaatgcgcccgaaaggttggaaatgtttttgcggcattttgagtgaccttacaattagcaaaaccatttgaattcgatttcaaaatgtgctttttttagtgacttgcgccttcgattgtccaacttttatttattttttcagtgtgctgtgacgtatggaggtccgatcgtcgtcgttaccatcggtttcctcgagtttttgcgccgtaaacagaaccttccgatcacagcgccgcgctttttgatcggctaccccattgtttgtccgtttcccttccatttggttttttgagttgctaagttttcagatgtgtctcacttcggtggcccttggctcttccatcggcttcaaaaggtcgggttgcggtgcggaaatgcgactttttctcgacaagctctacgccaaagttagacatccaaagacaatttttttatgtttaaaacatacagatggatatttcctcgttttttcagtacgactcccaaatgaatgccgctagcgctcagatggcgccaggcgttggcggtggcacttcgccaacaaaaacctacgcccaattgcgcgaggccaaccgcgccggtcgtccaattgaattgggacagttgaagcaacagcaaacgcgacaacagcagaagaaaatggtaggcaatcacacaaaaagatgagggagtagttgctaacaattaaggacctataaatgaatttcaaacgcaaaacagttttaatacattatttaccagatccatggcgaaggggagggtccccaaaatgcaatgttttttgggtcaattttctttgtcatattagccaaaaaccaaaatgtgttatcctcctccgaatactttctagttaggctcctttttctgtacccatatacttacaatcggtcatatttaaccaaacatatacattaaggaaagggggcgggcagccaaattttttgcgaagatggtccagttatataaaccaaaaaatgatgaaatttcgtaactttgaattatttttgaaagtttgataattgatgtatttttaaggaattttgttcaaaatttcctcataaaaaaacttaattttttttttaatgaaaatctaagattcccctccctccctcaatgcgaaaaggtcccacccccattttgggcatctgcggcgagcaacaaaccttttgtttggtggaaataaattaaccaaataaatgtctccaggacggcaggaaagcgacgacggaagggactgagggcagcggcggagtgccctccgacgagtggggccgtttcgggttggacggagtgttcgccccctctccgcccgcttcgtcttccgccgatggcaccgccccttctccaccccgtccaaaatcgttctgagtgatcatttgctttttcttatttcatcaggcaattattgctcaattaattaattaacaaaaaagcgccgaatggtcgcaaatgaataaaaatggttcactttttgacctttgtttccttactttacattcgttacgattgttttttctcttatgaataaataaaaaatgcgaattcattgcacatttattatttttcgtgatttaaaaaattaagttttctgcaatagaaaaagaaaaaatcatatagcataaaacttttgtgttgatcaaagagaagaattgcacaaccaaaagagcacaaaattttggtgcaaagtgaaaaagacccaaattctctacggcgtttccgatggaaaaacgaaaggtcgaaaaccgagtttcccgaagagtttctgtatttaagggaaattgcttaaaattggcaatttttaagtaggcgattttaaacttagattattgagacacttcgtacaaatcatcttgagttcgtcacattccaaagaaattttccagccaatgggaaatttttttccaaaatttttcccaattttttcagggcttttttt

SEQ ID NO: 6695 - DNA, 2253 bp, Heterodera glycines
  unsure (1)..(2253): unsure at all n locations
gaaaagcctttgtgctaacagagcgacctttggtcaaaaataacgggcactccttccctttcccttccctttgtccattctttgggccgttctctctttggcccttttatttcgggttttttcaattttctttccaaatttcgcatttccaagggtttcccatgggaattcgtccgtacgatcgccccaggccctttccccccctttccctgctgaaggcttttgccctttcgctttgcattgcctttggcgttcgggcgcaggacggttccagcgagttggtcatgtcgcagaccgtcaaaagtgcgtcggtgctcggctcgcggctcagagttcgctgtacggatgagaaccttcgactttattcggtgttttccgtttaccgtattttgactcattatcgtaacgaatgagtcaccgtctcacagaatgccaccacttgtgccgatgagcgtgaccccgagtcgtgcaagtagggcaaaagcacgaatgaagaagccgctgcttaatgtgacgatttcagaatgattttcaccacgccggcgtcgaacaatccggcggggagagacccaaagtgtgacaatccgttgctcaaggatttggccgaccaatgccgaaggtgaacaaggcatttggcaaccggtttaaagcatctcctacctaaaaaggacgtgcgcaatttgttgcgaagatcccgtctacgcgtgccaaaacgacgaaagtgggcattttcggctaattaaacgcctaattggtcggtccattcgttcattaaggcggcattgtcaactgcaatatgaacgtggagaaatgcgggatgttgggtaattaattgattgtgcgtcattttatgcccaatgcgcaatttccaacagaatactcttcgatgatgatcaaattttgccccgccacgtgcggccttgcttaacgaagcgatgccgtgaccaaattgaagtcatttttgagcaatttccgagttggcatttaatcattggcattttttaaaggattgcgaagacatgaaaagtctttgtacaaatggtaaaatgtttttttaatcgattttaaataatttcttttgccaatggcaaattgatcagaattgtacgccacttttatgaaccaccaatgcgcgcgcacttgcggcaaatgcgagcccgaagatggcgactttgaggaggaggagaagtccaaggagaagggcgagggagggacggacgaaccgcaaatagcggagccggaggagggcgaccgggtcgagtcggccgaggatttgccacggcgaattgtcagtccgccgaggggacggccaaaaagtgaaattcgaatttcggcggaattaaatgccaccgatttccaaatgattttgctttttcaagacgaaacttgcgtggatttgatgaagaattgtcgccgcaacaaaaggttctgccaccacccggtgtacaaggagatgatgcggaagaactgcgcacgcacttgcggctattgcaagccgagcggagggccgaggggcggcacggcgtcgcggggctcggcggaagcgaaggaggagaagtcgcacacgacgggcaaaagccgcaacaaaaaagagtgcaaagactcacaccctttgtgagaggggggaaaaccgaccaataaattgaccaatcattaacaattaatgaggcaattagaagagaaaaacaaaaccaatcaaatttagctgcaaaggatgggcaaaaaacggatactgcgaaagcgacgaatattctgaggtaatgggtattataactaattaatgaggactcactcaatagaaaacaacatttgataattgaatctaattaaggaggaaaaacgagaaaagtgcgccaaaacatgcggattgtgttaatttggagatgttaatttattttatgcttatgtttttgattgaatgttttaaaatatcatcataaagcggttaaatccgaaaatattaaaaataaaataatgtgaaacttatcgtatagtaatcagtgattactaatcacttttgccgtggaaagcgtgctgattgtgcctaaggacttccatagccattttgggaatttgagaaccaagcccattagaaaaccacttgttaatgaggggtttccctgggctgatcggtcccaatttacccgccccaactcaattccaattccattgtaaatggctttattatagggaaaatgcaaaatgtgaaattanattaaaatgaaaaacaattttttatgtttcgctgaataa

SEQ ID NO: 6696 - DNA, 1459 bp, Heterodera glycines
acaaattcattatatcgctttcgccgcttccgttgcctttatatcgctcttcccccccccccccctcgcccattcattgactttcccgagaatatgtaccaaccaaccaagccccttccccaaaactccatttttatgcagaaactttagggttgtgtgtgtgtgatattagggttttcattattgctctgctatgaaaagttgtagaaatttcaaaaaacttcttgttcaaaccccgtgccctttccttgctttgcttgttcgaattcagtttcagggttaggtatccgagaagtatacgaaatggagcattttgcttctcaaaattgcttgcgagaaatgatttttgccaagaatcgaaaggcaaaaatggcaccgaagatcacaagacaagaccaagataaaaaaataatggagaaatttggcgttaaatttgcgcgcccctttgttgattttttaaaaattttgtcttgcagtcacataattggaaagtaccaaaaaaaacaattgcgattcatggccaacaaatttcaggatcttttgctcactaagcagcaaattattttattcttactagccaaaaaaacccaggaagaatccatcataatcagcttcatttatcgccacttatttcttcgcttgcctattgcccgccgctgtcgccaaacctcaacaaatcatcagtctcaacaatattacctaactaactaacaaaacaacaaaacatttctcatcccagtcggtgccaattcagtcccaaaattttcccgcattttttccaccaaaaaactcaccattttcgtgtgtaagagaagtgctgaatttaaaacaaaacggtgcaacaacagcaacaaacccgccaataattgccatacccagcagtaaatggacgtgcctttgtcaggtagaaaaaaaaaattttttttttttggggggggggggggggggggtagaaattgtaatttttacccgggaggacgtgtgctgttttacaaagctgtgtaaatatatgcttttaagtgtttgtacaattcggatgaaacgaatcaattttcaccaacattaattttttgacacaaattttttcgggccggacaatttggcgtcattcagttaactttttttcaaaaaatatagccaaattgaatgctctgaatattcttggcatgtttcaatctgcaaaattccataaaattttgccaagtttcaaaaatgtttaaaagaaaaagaaatttatacattaatttttaacccttaaaacgctcatcgatttaaaaaaagtttcttttcccattcgggattatgccaccaaatcctcggctacaaaaatgctattttttcaaatgcttactattatctaacctttttttttggaattctttgccctcttccaaagcccgcgtttttccattttttcactcggggattacggtttattttttatttttttgacatttac

SEQ ID NO: 6697 - DNA, 2524 bp, Heterodera glycines
gtgagtggaaaattttgaaatatgaaaaaaaaaatctttttttttaatttcagaggctcaggaatcttgacatggctctcagctaaagcggttgtcgtcgttcaacgaattttaggggaaaattgtaacaaaaaaattttttttagggtctcatcaaatgctcaaagccgaccaaggcgaccatctcattccagcttaaagacttttgcgattcgggtgtgacagacttgaacacggttctcaggtctcggaaaaaaatgaatttttgtaaaaaaaaaattgcaaaaattttcgctttttagagtgggctttcatctcagttttcatgccattccaaacacaacgagtccaaaaaatgaatggatcgccaattatgtgacgccggtcatcgaggttatttttgaggattttttgtggttttttggcgactccaattttttaaaaatttccccatgtccgcaaatggtgatatttagggagtccaaaaatatgcaccaaaaatggcaaaatatgcacataaaaagtgaaaaatatgcacataaaattttccaaattaagcgtaaaatctctcaaaatttcttccaattcgttaaatttaagctaaaatagctaaatatggtataaaaaatcatttttgaagaaaaaatacaaaataaagcatttatttattaattttggcgaaaattgaataaaaatcgaaaaatttcagttttttaacttatttttgacataaattaacaaatttttaagaaaatttaaatttaatcattatttcgacaaaattttgctaaaaaatgtctttttcggaaattttttcggtctttaggagtcaaaaaggccaatttacctcatgggggccgttttaataggggttttttttggaaaaatgcccaaatatgcgcataaactatgcatgaaatgccaaaatatgcattttagccgtctgatttaaaaagattgaattttaaatgcaataaacaaaaaaaaaacaaatacccacaaaattataaacccataggagcgtaaaaaatgccaaaatttccatgggatcaaatttttcccctgattttaattctcgccaattttttgaggctttccaattctatcattttttttttcattccaatcgctccactattttatttttctccatccataggaaacaatcactgacggtggtccggagctgaacctggaggaggcgttctggtccagcgacatggacaaaacccacccggtcaagggcggcaaggacacgtactcgctggagttggagatcaaggcgctcacatttctgttccaaatcttccaaaagagcaccggcgctgtccagtacatcacactgtcaaagtatggtggcgaggcgagaaaaacaaatggcatggccaagcaattttgtggcaattttggagccaaatttatttggaaccaaattttgggtttattttttgatgccaaaaaaattggttaacctcacatttgtgccctagacattttgtcctaacaaaccaaaagatacagcgattttttttgcaaattattaaaaaaaggaaactaattcttcataaaaatttcaaaaaaaaatcgctgcaaaatttacaagtttttttaactcttctcgaaaaaaaaaattcagcgcaaatgatagggagggggagggtggtgaccgtaatgtacccaaaaatgccgtattgtaggatcaggtcaggtcttgttccttgagtccctctaaaaatgccgaatccggtccaatccctgcagttttttcccatcaaatttatgcgcttgaatttcttacaccttggcgtcatcgaaatgacttgccattattattattaaaacgctgtttaatgaccctaaaatttgcctgctgttccctctccacagtttgcacagtcggatcagcaactcgtgcgagccggagctgatccgctacatcgggtccagctcgatgaagcggcgccagttcattgaggaccgcctgtacatcttcaacctgggccaactcggcgaaaatgatgtgatctacttgcaaggtctgtctgtgtgttgtgtttgtgtgattgatgaccacgagcgggagcagttcactgacccttttgccaaccatccttccataaaaaatgaaaatttttcaatttttttaaagattttgtagcatttttcttgaacaaaccaaatgggaatttaaaaatttttcgtttgacggggaaaaagcagggattaatagccgtttcgttccaacaatgaccaatttttaccatttgtagtcaaatttttcaaacttttaattgttttttttttctctttttgcacacaatactaaaaagctggtaaaccatcatggtaaatctgtcgaaattttgctttttgtttcagcgcccgaggtgtacctgacggtcacgcagttggcccagtttttgctcaagcatggcggtgtgaccagctcggacatgctgtttcgcatcttccaaacagcaccgtccattccgttgccaatccgggaccgtattcagaacaaacg

SEQ ID NO: 6698 - DNA, 2581 bp, Heterodera glycines
  unsure (1)..(2581): unsure at all n locations
cataagttttgccaatattcctgtccaatttctaccgtaaccccctcgtctctcgttgcagttccttgcccagcatccgtttgtgttcgcgccgttcnccgcccaattttatgtgggcgtccggcgcaatttgccctactttgactacggcgcgttcatccgcaaagtgagtaagaaatttaggaaaattttttggcccctcaaaatattatttttcccgattttttaccattttaaaattaaaatttttccgatttttccctaaccctccccccgtcccccgtttttgcagtcgttccccaactttcaaaatggcattggcacggtgtccgccgtcgccgcagcagcagccgccgcctctgtgcgtgcccactcgcgccccgtgctgcagtccaacgacagttttgagcagccctccttgctggtggacagcatcacttcggcgctgaacaatgtgaatgggccgggcggtggcgtcgccggcggcggattgggcgccattgccaacgggtaaataaattcacatatagtcattgtactggtagcagtacttgtacaaggatatggcatggccagggcgtggtgtgcggctatgaaaaatggaaaatttttttttggaaaagtttgccgttaaaaagcaaaaaaaatttccatggcggtgccttagaccctaaattcccataaaaattaaaaaatttgattaaaaaattgccattaattggtcaaaatctgtttaaaatcctttccggcggcaccttcgccaccacctgacaccaaactttaattttttttaaaaattatttccctagaaaaatgtaattaaactcgaaataatttctgaaaaatggtaataatttttctttttgtagggcacgttacggtgcgccgcccacactggtcaacggaggcggtggtggacaacatggtcaagcagtagttgctggagggggcggtgccggaggactccatggccacacccattcccatcacggttcatctggtggcggtggcacaacgccaaccgttgccggaccgccgacagcgatggcaccgccgccgcaactgcatcaccaccaccagcaccaacactctttgcatgcccaacagcaacatcaggccgccgccaccatggggattggaggaggcggcggcggaggagggcatgccgccctcctcgtgaacaacaaccatcatcatgccgcccccgcccacaataatcatcatcaccaccagctgcatcatcaccatggcagtgcgggtgccctgtccagcatggcgactagctcaaacggcatcaacagcaatggcacgataatgccgtcgttgacaaacggtatcgtcagcggcaccggtgctggtggtagtggtgccgttgtttcgccgtcccttatgcaacaacagtcgcagcagcagcaccaccatcatttgatgccggtccagtcgatgccctccttcttggcacagcaacagcagcagcagtcgacgcatcatcaccagcaacaacagtcgcaggggagcagcgccggcgccgccgccgcctccactttgttgtccgctgctatgatgaacggacttggtggttcgcagcagcaacagaagccattgttcgcgttgttcgacctcaaaatgggtgtgtctgtctgtctgtccctctgcttacaattagtctttctttatctctctttttatttctatcgttttttccctcctcctcccctctctttttctttttttccctcataattctccttcctctctctttctctctatctatcttttcttaactctctctttcgttctttctcttctccctttctctctttcaatctctctctttctttctttttctctctttctctctctctctctctatcgctttttctctttccttaactctctgccgtctccctatttttcttttaatattttcattctcgccctttccctttctctctctctacaactcttcactgtttccagatgaccatcatcaccaactcacttcctccatccatcaggacggtgccgcttctgctgcttctgccggtgcttcgtccagtcttcgttcagcaacgaccggtgcagccgctgcttcagtgccgtcaattaccacagcgtcattgccgctaagcggtgccaatggcagcgcactgaacggcattggtggtggcggcagtgttgtgacaacgccgacaaatgtgtgcggcggtggcgccaacaacatttggacatacgggccgtcctggggtgaggagaaccgaaacataaaatgccaattttgagatttttttggcactgccagggaataacttacaaagattttaaaattcattactttttcattgaaatttcattttttttcattccttccccctttgttcccgtagacatcgagctgctcaagttgtccgtcctgtcctcctcgttcggcacctgcnccattggcggcggcgctggcgctgggggcagcggcgccgcttccctcactggcggcggaacagtcgactcggccagcncgttgtcgccccgcgttgccgtgagagcgggtgtgggcgggaacaggaagcgcgagtttgtggaa

SEQ ID NO: 6699 - DNA, 3276 bp, Heterodera glycines
cctgcaggtcccccccctcatttatccatctactttcattttaatccgctcaaatcccaccacattccttccctttacaacatcatcccattttcccactatcccattcccatcgcggattggcttagattggattacatactttggaacaaaatgattgagctttcagattgcatttgttttttcccatagaaatatgtaagtggaattaatgaaattcaaagtaaaatttaaaataaatggcctatcagcactaatcatcttttacagatccctatttacttaattagttcaaacaaattgctacttgttaaggatcttctctatataaattttaattttataattttgataattttcatttttttttaaattttattttaattctatttataattttataaaaatagtaaaactttaacatcaatatttttgtgtcaatttaagccttattttcctaaatagcaacttttaagtaaataaaaaaacattgtaaattttcaactttcaacttcaaacgtcaaaaaccattgccagaaaatgaggaaggagaacaacaaaagcagtgccgcctcagcagattctgatgccaatgccaaaagtggtggcgatgcttctctcaccgcccccactgaagaggaggcggaagaaatcagtgccaatgagcaacagaaggagcagcgcaagtcgctggacgcactgtacgctgcggcacgcgaggagttcgatttggacatgagccctttggacagtgcgatgaaaacgttgcgggagggccgtgagatacaaaagttgtccgtgctgcgcaacctggtcgagctggtggagggcgagccggacgaggcgttacaccgcctgttgcccatgatgcaggtaatgttttggaccagggccggatggaattaacggacttgcgaaattttatttctaattttaactgactttgcaccaaaggatctttcctcgtgggttttagggaaactattaaaaataagaaaatttaatatgaaaattttcataattatgtaaccaatttttaagtataaaaaaaatggcaaatgccataaattaaatttatcgtaaatattaaattctgatttgattcaaacccaacttaatcaaacggggttattttgtattatactgttaccgtaataattatcttggtaggaccaagattttggtttagggccacaaaagtgagcagttgtttcaattgttattcccaaattaggccataaattcatcaacattaagggacttttgtcggttacgccaagcaatttggacattcattgtgaagcggcaattgcctacaaaaattgcattaaggagaagaaactgcagcagaaatgcccgtaattatttaattgagcaatttaatacttttgaataattttttcccattttagagaactttctgatcgttttttggtggcaattctcgagaatattgaggcgcagaaggaaaatggtaagtgaaggtgaatgattacagagacaaatcttggacaaattaaaggaaaagagattaagaaaatcgcatttatgatttttaataaacaatttttttaaacaatcaaagaattaatattacacttaatgattttaataaacaattttttttaaacaattaaagaattaaaatttttctcatccgcaatatcttacactttacgataggcgttaaaacccaacactaattggtctaaaaaatattttagctggttttcttttgtgtcctattttctggctctttcacagaaatttttattcaaaggtcgagactcccgacttttaatttgcatatttaatctaagccgcgactctcctcgaagcgacgcaatcagtcaaagcatataaaattatgaactttcgatatttttggaaccgaaatcccgagacttttggccattggttgcctaatccgatttttttggtgggggagtggtgggtgaatcatcagctgctgactgaaatgtgtcatatgaataagtgaatgaatgaatgggtgtatccctcactcccttcacatattcccccgttttgaataatgatgcaagtggcgattagcatgtaattagcacgctgaatgatggtcatacgtttttgattttacaatcctttaagcatttataaaatgatattcggtgttggtttttttgctgttgttgcagcaattaatcaattgcgaaatttataagcaaaaatttaattttattatttgtaaatgctaaaatcaaactaacaaataagcttaggttttaaaaatttaattaccactacagtaaccgccactgcttggctggaatcgctggtggacattgccgactgtgtctccatgcaatccatcgtaaatatggtaaaacaaaaataaattaaaatttatttaaatgataaaattaaacaaaaagcgccaatttagcccataaagcagctctgtttttttgtctgtttgtttgtttattttatgttggaagaccataaattttctctttacccaaactgtgccacccaaagtggcccccggggggcaattgttgccaaaaatgcggggggggggggggggggcgaacacaacaaaataatacaaaggcataatgccaaagatttccccaccttatagttagggctgggatttttatgttttaacatatttttttgcggcttagttatggcgagagaagcccaaaaatagcattttctccgaacaatttttgatttggagcgacttataaaaacataaaaacacatattttggcgttttcgcacataaaaacatatcgcacatatttcggggtttggcacatattttggcatttttgaaaaaaatatctaagaaaaacacaaaaaattcaaaaatgcacccctaaaaatcaactttcttgccatttttataggctctttcaaaattttctttatttatttcgtgtaccgaaaatcgaattcttcattaattcgttactggatatcgaagtttcttgctggaacttactcaactgatggaaaaataatctttaaaacaatttatcaaaaaaggactaattttacccccaaatacctccaaatgttttttatttgcaattgtgcgggcaaaaatgataaagaatgagttttttggaatttttatgcaaaaataccattggtttttccaatttttagcacatatttttgcattttttaacacatatttaggtcttttttttggtttttagcacatattttgggtttttttagcacatattttattacatatttcaggatttttagcacata

SEQ ID NO: 6700 - DNA, 1587 bp, Heterodera glycines
tttttaacacatatttaggcctttttttggttttagcacatattttgggttttttagcacataaaattcccagccctactgtcaattttcgattattttttttacctttgttctttattttaggtggttccattggccgttgcacaagcggattccggaaagagggttcaacgacgggttatttcaactcggctaattgagaaattggcactgctggtgcccaaggaaatgtaagttgttgcaaagtgcaacaaaataatcaaaagtgtttaatattttgatgatatattggaactataaattaaaaaaagatgccattaaattacaaaaacgtttagcaatttttttaaaaatgagatatatgacatctaaaaatatatatattttttttgtttttcagtctccagagagaattgtcgccctgcgcccaaatgctgtgccaagatccgagtgccgcagtacgcacatcaatcgcacaaaagttgtcaatgttggcacaatcgctgaagtaagcttaccctctaaatgtttacagtattctaattattaattactgcctaattgttttagctaattactgtctaattgttttggaattactgtctaattgttttagcaattacacggattgttgcactttgcttttgccttgcatcatccaactgtgcaaggacgaagacccatccgtacgggaggccattctgagctccatggcccaatgtcttccacactttagcaaaggtagaaacaaaagcaagcagattgagcaacgatatttctgatcacaatcgcttggaagatgaattttcctatttggatcagttaaatctgatcataaattaaccttattagcctcaagaaatgacgaatctttcttggccctcattttctaatgatcaccttttattgccaattagatgcaaaaaagtccgtgttgttgccgttgttgcgcaaatgcactgaacaggcactgatcctgcgcgacgcttcgttgcccatcgtttcgcgccactttggctcgtggttgcattgtctacgcgacattttggcaccggcagagttgcgctggtggttggacacgtacgtgcgcattttggactttgcatgccaacataacgccatcaataatgccatccagcagcaggcgacggcacaaaaacaaggtgaaaagaccatgagcatggcatgaggacgatgctcgagaattttgagctgatcagtctcgacaagaaacagcatagccaattaaatatttttaatgtttgaataaaacattttaaattctactaatctttttcttacagcatcagttgaaaatggcacaccgccagcagttgcgggcaatgcgcaacaacaaaaacttcagcaattgtgcgtggcatgccgaagaatgtgtgcttacaattttccggtttgttaattattttagaagttaattttaaaacagttaatttgttaaaaacaatgcagttgcttaattaaagcttggtgtttcgtacaaattggcagattctaccgtacttagatttcctaggctaagcttttcaatagttgtacgaactgcttctaattcttattcctgtcata

SEQ ID NO: 6701 - DNA, 2228 bp, Heterodera glycines
aaaaaaaataaataaaactaaaaatgttagattctgttagaattaatactataattgattcttttcaaattttatgcttgttcccttttttattagtttaaaaatgcaaattgctaaaaaatattcagtgaaaatcccccccccccctccatcattcgtattttgtctttattacaccttttttgtaattttttactaattttaatttcaataattttaaggctccaactgtgccggacactgccgaagatcaagcagtatttgatgttcccgaacaatgacgagtcgttgtccaacttggagcgtgttgtgcgcgaattgctggcatccgaacagaacgcactttcacgacaactcatccaacaggtgggctaaaattgactctttttttaatcatttcggtgggaaaattcatgataacctccgatccaaaaatgcttatcatattcaattccattttcgtcctgtttcagttcgcttgtgaactgtcgaggacagaaatggacaagaaggagtgccgtgcaaaccgtgccaaattggccgaggaaaagcgactgtggaccgagcatgaggaatccacggacgaaactgatgaggctgaggcgggccagcagtacagtactgagcatacagtaaccgggagcgatgcgataggctcgcccgaaagcggcatcttcttcgaggaggactgttggcttggcactggggtcggaaacggtgccagacctaacaaccaccagcagatgggcggtcgcctgtgccgttcggctaccaccacaagcatatcgcaacacatggagacggaggtggacaaaacattcaaataaaaaaatattggcaaaatgataccattaaatttttaaaaaaactgaaaggaagcgaaaaacagaacccaaaatcaaaaaataaaaaaggtgaacggaactaaaaaataatgataaagataaaggaaggaaaaaatattgttcgatttcgaccattaattaattatttatacgtttatttcccaatttaaacgcatcccttaataattaattacctaatgccttagctcgactaagcttctgaaaaacattttaaattatatttttcaaggcccactccaatctcattaccgctccgtccgcttcctctgaaatgctttccgcaatggcaattgaaccctttgccgcttcatcgcccaaggtcagttacctgacgaataaaataatttattttaattaaaaaaaattaggctgctcgacgccgtcctccgccccctccgccaaaaagttggcgcaccaccaccacaattaaatcagcaaatggtccaaaattggccattgttcgtccacaacctcaagtgaaggtgagtgagcccatctgaacaggtttttagctggttttccctattttttgaaggtggtcaaccaacggtcaagcagtccaatgccatttgttgacgctgagcaacaacggaaaatttcgaacaacaaattgcccaatgagacaccgtcggcagcaacatcaaaagcagaagctaataatgaacaaattagtgataagaagcagcaccatcagagtgacactgatcgccattattcaacaacgacagccctcggggaaagaggaaaagcaccggcagaaagcattcgaaaatcgaaacttccattgtcaacgaatggaggtgagagttaaataaatttattttatttagtcttgtagaaaaatattcattaattcattttctgctttattaggccggcaccgctcgtcgagttcggcaccgccggtgccgccgcctaagcccaaattgcctctgttcacttcttcgtctggcaactcacctccatccccatacacaacggcggcctcgggaacaagttcagtgacggactcgatcaaactgaagaaataccgtccacgcgacatttctacgacaagtaattacttatacattgaaatggatcagctcccaatgccatcaaaatagaggaaataaagttttacctattttttatttaatgattttttgaatttaaatttaaaccatcaacaactttttcaatgcttttcattgatttacgatttgagttttaggggctaattatttttaaacaatttataattttttttcttgaattagtcgagacgaaaacagttaaatgagatcattgatcagctaatcacttttattccctttagcaacaatgacaacacgcaaatgttcgctgtcgtccgctagcact

SEQ ID NO: 6702 - DNA, 6532 bp, Heterodera glycines
ttttacttttatttatttattttttaaatttagacactctaaaaaactctctaagccttttaactccttccacttcttcttcttctgctgattttgaattaaaaccttttctctctcaatcgtttgtcctttgccaatccttccaaaagggcttttccaaatcccttttcaattcttttaaatctccaaatttccaccgattaaccacttctcactttcctctcctaaaccatccaaaaatgtcgcgcatggaaaagatttgcgaagacgtgaacagaaatgccgccctgctgaacatcttcggcaactccgattccgtgctgctgagctgctccgatttgtgctctgaaaatggctgtggtgcgatgtcgcgtgcccaaatgatttgcgaagatgtgaattatgaagcgatggccaattcggacggcgggggagggacggacgacgaagcgtatgcgctgatggaatttggcggctctcttttctgcgtgccggcctccatcttcgccaccgcggtccgcgtgccacttcagtcgtcggtttggcccaatcagccggccaatttcaccgtcggaaacccgtcgtcccaaccacaacaaggagatgtgtcggtcggacctcgcttgccggtgagtgactgtcccacggagtggcacttgtgccaaattagggcttaaagctgatgccttgggggttgttgattaactcatctctcgctgattgcccaatttctgtaggccgttcgtcacggcgtcggcggcctcaggcagtgggaaactgtcgccgaagatgtcgaaggctgctgctccacgacgtttgcggacgggccgaagtgtctttttaagttcgtcgcctcaacccccgacgcgtccattcgtcgcggagtgcgcggcctcctgcggggatttatgcggggaggagcagcaaaggtgggcaaatgccgagattaagtgcccccattccgtgccgtgcttcacctcagtgttgtcatcatcgccgcttccgacgccatcagcgtcagcgctcttccgctcataaagcctccaccggaatgtctcttctcggcctcgagttgtgcgttctctgagtgggaaaagtgtgccgcgtcggaaggtgcggagttcgcttggtgtgcggcggcgcagggggccccgcgtcttttgccggcatccgtcggcttttccgaggggtccccgtcatcctctctcttcccttcctcctcctcctctttgtccccttcttcctcctcctctctcttcccttcctccgcctctttgtccccttcttcctcctcctccctcttccattcctcttcaccccctccgacttccgcttcctcctcatcttccacttctgcttctgcttcatccccccattcgtcctgctcctctttctccccttcgtccgcttcaacttcatccccggcctctctttctccgcttccatggcaattattaattgaccaaatgatccgtgaagtacagactgagatccaagctgagaaggtcaccattccgccgagtgtggttggatttgccaattcccttttctctgttcaggcacttcgcttcgactgtcccaacttccaaatgcctcggaagcgttcgttccgtccggttcgcccggcttctcctcctccgcttcctccgcggtgctttcccttcccatcgctttttttctcacctcccctcccccttcttcagattgacttcccctccaattcttcttcgtcctcctccaattcttcgggatccccccgtccgtttctttgcttttcccaaaacactctgcctcaggcaaaacgtgccaaaaagaattcgctcctttcgctttctcacgaggaattggccgagcgcaaaaaggaacagaacagagcagcagcacaacgctaccgaagtcgaaagtcgaacgttttggagcaggaaagggatgaaatttggcatttggagacggacaacgcgaaaatgagggaagaaatggcacaaatttcggatcaaattgccaaactgcggacgaaactttcactagggagataaaaggggggcagcgggctttgtttgttcatttttgaccacattcattcgcaagtgtaaagtgtcgagccacacacagcccatttatttgtttaccgtaccccactccccccactaccgtatacctttgttagtttttgtcgattcaaaaaataaaatattcgtccattttgtttcgtttggtgctttttcttcgtccccctccctctctaatcccctaatttacctaatcgctcccttttatcttttcctttcccgctgccgttacgcatcgaccctcaaaattggccaacatttcccaccccgccgcttcggctgttgacaaagaataaatgaagccacttttgccctggagggttcgccttttggcttttcctcaccttttccggtcctttgcacttttcctccaaatattaacatttctcgtcattcccttcttccgaatgttttttcccagcttttccctcctcctcttctgctccaactttttgctgcttccaattttgagtaagcgaagtgaaaaagcattggctcagttcgcctctgatcactccgattgtttctcttctcagcttacagcaaagaagcatgtgacggggctcaattcgcgcaaatgccgtgccgttgttgcaaaatggactgctggtattccgtggcggggtcggccatgcaccaattgggccatgtgccgggcgaggcgggagagcgcgaagcattggccacactgcgactgatccgtgcgtgtatgatcgcggaatgcacgccgttatgtgcacacaatttgatgcagaaacggatgtcaagacaaaattaaaaacactgaagaaaagaggaagtgggaggggggcgaagaaggacaaaagcggaccatcgccgcgggggtggctttttcctccacggcaccgtccccctccccttcctccttttttgcctctttttgcccctccccgccctctccgctcattttatgctattgccaccactttcctaaataaaaaatgcacggatgaggcgaataggaataaacgaatcctcgacaaagccgtgggcaatacgtcaaacagaaataaatggcttcgctcggggcaaccgattcattccaatggcaccaaatttggtcctaagggatacaattaattaattacttttcaatagcacattatctctatacaatttgttttgattctgtgttatttgtctcgctgataaattggccatccaaaggagctcatttttgtcctctgttgtcgccattggtcggctctcgaattttccttcagccgagaaatgtatcgggtaagaaaaatgccgagtaattggccctaatcggtcgcgcaattctaatttggaattccacgctaatggcacctccggggggggggggaaggggagcagtgccatcattcgcattctaaaagcggtgttttctgcttcgtcgattttgttaaccgtgaaacgtcaggcattcgtcccctgccctcctctcctcccattgtttctccctcccccgcccttcgtcgcctccctccctttctttaatctttgcgttaatccgctgattgcgcactcattggcactaatccgtggcattttgccccagggcaaaccttgttcagttggccgattattctttattggtttcatcgtcataatccacgttaaatttacatttgtcggctctctctccgctttccccccccccctcctttttattattaaatattcccatttttataactttttattttccaaatcctctcaagtttttctccgttgctgaagaggccgtcagcagcacttcctcctccgtttcgccccattcgatttgtcctcttccctccgcgccgctttttccctttcccaaaatgcttgattccctccaattgaatgtgcccgtctctggcaccaatggaaatgctatttacggggtcggaatcggcattttgaatggtcagaaagaaactgaccaacaacaaaagcgatcggtgggtgattaagagacgagaaggaaaaaaagggaagagggagggggggggggatacacactaattagcgataataggccggggaaaattgggggggggggataggggtacgtaagagggggagaagcattcgccgaatgactctttaaacagtggccccaattatatgcccctttcttttgcccattttttgtgtgttctcttaagagtgtttttgctcgtcaaaagtcgtcttcggaggaggcggaccggaagaagcgactgacgatgccattaatatacaggtgaagtgaaaatgccaacccaacccaattggatgcttaatataaatcccgctttccttttctctctttaagagcagagaaagtgaaaataataataatttgttggcatttctataattgctttaaatgattacgtcatttccaaaaagagaaataattgccgaagtgcaattataattgaccaatcgttggctaattacttcaatgagttaaacttgctgaatatttcagaatgtacgaaagtcaaagtgacgaactttgcggcaccgtccgggggccggacgacgacgcgtttcacccggaggaggcatcgaaacgccttcgccacgccttagccgccggaattcgtaggggggggggagagggaaaaagcaaccgaaaactgtgcagaaagtgacgacaaaacactgatcgacgttctgttggagcacaacaatttccagcgtcagaaaatcgccacagcttatgaaaatatgtacggaaggtcagtgtttaatggggagaagctaaaggaatgaaatttgcaatttatttgaggattttggcggatgacattgaagaggaatcggggggccatttcatggaatccattttggtaagaagggcaataaagaatggggggaggtaattagtgggaagggggcaataataaaaggggaagggcactcagagagggggggggggaaaggacgtaattggcacagagaaaagccatccctcacttttgttcgttgaaggctcttctccaacctgcgcatgtttattctgcaaacactctctattttgcgatttctgtgagtcaatgaattgccaaaaacataaacaaatccccgccttttgttagggcaaatccttcgagcgaagtgccgcggtggaaattgggctgaccagtacggcatcggttggtatcccttttaagaagtgtcaattgttcattcattttctttccaattcagcaactcggcgtcatccgcgacacttaccaagtccgttttaccagagaataccgtaacaaccccacaaccaccgtaacacttttcacagaatgaatttcgtgtccaattggagcgcgacttaagcataaaagttgagggattattcggcaaaatgctcgcccaccttttgatgcgcaaaacggactttgccgaagaatttgacttggaagaggcgcaaaaggaggcggacattctttttaaagtggaaacccaaaacaaaacatttgaatgaataaaagaaaatcccatcaggagggaacggtggaagaattgggccgatccatggaactgttcaaccgcgtgttcgggctcagatcggcccgacagatccaagcatttgtcgatcggtacgacaaaagagtcatagacgcgcaaagtgaacacggaaacgaattggcgagcggacggagggagtcgcggacagtacgcaacttcgaatggaccatccggaagagtgtgaacatccactcggacatcaaacaagcgattcttctttatggtcggaatggggaggagggggggggaaggaatgaaaaagaagcggagataaagggcaaagagggataaaaggaggggtaagaaagggggataaatgagatgagggggcggcggcgattttcaaaaaagtaaaactgccatttcagttcgaatttccaaaaacatgcagctttactttgcggaaaagttgcacgaggcggtgtcccaaactcggcccgaccatcagacaatcattcgtttgctcgtctcgcgcagcgaagtaaccaatcgcttctcaattcgattcgttggcccattgttgccattttgttcagattgatctcttcgacatttgcaacgaatacaaaagaaaatacgggcacaatttgatgttcgatttgcaggttttggcatttgtgaaggaaatgcctaaaacgaactctttggacagaatatgtgcagcggcgactttctgcggcttctcagccgattggtgggaaaatcgaaaattaattaatttgtaaagagcggactaattggaggtgaacccaacggacgtcgcctcgggggacggccctttgtcggcataatttggaattgaaaaaacgacgaaaaattaataatgaggaacagttgacttatcacacaataaaagaacaaattaacaggccatcattttaatttattaatgtaatcaatttaatcatcgaaatattcgacgaaaatttgttggaaattggaaaattgggaatggcaaa

SEQ ID NO: 6703 - DNA, 6924 bp, Heterodera glycines
agcacgcgactgttgtggctgaaatcggtaccgaggagatgcccgcggactttttcgacgtcatgcggatgaatgacatcgtaaaacgagggagagttcaaccattgttcctggaaatgtgagaaagaatgtgctcatttgaacaaaagcagcggagaaccggcgaaacattcaaaatgggcccaatcgaatcggacacaaagacaactctcgcactttcgcaggaaaccacaaacaaaaagccattggccgcctcaagaatcaaatgtttaagttcctgatccgtgaggaaagacggttggcttggcattgtgccagacaaattgttgctttgcgcattggccccacgaatcactttcatatgtgaaacggccatacgcagaatggtcagctgagcgaaaagggacaacattttttcgatattctgttatcggattaactttgtcaggtttacgaccaagtgcagcgcactgcggcacctgagaattcacatgaaatgtttaatagcgatggcaacagcgactttcagtaccatgtccgcaagttcgttgatgtaatgtgtcattttgttccgtcttcgccgttcaatttcactgtgattttcacgcgcaaaacgctcttttccctcggctccaatcgaagggcttggccgtgtcgaaagcattggctcagtcaatccatccatttgttctaatgaatagtcagacgcaaaccaacaaatgcaaatgattttctgtaatgcaatgtcttttatattcatagaatcaagaggacttctcagcctcataaatatggaaattcttatgaatctctcccttttatttttcaatttgctcattataaaataaaaataatgcattaaataaataatgtcggagtatttcacatgagaagagaacaaatcactaactaaggtttttaaattataattcatttttttattttacaaatacatgtatgaaaaaaacagctcacatcgccattaataataaaggggattgtgtgtcacccaatgggctgttggctgctttttggcctcttcactggttgtgaacatcgacttgaccgccttcggcacgttcggattgtcctgaatgctgctgaacttagtctcttcttcgactttgctcttcttttgctgatgctccgcgccctttgaatcgccggtcgttttgcgcttcttttcccccgcctttagttttctctgcgcaatttcatcaacaattcgttgttcgtacagcagaaagagttcttcgtccgggtacagcttgatgaactgttgctcctgcattggtcctccgcatccgtaacatgagtccgtctttagttcgttgtgcgctttctcggagaacacgcaaccacacttccaattgacaaaaaaattgtttactccgttcattggcaaggcagtgattgggcaaacccatggcgtctcattcatgtcttaaagtacaaatgtaaatgggaaaaacaaagtagaacaagcatttgatgagcaaattaaacgatcttaattctagaaaacaggctagggatcgtactaattaaattactcaaaattttgcatttttattttcatttttttctgaaatttcaaggacccaacactggccaacatacaaatacccgagattggaatctttcttatgattaaacctatttaaaagattggggattatagtgaatgcttcaccgatgtaaatgtctcctttctccggtccattgtccttccacgctttgttgtcggtcaacatcaactccttaacatcggaaaacgcgtgaatgtgttcagtcgctttgttttttgccaaggttttgtccagctttgcctcaagcaccgcctctttgttgtaaagtctaaaaattgcaatttcagctgaaaatacagtgaataagaaatgagaggcgcttcaccttccaagcttgcaacatacaatcggctttttcagaggttgctgtgacagctggcaagtgcgccattttgtagcagcctcatacgatttctcgattttttctttctttcgtttcttcttgacgagttcgcatcgctttggaatagttcctccatctgcacccattttgtattgctagaataagaaattgaacctaaaatttgatttttcttcagttaatttgctgtgtatacattgttagagatacaaacatatgtatgtatgcatatgccaatattttcgcaatcttggcattctgttttgaatttttgcagcacaatgtaagttttacatcgctttttattatcagaagcgcgaaaagggataaatgtgtgatctgtcctcataaaccaaaagatcgaaataaataaacaaaatcattttgtttcgtctttcacttcctccgctgtcggcggaacagagttctcccacagaaatttagtggcagatgtagcatttgtcaacaacggcgaaaattccggcttgggaagtatgtgcaaattctgacgagtgtctctccattttgacggtgtccacatcccttgcacagatttattgtgagaaaaatgggagttttcaactgaatttggggagcttattgttagttacaaaatgtgttgttcttacatttataaattggaattccactgcgcgtcctaaggttgttcatatgcaaacaaactcgctccatgctttaaaaaagtaattacaaaataaagattttcatataataaaaatagtaacttctttatgaagagagaacacagatatatgcgtgtccagacattttcgcctcggataaatttgaattttttcattttttcaatccaagaggtcataaacagcattaaagaagtgatagaaagtgactgtattcgatagtttgattgtcagtaaatttttgaaaataaaacaattacaaaaaattaatgctgctaaaaaactagaaaaaacatagtttttcttatctctaattctgcttatgacctctaggattgaaaaaactaaaaacccgtttggacataggcgcaaatgtctggagtgaatttgtccgcaaatatggggtaactgaaataagtggcttttggaataaattgccattaattccgattttctaggtagagcaaagataaggcacaaagatttcaaaataaaacggtcattctatacaaatccaaaaaatgtttgaataacttgaatttccaaaaaatttactcatttttggtctctgttcataattattcacctgaaagcctttgcgttcacgtggactagtcgcccatttgaatattccgcccttagcactggcgtcgcgttccttcccggcacaacgtaaatggcacagtatgggttctccgtcgcaaatttagtcaacgaatgttcgatgtaattgcgcatgccaacacttgtttcgctttgcttgcaaaatctgtggcaaaagaaacggaaattgcaagtcaaacatcccttgggatgggtgttcgtcccccactttattgtaatccgttgcagttgcggttggtaggcggacaccccattgaatgctggtgcgattggatttgtggccgacagtcgaaaagcaaaattcagtgccttcgctgaggaataaatggttttcaggcgatccgcgcggggaatagctggcatttcttttttgattaccaaacgagaataaaataaaaatataatgcaaaacaaacggaaagatacaaaacgaatggaacttcgtttactaaaaatgaatgcatttgctttagtttttctgattgtgatcgcaaatgtaatatatgatacagtagtatttttccttccttctcatttggtccaagacacctaaagattgatatgcctcattaaaaattaatgggtttttcggccaaccaacctttgggatgtcgttgaattccgtcagttcctccatttgcttgttgaacttctccactttctcccggtgactgatttgggccctctttgacaaacggtcgaacgccgtctcctcctgccgtttgagaaatgccaattcggccttcgtcttccgcgggccctcttgttccttctttatggtcagatctattgttttcgggtcaacatttcgcttcttcttgaagagagtgccacgcttcagtttcagtccggtcctcaccagcaacatttgctcatttgtctgcaattattcaaaaagcatttaaataaaatgaagcgaaattaacccaactttatgatcagtcttatcctctttggcgctttgagtttcctcctcctctttgttatcatttgggcttttgctccgtcctttgtccattatcagagctatttgtggctaaaacaaaataaatttgtaatgtaaaaatagagagaggcgggctaggtttttaatgggcccggtgatttttgggaaaacccaatttgaccggttgggaaaaggcggacaaaggaattgtctgcttttgaagatccaatcccaccctgcccgggaagatttgaaatcatggtctcttaaaatggataaaaatagaaaatgaaactaaaacattataaggctggaagaattttttcaaacaaatcaaaatttaatagttaggaaataaaaaattaaaatggaggcagaaatcgttaaataaaacaattgaaattgtttgatcaacattccattctttcttcagttatcctttgttcagaatgtccgaagataaatgagtgaaggctgatcggatcattttccaattctctgtgtccaactccgttctcatcctcggacattttttcctcatcagaagtctcttcctcgctattttcttcaatttgatgaccaatttgttggattatggcttctttttcatcgggggccaaaacatagcatttgtttttatttatgggctgccgtactctaatttgtgagggaagcgacgaattagagaaaggcagaaaattcccaaaacttacaatgaatgaattccataattattgagaacttgaaatgttttttcgaaatcattcaaaatatttgcacaattttcatctaaaatttctttggggtcaaacgctggatgatctgcagaaatcttcaaaagagtgtcgagaagtctgtaaatgttttttttttttcattttttgtcagaaacgtccaaccgttcagaaatagtctcccatttttggctctcgttgagttcctccaatttaaccaaaagcgatcggagcagaataacacagtccatcagagctttgttggtcgattgtaagtcgtaagcgatacggtaaacattacagaatgacatccaacaataacttaaatgatcgatgagttgcaaaccataaaaaagaccaaccaatccacaagttgttcgtagatgagtaaatggtcctgaccaaattcaccagggagtcgcaaaatttcaaacgaattcgagtctcgggagagaatgtgtattttttcgtcgtaaataaaaaattcattttggagattcgaaagagaacgacaaatggttgctgattatgaacaaatttgtttaaaaaaaagaagaaaaatgcccactcattttaccttcgttaatgcttaaacgacggatgagcaaaattccgccagaaaaaatgtccacgaaagtgtcagtgccagtcgaagataaaacacaaagaaaagaagaagagagcgaatttggcaaaatatggcggtaaaagtgttcaattgcacaacaaacatttcgatgctcacaatcagtagaagcattttgagtggagttggaattgacagcctaaaccaacggaaagtttaacacctttgaaacagaaaagcatatttagttccctataagattcgcttttgctgtcaaaaaagcaatccgtttttaaaataaattgcaaaaaaagcatgaaaatgttccaatgctttgccattttaccgctgtcaacgacgactgctcgccaatacgcggaaatttgagtgcaatgcttggtcgaaattttagccattcaacgcaaaaaggcgaatatgacaattttttaacgaaaagagtgttgccagtttgagtgtccaaataatagagtaagccactttggaaaacagtgagaagcacttggccatcgggggaccaacacagaaacaacaactgatccttcgacttggaggacgacggaacggacgaaacatcgccaagaaaatcaaagtgtttggcagaatcatcacgagaaaaatttctctaaaattaaaaagggaaaagtttaaactaatcgaattcaaaagcagcaccttccacccggtcttccacaagtaacgcttaaccaccacttctccatcaagtgacccaagcgcaataagactgattttcgggttccaaactgcgtgagaaacctaaaaaataacagaggcaatgaaatttgttagacattcactgatgaaacgaacctcaaatttagtcctaaatttgattttgtcaaaaatgtccttgttttccgcaaccgttattaattcctttttcatattccaattgctgaaatttagaaaaatgattacttttttataaaaagttttcttgaagaagacatatgttcacatttatttcatggaaaattgcaaattcaaaatcagaggaaatctttccttgtaataaaaagaaagtaaactaaataagcaatcttttcagcaaaaacaaatataaaaattttgaaattggaataaatacgatacgataaaaataaaatgataaataaacagaacaaaccaaaatcttctaactaaatattttagtagtataaatcttaaggtaataatactttaaatggtgggcattaaaccatttttaaaattcaaaggatttgaatttacgatctttttgttcgattccgggtatagtataggacgaaattgatgccggattcgtattctccgaccctgaaaacagtttttttcaaaaagagcccgccatctaaagcataccatttaatttcaatcgttctctttgcatttttctcggcgaca

SEQ ID NO: 6704 - DNA, 1808 bp, Heterodera glycines
ggttattttttgggaaaaaaccttcgtaaagtgttaaataggcgtaaaatggcataaaaatgacctaaatatgtttagaatcaccttttaacatttaaaaaattatttttggaggggtacatttaaaaaaagtttttttttaaattttttcaatagaaatttctaaaaattttcaaaaattctcaaaatatgtataaaaaaataaaaaatttgccaaaattttggatttttttttgaggatttccaaaaattttccgtaaaaaacccgcaaattatgtaaaaaaaaaatcaaaatatgtaagaaaaagtccaaaatatgtaccaaatatgtataaaaccccgaaatatgtaaaaatatgtaaataaaagtcccaacttttgtttgcaaacataaaaaagaaagtgtttttcctactatttagagcatggagaagccaggaaaaaatatgcattttcataaaattgacatccctaataatgaacaaaaacaaatacaaaattttcgattccattgaacacaatcgtttcaaaaaaaattctcaatttccttatccacctaattttcacccagacccctttcttaccagtgcttatttcgacccgaaacccgacccaaaatcatcgggtcgggtttcgggtcgagaaaaatgccgggtttcgggtatcgggtaacccggaacaaccctgatacaaactgaaatatttaagtacaaaaattcttaaatatgtttaccaaaatatgtataaaaatatataatatatatatgctttttaggcaataaattgtaaaagagcactaaataaggcagaaagccattattttttgtttaaaaattggttttgatacccattaaaaaaacgaatttgaaaattttttcattttccataagaaattactataaattctcaaaacctctaaatatattaattaataaacgaaaaaatgtatgaatttactgcctaaatcataaaaagatgggcaataaatatgctgacacttacgtaattggctaggcaaattttcaactccgaaagggtaacaaatggaccaccgtaacgagcgctggcaccggtaaagccgaccaagcctaaattactgtagatgatgaatcaaataatattttaagcgaaattatttattggataataacattaatttatacagtacaatgagaacatacggtaccagtaaaaacatgcttaaatgcataaagtgttgccgccggagacattgcggagatggttgaaaacatcagggcaagcttggtcaaacacagctcggccttaaaaattgatcaaaaattcaaacatgcttttcctaattaaaccaaaattgttttaatttaaaatgaaaatgataaatcgaattaaaataaattatgtattaaaatatattttataaatatgattaaacaattctccccatttctttcagttgcttcaaccaggcaccataatggcaagagagcaaaaagtgatcaaacgcaaaggaaacgcggcattttgcccattttttgttgcggcgaataaatctgatcatttccagcaaaagttcggggggaatttttttcattttatttttgtggagagaagtcaaaaaaaagaagtgatttaatggaaaggttagcgaagaataatcattcgaatgggaatttatcttttttatccctttttatcatttgcatatattttatcggtgtaaccgcggcacaaaaaatgaaatattttatgtaaatattttcaaaaaactttcctttcgctcaaaaacggatccccacccttatcattttcgccattgcatctgtttt

SEQ ID NO: 6705 - DNA, 2220 bp, Heterodera glycines
ttgaatttccccgtaaatgttctcgtgtgtaatggatgtatgagtttgtgccgcctcttcgtggggcttcactttcagtcgatggaaacaacatttttcaacacgtgcagtgcgaatttgccatggttaaatttattggcattttgtttgaattccccccaatttctcgaagaaaatgaactcaacaatttgcttgccattttgcatcgcgtgctaaactctctgctcgatgactcaatgcgttccaatcgcgtgcttttggagggagtggaaacgcgagaaatcagcgactttttcgtgatgttcgagaaagtgatttggcacggttttcgtactttttgtaaaattaaaatttgaaactgaggcaaaaatgtaacatttatgcattgcagcttctttgttggccaaaaagaggcccgaggcgcaactttggaatttaattgggcagacaaacgaaggaaagggcgaaattggcaatttatacgaaagcgtaaatgagatgagcaatttgaggtgtgattggaagaaatggttttcattggctattgagataacaaaattcagttctccgctcgccaaaatgagcaccttttggcgtttagcattggtgcagaaacggctgtccgattatttcaatgcgatttgtgaattcaatgggaaaaagtaagttttggatgggaatgatcagtttcaaaggccgggaggaaatttcaaagcaaaatgaaagaacaaagatcactttctttgattttacttagccacattaaaccacccgccaaagacaaacattagtaaaaccttaatttatacctaaagggccttcattgtttgaataattaggaaccattaaattttggccatttcggcccggcatggctaagatgtctgctgatcacttgtgctttactctttgaagaaattccgcatttttagccctttttacgaccatttggcttttatgtgctgcgacagttgctgtgcttttttgttttggctttgaatgcttaaaatctgcctttattttcctggtgctgcttggtaaacttcgtgtttttgtgccccaaaaattccaaagttttagtcggattttgcattatctttttaacaaaatccacgcatttttgagtcgccggggaatttaaaaagaagtgttctaccacactttgccattattttgtaattgtttgaataattttatatattttccaaatttgagagccgacgacaacaccatcggcacaatgaggccccaacaattgtcggctgcatcagcctaaccgaggtgtacctgtagcagaacctgatcggcgaattgcccagcaccgtcggggatttgaaggcatgttttggtcaggcccgtatcaagaaaaaatttcggggaggacatccgaagtaaaaggaaaaggagggaggatgaagaggaagataacgaaggaaaaggagggaggatgaaaaggagagaaataaggagggatggaggggaagagaaggagggatgaagaggaagagaacgaaggaaacggagggaggatgaaaagtagacaagtaaggaggggaagagaaggaggcatggaggggaagagaaggagggatgaagaggaagagaacgaaggaaaaggagtgagaatgaaaatgagagaaggaagaaaaaggaagagaagtaaggaaaggagggaggaggaagagaatgaatgaagaagaggaagggaaggaggaaaaggagggaggatgaaaaggagagaaggaaagatggaggggaagaaaaggagggatggaggggtagagaaggagggatgaagaggaagagaacgaaggaaaaggagggaggatgaagaggaagagaacgaaggaaaaggagggaggatgaagaggaagagaacgaaggaaaaggagggaggatgaagaggaagagaaggaaggaaaggagggaggaggaagagaacgaaggaaaagaagggaggatgaagaggaagagaacgaaggaaaaggagggaggatgaagaggaagagaacgaaggaaaaggagggaggatgaagaggaagagaaggaaagaaaggagggaggaggaagagaacggaggaaaaggagggaggatgaagaagaatgaaggaaaaaggagggaggatgaaaagtagagaaggatggagggaagagaaagagggatggagaggaagagaatgaatgaagaagaagaagggaaggaaggaaaaggagggagg

SEQ ID NO: 6706 - DNA, 454 bp, Heterodera glycines
atggagaggaaggaacaggggaggcggcaaaaagggcgggagtgaattattgagagcgggatcggggggggcgaaaatgtacggactggtgagaggggggagggaaaggacggggagggaaagatgatcggcggagcgaattaggagagcgggaaggggggggcgaaaatggacggactggtgagaggaagggaaaaaggggagggaaaggacggggagggaatgatgatcggcggagcgaattattgagagcgagagggggggggcgaaaatggacggactggtgagaggaagggaaaggggggagggaaaggacggggagtgaaaaatgatcggcggagcgaatttaggagagaaagaaggggggggggcgcgggacgaaaatggacggactggcgagaggaagggaaaaggggggagggaaaggacggggagtgaaagatgatcggcggag

SEQ ID NO: 6707 - DNA, 5482 bp, Heterodera glycines
aaaactcaaactaaactattaccgagaattggggaattaacgaaaatttgaaagaattttgattatatcgcctaacagccagcgcacactcgactacgatggcaattacatatgtggtgcaacaagactccggaagaaagccgcgcatgtccgcatgcggttgactgattggcggggacctgattgattcgttggcgctagtttaaaagttcgatttgtttagaatttgcttggaaaaaattctcattttcaaaatctttttttaaatatcaaatttgttcaatttaattggaaatgaaacgagttaaggctgatcaaaaaaaaggcaattatcagtgtaatttttgaattaacgcaaaaaattcaacatgccaatgtaaaattcaaatttccttccgatctgccttgccgaaaattaggttgccccacaaaactcggattctaaaatccaattggagtttggtcagtccaacattttttgcttatgttttggtagcttcactcaattacaggtcaattaaatgcaatctgcagctgttcatttttctgctactgaagattgtgaaattcccgatgcgccattagcacaagttgacgaattggaaatggttgagggcagtttcgctgctttctcttcgtcactgaccgatatttcagcgggagattggtaaagacaatttcgaaaaagtatttcttcttttacattttaagtgagaagtcgcagtcagacgagggccctggcgaagatttgtcgaattgttctgtcaatttgtcttcgtcgctgcaagacttagtcgagtcttttgacgacaaagtcgcagtcgttctgaaggacttcgaaaaagatgctgaaaaaatagcgccaattaaaattcgttctcaggaagaaataatgtctgaaagccagtgagtttgggactgaacattttgtagtaaaatattaaaagttattcatgttgtagtcaagggaaaataaaattaattggaaaaattaaagttttttttttactttaatttggaaacagaaaatcttggcagtctgtcattaaaaatgtctttctttcattttcagattttggtggactttgactggcaattatggaaatttgccgccgattgacttcgataattcgcaaatccgaaggaaacaattggaagcactgaatttcaattctccgaaagtcatttcgcctgtctttacactaataaattgttttttgttttttttgttcttagcagggaacgccaaccgatcgaagtgtcgtctccgactgcgactcgtcggaggacaccgaacgaatcgactttcatcgactcgcaactgcgcaaacacacaacgaaaacggcgaatccctttcctttaacgccgacaaagtcatcgaggaaatcgatgagattttacaggtaaatgttaggagatgacttttttattgtgcaactcaatcaggccccagaccagaaaaagcgtatgaggtggaacccgaagactttttgtttgctcttccctctttttcccgttgtattttaccttctttcgcgaaaaatgaatatttggattaaattattaaaaaaaaaaaattttttttttgcccttttggttatgggtttgatgcaatttattcgatctaaaaatttctattcaattaaaaaatatttatccgtttaactgttgaaataatagatttttttaatggattttcttcacttggttttcatccatttcttttgcgtttttaggccggcgatttgatgaatcagtcgttggccacaaaccgtacgattgagtcggttgattcgatgtattcgtcgatgcgttcgccaaatgtttattcggacattgaggcggagttcaagtccaaagagagggaaggcataagtgtgtctatcgaaggtccgccatttttgttaattttttcaaggtttctcccattttaagaaatgaattcgttcacccatccaaactgatcacaattgtcagtgagatggagcaaatcattcagttgtacaacgaggaattggtcagggaattggcgcggaaggacgaatttgaatatgagaaggaaatgcgcaacaaattcatcactttgttggtggcggtgcaggaaaggagaaggaaacagaacggagggggaggaggcaaaaagcaaaacaaagggacgacgaccgaaacgaacaacacaaacaacaacaacaacgtgggtttggtgtggagatgcattttgatcagttgggccattgtttgatttcagttggtctccgtttccattcctttcgatgattcgaccgatggtccgtctctctctgcgcttgaatggctcgtcaaaagtcgggattttcccccttttcacactttggtatttgtttttcagttcttcaagcaatgatcgacgacagtgtccatttgccgtctctgctcactgattacattctcaacggtcgttgaattttgccgtggggctcacttttaatttgcccttttttcagttgtttgcccttcaaaatttgccactgattgactttttctgtgccgattagcatgccaattctttccctcgactgctccgtcgttggctctttccattgcatttgcttgtggcctgcttttccgttacgactgtctttagaatagaaatggcgtcacattgcttaattcgtcaatattattgtatcatttccaatcgtttatcaaattgcccagactgtcctattacaattagtccgatctcatcgcatttaataatttcgatttttgaggtccattaaaagcttttcattgtccatttgcggttatttttcctgttgctttaacttgccatataaattatatatatttttatataatttaacatcaattaatttttgaatgttttaaatgttcgctggtattgatgggcagcaaaatgttctcctttccgctcaattacagcgtttactttgccaccacggagaaacggcgaatgcattcgttttctgtcaccaaatgcaaccggagctgcaaaaggggccgacgtgagtgggcgagcggtcattcattatgtgcaagttaattgggcaatttggaattgcatttaaatgtaagataaaatgggtaattttggacgacaaatcgccagttgcggattcgccgttcttttgatggcgttgcgctgttccgtcggcgatggtacgttggaccgattggtggaaatgggcaaacatttcgggatcacttacaacggcgaactcttttccggttggttctcttttgagggtcatttaatttcgttgatctcaaatagcattttcaattagtacattggtcaacacttactacatttgaattcattttttaagctgattggatgtgtgaatttgtccaaaaacattggtcaaacgcttgcgaattgcgagtggcccaatttccatctccaaattccatcgtgcggcatttgatttctgggaaaaaagctcatcatcaatgtacaacgacagttttggtgccgtacgattgtgacaaaaatttcgagccatgcaatcggcagggcgttgcagcacattgggcaatcattgtgagttcaaaccaaaggcgtagccgaagtaatgaaccaactcaccgaattacaaaaatgtcaaaaattaaccattctcgaccaaatatcttaataaatgaaattctataatgcgtaaatctttttttgtgtaccgtgactccgccaaaggctatggctacgcctttaaccaattaattggtaatcgataaagaaagaagcaattaatttgagattggatttgttatttttgatgtcaccgctcaaaatgggccagaaaatcaaaatgcgaaagttattgcatttgacgaaaatgacttccgctgtgatggctttgacaacgaacaccttttgtatcttatagcgcttcaggggaaaagtcggtaaattttccattttgctgctcccattttgtgtgtttttctttgtctgtttagtcagccaacactttggtcatacaaagccttaagagagagcaatgggcaattgaatgtgccaaacccttcgggcaattttcgcctggcgcctgagggcatggaagcaattaggggcaaatgtgtgttggttggcggatcgaaagttggagagcgataaaagattggatgtttccgccttttcagtgccgagagaattgtacgattcgttttgcttgaggcatttttgataaacttagcaacaaaaaacggaccaaattctgtcgataaaaggtgcacaatcaatcggacttttaaaagcgatgtgtgctgtttaattgcccaccgccaattcaaaatggccacaaatataatcgcaggcgtttcaagcgtaattggcggtatgttttttaattcaaatacaataattaatgtgttttaatgggctgtaaattgaaaacttttgccagaaaggccaaagggatggaaggtcgtgcaaaaatcacttccgcgcattatggactatggacggaacgaaggcattctgcagattcgcgagttccaaagggtgcgttttgcgcgtgacggtgctacgatagtggcgggtacattaccttgttcttcgtagggcggtgccgtcagcaacattcccggccttgtcatcgctgcgcaggaagggctcgaagcccaacacgcaaaagagaacaaaggcggggacaaagtcaatctgccgaccaatgacataacacgtgagagagttgtcggaggaagggcatttatccatcagggctcgacttaactgattttcaattacggaaatccgtaattacggcggtttttataattacgaccatccatggcatccattcacagccattggctgctcaaatggaccgtttagtaatgcacgaggccattccctttctgcctttcccggtggcgttggcctgtctttttctcaacattgtcttgcccggctcaggtgcgtcaattgcattacaaaaagcggcaattacccaaaaataaatcgcaggaacaattttgagcggcgcttcggcactttgcatgggtatttggaatttgacgaattaatgaatcaattcaaaaagcgccagggaaagaatcccacgtaattttccatttgttcaattgactttttccaggccaaccacgggtgaacatcaaagaaggtcgaaagttggtgacactgctcgtgaatttgcttgtcgggatcagtcaattcttcacaatcacttttatgttcgtcggatggttttggtccatcgcttggggcggtctgatcatcatccacgcgagtccgtttcacgagtgcattatgctcccccccccccctccaaactttttaattttcaaacagaaatttaaaaaaaccttaggaaattttctaacaataaaaaaatttcaagaaaaaaaaagattcatttctttttcagtgcaatacagagaagcgttacaacagcgcaggcaagaggcagtggcaaccggtgaaaattgacttttaacagcccaatttgccatttt

SEQ ID NO: 6708 - DNA, 1740 bp, Heterodera glycines
ctgccctttgccttgagggagtggtggcggacagaggcaaagaaaggaacgacaaaatgcccaccggcgacatcgaagtgagatttatgagtgggattagcttcataattaaccattttatgtgccaattaggtggtcgtcgacggacttggtcagtgacttacttcgccttacggtcgattcgtttctgttcccttttcagaagtgctcaatccttccgatgcgccgttgcccgtcgatgaatcgtccaacgaatacacgaggcaacaacaacatttatgcttaattttgcgttcctcttcagaataacccatcgttacttggatttgcgttcggagaaaatgcaacgggcaatgaggtcggctcaaaatcattcgaaaaattgagagaattttgacgaatgcatacatttattaaggctaagagcgagagtggtcagcaaatgccgtcgcttcctggaggacagttgtggctttgtcgaagttcaaactccgaccctcgcccacacgacgcccggcggtgccgcggaattcccaatccccgccaacaaaaacggcgactgcttcagtctcccgcaggcctttcccccgtgggcacttccttttccaatggtttttccttttcagagtccccaaatatacaaacaattgctaatgtgtggctccatcgaccgttattaccaagtcagtccaaatccttccatttttacctaaaaattaaaaccaaaatgcgctctcatgctactttctcaccatctaaactatttccccaatttttttaggttgctatttgttatcgtgatgaaggtattttctgacaaaactaattagttaatttcccattctaaaattcccaaatcctttccgatgcaaagcccgacagacaacccgaattcactcagctcgacttggaactttcattcacctcacaagagatggttttgtcactgattgagcaaatgatcgtgaattcatggcccgatgaaattgtttgctttttaataattaaatttgattataattcttttaagactcccaaaccgaccatcccttttccgagaatgtctcatcgtgaagccgttagtgatttatcatgccactaatttacaagttccgattttagatggataaattcggcactgataaaccagtcagtttttttagttgggttactgtccattcttttgtccagtgatttttaaggacatcggctcagatgcctcttttcctcgtttcgattttgtgtgggttctcaaattcccgcttttcactcgaaacgactccaccaattgctttgaaagttcgcaccacccattcactgttggtattcttccgattattgttattcttccaaataaccaaaacttaggcgccaattcccgaacattttgaaaaactttgtcaggggaaggatctcgaccaaatcgaaggttttttagctgacactccctttaacccctttaaattaatgttagctcaacattatgacctcgtcctgaatggtgtcgaaattggcggaggctcgattcgaattcataattcaaaagtgcagcgatatgtgatggaacaaatactcaaattgaagacgaaagaattggtccgggcttttaaagaaatgtgataaaaaaatagcctatgtttaggagcatttcctcaatgctttgagttttggcgcaccaccccacggtaagttgctgacaaaaaacgcaggacgggaatgggaattctgaattcgagattt

SEQ ID NO: 6709 - DNA, 1245 bp, Heterodera glycines
  unsure (1)..(1245): unsure at all n locations
atatgtgtgtgccncactttgggtccaccggcagattgcgttgcgactgcttcgggctgtcctccctctcctccctggtgtcataatcagtgcccattggtggcgctgcggtgcacggcgtgccgttgtttgcggcaacactcgccggtgccattgtcgccgctgtcgtttcgacgtgcgttccgccgccgtttatgtcagcagtggtggcaccaccggcggttttgccacgcaacaacactttgtgcttcagttgctgcggtgatggcaatggcttggtgtgcaagtcgtccgatggaatcagcaaatggtcaccaagaatctgcagcgggggaaagaaaaaaaattttaatagttttctgcgcacttttttgacgctaatttaaatttttgggacacggaacctagttttaagtgcaaaaaaaatattaattatgtttatatgtgcctcttggaaaatgtcggccatgatccgttgctgcacaatgcccacatggttttcaatggtaactgaaccgaaaagggaaaaaaataatggtttttgaagccgtaaattcaaaaaaaaatttgcttacggatcactgggtacggattttgtacaaatgcgtaattcttgacacatttcaacacattgcgcagactgatcgccccaatgaatgtgcgtttgtgcgttatttgtggctcaccatgttcaccgtcaaacacatccactaaaaaaatgtttattgggattagaaattcgttcaaaaattcttgggttttttcggggaagaggacgcaaaattttctgaaaattggattttttaaaaaatctgaaaaattataaacaaaaaaatttttttgtaaaaatttgaaattttttacaaatttattctttttttatttttcgaaggatggggggggggggggatcaaacagttcattaaaaacaaatcaatgacattccaacagccgtgagccccggcgaagtgccgaaatgtaaccctcgacggtggcattgccgtgcacttggagaccggtcaaataagtattgtgactactaaaaaaggggcaaacggaatgatggcattttgtttcgtcaaaaaacaacggcacactcaaagccaacaacctgttgatgaagtagcactgaaaaggtgggttaaaattagagatcggaccggtcggttttttttccggttttttcggtatttttcgattttcggtttcggtttttaaccgaaaaaaaccgaccgacaaattttt

SEQ ID NO: 6710 - DNA, 5141 bp, Heterodera glycines
aatgttcattgatgttcatatgcgctaagtaattccttctgagtttataaagccaaaaaataattgaaaatttcgcacttaaatttcataaattttcaaaaaaattcacacctggtccatcacgttaatgttcgagccttgggcaatcagcagggaaaccttgaaaaaattttgaataataaaattcagttttgtatttttgtttttgctgtaccatgtctttctttccattgactgatgccaaatggagcggagttccttaattaccatacatatttaatatttaaaaatatatttttaattttcaattttaaatttattattacttcccctccaatctttggcgtgctgttgctgggtggaacgggacagcagcatcccaacaacggcaatatggcctttaaagtttaaacaatttatttaattacaaaacttaaatttatttaatgattgtttaatttttaaataaattttggttatttaatttgtaatgttttaaaaataaatttattaaattaattcgtagagtttttcaaatttgatataattttaaaaatggtttttatttaaaaaaattaattttaataatgatttaaaaaaaggtttcaactttataattaataaattaatttcatttacattcattaattacacattaatgaaaaacctaattttcattttaataaataaatatttgaccttgttgtgcagccaaatgaagagggataacattctgaacacattcatgccaattgacaaacgatgatacaatacttatgattagagatcggaccggtcggtttttttcgggtttttttcggtttttaaccgaaaccgttcgaccgaaataattaaaaaaccgaaacaatcgaccgacttttttgacaaatcagttggccattttttaacaaaattcattaaaaattcttaaaattttcctccggcggcggcgcctatcggcaccgcggaccccccaaaaagctatcttttcttaaaaaattagccaaaatctcaaattttggtatttttagacaaaatctgctcacaaatagcattaaaattacaaaaaaatttcccggcggcgcttatcagcaccgccggccctaaagttatggcttgagctcacaattaaggcaccaaaaagcgcaaaatggcactgaaaaaaggcacaaaaatcccgaaaaaggcatgaaaaaaagcatttaaatttttttattaatgatttttagggagcaaaatacgtaaaaactaaccaaaaactaaattttgctgatttattgataattcaatattttataatgtttttcaataaggaaatttttaaacctaaaattttttatcaagaaaaaaaatgaattttggcgaacaatttttgtgaaaatttttcaattcataaaggtatattctctgaatttttttagatcatttcttaggggtttatttttccgattttttttgaatttttaatggaatttttcgggaaaaaacgccaaaaaaggcaccaaatcgctaaaactaatctttgtggttttttagaatcaaggagcaaacacatgttttttggctgccttttctatcattttccaaacctttagtacaccattcaatagagcttcaatagctctacaattttactcagaggtgatctttcgctttttctattgataaaaatggttttgagtaactcaatcagaaacgaacgatggcatgaaaattttgcaaatttttgtgtattgtaaaggctcccggaaaatgcatcagtcaaatttatgggattttgagccaaatttttaggaaaaattagttcgtcgtttttgggtgaggaaaaattttggatttttaatgaaatttaaagaaaattagacaaactgcccccccctctctttattttctatgaattatttaagccatttttgggaaaacggaaaaaagcctcaaggagaatgggggttcctggctcctcgggaaaacaaagtttcgaatttgaaaaatgtcgcaaatattcatcaaaatttgaataaaaatgtgcctgcaatggctggtccatttgctggaaaacggtctcatggccctccctgagaatgttgccccaacgacactgcagcaaccgacgaaaacctgaacgggaatttcagggagaaaaaataattttttttttatggcaaaaacccccaccactgacagacaacacttttggtgacgacgaagacgacggctcaccatccttttggttttcctgttgaaaattggccggctcacagaatgcgatgactgcctccgccttcctttgatcaacatctttgaactaaattttaaaaatttcattttaatttttagtagattttttcggcaattaaaaaaaaaattcgaagcagtggctaaactatgggaaaaaaaatcattttttggcgaaaaaactgctaaagtgcctcttttgcaacagtacctatagttttttttagttacggagccttttttttatccaatctttatttgcacttacttatattactcaatgttataatttgttttttttcaattattaaaatattttgacgccgaaaatagacgctttttcaaaaatgttgcccccccaaaaaattttttgtgcctgttgctcttcggtgagaaattgtcggagtgtgtccgcgtccaaaaagtcattgccctgtccgttggccaagcgcaaaacgctccgatattccggcaaatcggtgagcacgctgaacaaccggagaaattcttgctcattcaacgcattgcgcggccggccgctctttgaaacgctttccttgcaaaaagaaaaatggtataaattttgtttttaattaaaaaacggatttgattgagataacaaattggttaaggggtgtgttagacgaaatccaaatttttaaaaaaatttgaaaaaatcaaactcgcctggtcctcgttttgtaacaaaatttttgaaaaagagttcagtgccaaaaggagaggacgaactaattattaaagtttgggaaatttgggtggacttaaagtggtaaaatttcataaatttggagcaattcttaataaatttggccaatattaaaaaacaaaaaaaaaattcacaggcagaggctttgaatccaattttattgtccaaattcaaaatgaaaaaattccttgaattaccaaaacacaaaaaagcccaccttgaacaatgcttcaacatattggtcactaagctgcaaattcaaacgtttgagcagacgccaaagttcgccgaacgaaatttcatctttagcaaaaaaagaaaaaaaaaattttgtacgatttaaattttttttttttttttgtaaatcacagcaccgtttcgattcaaatcggcttgacgaaagttctgcaacagccatttttgctcattgaaattggtcaccgtattttgggacaaatgcaacacattggcaaaatgttcctgcaacaggttcaaccagttggttgtctgatccaagtccaccgccacaaagtcaagcgatttgcacacaaagcgagggtgctgtgattgaggaaaaaaaaatgcgaaaaaaaatttcctgcgcaatttttacaatttgagtgaattccaaatccgaatccctaacgtcgacttggacaaaaaaccggaatttgagtttttggttttcgactttctatggaatatcaaaatttttgggctttttttttaattgccaccaaattacacactttgcaaatgatggagaagcatcgctgttcctgaaatgataaatttttgtttcatttaatttttctgttgatttgttgaccggtgccatccgttggaatttgtagtccttggcagctttgtgcagcccatcggtgcggtagccttgccgaatttcaagcacatcagtcaaaattacttgaaaaggaatggtttttttttaattggcaaagcgaaagcccaattaattttgatcaactattgattgatccacgtgccatttcaaaaagaaaattgtttaaataaatttccgatattttcaataaaatttccctttttgagagaaattaaaaagaaaacgaagcacggaaggtcactcctttttaggaaaaattatggtaaataaaaaaataaacatttaattatttttaaaaaacgaaataatacatatttttgaattataaaatgagtcgcgccgaaaataagaaaaatatatatataggattgcgggttacaacaggtccagcagagtcgagcgagctctagttttttagatatacaaaaaaaaaaaattttttttctaagaccgattttttccccaaaaatttcgggaatcaaaaactcagccgacatccccgcgcccctggttgatggtggataaagatgaggacaccttttttgcgcctttccccagcgctcccttttctgcatccgctgatgctgctcaacagtgatgaacgcgttgcgccatagctgagcatatcctcatagatgtccagcgccacccgactgaccccgctgatgcgcccatttttaacacgacggaccggcaaatcgaatggcaccaccaccccaccaccaccattaatgttatttttttctgtccggtggttgcccagcggtgtcgtcgtcgtcgtcatcgtcccacttttcccaccccaattattccccgccgttgttgttgctcctacattttctccatctccaccgcctctgttattattattattatttttgttgttctccaccatcatctgtccatcagcagcagcagcagccatagtcatggatcaaaaataaataaattcacataaatacctccaaaaaatggcgctaaaatttttcacttactgtctgtctctcttttgttggtgcaaagaatttaaattactaaatggtgcgctatgacgtcattcaaaaaattaaacatttgtttattattttattattttttttgttaaaattttcattttgctgattttttggagtaacgacgaccagcaacactttaaattgtgtaggaaaaaggaaggcatttagagattgatgagtgaatatatttttgaagtgaatgaggaaggtcagagagaaagttaatcccaagaatgttgagggaaaatggagaggtcgcgagaagagaaaagacaaaaaataaataaacaaacagagagag

SEQ ID NO: 6711 - DNA, 5607 bp, Heterodera glycines
tcgaatccgggttcgtggttcggaatgggtcgaattgagtcacagaatcggattcctcgaccctgaaaaccctaaaaacgccattttctcgaaaaaaaaattttgaaaatttttttcagaaaaaggtggggaacattcttaactattaccgaaatttctattaaaaatttttcgcaggctttttcaagaaaaatttctgtttgaaaatttaaaaaaaaattgtttaaagaatttcaacttggaattaattaattattataaaaatagaaaagaagttattttttcgaaaaaaatataaattctatttatcccccgggcagataaatagagaaggggagattatttttcaacctacttcgaaaggggtagattattggtgacttgcatataattagagaaatacggtagtttgactctttattattagggcttacatttttaggtgctaaaaactgccaaaataggtaggttttaggttctaaaaaaccccaaaaataggtgctaaaaatgggaaaataggtgccaaaaagttccgaacttaggggtgtaaaatgacaaaaattttattaaaaagtcaacaaatattaagacaaattgagaaaaataatttttaaaatcaaaaattctcgtaaataggtaaaaatctaaaaatgtaagccctatttattattacgttggtcagttttcaaatttcaaaaaacaaatgcgcgtctaacatttgcaaatgaaagttggataaaaataatccgtcaaattgattttttattgattgatttgggggtaggggctaaaacgcccggcaaatgtcatcattttgcaaaatatattctcctctgttgcgttccttccattccctttttctgctcgctttttgtcaatgattttcgtctcccattggcatattgtccaacccctcgggcccatttgcaacaatttaaggcaaacaaaattcagaaattatttggataaaatgtgattttcgttagaatttttggttttccgcttttctcattatataaaaataaaacttcaacgcaattaattcttctgctatttgtgtgacatcattcggaactcgtccaaattgtgctaattgctgccaaaaatgaaccgacggtaattaaattaaaagtcacaaattcgtcgtttatttgactaaactgttttcccatttcagttggatttgcaacgacgtttggatggacattttcccatcctttgaccgtcctcaactcggcctcaaattggcacttctttcgccacgtttcaatgcgttggtggataaacattttgatggcaaaagcgaattgacaatttggagaccaatcgaaattagcaaggacatcggaccagaaccgaaactatctgtgtggatggatgacaaatataacaaatttatggaatttccattgccggaccgtccgttgcccagcaaaatccgttttatatgccttcggatttagtaattaaaaatcagagagctatgacaataaaagcattccttccattttcacagttacattgatcattccgtcatcgtttttcttcgttcaaatcaccaaattttcgacaaaagaggcaccaatttacagttgttttggatttcttcaccacacaccacggatggccagcggatttgggatattttgacacgtgaaatttggcccattttttcggcaaatattcgccatttgtgcttttcccatcgtgatcatttggacaatttgcttcgtcaaatttcgccgacaattctcatcgatctcaaccaattggtttcaatccattcatttggtctgttgcccgctgcgtttggtgatggttttgatgggccaaattcaacaacttctgctggccaagcattgtccaaatggttgcacattccgagaaaagctggccaacccaagcgattgcgttgcgaagattacaacgcacaagcgaacactgattggatcaacagtttcaaggaggtgtggggtccgggggggggggggggacaacacgtagccgcaaatttttattttaattaaaaaaattatttaaaatttagttacctagcctaaatcaaaaaaaaatagataaattcgaaaaaaattattaagaaaattcaaggaaatgtaaaaaagtcgtttttttatttttctggaaattcagaaaattagtttttatacgagacggcgacgttttaggggtgtacccggtctgtggatggcattctgagttattttctgaaacccgaccccaaaaaagttataaatcgaaaatttctgaaaaattccgaattttatcaaaaatttcggaaatcggaattcagtgccatccctggtgtggccataattcgacaaatgattgatttttgttttccaatcaaattgtttagcattttcttcgtgccaatgccatttcttccgtcagttacgaaattcatttttctgttcgtgcgccgtcaatggaaatggtgccgtttgaattggtaaacgaatggacaaaggaaaagctgacattcgccaaagcaaagggatgggacaaggcgaaatgagtgacggacaaaagaacaaaaacagtgatcagccgcagaagaaatgaattaattaagaatgatcgatcgaccgatcatattcatcagtgatcaaatgcattttatgaagaaaaacctctcaattgctaaataaatcgggtgtataaaatggtttgctatctatcgaatgaatgaattttcctttcaaaaatgtgacaattatttttcgggattttggcgggggatttccgacatccattagcaatacttgttccgttgctgctcctttttctccttccttttcctctctttctcttccgtctctcctccttccaatgttcttgcttctgctgatgttgttgtttctgctggtgttcagctgcaattttctttttcctcttcttcagttgctgctcctttttctcctccctttttctctcttttccccccattttctcttccttctcctcccccttcgctgtttcctttttgctgttgttgatttcgtgtcacgacatttgcggccaccagccaaaaacgacaattgcggtccgtcttttgcggcccgacatttgcgcctcggacatttgtggcccatttcttaaagggccattttcggacatttgcgtcccgacatttgctgccaaaatcaaaataggtctctcatcgaaaatcctttttttctcttcaaatttatgccgaaatttactcaatcgagtaattctttctcgaaattgggcttgttcaaaaccccatcagagcttaaaagttttctattaaaagtaattatttggaactttttcgccactatttttgccactatttagttaattattttgggatttttgccactaaaaatccgatccctacttctaacatgcatttttttgagactttttttgactttttttacactttttcggatttttatgacttttttgagtttttgcgacttttgttcgtgatttttttgacttattgaggcaaagtttgagttttacagaagaaaatgccgaaaaataaaattttcggtcgataaaaaggcaatgaaacctggatgaattttttcttaattattgggagattagaagtaatcattaagcagaagctaagcgctgaatcatctcaccaaaaagctatgatttataagacttaaaaattcaagaaaatcctaattttttgtaaaattttttaagtagattcttaggggtgtattttttggttttattgcatttttgttgagaaattttccaaaaaatgtcgaaatagtaaaaaatagtgacaaaacgccaaaataatgaattttcactattttagtgacgaagctccaatggtgacatgaaatttgggcatcagagtaagggatttcaaaaaataatacaaaataaatatgtaaaatgctaaataaatcgttaaaatctagtaaattttaagaacccttgtgcttaaaaaaaatttatgttttcttaaaaaacggtaaataaataaaataaataggggagcaaaatagaatttagtgctaatttggattttggtgatgaatggatttggcatctttcatttgtgcttttatatgccatggtttctctgcccatctctgctgttcccattttggttctcttctctcagattaattgccattgattaatctgtccattgattttccttgggttaatttgagtggcttaatgccctcctctgccagtgaatgggaacggacggcattttctttgctcgcacaacggcactttgggaaaagcaacctaatcctcaaccaaaaaatgaaaagcaaaattaattgatttgatttatgctcttctgaggccgaaagtgatcatttaaaagtgatttttttgtaaaaattaagcatatgtctaaataaaaaaaccggagaaactaattagcaactccttaaaataagaatcaactaaagcttataaaatcttttgagaaattattttttcatattataaaattggtaattttacatacaataaagaaggttgacgcaaattccgagtgaaaaatgcaaaaaaaaaatttgttcgaattcgggtccgggtttcgaaataggtcgaaatggatgtcatattcgtgttcatcgcccccgaaaacccccaagagcacctcaaaatcgctcaaaatctcttttttacctctttttttatgggaccagtaaaaccgatgattacccaacaacagcagcaaaaccaagaagttcaagcagtacaacaagaacaggaaattttgatgggaaacgagatgaagatggacaacagcaaaaatggagaaacaagggaataggagggaaatagcattggggaaggaggagagacggaagagaaagagaggaaaaggaaaaattcggcgcaaaaaggaggagagaatgaagctgaaaagagaaaagaacagcagcaaatcggcacttaatgttgccggtgctaattgctaattttgtgtgtcgtaaatcccgcgtcaaaatcccgaaaattaattgtcacaagtttcaaggagaaattcatacattcgatagataccaaaccatttttatacatccgatttatttaccgaaattgagagttttttcttcataaaatgcatttgatcacggatgaatatgatcggtcgatcaatcattcttaattaattcatttcttcttctggggttgatcgctgtttttgttgttttgtccgtcactcatttcgccctttttcgctgctttgtaccgtttcttctgccggtggcggagacaatggccttaattaagcgcaatttgaattatttaaacaaaattaaatgcctttttttattgctcacccaatgcaattagtggtactgaaaagccaaatgatcacattgttacaattgttgtcccaatttccgtctttccaatgaaccgccgctgtctccccaataattttgcttcgtttcattatccaaccgatgccccattcattttcattttccttggccaatgtcagcttttcctttgtccattcgttcaccaattcaaatggcacaatttgcattgacgtcgcacgaacatcaaaaaggatttcgtaactgacggaagaaatggcatggcacgaag

SEQ ID NO: 6712 - DNA, 7617 bp, Heterodera glycines
  unsure (1)..(7617): unsure at all n locations
ctcatgaggattnggcgatgtgtcaatgaatccctcggggcaaagacatctntaaaaaacggcttacaattaattattaaaacgtaaaaaaangaaatntgagaaagcagcactcactcgaagccaaagtcattgtcaatgcatcgtgcctaaatccgatccattagatttatttgctttttttgaactgatcactttctgatcgcagtcgttcagtgtttcatctgcgcattcgttgactggaactgaaataattgcttttataattggcctcaattccaagtcaagaacggtttgatttttgcttgtttcagactgaattcaatttgaattgagacacttttaatttggatttggtcaacaacttagaagtttgctcgagtgacaagcgctcagcccattattagtgaaatccatttctggcactttttgattacgaactagaatgatcaaagtcggtcattttggcttcttcgcttggttttgtgtcccccctccctttaattttaccatttccgctaaattatccattcattgccttacccacgcaaatgcctttccgctttttgtcgcttccattcgtgcctttccctcctttgtccgccgtttcatccctctgcttcatcgcggcacgtattcttccgtcccctccgcgatccgcttgtccgttcttccgcgtcacattcgtccggctccgttatcggcaccaccctttttgtgccgatccaaatcgagtttgccgcccgagcgtcgggcggtgaccgtgccctcgtgctgctaatcgggaaaggattttttatgtaagccgaagatattagccagatattcttaaaaaatgaacaaattaaaaaatttgaaagcttaaaaatgggctataaactgaatagaaatataattttaaatttttaagtgaaagcatgaaacaaggaaaggcattttaaaaaaattgaaaaccgatttttactagataaatgaagggttcaatcgctaatcggtaaatttagtgcaataaacgccggcctaaattttttacaaaaacattttgggggggggggggggaaagtctgccaatcccggcattctgatccatggttcacgaaattcgataattttcaactgctctcgcttacctcgccccacgggcgggtgataccactcggatggtcagttggcgatccgtttccatcagttcgtcccgttgttttatggtgccaccgctgctgtttttggcatcctcgcgaccgttgaacagaaacagtgccgggtaaagccgtgccaaatcggtgaaaaggcgtgaacagctcgaatttgttgttggttgttcaccacgccggagcgcatccgcaagccgaaaagcgttggaggcgtcaaaatgagggaacgcttcggttggcacacaggtggacaagccgggcgctcggaaaaagcctagccgacacacacagcggggccgcgcatcaaattccttcaaaaaattaacattttaaaattagtgaacggctttgctaaagctgatcagctggcctgatcagtctgtgatttattttcacaccgacaccgttcactgtggttaatggcgccaattttctcatggcggcactgtgactgacatatatcaatgcaaatcagcagatcagattaagctacactcaaagtcgtatgaaattggacaaatgtgatcaaactaatcatgggattaagatattaaatgctaaggatcattaaaataatatcaattaattcaaaaataaaatattgtatgaaaactgtgctaaaattcatcaagaaaatgtcaaaaaatcggtttgaaaaattggatatttttataaattaatgcgagattgtgctttaaaaaaatattctcagatttcaaaatccatgagtcaaaatacaaaaatagaataaataaatcattaaacaatcaattaattttaagaaaagatttaagtgcaattggcaaatatttttttaaattaaattactcacacaaattattttaaagttaaaatgccaccgacatattgtacaggtcaaaatgtccggtagttgccgaacctccccactctgtgcttaccacgcacacttggcccaactcggcggggcattccctcgcgcgtgccttcgggcacagccgtgccgtccccgcccgcgtccgccatgtggccgagcgccgacttggagtgccatcgccgcacaaatcctcccatgtctcctccaattcgtccgttgcatcggcacagtcggccgctccatcactgacaactgaactcggcacgcacctttagaaggggaaggaaggaatggacaaaatttagctaataggatgaaaagtgcatggttacaatttgcgcttatttccttaatcggattcaaactgaagtttttcaatcccagatggcctaaagagctttaaatatgcaattgaatgtaattgtatctgatattttgatcgtcagcacatttttgaaaaaataattgttttctcatttaataaatatgtctattttaatgctgtttatgaactatagattcgaaaaaattcaaatttaatccgatttttggcataggcgtaaatgtccgaggcgcaaatgtatgcacaagaagggcatacacatcttcaattttagctaatttcatcggaaagtcatttttagcattgatcactgattaaaatttaagtttctgcatataatgattatgaaatttgaactgctaaatttgttcattcattgtgcttgctttgtgtacaactgatctgacaatcatcaacagaatgccaaatattgagatttaattcaatgaataacaatgtttgttggattggttacgaatagagttgagcggtaatcggtaattgtaaaaaaaccggtaccggtactgaccggtaatgcaaaaaccggtaccggtaccaactttttccaccggtaccggtaccggtaccggtaaaaaccggtaattttccaacgtaaaaatttttggacaaaattttccaaatacaaaatttttattcagttttcgcgcgagtgcctgttttttagcattagaattgttcagaagtatatgtatattgagggtgaccaagtttttttttcaaattcaggataaagaacactaaaattcagatgtagacctcaaaattcagattattgcaaaacaagggatcagcggccaatttccaattttgcgaaggggtctccggccatgtaaattaatgtaaatcaatgaccttttttgctttcaacaccgcttttttcgcggcacgtttttctcaagacttttggggaacaaggagggccggcggtgccgataggcgccgccgggaaaaattttgtattttttaatgcgatttgttaacagaatttgtaaaaaaagaccaattgattaatttttgggtttttaggatgcttaaaatgaaagaaaaaagttggaatatttttttaaattaaaatttcaattaaaataatggtaaagaaaatatgaagaatagaattgaatccaagcgaaaataataaaatcagaaggtttagccacttggccacttatgcatatgaacaaatgctttaaatgaaaataaataatttaattttttttctcaaaaaatttctccttcttcaccattccctactcttttctcacccagacccccattcttaccagtgcaaatttttaccggcggtaccggtactagacaaaccggtaccgatactttgatttttgaaaaaaccggtaccggtaccaaaaaaaaaccggtaattaccggtcggtaccggtaccggtaccggcgcccaaccgacccggtccgtcattcgaaagcacacagtctaacgaagctaaaatatataaaatcgcagcgttcaggcaattagcacaaaagatttgattaattaagtaattgctgattattttcgtttgtaactttcttgaaatgttagaattctcttgttttctcgtattattacattattcagactttgtgctttcgaatgataccaaaaagataggtttgctcgaatatgaacaaagttattgtataaaaacccgggattgtcaatcgattggactcataaagtgcattagagcctaaaaatgtgacttcaaggaatttttcgaaaatcattttctgaaaatctagctttatatactccaaaatttaaaaaaagcattggaacagagaacaaaatgtgtgctaactcggtttattcatcaaaaaaagcatgaaatgaatgaggtttttgagaaaagaaaagcacccgcgcataaaacaatttcaattagtgaaacaaaggcgccaaatgtgagtggaaaactaagttatttgtgctcctccgatcatgcatcactaccactgtcgctgtcctccgatgatgatgcaccaacacgaccgtcgccttcctcctcaatgctgccgttgggcgccgtggacgtgctttgttgactcgacgcaccagcaccatcagaaccacctgttggggaaagcaaaaatttttaatgaaaattaaaaaaaaacaattaatgagtggtgcaatgcacttaggtatatgtagagaccgcattttaaatgccttcctttttggcgtattttcccgaaaaattccattaaaaaatgcaaaatgggacaatgacaaactgacgaaaaaagaggacaaaaaaaaaattgattcaaaatattggcatgacaatttgatcaaatatttgatgaaaatttagagatgaaagaaaaattgcaagcgaatgtgatcaaatgtcagaaaatagtggacaaatacgtgatcattttttaaatgaaattgataaaaataaaagggaaattgtgcaaaaatttattaaaattaaagagaaaattaagcaaatgaaaaagaaaaattcgagaaaaataattgaaaatgaatttggactgatcagaaacatttattcaaataagcaaaagtgttaaatatttttgacagtaaagaaatcttttatttttgcttacaaattcatttgtttcaaaagtttccatcatattatttaagagaaagataaaaataaaaacctattcgttaatatactaatcttgcagcgaatccgcaaatgaaggatcccgcggatggaaatttgtatttgttttttgaaaatttttttcattgctcctggagacgggcgtttaggcaaaaacccaaaacaacaactgaccgtcaatgttttggcgtgaccctatgtccggcattgcggccccatggtccaccgtcgactggtgcggcatcagtgccattggagcgcggaagaaatagaagaccgaataatggaccaagttgaagcaagagccggcatacaaatcggcatactgttccagctgaaaagggacaaaaaattttacaaaattttttttttggtaaggatttagtcaatttttgaggaagcatctcctcgctctgattatttttttaaaaaccgtaaattttttaattagttttttcaattaaaatgaattttttttcaatttttttggaggaggggggggggggttgaggcggcggtgaaagtttttttctagataaaaaaaagaaatatctttattaaaaaactaaccataaacaattggaataccaaaaaaaagtagcaaatttattccaacatattgtggaattatcataaaaacccaatgagttggcatggcatcgcgaaccatgggaaaagggcactttttcttttctaattaaatgcaaatgccacggcacatcatccaacaccacccacttgagaggcgaaaaaggaggtgcgcgttccgcttccgaacagagagccgaaaccgccgtactgttgttccattgactgtgtaacttcctgcaattagaatttgttttagaccgactcaatttgtcgtttaaaaagtgatcaaaaacttttataaattgagcccaaaaatgaagaaaatgtcactttttagtagggtaggtcgagaccggggccaagacacggacaattgagtaccgaagtcccggttttgtgccgtaaaataaagataaatttggtgtccccattttgtatttttttcaaatgattaattattgaattgcttttttgtcatagaacaatagtcacttgcctggatggccttgaacacggggtcggtcactgcctcagttggtttgtctcgcttgtgcagctccaccagctcggactccaattgttgcaactgttcgtacagttcacggttgtccgtccacacggccagctcacggctcagctcgggcaccaccaaaaaggtgtgccaacccgtggttttctgaacaaccaaccgatgaattatgggagtgattttttaatacacaatttttttaaaactcgactcgaaagccgattgattctttctcgactcgaaacccagaatcgaaccgttgggccggcccaagcaaacctttttttttctcaacccggcattttttgccggcccgagaactcgaaattgaaccgaactcttgtggccaccccaacacgatgtttttttccatccctgctcatggcccaaaacaatgatatggccagtgtttttttgttttgttttggccgacctttgaacgcaacacatcgccaaagatgtggtcgccaatgtagagcactttgcccttgaagttcaacaaatggcgcaatttctcccatgaacctgtgtgaaaaattgttttaacaacatattggcaaaatttgaaattgccaaacctctcgaataaacggcgcctttttcattcaacggatttgttgggacgccaattttcagtgtatccgtatccgtatcgacctttgaataagcggataaacaagcaaaaaaattttaaattttcgcacatgctaaacaaatgggagcagcgaggtcccccccccccccgagaaaatttttttaaaaaacatttactaacatagaaatttttcaagaaaaaatcttagtttttcataagaaaattctatgaaaaaatttccgagaaatttttatgatgaattattaagatttttcaaaatgttttccgaaaatcgttgaaaatttctcaaaatttttttcttaaaatttgttgtgtgaaaaaatatctatgatttacgggggggggggggggggggggataaagtgcacccaaacaaatattttatttttatatttttttgtacctcggtgccttcgccaaaccacgacggtttgcacgcgtccacaatgatcatgtcgaagaatgaacgccattttggccccaacaaaaatgtcataattccctgtgagacagaggagcaataaatatataaatatatatatatatatatatatatatatatatatatatatatatatatatatatatatatatatatatatatatatatatcttttttttggaaattttcaaaaattttgccgtcaagtttttttcggtaaattttattcctttgtttttttcgctcaatttctctctaaaaagtaaaccaaataaataaaattaaacaattattttgagacacttaatgctggcacaaaaagtctgtatatcgtgccgatgggcgcctgcagggaaacttttttgaatttcagtgctatttgttaactaggtatgaggtataaagatgatctaaattttgctatttttagccgatntttca

SEQ ID NO: 6713 - DNA, 3554 bp, Heterodera glycines
tccttaatactctcgaacattttttccatccaaatttgggttcattttgaatgaactaaaatggacggcacagtaaattaattttggcatcaaaaagactgatcttttgtactcatttgtcagtggcgatggtaaatgaatttcaaattaacctgtgggcatttatgtgagatgaaagggaacagcaggagagagggagagagggtggcaaaggaaaaagaagagagagagagagagaagcggggaaggagacatgaaaacattgatacaacgaagagaataacagagaaaaaaaaggagaaagaaagaaaggagggaaaaaagaatttagggggagagagaagggggagagagaaagagagagagagaaagagatggtgagaaaattggagaaaatgagagggaaagagagcgagaaacagaaaaggagagagatagagagagaaaaggagagaggataaggtttggttagcgaaagagagcgatgctaggatagacacaaagagagggagagagcggcgagacagtgagaaaaaagagatttggacacagaaacagaaagagagacaatgacaaaatgagagataaagggggagagacagggaaggagctagagaaagaggggagagaggcaatcagcaaattaggcaaattgtatttggccactgtttttgtgccaaaatgaactcccacgcattggaatggcgtgtgtgcattcatggaaacaaccaattaagagaatgaataacttgatttctgagaaaatattatcacaccgtaccatgggaaaaagcgtttgtatgaactaattaattttcgtttaatttatttgtgtctgatgaatgacgtttcgccaaattaaaaaaaaaagttgacattttgcgttagccactatttaataattggctcaatgaatgccgtagtgattgatcactgtcttagtgattaggtaaatttcttgtacgaattatcctttttagtaaaaatttttgttgtactaattgccctttttacatgttgccactgacccagatgaacatgaaacggaatcttgcaaaatcttggcaaatgttaaacaaaagatcggtactttacctagcaggtctggattgtaacttatttcagttacggaaatctaatccgtaattacggcgatttcatcaatcacggcaatacataatccgtcattatggggaacaaaaaacgcgttaatttccgtaatccgtaatcggctcgataaataatccaaaatctcagttacggatcaaaattacggaaaaatcactaaaatccgtaagtcgtagtccgtaattatgggatcaaacacgctgttgtttccgtaatccgtaactacgtcctaactgttgcataggcaatgtcccggcccaaacccaccacaccttgagcgtgttcatcatcatcatgttgttgttgctgttggcattgtactgctccacatcgtggatgatccgcctaggcggtgaacgatgcagctgtgtgtgttgctggtactgcctgaccgtgccgatgccgtcctcctccgccgccgccatcaccaccagcttggcaccaccacaattgccgccgccaccacccaacatggcgtcaatggagtgatgatggtatgcggtggtcgcccatgttgtggttgtagtcgttgtgccgaatcctgctgacgccgttgtcggtgccgtgccgggcaatgtcagcccgagggcattccggcttttcggacttcgttcgccgtcctgttgctgttgctggtgttcctgaaccagctccagcctgttgttgttgtttttcgtggtgccaccctcgcagtccgtcgtcgtcatcgatggcactgccagcacggtcaatgtggggggcgctgccctgacgctcatttataattgttgcatataattggaaggcaataaaaatataattattgtatgctaatgatccttaattgatggtagacatgcaaaaatttatccttaactgatgttaaacatgtaaaacacaattgttgtctgctaatgatccttcttgatgttacacatgtaaattgattgcaatttggctaatgaccattaattagtgctggacatttatattttcgttacctaattgcttcggataattgttgttccaagtacgttcttgaaaacaaggacaagactttcaaggacaccaatttaaggcaattaaagaaatttttaaattaattaataagcagaaatttttcgtgccccgaatattaagatgaataatttatatgtacttaatattaacaataaatggtcagaagacgggcttttgaagtcatatccgctttttcatcggatatccaactaattaataggccaatattagcggacaaaggaagtcaattaaattggtgaattttggaaataaatatttattaatttgtctaataaattttgcggatttaatttcctgcgccattcttcttcgcttaatctgaccccgaaatatagtgcttatcatttttcacagtaaattacaccgttgggaaaaattaaaagaatttagtgtttttttcgcaaacgaaatgccaaagaacgaaatttaatgggcaaatttgaggaaggaaaaaatggcgcatgtagtattaagcgttcatgctgttaatggcccgataatgggcaggtagaaatgcagctttaaaaaatcacgacgaacattaatttccggcacggcacggaaaaatgggccccggaggggagggcataaggaatttaaattcggattttggcattatccctgaaaaggaaaagccccgggggaggcggaggaggatgatgatttgattaagctttgagagtaaaaggtacttatgtgagactaaacatggacttatgattaacagacagcgaaaggctattagggcggctccacattcaattccattaaacaattgaactaattgattggtcattatagaacaacatacaattacatctaatattataattaattgtttcagagatggaaaaaagtgggacagattttcggggaatgggccccgtttaatgatatggtaaatcaattagtgattttgccaaaatgccacaaattgtaaaagaaattttaatgattttgccaaaatgccacaaaattataaaattaaaaataattttgtttatatttttttaaaatttctaaaagaatttttatcctggtaaagttaccctcacaatcagctgttaattcctagctcgttcttttcgtacgtgcctggggggataatttggacagattaagaaactggtaataaacacagagaattcccatgtgccattcatccgcccccgaaatgccatccccgcattctttagtttatgataatgaggggacaataaagcacaaaagcaaatttttgcccctaggggggaggggggatggcacagaggaacggaattgaaaaagtgccgtcgccgggggcggggacaacaatttttgctttcatctatgcggtccgcgccgccgcgcgacgcattgacgtaatattaaaaggcggtagcagcagatgttagcggctaatggac

SEQ ID NO: 6714 - DNA, 2296 bp, Heterodera glycines
gaaaacccacctgctgctgttttgttaaattttccgtcgaaaaaaaaaatttaaaaattttttaatatttttaatggtcggatagggagagatcaatcaacacattctctgctgcaataatgccagcagcagaaccaaaggggtggatttaggagaaggaattttttgttttgtacgaaaaacatggcatttttgccggcaatattatgtattttggcatatttttgggtcttaaatgaattttatgaaaaagatttttaaaaattttgtcgataaattttttcctaatttttcatcatttatgagcagttaatttttttttaattttaaaataagaaaaattttgaagtctgtgaatttttgttaaatgattttacggtttagttttaacgggttttttgaaattcttttactagacataaatttcaaaattcagcaggttatgtgctattagaatttatgctattaaaaatgaagtaaaaaaattagattttttaaaccaaaaattcgcttagactgaaccctggggcgaacgcccgcgcgagggtttgacacttttggacccgccgtaccgtcatcatccgtcaatgatgatgtgacgaaagaacacagagacaaaagagcataaaggtggaaaaataatgagcggcgagtgccgtcgtgccaacgaattaggggcgagagatcgcggcatatatgccaaagtgcaaaatttaaatattatgccatcggcgagaggtgggggggggggggtccgggtcgttttggtgccgacgttttggcgccagccctaacttttgtactaaaattgttgactaaatctaactatcttggtataatttgaaagctcttcatacactctattagtcttataaaaacaaagattttctagaatataaaaaatgtttttaataaaaaactcaaatttcgacttttttgcaaatttcatgttataacttatttggtaattgtctaaccgcctagcaacagctaagaaatagcttctaaacatgtcaagcttttgaatgataccaagtttgttgcatttaatcggcgacgaaaaaaagttatcgtccaaaaactcgggctggcaccgaaatgtcggcgccgaaacgacccacacgcgggggcggggaggacagtgccggcggggtggcagaaagcatacattgtgccacacaacgtacaaaaagtatggggcgggggagaatgccgtgccgcgttatatgggggtggtggcatggggattaataataatgaacacaaacacacacacggacggcacaatgcaatgaacgcatcgttctcgcccccgcgccctgcccccttttttttgccgttggcattgccggcggcgtgtgtcggtggaaggaaatgcaaaatgcgctccggcaaaatgggccaaagattcagaatcaaaatgaaacgcccccgccggggcgggcggggaaaaatttttgctgacgacgaacgccacaataataacaaatatgacgacggggttttgtgcttgaagagaaagaagccaatgtgtggggaacggggattagacagaaaacggggattcggagaaaattggttatgggaatggcacatattaaaatgatgagataggtttagacaaaatggtgatggcatcaccctcgctaaatccgggggaatatccccgcgcggaatgcgggatcaataatcctccacgaattcggagacaaaaagcccccggataaattccccgtggtccccgttggatgcggggacaacaaaccaattcactacgaattcggtgataaaaattcctccggataattgaatataatttctcgcgttccccgtggaatgcggggacaaacatcccccatgaattcggagacaaaaaccctcgtggcaatatacgaaaaaatgattgattcccgaaaatctccgattcggggatagtcggttccccgcgaatggcacaaaatgctccaaccaataaatttgatagctgtgattgagaccaatgatacatggcgaggcaaaaatctgatgccataaaaaattgccaactcgggagtcaagactaatatgttggaaacgcagtcagtaattagtgtcaattggtattaattacccaccctcgccgttttgcccatcgcaccacccaattttttgataaataaagcacacccacgcaaatgaatgatgaggatgatgaggatgatgagcgcgtataattattttccgcacgtaatcagtccatcacttatcatcatcaacgatcaaccgactcccccgcaaaatcggaaatgaatttggg

SEQ ID NO: 6715 - DNA, 847 bp, Heterodera glycines
agagagaaagagagagagagagagagcggagggagagagagagagagagagagaggagagagagagaagagtgagagagaggagagagagagagaggagagagagagaggcgagagagagggagagagagagaggagagagagagagaggagagagagagaggagagagagagagaggagagagagagagaggagagagagagagtgtgtgacccgatcagcataatggaagaagtgatcgaatgagttctagtacagatgtccttgagtgccaggaatcgaaggacgactgatgcctacgtccttggaaattgatcacaaatgtcattagtgacagagagtgagtgatctgaccagcctagtaagtgaaaaaaattgtcagatccgaggacgacccgttcccgagtccttggaaagtgtgcgcacccgtacatatgagtcgtccttaaattccaaaaactcaaggacaatctctggacaagagatgtgttccgatgcccaaaaaatttggaaaatgcaattttaaaagcggaattcctggatgaccaaaatctcaaaaatcggaattccgggatcaaaaagaccgagaaatctcgggtggggccataccaatattgaaaaaaaataatcgttaaaatttgtttattttggtttttgatccttaagaagaagcaaaacaaccattaaatctggtgataaatgcccacagactacaaatttttgcatttgaccaaacagcggggggaaaagcagcagattagtgggataggtatgctactgctttaagcttctgttggtcattgagcagagaaaattaattggcaccgagaaagagagagtaattagg

SEQ ID NO: 6716 - DNA, 1404 bp, Heterodera glycines
tgagacttgcatctagcagtgtatgggttacaaaaacagaaattggggcctcaattttgatcaaaatgtttttaaaaatattcgtccattttacatataattgtccaaaagccaaatattcaacttttttcgactgtaggagggcatttttctaatagaatagaaaaactctttcctatagaaattgttgaatgcttcaataagcctttaaaagtgccgacatagtttcagtggcatcaaccccaattggtccttacagaatgtggccaatggctttttcatataaataaagaaaaaagtttcatttccgattatttttattttaatggtaaatgctaaaaatttgtccccattttttaacagggagaagcttaggccttcattgttcattgtttttgcgattgagactttgaatctagcagtgttatgggttaacaaaaacagaaaatttggcctcaattttgatcaaaatgtttttaaaaatattcgtccattttacatataattggtccaaaagccaaatattcaacttttttcgactttaggagggcatttttctaatagaatagaaaaactctttcctatagaaattgttgaatgtttcaataagcctttaaaagtgccgacatagtttcagtggcatcaaccccaattggtccttacagaatgtggccaatggctttttcatataaataaagaaaaaagtttcatttccgattatttttattttaatggtaaatgctaaaaatttgtccccattttttaacagggagaagcttaggccttcattgttcattgtttttgcgattgagactttgaatctagcagtgttatgggttaacaaaaacagaaaatttggcctcaattttgatcaaaatgtttttaaaaatattcgtccattttacatataattggtccaaaagccaaatattcaacttttttcgactttaggagggcatttttctaatagaatagaaaaactctttcctatagaaattgttgaatgcttcaataagcctttaaaagtgccgacatagtttcagtggcatcaaccccaattggtccttacagaatgtggccaatggctttttcatataaataaagaaaaaagtttcatttccgattatttttattttaatggtaaatgctaaaaatttgtccccattttttaacagggagaagcttaggccttcattgttcattgtttttgcgattgagactttgaatctagcagtgttatgggttaacaaaaacagaaaatttggcctcaattttgatcaaaatgtttttaaaaatattcgtccattttacatataattggtccaaaagccaaatattcaactttttttcaactttaggaggggcttttttctaaaaaaataaaaaaattttttcctataaaaa

SEQ ID NO: 6717 - DNA, 3085 bp, Heterodera glycines
tacattcattcttttctctctttctctttcctctctctttcgtcttggcttctctctcaccctctttggcctctgacctttaatcctttcaatttttttcttcctaaatcaatatacctcttgtattcccattctctctaatttatattgtattcctttccttttccttttcgtcttctttgtttcttttctctcacgctctctgccttttccttccgctctcttctctggcgttgtgtctattccatttctcatgccattcaatgaattttaactttcttttggcgccagaaggaaacaaaaatttctccatgcatctgttcatgcttttctttatgtacatttctttacacccttttcactgtttcattttctcccatttcgccccactctttcgcacaataaatttactctgcttcttttcaccttattttcagtgctattttcacaaaagcctttctctcatctcactgcatcaaattcagaccgacctcttaaaaacggatgtaaaattatgccacctccagcgaagcggggcaagcagtacaaccacaacaacatcagcaccagcaacagccaaagacatcaacaaattgcaaatgacagactgcaacatcaacaatattacgaaaatgttggtttatacctttttttagttgaggttttaccttaaatacttaaaaacgcataattttatgtagttatcaaggattttaaattttattattttatttattttttactcatcatggtgattgtttattttagttaaggcacagaaagtaccccgaatatgtacatacaatgacttttgcatgtgcataaatcatggtatttttttatagtgtacaaaagcataccgtgccatggtgtttggtgtcttaaactgcgcacccggaaaatttgaattacaattggacattccgttcttgtacatgtcttacaatattccctccggcatttttcttatttttcaatttccaatgccccccccctcccaaaaaacccattaagatccaattgttttaattgttccaaacccactcatcatcatcatcttcatcattgtccaaacaggtgtcaacaccggccagcgctgtgcgcggcggacgaggccgtggccgtcgtcggggcagacgcgccggcaccggccgaggcggtggcgttgccggctctgctggacgcattctacgtcaaacaaacggcatcatagcacgggctgatggtggcggcattgtcaacaattgggcgcacgaaatgccgacggtcggcggcggtggtcgacggcaacgtgccggcttgcgcggcagacggcgggcgtcacgtgcaatcgccggccggatcagtcggtgaaggacgactcggcgtcggtggccagcagcagcgggtacggtttgcattcttgggattaaatcaaacatttatttagggagaaggggggggggggatttaaattatttgaatttaagtgctatagccaaaataaattgcatattttatgatcaacaacctttaaaatgtgtgtaacatgcttcattatctccaaaaaaaatttttacaaatcaaaggccaccctttggttttgtcgacccctaattagattttgtgtcgaaccttaatctataaaagagcagaaattttcaaaaaaagtcgatgactccatgaaaagtcttttttttcatttagaaatggaggagggttggctgagtctttaaaaatcgaaaactggggccaattttcagttatttgtggaaattatcggattagaatttatttttgcagtagaagaggtggccgtccaccgcgacaacagtcgtcgacttcggcgtcagcagcggggaggccaaaacggccatgggaaggcagcgaggacgaggaggacgagctgagcaaacgctacggattcgggcgcagttttctgttctccgaggaggaggaagacgaggaggaggaggaggaggacgaagggatgggaagtggtcagtttgttcaattattggggcgaatttttttttttttgaaatttgaaagtaaatattccctatacgaaaatcgttttttaaattgtttttgggatgaaaaatggactttgggaacattttagattttaactaacaaaatttgtttactaaaattgctcatttcatatttcccatacaaaaatcgcttttttgggatgtttttgtactgtaaaatttgaatgtgaatggacttttgggaaccctttaaaagattttaactaatttttttttatagaaaattgcccaaaatttttagagatattaaatgagataattaggtacaaatgtttgtttttgggtttttaattactttccattaccccacacagatcagaccgatttggacaccgatgatgacgaccgtggtagtgaagcgaaggcgcttccgtcttctgccgctgttgctccctcggcctcgtctccgtttggcccattttcttcgttggacgacgaggacgacgacatggaggaggaacttttggcccaactaccgcctgaccaaataccaccgctcgttctcagcgactccagcgtggacttgctcatctacaaggaacatttgatggacacgcttgaggtgatgggaagtctgtgatggttactccagaatttcttttgttcttcttcgagttatctcactttttcgccaattctcaaaggcagtttcgaattaattttttcttccatgataatgtaaggcgggacacagttctcgtccacggactgggatggtgattgggtattagaggctcctcaccctcctcccccatcggaacgcccatcccgggaatccccttgtaagcgacggctttcccagccatcgaggtcagtcagtcattcagtcatcactcccatactcaggagccccccgcgggggggggggggaaaggtccccccccccccaagatttacaattagcctcacccaaatttcccaaaaagttcgctaaatttttcaaaaaatccacaattttttgatgaaaagctgctaaaaatggctcaaaatcacaaaatgtgccatttggacaaaagtcgttaacaaatcgcattaaaaatgcaaaaatt

SEQ ID NO: 6718 - DNA, 2894 bp, Heterodera glycines
cgtattggggccaaagtttgcattttttaaaaattagagtttagcgggccgggaattcccggttctccgaggtcccggattggctagtctccttgactttcctttcttttttcccctggttcaatccctctacagaaattaacatattttgaattttctttttgtatactcatggcattcctatcgccaaaatatggttactcatagttttattttaattgacacatttttatcattttttttaaatgaaaatccgtacaaattgttgagcctattaatcccgaaaaccagccttttttattttagtctgagtggtgaaatggcaaaaaaatttttgcttataaaaggaaatttgggtcgtttgactttggcaccatcgacagaacctgatgaagatgatgaagaattgatgaaatttgattttggaaataatcgaggattaaacttcaaatatatttttacaaaatatttgcttgctttaaaatttaagagctttatttttggtttgactttttgaaataaaagaagcaactttataaatttggatttgtattcacaaaaattctcaaaattggtcccggtcccggtcccgaaaaaaaatcgaggtcccggcaagtcccggtcccggttttgcccaaaattcccggtcccgctcaactctattaaaaatcaacagctggcgagtagaattgtaataaatgcttgactcgtatttgtgcgaattcctctggcgcaaaaatgtcaaaaacccgtggcaataattttggcgcgtagctttagaattgtacgcgccctctgttgatttaaaaaaaattcaaactttggccccaaaaacggaaaagtacagagctttttgcttgagctcctctgacttgacttttgccaagctttgtttttctggttcccattacctaaaatttgaaaacttctaattgtttctcaaaaaatttaagtccttatcaaaattgtttttcttaaaaattttcaaaaagaggaaaaaaatgccaacacgaaagaattttgtttttttcccataaattggcgtattgagtcacaaaaaaaaaataaaaataaaacgcaattaacttttttgtaactcgctttaatttttgttacccaattacccactttataattgcatttttattcgttaatcagttttttttttaatttttcaaggtcacttccggcgctggtgggccaaattcgccggtgctcaatttggacatgcttttggccgagttggaggacggcggccaatcggacggagcagtgccagcaacacaacaacaccagcaccagcaacaacagtcccaacacattgtggccatgctggagcgagcgctgcgcgagagagacgaatttgccaacggcatgatggaaatggcacaagaaatggtaggccgaaagtatacggtagtcaagtgaattttgtacggtaccgtatcgttaattattcgaatagcttattaaatgacagtaattttctttgcttgaaattaaatgattaagctatatatattaccaaatttcaaattgttaattaaggatctcttaatagttgttaaaatttattttaaaaaatttttaaaaagttaatccattaatattattttgccaattatttcatttttttaagaatttattgaatttaattccgattttaagaaatttgaataaataaataaattttgaaaattttttgaaaattcatttaataatttaattttcaacaatttgctatgactcacaattttttgaaaaaataaacgaaatatttcattttttgtaatttattcttttttaaatttatgaatttcaaggacaatgatgaaaatggtggcggtggttcgtcagcagctttaacaacgtgttcatcttcatgtaatggggacattgggcctgctgcgggcggcaaatctgtcaagcaacacaatgccattgcgtcaacatttggtccataatttgtgaaattaaaattttttaaaaaatattttattttttaaatttatttgctcctgaaatatgtagccggatttgcccgatatccccgggggtctcaattctcattctcgagcctcataaaactcaattctcggctcgatcaagtctagggtcaattctcgatgttcgatcaactctagggtcatttctcgatgttcgatcaaactctagggtcatttctcgatgttcgatcaactctagggtcatttctcgatgtacgatcaactctagggtcatttctcgatgttcgatcaactctagggtcatttctcgatgttcgatcaactctagggtcatttctcgatgttcgatcaactctagggtcatttctcgatgttcgatcaaccctagggtcatttctcgatgttcgatcaaactctagggtcatttctcgatgttcgatcaactctagggtcatttctcgatgttcgatcaactctagggtcatttctcgatgttcgatcaactctagggtcatttctcgatgttcgatcaactctagggtcatttctcgatgttcgatcaactctagggtcatttctcgatgttcgatcaactctagggtcatttctcgatgttcgatcaactctagggtcatttctcgatgttcgatcaactctagggtcatttctcgatgttcgatcaaactctagggtcatttctcgatgttcgatcaactctagggtcatttctcgatgttcgatcaactctagggtcatttctcgatgttcgatcaactctagggtcatttctcgatgttcgatcaactctagggtcatttctcgatgttcgaccgagtctaaggtcaattctcggtctctattctcgactccgtcgtcgtcaattccatggtgctcgataccccgggcttaatctcaatctctttctct

SEQ ID NO: 6719 - DNA, 2556 bp, Heterodera glycines
atttttttgctatttttccttcaattttattccattcttttgctgaatattttcttcctttttgcttaattttctcttttatcttattgaattttccaattatttctcttcttttctgttcttcgtttcttttttcttcccatttttctccaaatatttcgtcaaatgttttttgttccaattttttattttctgatccgatctgatcagttagggtgatcaaaaatataaataaaaagaataataagcataatttcatattttatttttgcgaaaacaaccttaaaaacaaattaaacaattaatattatttttaaaatgaattttgaaaatagtaaatggttaaatacccacagatatgaattaatattgaaataacgataaaaaataatttgttgatgaaaattacaaaaaaaaaaatgcttttttccttattgactatcattaaatcctaatattttatgtaaaaattcaccccaaaatcaatacaaatgtataaaataaggatatttttaattatttttttttcaaattataatgacaaaatataatctttaattaaaattttggcataattttttaacagaatttgtaatacaaatgttcattttatggatttttaatctaagttttaaaaattctatttttttgcaaaaatcaaatgtttttcacaaagatggaaatttttgaataaaatttttaaaaaaatcgaattttcagtgacgaaaaggaggacatgcttgtggacctgcaggacgagttggagcgccaacgcgtggagatcggcaggcttcaagctgaacggttggagctggtcaaggacgcgcgtgcagcgaaggatttacgtgacgaaatggaatgcatgcagcataaactgaccaggctggaacggttggagaccgaagcggagaaaatgcgcacaaaattgggcgagttggacttctacaagagccgaatgaacgtaaaacaaattaattattttgacacttaattttataaatttattaaaattataaattaaattattatcccaaaatatcacgcttttcagaggagttcttaattatgagagtttcagaaaagccatgaaatttaatgaccctaagacttagggattataaatttgtgagaatttagcgccaatttttataattttttgttgagaaaaaaaggaaattttagaggaaaaaattcatatgattttcttcagattttcattcgagttaactcgtggaacaccaatcttagaagaaaataataatttgatttgaatcaaaatgcctcaaaaatatttccaatattcatttttggtattttaaaatttattcatgaaatttctaattaattagctcataaataaaaaataattattatattaaaatattttatttcttatagagtttgaaagaggacaatcggctggtgcaggagacgtgccgcgtgatggaggaacagcttgaacaatgccaacgcaaactgaccgcccatttggaggtggcaaattttaatatttttaaaaattgaaaatcaattaaattttgttttaaaataattaaaattaatatttgttaggtggagacgaagctgatcgagtcacaggccaacaacaaatcgctacaacttgatctcactaaggtcaattaatttctgtcatttggcaattttatttaataaatatttttattaaattatttaaataattaaaaattattttttttttacaataattaattaaataaacaaaaatttgaacattttgtttcaaaaaacaataaaaaaattaaaaacatattgaatcattttaaaataaataaatatttaaaaatcatttttatatttaataaatattattaaattatttaaataataaaaaataaaaattattttatttacaataattaattaaataaataaaaaattcaacattttatttcaaataacaaaattttaaatgattaaaacaattaaaaattcaaaaacattatgaataaaaatattatattttaatagaaattttgatttgatttttttataaaaaaaatttaaattttttgctaataaaattatccaaaatatatataattctcaaataatgctgaaatagacgcgcgcacatgtggaggacctgctggtagagaatgggcgactggagcgtgaactgaaggccaacttgcagcgacacgcgcaactggagcgtgccatgcagcactgcaatgctgtggaggaagcgcgagcgtgcgcaccatcgccaagcggtggcgacacgctgcatgattcgtcattgcttgcgcaattggacgcatacaatcaatcgcagataaatttttaattaatttttgaatttattttaataaataatcattaattaacatattaatacatttttgtgttttaaattattgaactgcgtctcgagaacagcaaactgaaggcacgcttagcaaatggagaagggtaattgtttaatgtacaaaatatttgccatttacaaatcaaacatactgtatgtatttcaaatcaaacatactgtatgtatttcaaatcaaacatactgta

SEQ ID NO: 6720 - DNA, 3134 bp, Heterodera glycines
  unsure (1)..(3134): unsure at all n locations
taaatatcatnttattnaaaaatattnntagttctaaaatntaaaaacttatattcagtaaaccaataccacagacaaaatacatatacttagaccataacataattntaaaaagggaaatttaaaaatttctttttttaattaaattaaatattttcaaatatgcaaaaagccgttttttccgaatttcgattatcaaaaatcgatgttttagaatatcttcgccctctaatggtttaatcaaatttaaaaacaaatgaaaatttacgtggaaagaagaaatttttatgactgattaaaaaacaaagcattttttctttccacaaatgatttttgcaatgattaattacactaattacactttccttaattgagcagttttgctctctctcctccaaatggacatgaatgaatataattgacaaataaattcccatttttggtgttaatgatgctaaaaatgtgggggaaaaattttatgttatgtgaatgaatgggttgggcgggttctcttctttcatttgtgctttcacattcatattaataaacaattttattacatttggaaattcaataaaaaacaaaaatattttccaaaatccataaataattatttttaaattaacaaatcatctttttgtaaattcaatttattttagcgaagtgatttatgtttaataggattttttttttgttgttgtaaattcgaaataaataaatatttgagaattttaatgctgttttatttatgtttcgtggtttattatgaaaaattctcatttttttttgtcaaaattagttaaaaattgaattaaaaaccaaaaaatgatgttttaaataaatattttagttttattttaggatctaaatacctaatttaaaaaattctttttaatttttaaattagttttttttaaataagtttcaaatacttactgaatttaaatgcttttacaatttcccctttttccagtgcttctaatcctgctgagatgttcgaactgcgcgcggaattgaacgcacacgaaaaattggcggaagaaaaaatcacagaatgccaacatttgcgcgccaatttggaactggcacggaaggaggtcagagaagcggaggagcacgagacagtgctgcgcgcagacatcgacaaattggagagagagttggcggaccagagacgcacgacaatgccaatgcaaacgcaccaattaacggtggacaaattggagagcacagaacggaaggtagagagagagagagaaagagaaagagaagggagagagagagcgggaggaaaagaagagagagaaagataagggggagagagagaagaaagttggcataatggcattggtgccattttgttttttttaattttctgagttttatttttggaaattcagtgaatttttgattttttataatttcttggcgtcagcccaacccttagcttgttagcgctataatttttccataaaattaaactaaatttgagttaaaagtgccaattgaaaattaaaggaaatttcagcaaaaagtgccagtttttaatttcggaattttttgccacaatttttaaattgtttttcttgaaatttataggctaaaaaaggaaaaaattataaaatggagtcattaaaattaatttttaaaaattatttttagagccaacaattggagcaacgtttcaccgctcagttggacacgttacagcgcgaaaagtttgaagcggaagcgcaactccaaactcaggtccaattatttgtgaatgcttcacgtcatgtgacacattttcggttcagaaaagacagcagcgtgactgtcgcgcggagatggacgcgctgcgcgagcgcgccggatgcgacgctgaccaatgggagcggcagcggaaggcactcgaatcagaacgaaatgcgctgcgtgcacggctcgaccttgaggaggcaaatgcacgtgagctccatgctgcaaaatgtgaagcggaaagcgctgcacgcaacgcggccgagtacgagcgtcaagtgcacgaaagagaggagcgcatgcgcaaattggagacagaattggcacaacaacggcagcaggtggccatgagttttttgtaaaagattttcaacaaagatattaatatccatttttgcaagtgctatccttgaaaatcatcatcttgattcttaaaaaccgtggcaattaaacatttttgggcaaaatttaaaaaataaaaatgaatttttactcatttatcatttaaacattttaatttaattaattaattagttaattatcaattaatataattaaattatttaattaatcattaattaattatcaattaataaaattaaattcattaattagtcataattaattacctcaattaatataattaaattaattatcaattaatattattaattaaattaatcattaatttattaaattgatcagcaataaacaataaaacacttcaagactgatgccgaaaagaaaaagtcgcagctctaccgagaggaactgatcacagagcaaaatcggcttagcgatttgcttggtcgcctccgttctggttaacactgtaatctgctttttgtactcacagtaatttgttttacagtatgccttatggcgctgcgttccggcgctgacgaagcggcagacacttcctgttgtttggagccgacctgcatgcaggacgacctgcagctgattgcaatcattgatgatctgctgatgaaggcgttgacggacgcacgccgggaggcggacgcactgcgcgtgcagcaacagaaacaaatccgcgagcttggtcagtttaatacgattactgtacaaataaattcttgttacgatggttcgattacagtaattgtctgaataattttgtgtaattaaccccttaaatatataaattcaaaatactgtgaaaagtaaggtgagattattatgcaagtattgtattttgtattgttacagttttctttaactttaggtgccctaaaaaccgaataagctacaagtctacagtagttctaaattagtgattattaacagaatccaattgctgtacttagcagaagtttccccaaattctgcgccatactgtaataaaaattaatttaatttcaattttaattaat

SEQ ID NO: 6721 - DNA, 1522 bp, Heterodera glycines
tagggatcggatttttagtgataaaaaatcccaaaataattaactaaacacggcgtccggaaactgagctgctgtaccaaaaaagatttgtatgtgtggcgaagtggtttgtgagaaggtcaccaaagggggggtcccaggttcgatacccagtgcatgctattgatgtatttcgatgattttaatgaataaataaaaggaaaagtgaccaaaatgattttaaaattgtttacaaattttttaacatttttatttatatgtgtagtgaaaataaaccatcaatcctcgatcagtcaacgacatcgatgtcggcgtcttgatcactttcttcgttcgttctgtcttccgctgcttgctcccgtcgttcctcctcttgttcagacgcgggtatcgttccacgaattcgccgttgtgcgcaattgtattgttcaccaaattccatcccctaaaggttggcgaagcaaatgcaaaacgggtgaccaaaattcgcttattacgaagcaaattaccagctttggtcgtcgctgccaattaacggcaaatagccgggacaatgcaacgcggcatgatgaccattttctccttgctgtccgtgtgagtgaggcagaaaattttgttggtgatcccattcttgaaaatcttgaaaatttggctaattaaatttgtcaacttttttttagcaaacggagaaaaataataattttttgcacattagacttagacttaagcatggactaagcttaggctagcgctagacctaggcttcatttccacaatttataaaaagaaaaataataaatttcttatgtttttgctgccatttgctcatcccaggtatccaaatagaaattttgtcaaaatttttccatagttatggtattttatccaattttcagttgcctaatgacaatgcaattgacacattagccaataattatgttttaattgctttttatccggtgccattttttaattaattaattataccagtgatccttttgattattaaatgttttccattttgtttttctctccctttttaccttaatgtcaaatcctccttcacgcacagaattgtgctgaatttccaatgaaggttttacatgtccaaagatgagagagatgcctccccgattaaattgtttgatttatggaacggaaaatggaatgtgagaaagcagacatacctatgtgcttgagaaagagattaaatggatgcgataaattttcgccttacagtatttagaaaataaatggaagatcaatgataatgaatagggcgtgtaattattagggccacgacttttagtgacggtaatagtgccgatggtagcccccctttttagaaaaaaaattttaaaaaatttgtaagtcccaaaaacatgtttttaggggttttcagagtcgctgagcacgaatctggcatccatttcgacccatttcgaatcccggacccgaattcgaacaaaaagtcgaaaatacaaaataattttcaaaattcacatttatgcaacaaaatcaa

SEQ ID NO: 6722 - DNA, 3225 bp, Heterodera glycines
  unsure (1)..(3225): unsure at all n locations
ggatcggatttttnagtggcaaaaaatcccaaaataattaactaaatagtgagaaaaaaattccaaaatagtggcaaaaatagtggcgaaaaattccaaatttaggggtgtaattttttaaatagctgttttttaatttgaaaataatttaaaattaaggaaaaagattttattcactgatttcagttacaaaatattttctatttttgaaaatttttaggtcgattcttaggggtgtatttttgaaaattttttaggtcgattcttgggatgtatttttcgtttttattgcattttttgggaaattttccaaaaaatgccaaaatagtggcaaaaataatgacgaaacgccaaaatagtggcaaaaaattattttagtggctaacttccgaaatagttttttttagtggcgaagctccaaaatagtgattcctagtgatgaatagtggcactaaaaatgaaaaattttcgaaaaagaatgtgttttcgtgcatttctcgtcgagttaaagccgcagaaaaaatagttaaaaaactaagaatccgatccctattgatcagactcactgataaactgataatcaaatttatatgttcttttaaaattcttaggaaaacaatatttggctatgtccttaataaaaagatttcttaacttcaccctttttggagtttgtgggtcaacaacactttattatttgcatcaaaacgattattcactttcacacattggcattgttcgatttgcacgtgttggactcactgtaattttttttattttttgttaatcgtttattttcatttattctttccttttgcaggcttcagcaacaattgtcgattacaaattgtctttgttaggtgtggacagcgaatccgcggagtacaaagaacggatttggcaatgccatcaacggggggcagaccgactgctcagtttggcacgaaggaatggcggagtgttcatcaaagttggtcaacacatcgcctcgctgcaataccttttgccggagccgtacacttccacactttccattctccactcgaaagcgccggagagcagtttggacgacatgaagacggtcttctacaggagtttgcacaaaaatgtaaattcattttttttgccgtgtttcactcactcactacaattttacagtttgacgatgttttcgacgagttcgacccccgtccatgtggcgctgtgcgttttactttcatattcctaattgttcatttctatacaattaacaaagattaattttgcattataatggcatttttgttttccgtatctctgagtggtcttcgaattcgtttaggcttctctcgcgcaagtgcacagggccaagctgaagtcaagcgacgaatacgtggcagtcaaaatacaacatttgcatgtgaaagaccgcagttttgttgacatggccacgatggaggttcagttcaaacaaatttttgacaatgcgaatagaataaatcgcttgttagagggctttttctaaatttttcgacatttttactgttattttttttatcgtagtttttcgtcaatgtcgcttcctttgtttttcccgaactcaaattgaaatggttggtccgcgagacaaaattaaaccttccgcaagaattggactttcttcgcgaggccgcaaatgctgacaaagtgcgtcgaatgttctcccacatgcgttttgtcaaggtcactcacttccattgttttccacatttttcattttttagatccccaaaattcattacaattactcttctgacaaagtcttaaccatggaattctgcgaaggtggtcaaatcaacgacttggactatttccaagtccatcagcttgacaggcacaaagtgagtgaacggtggcgcttctcctgactaaccatccccgtttttgcactcaccaaattacccaacccgaaatatctattttaccgatgattttacgaaattgttttttggactctcaacggaattggcccatctctgagctcatgttctcccactcctccctctttttcagatttgtcgtctcttgggcgctttgtacagcgaaatgattttccgccgcggctacgtccacagcgacccgcaccccggcaatgttttggtcagacgaagtgccaacaccgggcgggaggaaattgtgctgttggaccacggcctttactgtgtaaaaagtccgtttggaaatgccaatgtcaaaacgagcgccaattgtcagactcttcccgacgaattgcgcattgattacgcgaaactgtggctggcgctgatgaagccggaccaggacgaaattcggagggtttgcgaacggatgaacatcggacagaactacggactgttcgcctgcattgtcacaatgcgctcttggaagtcagtcactgcgggcattgcgcggacagaaattgacgacagagaggtggggaaacggagacagggttttgaaatgggttcaaattttcaaaaaaataatccaaaattatttttaatttttttggggctctgtctttcatctccctcaaatttgagtacttttgaagcgatcgcacatcaaagagtacgccaccggtcttatccctcaaatttccgtggtcctcgattccatcccacgccaaatgttgctgattctgaagacaaacgatctgctccgaagcattgcattcaaattaaaaacggaacaccgactggacagtttttcagaggtgaattcggccggaaatgtcttctctttccccgttaattaatttttgttccgtcagatgaccaaacattgcactcgcgccgtttaccaccactcaatcgccgccacccaatctttgctgagcaaattgcgactttacttggccatgtacgtccttttggtcaaaataaacatcttcgaggtctttctgattgtgaatggactgctcacagcgaggcaaaggcatttgacactttaacaaatgcttttccttttgcatttgacttcccttttgttagcccactttctttctaatcattgcttgtcaaatacacaaggagagagtacggtaatcgttgtaaaaaacggattcaaacaaaaacagcaaaaccctgagttttgttttaaataattagaaaatgccaaataatagtgaattattggcagataagcagtcaaaaaatgaagaaaacgaagggagaggttttttgtgtatgaagtgaaaatggcaaaatgaaagaacgaattggcagt

SEQ ID NO: 6723 - DNA, 1479 bp, Heterodera glycines
  unsure (1)..(1479): unsure at all n locations
cagtgccatttgcctaaantgnatggcattttcgaaatgctaactgtgcggtgccctcctcctgctatcgttaccataatccatccttcgtccgcgatgcatttggtcttctcccccttgcttaaattgtcagtcattagcatggctttccctcctaattaccccctcctacccaatttccgtttcttcctcttctccgtagcccgcaggaggccacaatcggcctgtgtttgggtcgggcccaatccgtcccggctggtagaccgtcttctgtacgtggtgttccacctgttgggggtgttattatttccccctgcccttgtcttccccttcccctctttttacgtcatgttccggcacccattcctgcgctttgactttcggcaccgattggcgctcctcaaattatgtttttgctttcttttttgcttctcatgccccgcttctctcactttctcttcctcttctgggaattcgttccattttgtcttcgaatagcccaccgcctcgggcacaatcgatttctgacaccaaattaattaattaaccgataaatgataagtttaattggtctcgacctttgcctcactctccaccaaaaagtcgccagtcgcatttaatttggcgggttggacctgcaaaaacaaaggccaaatggtctccgataagccaatgagcatttccttcgctcgtcttcttcttccctcgccaattcgttcactcaccggctgatattcgggctgcacacgccgctgcacttgccacgcattgtcctcctaaattttgacagactttcaaccgatccgattttatagggaattgaaaagggctttatccccccccccttcattttattcattccccctttggtcggtttgcgcggaaagatcgctgctatccgcaaatgattgggactcccgccgagatccccccccttagcatattccgtctccccccccccctccgcttcgtttgttttcgtccgtctaacttacaatgatcggatttcggggcactgcgctcgcctccaattgttcctcatccggctcttgccctggcggcagtttgttgacagatgcgtccaccaatttcggcgtgtattctgcgtgtcgtaagatgggttgggtcggcgcttcgggcagttgcacttcgcgcacaacgggcggaggcgcgcgcttttgaggcgccaccgcgggaggggcggtgggcttcggcggcgcagcgacggcagtcgctttgggctgttgcggggccgcggcggcctttggcggtggaggggcagccgctttgggctgttgttgttgctgtgccggggcaaccgctgcttttggcgcttggggctgctgcggtgctttggccggcagttgagcggagggagcctaaaaagtcacgaaaattgcgcaaatccaaaaatgagcatggcttttcattcccctccccaattcaaattttttttttttaatttgagaagggaatgga

SEQ ID NO: 6724 - DNA, 1761 bp, Heterodera glycines
aattttcccctacatttgcccttgaacaggcgatcattcatgccgtttcgccgtcaccattctgcagattgatgtcggcaccattctcgatgagaaatgcgactgttgtggaaaaaatgacggaaaaaattacgcatttttcaattttttgtctaccaatttccatttgcgatcttttgcaagccatcatcagcggcgttgttgcaaagtccgatcccaagtccacgttggcaccacggtcgacgagcacacggcacagcggaaaatgtgcatggagggcagcaacgaaaagaggcgtcatgtctgcacacaaatggggaaacaacattatgtccaagacagacaaacatataattaatctctggcatccgtattttgaccaattccgacccgaattctaacaaaaagtcgaaagttcaaattcttgaaaagggttaaatacacagtaacaaactgaaagtcaccatccagcaacaaaagatcatttaatttttttagacgaaatttgtgaaattcgaaaatttgaactttcgactttttgttcgaattcgtgttccggaattgttcaaaaatagatgtcagatttgtgataagaggtgccaaaatattactctccggcatccgaatttcgaccaattccgattcgaacactggacccgaatttcgaagaaaaaatccaatttttattatcagataacgaagttcggagctggtcgaaatggtgccgccggattcgtgctcactgatcagtgaatgacaccaaaaaactgcatggtaaaaaagatttcatcaacaacaccacccactcgtgttaatgtcgttctcacggccaaccaccggctcattcggatcggcgcccttctccaactgaaaatgccatacaaaattagtgccgactgataaatttgtttgatcactaccaagagatcaacaatgtcgatgtgttgtcgaaaaaaggcactccaaagtgctgatcgtgatcgggtgtagtcgcgctccactggatcaaccatccaccgcagcaaaatgttcagctcgtcggcgtccagcgcatcgatcagcacacgaagttgttggatgttgccgtcgttgatcaggtcgaagaagcggcgagcgcgcgtctcgaagttgtccacaacagcagcatcagtgggatgttcagcatcagccttaaatgtgggggaaaatcagttattgaaaaaggattctgagttgaaaccgtgcaaaacatttattcaggggggggggggtcatttcactgatcagtgaccccgaaaatccccgtggaaagatgactttcagtttttgaaaacggattttcagttgaaatcgtacaaaacattttctagaaggggaagaggttcgtgatcactgatcagcgccttgaaaatccccagtggaaagatcatttttaaaaacaaaaattcgtaaatgggagggggatttaaattttatacgatgatgaaattacaaccaaaaaaatcactgtaaaatgatttcatgaaaaaaactttaccatgcgaatcagcgcagttgaacaatgacgacgaatatgcaatggaaataatagtgaaaatggaagacgaagacggaatgaaatggcggaaaatgaaagtacgcaacgcttttatatgcccatcactgtgggtcgagttagacaaaatgaattgaaacgccaaaaattatataatttacgcgctaattcaaaatttactctgatcactgcatttttaggattgtttatttagatcagccataact

SEQ ID NO: 6725 - DNA, 3569 bp, Heterodera glycines
aaaatatcagcgaaataaatcattaaacaaaaaaatataaagtttaaagggaagcctggaaataagaaaaattttagaaataaggacattttttatttctaagatctggcccttcaaaataaggacaaatcttagaaataaggacacttgggaaccctggttttacgacctttttcacgtcgacttccttttttcaattttcagatgcaagtggactcattcatgacgaaggtgccattggaaacgccgaggcggagaatcagcaattgactttgtcacgaatgcaaagtgtcaacggcagtttcgaaaaaattggcgatgagccgaacgaattcggttggcacatattccgaattttgatttaccgaaccaaataaaaattgctacaattttagaagccattggagtggccgatgttctctcaccagtggaccatatgcaatttgtatgttcaaccatccatccattgctgagagacaaataaatattggtttgttctctcaaaagggtcaacagaattcggtacaatttgacaatccatcggcgaagaagacaaaaagttatgccgaagccgtgcgattcgaattggctgacggaggaaacagtgacgaaccaatgatggaatgggaggggccgcagaatcagcgggaggactcaacgcatgacgacggcactctatcggacaatggtaagaaaaaatggggtatttatctgtcaccagacttcaaaaaaatttatacgggtaaactggtttggggtttttagggtcgggaaaacgattctttcggatcctgaacccaaactcgaacaaaaagtcgaaattaccccatttggtttatgctgacaataattagttttagtgcattctttgcaacccgttgcgccccccgtcactgaatttggaattgatttgtttccgattgtttctgcaaaacaaactggagacgattttggtgcgcggaatgttcagcagcaggtaattcagtggccaattgttccagtttctaattaaactaaacgtttcaggaccaaagtcgtcgcaacgacggatcagacattggactatttgaaaaaaagaaatgtgttgcctcattggaaatccatcggatggacaatccaaacgaacgttgtgtagtcaaaaagtacgaattcttcatggtgacggacaatgagcagcatcaaatgaattccgctgcttttgcaacttctgagcgttgtaacccaacggttggccaaatgacacagaagattttgtcggagcattttgaaacaccaattgacaaattaattgcacaattcgacatgcaaatgcaaatttttgatacggattttgctgacggacgttttgtcgacatggaaaaaaattggtcagctgaacttgttcaaaacaatggtgcctacaaagtgctgctccattcaaaaatggacgccagaagtggacgtggatatgaagatgtatccaccagccaaatggccaaccgtggaccacgtcagcaacgtgaaatgtttggcaatcaaacgtacaatgaatatgagtccgacatgtttgatcaacaaactgttggaaatcgtagtaaatgtgggcggcccattggtgatccatcgttttgtgactccaacttggaacaaatgtaagttgaaaacattattcatatggatattccgagtattctcttcatacatttttagtggggggtcgagcccccctgacttcgttcgtatgaggggccgaaagaggggggggggggggactttgtattggttgggacaaaaatctgaaaaaaaatgtggggaaaggtcggagacgaaggattaagatagatgcgacttcgtaaaggcgaagagaatttaaataatttaacatacaaaaaaatttacgaaaccgagtaatatttcgtattttttttatcaaataggtatgatttttaacaaattgcacttcgcgaaattgtttctggttacgggcctgaaggacttcgtaaattttcgtccgacccccccccccccactatttaatgtatgatttaaagtaattgtcttttaaattcttatatgtttgttgttgcttctttttttctctaaaatccattttatcggatatttagcggtcgctttcttctctccgaggtgaaggcgcctctcgccaatctttacgatgtttcaacggacaatttcgtcactttgaatgatcatggatttgtcaacaaaatggccaaaaacgacgaaaatttgacaatgcaggacaggccaaatatgcgcgaacaactcattgaaattgaaagttttgacgatttgaaagaacgcaccaaaatattggactttgatcagaaagttgctaatacaattttaacaaaagctatttacgcttttgttatagttgagtgtgatcagccaacttgcgcattttgacgatgccaatccccttggccagtttctgcagaaagcggcagctcaaaccgaacgtggcaactcatttggcttcattaaaattgtgccaaaaacggtagaaatcggcactcactttttactctcatgaaacttgtctatgttttgcagacaatttcactgaaattggtcctcccaaaaatgcgtgacatcattctgcagcagttgcctgtaaacaatgccacacattttgtcatgtcggcatgctatgggtcaattgtggcagggatcgtgacttttaatgagcgcagtgccgccaataaaaccgacatttcaaatgcgaaaagggtcttgaaaagggcataatatttttcaaatctgtgtaaattcgttcaagattgttcgtaagtttctggctgggcctggactgagtccttcggacaaatcattcgtctctcatctgaataaatcaatttcgtgcagtgttttcgttgacccttcggttggaaattgcttgactgatttggttcgtttgaagcgaattgtcttcattttaaaaaattccaatcggatttcgttcaggattttttcaaagggctcaattcttttgccgataagtgggcggctgctaaagacacaaaacattcgactccgatcagtttttcgttggtcccactgtcttctattatcgacaaaacccgattcaatcccgtctctactcatatgatcggtgatttatttatagttttgattagtcttaattatcccaatgatcagcagatgaacatcagtttgattggttctgtcgtcgtgtgcaaactgtgaatgattatgaatggcggttgcggaaaatccgtcaatcattcaatgaatgttctcccatgttaacgttagattttggcgctttgtttattttcaaaaattgttttagtaatgggcagttggacgacgcccaacaaatttttgaacagttggaagcgaagaaaaacattttttacgactcactaaaagatttcatcgtggatttgcgagtgtgcaaagatgaacgtccgaaggaggccatggtgcaaagggcggtcgagaattacgtgcagttctgtcaatgcgtagttggtcattatgaagcgttggtgaaagagaagaaggaaatggtcaacgaattgaagcaaaaagggaaattcttt

SEQ ID NO: 6726 - DNA, 2961 bp, Heterodera glycines
gggagacaattgactaattatataagataatcatgcgcatattgaatgaatgaatgcttaacgcttgcgatgatcaatcaccccactgatcagagagtgattaggaattgatagatgtttttgaattgaactgctagcaaatagtgctgatgatttatttaatgatagactagcagttttcaaacaaaaatcgtgataaacaattaaaataaagaaaaatacgagaaaaataatgaaaattgaaacgtaaaaaacaattaaatgtattagataaacaattaaagaaaaacccaaacaagagaatcaaataaataaccaattcataataaaatggaaaaaataaattaataattatgataaaaagtttaaagcaataaacagggcccaaaatttctggcaaaatttgcgaacaaaaaaattttcattttaaatttaattattagaaattaataaaatttaattttcgcatatttcttttcttaaaatctgagccctgcttgataactagagaccgacttttgaggcatatgctatattaagcataaaacgcattttccgcttggtttgaggcttctatgtacgttgacttttattatgctttttttgcctttttcgggattttcgtgttttaaatgatgcctttttggcattttgctgttttgaagatcgactttttagaaattttttaaaaatacacccccaaaaatatgaaaaatttgagttttcatcggtcattttggcattttaataaataattttgccattttttgcgaacttttctttttatttaatgagaattttttttcgaaattttgacaaacttggaagtattttatatacaatggacgacaataaaaatttgcatttttaagttttaaatccattttttggttgtttattgtactttttataatttggcagtttttagtccatattttggtccatatttggccatttttgtagctttcttcatatttcgggcatttttagtccatattttatgtcatatttgacgttttttagtccatataatttcgagccctagttatggcaattcccatttgaaattgtacgaactgccatcgaccccattttaccaaccgattggcgcccagaaatttttcggattccgaaaatttgcttttttaaatcgacgacgactgaatagcttcaattaaaaacacaaaggctggcagatttaaatcaaaatgttacaaaaattccgagtttttctcaaattcattcgacatttatacagcgactcacaaattatatgtacaatcagagatatttggaacatattacagacaaatcggatcaaatagaaatggtgggcataataagatacaatacattagtgatcaattaatgtcttccgaataaatccatccgccgcttttggccagcgattcgctctctctgtgctgctgtcacatctgttgctgatcattttgctgtctgaaaaatgggaaaaaacatttatttttgatcaaaaataacaatttttctttacccatcggtgccttccgcgtgttgcccattgtccgtcgccgtagtacgaaaaatggccatcatttcggcatgtccggtcagtaccgctatatcctgcgctcgattgcctgaaatgggggaacaaagtgaactaaacgcttcaatttggccacttccgctgctgctcaccggccgtgtcccgttggttaatgtccgcgccgatggccaccaaatgccgtgccatttcagtcttcccactgatcactgcccacatcaaagcgttgtttccaaccacgtcaacatgttgaaggtcggcgccatgttcgatgaggaaattcactgaaaattagggagattacatttttggcactttgccacaattctctcccaccgatggccaaatgtcctttactggcagcgcaaatcactggagtgtatcgctcttggatggtttgttggttgacatctgcggcccactcctccaccagcagacggcacacctccaaactgccgccaatggcagcgctcttaagtgcgaaatggaatcctgaaattaggacaacatttgtggtatggtatttttgggtactgtaacagtaatcccccaccttcgaaatccatttgctcgacatttgcaccatgtgtcagcaacaagcgcacaatgtccacctaaattcaaatggaaatgttggaaaacatttcgccaatggaaatttttccctagatttcccttgtaacacgcgtacatcagtgctgttgccccatcaccattctgcagattgatgttggcaccattctcgacaagaaatgtgactgtggggggaaaaaagacgggaaaaaattacacattttttcaaaatttcgtctctctaccaatttccgtttgcgatcttttgcaagcgtgcatcagcggcgttgtggcaaagtccgtgcccaagtcaatgttggcaccacgcgcgaccagcacacggcacagcggcaaattggcatggcggacagcaaggaaaagaggcgtcatatctgcacaaatggggaaacaccattattttcagggaaagcaaaaatataattattttccggtatccgtttcgaccaattccgcgccgaatccagggacccgaattcgatgcatggtaacaacgatttcatcatcaacaccacccactcactcgtgtttatgttgttcacttggtcagccactggctcatccggatcggcgcccttctccaactgaaactgccatacaaaattagtgccgacggataaaattgttcatttcactaccaagagatcaacaatttcggtgtgttgtcgtaagaaggcagtccaaagagctgatcgtgatcgggtgttgtcgcgctccactgtatcaaccgtccaccgcagcaaaatgttcagttcgtcggcgttcagcgtatcgatcagcacaagaagttgttggatgttgccattgttgatcaagtcgcagaa

SEQ ID NO: 6727 - DNA, 1029 bp, Heterodera glycines
ggaatttcgctttaacaaaagtttttagccctgggaatccagagttatgaagaattttttggcctctgaattgcgatttgtgaaaaatttcggcgttcggtattccgtagttccaaaaaaaaaaaaaattttgtgcctcggaatattgtcgttatttattgggtttactttttagtgatgttttgtgcataattgaatgggaacagcaccgcatgtgctctgtttgcagccatcacaacgtaatgcaaacgaatacaaataacaccgtaattctggcaaataaatgcaatctttgcaacaatatccaacacaacatttggaattataaaacccgttgatgggaaggaaatgatttttgataaaaagaacaatattccgggaaagagctaaacagagaaacatggaaattcaattttaatataaaaaacccgattcattttttggaccaaaactttttttcataactgttaaccaaaatagaccataacttttttacattctatagctcctaagaatcctttataagaattataaaatttcaaaaaatttaatccgtttcagaaaagcaatgacgaaaaaaattgaaacattcactttttcccactttttgacatctgaatcattggtgaaattttttttttaacttcgtatacgaatggatgacactttgagctatcgaatgatactaataatgtttaatttaggtgtgtctagaaaattcttttctcacggttttctttactcaatatacaacatttcacaggttgagtgataaaacccgcgtgatcaagatcgcttctgatcgcgtccattctgattataccataccttgctgatcaccatgtacaatgtcaggcgttctcgagccaacctgtacattggaaaagcgcacaaaatcataaatgctatacaaatcagcaaatttgtgatccgaaaggcgtcgcgcactttcgacagagtcgtcaacttatttatgacagtgcaattcatttgctgttttgacaaaaatcaggtaaataaatttatttg

SEQ ID NO: 6728 - DNA, 2479 bp, Heterodera glycines
taaataaatttatttggaatttttcggtggcgcaaaacataacattaaatttcattgaatttcacaaaatgagatgttgaaaaattgaacaattttgggattagaaatatttctttgttttttacacgcaatcagtgcccattcttttttttataatcaaataccaccaatttatttaaaatttttggctactgtaattcatactaaatcggtcaaataaaataaagacatatgaatttaaaaatcagattattttatatagcatatataaatgggatttatattctcttcacaattgtggggggggggggaattattaaaacaaaatgtttatacttattgagatgagcattgtgtgtgtgtggccaatttgcgtgattattaaaacaaatatttatacttaatgagcattgtgtgtgtggccaatttgcgtgattattaaaacaaatatttatacttaatgagcattgggtgtgtggccaatttgagtgatggctttattttttaaactttacaaacttgtcgtgaaattttaatgagttttaatgagatatgattgcaaaaaatagatgtaaaaattctcattaaaaatttataaacaaatttttgctccaaaatgtagtattagaagaaaaaaaattattaaaatcaatggaaatctcaattatttccaaaatatgatgctattgtccactcggattttgccaaaaatctgtttatagccgatggtggtgagtttcatgaaagtgtttattatgagttcaatggtaaatgtttttattagggttaggtcgggaccgggaccaaaacacggacaactgagtaccaaggtcccggtttgactagttttgaccggaaccgggaaattcctggcttttttcccggttttccccgccaaaaagtcccggtttttcaacccgtaaagtcacggtcccggttttgcccaatattccggtcccgacctaccctaattttatcaccagttaaaatcaaaactgaatatttataaaatgcatatttaaaaacattttaaatgcacatcgcccatctgttctctttaaatctttttttaagaaaattttggcgcaaatttcaaaatttatgaaaaaaaccttaattaatttattgaattaactaattaataagttactcaattttcttattatttcaatcattaattaatattcagttacccattttactggaaaagaaaacaattttggcttgaatttatttgtcgatcaatgagagtaagtagcagctccctccgtagtaaactacctaattaattgcttgcaaatagaaccttaattcttttaaaaacggagcttaattgaaccaataaaagtatcaataacgttaatatatacaaaaaatcattcttttatctttttttaaatatttatacaaaaataaattaatttaaagccggcaattttaaaataattaaaaaatttgttacagattaacactaaattaaaaattctattttgaagttatttttggttaaagttgaccaaaacgtttaccttctgatagagctctttaaataagaaaactcataaatttaaaattgatttttttttaagtgcttgccatcaattgattaatgtggcatttttcgattggcattgctgtcatttttggtacgctctgttgctcaaacggaaacggttcgttcagtatatatagttaacaactatgatttttaaactatttataccattttcaataaattgcactaaccaaaattgagaatgatttttctaattttttttcgaaatatatgaaatttccttgtccacgagtcaatcatgttcattcccggcaattaaatggacaattgttccttttttaagtgttcaatgacgtcgaaggtttcgtgtccgagttcgcctcaatgacggatgcgggggcagatgtgctcgaaaaactcggccacattggaaaggggacattcagtctcttaaaattcgccggctgttaaaattttttcagatatttgcaccaagtggttgtttgtcctgcttggcaacaaaataaattttttcttatgaaatgcttcgacagcgcatcatgcgccgccatttttgccgaagggagttcacattgtcgtgacaaggatcgatgaaatggagcattcccttggagagcgttttagatccgcgcatgaacaagtcgacatttatagggcaaaacttcaaaaagaaatcatggttcgttttggctgaaatttattttcttttagtatttttggcatttattctgtctgcaaaataattctctaaaaattggcttaataatttcaaaaatatactcccaataatgggagagttttctaagctgcagaaaatttttgttttcctatgccaaacttttaaaatattttaaaaatccttaagaaatatcaaaatttcatgcctattttggcatttttatgtgtttctagcgattttcaaaaatgaactcacattaaatt

SEQ ID NO: 6729 - DNA, 1418 bp, Heterodera glycines
atctttgcacaatttgtcattccttttagcaatgcacagtgtaaccggaattgccggtccaatcattcatggattatacgcctataacaatcaaacggaagctgttgatgacccattttattccgttgccaataaatacaaaattattttcctgttatgattcaaagtgggcaaaaagccttgtaagcaatgtgtttattataagtgtgttcacatttttccctaaaaattgtagatttagacaaacaatattaatcaatcagtttcatattgttattttagtataattgaaaggataaaatatcttataaaatttctaatacaaattaatgcttttgatttatatttaaaaattataacaaagaagaataattgggagatgaaacttagtcttcgtttttgtcatgccaaggcattaatcacatgaacacagttttattttatctgcttccaactttgccgtcccgctcaatgctgttgggcttcttcgtccaccgttttaccgtgcacataaaatttgtttgaataaaatccgagcacaccaccaacagcagcacagtctgtaccactgcttaaactgttggttgtgatgttgttgatgttgggcatctgcagcatgtccaggaccttgtcgaactgctcggcttcacttaaaatatgaaaaatgtttttataatttaaatgcatgtctttgtcgaattatttttaaaatgaataataaaaaaggattttatttaaaaaacaaatgatcaattttttgaatatttgttttgatattcaatttgtcttgccttgaactgatcagctttaaaaaatttaccttaaaatttattattcatttctgatttaaattgaaaaaaattattttaataatgaaaaaatttgccacctaattagtgtacacacaccaacaatcattttagacaatgttggcattcggcttgtgtttgtagtacacagacggcactgaatccaatgccaaccgccacgaccattcaacaatcggagaaaagcactgagtgcttggcctcctcgtaaggcttaattttttttttgaaaaatttgtcaatttgccaaccctgagtcctcaattacggtgggggttaacttggcctcaatcaaataggccaaggcgctatttttgggggtgtattccagggatgggccaaattaaaagataaaaagcgaaatgcgaaaagcgaaatttgcgaaactgaaaaatgcgaaatgaaaaaaaagcgaaatgcgaaaagccaaaatatgcgaaaatgcgaaatgcgaaaagcgaaattttttctacaactttttaatagttaaaatcataaagcaaaaatcattttttaaaattttattccaaattaaaaaatcaataaaacgcttttttgaggcgcgctttttccaaaaaaactttttgggaa

SEQ ID NO: 6730 - DNA, 2608 bp, Heterodera glycines
gagaacagtttttcatcaaaataccaaaattttgcattttgggccattttctaagaaaaaataggtgttttgggggcgcggcggtgccgataggcgccccccggggggggaaaaatggaaattttgatcatttataaacaggtttttactgaaaattagccaatttataggtaaaattttgaaaaattttatgggaatttaatccaattcttaggggtgtaaaagtcgcatttcgcgccaaaaagcgaaatgcgaaaagcgaaatgcgaaacgccaaaaatgcgaataatgcgaaatgcgaaaagcgaaacctaggcacatccctggtgtattccttttatgattaaccgaatagaaaaaaaaattgatttattcggtagccctaagttctttgcattttcctggtaaattttaataaatttcatcaaggtatgttcagaaatttttttttaatatttttgaccaatcttttagacataatcaaaattgtccaattggaataaaaataaagtacaatatggctatcgaggccaatcattttttcaattcggtccactatgaaagaagttctacccctaaaactggcccggggcccaattggtcgggacccagtcgagtcggtccgaacaattaccatgttatccttatgcaggccctccctattcgacagtggaatttacaaatttgagaattcaaattcaccctaagaacagagaaatccaagaaaattataatccaaaattgagacaatcagcggtacttgaactaactaacctgtctgctggacctgaattttatttatgcactattatcttttttttaaatttttgtttaaacttcgctcaattgttgcacatcggccggatggatgaaggaaaacagtgattggttcagcaaaaaattcggcattaattcagtcacttcagtgaaactgaaaaaataaaaattttttttttagttatttttaatttgaaaattaccgattgtcaacaaaaattaattggagtgctggggtagcacgaaacatgaacattgatgaactgtaaaaaattttttttttaaatcgaatattttttagcctaaccaaagtcgaagttcgttgagaccgtatggcactgatggttgaccgtaacccttcaacaaactaggtttttacgttcaaccaaaagatatgataaaattattttacgaattgtttttaaattaaaaatttattttatattccataggtttttatacaaatttttaatttcaaaaaatttgtaattaacccatataacaaattaaaaaataattaaaaaaggtttatcataatattgatgtactcactctctcacttaattttagaattaaaaatcactcaaaaaaatttggaaaaaatttcatttcggaatttggattaaaaaaacgtaaaaaacaacaaacttgaaattaaataaaaatatatggcttataaaaattttccaaagctttctcttttgaattatatatgaaaattaacgcacaattaattgagagatttaaaaacagcaaacaaaaaattttcaacaccctacttttgagaacattttttttccttcctagtacggtaggtctcttttccataattaccatgcctttaccaagaatctcccatcatcgtcagcgtgcagcgtgccgacaaagtgaattggcttatagccgggctgcatgccaatgccattgcatcccatcattgcgcgccggcctggcgtacagcggaagcgcagtgtgaagcgcagctcgggttgcaggacaagcaacgcgcttgcaggcaaatttagtgcaagctgattatgcagcaaggtcgcgtcatccggatgcacgaactcggcaagcgaaatgccggcaagttccacctatcaattgcatcattagtactaattatacctgattaatctctataagaacactcaaaaaattttttgtattagttcgtctcataattatttgcagctccttaatataattggcagaatttttgaattcttctctcacttttctgaatattattggtgtcattctatttaaaattaattggtcagtaaactctgatcacgcgacgcgtttttcggaaaatttatttatgaaaatttttatcaaaattttatttaaattaagtgatattttagggagatgtaaataatttttagaagatctaataaaaatttaaaaaggtaagattttattttttcgacaaaataataacttactaaaggaaaaaatgtaataaaatttaattccaaaatttattattgcgttttcatcatcatttaataaatatgtttgctgcttgcctgagctaagccaagatgtacagcaacagtttcgcttgtgtaaatcactttgccttcacagtcaagaacgatcacaaaaccgtccattgcctttttttaaatgagtgattgatattagaatcatctgctgatctacccattttctattatttaattgtgaatctaattaattatatatttaattatggaatagggtccaaaatgcagaaaattaatttattctgtattaaattttttagcatacagtaacagggttgttccgggtcacccgaatccagaaacccgaatcccga

SEQ ID NO: 6731 - DNA, 1308 bp, Heterodera glycines
ttttaacccggtacacaacttacgcggacgtccgccgtttgctcgtgtcgcgtttgccgtgcgtttgcgactcgagcaactcgccgcgagctttgtcttcttcgtgagtttttgtcattccctcagcctttcttcattcgaacaattcctgtgattttcagttccgccgtcgtttcgggaatcaatagaggcacaaacaacgaagaaacacccgttgatattggcacatcatacacacagacatttttgaaaatgaataaaatttgattatttcgctttttttgcttccgccctccctcccccccccccacttttcaacacaaacgttaagaaacaattttaagggaggacaattctccactattaccgagttagcaaccccaattttggtaatagttaggatttggctccctttttcaaaaaatttttcgacataagcacactaaatctaatggaagttttcaataaacccggtgggaagcaatcaatcgatcatttttcacaatttgattgtagcctcttttcctttattttgacatttttttctacacaaatgtgccatggattaagtttatacagtcgttgaatcatacacatacacagtaatcgatgatagatgaatgaatgatacagtatcatcatgatacatacacatcattttttgaatctttctcatttctgctgatcaataatcaatcgaaggcgcgaagagatacgaggaaaaaaagaatttggaaagaagaaaaagtgaatgaagagacttttcgctaaaatagacaaatgaaagtcagacaaagaaatcaatgcaaaagcatactgtacatttgtgtatggtatatgggcatggtatatatgaagaacactgtattggttaaactacggtacacacgaacacacataaaataatatataatacatacatatataataataatattgtaatattcagccaaaaaatgcgacaaaaaaaaagaaaataaagcgaacttaaaacgatggcgcgggtagaacacaaaaatacaccaatttttttaagagaaaatagcattttgtgctgaaaatattccaaaaattaagcgaaatttttactaaaatccacaaaacaatttttatgtgaaaagctagggaaaatctacaaaaaagattttccgaaccaataaaaaattttatgcaaaatccgaattttggtcatttttcgttttttttaattatgttctacccgtacgaagcgatagatttgctgcaaacgaatcagctataagtctatgttctgttttttgatgggttggtgttttttgtgacaaaatg

SEQ ID NO: 6732 - DNA, 3883 bp, Heterodera glycines
ggggggggggggggggcgaaaaaccaacgggcacgagtgctcaaaactcataaacaccctgctggacccaggccattttcggcaacctctggatttttcctgggcctggaatttcacggttttatacggaaaatccaagtgcagatgaggaccaacataaaattcaaccagacacgtccagacttttctccaaataatttttctttcgttgtccaattctcgtttccttctcctctctgaaaagtttccaaatccttttttttaaagtttttcggagatgggcgcacttttagcaaagtgtaaccgaaatttaccaccaatatttttatttatttaaaaatccaaaaacaaaaacaaatgcacacacccaacacgagggaggtcgctttgctggcgatgacaaacggtttgattgctgacggagtcatgtgccgcagcacgcccatgcccagcccgccgagtgcccggtcttcagcagcggccgcctgcagtgtttgtgccgtgtccaaaacgccctttaaaataaattaaattttttttttaaattttcggatttgggcaagacttaggcggtggatttaggcgtccaaaaacgggataaacaacaatttgaacaccacccacctctctgacggcgttgtaggccaacgaaaagccttcacggaggtcgccggccacttggacacgctgcggaccgctgaggaggcgccggtggcgttggaagttcgggttgacaatgtcaaaggccaactccgcaacattctgcaaatgattattatgaatgatttaattaataactaataatatttaataaaatacaaaaataaataaagaaatcatttaagacaacaataaaaaataaattgaaaatttttattgccttaacaattttaaacaaattaaacatattttgtgggaaagtaaaattggcaaatttgcctcttttcatttcagtgactataaatggcgcacaaatatgttcagaaaattcgataaaaatggtttatcaaagttaatgagtttttcccctcatttgttttactagtaaaatcgacatttgtctcattataactaattttccattttttttttaaattgactttattcttgacatgggttcggatccacccgacggaaagtgaaattttttcactggacattgttttttttttaatttttgaaatttaaaaaccaaatcacaaattattttaattatgctattgccatcaaagaggtaattaagcaacaaaatgtgccgcaaaacacttgcctggaccagtccgaccacccgttgggtggcgtcaatggccgccgtggcggcgttcagcccaaaactggtggtgccccgttgaatgccgcggatcagctggccattctcttttctcagctcatcatagggcagggcgaacagatcgtgaaagccttgcgcttaaagcgttaaaatgtcataaaaataattaattaattaccctaattagataaaataatttgtttatttacccaattggacgagcgcattaattggcgccaaactgccgaccacatttgggaattgtttgttcattatgtccttcacccattcattgatgacaaactgtaaataagagaaagaaggctaaaatgggtgcatgacgtttctcccccgcgttgaaattttttttttcaaattttgaaatttaagaaaaaaaattttttttggaattttttttaatgattttttcaatttttaagatgaaatctaagttttttcaaaaatcttttttttatttaaatgattttttgaaaattttaaaaatttgaaaaaaaattcgggaaaagtgatttttcgaaactttttataacatagttttttatgtgtttttttttaattaatttaaaacaatggtttttctttaaaaattatatttaaacaacagaattttgtgcttcagcttcatttttgtcgtctcttcacattctttttgttttacctgtgcacatttttcaatgccaagaaagccccgttcaatgcgcatttccttcagcgtcagttccgttttgttcaaatttgccattccgatcaaaaagccgatcagcgcgccctgctgatcagttttcacgcgttttgcctcgtagtcaatgcgcaacaaacaggcgggggagaaggagaaatccctgtggcaaattaattaattgactgattaaacaacaaaaataggtagcatgaatactaattagtgccctaaaattttcgagaaaatttttcgatttcttaaatttgtaattgccggagagagcgaaagggagatttcgtcagctttctttagggtccgttttcgttcaatttttgattgcaggcccatccataaccatggagaaagggcgaatgcaaaaaaaaaaaattgaaataaattaaatgcttaaacaaaatgacaatgaaatactcatttttttgggggggggaagactttcaattcccaggcctatcaaaaaaaaaatttcgtttttctagttagggctgggcccgtcgaattttttctttgtattttgatggcccaagagatacacattcttcttcatttcgttggggtctaacatgaatatgaacaaatagggattatgaatgaatgatgcccacttgatgaatgtgtctttggccgcaagtccgcccgtggatgggcccgcttttgcggtgctgtcgctggtgtccgattcgtcatcctcctcttcaccctcctcatcctcctcctgctgctgctgctgtttctgttgctgttcgttggcatcggccaaattcagttttgcacaaaacgaatcgctaaagtgcacgtcgtcttcagagaagagacgtgctgcaaaatttggaaacaatccgtaaaatgtacaaaaagtgtaaatgggttgtgttaaagattttttaaattgtattccgcaaactatcaaatcatttaaaattaatgaaaacaataattagcagtaaaaatttcaaaatattttattaattaattttgggatgaattttttgattcttttttgtgtaaacaacaaaatttttgaaaaaaaaatttcctttctcgactcgcgagtcgaaaaatttctccggttttttttgagctcgcgcaactctcagtggtgggtcaattcccggtctcggttctcgagtcacagaaaatttcgactctcgagcaaccatttcaattttctctccaagaaatttttttttaaaaaatagccaataaaacaatatgtccttcgtgttgcttaattatcccctaattcttgatcccgacattttattcataaattcctgtccttttaattgttcatcccaaccgaacctacccaatgtgtttgtgtcctcctcctcttcttcatgctcctcgtccaccaacagttcgtccctcgttttgagcactttgaatgacacgcacagctcgcctctgtccggcgacgacttattgttagcagcagcagccaatttgggataaagcccatccggcgacgaagagccgctcaaattttttgccccttttgtcgtcgtcttcgtttttctgccgccatttttctgctccggtgcccccgccgtttttggcattttgttgttgttggttgctgcattgttggcattttccattcccggacccctgcctttggccacttccatcaatgggatgtcgtccgaaatggtgccaatgccgccgacgccacaaccgctgccaatgccggcaccgttttttggacttcgcgtcaccgggaagtcaaaggtggcacgcagactttgcatcacatcagttttgaagtccatcaaaaattcgatggtgtcctggtcaatgttcatccgaatgggggccaacgacaggcgcagaattgcctcgcgtaaagggtcttcaatcagatagccgga

SEQ ID NO: 6733 - DNA, 2908 bp, Heterodera glycines
tgcaatgtctccgattcgttgtccatccattccaaaacttcctttgcacttttcgatacatttgtgccgctcctcgtcgctctctttgcccttggctagctgttcaccctccattgtgtgctgggttttaaagcagtactcctcgaaagcgttcttcgcatccgatcgttgtttgtcgcgtaggtcggccgtctgcatttcttgctgaacagccaaatgcacgagacaaaaaaaaaattggactcacttcggctctgatctcctcttttaacttctcttcgtccgaaagtgccgatgggtcgattggcatttcgtagcgatcgatcacaatgaatttcttcacctgataagccgggtaaagcatggccgaacgaagagcacatccgcgggcctaagagaagttccgttcgttttttgagtccaaggccactcaccaaagcatcgtcctgattcattgtcgtttttggcaccttcttgaaaaactcttaaaatagccgacttttattcatccttttaatgattttccaaatttactacctgccacaatttgtttgatgcgcggaattcgcgacgaccccccgaccaattcgacgtcgaaaatatcgccgacctaaaaacttgttatttttaattgactgtttttgtttaccttcacattcgcgtcactaatgagctgttggagcagtgcctgcactttttggaagagtttctccgccaattgttcgaattggtccctaatttgtaattatttgatgactatttttgtttcaaaattcagcagagggggaaaacgcttacgcgtcccatggactttcatacatcctaaaacaactcaggtactgtcccaccacccacctttgcatcactccgttgacgtcggtgtctttcacaaagcattcgattgcaaagggaatgggctgactgtttgccgacatttgctttttgatctgaaagttctaattcgtttgtgcctttcattgtcaatgccttttcgcattcatccaacaaacggagccacgcccgcggggttttcctcgcgtcgattttgaagcgtttgccaaagtcctcattgaaatagtcgcgcaacaacgcatcgaaatggacgcccccaacggtcaaatcgaaagaggcggcgagcacctaaaatggaaataattaaggagtttacaacattcgcctgctgacctccgctttgccggcgctgaatgcaataagactggcttgaacagacgaatggccgacatcgacaaacgcaacaagccgagcgggctgttcaggtggaggaagactgaaagaggagaatgaaaaatgcgtgttaaaaagagggttttacaattggaaaagttggaaaaataatcaaatttatataatacaaggtaagttttaaatttcattttcttatgtttatcaaagccaaaaaagaattaatgccgataaaaaaagttgccaggtcccactccaacttttttggtgatgggcctgtccctcactcactttgccccgttatacatgccgtaacaataggccaacgcggccgggtccgtgatcaggcgaagtgaaaggccagcaattcgacccgcattcagcaaagcgcggcgttggttttcctcgtagaaaaacgggacctgaaggagaacaaactgttgggttattgaagagcatttttaacacccaaaactattcctatccgcccatcctttttggtaccgaaaagaaagatctcacattaatgacgcattcagtggcatccgtcccgagagaacggctgagctgaacccgcaaatgtgtcaacagacaggcgaccacctgttccggggaaagcactcgcgtcgtgcccaaatgagtgacctaagaaaacacatttcctaattacaaaatgatttgtgacgttttggcacacttttatctcaatttggtcatcggtgaacttccccataagtccgcagggaatgtgctgacgaaatgtctgcacgactttgtcattgaaagtgcgtccgaggatgtgcttgaaattcacgacactgttcccgtaattgacgttcagctgctgcttggccccgaaacccatcatccgagcgaattgtccaaaggaaacgcacgaactgaaaacaaaagacattcggacaaatgcaaaaatggaaaatgggagacggaacttacggcgtggcatgcaaagagtaatcattctcaacaatttctaaaacatttaagaattgtcagaaatgttttgtatattttcccaccgattcctttgttccgcgccacagccatgtaacaagtcaaattcccaaagtcaatcccagccattaaaatgagtattaagctttaaagaagggggataagtgacagtaagcagaaaaagtctgattaataaggggtggaggatctactgcagtcttacacgactataaaataacatgacgactttaaggctatccaaaaagacgggtacattcgataatcggtaactctaaaattctctattaggttacctacctatctataatttcagtttcatttggtttcagaaaaaatgggtaataaatagggttctagtcggttttaagttgagactttatttttgtatttctttttaacacttttctaggggtgttttgaggcgctgagaacgaatccggcttccatttcgaccaattccgaatccctaccccgaacatttttcgagaattaaattttaaattttttaaaaatttctcttaaaacatgtttcttagtgttttcattagtcaaaaaccatttcaaaaccaaaaaatggtcattctgtaaagatacgaacataaaagtgaattttgataattttgaattttcggttttttgtccgagttcgggtccggtatttgaaattagtcaaaatgaatatcagattcgtgatcagcaaccccgaaaa

SEQ ID NO: 6734 - DNA, 2734 bp, Heterodera glycines
  unsure (1)..(2734): unsure at all n locations
gtcccatcccttaacatttatgaacttcttcgttaggatttttattgtctttttgctaacagtcggaacgaaatgcggtctctttccacaatataagcgggagcagtgaatggtagtgagaaaatgcggtgagcaatgtatttgtgcaaaagttgtgtgttcaggtcgtcgttagccgaagtgtaaatataaaatggaataattaatttggggtttcttccattttcctaccaatgcggcgccatgttgaagacaaaacttgcgcacatggtattggagccggtcgagctgttctgcgcttaggtccatttgcatgtcgctttgttgattgccacgatgagaatgacaccgcaattctcctctaaaatccctttctccggcggcaacaaaagtggcgacgaatccaagtcattggcagtgccattcatcccaaccccgcccaaaatagaaatattcgctccccttttcttacgtgcttgtcgcgcctggacaatttcctccggctggtagtgtaatcggatttgctcgtcaagtagccgataccatttggacaatgccggcattatgttgcccggctgttccatggacgcgcaaaggcacaccacacacttggacagagacggcgggaaggtaaagcgaagcagcggagcgcactcgtccttcccgtcaagtatccaaagcggaaggtctgtcgagtcggtcggaccaaggaggccattcgcggcaccacctccaaaacgacaaaaattacagcgatacgccaaatactttcgtagtttctttttgtcttctcaacctcccagctgatatgcatagctggcgtctgtatccgcttgaatttgcaggtaattgtactccagcactgagctctgtccggatcgttcacctcgcgtcagacgattcgccaacagactttttccacaacgctcattccctggaaaaattacctattaaatcacaacataaaagcgttttttttatatttttataaaagttggcttagaaaaaattaagttatttttaaaaaagttaaatttttaaatgagtagatcaatgaatttgtttatcatggttcatatgaggtcattagcatatactgttagaacaattacaaaacaccgaccgagcagcacaacgctagctcgtacgacagtgttactcttggaactgacttcctgaagagttcgcaaccttaaaattttaaattcttcattcattgtatattccaattatggtaatacttgagaattgcggtcggggtcgttttcgcgtggccgttttcgcgtggccattttcgcgtgagggccattttcgcgtggccgttttcgcgtggttgcatataagcgaattttttatttttattttttatattttgaaaaaatttttcactcccgttttacttcgggtgcttaattcaatctatatttaagtgaattttataaactaaattaatactgacaaattattatacagtctaataattttttcacggtctaatgctctgctggtattagtgtaaactaaccatcccaaatgaatttggtataaaaattttctctttctggcaggcttatttatcataatttaaaaaaaatttccaaaccctattacagaattttttctatataaaattgagttatttgtgcgtaaaatgtttggggcattacttttgtacggcaaaaaattgaacaaaacaattaagactttccaatgggttaatctcttggatatttatgtgaaaagaagagtcctccgccccggaaaaagaaaaaaattaaagaaatgtcgtgatgccgatggtcgaattctgtgtctcattcacgctgtcaatacttgaagttgttaatctttgcaagcataaaaatgaggacgcttttgagtaaataaaagcaaaaaattgtttgaaatcgggtttgggattcgaaataggtcgaaatgtatgttcggcacacatccgaccaatttcagtcctaataggcactcacgcgaaaacgtaccccacgcgaaaacgggccacgcgaaaacgtcctgcccccccccccactaattaggctatggagaagccaggaaaaaaacatgtatttacataaaattagcagccctacttatgaataattatatttatttgtgtcatttattatttgacatttctttctctcttcttctttcatcaccattttgttgttattggcaatggttttgaataagttggcaaattagtgtgtttgactgtctttgcgtgcaatggcaccacttgttgaatgttcgtagtagccatagaattggtggacgacagaaaacggatttccttctggatttctcttcgatattcagtgctaaatgagtatacacaaaataataatgtgtaaaaattgacaaatagaacaaaacttcaaaataataaattaatcaaaaatgccgaatttcaaaaatttttacaaaaataaaaacaaaagttgttgattttttggtgttttaagaaaatttcatttttctttgtttttttttgtaagtcctagaaaagaatgaaaaatatcttttacaaaactccaaaaatggatacattttttgattttgggattatttttgaaaatttgaaggaccatttgtgcaacttcctacaaaaattcttaaaaatatgataatttttggattanatggataaaaatgcacaattctccaccctgatatgtacagaatcggcgtggtcgctgccgccccatgttcaccaaaa

SEQ ID NO: 6735 - DNA, 1527 bp, Heterodera glycines
ttttatgccaacatatggtccacctagaaatgggggccaccacgcagttcaactaacacccaaccagtaacagctgacacttttcttcaagtttggtatcattggaaagcccactaaaaatgctacagaattgcttttgacttttacccaatttgggcctttcaaattaatttcaaaaaaaaaattatgctaaactaaagaaacacataataatttaaacatggaaattaacaaaatgaactcatatccctcattttaaatacgctgaatatttcaataaattaaaaatagtttgaaaaggttattactacataattatttcaataaacaattaaataattttagatatgcaaaaatttaattataattacttttttaaatttatgtgaatcgatgtgcttaaataaaacattttatgaataaaataaactaatgaatcaaatgaaatttaaagatatgtgttaaaaattgaaagaaaaaatgtaaaataacatagaatgtatttatataatgaaaaacaaagtataatatgttaacgaaaataacaaatgaaaaaatgcacaaactgtcaaaccaaattattttatttaaaattaaatgattatcgactttattttgtaaattatgtttaaataaaggcatattagagaaaagaattgagaactttttttgttcgaaaacaagagaataaataattaggtatctttaatttaaataaaaaacaagaattcttaattttagcgaattgtaaagaaataattatatattttttattataaaaaatcaaatattgtaataaattacttaataactaaatgaaaaattaataatttataaaaactcaaaatttgtattataataattcaacagacaaacccaaaaccataaattagaaataattttaattaattattcaactattaaataatctttaaaatttgtaatgtaatattagggatggatattacgcaaaacgatgaatcgaatgagcaaaaaaccattgtttgcacttgagtaaatattgcaaatatcctataaaaaataataaacgaattcatgcataataataaataaataaataaataattcataaaagttttaaattttatttattatggcggttttcttcttttaatggttatcaattctgaatgtgtcgcagtgacaagcaaagggatggtttattacgtgtatttaataaagtttttatgaatacaaaacggacttatcatataattggataaaaattaatttgacttaaactgtttgacgacgcctttaataaaatttaaatacattatttatataatcaatttggcaggaagaagaaaaaaaataagttcatataaaagcatatttttggggttttcgagaataaatgcatattttgccatttttgaatttttagagcatattttggtcattttttggaaattttcacaagaaaaatgcgaaatagcgaaaaatacaccccctaaggatcgactttttgaaattaaaaaaaatatacccttaaaaaccgaaaaa

SEQ ID NO: 6736 - DNA, 6047 bp, Heterodera glycines
atgataataagtataagttttaaaattagaaaaataaataatttattttatttaaacctagataaacgatccaataaaattcttaaataataatagttaagcttaatgtatacgctaatttaaggccgatgacttcaaaatcatttacgaagaatattacccattttaaacaatcaacagacaaattatctattcaatacaatgaaatttgttaatattggtaattaaaagtactggaaattatacaattgacaaatattaaattctttttatttacatttttgttatgtatctaaaattttggccatttatttatatgtaaacattaatctaatagaaaccttaacaattactaattagcaataatattttaaaaatatctataaaaaattaaaaagtgtaaatttaacggaattaaacaaccttgtttaaaaaataaaaaggagcagtctgcactccaaaatataaatatttaaaagttcaaaaaaataattataaatactaaaataaaaagaatgtatgtgtaaatgaaatattttctatagaaattaattaataaaatttttaaatcatataaaaaaccgacagtttaaacaaaatagtaaatgacatcttaagtacaaaaatattatttttccaatttatattctatggaagataaaaataaacataagaatttaataaaacaaaataagtaaatttaatgacatttttaaaattaaaagtggagaatcttcttttaatatattagtcaaaatcagataaaaaattctgttaatttgtaataatttttgtatatagaaataaaagcaaaggtaagaaatttaaaattaatgtttacaagcaaattgacaattaaaatatgtaatttcaaaaaggaataacaatatatcggcgagctagttatcgaaaaattaataattcaagttagtaaattatttaattttgctaataaatagcatatttaatttcataataataacagaaaatatttttttataaatttacaaaaaaaaattaaatacttgaaaaacaatatgatctgaatttcttgattaattctgaaatatcacaaagaggacccaagttcattggttaaacgacataagaaacctgggtagactaaattatgataattatcatttatagccttttagtttatcattttgagttttgaatttttcatagttttttttctttatatattttaaaggtgattaatttatgtcatagagggattaggtgcattgatgatttatattgtattattttcaattgtaattcacttattttctttaagcctatttagatttttattttatttatctatgtgttaaaagtttgttttttggtttaccgtcctttgttatattaataaacattttatactatttattttggctattttaacattaagaaagatcgatggcccatataatgttttattttattgattaatatttaaaatcctgatattccagtaaattttctttaaatataattatgcttttattttactgaatttataatatattttataaataaaaatgttttactattcttgtttctcagtacctcattgaaccaatcaatggagaattgtcttggtttcattataggattaacggtgatcaatattaaaaaataacaaaaataataattaaatgattttattaatgccaatgacttcatatcttaaagctttttcgtacgcccttgcttatctcctacaaaaacgtgaaaaaacataaaatttaaataaaacaaaacataattcataatttatgtatatattcattatatttcttaccttgatgatttacctattcaatttatataatgataataatattcacttttatactattatttcaatacttcttcatcatttaaattatatacaattttattgtgattcccatttaaggaattcgtattaaaaaatttatgtatgtattttaaaaggtttcgtttgtacagggcccggatttacatgtcaaagtgaataataaatatataatgaaaaaataattatttataaatatttttgataataaaattattatgaaatacttttttattttaactggtgcctgcctattcttggcggttagccgacttttgcgccgcagacatttgcgccgcgccatttgcgccgcgacacttgcgccgatcagcaaaaaagactcttgcgccgcggacatttgcgccgcgacacttgcgccgcctggcaaaaacgacatttgcgccgcgacatttgcgccgtacagcgaaaaaagacatttgcgctctgattaaaataaagttatgtggtttatagaataagaattgattgatattcattattaattcctttttcgaagcctttcatgtcaattccatttgaagtgcacgtaatgattgatcattttggttttcattgggaccatatgcgataacaagccttcgtattgcctgatcattaagcggcggattttaaacgaaaaaaataggtaaataaataagggcataaaaattgcgaaataatgcgaaaaatggtaaaataggagcgaaaatttgaaaatcagtgcgttttttcaatgaaattaaattaaaatcgatgaaaataacttattgagaaaattaattacaaaggaattgaatttcattcctttttcgaagcaaaaaaataattggggtttctacagaaaattctttttttcagttttttgttagtttgtattcttaatcattttttcatatctttgatgaacctattcaatgttaagattttaatggttaaaaaattgaatgtcaatctttgtgactagtaattttttcgaattttcaattagttatttttgtcgatggcttatagttttagtaaaacttattgataatagtggaatttttatgaatataatatttttgacagcgcggcgcaaaagtccatttttgctgggcggcgcaaatgtcgcggcgcaaatggagcggcgcaaatggcgcggcgcaagtgtcgactttgctgagcggcgcaagtgtccacttttgctgtgcggcgcaaatggcgcggcgcaaatgtctcatcacgcgccgagtcgtaagccgaagcgggaaaagaatttaattaaataaaaataacatttaatagaagaaaaataaatcatttagaaaacattcttccaaaatttgaactaatgattattctattgattttttaaatcgctttttaattgtgcgcgaataaataataaaagtgatttgaaaataaaatgaattttgtatcccgaaattgcaataaataaaatttctatttttgttttattttcttccaattataattaaaataaactaaaaaaatttacttttattttacatatgaattcttgtcgaaggttaaatgcctcaacttatttaaattatatttttcttataaatttaatgaccaactcataaaaaaaggaatatttttgtgagatcagtgtgcaagagaagattaaaaaataaaaacaaaataactacacaacattgccattaaattaaatcattttaaattaaaattaaaatgtttttatttgcccaaacattgaaaacgttgtcaaataatatttaaaataatagcacaaaatcaaagaacatcgaaaataaaactaataaattttaatattaaaataaatttaacaaaaaaggaaaaatttataaattaacataaaaagaaatacaagccaatttgtaaaaagaaatactgtcgacatgagaagattaaataaaaaataaaataaaataattaattccagcaaaattctggggaaaaccattgtcatcttttatcatataaactagagttgcacgggaccgggaattttgacaaaaaccgggaccgagaccctaaaagtcgggaccgggacaatcttttttcgtctaattaaaaataataaacacataaataagaaattaacatataatttaatcaaagatgaaaagccaatttaggaattcaattaattaaaacaaataaaacatatttgtatgtatttgaaaatgaaaataattatatttctttgttgatgaattatttgtataagataaaaaaattaatgctaaaaaggagaaaattattttcaatattccatttaaaacattgtaaaatattcatttatcataaatttacatcaacataactcaactaacttattaatttgaaaaatgtttcggctttcgaaatttttcggaaaaaagaaagatatttattttaaagcattaatcgcctaattatatataaaagcaaagaaatgtgataattcgtttttttctatgggctacaatcggtatgaaatgaatgaaaaaatatattgattgcttttgtgcaatttttgtgagaaaattatgtattattttaaagtatttattttttaggctctaaacccctaaatgatgaaatttggattttgcaggaaattccttagaaaaaaagattcgacctaaaagttcactaaattacttactatttttttcaaaataaggcctaattaatctctttttcaaatgaaaaaaatgtttttgcatcattagcatcgaaaaataaaagaaattgggttttcctatacaaaataataattacagaggtgaacaaaaatatcactatttaaaaatatatgtgaaatctaaaaacataaaaaaatagtaaatattattaaaaaatatttctcataaaattttaattgcaaatattacgtgaaatgcagcattgcctaataaaataaataaataaaaattttcaaaagatattaaatgaagctatttaaaaattcaataagtaaagatgagcaaataaatatgaaatcaaagcaaaattcactttttcaataagaaaatttaaaatcgagttgacaaaaatgcgatttaaaagaataaaataaaagtaaggtcaataggaaaagaaacaagaaaaggtaaaaaataattatagcataagaaacacaataaatattatagtgatgttattttgcattaagaattaattatttatcaaaaagagtgagtaaaaaaagttaataaattaaactttttaattttcaaattgaaatataaaaaaaggaataaaaaagcaaaaaaattaaagaaaattatgttcttggtgttaatgaaacggcaggtttaaaaaattactgcgataaattaaccaatttccatttaaattttctgctttaaaacaaaatcaatttaaatgaaacaatgtttaattttataatgtccatttgtaatatgaaatgtaaaaataaattaaatgaacaaaaacaataaatgatagagaaaattaaagagataaatttgctgtaaaaatctaaatatttatcaaaaataacgtcacgactactacaatatgatttgttctacgaggataagcataaattaaataaaagaaaaaaagaaaaaaacaatcaaacaattaaaaaacatattttttactaaaatactaatattgattcgttctaattttataacgaacatttaacaaaagtttttgacgagtaatataaaattgcgagataataaaaaattaaatattaatacaatcaggtgcaaaagcttatgctcaacagatttttgtttaaaaatccgtttttctataaaatgaatggatataaaaaagccttacttgtacaaaaattaagggcaacaatttggctataaaaatgaaaaaagggacaagattaaccaacattaaaaaagttataggttcgtaaccaatttacccaaattttgatggtgcaaagtatattctcaaaaagttaatcgaaaaatctcagttccaagttggcagaagccaattttattctaattttgcgattttttagccagccgacgacttttttttaatttttaaaaaacattttctgcggcgtggttttttttaaaaaacttttgggagacagggggatttcggcggcgccgatattcgccgcaggaaatttttaaaaattgatttcaatatcttacagatttacaccaaaaaatgattaaatttatgatttttaaccaatttaatgaatttttttgacatattt

SEQ ID NO: 6737 - DNA, 6763 bp, Heterodera glycines
  unsure (1)..(6763): unsure at all n locations
acgggtttttagcccgtgagcccgtaacccgtgtcggtgccaagcccgtgtattgtgaaaattccgatctctacttttgacacttgggctcaccacggatatgtataagttagtgaaaattaccggtgccgttctattctggaattaaccaaaaaattaaatttatatataatatttattatcataatgggcaaatctgagaaaaatgtccgggacgacaaagaagtgaacgaacaataaaaacaaacattgaaaagggataagcaaatggtccgacatcacaaaaaataataaaaatcaaatttaggtcaacgatttgggggattaacttaaaaatttgcgaagattcatcagtttaagccaacaaaaggtaataaatgatggcaacaatgacagcaaagagcaacgcatacaccagcatttccacggggctgttcctaaagaacggagggaaaattaaattgataaaacaaaggagaagcacaattggaggcattttccttctttttttgaatggagtttgtggaacacacaatgagtgcttttcattttacaccaaattttatattctggtcattaccttttttccgattggtccatcgttttgtctgcgcccgtctctcttttgtcgtaactgtacttccaatgttcggactgaattaacaatatttcctatttttaattaaactttttcctaacctcgacaatttctcccactagaaaatcttctttcatttgcctggcgtccgtagaatggcctaaattttgaataattccattatattttattaaaacattgtcatttaccgatgtcttcgaatgcctcggttcgatcttcgcccgctttttccattaaaacttccattccgccggggtgttcgtccagaaatttggtcacatcgtaaacctaaataaaatatggcataattttatggggataaacttatgaatttgtattgttttttctcatcctttgaaggaataaatccgtttgagaaattgacaattagctcgcattttacgcccacaaaacagtaaaattgtagtcaaagataagtgcttttttttcgtttacaaatctaactttgttgccaataattatccatgcatcgctactgttattgtgttccgccacttccgcgcgagtcaatcttcgactagcagtcatttttgggttgttgggacaggctgaaatatgttgaaagtatttatgaagaaaattgtgtgagtccaactcaaaacaaattcggaaattaggtaccaataaaggagcgcaccttcggtatgccgttgaaattcggaggagaagtcacgaaatgaagtgaacaaaagtgcggaggagaaagaaacggaaggaagagaaggatgaggagagattgaacgagataacagcgaaacgatcggtcgatacaatgacataaatgaaatgttaagtgaatgacgagggggggggggggggaaggacggacgatggggcgactgaaaagagcagggaaaagagggaggaaagagagaaagacccaaattggatgatcggattggagaggaaaattggaagggagttgctgattagaaggtaaactcagaaaaaagggaggacaaaatcggaagagttggagggagcgacaaattaagacacgaacaaatacaaaacataaaagtgttcgggttggggtgtttgcgttcagcaacttttgcattgagcggtggagagatgttgtttcagtacaaagaatgggccgatatatttaaagtacatgaaacatatacatacaacagaaactaatgaaagacacaaaatgttccgattttttaatttaaaatattttaaaatggcaattttttgtctatgcgtcgtatttttctcagagatggcaaatttgaaatttgtaattcaatagttttgtttttaatgcttttcagctctttcttttggccgtcctttcaaatgtcccgagtgattgtctcctattttcgtcagtattcgctcaaggattggcgcaattattttctgtccacccatttttggggtccggtggccaattggggccttcccctcgcggcgatcgttgacttccgaaaggttttttgacagtttgccaattccgaagtaaatgcatttttcaggacccagagatggtgaatacttttttctgataaacaaaataaatgctgaaaatgctctcttattgtaagatcagtgggccaatgtcctgcgcactgacaatttactcgtccgtttttatgcgatttgcttggcaagttcaggtgaaaaggaaggaatttgggaagggaagcgaaagaaatgacgccaaaagtatttttagccgaggaatatgctccttttcgcctgccatttgacaaatttcgtagctcaacaaattcaggtccgtccctttcctctttttggcttcctttcctctcaatgcattcacttttctcagatcgttcgcttctccaattaccatttcctccatttgtacaccgaccctttcgccaaaacggttaagaaattgtaaaggggacaaaatacgaaagtcgagcaaaggcattgtgcattcatccattgtttgtttattgtaacctttttaccataaaattagttgattaaaaacagtgttacccattcggattttaaatgcggattttttttgacaaatttcactgttttgtacaaaaaccatggcacaccaagaaaaaatggaatgctaattctaaaagtgacttgcccagtgaattaattaggcgaattttaaaccgtgtgttagtttgtacatttagttttattaaatcagtggaactttatataatacaaaactttcttttccgaatgcgaaaatggcgaatattagcacaatgagtatcatcacgtgtcttcattcatcgtcctccccattttgttggcagtgggtgcgttttgtccaccgttttattcgcttccagcgaagtccggccctggaaaactgtttttgatcaaatgccttaattattgacgaaaacggccatggatgagtcacagactcattgtcccgtcttccccaattgccctttctccccctgcctttgtcacttacgcactttttctgttcggcgttgtccgtccttttcaccttccttctctttagccaatgaatgggtgttgaatcgaccttcagacgacctgaataccttttatttctgataccttcaaatttccttccacacgtgcgcccctttttcacacctttcaatttggtgactccttctctttgaagttgtttcaactcgtcaatttgctcaaccaaagtttccatttctaaaatatttacaataaacaaaaccatacattaaaaaggggggtgggtcggtaaaaatttttgcgaaggggggtcggccgccgatgacctcttttttttttgcttttcaaaaaccgtttttttcggcgcgctttttccaaaaaacttttcgggaacagggggtccggcggtgccgttatgcgccgccggggaaaattttggagttttgggtgtgctttgttaacagattttcacaaaaaaagaaaaactataataatgggggaggagtgctttgcatttttcgctttgtttatttttacctccgatattactggcgagttggtttaatgtatcctgaacttttttcgatcattacccattaatttttgaaaaaaaaccttttctgaaatttgtcgcaactgtgcaaataacggacgaaacgaattttctgccgtttttgaggtaaagtaacgttctacaaaatgactaataagctttttatttaaaatagaatactttttacttgccttcaaaaacggcgtactttcccttttctgacatatttgtctgaaaaagaatcaatttatactttgcttgaataaccgctcatcaccttaacaatgtttaagtattcgttcaacaaattgtgctcgcggatgatcgcttttttggtggtcctaattcgcattattcggttgtaccgatcgaacctggcataaatgacctctgaaaacagatacaataatggcaaacagatgaaattggattagtacattaagggattggagggccgagtcaatccgaaaaaagaattagggtgttttgccgaaaggggaatttattgtcatacaaaaagccattactcgaaactttgtagatacattttatggactaatgcacttgagaatgagaaggtgtggaaactcaccattgatgaatttgtcgacttctcccaaatcggctccttctcgtgggaatacaattcggctgatcagctgctcagcatcatttttgtactcctattcaaaaaataaataaacaccaaaaagcaaaaggttggttgaacattttcgaattcgtcacggaatggcaaataagtgagcaattggaggtcctcctcgtcaaatttggccaccgtttggggtttcatcagcggcacttttgcattgtaaaagtacggactgcaagcagaagaggcgtaaagttcggccaatttctcgtcacaaatcgctgaattattgtgtacaccgtcacatgagactgaaaagaataatccaaaaatctgaccaagaataagaaagtgaattcaaaaaggaactccaaattctgcgtttgccctccgacaagcatggattttttgcgtttctttactcctatttaacccattttgttaaatttcgggaagggaagtcgtttccctggtaacatgggtcactttggccttacctttcccagcattttccactgaattcattgcctcagacaattcgagcgatgtctttctttgtccacggaatgcctccaccgccgcatttttagccacagccagcaattgttcttttcgcgttgccttctcaaaaataataattttaaaaaacaaaaaatatttaaaacgcaacccgccgattttccgtcaaattcgaagtttctccgacagaacgcgggggcaatcgaagctcgtcaattgccacggagtcggaactgttctgtttggaaatggcactgtcgctgtccgagtcgtcctaacaaaattttcattattagtataaaaacagaaataattgttgcctcttcgtcaaaaaatgttgcacttcgtttttgggtgggtgcagcggaaaaactcagtgaagcgacatccaaaggaggaggatggtcttcgtggtttgtctgaacatttcaaagggaattaattagcggaatatattaaaaagaatgaataagaggggggggggggggggtaaaaagtcaaaattcgggattgaactataaactgcaaataattagacaacaaaaagaattggacttcattcaattaaacttttaattaataaccaattatctatgcacccaaattgaacaaatatccaatggcatactttgaattcactttggtacccattgcaactgaattctaaaaagaagtgaaacaaaattgtgaatttcacccaaccattcgcattttcttccttaacatcgctgtcatcgccacaaatgttcacaatgccactggaaatgaaaaaccaaaatttacctaaattcgatgttttcgttggtccccaatttaccggtttttagtggccaagacgcatttgccaatttcgttgcgcagaaaacagcggtccaatcgttcaagtgcttccatgagaggttttttcctgccaaagtctttactcagctcggcccattggtccaaatgcgctttgattagcgagttgagcaaatgaatgtcctcttgagcaccccacgcgttcggatcgtcgtcaaaaaagttagggccaatattgtcgacaaaaatgtaccggtgaccacgcttatgcggaggagactcaacacccatgcgaaggcactgaaaaacaattggcaaagtcttcttgcataaaagtcgtcccatgtttcatgaaaattggtgtgaaagccaatggcattttcaaaatttttaaagtaaattaatggatttgctaaagccataattattgccccgcttttttttgttccccatggaaatgaatgcacctcaatacaaattaacacttcgccctgctgacaatccaaacattttgtgtaagttgaaaccgcgtcaaaatttactaagcaaaatgagcattctttgtggtcagcctcggacagtgatggtagcgattgaagctaaaaaatcattgatttgattaatttattagacaatgatgagactcatgtcaacatacccgcttcatttcgtaccatgcagacaaagtaatcggttccaatgggattttcacgcgggaaattttaggaatagaagagccctaaaatcgaagtaagcattaaatggggataaaatcaatgtccactgatggtcaacctgaagatcagactcggtgctttgcattaattgatgtatttgtcatggtttattttggggttccatttttcaagtttcaacgtttttaacatgctaattttgcatgcagctgaccgaaaaattgaagccgatagatgggaaagaaatcgatggatgctttgatgaagggattgaatgggcggggggaacaacggtaaagggaaagatggaaaatggggttgggtggtaaacgaacgaatgaaatgtgtgagggtggcaaggcacgcgggaagggcatccatcgccttcccttcccctcgcagaaaccattagaaagaaaacgctgccccctctcccaaactgcgcactcaaagcccaacattccccctccccccttagttnncggtgacccgccctcaacaaatccattgnttncatcattacttac

SEQ ID NO: 6738 - DNA, 1307 bp, Heterodera glycines
ttcttttgattctagaggctcctttgtgctttttactaccaccgattttaagcatacctatgcttttaacttgcattttatcttcttttcttaaaaaaaatttttgtcacaaaaatgcttctttttttgtttttaatttgtgtgttttcccctttttattttcgaaaatttcttggttaattaactaaatctcgaaattttatattaactgtctctaatatggtggaccaatgcttttcgaagccaaaacgtgaaattttgggcattggtgatgtttccaaatggctgaactcagaggctcatcacaaatatatgggattcttacgccgtcttaattctgccgttaaaactgtgccgactacttcatcagatattataatcggagaaactgcccgtaaaataatttccattttggacttacttgaggtgaacacataagctttttttcatttcatataattagaaagtgtcctgtacttgtatttgtatcccgaaaatccaggtccaaataaataggtccaggcttttcagtttgtcgaattctacatttttttttgctaaggcctggataaacgaattccctcctgaagatatgggattgcaacgctttggcaacaaatctttcaagaaatgtttcgagcgcctcatgtcggtttgtttttcttttcttttgacgtcccaaaaatatattaaatgccgatcaatgtaatttaatttttaatctttttaaggatggacaaagtttgctgagcgatttgtttcccgaaaatttaaagtcagctgttcttgaaatctggccttatttgatggattcgtttggaaattccactcggattgattatggatcaggtttgtcagtgaaattgacaattaatccttgaaatattaggtcacgaaacttcttttctcattttcctcttctgtctgtacgaaattggcgtgctccattcgcccgacgatgaccgagcttccatcttaagggttttccatcggttattttttgcccaaataacaaataaaaatttgtgatttcgattcgtatatatcacatctttccggttcactgtttttaaccgttaaatttgtttagatatctgaaattagctagacgacttcagtgtgagtatcgaatggaacccgctggttccagaggagttcatgccattgatgactttcagtttttgccttttttgtttgggagcgctcagttaattggtaggattctatgtataatatatttttaaatgaatttcaaatcagacaataaacagagacttatccccgattattatttgcgccccgacatg

SEQ ID NO: 6739 - DNA, 7366 bp, Heterodera glycines
acttttgcgtagagaaacattttttcatggcaaaacaggtggctgataatctaaactaatataaacatttgttggtttgatatttttatctcattgacacattcatttagactaaaatcggtcctttccatgaacattcaaatcaactttacaacatcagtgctgtgaatacttggttcttttgccctcttttattattatttttgtttgtttgtagggatcggatcaatgaaggaatgttcaaaatgtatgagggcgaagtatgtcagataaattagttttttctttattttttgtctatttattattacttataggtgctgaagaagtttcctgtcgtacagcactttctttttggtagtctcttttccattacggagcgtaaggatggaaagaagaccgactcgtcaggattggataaaatttcccatggattgcatcccgcgaaactcggaattattccagaatagatttaaggtttcaaacttttttatatggaatgcactcaaatatcaagtaaaatctgtttctcttctgatggttctagggtatcttgtatggatttactggttattattttggtttttctgttgctcttttgttgcataatttacttttattgtgtcttatggtcaatggaagaagataaaaaagcggctaacaacacttgcagcagcaacaacaataatagtctatcggatgtcaaacagaatgatgacgtctcatcgcttgactcacttggcgtttttctaaaccggtgaattttttaacatactttttgttttgtgtaaatgctgattttgagttgtaagaaatgaaattaattaaaaatattcacaattaaataattgaagttttcgtcaaatggacacaaaaaagttgcaacaattggcttcaaatccgacggtggtggcgcaatccaacggaccaaacgaaggcaccgcaaaagacacaaacaatgataacacttcgatcacatcaactcgggagaaaatgctcgaagtcgtttatgggaataagctaatgggaaaggagaagcagccgaaatttatgtgttttgttgtggatgcgcaggaaagaaaaattaggataatgagcagagaggagcagaaaaaacaggtaaaaaaagaccggtcgtgagttttttaaatatgggcaaaataatattttattaaacgcgttttaatttattttaggagagttccgccatcattttggaagaccttacggatgaccaattttctcggtttggcaaatccgtcaaggacaaagaggctgataactccgacgcattcgtccattgtgaaaaatgttctctgttctacgaattctgttgccttgatcatccgctttatcagtgcaaagatcgggtgccttcgtcttctcccacagaaattgaggacagagcggcggccactcttcctgcctttctttttattcagaattcttcaattccctccgctgggaaaggtgagaattaattaccttcatttattttaaatattctcgtgaattgttttaaggagtgttcaccaaagttgatattccaattggaattgtgtttggtgcgttgtttgttttgttggctgtcgtttttgttctttcgacattaaaagtttccattttcaggtccctacgagggcattctcacacaaaatttgtcggaaatggaattcggtgcttacacatgggaattacgtgtaggatatggaaaaccttcctattacattgatggttagggaccgtcctaattattcttttatttttcctttttcagccaaagaccctcgttattccaattggatggtaaagtttattaggtaattaatttgtctacttttctctttcgtacagcgctacatcaattctccgaggaatgagtcggaacagaatctgatcgccttccaataccagggcagtgtgtattaccgcgtctttaagcccattgaccgatcttcggaactattggtttggtaaaatatgcaacttcgggaggaaggcaattaaataatagtaaaactacgcatttaggccattttcagtatttgtttcttctgattatagtatgttgttacaaatgaatggattctgctgggtattgtatcattggatggagcagaaacgtttctatctaatgacactcctttagaagaatcttttcatttttggaaaacttatgaccaatttagaatgttctgaagacttttaaggtcacaatttttaatgttttatcagaaccataaaaatgaatacacaaaagtctgtgctctaacctttggttttctgcaaatcttggcccatggctgaggaagttaattagcttcttaaatagtgaaggtggcttgtttattaattatgactcatattgtgaaattttaatatattttatttgggactttcttctcttcttcctcccctttttctgcttttttatgattctgttcatttttaggtacggaaaaaaatatggaaaagagttgggaatcattgacacttcggtgaagagagtaccgcgttcattcttttattataccggcaagagcccttttattctttgacttgctgtgttttgtttttcatattgaatttcctttttcactattttcacgacgctattcatattaatttggtatttattaattcatcgtattattattttataaattcatccactgcgatactttcttttccttattaaaaatgttttaccaattaaatatttttacctgaaaagtattttctactaattgtaagtttcgacagataaataaatgtcctttttgcaacgacctccttcgtccgtgaaagaccatcgacggacttgggacaggacggaatatgaagtcaaggcgcaggagagactgactaccgaaagggaggcgttggaaatcaaaaaaggaaacatacggccaccgccgaagggtccgaagattaaacgggaaatgctgaagccgagggaattcaaagtgggtgctttcgcggcactataatttttgctttctccatcggcgtaataaatcaatttattgctcaggtagacctcgagtcgaaagtgggcaggcaagtggtgatcaacaaaaccacgccttcctccgagacaggcggttattactgcaatatttgtgactgtgtggtgaaggactcaatcaactttttggatcacattaatggtcagagagcgactcactcattagacaaattatccctgaatttgtaggtaaaaatcaccaaaggaatttggggttttcaatgaaagtgaagaaaagcactgtcgaggaggtccgagagcgtttttcaatgaaaaaggcacaaagtgagcagaaaaaaccgaataaaagattaaaattttgtaatgtccttaagaggaaacactgcgcaatgaggacgtagaggagaaacaacgcgatttgaaggaggaagaggccaaaatggcggatctgaaacggatgcaaagggaacggcaaaaggagaccagtcggaagaggacggcagcggcggtgacggcaccgcccacggacgaagaggcggacgcggaactgatgaaagtgatggggatcggcacatttggcagtaataaacggaagaaatgaaaaagggtggactatctaccaaaactacacattgtccgatgtcggtcgagtcgatggaatggctgtcttatggccattggtttatcgtcggtttcccagttttgctgtatattccataccgacactcagtttttaaatgcttatttacatttttttaagtataaaaacaggatgaatcgtaaataatgttattttcacttgctattagacaaactggaaaaattttcctacgaatgttcgcctttctttatgtattttttatttgtcgctaagtttttagtttatagagattaaaccgactttatgacgaacattatctactgtattattttatttttctgtgttgtcgtccatggagcggaacggggagttacggtggaagaaaaggtggggtttactagggtaacccgtaaatttgttcgggagtacgtaaataaccaacattttgtgttttcttgtgttaggtgcgcactttgcaagaatcgatgctgaagcgtccgctgatcaatctcaatcttgagaaatggaaaacttacgtacaggttccttgcttttgttgtcatgttggtgtggctggtcagatttgtatctgcatattgacccttggcattttcctaaaactgggaaacggaaaaactttttggtgccttttgtcggtaccaggagttcccccccccctctactagtacatttttatggtttttagtcgtcgccacgcaattattcgatgattgtcatgttcactgtgctttctgcgagcatgaattgccccatttgcaagttcgctttccgcagttttctatttcatttttggattaaggccagcttatgaagagtatctgatactggccaattcctaccgttacacctttctcaactcgaaatcgctttattttgcactggtcgattatgaggaagcgccgcaggttttcaatttggtgagcattttggtagattgaataaaaaacgcgatatttaaatgcttgaattcagctcaatttgaacacggctcctgcaatttatcattttccagcaaagggagcgcgacgcaatcaggtgcaaatatattctaattttgaacattttcaatctgatttggaaaggatacaatggacttccaacggatgggcattgacgcggacgcaatggccaagtttgttcaggacagaacggacatccaagtgggcaccccccccccttttctggcattcctttggcttcaatagattcgagtccttcgtcctccgaattatgctgcgcctgtggttgtgctgctgctcgtcatgttggtgcttggcctcctctacatgcgtcgtaataacctcgagtttctcttcaatcgcactttttgggccttggtttgcgtggtaccgtctctttttatgtgtccctcttgcattttccctgttcttctgtaagggcatcgtattcgcgttcatgagtggtcagatgtggaaccacatccgtggcccgccctttgtgatgactcacccccaaacgcgtgaaacttcgctggtccacggcagcactcagtaccaactcattgccgagacgtacatcgttctctcattgtacgccgccgtcacccttggcgtcgtcgtgttaaatgatgctgcctccagcaaaacggaccccgggaaaagaaagcgtggggatctttcaccatttggcaccgttttttattgattcaattcagttatggcatgcatcggaataggactggttgtggtcttcttcagccttttgctttcagtgtttcgcagcaaacatcacggatatccgtaccattttctgtttagttagaaagacgtgggaccgatgttatgtgaattttgttgggttacctaatcttgtcttatttattgtaaaattttaattttattcatttgtttatttgggcctaataaatcactttctgtctattcatttttgtccgtggcaaatttctgattattcgtgtcaatttatttttcattttttttatctacccaattcttgttaatcatttcgatggatgtgcaactcaattttctgcaacacgaaccgaccgccaattggcttgattattttttggagcggaaaaagctttcagagctactcagacgaaacccaattggtcttacattattgcatttcactttaatttggcttttttcagaccgaattgcagcgatttcgttttgtgaccaattcgttgaacaggctttggtcggtgaaagagatttggcgacgatggagagaaacaatgcaatagagaaaggtgggggagggacatatgggggcggggacgtcttggcaaaatgtacaaagtccaacatgtatcgtatgttttgccattgccctgagatgggaattatgtgttttacacatatcgactgcgtttaagatgatttcatgagcacacattacaaaatcgaagacctttggctgtgtgctctcagttgttttgcagcgtgtgattgggacttgtcgttgctgatcaaaaagtcagtcggagagagggattggttgggatttgaccttttcaataccaatagcagcagattatcccttttcagttcgaatgccatccgagtgggcgctttgttaagccgtctcatccgatgggcttttgaatccgatttgagttcacagagcagaactctctttgcggaagagcctttcaaatttctgaattctttcgaccgagttggcgcctcgagacttttctccggatggctttacgctcgttgggttctcaaaactgatttggatggccgattccctgtctgttcatttatttattttgttctaactcattttaaaggttcctcccgcacggccaacagtcagcaacccgtaagtttcaagagcagcttaacaaacatgaagataagatagctacgcaatataactaaactaacaatttaacggcccctaaaaaattcacatgaaatgcaatttgcccggcaccgaaactgatcagaaaataaggattctttgagttaatatttctttggcttcccccccccccccgcccgttacggtcattcgttatttgtcacctgcttgtttctttcagttatttttctgttgatcagtcacttcttcaagccgaacggttgtcccaagtgactttggaagtgcgcagtcgaatgggcgaagcagtgaactttttgagacgaattgtcaacgaccggcgacttggagacgacgacaaagtggaagtgcccggaatgatgtgttttttccaaaactttgacatcacaacgaaagtgcgttttaattacgttttttgtttttaattgccttttcattcagaagctttttcttcctaaagctaattttgacgcagaaacacataaaatttcctggtgcacttttcgtcgaaaaacgatgttcgatttaatgacggcacatttttccgccaaacatttccaaagggccaagcatttcttgagtaaagtacgttttaattatttgtggctgtggatttgttattcgactgtcagacattgtcctgcaaaactgaaaacgaagacttacaaatattttcgggcgatttattgcacatcgacgagaatgagttgcaaatttatcggcatattttcaaaattggcgacgcttatccgttgcacaaacgatgccccacaatcgccatttgcccttcggatccgttactcgattttgtgcgacagaaagcgaaaatagacaaaaacagtgccaaatacatcgtcaagttgctgttctcttcaggaaaggccgaatatccaagcaccaactgaacagacttcggg

SEQ ID NO: 6740 - DNA, 1369 bp, Heterodera glycines
aaaatttttaattgtagtgttttaaattataaaattgaattttctttgtcttttgatttttaaatctaataacaataataatttgattctaaattttgttagccatttgctttattaacaatgtattaaactgaagaaaatataattgtctcaatttttaaattatgttttaaagttttaagttttaggtaaatattgatcataggccccaaactcaaaaatgcttaaaaacggtcagaatagatgtaaaaaggttcgaaatgggttggaaaaatagaattaggggcgcacttgccctttttcaggctgaaattgatccaaatggatgtcataaccgtgttcagcaacctcaaaaccccctataatatgttttcgtttaatttaaaaattttgagtttttgttcgaatttgggttcggggttcggaattttgcaaaataaaggtcatattagtccatagaaaaattattcaaaatgtattttgagtgctttttatagtgcggtcacttgagtcccagctgagtttggcacttcaattccggcactttttcagcctgcaaaaagggcaaacgcgcccctaattctatttttccaacccatttcgaacctttttacatctattctgaccgtttttaagcatttttgagtttggggcctatgatcaatattttccaagttttattctatttattaagtttattcttaaatttatgctaaagttcacttgactatctttttatggaatttaattaaaagccatagtgtgggatctcaaccgtggttaattaaatcctgaattgtgattttggaaaatatattattgaaattaatagataattgtaatattaatattaagattatgaggaatcaaataattaaacccaattatttttgttcgattttgcttttctgcattttataaatggcgtttcatccaagtagatgatgatggaaattaccatccttgtgttgttttgtatgcttttgtaatcaaagtggaaagggacatagttttgtcccaaagtagctatagaaggtctatagatataaatcatttgtaaatttctattatttttttaaattatatttttgaacattaaataaaagattataatgaaacattttatttttaaaaataaaatatttaaattacgctttcttatttttaaaagttttgtttattctttatttttatttaacttcttttcgttaattaatactttaattttatggttttattattttatctttcccctgtaattacaatatttcctaagtaagctattgcaattattgttaatctcatttttaaacatagacaatttatatacattaattaatttattattaaaataactatgttgtgttac

SEQ ID NO: 6741 - DNA, 2061 bp, Heterodera glycines
  unsure (1)..(2061): unsure at all n locations
gggggaagggtcaacgaaaattnttgcaaaagagtcaggccatataaaattgtgcaattttgaactcccgagggattnggcgaaacggtcggttcattaatgaggaaagggatgactgtattttttcatagttaagcttccggagccgcatattacctttaaatcggcacaatagacacatagtttgtcagtttttcagatcaattgcttcctcaatattacaatattgattttgtatttctttgtgcgaattatataacttgttaatttttataaatgtttcaaattaattattttcgtttttttattattttaattaaattgtcatttattagtaataatattttattaaaatttaaaaaaaaatgcagtttcaattacaatattgggtcaaaacatatttttatctctatctttgaattctctaatgatagtatataattattatgtagcaatattccctaatctgttaatcttttatatgaagcttttagtaataattaatttcttctcttacagcaaaaagtattaattttacaataatattttttcacatatttctgtcgaaagaatttaatttaagttctatgcatacatttaaaaataatttgtttttttattgcattgtattgattcagattaaatgataaaaatatagttttctttgtaattgttttaaatttataaatgtggaaattacttcaggttgttacaaggatctcgaattattttctttttatttttcctacttttatcttatttccttttaacattttatatatttttaaaacattaatttattatttttatttaattgctctcctctttgaatcaacattttcaataagcgttaatataataatttttagattcttaagatttgggctaacacctttgaatctgcaataatgctgcagaaaatattttatatttgccgaattaatattttattttgaccattcgaagctctacaaagtattaacatttctcgataatataatcgagcctttattaagtttttgactttgcattattaagatctttaaatccatttattaatacatccaaaatttttacttcggttttttttgccttctataaattcaaggattgaaaaatataataaattttgtagataatttactataatagaaattttaaattaaatatcgttattagtttaaagctgccatgtttacttctcgccaaatatatccaatcggccttctcggattattgcgcttgtaacatttcttaatttgcagcttaagataagataaaatattatacaaaacctcgacaaatttgttaaaagtttcacatttaatacaataagcaaagataatatttgaattttcgttagattgaccaacaaaatttattgcatttatattttttgcgatttaaaaagcggattaattaaataacattttttatttatctatattaaggaaaatacaaattaataaataattagattaaaacaatcacgtcctcaattttttttactaaagtttaaattacgcatcttgaaatgtgatcacgttttttgttgcccccaatgttctatctcatctatttattaaatggggtgcctgagcacttttcggtaaatttagctttttttatttaaaaaagtatttgttagatattatctaactttttacttaagttaaaatattatgtagattcatttcaatttcttaaacaaagttaaatttaatattggttaaattttctaattgattccaaaagcaattttttttataatattgcattagccgtttacacaattaatgtttatgactttagactatttatattattaaataaatttcaaacattactattataaaagttatttaatctttttgccatgtacaatatataaagtgttttgttcgtttaatagacaatgatttaaatcgacctttattgcttccggcacttgatttcatatttctttatttcattttattcatgggagtgaatttaagcatacacactataggggtatacttttacgattcttttaaatgaaaaattgtcttttaaatactg

SEQ ID NO: 6742 - DNA, 1539 bp, Heterodera glycines
cctcccggacccccttccccctcctctgacgacgctcccggctctcccacaggcacgggcttgtgcgcgaaaaacaggcggcgcgcgaaagcaggcggcaacatcaaagacccgcaccgcccccacaggctcacgcctgacgacggtgcgggtgggtaaactactatgaatttctatatttctcttcatattatgacataaaataaaaatttcttaatttttcagttattattttttgcaatttattttttcctttatttgttcaaacaattatattttcgtccatggattggaaccaattccaatgcttacaacactttatttatgaagatcaaatttttttaaagatatcttaacatgtaccataatggcgaccattccctcttattatcatctttccaaaagcaaagatgcttagaatataaatatttaattatttatcagagaaaattgcgaaaaaaaagataattaaattttaatcatgacaataaattaaagcgtatttggcagcaatttcatattttttattttcaaagttttttttacaacgattaaaatttatttttgtatcttaattctatattaaaaatgaaacattttgttgttgttttttggcgtgaccggaaaattcgtcagtggaaaatatgttagtagaaaatgcgtcagtgataaaaatattctaaaatatagttcttaccaaaataaaattctataacaaaatcgttctgaattccgaagcccggacccgaactcgaacaaaaggtctaaattcacaatttttgaaattatgctttttgttcaaaattggtttaaatacactgaaacaaactgaaatgcatcaatcatccaaaaagcgatcatttacgccatttttgaatcaaaaatgctaaattcgaaaatgaggactttcgactttatgttcgaattcagtcaggtccagagtttggaattggccgaaatggataccgatttgtgatcagtgagctcgaaaacccaaggaacttgtttttataaaacaataaaattttctactgacgcattttccgggcgccgatttttggtgatacataattaaattgttcatcaatttattgtatgtttcaacttccgattaaatctgatttaaaattggttgagctgttgcttatgttgaattttttttttgcctgttatatttataacactttattgtattatttattgctatggaagtttgataataaaaattctcgacataagcaccttaatggtcttcactgttgaaaaaggtagtgttatcaaatagaatattaatttttaaatttctaattattttctcaatttatttttgattttataaaaatgttgctcatttattttggtgcatttggttatgtttccttcttgacgatttgtttttattttgcttagttgtcctagaaaatattttttattaaacttatctcagaattcgtttaatgcaaatttaattgagttttctttttataacattttggtccttcatttaattagcgtcttgaattttcttatcttatacag

SEQ ID NO: 6743 - DNA, 4328 bp, Heterodera glycines
atttaaccaaaaatctatttatgtagagaaaaaaaatttcctctaatttgtaagctaacttttgatgctgaaaaaatctttaggaccaacatacacagtccttcatgacgatctgaacaccccaaaagatactgaaagtcgggaaaattttagaaaaaattcttagagggttgggaaaattttctgaaaattttgattaggcctgtcgttttaaatttaagcgacggaaagaaaaaatagggtttttagcagtttatatgccaaaaatggtaatttttctgccatttggggtcaaaatttcaaaaatacggtaaaatgggggtccgtctgccggtggtgccgacaggcgccgccgggaaaaattttgaaattttgagtgaatttgttaacagattttgtccaaaatatgtccaatgattggttaatttattggtatatgaacgttttaaaaaataaagaaaaataattttcaatgttatgaaatttcttgttaattaaatttcaattaaaattatcaaaacaaaaacatataaatagtcctatcccaatggggaattgaacccaagagacagacaacgaaagacagaaggcttaaccaccagactacatatatatgtttacattctaatttgtaagcagaaaagaatttatttatttttctcaaaaatttcttcacaccgctttcctattttcgtctcattaaaaattccctatataaaatgccaatcacggatcaaaatcacggaaaatttgaaaaaatccgtgaccagtgatccgagatcacggcaccccaaaaaccccgtgatttccgtgatccgtgatccgtgatctatgagaaatgatagaaaatgaaacatttttattaaatactcggttagcactttccccattccccggtttgatgggtgatcgccctccgcccccaccattcataccagggatggcattcagaggcacccaaaaattttcggaaatcgtaaatcggaattccgtgccatccctgattcatatatgctctacttataaaaataatagagaaacacttcgtgttcgccctttatgccgaacaatctgctgtttggagagcaattggacgaaaaaatgagatgccaggcaagttattcaacggtcgtagaggacggaatgagtccgatggctgctactggtcacattaaatatcacgggtcggtgcgggacggacaactcaaaacagtgacaaggcgcgagtgcagcagaaggcacgaggcgcagaaggagtcgaccggtaccgataatcctttttcagaatgccggaaaagtcctgagaacccaaaatttggcacgattttgtgatcaaaatatttattggagatgcactcaaacatggtaattacagctccattctcgaatatatttttgaactgattaattaattatcccaatttgtcaatttaattttttctttgtattcaatatttcttatttttcatttttgctttgtaattgggcaaaggaaaaagaattttttataaagggtggacaagaaaagtgcaagaaatgttgggtgaccgctgacattaaatttggaatcaaatctcattttggaattcgtaaaatgtgaaaaagccggaaatttgaatgaaggcacagcgctgaaaacctataaaactttgagcattttcagattttttctttggattttgttgagtcagttacaattaaatttcaaaataagtaccatgaaccggaaaaattccgtcactccctgccacacaaaattgacgagtcaatcccgaaaaaccgtatcattcaaaactcttaatgagtctcgaaaaaagaccaaaatcactgtaattcccttcaatggtgtaaaagtataaggaatgattattaattagaaattaatttaaggttaatttgacagaattcagaatttattgtacaattaattaattattggttgtcaaaagtgaattgatatcatttgcacgcagtttttgaaaaaaggggtaaataaaatccattttttatttaattggtcgcttatcaataaattccaattcttcgtcgtttgcatgttggccatggtgaggacgacgtcttgaactctggccaaagtcaaactcttgaggcggatgaatgccctgacgaaatttctgaatgtttaaaggtcaataaatggaccaagtcaaaaaatgtgatgaactatgaacattaaaaattataattgggatttctaaaaattattgcttaattaagtgtagagagagagagagagcgagaatgagacagagagtgagagagaaagaaagaaagagagagtgagagagaagagagagggagtgagagagagaaagaaagaaagaaagagagagcgcgagaatgagagagagagagagagaatgagagagagagagagagaatgagagagagagcgaatgagagagagaatgagagagagagagaatgtgaggaaattttgaattttttttttaattcttaatgacttgtaatgggctgagacgacggtccccgtcttggccagcacagcacatgtagtagagggcgtagccgggaatcaccaccatggagcaggcggacaagaagaagccgaacgcctcggcccaaaaggggtagtcgacacccgtggggtagcggagaggctcatacatcaccaagcagcaaatgaacaaaatctgagcaatttttgtttaattaatagtttctttttgttgaatgcgttctttacatttaaattcaagcaacaaaaattcgacttttgaagcccattacaatttaatttgtgcctggaccccaatttggggttgaggcataaggtttgaagcgtggagaattcgccgaaaaatggcaaaaaatttcattcaattcataaattaggcaaacatcttcacagccaaattttggctttttcactcgagccgttaaaactttgtgatggccgaaactcggctttgtccttgtcacaaacaatggtaaatcggcaataaaagttaattattactagagctcggcctggacctggacccaggcctggattttcctggacctggattttcctggatttttgtccaggaaacccatgtccaggtccaggcaaaacaggaaaacacctggatttcctggacaaaattttagaatttattattttaagtgaccgatgttttttccaagttttcaaaaaatgtttaatagatttaaaaacagattattagtgtaaattagatatttttagatgttcccaagcaattaattgattttttcaaacttttgcttgctttttagaacaaatttcaaaaaatccaggtccaggcctggatccaggtctcgaagagcctggatttttcctggacctggaatttgtccaggaaatccaggtccaggtccaggcttttttcaaaataccgagctctaattattaccaatgcactcagtggggctgtgtatttccagagtaaggtaaaaaaggatagcggataaatgccaatcatttccttcagagcagcgcggacacgccgtgcgcctgttaattcattaaacatttgtcaattaattaattaattcgatgggatcggaaatgaaatcaattttagtaaattcgaaaaaaactaaccgaatccccacgccaggccaaccacttcgaaaaacaccacaaatagaagtgcaatgcccgatgctccataggcatccacctgaattacatattttgtttggttcgagggcatacgttaaaaaaggggggagagggcgaagcctaattttacgaagggactcaagacatataaaatatccaaatccattttttttttgcagatttgccaaacagaatttttcttacaaaactataatattttcaagagttgaagtgaggatgcaaaaaaagaaaaaagacttcaacaccaaaatacatattaaattaaattttggaattttgatatttaattaaattcaccagcgtaagccaatgtgcaccggcataagtgaccattggaatgccaataatgaagaagaatatgcaagtaacgagaagagaaatctaattaaaaaaataaaaatcacaaaataaatattttcaatgtttttaaacttttttgtatttgcgtaaaagtgttggaaaagtgtcctcaagagcggtgaatagtccttccatcatgcaaacctgtgaaatttcagaaaaataacatcaaaaattgtttttaaatgcctggctgtccagcccgagaattgtgatcatcagaaaaaacagaaatgcccaaagctgcttcagcggtaaattactggcaacctcagggtatgccaaaaaggcaagtccaaccccttaaaattaaaaa

SEQ ID NO: 6744 - DNA, 2588 bp, Heterodera glycines
aggcaaagttagaccacggatcagcaaaacgatgatcagaaagtatggaaacagagcacagaaatagacaaactttaaaagtgaaaaaataataaagtaatttcattttctttttttttgaattataaattttttttgtaaaatggaaaaattgtagtttgtgcccaaccaagcaccataattattaaggcgtgttattataagtgcatgcatatttttgttgctagaccgtgggaggctattatatatatattttttttattgttttgcatatttgtgtatatttcaagttttaggtgcatatgggcattttttcaaaaaattctattaaaatggccctctctgttaaaccggttgtttttacctcgatggatcgaaaatttttctaaaatttgattttttgctattttctcgaaaatattaataaaaatataaatttaaaaaaagaggaaatttatgacaaaaatatgtccataggaaaattttgatttactcaatttcttcaaaattaataggttttaggtacgttcgacatttttagcctaaatttagattataaatcaatggcatgtgcaaagaaacggcacctttctcgcctgggtgatgcccttccacaaagcgaaatacacgacaacccatgccaaaaacatcaatccgagcaattcccattggatgccgccaatgtcgtcaattgacggcgtttgctttagcacacgtcgcctgaagaaaaaaaacaattggatttaatggagaaaaaatggcagtgttttggtacattttgcgtgaaattggttgggaaaggctttgaataaaaataaaaaaattaatttaacaaaaatttaagatgttgttgtgccggctcaattgatgtaaaaaataaacaaaaatttcagcgtttaaaaaaatattcaaaagcccttttatggtgatcacgaaatatcatttatttaaaaaaatatgtttccttccgccgcttactcccaaaattgttccacggatgactcaatggacatcccatagcgggacaaatttgacgcaattcgcataatctccgagtgcgtttccttccccgtcacacattggccattgttccaccaattgtggcacgtctccccttaaatacaaaaaaaaaaagttaattaataattgtaaaaaatgataacgaacacggaaatgttgaattgaaggagctgatcatgtaaaaaacggcccaagaaacaatcacacaaaaataggaaatgcacataaaagcgatcatcacattgccaatgccaacacctgaaaaaggcaaaaatgtataaataatatattttaggaaaaaaatttaaaattcaatgaaatttttatctttgaaaattgggcacattttccacatttccattgctcctgaaagtaatttaacaaaaaatgtttcaccaaggcataccgtaatttacctctctgtaggtactgaccgaccgtaacttccatgaggaaaattggaacagcgccaaaagtgaagaaaagtgcataaacaacgaggaacgagcctatgagcattttcaaatgtgattaaataatttttagagttaaattaattattccgagtaattaattaacctccgccatttttgaagcaaaggtacggaaagcgccaaacatttccttaaaataataatttattataccggaaaaaaataaaacaatgaattaaccgaggccaactgcgtacgcaatcatactcatcagaaagtcaaattgtcctataaaaaagagaaaaggatgatcacaatcagtaacaaaattaattcagaagaagattaaaaatttattttttatcataattttgaaattttgatctttcgttgggattttttttcataaaatttcagaagagtggattgagttttttcttaatatccgaaatgagttgtgctatgtgaatgaaaatttcaatgtattgcgtcagaaattaatgaattaaaattttatttatttttattttttaaattagtttttctgttatattccaagtagattaaacaacaaggcatgaaaacttcaaaagttacgtttactttttcagttcattcatttttgaaagcttaagaggtaaaacaaattatatttccaaaaatatttttgttatgccatttttaattattttcattttccgagtttttagtggcaattaattcattcacttaataggcataattatgtaataaatttgccactatagaagttcgagttatcagatttacccgtccattggccccggtcaaccgattcagcgccaagcacagagattttcctggccgacggcggatccgtcgggtgttcaatttcgggaatgttcacacctttttaaatttggcaataattaagcatgttttgcgtttcaataattaattccccatatagtttgtttgttcttccctttttcacctttatcatgctttccttccaacgcagcagtgttttccttcccatcagttgaagaaatttcttcgttaattgccttccggtttttcgtaaaccattttattggcattatgaaaaaatttctgaaaaaattattattattattattatttaattcatttttt

SEQ ID NO: 6745 - DNA, 997 bp, Heterodera glycines
taataataatattattctaaaataatttcttaatttttttctttttatattgcattttctctctttttatcccaaaatgttctgaccattttatgtcccatgttcaaaaaccccgtccatttaattttttgttcatatttccccaccaaaaagtgaatgtataatgaatatttaatgatatcctttaaattgtggtcatcactcacacaaagtgaattaaaaataataaaataaataaataaatgcttttgggtttgaaaattccgtaggcattgcaaaatttgaaagtcagtccatccattaaattattcgaattttctaaatccgaatcctcttgctgactttttaaatgatcaaaagcgttcaaatttaatgccttaaaaacacgacttttcttgaagagttgtggcgaaaaacttcgccatgtccaagctgaatcgaaccatcttctttctgcccatccctcattaaattccaattttgtcgatcatttgaaaatgtaaatttcgctgcttcgctgtagcacaggagaaaaattatgaattaaaatacatttcttttaattaattaattaattaatagtcagacaaatgcatccgttggatgttttcattatttgatttaagcaattggaaatgaaattaacgaaaataggaaatgaaaaattaaaattttataaacttaagactgaaagtaaagggagaaacgaaaattgagcggcgctgagctcgaaagtcaagcaaattaaatttcttttgcaagcatattacaacatatatgaaattctgaaatatttaaaatttattttttaatttttgtgaaatatatgtacttttcggctttggggcctagatatgaattttttaaaaaatttatgcgagttcctctggcgctaagatgccaaaaaagatggcgcatattcacttgaagaaatcttagctcaaattgtggcatttatacccccaatataattttggcccgtagtttttgcaattct

SEQ ID NO: 6746 - DNA, 2153 bp, Heterodera glycines
ccggaaagccaaaccgaagacggtgtgggaagggggggggaacaggttgaccagcagcagacaaacgacagaacagaggaggtgatcagcaatcaacgcgaaggtggaggaacaatcagcagatgatcaatcagcacgacacgtcggagacggcggcggcgacggcgacggaactgttgcgcaagcaaaatgtgaccccagggcatggaatttggcgcaattttcttttttggcaatagaaacagaaaaacagcaacaatgtttgaatattgctttggggaaggaggctaaagcaaaaaagaaaagaaaaaaaggaaatccagtttaatttggcagacgaacgaatggagcgaaagggggggggaggaaaagcggacagaccaacgaacaaacagacaaatgaacaaatagacaaatgaacagacagacaaatgagcagacagacaaattaacagacatatatcaattagtcaaaatccgagtcattaactttttattgcctattaattgatttgtaaaagacgaattattattatttttttattttgaacaaaaataaatttcttttatttaatttattgttttttgcctttgaccaaaacaacggaggcgttttcgccgaaatctgtgctttccgtccgccacattttctgttcgcgccggtcgagtagaaaaacaaacagaaaaatgaggacgagttgaaacacgaagagagacagagagccgacgaaaagccatttccaaacggcataacccctgaaaatgtggtgggcgttgaaaatgccaaaaaacccctaaatttatttaatttttggcaccgttcgcatggccttggacaatcgaagcggagaaaaggcggcggttcgttcagttttccgtttccattgctgtaatagtggtgcagtttgttcaccaatcgccccacactgtccataatcgccggcgaaatttgctcaaaaacgaatgacgcctttttctaaattttttcatttttaaactttttcaaattttataaaatgccaacccaatcatttttatctgccacaatttgcctccgaggcaattgtaaaaaccggcggaaggaatcgctggtaagtctctcgtaattgacccccaccgaaccgtgtcggtggtcattttggccggtcatccataaaattcggttggtctgagggaaagtgttttgattttaaatgcctaaaattcgtccccaaattcacccactcacttcaaccaaaatgacacgtcttaacactcgaaaaagcgtttgctcataaaatgccaaagtttcgttccttaccttctgtcttataccggtaattaattagagttttcattgataggattcaaaataaccaccagcatttttcggcattggggtcgctgattgaacagtcgtgccgacatttctttgccattcttcccgaatgtgccaacagttcaagctgatcactgtaacccaatggtcctctgacattattattattattattattattgtcatgttgttgaagaaacggagaatgtaacattttcggcacattttgccgtgggaaaagcgaaagtgccattgtcaggggaggagaaatagcaaaaagggaaaggaaccagaaaagtgaaattggcacgagaagggagcaaagatgacatggccaactgctgttcctccgttttcgcatgctgaaaaaataaaattcataaaataaatttcaaaaaattatttttcctaaatttatgtataaataaagtaatattttattgaaaaatgggcaggcagtaaattataataaaagaatgactgttttcgttcttttcactattccgtccgtcccttttaattttaatcactctcgacaaaagagagacgaacgatcatcaggcggaagaggaaaaaggatttaaaaaataataaaagtaaaacataaaaataaaaagtaatggagtgatttaattaattgattgaaaaagcaaataattgtggaaaaatcgaaattaaaatatgaacaaaattatcaataaaataaggtgaaggagaagaatgaatgttggattatttcctagttaatcgagaaaacattaagtaattatcatttctgataagaaaaacaattagaaatcaacatttgttattttgtaataaaaatttaaaattt

SEQ ID NO: 6747 - DNA, 2170 bp, Heterodera glycines
  unsure (1)..(2170): unsure at all n locations
attttctgaacgccttttttcgccacattttttttgcgtcgagttttttccaaggaatttttgcggaacagggctgcggggggggggggggtctgnccgtaattccgatttcctattttttttggaggttctctgttaccgctttggccttgcctgtttaatgatcagactaatgatcagattaatggtaatatcgctttgtaatgacggcttaaagaatcaaaaacaatgtcaaatgatcaggcccatgagaaaggtttggattgaagtgatcgacattgttcacattggtttatgtctctcccggccactgactggtctgatcagcttttactcaccgttttggtgcagttcgtccatcgcttgtctgatcattgttttgatttgctccagcgatggttccttccattctgtcgctttccccccgctttttcgtttcatctcctccaagaaatgctccacgtcggagctgcccaattcttccaccaatacaacctcgttgcaattgttgccaattgcgccgcttccgttctcgtcgatgttcgcattttccgctttaaattggcaaaatgtgtcattgcaaaaaggaatttttttagtgccagttttggccaaagaaagaaaaaagtaatggcatcattagggttttactcatttcatattatgaaaattcttttttttatgataaatccgattgccttttttatatggtaaaattcatttttctttttccataatattaattctttttttctcactctcttcgccaacgtttcgcctttttctgcgcttttcgctcccaattagaactgttctgataaaatcggacatcactgctccctccgtgcacggttggccactctttgtctcactgtaaatagtatttttcattaattttaatatttttcttaattattgtaattatccgctcccccccccccccccgaaactcactaattttcgagtcgcacaatgtgtggtgccatgtcgcgcatccgctccaacactttcagctcccgcgtgcatttgctcaaccgcgttgggtcctccgtgcaagttttgatcgccacacaacggccaagcgactgggaaaaggcgtgttcaacctgaaaagtgggcaaataattgagaaaaatggggaaatcaaatttaaaacccaaaacaaaaagaggaatgcaaattgaatggcctttttccttataatttcgttaatttttttgattttcctcccatttttctcctatttttggtaattttttcccatttccgacctttccgtccattccatcgcccaatggcaccaaagtgtcgtacgttttgccagcaatcattcgtgttgtcgttaaattacgaaaatgtttaccgcattggcatttttgttgaacttttgtcgaacacgacgaattgtgatgagagtctgagaaagtttatttattttgcgtttttattcaaaatttaattccaaattaaattaattaattaattaccttctccaattttatttgcgagtgatgcggaagaaatgaaagggaaaatattcaaagagaaaaaagaaaaaagacaaaggaaaggccaaagaaggcttttcatttctaaactcaaaattaacactcgattaaaattgaaattgaaaagtgttcatcaaatgcctatttctgttctgaggatgaaatgccttcgctttaaggtcaccgccccctccaatttggtcggttcgatcacgcgcattacaataaatttgccctcctccattttggtcatccattaatgcaaaaatgacagattaagtaagttatcaattgacacaaacgttgaaattagtgattgattgttcgttgtttgtgctttggatcattcgccgaatttgaacatcaatctgttgattaatgtaaactttaacaattttatgaaaaaacaatttttttttctttttgttatcggtcggtccattcaaatgaaacatttgctgatcagtgatcgaagtgtattaattacgtcaatctctgtttgtttcttctccatgctccgttcccgcaaaatgattcttttaattgtgttgcaattgcttttttcgacattaaccgtatttcctaaaatagagccccgggggttttgtttatcaacccccctcaaaagggaaggggagggagttttaatttggggggggggg

SEQ ID NO: 6748 - DNA, 1904 bp, Heterodera glycines
  unsure (1)..(1904): unsure at all n locations
ccccccccccccccctcttcccacctcatcctcaaaattgccacttcaattcgctttttgcgcctttctgtcgtgtccatgtcgaggtaatcaatcagttcttgttcatttttggccaattttgacttcaattgttcaattctttcttcagcaatttccgagaggcgttcgccgtcaaaaaggcgcgaaaaaaggcgcaaaagaggacgaacggaagaggaagaggaggaggaggaagatgaggatgagatggatgaaaaggaagggaaggaaaaggaagaagaggatgaagacgaggaaggggatgagaaggaaggggaagaagaagggaaggaaaaggaagaagaggatgaggaagaagaagaggaaggggaggagaaggaaggggaagaagaagggaaggaaaaggaagaagaggatgaggaagaagaagaggatgaggaggagggggagggaacatatgatgaataggaagaagacgagggaaaacggagtaaagaagaggatgaggatgaagaagaggacgatgcaaccctcaccaaaactgaagtgaaaaaaatagaaataatttgtgaaagagttgtgccgatttgcgaagctctttcaaatttacaagtcatcaaaaaataaataaaataataaatttaataaaaataaattaaaaatgaattaagttgattatgtaataattcaataagtaaaatatttaaattgtaaagaatggtttaatgcattaattgctgaaatattattgatttttaattgatttttttgcaacatttcttaagattctagcattttaaaagaattttcatctagaaaaacagaaaacaggaaaggtcgcgacacctttttgtcgcttgtcgcaattttcaacaataaatgccaaacaacatcagtcttattgtggtgtccattattctggatataatgggcgacccccaacccgactcggtctcggggacgggagcccagggcaagactgagagagagaataggcagatgagcacttaatgagtctcgattagtgaaaggaatggccgccccgggatgacattgatgggcgaataattaattatcagaggatgagagatagataaagagaaataagaaattaactatataagtgctaaaaaatcaggctttttttgaattagccatggcacagaaactgattcaacaaacaaaaaacatttcaagaaattgtgatgactttactcattgtcagaagcaaatgagatagagaagaagaagcttccccgagaggaagattaatggatcaattgaggcaacaattgatcctatatgatcgagcaaagtggggagctggagagggcagggtcggtagttcagctggtagaacactggtccggaaagccagagacgccggttcaaagccggcccgccccatagtttttccctcaaaggcttccccgctcgttcatatatttcacaaacaacttaatttcctgctttcatttttctaaccctttgacaactttcactaaattaaaaaaaagtcattttgaaaatagcaaaacattgcaatatttgaaaatacgttgaaaggaaataaaaattcaatagcagaagaaaagccacgaaaatcgagcaaagaaaaagcgaatattaaataaaaaaatgtttaattctttcaaaaatttttaattaataatgcaatattttagtaaataaattattcttattttataattttcaatttttgaggtttttacacacatttcaagtgggtcttattaagccagtccaaattatttgttatttgccgtcttgtgacctccaacacattacaattattattatgatgttcaaaattctaataattttatgtttaaaatttgtcgctcccaatcgaaagcgtttcccgccgnngagaagactct

SEQ ID NO: 6749 - DNA, 1478 bp, Heterodera glycines
  unsure (1)..(1478): unsure at all n locations
aaatcaaatgaaagaaattcggcaaaaatttgagaatttaattggcgtttcgggatttcaattaatttacaaaacattttnggaaaaaatgcaatggcaaagtgagtttaaaaatacttctaatttttatcatttcagaaaaacattcaaaatttaacctttaatgaaagtttaaatgaatataattttaatgattttattgtcattataaaaaatttcttcagttcgcgaccccaaaattccttatcaaattttatacaatgaatttttgtttggcgccgatacaaaattaagaaaatggagggcaaaaattattcttgaaaagtttctttacgacgaatcggcacaaaaattgttcgaagacgaaaaagcaaaagcaattagaaaaggcaaaagaataattaatttttaaattcattttaaattaaataaataaatgtaaatttattttagagaaaaatttaactgtttttcatgagagaattaaatttattggagaaatgaaacaaatttggacaatttattcggagaatttttggtttaacgaaaaaacaattcgggcaaaaattgagcatttggtgaggagaaacaaaggcaaaaatttggaaatggtaaaagaaactcttttggcacatcacaaagaaatgagtgaaattgaacacaacgaaaaggcaaaaaactttttaaattggatttaaataataacaaattgacaattaaggacattgacatgctttggggaaatgggcccgaagacacggcacttttcagggcacttttcatttgcatcggcgaatcattcacggaatgtgccgaaaaaggtggacaaaagtctgccgaacatttggaagaattttcggcgacagagcaattaaaagcgattaattgtgtggccaaaatagtgaaaaggaaggcgcggaaggacgaaattgtggccaaattgcatttagagaaaatggaggaaataattggcggcgaattcaaagagaaactgaagaaaaatagtgggcaatcaaaaacaaaaattaatttaattaattaattaatggaaatgattaagttacattttttagctaaggaattggcaaaacttttggatggaaatggcattaacaaaatgaaagaattactgacagaggcatattaatttttattattatatgagaccgtgataaataatattaattgaattaatacatttttatttgtttaacttgttatttccgttattttaagagtgaatatttctcaacaaatgaatcggtcgctttgtcttcttccgacaattcatccccagcagaaagtgacgaaacttacgaagatgcaaattctgaggaaaaatttggagaagaaaacatagaaaaaagcgatggaaattcagaagcaaataattggcaaaatgccatcgccaaaaacaaaatgccaaaagtagaaaaaagcaaaacaaaaagttattatgggagaaaagagaagaaaaa

SEQ ID NO: 6750 - DNA, 2520 bp, Heterodera glycines
tttgttgttataaacggatttaggcaagttgaatgagaggtccttcgtgccgctcctttgcgaaacaatttggagctttgccgaagatttgcaactccaatttgggtcttaattagtgcaaatccgataaattattcaaaatttctatttgttttcaccttcttcagaagcggtgcacaaaaggtaaaagcccaggcatttctcagtgctgtctttcttcgtgtttacttttgccaaaattttccatagcactccgtttctgtacacagtttcactgtatcgtttgctgccctcattctctccagcaaatgccgacaattgttcaatgtccaacacaagttggcgacaagaggcacgattcttggcggaaaatttcaatgggtacagctcggaaatcgcgcgcaaattcggatggcaattgaattggtaaatgccgaacatttcctcaacagtcagaaggccggaaggaactgaaaaacgtgaaaaatggaaaaacaattcttaatttggctaaaagcaacaaaattgttgcagcatgcttggaagcattttatggattaaaaacgccaaatatcgacaaaaacccaaaaaatgctaaatatggaccaaaaaatagactaaaaagggccaaaaatgttttaaatacttcaacattaattttagtaacaagataaaacgttgtagttgaaaactttatttcggatttttcatttgaatccctaccaatttccttcgcaaatgtttccattgtgatgagtgggaaacgaattttgaagagtgccgggccaagcgcagaacgacgatttttaggcgaacattcgatggcattttgacggcatttttcgtcggcccaacggagtgcctaatgaataattaatgagataattgggattatttaaacataataattattacagctttccaaagtgcgatttcgccactgattttcaattggtcactcgcaaaaattttagacaacaaattttggccgatttgaaggaattcttctgaaccaaacaaagtttccgcctttcgattaatgtaatccaagcaacgaattgcgaaatcctaaaaaagcgaagccaaattaaaaaacaaaatcaaaaactaattaaatataaaaagctctgaaattttatggccttaaattaattactttctcatcgagaagctgagcctggtcaaaagcgaggaaaacattgggcaattcattttccagtggaaagtccgcgcaagccttggccagcaaagaaatgtggtacttcttagctaaaaagtaatcatttgtaaacaaaaaattataaaaaaatatatgatagatttgagtcccaccaattttcaggtaatttaatgaaaatttttgtggctcaattccttttttaatagaaatttttaaaaaatgatctttttggggcttttgaaactttgatcactttttcctgatcatttttggcgccgtagcaaaaaggccgaaaattcacaattgcaaatggatcttgctttctcaatacgataaaagtgttttgagtctgcttttttggcgccgaaacgatacagactcttccgagcgacggccttttcctttttttcttgctcttaggcctcttatgttttcgtcacattttccaaacaatttctgaagagttagggtacggtcggcaccgtcggagaaattttgaaaaatttttcgttcgattttaatgactttcctaatccactagactgttgaaaattttactgctggtctctaattatggctaaaatttcaataaaaaaaattcccacccgcgtaaagcacagcgatgagattgtctccggtcaatccgcttgaatcttccgcgtagataaagctcagcatcactttgaacacattggcgtcgatgtcagtgatctccacggattgtaactgttcagcggaagaggaggctaaaaatttttaaaattttttaattttttgtttttcattttttactttttgtctttgcgttttgagcgtcgaaacggaacattgctttgaacacgtcagaagcagccatcaaaatgagtttgtgtgcttttagaaccttaaaaacaacaatgtttacgatttgagaaacttttgatggtcgaataaaagaaaagttcaaaaaatttaatgaatttcttgatttttttccaatacgtgcctccttttcctctccttggccaaccaaaaattgaatgtccgccccatcgccattggtcaacaaaagcttcatccgatcagccaaactgatggacatttgaattttattagccgatgattgaaggaaaataaaacttagaaaataatagcaaacattaataatgttaaagcgaagagagtgtgcttttttggaaaaaactttatatttatgggcgaagagtaatcattgcctttactgttcccataaaaaggatgaaaaagatggttttgagcagaacaaaggtcattcgtgatcagccccacaaattaccctcgaaatgaattgaaaatttcatgggggttacaaaactgcaaag

SEQ ID NO: 6751 - DNA, 1375 bp, Heterodera glycines
ttatttgcctattttcttgatatcggcacaatcggcccccttcgatacggcattttcttatcttttagtgtatttactgtcggattgtcctcactgacggattgtccactgtcggattgtccaaatgtccagtcacgcaaatacctgtttcttacggttgtttaaaggtagagttaatgtactagtttctgtttggacttagaccggaatactggcttagttgggtccgaaataacaagagacccgtctaattatatttaaacttataaaattttaagtcttgaacatactgagcttgtaatgatacaaataatacatacatatgtatggaattgatatataatgaatgctaatgagtttagcaaaatctctggtgcgtgcccaaacttcccgatgccgaaatttctggtgcccaaacttcccggtgcccaaatttccgccccccccccttaaatttttgtcctactgtatccaaagtcgcacaatcagtagcacttttgtttttttttagaatttttcaaaattgttccttatttccacaataaatgcatcggtcttgaatctcgggaaatttttgggctcgagaatcatactttattttacgggagcggaaaaaacccgggaatcccgtcgccgtcaatttttgtcaaaaaacgggaataaaaatgcactggtaagaatgggagtctgagtgaaaaatctgagaaggaaattattggaaagagtaattttgaaaaaaaaattgtttgtcttttgatcaattgatgctataggtaaagaaatatgtggcctagtggctaaaccttctgcctttcactatttgtcgcttgagcaatgttcccaaaaagcttttttagaaaaaatcgcttctcaaaaaaaggtcttaaaagcaaaaaatgtaagattgtcattaaaaacctagaaaaattctcagaacaagtttttgccgataccgtacagatgaaaaggttggtacctggagtgaatgaagtgaaacgaaaaaatttcacgtataattaaataataaaaaataatgaaaaataattaactaattttcttgctttcgcgaagcctttttcgggttaattaattttaggaaccttttttttggtagggtgccgtgatgtgccgcgcttctgctgcttcgctgctttggcttgtcgcgaaaaatgcagtgcttcacaccaagcacatttctaatgagcgtatcttattcttaatctatttttaaacttttaaattttaatcaattaattaattaatttcttttcccatttttgaaaattattttttatttttgggtttttgtcgtttggcggcctccgcctttttcaggaaattttttgtttttaaaaactattttaaaaatattttt

SEQ ID NO: 6752 - DNA, 758 bp, Heterodera glycines
aatcagggctcggatctgttctgatttatcagaaatgttctgatttggagggtccaaatctgataaaataaaaaagttctgatttgtcagaaatgttctgattttgggctattgttcttattttgttctgatttgtcgcttctccgaaaaatctgtcaatgtttctttataaatttggattggcatactgtttaagaaaaatattttcaattttggccttataatttatttcttgctgttaatttggctaattatttttgtatttattgctttattgtatttctcttttctttttaatttagcacctgcactattactaacaaatggcaccgcctaagcgcaaaaatgtttttaaaagtgaatatgccaatgaatttcagggtatcacaaaaagcaaaacaggagatgaattcgcgcactgtatcccatgcaattttaagccttttgaatgtaaaaatggtcgccaattgtctcaaaatcgcaaaaattgataatttttgatgaaaatctgttaacaaatcaaagaaataagaaaaaatttttccggcggcgcctatcggcaccgccggacccacttccctccctcgttctccaaaatttcttggaaaaatgcaccgtaaaaaatttattaaaaattatatttttttagataaaaattacactaaatttgctatttttctcaccaaaattgttaaaaatgatcatgggaggtggaaaatataatatttaatgcatttcgatcgaataaatgtaaaaat

SEQ ID NO: 6753 - DNA, 1923 bp, Heterodera glycines
  unsure (1)..(1923): unsure at all n locations
acttgactttcgtatgaaatctaatcgtttggcattcctctccccgcactttaccagctgtctttccattggcatncatcatattatcgtctggataacactcactgcatgcatgccaaacacatccattaacttctattgcctttctctctgcttccacccatccatccacagaatattgaccaaactttttctctcctctgggtgaattagccatcctcacttccacattatgttcttccgtgtaccactgtaagaaacggcgggccagtctactttgattttgtgcattgtcatagcctcgttccgggacaattgccaagtgttcagctggaaggtggttgatccggaaatgcttcatacaggcgccggcgatcgtcatacactccctcaatacatcaattccttcgtgtgccctttccgctacaaagccttcttccctccgagacacatcaaagaattccatccgaaacgctaccagcgctgccgttaaaatttcaacgtcgtttgtgcagtagctggccaatgcttcgtcaaggaggaagggtttatgctgatgttgttcataccagacgttgaatttttgtcgtttatccggcatcatcccatcggccaagtagtcttcaggcgtggggtatatctgctttccgtagttatccggttggtttgccatgtgcggaaagaatggtttgtcctccacatccaagccgaaggatggaacaagttcagccaaagcgcagggcatcaaattatacgagtctcggaacaccacgtttggattgcgtttcttctgattgcccactttcatttcatacagcttattgcccttcctcaacatgctcggattgaatcctcgccggaaaagttcacgaaaaaccaacaccatatcgaagcggccaccaaagtgcgaataaacataagtgtcatacttcagcgggagttggaagactaaccaatcgacaaattcctccaaaggattgtctgcgaccacttgcttgtcgactgttgtttctgtgaagcgttggcaaaaggcgaccgttctgtttggcccgcacacctcacacccttttgttcctctttgccagtctccattctcgatgcatcccgggcatattaatttcgcagcaataaaattaggcaaatggttccgttgttcagattccccaatgaacatatgctgcattgtctccacgtcaaacgcaacaatacgatagggagtatgttgtttcggctcaatgggttgaatgtagcatccccgctcagtgttgtggtagttgttgcatagcccacaataattctcgccacacacatgcccctttctgtcatttcttttgttatctgctacatcccaaacagcaccgcaatctttgcacatctttgaccgcatacaaaagttggaatgaagatgatgttggtagcagtcgtagtttcggaaccttttatagcatttagagcactccttgacgaatccatctgttggctgacacggaaattgcggtccaacacgtgagcacatcacacaatgtgccttacaagatttgttgtgccttgacattttgtcgtatggccgttcacactccaaacagtacggttgaccgaacagaccgccctgcttctgcacaccatcgaaatggtcctcattgaaatatagcagcaatggtgtgtcgtaggtgttgtcaatgtacttgtagagtggcttatactgtcccaacgagccaaaaatcaacacagcaaagcgatgttgtcgcagtgtgttgttccagtagtcaacgacgtgaggcacaaatgtgtccgcgtcgtagccgagccaaatccattggtgctttcacctgctgcattagcttaacagtatccatgatggagttgtccctgctgtccttttctgtcggtcacatagtcgaaaaacttccagcgaggccaatt

SEQ ID NO: 6754 - DNA, 2906 bp, Heterodera glycines
attttatcgtaaggtcgttcacactccaagcagtacggttgaccgaacagaccgccctgcttctgcacaccatcgaaatggtcctcattgaaatatagcagcaatggtgtgtcgtaggtgttgtcaatgtacttgtacagcggcttatactgtcccaacgagccaaagatgaacacagcaaagcggtgttgtcgctgcgcgttgttccagtagtcaacgacgtgaggcacaaatgtatccgcgtcgtaaccgtccaagtccatcggagctttcacctgctgcatgagctcaaccgcatcatgatgaagttgtccctgttgtccgtgtctgtcgttcacatagtcgaaaaacttccagcgaggccaattgcatgttttgtcgaccattgttgcctggagcgcgtagaaaaggcagaagtggttgtcgttattacgaattttaatcaggcactggtcattaattcggtgatggacagcagctatttttcggcgtgttcctcctttgacacgtcgtttaaattgaagtccggagcgatcgactgttgttattgtcaccgtgaacggatcaccccacagtgaaacgtttttctgttgtttggactgcgccaccttcagaaacaaattgaggatggtatcgatagtgttgtcggagatttttcgagtaggaattgttatagctccttccgacaaaagaggactgcttatcaaacatccaaggtgagttggctcgatcccacgttcacggctgtcttttgtagcactatcaatacaatgttgaaatattccagccaaaagcctctcggggttagaaggaacatccgaaatactgaagcgagatttcattttggtgtagtggaatttggcgacatgttcaacagagctacccaatttctgcacgtaatcctttggagcttcttttgaaggtgatgtctctcctcctccttgttggacaacacccaaaatttgattgatgactaagtcttggcggggttttttgggaagaagttcaacgaatggagaattcgaaggacgtttaggtgaacggttttccattgatatcgaattatattttaaaatttgctatggtgtgatggatggatttatatatttttataatgaaaatatatggggagcaatagaaattttcgttaaaaacacaataatagtcagagaaactgaaaagaagaaagaaaatagtgcataaattagagataattgtggggtaaatatgcgagagtaattaaataataatcagtgtaattattgatgtggttttaaataaattatttttttttaatttatcaaatgaatggctaattttactaggtgaagaaatgacggctatttatattaattgtgacaaactttcgtttcaatacatacttttggcgctaaaaattaaattcaaattaagaccatagccgaacaataatttgtttaacacgcaacgccagcttattttggtgccaaaattaaattcaaattactataaattgtcttacaatacgctatacacaacgccaatttcgtttcaataacagggtttttggcgctaaaattcaattcgagttttgcgctaaattttaaacagagccaaaaactcatataaaattagtttcgcaatgatattccatgagtggcgattaaattcaaactggtacaaaaaagttagacaaataaatttacagaacgccattttttatggaaagccaaaaatggcggaatcttaaatttaaaccgagtcaacatgcttgcgccaaaagtaaatttacataacgtcagtttcgcatgatactctatgagtgacgattaaattcaaactggtacaaaaacgcttaggccaaaataaaatttacagaacgtatattttttgtaaaactttaagtatggtgggaagtttaaattctaaccaagagaacaggcttaaaccaaaaagaaacaaatacatgttaaatggtatctcgaaccaaagctaaaggcttaggccaaaagtaaaagcctcctttatttcggtgtaaaatgaaaattgcatttaaaatagttcaagattaaactaaataaatttattaatcaaggcacaacgcttggaattttaaatttatatcagatatcgaagctagtcaaattacgacccctgtacgaaaacagtctggcccgcaaataaaatattagtgacggtttttaaatgattctttcttaaaaactttgattataaaaaaagcttggtcaataataagaaattataaatccaaataaaatatttcgtttatattctcatatagagaaaaatgattggactcaaatgttgtgctgatctactcggagaaaactcggcaatagacattagagtcacagaactgtttgattatggtgaagctagtcagagataattcgtccatacacaacgaacaataacttcaactgatcgcttcttacatacaaaataatttgaattagagggagaacaaccgatagaagcgagagttagagaaaagggaaggaaataaagtgaaagcatagagggatatagagagtgagtgagaaaatgaagaacaaaaaaatgcatgcgaagaatatagaaggggaatacatttgaagaaacataaaaagaaccaagcagagggagctaaacgaagctgagattggtgaaaaagtgcttgagtttgtgattctgacttgtagattaatcgggataaataattttgagttacggactatcccacgacaggatattttgggggaaaattcttctagttgtgttggtgttttatccatttcttcaccacctaataggtcattaagtggtactacaactcaaaaaaatgaatttccctcagctgtcagtttggtgatctatcaaaatacaactcacagcaaaatttaaattttccccgcaaatgtcacttt

SEQ ID NO: 6755 - DNA, 2502 bp, Heterodera glycines
  unsure (1)..(2502): unsure at all n locations
agagaggggagagagagagaggagagagagagaaggggaaaggtgaaagagagagagagagagaggggagagagagagatagagaagagagagagagagggtagagagagaaggggaaaggtgaaagagagagagagagggagggagagagagagccaaaagagaagaatatttctctctatctgttagttcatttctctttttttgaatcggtgttgtgtaagttggaaattctatggccaattatgaataattaaatttttttttaaactaattaagaggtggtgacaaaataaattgaaatacaattgtaaaaatgatggaccatttgtaataaaaatacaaatgttgacaacaaaatcacattccgaagcttcgcttggactgcgctcgggtggacgaaacactgtgcttccccgcctccgcaatttgagtgccgccgactcgtcgttgcgccctctccgtttggatttttcgttcggatagctgtttctgcgcctcctccatttctcgttccattgcggcagtggtccgttcagtgtccttaaataacaaaaattttagtcagaatttcgatttccgaaaaatttttgggcctcggaatgccaatccaggagaaaaattaacggattggtcgtttgggctacaattccggtttactaacctaaagttgaaaaaataagttgaaaaaaatcataaaacggaagcaaaggtcatcacagttaacagaatgattttgtacaaaaaaaaaaaactgcaaaactctctaaatttacgattttttatacacattttagaaacaaatgaatgaaacaagtttgaccacactacatattattattttcacacaagcattggtcagagaaacttcaagaaataacgatggagggggggggatgagatgaatatgagaaatagtatgggggacatacacatttcaaagaaaaagagttgtcgtcaaacacaaacattatttatttttctctgatgatgaaactgatgtgactgatggcaatgtcaaaacaataattccatgaaaattcctcaaatccggtccgggtgtggttttcgggatcttttgcattttaagcgtccaattgacttttgcaaatcaccgaattgctccccctctttgtttttaccattttttgcacatttttttaatgtacaacaaatcttgttttctacaatggtaattgattctcagatcaacaagcatataatgtctgaccagaaacaactgtttttattcggtcaaactcttcccggcaatcagagtggacttcttgaaaggttttttgggtttttacttgagagttatcatgagaaagcagaaaaattaaaacgaattggtcgtttggcgctaaattccggtttactaacctaaagttgaaaaaaaatcataaaacggaaaatctgaacattcaaaagggttggagttcgggtcaaatgggtccatcccccctttggttaaaaattaacgatttaacacttgcttggttcatttggacaacgattttgactcataaaatgtcgacaaacccaaaaaacaatgccaatgtttcaaccgccaaaaaattgacaaaaatttaggatgaaagaatgtgcggacaaacggaacaaaaaaaaaagaggatcgacagaaagtgaacaaattgcggtcggctcaacatcgcttttctgttcacggtttgcttttggactttaccatgggcacttggcatttgccggggttcggaactttttcggattatttccatgaaatgaaatgtgagcgatgggtcggaatttgacgaaatttgcattgctgtgaggggcggggggagggtcatgtcaccgccgatcgtagggggctgcgatcatctgatcccgaacctaaatttggacaaaatccaaaatgtaattctcgacttcgttcgagttcatgttagggactagaaattggcgaaaattgctatcagattcgtgttcatgttcagcgactccggaagcccctaaaaatgtgttttaatgacttaatattttgaatttttttcgaaaagggagcgacccttgagggtcaatgggcgccagctcagtttttggggtataactcttcgtaacttacctatttaatgaatttgatacagggatgggatcgcccaatgtcggtttccaaggacgggtatgccgatttgcaaggacatagtgnggaaaattcatgaaatccaaggacatttaaaatttttattttatgcaatgaaaaatggttaaaatttattcaaatggcttgtatttttcaccggaatgaatttttttcaattnttttgttttcactacgggtgggtcgggaacgggtctgggcgagaattaccggtcacggtttttcccaaattcccggtcccgtaccactctagttttcactgatcattttcctaatttgcgactcctttttttctgctttaaaacgcttttttttgcgggcgctttttccaaaattttgggaaaagggggggggggggg

SEQ ID NO: 6756 - DNA, 4945 bp, Heterodera glycines
  unsure (1)..(4945): unsure at all n locations
tttcaatttntggcctcccagttccaaaaaaatttgcatgtttggcgaagtggtttttgtaagatagtaaaggaacaaagggtggtggttcgagtccgttgtgcaacatgaatatttttatttatttttgtccaaaaaattaaaaaatgacgatttttaaaaattatttttggaagtttttaccaaccaaactggacaatcttgtaatcattcgaaagcccttgattaggagaagccttttctaagcaaatgctaaacgatttgatgaattcgaaaaaagatatgaacgtttgaaaatttgtttttcttataactcatgaaatataatgtataagccaaaaaatggctgtattactgaatgcgttatatttttctctatcgatatgcaaaatttggtgcggatttaacgtgcaggaaaaaagttaaacgtcacgaagtaaatccggtttttctctattaacagagataaaaaaatagtacgccaaaaagagaaatgtttttttctctgcactctctatttattggtccatgtctcattttttgaaacggtgtgtaaaatgggtaatacagagaatacatgtcaagagggtcccaggtatgtgaatttccgacatttctgggcccgaaattccgatttcgaaattttttgggccgccggaattccgattgacgctgccgaattttttggtaaagacaccaaattttcggcaatttgttggagaatcggcaatttatttttggaaactaaaaaaatggatttcgcctatagagttggggaaaaaaattaatccgggaatggggttctcgcctttttcccgttcccgtaaaagtcccatccgggcaaaaaagatgggaaggttatttccggttttcccacggaaatcccgttcctgcccaactctactttattctcagaaggcggccttatctgttccggtttgacctaactgtgaggctttagcctcttattttttcccgataaggctaaataaaaacgaggctttttatggctttttgaaaattttgaagctttttatggctttttggggaaaatctcaaaaattgtcattatttgccaaaatatgttaacaatcattccaaagatttctaattttattttggcagccaaatttaaatttttcactacctaatttttttttcttcttttcttcaacttatccgaattacatctttataaaatgcaaaaataataaacaagaccaaacgagataaattggtaaattaagaaatgaattatcaacaacaacaacctcaatttttttcttcctatcctacagaaaatagcggagatagtaagtaaattagtaaattagccaaatatgaaggaatacaaaagaggagatagaaaaggacgattaaatttagaatcaaaataaataatttcagtaaattgggctcaacttgctcaaagatggattcagacgcaacattcgcagcagcaatcgtttccgccccaaccgccgcctcctcccccgccccctccgtcgcgtttgccttattctcaaggtttggaaaaccagcaatttgttgtttatccacatcgggtctatcctcttaaggagtttcttctgcacctgtgtttcttggaatgccattgtccacacctcccccaaatcgaacacctgggcctggattgtttccaacaccactttcccatgtgtctgttggaccaccaaactggcgacctctgcagaattgtgcccatccatcatttaacattggctaccgatctcatgggatcgcttcggctgctaattattcatatttttctcaatcacagggaccgagtgaaaggcatgatgatgaagaggttttctacagtttactttctaaagcgatactaaaattctcatttgaatttcagtatcaggctcattatgacccgtccctcgagcaagaagaatccacggaccaaaggcctccagaaatgtgttctcctcagggggccatgactcaatggatggctaatccttggaatgcggcgatgtatcctccaaattacatgccaataattggttttcacttttttttttgaaaattttaaaccttcgcttttagacactcaaatgaggaagaaacttcccgcgtggattttggagggattagaaaaagctgagagagaaaaacaaaagaagatagaaaaggaagaatatgagaaaaaacgcaaagaaatggaggaggaaaaacaaaagcaaagggaggccaaaggaatcggaaaatttgtatatttttatttaaaagacataccctcgggtggaatatttttgtacccgtttatggaatattgaatttgcaacatttaggatgacgacagtaacgatgaagaagacgaatgcggagataatggaattgttacaccgaataatgatgatcatcaactcttaccaatacgaaaatttcgcgaatttgttgaccaaaacaaaaaggatgaagcaaaaatttacgaggaaccccggacggatgagcaacggacgcaggaagcggtgatcattttatgaatgtttttattttcccaaacaggttcaaaagtggcaaaattaagatttacatagacacaaaaataaatatgattcaaaataaatttaactaactaaattttcttaatcaaaaagcttaatttttgctatgtatttttttaataattaagcaaggagaagctgtcgctgggaaaatttttgaatatttttttaagaaaaattatttttattttctcagggatacgattcttcagtaataattccaatggctttaaaaatcattttttcttttcatttaagtgcgtttggaaataattcttgacttttttgaacaattttatttgagcattatgcttatgttttccttaattaagctgatagtggtacggcgtttgatgaccactgtgctgctagaaacaacggatagggagattaaacggattgccaacaatatgctgactaggagaaaaaacaaaggtaatcttatggatctgggattggctactttcaattacttatgggacaacccccctccggactcttgtctttggcctttatattttgctaggagtgcccgtcccttctaccttttatttagctcaaccaaagattctcgctcaaagcacagcccttgccgcattgacttcgcttgttggtatttgttgttgcattaactccgtccattatttattctttgcagacagtagggataaaaggcgttcagcacttggaattgacgcagcttcttcgtcctcaactgaaagcagttcagaggaggagaggactaatcgcaaaagaaaaagcaagagaaaacgcagtgaagaaacaaaggtcaaaaaggaatcgactgaaacgccagtaggaaagagaagtcgcaaatgaaaaggagaaaaatagaaatgtattttcaaacatttcaatgataaattatggtttacatattaggttctaacatagctaatatccattaaatgattatttgttatgtcggcttatcgagttggtcgttcatttgatttaataatacgtgttacgcattattaggcaaccggatatcggcgaccaccattttctcatttactgtgaaaattccgtttcaataatttgcattattcgaacgatggtacttttaaagttttatatttaagaagttttgagaattattttcgaggtgaatttcgattccctctaaacttcaccctttttgaaaaaagttttttctgttctaaaaagtcgtgaccacatgtttcatggggtttttagggccgctgatcacgaatctgacattcggcagtattaccgaactacatgctcatatacgaatgattagtgtacgactgtctgacatccaacagtttttcaaccaaaattttgtcataacaaacagcaacaatgaatagggtggtcaaataagggtctctcaaaacttgtcgaacgccttcttcgcccccgatgctttgatcaccttgagcacattgaaccggaccgtcttactcagcggacgacattcgccaattgtgacgatgtcaccaatggacacatccctggaaaataggtcaaaccttaagacaactctttagttaattcttgccggaaacacggagaacaatgcacagacatgttcttgtggcgcttttcataacgacggtactttggcacgaaatggagatagtcgcgacggataacaatcgttcgctgcattttgtttttgatgactactccggtgagaattcggcctcggattgaaacatttccagtgaaagggcatttcttgtcaatgtatatgccctcaatagcctaaaaacattcttaaaatatgtactttaataagaattggaacaaaaactgttctttaggcaaatcagtaccccaaaccaagcaaatgaaaattcaaacctcacggggagttttaaagccaagcccaacattcttccaataacggtctttgttggccgccttctttccaattccttgagttctgaacttgtcgttcaagaacacggtcggctgtctttggtatgcgcgctcagtttgttcggtcattttcaatagaaaaagcaatgaaacttaaagttaaggtaaattagtcgtaaattaaatggagaaagtgcgagagtgctgaaagcactaagattttattttcctataaattttacaagggataaatagggcatctaaatctaaacatggattaaatgaaaagattatgttatggaaaggaatcgaactcaaactgatctccaaaaacataaattgtgagggacatacatttttgggcgctatatggaaagtgggcctttttgaaaattttttaaaaaggggggacccttttgttttgcaaaattttttttgtgatagtcataaaaatttgttctctggggtttttggggtccccgatcacgaatccagaaattattttgatcaattccgatttcctaatctaaatt

SEQ ID NO: 6757 - DNA, 1309 bp, Heterodera glycines
  unsure (1)..(1309): unsure at all n locations
cccagcttcgtgttcttgataatgcaacatataattgtccatgtgaaaaaacgtctcttgttaaatcaattccaactttttcaaatgtttgtccttgcgcaccattaatagtcatacaaaatgctaattttaaaggatattgatggcgcttaagcacatagggaagttttttatcctcaatcaaagttattcttgggataaaatcgatttcacctgttctatcacccgtcaaaatcataacccttaacacattcttttcaatatcaagtatttgtaaacgtgttccattacataatcccatatttacatttaaatttcttattaattttgtaacacaatttattttaagcttaagctcatgatcaggaaggctatttgtttggagtttattgagtatttcaggaagaataggggcttccttgctttcggcttcatcaatacttttaaatacatattcctctccttgaaatttttctaaaatttgttcgttataaatgttaatttctctgttatacggtgctaaaatacaatgactacataatttagaaaattcttttgtattaattatttcgccaaagatctcttcaattaaatctttttctttgatatcacagacttctggaagaaaaatataattttgttcatttcttttaccatttcctatttctaaaagttgctcagaaaaatttagtgcttcagaatttgttcgtatattttgatttaaatgaaatactttaaaatgaatccataaatcacttttttgcaaacacaaatctaaaatttcttctttcgttgctttattttttataggtaagcattggcgaaagtctccacttaaaatcaaaatttttcctccaaaaataatatcattattatgtaattctcttaattttttgtcaattatttcaataacatatttaggtgccataggggcttcatcaaaaatgaacacatcagtatttcgaatttcaattgcttcattagaaccattttcaattgatgaataagaattgctatttaaatctaatggtaatttaaaacggttatgcacagttcgtccatttttaatagtgttgctgcaattccactaaaagccatgttcgtaacttttttaccaaaaccacgggctaagtgaaataaagcaatttgaacaaaagattttcccgtcccacctggtccatcaatgtanaaacaatttcctttatttttttcaggatggtcanaaacatttttaacgcaatcaaaaatttcttttttgttcctcattcattaangaatatttgtttaatgcanaagtgagttccttttt

SEQ ID NO: 6758 - DNA, 4889 bp, Heterodera glycines
  unsure (1)..(4889): unsure at all n locations
tcattnaaggaatatttgtntaatgcaaaagtgagttcctttntagggttaattatttgttcttctgaaatatttcctattttttctgttatttttggcatatccgtaaagtcaagtaaacattttccatgatntaaaaggtttttatcaataagtgacaaagccatttgataagcagtattttcagaatgtaattttttaaggtcataacttaatgcgtctttatatttatcccataataagcctggtttttttggttcacagttaatgagaatatttgcaaaaagtgagcgaaggcctcttggaaatttaaattggctcgcttcgtttaaacatttatcccattctaagtcatctctagttaagcccaaagccaagcaggcatctgaatatgatgtgtattcagtttttaaatcttcaaagcctgtcgcatgtttatgaattaataaataacgtaaataatataattctttgttttttggatttatcgtatagattctcccaatcactttgtgtggaccttttcttggccacttccattttctatttttttttgtcaaaagtgcaatatgttggcatttcaatgtatttgaattttggagcagttggattttctttaaaaaaataaaataagcagttaatttactatctttttccatcgcttcttctatattatcgttgtttgcatcatggtcaaaataaattgtttgttcgttttctaaatgaacctcaagcctttctattgaatgagatttaccctgtaattcaaattttaacaaccgaaaacatgcttcaacagggcttaaataacgggcttccaagtattgaccaacttcatcatatttcaaaaatgttttttcaccgtttggctcttcttttacacattctactgttgctgcatcgtatcctttgtaaatatatttatagagatatttaacagcatttatttcagaacagatttcaacattaatatgtgattgaaaacgcaataataaatacggattgtaaggggctacattttgattagttaatcgttggcctttaacaaattcaaaatcaccattgttcgggcgtttatataaagcatacccatcttctcctaattgggtttcttctctaaattttttcggatatttaaatcgacatttttcattcctcatacatggagcatttttatttgattctccacacggcccatgcaacataaattttcttactaatgaccgcaaaataggttcttgttctttattcggaagatcagcacgtataaattgatcaatatcatttgtatttttaaatttgtcttttggatgtaaagtaattaagaaatgtaaatgcggtaaacctcttttttgaaattctataacccaagaataagcaacaactttaccaaaaatttcaccttttacaacttcctcaattaatttgtcagattttaacttaaaaattcttgctactatatccggcctgtcttctgctttttgattttttaataaacatttttttatatctgagtcttcgggattaattgtatatgttaaaaacaaatccggtttgccattttctccaacaattgccatagaatcaatgtaattttggtctttattccttggtccacccaaaaaagaagaaggtaaaatgacttgttttccaataactgctcctgtttgttcggatttgttaaaaaggtaatcttctaatcctttatagctacatgctcttaactctttttggtgtgttttaatgaaatttaatctatcccattcaacacgggccgcttggtctacgacccactgttgaaaaagcctctttgcaaaatgatgaggtaaaaaaaaattttccctgtaaaataatttaaattttataaaatcacaaaatgaaatttttttgcctttttgatcttttatatcgaaattccatcctttcgttcccaaaggatataacaaaggataaattaatggttcgacattggggtctaatgggtagatatttttcatttgcttactccccttttcgacaacaattatatttgctgctggtatctcatcgcttgcattggctactataattgcggccacttcgtttgattgttgaacattgtatcggtttggatcgaaaccgtttcgcaaactcattaacatttttacttcctgtttttcatttttatttctcactgttgacttgttttgttcatcgattacatttttcatcatttcgtaggctttagcgaacgggtatatttttctaagaattaattcgattttatctaatatatttatatttaaattatgcgaatgtaatcgaatgttttgtgcgtcatcattatccaaaaaatacaattgtccatttgtcggcaaaaatttttgttctgttggttgtgctactgcattatatttatgatagacttgccctgatattttaaaacaacttgggcctggagttgtaaaaccaaatctattgcaagctaaagaagcgcaagcgaatgaattattgtattttcttatattattcgtaaaatttttcgaagtttcattttcttctgtaaacaactgttttaattcaaatggatattcatcaaataattccaacaaattttttgattttccaaaattgcaacatgaatggaattcattcacttttgaatttttgattgattgctcttctataaaatgcactgccttgcaaaatatacattcaatgttaaactcttgtaaagagaatttttttacattgtttagttctgctgcacttttaaacaaaaaacccgtcggtatacgtttggtatttggttgagatttttgtgtttgagtggtttcgtttactccatctaaatcaatcatatccaggtttataacgctttccaggttcatatcttttccaattttctttctttttctttctatttcatcgctttctttaacttcttcaaaatcaatcatatccaaatttataacattttccaaattcatttcattcccaatgttctttttctcattcatatgcattctttcaaaagaatcaaacattgttcttgtccgcttttttccggagctttgaaccggtttaaccgcttttttagacgggagcttggaacccgtttggttttcagagatttctgaggaattattttgtaaagaagatgaagaacattgaagctcagagggaaataattgtttagttcgaaccattgcaaatctaaaaaataatttttgaatatatttttatagctattgagagcatttcataaaagattaaaaacaccttaaaaaattatgaaattcaaaaaaaattatatcaaaaaacgattaaaacaaaaataataatgaattattagaaaaaaatggacattcacaaaaatgtgataataatttaaaagaaaaatattaatgataaaaagttcctttaaaatgaaggacacacaaaggaaaagaaatccattcggaaggggaaacgaaaaaacaaatgatgaaatcaaaaacgtaaataacaaaataatgaagtgttctcttcccttcatacataatcttttattttatttttctcttcctttaaaacataacgccaaacaaactcaaaaacacaaaaaggggcggagcttcctctcacttagtatagagtaagggatactttcaaaaaacaaaatagaattcgacagatggtgccaaaaaactagcctaggcaaaatttcaagaaaagttacccacaggaaaaattttttcccagggcaaacatttcaataattttaattcttttttagccaagtccacaatttaaggccaaaccaaataaaatttacaatattctccagaattttctattaatgaaaaaataattctgccttcttctttaaaagaagaaattgaaattaacacacaacatagggaggacttgaacctgggaccccccttttggtgactaactcacagaccactaagacgaaaagaccaacttaattgtacttggagcccaaaattgaatcgccgtgtcgaatgttcctatgtacatacgttttcgatgttgctctgactcactattagttgagcagcaagctcaagctgaacatgcaaagaaattttataatattttaccaactatgctaaccaacagatatttttaagaatattccaggcttatgcgaggcgcctattaaaagttgttcaggtgcaaaattctttccaataattcacttaggaacgttttcatctcgttttcatgagtaagtacaagttttgatgctaattaatgaaggcatttttgaatttctaaaaaaggcaagatagtgataactttctcgcgggatatcatggtctttaatcacaatccaacatcaattttaccaattccaaatccttaactcaataaaaagttgaaataaatgcaagattcatgatcagcgaccccgaaagtccagggaccaaatttacataactaggcaacatcttacaatgcaaataaaagggtccatttttaaataaaattcaaaaagtgccttttttcatgacgttcaaatttttcttttatttaaattaagtttgtgataatttggctgagggcagagaaggtaaaacatgtgaaaatgagtaaattaaatgtaaaatttaggcgttgacattccagtgataaacaccgtcgatgacacagacataccttttgcatttcattacattgccaaaaacattgacaaagacccgcggaaaacagtataaacatttttatatgagagtccaaaattaattctgcacattgatttaggagggctgtaaatgtgtgggcgtatgtaagccgaaaacatgcgaatgtatgcagagaagcagcatcaaaataacgaaggtgcttccactatttttagttttcaaaattcatataaaggtaaagaagaccaaaagtat

SEQ ID NO: 6759 - DNA, 8473 bp, Heterodera glycines
aatcaccgattgatccacgacttcgccagcatttcctcgctcgtcagacggctgaagacgcaaaatcgagcaaaacagcaaaattattcgatgccattgtcgatgatttaaatacgctgttaaagacggaggctgaagcgaaaatcttggagcggccaaatttcaaaatcaatgctgttcaaacagtgacggccaatcatctccaaaaaacgcagcaaatggcaatcgatgcgacatcgcaatttttcgggcacttcggatggaaaatctcctcccaacaattgttttagagctgcactgggcgcaacaatgcccaaatcaaaaacaattgtgcagtaaatggaacaggaggggcacatcaaacaacaatgcgaccaaatccagggctagcatcaaaataagaggaaaattctccataaaatcagcatggtaaatctgcctgcggctttcaaaaatcaaggcaaattttcgaagcctttgaaagaaaaaccttggaaatacagcacagcggatgtcaatgtgatcaataaagctgcattcaaggcaatcggcctaccagaaattcaaaactcgaatgcaaatcaaattttctccaaaattctggccaagatttaaggacaaatcacagcgctattatgtgcaaataaaaggtgaggaagccgaaaagagtgaatgaaactttagacaaattcgtcctgcccttcgcaccccgccaattccaagaccaaatgatcatctgcgatcagaaccaaataaatcatcccatgtgtgatagatttcagggccgatcagtagacttaaaagtggaggtgttggggcgacccacatttcaaatattgttgtcattgggtccgtgttttaacggactaaatattgattttgctcctctcccatttggttcctccactcatttgcccaactcattctctttccaatttgccttcgcattgtcgccctcctattttgctccattcttccgaccaaatatttgtgctttatttttccattttcttcaataaaaaaaattttattgtgttttccacctgcacaacacaagcaaatgaatgcccccgagtacagtcgattgggggtgcaggactgaattccttttttgttgccgaaaatgggcagctaagttttattaaccgtttgcaggataaaatgccttttattaaagtctttgtggaacttttgcacggcaaaaattaagacaaggccttcctttttaatttgtgtatagttcctttctgccggagccaacaaatgcgacgcatgcgcgatggccttgatgcttgcactcgcataacgaagggagagctaagagaacatcggcttcgaaaaccttcgggttatttgggcgaacttcgtgcttcggataatttacccgaagattcgggaaaaacacccctaaagaacaagtttcattgtgaaaaatgcacctctaatgattagcttttggtaaaccttaatttaatatatttattattcgaattcgaactcagcaccccttttccaagaagcttttgctgcaacattttttgcttgatggccaaaatttctttgatggggccggctgttcgatgaatttcgctttaacaatggtcgacgaaacatttgaagacacggaattcgggtgcggagcagtccgacgcaaaacaaattgctgcagccaatcttaattgtgtgcttccatcgcccaattcaaacgagttatgcctgaaagggtcagggttttgattttcttggacaattgactgaagaagctgccgacggtcaaagccattttgtttgacaaattaaatttgagtttgacgaaatttattgttcatgaaaacaaacaacaaaatagcgcagaaaagtcgaacaatttcaaaataaaatagcttataattgtcgacggcgtcgccaatgttatgccggagataaaaagggaggaaccgaatgatatttataacaaatgaaatgggtcaagcgatgatgacgtgaaaaaagggaaagaatgttaatatatttaaatacgatcctaccaaatcatttcatggtttttttaacaaatgcacaaaaatgttgaagtttgtacctataatattgaacagcaaggtagggatattttggaacaatcattaattttgttcttctaatcttaaaaattttttgtatgtgttcatgtgaaagtattattgtgttcttccacttagaacacacaaagaaaagaaataaataatatttttattgattgtgtcgaagggcaaattgggaaatacaaaataaatgaatgatgaagggaaagaacaaagtggttgtgtccacttttatggaaccggagaacactgatcgctgctttcgctgtcatggtgttcacatgataaactttgggcaattttaaaaaacaatccactaaaagcagataaacatggccgtcttggcatgagcgggcaaaatcaatatgcacacgttgtagtggctgtttatttggtgaccatccttcctttgtgaattttatcactttttgtagactttcatctttttgagtcggtggcagtgacgggaagatgatcaatttgtgactgcaaaattgtcgatgaaacattcagattctgtgcaaatttttgctatcaaaatatcttcttctggtcgcggataattcgcgttatggtcgctccaattccatcttttgaagcatcagccgcgacgattatcggaagcgaggggtcgaagtgggttaaaagcagatctgacaacatgatgtcttttgctttttcaaagctttttgctggtcttcaccgcaattccaaagttgttctttccgcagaagttggtccagtggtgccctgagttcacgcacctttttgatgaacgactgtagtaagtaagggctccgagaaatgagcgaagaggcaattctgtctgtaagaatttgcatttttcaagttgaatgcgcaatccatatgctttgaagcgcgtaaaaaattggtggatggctgaaaagcgctcttcaagggttttggacgcgattatcccatcatccaaataagcaaatgctccaggaataccagcacatatttgagctgatttgacgccaaatggaagacgctggcactgaaaaaggacacgatgcgtgttcaaacgcagagctttttggattcgtcatccaattccatttgtagatatgcgtcttttaaatccaaatttctgaaaaatgcggcgccgcttaaggctgcgtaaatgtcatcgggttagagttgcgagtctcaatgtcggttggcaacaatttcggttagtcctaatttattccatgtttcaatgctaaagacttcgcctgagctccggtgtcgaccttcatctcggtttttgtgccgttgatttcgaccaaaattttccaccaccatccttgcgttgtgccaatttgtgaacatgttgctttgacttggaccgtgtggaatgaacggtgttggttctttggcgtgaatgccccttttcgctaatattaacaatgtggccttgttttaggcacttgtggcatgttgtttcacggaaacgacaatctgatctccagtgatcagtacccccacttgagccgcatggctggaacggttgtccacgatttgctttccatcctgtgacgggtttttgctgtgccgagtagttttgttgcacggcaatttggtcttgggttttgtttatcgccactgttgagggcgagttcggatggcatttgttggagatttcgtggaaacgagtgacaaagcactgtctttgacaatttgggtcgcttttaactcctcttccaactttttgattgtgactgtgaaccatttttctcagcttcaatcattttaagacatttctgcctcaaatcgtggtgctcatcccttagtgaaatcacaaaaaatcaggcatttaagctgttctttggtgaggcttaaattagcacgctcacatacgcgttgatttgagcaactaaagaacgtaagcattcatatcaacgaacgaaaaaagcgcgttccggcaaacaacgccttcaatttgtcgattgatcccgcccaagacgctttgtcgggcaactccgggctgattgtgtccctgtatttggtgtactcgtcgtagtcgaactttggcttgctcggttaagtctttaccgtccttttcaatgaatgtgccgaagcgtttgtgacacttcaaaagtttgaccattttcggggtcataaacaaacttgaaattctgctgtcgattgagatggccaaattcgttggcttatgcttgaagcggcgcttccttggagcaaagcggtcaagaattgctgaatttgctcggcgtccatcgtccgtcatttgaagttgatgaaagtccacaaaatccacacctagtggatgcttacaccgccttggtgataagcttgacgaatttgttgaaaaaccgcttcttgcggaacctccccttcttagatctattggtttttttgttgatttaaactgcttcttaacagacctcacaccgcctgggttctattggtttttgttgaatttgcagagtccaagtctcaatgatgaagaatggctgctgactgcgccaatttattgtgttcttccacttagaacatgtaagaaaagaaataaataatatttttattgattgggtcggagggcaaattgggaaatacaaaataaatgaatgatgaagggaaagaacaaaagtggggagaggtgtccatttttattgacgagggaaggacgggtggacacagaaataataaatacaataatcagatcgccaaaatgttcaagtttaaatcactatccaacaagtattattgaaaaaaaattttacctggataaggccccagggataggttaaatgacacgaaaatttttaacctatacttttaaaatgactatgttaaaatgagttttggaaattaaattacttagtatattaaaaaataccaaataaacaataaaaaagtcgagagcgtatttgaaaataacttttttaatataaattaaaatttataataatttttatcagacatttattccttaaattttgtccgatttattacctagttttttcaggaaaaaataatctgaaatttatataagaaaattccaataaaaaaatatttaaaaaatttttcagcgatttttttgaaaaaaacttcgaatagttttatcggttcataaaattgattgaacacaaaatggactaaattcattaatcagaaaactgagctaagggagctccatttttaactacgattaaggaggggggaaagtctaaagaaggaccaatcgaaattttaatagtaaaatcaaaattgtccggccaaacgcaccaccatgcctagccgtggcgaattgtgatggtggtgttcatcaccggctgaggacgagggcggtaagaaaacgtccgcggaagaagcgaaagcgtcgccaccgtagccaccaaccaacagcaacaggacgtcatcgtcactcgcgccgccggttaacgatcgaatagtgttgttgtctatggggaaaaggaacgtacgaattggaaagtaaatactaaatcggaactttcgaaatcttgttgtaaaaaagccataaacaagggtagaatttttcacatcccccaccacttatgaaagttggccaaaattacaaaactgatcattagggtcgcgacttttagtgacggagtcgccaaaatagtgatttctagtgaccgataatgacatcagaatcgaaaaattttaatgcagaaatgcgttttttgagctcctttcttcaaatcagttgagcaaaaaaaatagttaaaacctaaaattcacgtccctactgatcattcggtgctatgacgttagtcaaaaaccataataatgttcgttagtcaaaaaaccatcaaatgaaatattttgcggggcccaaacgtgcccgcacaactgaggtaaatcgatttaaacttttgatattattccatagccctaagtttctataattaaattcaagaaagttatgaccaaaaaaaattttaaaaactgagttttttaagtttctcacgtcataactagagaccggatttttatgtgctaaaaatcctgaaatatgtaataaaatatgtgctaaaaaatgctgaaatatgtgctaaaaacccccaaaaatgccaaaatatgtgctaaaatatgttttaaaaattgaaaaaataagtgtgtttttgcataaaaattcccaaaaatctcattctttatcatttttagcccatacaacgcaaatcaaatacatttcgaagtgtttggggtaaaattgtctttttttgataaatcatttctataaattgaaagttccagcagagaacttcgaaatccaatgacgaattaatgaattcgagatttcattagtttctacaatcgaagaaaaaattttttaatttgaaaattatgttaataattatgaaaaaagtcgatttttaggggtgtatttttcaattttcttgtatttttattgcaatttttctcaaaaatgccaaaatatgtgcaaaatatgtgccaaaccccaaaatatgtgctaacatattttatgtgacaaaacgccaaaatatgtgtttttatgtttttataagtcgctctaaatcaaaaattgttcggagataatgctatttttgggcttctctcgccataactaagccgcaaaaaaaatatgtaaaaacataaaaatccggtctctagtcataacattccaaatgaatgaatttttaaaacatttagggctatagatgatattaagagtttaaatttggctaatctccccggagcagtcccttccgtattgttccccatcccccgaatttttttaaaaggaaattcacatttattgttagaaattttcagaaaaaaattcgggaagggaggagggaaatgagctgttccctgccattccttggccactgtcggcggcggctgcactcactttgccaatttgtcaaaatgacgttgtagttcattgaagacactgccattccattgagcgagtcggtcagattttgagcaatctttttaaaaggacactttaaaaaaacaacaaaaataaattcaaatttatacttcagtgttgttgttggcggtcattttgcgcaccgctgccgccgacgtcgaatgctttttgccggctgcacgttgtgtagaagatgcataagcgtgtcgatgttgctggttgttgctgttggagttcgcactcaagccgccgctgccgcccgtacggcttgaacattgtgtggacgatgaaaagcctccgtcaccaaactaaatgagacaaattttgttcaacaaatccaaaattatacgtcaaaaattcactgtacaaaccttgaacatcttcaacgcctcgttgttcaaaattttgtagaaaatgtgtgccttttgaacatcttccgctatcaccaaacaaatgtccctgtaataaaatatatatttattttattttcccaaccagtaccctacgggcactgtaaaagatttttaattaattaaaaaaaaattgaaatagcttcgctatttaacactgtctctagagggcacttcgcgcaaaaaaactttaataaagggcaattggattttgtaatggccggcaatatcctttttctcttccgctttctcttcctctttccgcaaaattggccgatgacccctccccctcctcaaccccccagaccccttcgaaaaaattccggttgacctccccaccttattttcatgtgtgtccacccctcaccgattgtcaatggtccacgacgccttcatgtaggtgactgtcaacggatgtaccggtgccaccccggtggacgaggccgacgcctgtgcagcagcggcagcagtgccgacggtgccaccaccgccgccatgttggaccttcggtatgaagccggcacttgcgctggacgaggaatgcccgctgctgtcaagcccatcatcatcggccatgctgaacggtgttcgcttctgttaaaaacagaaaaataaaatttaaaaaaagtcacaaatagaaaaatcaaaatttatctatattttaaaagcatacgggttttttggtaaaatttaaacacaaaaagagcattgttgaggttttttaagaatggggcgcaaatgtccgaaaaaatccttacgaatggggctcaatgaccgaataaagccctaagaaatggggcaaaaatgtccgttgcgcaaatgctttgacacgcctcagggttagtcgaacgcaatgcattcattggtctcgccttttccccttctcgcgtcaatcatattgaccggcattctaaactgccctcgggcgtgtctaaattgcccacctccttggccaatttggccgtgtctgatgtcaaactcatttggtgccagaagccgaagatggatgtacagcagccctcggcgcacggctgctccatgtcggaactttacaaaataaaatttgttttttgagataaataatgacaaaa

SEQ ID NO: 6760 - DNA, 1186 bp, Heterodera glycines
tttagtccacatcgaggctcaaaacgggcgcttctcctttatggtttaaattttgttggccttacagagattagaagccttacaacagtgattagaagagttacaattagaagagttttataggtagaggagtaaatttcccatccgaaaatgatgctaattttgccgtaaatccttactatacagtcgacgaagaaagctatttacagcttttccgagaaaatttggtcaaaatattggaaaaggcgaaaaataattcggaaattgcacggaaaaagatggaaaaatggtacaatttacagccaaaagtgacaccaaacaaataccaagaaggcgaacgcgtcatggttaaatttccgggcacaaaccaacgatcgactcacaaaaagttgcgatggaatatatttggtccttatgaaattaccgaaatttcaaattcgtcggcaaaagttgtgccaatagacaaaaggaccgctgaacccttaagtgtgcctttagaacgattaattcatgcgcctaatggaatcccaaatatttgcacagctccgcgcggcagaaacgcttataaaaatgtaataaatgtgatggccatcttagaaattttggaatgtggaaattttgagaatgttgaggcggaaaatttagtggaaaattcgaattcatcagagacgatgaaaattttagttgccggtgatagaatggagattgacgaggcaaaaatcagctggacaagcacttgtgaaggcggagagcatgtgctctgcaaaaagctacttgccgcagatttggacccgattctcgacaagtcccaaggcatcggcgcgatgacaatccaaacgccgctccaagggctgctcactcttttcattctccgggcaaatatcgccatgtcagcgagcaaagaattgctcaaggtgttgttaaagtggaaaagaacggacggaataagtaaattgcaggcgattttaaattcggacccggacttcgaactgataaaatatgtcgaggagaggggagacgcaatccgatccggaagctgcccacgcaacgaagaagtcaaaacaatttggcaaaaatggacaaattgctgtgcgatggttcacggaaacctgaaaatgtccggctaacggtcgatcactttggaggcgccgatcgctctttcggaattgcctgaagcagacagagt

SEQ ID NO: 6761 - DNA, 5666 bp, Heterodera glycines
tttgcgtttgggtcatagcctgccgttgtgcttcgttcaattccgagggtttttgttatttcagcaacagttttgttaacaaattcgccgcctctatcagaatgaatttttttcgggtttccgaaaacgaggattaattgttcaacaaatgcttttgccactgactcaacgtttttgttcgggattgctgcagtaataagatatttggtgaaatggtccaccataactagtacatatttattcccccgttcggacatgccaatcgaaagaatgtccatgcaaactaattcgaatggttctgttgtaataattggccgtaattctggtgtgtttgaccgcgggtttcgcgtgtgggcgcaaattcggcattctaacacagctttaacacaatccgctcgcatgttcggccaaaaaatatttttcggagagctgggccaataacttttttgtgacttaaaatgggccggcgcatttttccttcatgccctttcagctatcaaatttttgccgatatttttgtggcacgaaaagccgaaaatttttccgaatttgcctcattaaaatacaaaagaccatttaacagcgaatatttttgaattgtgcccgagattcgttgcctatctttatgatcttctggcaatttgtgtttttccaggaaatcataaatatagtgcaattcgcttttccgtgtcgcttcaacccattcagcttttggtgttccatcatggatattgttttctccatcctttctgatgacaatttcactgatcacaacagaatcttcaacttcatctgacttcaggccaccagaccgcgaaagtacatcggcgataagacagagttgcctggaagcgaatttttgactatggtagttgggccattgaagaagtacgcgcagtcgttgtccatgaaaaaacgacattggtggaacaaccgagggtcgtaatcggcgactccactggtgcacaactctgtggtggagcaggaaaccaaatcccggcacatttcatcgggaccgtcaacggatcaattggcgatattattcgggcactggacaaggcggtgctgacttccaaagttgtggcggcactgatcattttgggacgggatgccatgctacgaggcgaaaccgtggcgcagatcgcagaagaatgtggacggattcgtgggatttgtgccaaattcaaacatgttcattttgtttggttgccaccaccgtacgtccgagagcagcacaacctgtacaatgaactcctgccgaccctggaaacagtcgctggtgaatggttcatcgcactgacgacgagcggaagaagcctggtggagatgtggcgttttggcgagacgttcgacatgacacggattcgttcggatgggaaaattttgtctgagggattgaaatgttttcgcgcttggatttttacccaaatcccaaacttccccgatgataatgctcttggtcttcgtcgttcatctcgctcaattccatctgtatctgatcacatctctgaattgtctctcagccattctcgcacttctcgatctcacccctatgctgttcgtcaccattatagctcgcaggctcacagaggcggaaacgagatgatcagccgtcgtcgtcattaagcagcacaaccttgaaccccaccgatcggtagccgaattgtttttgcttattttatttgttattgtaagccgaggggaccgtcttttctagtgggcggtgatgtgctaattgacttcatttcaattttaaattattaatttctgtggcgtttcgtatatttttaagagactcaatatattttgtgatgtttttggttgttttatgtagtttttaattttggagaagaaattgtgctgaatttattatttttgtttgtcgtcgtattttaactgtttggtataaatttatttgtgttttgttttgttttgtaaagacagatcgcagagaactgttgacaatcgccgttttgacatttgaattgggaaaagtggacgcaaacaagcttttgttttcaacttggcgctcctgcaacaaaaggttggcttgcttagtgacgactaaacggaaaacttttacgtcggccatataagttgcgataatcctcgtgttggattttggattttatcgacattatcatatatcgacattatcattttttctgtcctcgtgttggactcttcatgcatcccaccgaattataaagcactcgtgttgtgctcttcaagattctccaataaagcactcgtgttgtgctcttcaagattctccaataaagcactcgtgttgtgctcttcaagattctccaataaagcactcgtgttgtgctcttcaagattctccaataaaactcgtgttgttttaaaaagatgattaaccgctctccaccattcaccagacaacgagctcgagatgcggcggcattacagcaacagcaaaacggagttgtagggaatttaagcaggccgaataacaccgctaacacataaaatcgaaatgtttcgttgaataaccgggttgatggtgaacttttagagtcagaagaaagcatgggatccaacgaaattcgcaatgcgcttttggacgtcgcggcaccggatgaacagaatggccaacaagcagttcgaaatgaagcgggacgaggcggaggaaatttcgagcaacagcatgttgatggaggtttgcgaattcgattgcaaaacgttgggagaaataacggacaacaatggcaaattagaaacgaaaattcgaatgatggccatcgcattttacatcccgcgccgcaaaatgttagacctaggacttcaaccccatacgaaaatatgtttgaagagttgcgcgtagagcacaccgtagaatgcagaccgcacaatcaaaatttacaagcaaattttcaaaacatgttgaataatggtgtagctatgcagaaccaaagagttaccgcacccaccggtcttcagtcgcatcctcagcaaattcatccgcacccaattcaacaaacgcaaccacaacagccatcccaacccatgccagcccaaccagtttttcaacaaggatttcctgggtttatctggggttatccgggacaatttccttacggtccttatccaactgcttttggctaccctccacagcaaaattttggctatgtaaacccaaacctccaacaaccgccgatttttaatcagcaatttccgccaccagttttgcagcatgcaaattatgcaatgggtgtacctagccaacagcagccaattgtacaagcaaatcagcagagagaagttcttcaacctgttgcccagcagcaaaaccctccgattacaaaccgtccaaacaattttggtactcaaaatgcgggtgctgaaattcgtcaaactgaaaatgaaatccgtggtcccgggatggaccaagtcgcatatgctctgattatgagtcaaataccttatttaaagggaaatgaaggcgctgaaaaaattaaggagtttttcaagcgttttgacgctaataccgctgaatggtccaatgcaaaacgcattacctcattagaatcaaaactctttggtcgggctgagagagcttttaagtctgcgtgttccaccgaaccgtaccgatatgagtccataaaaagagaaatgtttcggcagttggaagaaacggatgcccgtgaatggagtgcttttgatcagataatgaccggtattcgacgaaaaaacgacgaggatttggacagtttggctgaacgtgtcatcaccctggtacgacgcgcatacccaggtttgactgatcacctggtcgatgattatgctatcaagcatttgattcgaacattcgacaattcggaattggcactcagtttggaattgggaaggacacccggaatgacatttgatcattttgtcgggatggcggcgagagcagaagcgactcaaagggcaacccgtcggatggcatcgcaaaatgctatacaaagagggaggcaaaatgaagcgaattcaacgggaggatttttcaacaattcgcaaacacagcaaacgaacgacaaccgcccaaaatgctacaattgtggaaaattgggccatgttgccagaaattgcttcaggcgtcaagccgaacaaaatggccaaatgcgaaacttcgaacatatcccaacgactggtgcaaactgtaccccaatgccgagtaacccaaatacgaattttatgagcaaacccgaacaaaatgctaatcagcaccgtcctcaacattttcaatcaagaaattttttgaaacaaaatttccttattgaaagaaaagaagtgaaagacaatgaggacgcggtcaaatgcacaggtgttctgaacaatgaacccgagatggaggaatttttcaaaagtttttgggaggagcacgaagacaattttgaagctgctggcaaaaaggaactgtgcctaatcggcaaaataatgacaacgaatgttacaatttttgatcagcccgctatttcgatgatggatggcggtgcacaagtttcacttattaaggcggagtttcttaaaaatattttggaaagtcagaaattggaaggcacaaatctcaaaatttggccgaaaacccggaatgtcgttgacattaatggaaagcgtgtcgagtgttatggaattattttgttgccagttgtgagaagaggttgtgaagcagttgaaattatgttccacattacggatgcgcctattggacatccaattttgtttggaacaaatgcacttgggctccttgggttcaaaatttttgatgctcccaacggcgaattagtggaatttgagtgtgtggacaacaagtctgattctatgcgtgtaatttacagtactttggttgaaccatattcaacaaaatttgttgaactttcaatttcgccggattttgacgacaaaaatgttttgatcactccaaaagaagagaatgacagaattagggttgagtcttctgtagataaaggcagaaagggaaaagtgattacggcaatcacaaatttttcacacaaagcagtaattttgaaacaaaacgaagaaattgctgcagttgaagagttgaagcaaattgccaatgctgacgattgcttgggacgcattgtgcgcaacagacccggaccaatgacctccaagaaacgcgtgttggggttgtgcgccgaatgcgacaaaccgatcactgccggcgctcgtcagatgcacatgttctaccaccttggcaaagacatgaatacttatcgtttccgttgcaaacatgcgggatgcaaagtgcaagactatcggaaggatcagatggaaaaccatcagtcgaaagcgcacggaaaagttgacgccgaaatgatggaagacagaagcatggaattgtacaacatggtccaagaaatgtcaatgcaattgctgggcaccaaaggaaacactcccggaccaactgcagtgaaagcgcaacagatttatgagcagcaaatgcgcgaaatggaggccaatttgggggtgagaaagcggcggaggcctgaatattttggctgcaatcttccatccgccaacatcaacaacaacgtcatctcccgctcttccggtctaccaatttacgactccgccaaccgccgagtggaggatttggaatgtcgtctgtgcaacaaattcatccttaatcgcat

SEQ ID NO: 6762 - DNA, 4575 bp, Heterodera glycines
gtgaaatcaaaatgatatagagtcttgcgccaaaatgtcctgcgccaaagtggccggttcccgactacatatgcccttaatagttaaggcaggaaattttatggtttacatttttttacaggagaaagaagttaagagagagaggaagatacttgactaaacggaaaatattccgccggtggaaacaatgaaatgaactttaatgaaagaaatgggggacaaaagcgggaccagcggggggacaaccacgtggtgggggggggggagaaaaatgtgacgtgatacgtaggggaaaaaagcaaaaattgagacagccatttcctaaaaaatttaaatttaactaaaaatcatccaaatttaatttcccaacgaactctataaatttgaattttataaaaggctaaggagggcgtttcgtaaaaattgccaagtttacagatttttctagtaaaactcatcataatttttcttaaacacaaccaaattaaatatttaattgatcttggattctattagcttgaaaattttcagaaagttttcactcagttttccgaaaattatagcaatttttgagcatttttggtcttgaaaaactgagtgaaattttctgaaattttttatgctaatggaacaaagcgctatcgaacgtatgataccaagattatctaataggttgggtttaaaaaaattatttataatgactagggctaggatttttatgttttaacatattttttttgcggcttagttatggcgagagaagcccaaaaatagcattttctccgaacaaattttggtttagagcgacttataaaaacataaaaacacatattttggcgttttggcacataaaatatgttagcacatattttggggtttggcacatattttgcacatattttggcatttttgagaaaaattgcaataaaaatacaagaaaattgaaaaatacacccctaaaaatcgacttttttcctaattattaacataattttcaaattaaaaaattttttcttcgattgtagaaactaatgaaatctcgaattcattaattcgtcattggatttcgaagttctctgctggaactttcaatttatagaaatgatttatcaaaaaaagacaattttaccccaaacacttcgaaatgtatttgatttgcgttgtatgggctaaaaatgataaagaatgagatttttgggaatttttatgcaaaaacacacttattttttcaatttttaacacatattttagcacatattttggcatttttgggggtttttagcacatatttcagcattttttagcacatattttattacatatttcaggatttttagcacataaaaatcctagccctaataatgacgaaaaatctataaaattaagttttacaaaacgatttaacacggattaaaaattcagtatttaaggacatatttcttttcatgatggtcattttttgaacactttctaagcttgcataaaattgtaatttaaatttgttttccattattttattttcatttggtatgttttcggcaaaaataaaaacctaaattcatctaaaaaaatttcggggcctagaaaaatttccaaaaaattcaaatttaaaaatttcaatgtgatttttttgcatttttttacatttttttgcaagttaagcgacgacgacagaaggaatgttggtcaaagacgcacaagtgaagccggacatttcgaagccgcgctgggaccagtcgacgttcagtggtcgcgcacggcacttcttcaccgtggtcaacccactgaaccttttggcatcgaacaaccaattggaaaacagtcgcaaaatcgtcaccgattacgagtgggtgcccaaaataaatggcattaaaaacagtcgaaaatcgtcaccgattacgagtgggtgcccaaaataaatggcattaaaaacagtcgaaaatcgtcaccgattacgagtgggtgcccaaaataaatggcattaaaaacagtcgaaaatcgtcaccgattacgagtgggtgcccaaaataaatggcattaaaaacagtcgaaaatcgtcaccgattacgagtgggtgcccaaaataaatggcattaaaaacagtcgaaaatcgtcaccgattacgagtgggtggccaaaaatggcattaaaaacagtcgaaaatcgtcaccgattacgagtgggtgccaaaataaatggcattcttcttttttcaccatcagacaacagagtacagccaaattaccaatgttttaatacaggaaaacaatgaattcagaaatttcaattgggcttttgcgaatgggtctgtggggggacgcctaattttgcgaaggggtccgattttgttgaaaatcttattgaattttgagttttcatttgttaatccccatcttacttttttcagtggtgccctaaacagcaaagttccgcaaatctttttggttttgtgatttcgatgatttgaattccgtcttaaaaaaattttcaccgaaaactctgaaaatcatactggaaaacatgaattcaaaatttttctgtcgtgtcaaccctacctggaaaatttcgtttaaaatcctagtgaattttgagtgagccctgaaattctttgttttaacccattttttccaggacaggcaattactccgaggatttgtccgtcgatgagctttggcgtgccaaacatttgtacgactcggcattccatccagacactggtgaaaaggtgctgctgttaggacgaatgagtgcacgagtgccggtcgtcacattaatgtgcgttaagtcccccaacgaaattcttgaaaataaattttgaaaattttttcagccttggcggtatgctaactttctacaagtcagtacagtgctcttcatttatttacattcgttcaattttaaaaatttcaggtctgcccctgcagtttttggctggcaattcgtcaaccaggtggattaaaaaaaaatttcagaaaattttcatttttccatgattttttcagactttcaacgcaattactaattattccaaccgttcgggcgatgcgttgaacaactcgcaactgttgcaggcgtatctgatggccaccggtgggaaaaaaattttacctaggcctacccaaaaaccacaaattgaataaaaacgttcccaatttttaggcggtgcgacgggcgtagctctgggactaaatcgtgcagtaacggttcgaattctttaactctatcaacaaattttcagttttttctacttttccctaattttttttttttttttgcagaaattgccagcaatttggggtcgcctggtgccattcgccgccgttgcatttgcaaattgtgtcaacattccgatgatgcgacgaaagtgcgggaaaaaaatgatgatagatagagagatagatatatggcatttcttttggcgtattttaaataaggattgtgttgaatgattggtcggatctgattttctcaaaaaaagaatcggaatcgatgacctttttgattttcaaattaaaaaataacgcctaaaaaagtgcccccaatttttgcaacaaaaatttttggcctggaaaaaaagccaaatctacattcaaaaaaacattttacagggaattcatcgacggtgtccaagtggttgatgcaaatggtgtgccgttgggccaaagtcgcaaattggcatggatagcagttccgcaagtggtcttctgtcggattgctatggtcacgccggggatgggtgagagaatggcacaatttttatttccgaattccgttggcatcaatttgttttttttggactaaatctaccaaaattctgaatttttagccccaattaaataatttcccaattccgcagtttgcactccaatactgatcaatcgccttgatcagaagcaatggttccgcgcacgtccatggctttctccgttaattcaggccgcagtttgcggatttctgctcacttttacaataccattgggttgcgcagtgttcccacagcttagtccaatgaaggtgtaattgagaaatgaaaaaaaactaaatttttaatggattttcaggtggcgaagttggagcccgaattgcaggaacaaatccgtcagaaatttgtggccaaaaatgtgccagtgcctgaattggtctattacaacaagggcttgtgagaacagagattagagagtgccaattattgtgatataaatgctgtaaatatgtgataatcaactattatttatatactgttttttgtatacacataatattgattgtactctatcatatgaataagtatgtagttcgaattctctacttttttaccaataatttttctattttaaacatctttttgttgttgttgttgcagaaaatgcctccaatttggggtagtctgatgccgttcgccaccgttgcatttgcaaattgtgtcaacattccggtgatgcgacgaaagtgcgttaaatttgcaattagacaaacggaattaatggacttttttgatttcaaaaacaaattttgtgaaccaaaagtcaatagacatgtccaattaatgagaccatccacagtttcttaggccat

SEQ ID NO: 6763 - DNA, 1052 bp, Heterodera glycines
cgagcttcggctcgcttattatatagtaagggatagtgaggtcagagaatcaaacaagaaaaaaaacggaacgtaaagccataggaaaaattatgaggaaattaaacgtttatgaatttacagcaaatgatcgcatggatttaaagttaggttaggccactctctacacacatatttcgatcgcctcattgccccattcatctgacaatcgactgcaccaagtgtccgcccctctcggccccgcgagtggacgtcggcgttgtctgccactggtgtttcggcaccaccggcactgccccattgttgtccaaccgagcagccggcccatcgtacatttccgtccaataggcctgcgacaaaaaacaattttcaaatttatttgagaaaattccattttcagcccttgcactgaaattcccactccccccaaaaaaaaaacccacatggtccaggctgagcagtgcctgcatgatttggatctgattggtggcctccgtcatgtacgcggtgccctgttgctggtgtttgtcctgcaccgtcagcagccgcgagttggtgcccaccacagtcgggccgagcactttggccaaattggtcagcggcatctgtgagaaatgttaaagggatgggactttgtttgatttatgaaaatggggttgaaattgtttgcaaacacaaaattttacctgattttcgttggaatgcatcgccaccctttgccaatgcgcacataaaaaagccaactgaaatcgaagataagaaatgtttttttgtccaatttgtctccgtcttccactccaatcaccgtgtcccggtgtggcatcggcaattcctcaatgaacgtcttcagctgcgattcgtctccctcaatggccgccttcagaaattctctgtaggaggacagagggatgagtggctcctggcaaaatgaaataaagcattaaaaaatgaattaaattattaaagccatcccaaatttttgtggtttacctgcatcaaaaatatttaaaaatgccaaagtcgaaatttttttttcatttttcaaaaaccca

SEQ ID NO: 6764 - DNA, 4536 bp, Heterodera glycines
acagcaaatgatcgcatggatttaaagttaggttaggccactctctacacacacatttcgatcgcttccttgccccattcatctgacaatcgactgcaccaagtgtccgcccctctcggccccgcgggtggacgtcggcgttgtctgccattggtgtttcggcaccaccggcggcactgccccattgttgtccaaccgagcagccggcccatcgtacatttccgtccaataggcctggaacaataaacagttttcaaatttatttgagaaaattccattttcaacccttgcgctgaaattcccactcccttcccaaaaaaaaacccacatggtccaggctgagcagcgcctgcatgatttggatctgattggtggcctccgtcatgtacgcggtgccctgttgctggtgtttgtcctgcacggtcagcagccgcgagttggtgcccaccaccgttgggccgagcactttggccaaattggtcagcggcatctgtgagaaatgttaaagggatgggactttgtttgatttatgaaaatggggttgaaattgtctgcaaacccaaaattttacctgattttcgttggaatgcatcgccaccctttgccaatgcgcacataaaaaagccaactgaaatcgaagataagaaatgcttttttgtccaatttgtctccgtcttccactccaatcaccgtgtcccggtgtggcatcggcaattcctcaatgaacgtcttcagctgcgcttcgtctccctcaatggccgccttcaaaaattccctgtaggaggacagagggatgagtggctcctggcaaaatgaaataaagcattaaaaaatgaattaaattattaaaagccatccaaaatttttgtggtttacctgcatcaaaaaatattccaaaatgcaaaagtcgaaatttttttttccatttttcaaaaacccatcaaccaacccgacagtcgcgcaggaatttcttgatgtagccggtgatggtctccgagtcagtttggtccagtttgggcacgaatttcgagttgaattggtccttcaacttcttcacttcggagtcacaactaaaacaaaaaatatatatccaatttaattcaatttttgttggaaatcataaaaaattggtgagtcaaatacggtaacagtacgcaaaacacaccccggcactcggtacaacccgacggtgtcgaggaagccttgctcaagcgcgtacacgcaacggatgatttggccagggatacggggcggcagcaccggtgccaggtcgcccaacgttggccgatgtcgattgttgcagcgttgaggcgtcggcaccattggcacacacagcggcggtgccaactggcaacagtgctcatgaacctggagtttgcattctgccggaaggaaagcatggtaagcatgaaattttcggcattttcccctccccaaaaaaggctttttttcaaaatttcgcaaaatatatatatataatgcctccaccggaacaacggaagccgcgaatgccgagcccacgggcgcacacgccgcaacaggagaacgcggcactgaacaggttgctgacgggcacgtaagtgtgcacacattggttgatcggtttgcccttggtccaaccgcggccgacacacggacggggcggaccaaaatggctgaatttttggggacctggatttgcctttgtattcattcctacatgttcaatgtgctgatttgcttggccgacatcgctgccttatgctgctgttgttgttgttgcagattttcacttgtcggcggctcgtacacattcgactcggacattgaccggttcttcgtcagacggcccggcacagcctttgacggacgacttcgctaaacccaattaaatgccataaaaacaattaaaatggttttgtcacaatgcaccaaattttttgaatcttccccgtttgaacctgtcgctgttgttctccatcggattcggtgctttcgtcgactgcaaattttcgctgctcttcattaatttttacaatgcgacgcgaacgctttgacggtcccgccgcggaggactgcacaaatggcgaactcgagcgacgtttgcccttctgggtaatcctgtaaaatcaaaaattttcgaaaatttaaaaaaatatttagacctgccattactgcggaggacctcgggacgtattttttggtcgtcgttgcactgctggcgacccaccgcgttctgataaaaaattaatggatccaggcaatttgccaaaacaaaacctgcagttcgttgttcgccgcctggaaaacgcgctgatgttcctccagttcggcattcaacgagtcgactttggcacattttgccgccaaatcggcttggagttggcggaccatctccttgtttttgtccagtgccagttcgtaattcctgaaaattaaattgttgacaaatattattcccaagaaaattgtgttttcttacccaatttgacgcttcagtcgactgatttggtcaagcaaaccatggttttcttggactgaattgaatagaattcggcgtacttgttccagctgatccaagagatggatgacaactaaaaaatggtataaaaataatcaaaaaattaatgtaacacgaactgttcgggttgtacaccgttttatttccttgtttataaattcgggcccacaattccgacacgttcagtgtgtctgcttgcaatttgccttcttttccactcattaatcaattatgtatatgtatatatttagaggaagttagttttgctaaaattttagaaaaatttatttatatattagcctttttatagtttgtaatgcaacgtgggtggtaatggcaatggaaaaatcgattagcgcgtaaattaggggtcattaggagggaaagggaaggggcaaacacgaaacagaaacgatgccacgaaattatgctctcacaaatgtacagacaagaaaacggcactctccaatttttgaattcaaatttagcgcgctctctgctcttttgtcattttcccgaaacttacaaacaggcttatttttgtatttgtagcttctattgtggttcaagcccataggcatcgctcgactttagaattccataatattttcagaacttgaacaaattggtaagttttggtaaaaagcccctctccagagccttttacgacaaaaggacgacaacctccgcgccgacaaaagtaactgcgtataaaataggtaatatgcaacaaaatttcaacaaatttataataccgcaatcggtgggcgggccaacaaacaaaaacagaaaacaacaaaagcactgcgatggtggtccgtatcattggcactgtgccatatccatcagttcctccatcattcgtcatcctcctccccgtcgtcatccatggcttcttcctcttcttcgtcgtcatcctcctcctcttcatcttccatctcatcatcactttcctcccccagttcgacgtccccttcttcttcctcttcgtcctcatcgtccgtttcctcctcctcctcttggttcgtctccaacttttggcccaattccgccacaaatttatgcgccacttttttgtcaccgccccactgttggatggcaccgtgcatcttcagagaagtgcgcaattccttaatattccattattggtttattagtaaaatgcctccaaaattgcgcactttcattccttcgttggccaacagttccaccatcgtttgctcatccaaagaaccgacggctgtcgttgcgacggcttgtttgatgacgttctgtttgtattgagttgattacgatttgaaaacggcaacattttcccaccgtggacgattcagcaccgtcaattcggaagaaccagccgaggatgaacacaaatttggctaacaattgatgtgcctggaggggagggaaaaacatttggatgtaaatgaatgcgaaaggaaacttctattaaaaactaattaaagtccctaattatggatcgaaaaacttttcaataaaatcaaaataaaaagctgttttttgggggggggggaaagctgccaaaattggcacacatactcttttcctcgtaattgtgtcattctcattgtccgcaggaggagaaggttcgtctgcgattttcttgatgtacaaaggcactgcgcggaccaaatacgagccgatgtcgtccaaaactgttgcatagaatttgggtgactaaaaattgtaaaattatttaaattttgctccccctttactttacgtcttttctgctggtcaccaaagtgcgtgccatgttgaatgcttgatgctgaaaagcaaatgtacaaaaatgaatgttatggcacaatgccataagaatgcacccgccccagattcgttttacctttttatcgtcagacattttggcgtcgggcggtgaaagcgaaaatagtgggcaagaaatttctgacccagatattggtgggggaaaaaaaaaagtaaaattaaaaagcccacaattaggtaacaaaaattgaaaaatgtcggcattcttcccccatttttgtctttgc

SEQ ID NO: 6765 - DNA, 1580 bp, Heterodera glycines
ttaagcttgtgtttgatctgacctaattttctgaacaaaatttccaagaaaataattaaattagagaattttaagcattttgaataaacaatttctaaaatcttctactttcgatatattttaccatttatccaaattttattttttgccattttgtccatttttcataatttgattgttttttgtcgtccattttgctacttttcccccaattttcagccattgataatccgtcgctttttttgctgtccgccggcgccgcaatgaccggcttcgtcacctgtctgggcttgctccatctgatttttgtgctcaaatacatcaaagatgaacaaattcgcactgatctgtactggctggtgtttatgccatcggtgagcaattcattaattcattagtaattaatcaattaattaattattaattatggagtatctatttttttgacaattttgagacggaaggaatgaaattgaaacccatttaatgtaccacaaatctcagttcagtttagcaaaaacccattgctcgtttcctatggtctttaccattgtcgagattcaccccctccctaaatgttcccttttaattcattaattacttaattaccctctcccccccccctcttttcctctcaggtgatcgccgcttgtggcctcgtcggcatggttttgccgagggcggccattttcatgtacgcaattgcgctcgtctattacatgatctgcatttttgtactcgtctgtttgatgtgcacggtcagtccaattaaaaattcggcaaatgcaaatttagttcaaattttatgtttttataattcagctgaacggttcccgcaaagcgatgtgccgaaaactgatggccaagggcaagcgaatttcgattagagtttgcccgttgggctgctgtttgttctgcttcgacaaatttgagccgacagagtgcgtttggcggggggggggaaattggcaaaagggactgatcagagaatgtccaaatctcgacaatgtatgctgatcaatttccccaacatttgatcagaaaatgtcgaaactccacaaagtaatctaatcaaaaaatattcaaaaaggacattttgatctgctgatcagagataacgacaaaataagcagaagagatgaaaaatatttgttaacaaagcgaacaaacgcataaatgatctgatcaatgggataagattacagagagtcctctgcttatcaatgccccaaaaataattgctcttacaattgccgcttcattttgttcgaccagtcaaattaagctataaaactgatcaaaattgtccatctttttgctgaccattttctgatcattcgttttgaatacaacgaatttatgaaccaaaagccacgaaaaaacaaagttcaggaagaatttccgccgctttgaatggctcgtgttccaatcgccgattgtgcgcattctgctcgaaattctgaacatcaccgtgtttatggtgaataaacatcccaattaaaatcgaaatctaaataatacatataattaattaaacaaaattgacattttattaggagctgagcagtcgctccaatctg

SEQ ID NO: 6766 - DNA, 4313 bp, Heterodera glycines
  unsure (1)..(4313): unsure at all n locations
attaggagctgagcagtcgctacaatctgttcttacagctgtccaattcgatcgacatcatctctctttttgtcggctcntacggctcctacataattgtgccaatcggcgcttcgctgctgcacgaatatcggcacgtttattttaaaaattaaatttttatatttttatatggaaaagcggcaaaatgtttgcaaattaattatcaatcaaatcccattcaattatttccgataaaaaggtaattaattttcaatgcaataatccgacacgattagtccgttattccgtcgcattattatttgacttacaaaaacccattcgcttatcccttggcattaattggataatccctcctcaaatcttcggaattagtaattaattacattttgaaaagcattgcttcttttggcttaaatttgtctttcgcttttcctccctccgaaaataattaaaatttatttttttaatttcagttttttgcttctgttccgtctcgtagacttctgccaattgttttggtccgtgcagaagttcatcgccgatttcatcggccccctcaatttgatcccgagtacggccgacgtttccacgccgttgccctcctcggcggtggcacaatgtgagcggtgaaagccccggcgggtgccaatcgcaaaaccccaaaaatccggcattttttggaaaatttatcaataaaaatgcactaaaacgaaaatttctcctctaagaatcgactttaaaaatatttaaaaagacacccttaaaaatcggcccaaaaattttcacaatatactcctatgaaatgaaaaaattttctcaaaattcactttcttggcaaatttttaattttaaaaattattttttaggtaaattattttgggttttttgaccttaaaatcccagtcctactcatttgcatctgcaacaagtgaataaaaattatttttgctcaatttttggctaaaaattatgtcactattcgtcactatttcgcactttttgccactattttgtcactattttggaagtagtcactattttagttaactattttgagatttctcgtcactaataaaagtcgcggccctacttatcacattatccgctgtaatcggcacactgagaaaaagccggctaaatgattttttggaaatgaatttaattagggaatgaattttattacacaaaaaattaaaaacatattcacaaaaagagttgactattttagaaatttttaatttttcttctctctgatattttgacaaaataaaaaattataaatttttgtttttaaataaatttattaattctgataaaatttagtaccctaattttttaaataatttccccccccccctcccctcagtttacatttgctttttgctctgtgccgagatgcttttcgcctctctgttggccaccgtttgctttcggccctcgcgctgtgccttttttgaccggcatcggagtgccaatgccattgcaaatgcaaattccctcgaggagtgtgccgtggatggcggtgcccattcggtcgcctctctcagcgcctgcggcggtgccgaggacggagacgagtcgcgcaacacatcggtggagtcaatccattgtcggtggcgaaactttgatggggacgaaaatggggacgaagcgattagagggggaaaagggcaaagaatggcaaacgaatggcacggcaaaacggcggacagagagcaaaagtattgatcagagaatgaatggggcggacgattgattgatcagcagcaaagagtgattggaaagaggcagcagcagcagaaggatcgaagaaactcagcgattggaaacaaaaaaagtgatcggaaaaagtgatcgggtagattttgacgaaaattgataggaaaattgctcaaaatgaaatgccaaaatttgatcaacgagtgatcgctcgaagttttgaccaaagtaatttaacaaggccattaatttttgtgttaaatttcccataaaaatacttaaaaattaattccaatttttagatatttttgcacaaaaatttgctcaaattaaaaaggccattatttattttagaattttccaaattaatttttctttttgctttactttctcacataatatttatgtgtttgaattaatattttaaattaacattttttcattggatgttaatgttttgcttgtattagtctcggttataaatgtttattttgatgaattttgatggcaaatttatgccattgccaaccaaagccaaagccaatcaatttgttgtcgttttattccattttcatggaaaattctccaattatcgatgtctattattaaaagcaaaatattttttgtcgaaactttaaaaaattttaaaattatttaaaaactttactttcattttttggactgtgaatttttacggttcttaataaaaaaaagcatgtcatttttggcatttgccttttcatttgttgaaaattatgaaattttgcagaatcaataaaatcaaaaaaattaataaaatatagaatttttgttaaaaataaaacatttacttatgttattatatattttttttgttaatttcctttttccatttaatttaatttttaaataattttattattacaattttaattcatcatttatattcaaattttatgttaaattcaatttccattttctgttttttctaaaattgtaattcgaaattaaatttccccgttttttcataattagtttgataattaatttaaatcatcggcactttttgttcccccaaaatgccatcgtcgtcctccacccttttgtttctgttactgctccaatttgccgttatcctccgctgtaatttcgtcgcccgtccgtcgtcggcgccgcccgacttccgcgacgcgcggagcatcgtccgctcggagggcgaatggacgcggcgaatgggcgaggaatttgtacggcacaacgttttgccgttcatccgccaattccgacggcagctgaaaccgccgcggaaccttgtgagaaaaaattaataattttaaataataaaaatttaattaaaaatttaaaaatataaaaataattaaaataaaaattaaaattaaattataaaacatttactaaaaacaaaaaattgtactgtaattataatccaagagcataaaatcctaaaaataggttttaaattatttttaaatgaatttgaaaatgcatttaattaatttgcagcaatgggcgcccggcgctggcaatttgttgccatttggcccaaatcagcggaacaatcgcaacagtgccaaatggggcgacgatgaaagcgtacaattcacgcacgtcgatttggacccggcggagcagcgaaaataccgaaaaagtgaggaaaaaactaaaaaatggataccattttaaacattttttattcgtctgtttaccgatcgatggccaaactgattggaactcaactgatcacacttaaatagaatacaaattactaattaatcagttccaacattcatttaatcactggtcctttttcgtcaaatcagtttattgtgtccatttttgagcaccttttttcgctcctatttaatcacttcgtccttgatcacttttaccatttactcactgctttttgatcatttatttgtgtgtctttttggccacagttttcccattttctgccgcttcatttgatcactttcttttccttctgatcatctgatcattcttttgatcactctctctctctccccttctcttttagaccattctgtcgcctcattgttcgacttgggcggtctggtcgcgcgcgaactgtggaaacagacgaagcaccggtgcatccattgcgagaacggcgcctgcgagttggcggacccgcagtgcggctttccgtaccaggtgggcacaaaatcatgaaaatcgcggccggatcagtcaccagcagagggtttacccatgaaatatcgagaaaaaaccctcaaatctcgagtctcgctgagttttagttgatgggaagtcttgcgatttaaatacgttctcaaaaaaatatataagggaaaaaaaaaatatttttttttttacacctaaagtcctatccatattgttcctgaatgatattttctttttgtttatgcttaatctttttatttggacaattctaatttcaatttttcttttaattttaactctatttcttttttttttttaaaagaaaaaaattttttaattttttttaattaaagtatcctgtcaactattaagaaaataattaatttaattaaagtatcctgtcaactatcaagaaataattaaat

SEQ ID NO: 6767 - DNA, 1783 bp, Heterodera glycines
  unsure (1)..(1783): unsure at all n locations
tgcatccatgcgagacggcgcctgcgagtggcgacccgcagtgcggcttccgtaccaggtgggcacaaaatcatgaaaatcgcgnccggatcagtcaccagcagagggttacnccatgaaatatcgagaaaaaaccctcaaatctcgagtctcgctgagttttagttgatgggaagtcttgcgatttaaatacgttctcaaatttttaaatatataaagaaagagagagcttcctagatccaggcctggattttcctgggttttgtccagaaaatacaggttcaggtccaacagggaagcaatccatgttcaggctttttcgaaagtcgaactctaaaaaggtataaaattcattttcaaatggacataaaagtgagaaaattcaaaacatttaaatcttagagatcacattagccaaccatttctaagcctcaatctcgagtcttggttttaaaaatgaatcatttcgagtcgagactttgagacgaggaccaaaaaaacagaatgagacttggcccccaaagactcgagaccgaaattctggaacgacaataacattttgttgaacagtttcaatttgatggcttcagtttcaacttttaaaatatttttttcaattttctaaactttaaattgtcaaaaaattcagcttttcgatgaacgagtcgaacaaatttattgtgaattgacgctgcaaaagaaaaggcgaaaaagtccggcgaaaaagccgccactgaaagcgaaaatgaaatgcgcaacgtaattaaaaaagcggataatgaacgaattaaaaatgaaaagcgaggatcacaataattaaacaaaataattacctcctgattacctaattaagcgtaattaggtttcccccgacgccgtccctgcccaacacattgttgacgaccggttaccaaaagaatgggaaattgatgtgcgtcaactgcacatttccccatcagtcggacgtggacacggattacgatagcgacaattacggtatggtagagcaaagcaacggccaaaattgggcggagacgacaccgatgatgagcagtaatgggatggtgggctacggtaacggtggcaaccgtaatttcaataatgtgggcggaagagagtgggacgaccgcggaagagagtgggaggatggcagaggagggagagagtgtgcaaacggaggagtggcgagatggagagacgggcagagagtgtgcgaaggggcggagagtggaagagaaagaaacggaaagcgaaacgacagaaacattaatggggacagaggaaaccaaaacggaatggacaattttgcatatgataacccgtattatggtggaggagggaacggattgtttgatgagggcggcgaaaatcaaaggaattattacgacggaaatgccaatgccgtaaataatttcaacgcaaaggcaaaaaggtatgaagcgattggggaggattttaagggaaactaattaaaaccaaatcaattaaatacatttatttgcctgccaaaaatcgaaaaaattctctaagccaaaaaaggttatggcattccgggccaaaaagacagagaaagtcaaatcgctcggcgccaaaacgggcggcgcaaaattgggcgatttttaattgaaattccggggcgaacccaaaaaattttcgagtatttttatattccgtttcgagtttcagggttcatggcaactcgtattttacgaaacaaagcctacgctttaagccgaagcctaggnctaagcctatgcctagcctaatcctaggctaacctcag

SEQ ID NO: 6768 - DNA, 4778 bp, Heterodera glycines
  unsure (1)..(4778): unsure at all n locations
taggatcanctgaaagaacctgctcataaccgagctatgctatcagcattaaactaacaaacgcttattatttgcttttgatttttaaagaacctgctcatactggaggttgtgtgttctttattacattactaaccaacgcttattgtatttttgctttatagtcttataaagaacctgctcctatcggagatagtgttttctttgtttatttgtaaccagtgctttatatgtgctttgtgctttttcaagaacctgctcataatggagattgtgtgttctttattacattactaaccaacgcttattgtatttttgctttataatcttataaagaacctgctcctaccggagatagtgttttctttgtttatttttaacccatgctttatatgtgcttgtgttttttaaagaatctactcatattggagattgtggattctttattatactactaaccaacgctattatttgcttttttattatgaataactctcataatggaaatggtttgtctgtggccaatacagcctgcctaccctcatgggattttgggcactcagactggcctctttaagtattggtcaatctttacactttccatatctgcactcaatgtcctttttggcaaaataggataggtgagccctgactgatagatttcggcaacggctacacttatggtaattgagaacccacatcatttttcacgtttttaggtcatttgtataaatatttgatatttgcacattcattggtttaattccttcatatttttgtcgcaaccactttttcacgttgattttttgatttaagatgccttctaagcaacaaatgctgaagaagagaaagaaagaagagcacctgcggcgggcggagcaatctgtcagtccaggtcgctcacctatcccaaattgccctcctcagggcaatcaaaattgtcctcttcaggacaacccattgagtgcagatgggaatggggcggcatcaccccggggttttaataccccaaatataagtgctttgcaattgagcaccccggcctcttccattggaagcagaaggggcatacccccaaaagccggaacggagtcaataacgacttcgcaaaacagtgtgtcgtcagctggcacacaaaacacatcggccactcaaaatgttgagtcgccgccaaacagtaaaaaattgaaggtcgaagatgttgatcgaccactgtctgttattgaagcaattacttcaacgcctgtttccacacaaaaaagccgtggtgggcggccggccaaaaaaagaggcggcccaggcaggggcaaaacaaatgattcaatgagcgaaagcttttcaatggatcagggctctgaagctggcataaatgcggcggttttacccaatgtgcctgaaaaaataaatttcagcacagtgcaaattaatttcgcaaccacgcggaatttagcctgtaaaatttggaaatggggagcaactgctctttacgaatgcgatgcaagaaggtcaggcccaagattcattgaaacgtgctggaatgatctggcacagtttctgaatgacgcctttattgtcgaatatttggcatacttggcaagcatatcacaacgaaaagtggtcattgttgatccagctgtgtggcaaatgggcattgaccgtgtcattgaatataaaaatatgacatttgggtatgaccctaatgttccggccgaagtcatacttttgccagtacattttcctggacactggactctcattgtccatgatgtgcaatatggtacacattttgccgattctttgcctaccccatatggaaggttggatccgcaactgacggataaaattagaaagatcatttctgacattttgccgtcaacagtgctgaccggtattgttaatgccgtaaatcttacagtacaacatgatggaaacagctgcgggtacttcgtgtgcctgtatgctgaatcatggcttatgaacaatcgcacgtttgttctgccagacttatccatcaattatgaaaagaagcgtattttatggcacattaacgagctgtatggctctgataatgtgccatatcatccaagggaaggggtgccaactccttgcccaattgtctatcgacatacggatgaagcgcagtcgaaatccaaggccgctgagccaatggaaattgatgagcatgatgacataatgatcatcgaaccacagacaagtggacaggctgctaatgccattctcacccaagcccaagtggatggtgaaaaccaagtcgacacgcttggtttggtttcggagtcttgtgttccgcaagagccaattgctcaggctgacgatgcaatatttgtcagaccgaagacgcctccgaggcgatcaacgcgcataggcagacggcaatccacttcgattagccgttctccttctcccgcaccgagacgtcgctcatcaacaaatcctgttgagaaagtcacagcatttacgaagcgttgctaccttgtccacaagggttggtgctgtgctgccgcagcagcaaaacattttccggaatactccgattcaggtaaacttggcgaaaaaaagtgcgctcattgtggggcactgctcttcccgcatgaggacagcagccattgctgtcgacagggaagggttgttttgccaaagcttaacccgcacccaaaagagcttgaagagctcatcgtgtgcgacaaacaaccccgccaagggaaggagtttgttcggaatatgtcgcgttacaacaatttgctccaatttgcgagtgtttcggcaggaaataagccttgccctgcaggcggacccatggcagtaattctcaacggagaattccatcgccgcataagcagcatgcaggctggcacgacccagattcctggcttcggtcagttatacattctggatccagtcgaagccatggagcagcgacgaaaaaatcccaccttcacgggagagaaaatcacaaacgataaagagtttgtgcagggtcatcagcttaatgatgagacccttgaaattttggaacaaatgatccaagaaaatcatccagctgcttctgcttataagcaggctcgtgaacagctccatgagttgttaagacaacaaaggactgaagagcttcggttcttcagaatgactttgttgaacgagcgctcagctccgggtggtatgaaagacccaaagttgcatccccaccagataatcaccccatcaacgggtgaagggatgtttgcaattcatgcagatcctactggtgccccggcacctaaagggatatgggtcgaaaacaagcaagggcagttaaacgaaatagccccgttcagtccatggactgatagcttgacttatccattaattaagcctaagggcgatgatggatatcacattggtattccatatgccaaacccgcacaaaaaaagcggagaagcgatcaatgtgtcgatcaaatgtttgacactgatgcaatgtccgacgatggctcatgcgagactgagtcaattgctgcatcagatgctgagtcggtcgcatcgaccgaatcattgattgatcgcattgataagacgagaaaattcatttctctgcgagattactgcaagtaccatctcgcaataagggatgaaaatttggagtggcaatatcaccacattctgtcatgtggcggtggtcttggccagcgctgggtcttagaccaagcggccaaaattgattggcaaattgccagttttttgcgccgtccagacatggacctgcgcataagtactccaaaaaatttgttgcattatttggtaaaccaatacaataagcagcaagctcggcaaaaccctaatgcacgacaaaagactgtcgatgacattggtagtgttgttcgcctttctgaaaagaatattaattctcttcagtattggaaaaaaaggtatgaagactgcaacaccatttttgcgcgttgccacgacgcaaaaaaggcgcggctcttcatcacattcacgaacaaccgtgagtggccagagttcaagcaaaacatttacaaaaatggtcaaatgttcactgaccgttttgacatgtggatgcgagtgtggtgcggcaaaattgctgtcttccaccaagagctctacgagaagggtttctttgggactatccttggctcaggagagtccatggagttccaggggcgtggtggcccacacgcacacattgtagcccagactgacctggacgcagttccagaagtcatccaggaatacatatgggctcatattccatctttgccgtgcaaagacgatgactcacccatagcgcaaatgcatcgcgaagtccgcgaactaatgcatatgcaactgcacagatgcagtgatagttggtgtggtccacgtgaccccaactttgggcggtgtaaaaagggcttcccagccccgtactcgaaatgtacgatactacacccggacaggcccgcattgtattaccggcctagcccaaccgacggtggtgcccaaattgaggtgaacggcttaatatacgacaactcgcaagtcgtgccgtacaacccatacattttgctgcgttaccgagtacaccacaacgtgttattcgcatacggtaacaaagcgaacatcaaatatgcactcaaataccctttcaaagggcctggacattgttatgtcgagtgcaaagaggagtccggcagcaaaatcggtatcgatgagccggctcaatatgccaaaatgaaaaagggtggtgctacggaagcttttgcagttgtgcattcaat

SEQ ID NO: 6769 - DNA, 2749 bp, Heterodera glycines
tatccattaattaagcctaagggcgacgatggatacaaatttggcattccatatgccaaacccgcacaaaaaaagaggagaagtgatcaatgtgtcgagcaaatgtttgaaactgatgccatgtctgatgatgactcatgcgagactgagtcaattgctgcatcagatgatgaatcggtcgcatcgaccgaatcattgattgatcgcattgataagacgagaaaattcatttctctgcgcgattattgcaagtaccatctcgcaataagggatgaaaatttggagttgcaataccaccacattctgtcatgtggaggtggccttggacagcgctgggtcctagaccaagcgtcaaaaattgactggcaaattgccacttttttgcgccgaccagacatggacctgcgcgtaagcactccaaaaaatttgctgcagtatttggtgaaccattacaataagcagcaagctcggcaaaaccccaatgcacgacagatgactgtcgatgacattggcagtgttgttcgtctttctgaaaagaatgtaaattctcttcagtattggaaaaaaatgtatgaagactgcaacaccatttttgcgcgttgccacgacgcaaaaaaggcacggctcttcattacattcacgaacaaccgtgagtggccagagttcaaggagaacatttacaaaaacggtcaaatgttcaccgaccgctttgacatgtggatgcgtgtgtggtccagcaaaattgctgttttccaccaggagctctatgaaaagagtttcttcggaacaatccttggctcaggcgagtcaatggagttccaagggcgtggtggcccacacgcacacattgtagcccagacggacctggacgcagtcccagaagtcatccaggaatacatatgggctcatattccacctttgccagacaaaggcgatgactccccaattgcacaaatgcatcgcgaaatccgcgaattgatgcatatgcaactgcacagatgcagtgatagttggtgcggtccacgtgaccccaactttgggcggtgtaaaaagggcttcccagccccgtactcgaaatgtacgattctgcacccagacaggcccgcgttgtattaccggcctagcccaaccgatggtggtgcccaaattgaagtgaacggcttaatatacgacaactcacaggtcgtgccgtacaacccatacattttgctgcgttaccgagtgcaccataatgtactatttgcgtacggtaacaaggcaaatataaaatatgcacttaaataccctttcaaagggcctggacattgttatgtcgagtgcaaagaggagtccggcagcaaaatcggtatcgatgagccggcccaatatgccaaaatgaacttccgtggagctacagaagcttttgcagttgtgcattcaatgccgtttgcaaagctttcccaccatgttgttcatttgtcaattcatttgccaaaccagcagcccgttgtatacagggcattccaactggtgagcaaagctgaggaaattcagcgaggcgaactcccagagacgccatgctctgcctattggaagcaatggcaaaacgaatggcagcatgttccttcgctcaaggacatgctttttgaaaaagtcccagagcaatttcgatgggcaaaagaccgatgggttccatataaaaagaagcctaccaagaggcccccaatcggtcgtgttgtacctgtccctccaacggaccgggaaagatttgcactttatgtgttgatgacgcactttcccggcgatccgtaccacttaaaactggtcaatgggcagcagtgcaacaccttcacagaggccgctctacagcatgggcttcttgaagatgaccaaatttggcacaaaacgctcagcgaagcatccttgcatcgctggccggaccagatgagatttctctttgtgagcatcctcgtctttgggcagccgagcaatgccctagaattgtggaacaagtacaaagaccaaatgtacaatccacagggcatcaccagtgcggctatacgccaagcacgcgagcagcaagccttagccgacattgattggcgattgcactactttaatttaagctgcgtgcactgtggtctcccagatccaccaaattcaatagccaaaaataccaatttggcagttgaagaatttttctttggtgatgatgatctgaatacgccgcctggccagccaaaccaaaggccacaacaataccccccacctccactcaacagcgaccagcaaaaggtctttaatgctgttgtgagggcaataaagtctgacccgaaggaccagactgtgcctcgccgtttcttcattttcggcgatggaggtacaggaaaaacattcctgtttggccaaattatcaagcgcttgcgaaagcccccatacacctataaagtgcttgctacagcatccactgggtgtgcggctatcttgctgccatatgggaaaacagcccattcaacgttccgtctcggcagagaagtctcgctagacaagcttccaagcattccgcttgagagcttctttgcccgacggatacgtgaggcccaactcatcatcattgatgagatcaccatgcttcacaacacggtgatagaggtcatcgaccgggtgtgcaaagaaatggcagttcgccagcacaaggacctcctcttcggaggaaaaacggtcattttcagcggtgacttcaaacagtcactgccggtcgtgcctcacg

SEQ ID NO: 6770 - DNA, 3376 bp, Heterodera glycines
  unsure (1)..(3376): unsure at all n locations
ataacagattgaagccactgctgaattatggtgagccaactcgttaaaataattaacccatcgaataacaaaaaggaaacacccgttcttggaacttccctcgaacaattttccgatatatttaatttcatatatacattaatcaaaacaaatctttttaattttttaactatactttttactttgattgtgatcataacatttataatttgtatatgtccaatgatttacccacttctttttaaatactttcctttccgtcgcgggaatgtcgcgactacgcgaaataggatttttaatttaaaaaataaaaacattaaaaacaaaaaacatttaaattaattttaaattagacagataaatattaattaattaaatgtgaacaaaatgaaggaatgagagaagggaagtcatattagtcacaattttttctatccgaaaaattatcaaatgttaaaatttaattatgaataattggaacgttaaaagaaataacagattttaaacaaatgttaaaatgagacaaaatgtgaatgatattaaagaaatagtaaaatgttagaaaatcggaaaaggctaaagtggcacaaactggaaaatgagaaaaggttagtaaaattggcaaatgttagggacagaaatttggacatgccaagttggcaaacaattgttcaagcagaaactgccggtataaaaggaggccacaaaccccccaccaatcagtacaccaacggtttctgagaggcattgcctcgtcctccttttcctccctccccttccccccgtgccgacaacagccgccgacaactgcgccgcccgtccgttcgtgccgtcgactcttggccctgtccgttcgtgcgccgactgttctgtgccatgccaatccgtgccctgccgtgcccgactaccgccttgacacaccgcccgctcaattccgcccgttccgtgccgttgacgtgtgccgagccgaccactcccgttccgtccccaaattgtgccgtcctccgatttgtgccgttttccccatttcaatgccgtttcattttctccacatttcccccatttttgtgccgttccccattttgtgccgtcccccatttttgtgctgtcccctttttgtgccgttccccattttgtgccgtcccccattattgtgccgtccccatttctgtgccgtcccccatttctgtgccgttccccatttttcccccattttgtgccgttcccccatttcccccttcggtttaattacccaagtttgaggactccaataaagtgtattttgaatcgctttcccgcctcacttgacccccagcaattccaccatccccgatcgaccgtcaagcgtccacccccaatcgccccagctctcgccaaatccgggccgttgccagccaacaaactcccattcagtaccggccgctcaatctccgaccgactccccgactcgccctcttcatcccgtcccccccatttgtccatcaccgattgcggaaaggacaaagtggtgcacgacgacccgggacgacgccctgtgcacaacgacgacccggcattcgacaacaaatcgtcaaatccctcaaacagcgaaaactcttcgtcccgcagccaatcttcaaaagtgagaaatcttcaaaagtttttgcttcaaaagggtaaccaatccccacactcaaagacaaaaaagtttttaaagggataaaaccctaacctaccaaaacacacacaaaacagtcatttttctcgaacaaaaaccgacaaacacacccaaaatcccattacaaatcaatcaatacccatcccattcagtgaaaagaacaacccgatcggcatctcgcgcaccgacaaacccaaacgaagttgaagaaaaagaaaagaaagagcattttcggaccgaccaacccaaaagaaacggagacgaaaccaagcaaatcctcagacggacaacagtgataaaagtgaccactgtgatcaaaaatttctaaactgtgatcaaacccaatttaattttgtgataattgtttacctcaataaaatattaactgattaaatcgcagaagggaataaattggccaaccaaaattaagaaacaacacaaatcatttttaaaggaaaaaatgtctggttttatcaggagcaaaatccctctcctcaatcgagtgctaagaaaagaaatccagtcgaccaaaacaaaaatcgaggaaaacaaattcgaatttgaccaaaataatctggacgaatgcacacgggtgttcaataaaacaaaggaaattatacaaaaaattgagccaaactttgaaaaattaaaaactttgcataaaaaatggcaaaatttgatgagaaaaatggacaaagaacagtggaacaccgaatggaaaatccagaaaatttttcgcgaaaaacatgattatttaaagacaattaaggaaacagacgaaatcctcgacactctgaaagacataaatttggaggtaaaaagaagactcaaagtaatcaaagcaaaaccctcttcagacactgaccaagaggatgaatcaaatgatgatgaagaagaaaacgaagacgaagaaattgaagaagaagatgaagaagaaaaagaatacgacagtgaccaggaagacgattcaccggaattgacctcaaatgatcaaacaaaccgtaaacaaacaccttttgtcaattatcgatcgagaataaaacttccaccccaaactctgacacacttctccggaaaattctcccaatggcccagcttttgggacgatttcaaatcctcagtccacaatgacccaaacttagagaacatacaaaaactgaaatacttgcgaggactcttacatgacgaaccataccgaattgtgtccccttaccccctcacaaacaaaaattatcccctaatcatcaaattactcaaatcccgatacggtaatccacaattgatcagagaaaatctgcacagcgaattaagaaatttaagaaaaccaaatgaatccacaagcgaactgagacgatttatcctattcattgaccgaattatcctacaattacaatcccaaggcgaagaaataaaccatccccaaatcaagcaatccattgagactaaactccccttcaatatccgactaaaactgagagaaaaattcaaactctactcgacaaaagaattaatgaattttctcaattcacacactcaagctcgtgaagacatagaacgaatggaagattcnaacagacaaataagaaatttcccccctcaccggccacctcaaaacagaccacaaaggcaatcataccccaactatccccaaccccagctaaaagcaaaacaccgaaaacatcaaaatatacctctctcgccctatcccattacttctgc

SEQ ID NO: 6771 - DNA, 3170 bp, Heterodera glycines
  unsure (1)..(3170): unsure at all n locations
cttttttgaaaaaccccgccgttcaacccttcgcccccgggctccctttgaaagtaaccccggccccaaaccccaaaaacttcccaaaaaagggtccccaagctcaagactcgaaaattagggataatttcccccccaattcaaaaaaaccacccacacaacacacaaacaaatcacaattcagtgagaaaggaccaccccacccgcatcccgcgcaaagagtgaaaaaccaaaagaaaagaaagagcattttcggaccgaccaacncaaaagaaacggagacgaaaccaagcaaatcctcagacagacaacagtaataaaagtgaccactgtgatcaaaaatttctaaactgtgatcaaacccaatttaattttgtgataattgtttacctcaataaaatattaactgattacaatcgcagaagggaataaattggccaaccaaaattaagaaacaacacaaatcatttttaaaggaaaaaatgtctggttttatcaggagcaaaatccctctcctcaatcgagtgctaagaaaagaaatccagtcgaccaaaacaaaaatcgaggaaaacaaatttgaatttgaccaaaataagctggacgaatgcacacgggtgttcaataaaacaaaagaaattatacaaaaaattgagccaaactttgagaaattaaaaactttacacaaaaaatggcaaaatttaatgagaagaatggacaaagaagaatggaacacagaatggaaaatccaaaaaatttttcgcaaaaaacatgattatttaaaaacaattaaggaaacagatgaaatcctcgacactctgaaagacataaatttgggtgtgaaaagaagactcaaaacaattagagcaaagtctctttcggacactgaccaggaatctgactcaaatgctgatgaacaagaagaggaagatgaagaaatggaagaagaagacgaagaagaaaaagaatacgacagtgaccaggaagacgattcaccagaattgacctcaaatgaccaaataaaccgtaaacaaacaccttttgtcaattatcgatcgagaataaaacttccaccccaaactctgacacacttctccggaaaattctcccaatggcccagcttttgggacgatttcaaatcatcagtccacaatgaccaaaacttagagaacatacaaaaactgaaatacttgcgaggactcttacatgacgaaccataccgaattgtgtcccctatccgactaaaactgagagaaaaattcaaactttactcgacaaaagaattaatgaattttctcaattcacacactcaagctcgtgaagacatagaacgaatggaagattcaaacagacaaataagaaatttcccccctcaccggccacctcaaaacagaccacaaaggcaatcatacccaaactattcccaaccccagctaaaagcaaaccaccgaaaccatcaaaatctgcctctctcgccctatcccatcacttctgcattaacaaccaaatcaaaacccgtccgtttggcagaatttaaaccaaaaccatcgcaacccaaaccacaaacaaaaataatattttgtcgattctgtgaaagagacaatcacttgagcaaagaatgcaaaatttattcaaccacggaaaaaagaagtaatcgagcgcgcgaattaaaactttgcctaaactgtctgaaaaaaggacatcatttgaaggaatgcaaatcacctttttcatgtttcaattgcaaaagcaaacacaataccctcctatgtacccgaaaaacaaatcaatttaatcaaagagaacaatttaccaacgtaaacgtcacgcaaaaccccgaagaattcgaagaaacccaaaattttatgtctttagattgcgatcaaaatgatgaaattttacaaaatagtgaagaagaattgcttatgactacggaagcaccagtattaaatcctgaccaaaacaaaacccaaaaagaaatgatattcttcgataatgggtcacaaaaaagttatataacagacgaatgtgctgattcccttcaattaccaacaattgacgaaaaattattggcaatatccacctttaaccaaaataaacccaaaatcatttcatcgagactagtcaaaattggaatcaaaacactaaacggtgaaatcgagtacgtaacattacagactgtggaaaaaattactgatgttacaaaaatggtcaacagagagactgttgatatacgcaagagaaaaataccaattaaccatgcctgtccacaaattctgattggtatagaccactattggcactttatgctaccaaactcacaaattcaaatactcccctccggattttactcaatcgatacaaaattaggaaaaatattatccggaaaaggtacgattgaagacacaaatattaatcttgtgaaagaaaagcgaaaaaaggatgagacaaacgaaatccttcaaaaattctgggaattagaaaatattggaattaccgactctccacatttgacggacgaagatacagctctcatacactttgacaaaaatgtcatttttgaagaaaatagatactacatccgatggccatacaaaagagaaacaccgaatttacccacaaattttggattatgtttgggaagattaagaaatgtagtcaaacaattgatcaaaaacaaacagttggaaaattataataaaatactgcaagagcaaatggacactaacgttaatgaaattgctgaattcaaatccaaaaatttaattcactatctcccacatcaccccgttataaaagagagttcaaacaccacaaaaattcgaccagtttttgatgcttcagcaaaattaagaggaagcaatttcctcaatgacgaaattcaccaaggaccaaaattattacctgatttgtgtggaatgattctccgattcagactcaaaaatttcgtcttaataggcgactttgaaaaagcttttctaagagttggattaaatgaaatagacagagacacaacacgctttttatgggtaaagcagtcatatttggacgagataaaacaaaattaccgagaaatcgaaatgagagacgtagaattaagacgtttcacccgaatacccttcggagtcaatgcttatcggtttttattaacttctgttgtgaatattcattta

SEQ ID NO: 6772 - DNA, 1868 bp, Heterodera glycines
  unsure (1)..(1868): unsure at all n locations
aaaaaagcaattaattagcaccaaatccaacacaattcacgttttcattaattttaggcttcatgttgactgcgctgacgcctgaactcagaggcactttgtccaaggatctcatttttagtggtactttcttcatcgtcctaatgattttgtcatcactatacaattcccttctgttccaggacttgagcagctgctcagagacccggacgaggatgttcgtgttcagacggtgtccgccatcgctttgctttacgctttcgcatgatttggtggccatcaaaaacaaaaatacaaaagagagaacgacagcctagtcacaatgagaattgcttaaacgcacgggcttcccctcacttcgctatgtcctgttcaaaaatgacttttaatttaataataataataaaacagaatactttattattattatcatccctgtaacctattattagattatatttccagagttgtgctatatattttcattgtttgttcatctcccccatttttggtaatttgcgtcttattattattattctcgattttgtcttcccttccctttcaacataattattgttgttataatatgttgtgttggctcattttaatcaaatgaacacattaattttaaattgtgctcaggttttgtccaattgaatatttttgacaccttttccctccctttcgtttattcaccgggcaaagattataattcctgtgacttttcacccaaaaaagcacaaaatggcatatcttgtctaagcttttcaccgttaaaaaacagcttaacgaacttggatttccattgcttgttcgttcggctttttgtcgttccggtgactgttatttttattatttatccccactgctctctttttggtgctttttgccttttcctatgctgctgaatattgtttttttaaccactcatttcccacgatcattgtaaaacatatccaaaatggacactaaacaaaatgatattttaagtgttcttttattgtgctgtttaaagaaaagcgattgcggtttctgatgagagaagcatgtattttcaaaatgagactgacgaatacagaataataataaatctactcgtattcttcatttttcgaaacgataaaataatgaatagtataataatttatatgatgatttggtcaataagtatatcaaaaatcaaaatcgatcaacaaaacaatcagtcggtttggccctgcgcttgcgccccctctttccctttctcccccttcgtctgctcctccccacttttgtcgcttttgccctcctccgcttttcctcccccgccgtcgacagcgtctaaatccaaaagtgcgccgtcctccccgtaatattcgtcctcctccacgatgcgcttcacccggacgccttctccgccattttcctcttccgaacagtcgtagtaactcgacgagtcggtgtcgaattcgacgcaaccatccacctgagtagggaagaatttaggaatttttaggcaattattaaaaaagataaattccctcttagaacccctcccgttgggacaagggggggccatcaatcagagggagttacgcctgtataataatttttagttttattgcggcgaaaaaactggaataagccctgaaaagtggcaaggccataaatgtgggcggacggcttcccaacgcccactcacagccaactcctccctcctcccctttctctctccctcaccttaacctgaactgtctccaactccacttcctcctcttcctngcgnncggtgntcctcctgtgcctcctcctctccttcttctcccttatgtctcttcgtcccctctttctcgtcgtcgtttcctttttgtcctctgctcctcttttcc

SEQ ID NO: 6773 - DNA, 4291 bp, Heterodera glycines
gtttccttggttccttctgctcctcttttccgtccgtctcctccttcccctccgtctttgtctcctctttgccttccgtctgctcctccttgtccttctctgttgctcctttttgctcctcccccttcgctgtcccatcatccgtgttcgtcgtctttgtctcttctgctcctccctctccctcttcacaatgttcgtcttttccgctctgctcatcgttgctgctttcatccaccgtcgcctcctcccgctcctccgtctcttcgtcgtcgtaattttcttcttcctcggaactttccgaccgcggattattcgccagcggcgacgccaccgttggagtactcaccgcactgttggaagaggacaaaagtttggctgaaatagaaaaaagatgcatttccatgtgttatttgtgccgcaccgctcgtccccccccccccctctcacatcggagttgcacttggggtttcactgcagaaacgggcacgggcattggcacaacaacaaacggcggctttttgctggaggaatcggaatcgaccgtcacggaaccgtcctcctgaacgaaagacaaattgcacgccatgacacgaggagacagcgtcagacaaattaatgaaaggagaatccgatctcgacctcaattccgacccaaattcgaatctcaattccaaaaccgacttgcttgttttgtcctcctttaaaattggaaaattcctcccccattttgaccttgtacgtctccaactccacgtgctcctcctcctcctctttggccttctgctgatgtcgctgatcgctcttcgtgtgacggaatgtgtaattgacaacacgtggcactgaaaagggattaacggacaaataaacaaatttgaaaatccaaaagaattccccaatttcaattttggtttcttaattttcgcttgccattgttcgctgccgactttctcgcctccgcttgcattctcttctcacattccgccaacacgtgaccctcagttttgcaataatagcaaactactaaaagagcaaaatattataaaggtttcccatcgaatgcctttggaaaatgacaatgcaaattaattgctttctatgccattccatttgccaaaatgtgcccttcccctcagagacaatcccgaagggggggggggggtgtacccgtccgagaattaattttggattttacatgttggcattcctttagggtctttagtccaacttggttttctggtaaagtggtggtgttgcgcgtggtacggctccttcttcggctgctgttgtgccattgtccccgtgcccaccgtttgcccctctttctccgccccgtcgcccttttcgctctcttttttcttctcctcctccgactgatggtccttcgttttctccgactcctccacctttttctgcacaatcatcaccaaattctcctgactttcatcgatgacaatttcttttacgacgtttcgtcttttcggcacaaaaccgccgcctctgccgcgttcggacattgtgaaaaaggcaacaaaatggtgacaaaatgaaaaattcaaaaggcactgataatagctagctgaaacttaattttaaatttaaaataagaaatttcgcggaaagcaaaaaatgcagcgaattgatttttattttggttctaatcagttgagcacggagttttggatgtaggatgaaccggtcatagttcaggattaaaatcccgctttttcgggttctaaatccggggtacatttattttatttcctttaatggacacttttcacatacatttttaaatgaccaatataaaatttgaattcctataatctgtatacatttattggcatttgaaaatgtaaagtacatatatttttacgcaactgctgaccagaataaattccgggaaaagcttgaaaaggattcggtacattcggtattcctaaatttgtaaagcaaaatgaatttgcaaaatgcaaagaatttgatttttgccataaagttttgttataatgttcatttgtggcataatgttttcgtttacttgaatataattctctatgatttatgggtttccttttacgagtccgagttcgctcataatttagactttttgtctaacatgagtaggtatatgtatattttgcgattactctatcatggcatttttacagaatttatttattttttttatttgttaatctgtgatctctctacaaaatggtgcagtttattgggttaaaaattgcgggggtcagaagcattggagacaaaccgcagtgtatcaattttttgtcgcctctgacaattattcagggaccaaatgggacagggaaaacggtgccgtaatttacactaaatctaacaattcaattttaaagaatttgcatccaattacagacaattatcgaggcattgaattacgtcacgacgggtgcgctgccggcgggcaaaatgcaaacattcattcacaatgcacaggtcgaaagacacacccaaccaaactcattttgttttatttctaaaaaaaattacatgaattttagagttatgaataaaaattatttttttggatgaaaaatgatgaaaagcctaacggtttttggcatagtaattcattttatttctgtttcagattgccaacaaagctcgtgtcgatgcgctggcgcagctcaacttcagagacatcaaagggaacaaatgcaccgcgacgaaacgaatgaatgcgagcgcaactcacagcgtactgaggggggggggggacggcacggggacaattcgtgaaaatttaaaccgaaatgaattattttttagggcaaattgtcaacaaaatcggacgaatttacgctgagaattgaagacaaatttggcaatttgaagagtgtttcctccaaaatctcggacttcaacaaggagtcagtgatgattctgctcacattttgtactaagtttctttcccaatttaagatgctcaatttgttgggcgtcccaaaggccgtgttggagcatgttttgttctgtcaccaggaggaggccaattggtgggccaaaaaactcaaaagtttaattaaactcactgaagtcgggggggggggggatactcattggaaaaaccataaataaaataattggttacatggtgcaaattttagcaattttgaaattaatgtccaaagtggggctcttgaattttctgcattttgcttgtgtattggcattccgtcgtctcttcgtttttaggcctttgtccgagccaaaagaattgaaattgcgtttcgatgcgatttttgaggtgacaaaatacgtcaaagcattggaccacatcaagaaaaacatcaaagaattggtgggttggcttcttttaaattggaaatgctgaaaaaaaagatttcagggcatgcaaattcagctgatcgacaaggaattgccccatttggagaacaacatgagggcacgtgccgatgttcgtccattttgagggcggagtaatgccaatggcacacttacctcctaaaattcgggttttctggcaaccgtaccctcgtcaaacccccgattttcaatttctctcccaattcgttgtactttttcagctccgtcttcgctttgatgaaacgctgaccgcactgaagcacaatcggaagagcattgagcaccaattgaagacggaaagagaggcggtggacggcgaactgcgcaacattcgcaaacatttggaaatggccaccaaatgcaaccatgagtttggtcagttgaccatctctgggcattttgagattttctgaattgttcgtgtcgtaaaatgcgaaaattcgatccgtaactttggtttgtcgctcttccaaatttttccatttttcagagattatccaaggccaaatcaatgcgcaaaagcgctttctcgagggaatgccgccgttgacgcacaaaggcacgcgggaacaactccaacaacaaattgacgaggtcagtgggggaatgacggagaaataaacaaataaaatcggacgaattggcaccgaattcagtgccatttttaaccccaattgcttttggtttaaatttttgttgtccgttcgttgttcagctgaagcgttccgccactgcacgcgaagcggacgaacaccgcgcgtcggttgtgcggcaagtgaaaagcatcgcttttgagatggaccaatgcaaaaagttggaggaggcgtaccggacaaaactgatgcagcacgagtcgagacgaatggtaaaaaaaatggggaaaatttaatttggaagagtcaaaaaaaactctacgaggatcccc

SEQ ID NO: 6774 - DNA, 1865 bp, Heterodera glycines
attggccacccacaaatggggaaaaagtcttcgaccatttatctccggtcagtgattttctttaaatgcacagattcgtttttaattttcagaagcattgaaacactgggggattctgaacagattcaacgcaaggatttcgtcggataatttaatcatttgttttgtcagttttccgattactgtacgatgcctcgtgattcatttccattttagggcaatgaaaaaacgctggccgcgtcggatcccacgattttggactcatcggaccaactccaacggaacaatgtgaagaatgacccgggaccatacactgttctgcgcatcattgacgaaatttataaaccaaacagtaatttttcactttattcgtccagtattctaaattattaagcatttggcaacatgggcgtcaaatgtattgtttgattttttttcctttatttctttttcattttagacaaattggacattgtcaggttaattttctcaaattttatactgatttatttttttttctcagcgcctgttgcatccaacgggacaatttcattcggccaacaggtcaaatttgggagaattcctcaaattaatagttggtcgaaccctcgaataagatcgccattttcagtttaccaggctaactacggcgaatactctcaacgctttgtcccgtcgaatttgcctttgtcacgcggcggcgaactgcagagaatgccaatgccaacggggcgtgtgccggggacaatgaattacatagaactggaaattgtgcgaagtggaccaattggtgtcagtgcgcagccttcgcgcagaggccgatgattgtttaaacgagcgatgtaagggaaattgtgacgaaactattggacatttatttactcttttaaatgttgaaaaagttataattggagcgaggaaggcgacactttcactaattaattaactacccactgattttattttattaggtcatttcacaaatattgtcccacttcgattaaagttggaataatttttgaatcctcgcacaattattggaattctaaaagctatgggtcagctttatccagaacagtatttatgaaaagacctaacttcgttgttgtgccgatccacacattgtatcaaattacggttacatttgacatagaaagacgtcacaaaaataattaacgattttcaaaaagggtaagtacaaaaattggtagggaaaattgcaatagaaccggggaccaatcagatcaaacaacatcttcgtcggttaagtaattgcgcaccaaaaaggaaaactgaaaatgatcattaaaatagtaatgagtagcgacggatttaattttcaataatttgatgtgttttggcctcgccgaacccaacaaggcaaattttgaagaagaaaaaacagtttttcgcaaaagactatcattaacaatacctcgtcaaagtcaatgaatccatcgctatcgacgtcatattccatgaacaattcctaggggcaaagtccgatgattttggcaaaagcctttccctgatagacctcaattagccggccattttgaatatcgccgagttcacgctgaaatgagtaaatataatttgtaattgattcactctttttttaaaaaattttggaaacatttgaaaaaagcatcattttttacatagaaaaaaatttaataagatagaaaacaaaatattcattttttcttgggggggggggggggggtaaacgagctcccttctgcacataccaacacaaactcgaagtcctttctcgcgataaggccagattcgctctgaattggaaattgggtcaaacgttgtcgagtgcctttcttgtctaattgcccctaatttacccttcc

SEQ ID NO: 6775 - DNA, 1917 bp, Heterodera glycines
caaaaagtcccaaatctcgtaggtaagcagttcggcactcaccgcaggacaggtacaatgccaatgccattcgtgccaagccccagcaagtaaaggtcaagtcatccgccacaaagcaatatgcccaaccaaaaacggttccatagccgtatgagagcaagcacaagttgccaatccgatacatgtccaatcatgcggaagcacaaatcattggctctccgattgtgtgcacagacagtcctacccccccccgccatcaattgtcttccatttacaaacaataagaatcactaatcacttagggcacagaatccccggtccggttcgcctccgtcggttccgtcccctcttgcttttgtcggctcggcttccccccccccccaccattcattcgtccatgtgccatttccatttccccctttctttccttccctttcgccatttccctcttcccccctcgtctctccacctgtctgtactccttcagctcgtccgtcgtgtacttgtccaacttggtgatcaacggtatgttgctgccatcttccgagttcacttccgacacattggcggtgaatttgctctgaatttgtctcgttctcgcagtgaattcggtctccaagtcaatggaattgaaaaagttcgaagttgcggtcgatgcactcgttgcggtggagcgccttttgctttttatccaactgcgccgcgtgctttgccttttggccatttgctgtgccatggcattggcatttgcggggggcggcgcgacggtgggcaaatccatcgctttgtcgcaaatttaaaacgcaaaaaaaacgggaatttgacaatgccctaagttaaaaagtgaatttatcaaaaaagcaattgttatttatgtaaaaaacaatttatttttaattaaataatttataatatttatttaaaattactaagaaaatattttgaagattaaataatgaaattataaatatatttttcaattttatatttttgggaatgaaaattgttttttgtaaaggataaatttgcatttttcgtaccatcgaagctcaaaaagtgagaattcacccaaatcgatgccaaaggttcgcatttcataatgcccattttggctcattccctcgtaaataatggcccaattttggagagacggaaaatattcgtctcggcggtcaaataaaaaaatgtgtcaaggaaattcccgcgtaaaatttgatgccaattcacttccgcaatttcactacgcaaatgccaaacatcggcaaagatagcggaaaagccaataaatttgtcaacttatatttttggcattaattgtcaattggctgctaattaccctaaatgaaccgacgaaaaggttcccccgtcctccgcttgcgctcgatgccatggcgccaatgccaagcaaatgcagcgacggccccccgcctgtgccacttttgctgctgcgcgagttgctgtgccgtcggctgtttggaattgcggacgaaagcaaagcggtggcacagttgttggcactggtcactgccaattcgttgccattcatagcgaagaaaaggaaggccaaagacaatttgggggaggggggaggaagaagaaagacggagggaaattacaaaagcattttggaaaggaaacggcgaaaaaaagggagggggagaaacggaaggaaattctgaaaagggaaaggtaaagcaaaaaactaacaaaagagaatggaaggaagggaggaagaaagttagaagaaaagagaagtgacaattcttgctaatattgtaaagccaaaaggagagaaaacaaacggagcgaaaagggaggggggggggggggatttgccatggcatcgaaagggggggggggcaatccatcgatcgaatttagcagggcaaaagccattctctgatgcatcatacttag

SEQ ID NO: 6776 - DNA, 3224 bp, Heterodera glycines
  unsure (1)..(3224): unsure at all n locations
cctatttaaatgattctttttttattttgttcttcacgttgtcctcttttatatcttactatcgtttcactttttatttgattgatagatttttctgccttttttcccgaccatgccaaaattgaaaattggcccactaatttttctcgaattttttatggtcaaaaaccaaagctgatataacaaaatcttagtttttctatacaatttagaccagtagaatccgaatatggccttaaatgggacctatcttttcaacctgagcttgtactgctccaactccttgcatgaagttcgagctgtacaggtttgttgcgatcccagagaccaaatctaagaccatattcgaactcaacatacccgatttaccttgtttaattaaattcagaatttccaaaaccacttttaaaacattatgttacttggtggtcttgaaaaatgccgtttttggagaccactttaagtctcggctctccaataattcaatttttgtaattaaaattttatatttttgtgttcttatagtcctaactttgctctatttaatcactatttctctggctctgtatctcttttatttttctttaaatcagccatcaaaaatacctacctctaaaatgaccatttttacttacttaactctaactccctaaatacttttccattggtattgatctcttgccagaataatggcaacatattattgataataatggcgggtattttgaatcatgattgtgttttgttgaaatttaaaaaaaaaatttttaataaaaaaaatttgggtatcaaaaattatgttccaccctaagtaaaagcaattgtattgggaaagaaattaaattaattatttttaaagaatgtggcaattgaaaattttataaaatatatgtaaaaaacgcagtttagagaaccaaacgaaaacaaaacaaaaacattaagtaaatgtgagaaagttggaagaagccattgtaatgaataaataaataaataataaatatggagtgaacatttaaacctaatatttcttttaaaattataattaagagaagcattcttaaactgaaaaggtcctgaatttccagatgtttgcattttacggccatttttcatgaagtcaattaaatcagcaacacgttttaaattaaattaattattataaataatatttggacattcgcataatgttgaaaaatgaaaaacaaatgccaattggttttatatttaaggagaaatagccgcgtctattataaataaacgcatttttgatgttttgttttcacttttgctctgagttttcttatgattcgtaacgtatcgctcttcttctgaagcggtacgtttttctttttttttttaatttaataacaattaaataatgaatgttctcatttatccattttcaaattaagactcattgtgagaatggtgtatatagagaggtttgaagcgaattcttacgaagagctcaacaccgttttggaaagattggcgcgcggtgatcgcattttcaacggtggcgtatttattctgttcgcgatccctcgaaggtagacgaattgccgggggtggagaaggcgagatttgcttttcgttttctcattttcgactctcatcaaaaagcttttcctcagactttaattctcttttctttttggcttttccttttcatttctttcagattctattgcaaatttgcgcttagcactgtcaacacaacaatcgacgacattaatcgtatggccaaaaccatttgccggagctcgtcattgcgtacattcactgctccgttggagtttggaaagagtgagttcgaagtgccaaaataaaccaatgccttttcaaattgtcagagtttgggccgtgccgaacagtccctacaaaattgacaagacgttggggttgcgacagttgccgacgctcatcgaatattcgcttactgatcggcgccgaattgagggacggatggtttacttggacgagcagtttctgagcgtggattacatcacccgattcttcctgaagcaaccgttgaacgtcttccagtgacgagctcaccgcactgttatttattaactgatgttgttgtacatactgtctattaacatattgttgtaaatatatgtatattgtatgcactaaatatgcccaaataatattatacatatgtacataattatgaataacaaagaataaaatgaacagaaaattatgttttgtgtgttattttattctgtcgatttttgagacaacaaaatgttactaggaatcatattttgttcaaaatccgattaaacatttactctattttttggaaaaaaattcaaaatttgaacccaacatttggaatattttaaaggcaaacgttactgtttaattggaaaattaaagctttttgtggattttgggcattttaattcgatttccgagtccaaaaacagccaaatctcttcgaatcctttgccactccatgtgaaagtcgcctccctcgtcaaattgttgtgttgacagtgctaagcgcaaatttgcaatagaatctgaaagaaatgaaaaggaaaagccaaaaagaaaagagaattaaagtctgaggaaaagctttttgatgagtcgaaaatgagaaaacgaaaagcaaatctcgccttctccacccccggcaattcgtctaccttcgagggatcgcgaacagaataaatacgccaccgttgaaaatgcgatcaccgcgcgccaatctttccaaaacggtgttgagctcttcgtaagaattcgcttcaaacctctctatatacaccattctcacaatgagtcttaatttgaaaatggataaatgagaacattcattatttaattgttattaaattaaaaaaaaaaaaaagaaaaacgtaccgcttcagaagaagagcgatacgttacgaatcataagaaaactcagagcaaaagtgaaaacaaaacatcaaaaatgcgtttatttataatagacgcggctatttctccttaaatataaaaccaattggcatttgtttttcatttttcaacattatgcgaatgtccaaatattatttataataattaatttaatttaaaacgtgttgctgatttaattgacttcatgaaaaatggccgtaaaatgcaaacatctggaaattcaggaccttttcagtttaagaatgcttctcttaanttatatttaaaagaaaatataggtttaaatggtcactccatattta

SEQ ID NO: 6777 - DNA, 2797 bp, Heterodera glycines
aaaagttcaaaaaagattttctccggaaaacagtccaaattgggccattgcgataaattggatcaatcagaggccatctcttaaaaacttttaatattttttgatgcaatttgatctgagccaacattttttgcagttgccgtcggcggacaacgcgtgccgttccatcggtgcggcatggaatcgcaatgtgaactgtgcctttggcgcgcttcgttccgcgacgcattcggcgcgcgaatcggtgcaaaaaatggctgccgaagcgatggcattttttgacgacgacgaggaaaacaaaagcagcagagggaggagaacggcagcagaacagcgccaatgatgagaaatgagaggaggacaaaatgaattgaatctgttttaatatcattgtgcatttgctaagggtgctctcttctctcagtctctctgattttgggccgaacgaacaaacactcagttaattattaagtgtacacaccaggaatgccatttcgaggccctgaaaattccgaaaatcgaaattcctacctcaaaaattttaatggaaatcggaattcagaccacaaaaatatcaaatcggaacttcgtgccatccctagtatacacctttataaagtaattgtctctattagacttaaaaataaatagattgttttccacttttgtattttgaactatggatcgaatacgagtggagcacgtatacggacggctttacggaaccgtagcgtagaaaatccgtgagaggggcgacggcggtgccggaataaattgggcttttaaattaagttttttaaaaaggattagggaatttcatttcatttcatttatacgcataagcgtgacgccgaaaaataagaaataatgaaacaatatcaaataaaacaaacaattggtcacttttggagctggggtggcaaagaaatcaacaaattcagatcagatctttcaagaagtttggcaaactcattagaatttagtaatctcgtctctttaggtaaaagtctatagagacgagaggttcgaataaagaacgaattgtgtctatcattggttgagcaataagctgttcttatggtgaattcattttttacagggtttttggaaaaagaaaaggattcattattttgtaaatttattttacctaaaattatttcatgaaaaagttttaagtctatttttaacctacgactctcaagcgacttttgatcataaatgtttaacaattcagcataattaggtaaatcagcagcataattgttacgtctaaatattactctcaaaaaagttttttggacattctccagtttttcaatatccttttttaaataaggattgaaaattggagatccaaattctaaaattggtctgcaataaatattaaacaaatttacaagtattttcgtatcacgagttttgattgactttagtatagcgaaagcagatcgtaatgcttttttcgagataatgtcaatatgtgcccatttcaaatcattagtaaaataaatgccaaggtctctgactggttcgtttgcgggatttttaggaatttgaaagtcatcaataaaataatttattttttgatttttgtgtcctaaatgtaaagttaaacatttatttgatgaaaattttgaattttcgactttttgttcgagtccggggttcggaattgaccaaaacatgtgtcattttcgggatcagcatccccgaaaatttagagcttttacaacagtaaaatatattttatttggttgagcgatcaatttccttttcatggatttttcaaggatgaaatggggcatgatctgttcggttgagagtccggaattaatccctgatttcgagtaaggtttatttttgttgatttacatttgttatggtatttttaagaaagttcggtcaatggatggtggcagaattgcaaaaagctgccattgagcgcagattttggcattatttcatgccttctcctaattttctcttgtaataaatggtccttttttgaatacgtttgtcctttagatacgccagccctggatcagttgaggaagtgaccaaatgttacgaaatgataaacctttcttttccggacgtccgtttctcttttctgtccttttggcattgtccagtttaggtcagttatgtcattcatgttctgccttctaaggattccgttgagcaccaattgctcaaagaactcactcacaacggagctttgataggccaaggtcattttgaattttcatccgtattgcaattctcaacacctttcttctttcaggtgttctcgcgtacaacgcactcaatcactttgactgctacgatttgaacgaagtcatgttcagaatgaaccaatggattgcccgtcggctgacccaaattatgtccaggcccaagtgagttttcttgcaatgattggtggattttttactatttcattttaagtgacaacgtcaagccaagtcgtcgaaagaaggatattttccgaattgtcgtcgccaattccgcggaagagcctccacccgcaagtcttttcaacaaggaaattcactcgcagatgcccttaaattcgaacaaagaacgcttttcaactcagcaggatatcgactattcagttggagttgttttgcataaaagtgagaagaatatttggcaaaattgcatttattcgtttttatgtatattttcagaattttttcgcgttgaggtgatttcggtgagattgttcaagtcaagtagccaccggaggagatgaattaattctaagtcggcggagatgggaaccaagcggagg

SEQ ID NO: 6778 - DNA, 4779 bp, Heterodera glycines
tgtatatttcagaatgtttgccgctgagccgatttcggaccgattgctcaagtcaagtgaccaacagacgaatgaattaactcaaaacggcggagatgggaacaaaggggaggtccaagttattgtgaaaggtgagaatttggagtgtgttcaattaaattttaattcgtcagtttggtcggaggggggatttatgacaccccaaatgaaaaatgtaaataatttttatcgagtcacatgaatttgggtaaataaatgtagatttaatgagcaaagtattaagcttgtctatgaaacgattttcttttttgttcagtgatttctgccaattctcaggtttccccacgactttcaacaaatttcaaattgcttctcttttccccgactttcgtcctttgcacgtcgaatatctctccggtggggaggctgtcgttcaatttgcgaacaaataccacgcagctcaggtggtccgcaactataacggactttcgtttgagaatgaaaattttattttggaggtaaaaatgctaattgtcagattattaatctattcttccttttttattttaggttcgctctgccgggaattatcaacgccaatttttgcaagataaactcaacaatttgtgtgttggaacgaaatgagattttttgacttttttgaaacaaaatatttattcagatgtttttttgttgccaaagtgaacggcttttatattttatggttaagcagcattttaaatttgagaaaaatcgaaagaatcgatcactttagccaagctcagtttttgcattcactttcattgtttgcttataaattacaacttttcgatattacattcttttataatgaaatgctcgtcgtttcatcgccaaaaaattgagccgtttaagtaaaacgcatttggcaaaaatggttcatgaaacgagaatcacaaaaagcttattacaattttatttgatgcaaatacatacttaaatattaaattgagttttggctttccctctccccctaattttctttgtttttgttattggtgctttcccccccccccccccctccttcaacttttctcaccattccatcttatacaatggcattttgttatttggagccaaatgcgaaagtcccaacggaaggatgggttggcataggaaaaaattgaattagccatggggaagagagatggcattcattcagtgccctccggcgagtgatggaaagtgccccttttgctgcccctcccttcgctcgtcttaactctcagcttctctctcttcgcccattcatttcgcttttgctgctgcgtcttttcattgcgcatttttttctcttccattttatgtcactgaaagaggggaggaaggaattgttttatttttaggaattgaaaattcatttagaagaaaggcccacaccagggatggaattccgaggctcaaaaatttttcggaagtcggaattccgagcccaaaaatgtcggaatttttcaaaaaatataataaacaaaattttttaaatatttaataggctaaattttaaaattcttaaccatgtaaaggtgatatcaaactgtttttagtatatttctatattaatttaattttttttaatgattttcaaaatatttttatgtaattttacatttttttgaatttttttttgggacagttacacccttttttgcggcgcgctttatccaaagaaaatttgggtaatagggggagaggtccggcggtgccgataggcgccgctggaaaaattttagtgatttttaatgcgatttgttaacagatttgtccacgaaaatggccaaatttagcgatttcgagcacattttcaagaaaattaaggatttttaggtccggcggtgccgataggcgccgccgggaaatttttaaaaatttcaatgcaatttattaacagaaaattatacaaaaattgctaattttttgaaaaaaaaaattcaaaaaaattccgactttttatcaaaaatgtcggaactcggaattccgtgccacccctacaatgaaccacaaaaaaattataaatgtttatttctaaaaaaaatttcctccgttgccattttcaaggagtacaagcgcgagaaggcgtccgccgaacggacacgccatcgccggaacagtgtgctgcattttgcgtcgtccgccggcaccgccgtcgcatcggtcgcgtgcagtagcagcaacggcactggcggtgaacacgcgcagctgcagcaacagacgacggcgataatgatgccacggcgcaaggccgttctgcaggcaaacttttcatttcttgtgctgccagaaaatgcattaataaggccatcgagaatgactcaattcccgcgaccgatattcgggactgaccgagaaattaacgcatgaatcgaacacccccccccccctaaaggaagtcgagaccgacagaggattgtttcccgatttcgtcattccccctcccgaattcaaataagataacaaaaaaccaaaatttttaaaaaggtttttatacgttttccggcgtggtggtctttgcctttgtcacttgccgaaactcggtcttgggttcgaatcccattgtgtgtgttaaatttttcaaacatttatttttaattagaaatggtaatgcatattttgttgctttttcagaccggcgcactcaattttcggccacctctcagccgttcgcgcagtgtgccacgcctttgttccattgacgaggaagaggcacgggccgaggagcaagaggtacggtaaatgcctgtttataccgtatgatatgcttctctctctaccgcttctcctatacttttaaacagtttccctctattctatgatcacataatttctttgtttttattttctctttactcattgcttattcctattctcggctccctttttattttggttctctctctttctctccctctgtctctctctccctctcttctctctttccctctctctctctctctctctctctctctctcgattgtactcacttatttctctcctcctctccctctccctttcgctttgttttttttttattatctttctatacattttttttctcaatcttcctttctctcttttggtttttttcatctctgatttgataagagatcacttcattgtaatttccaaatatataattacatcatcattatcacaggatgagtgtgacgagactgtgaaggatgaagacgaagagttgcagctttcatcgtctgatctggactcattgaacaccgcggatcattaccaaccagtgccaataccaaccgcgaccacaacgatggcaaacgcaatggcctcctttgcctgtgttgctgctgatcagcagaccatcaccgactcgtcatgtcgttcaagtgcatgtggagacgaactcgaagacgaggacgacgatgctgaggatgaggaaaggaggcatttttgggcagagcatcatcatcaatttcaccgtaatgatgatcaccatcatgccaatactgcgccgggacgtggtccgcattaaaataaataaaattttcacttttcatgtttttcattttttggaattgttgatatcttcaatgaattaaatcacaattgaacacagtaattgagggaattaccgtatttgctctttttatttgcccgggtatattatttttcaaccccctcagaaagggggagataattagatacgggggataaaggggagggggggattatttttcgacagatttatttagtggaaaatttttcaaatttatttttaatatgtctccagaaaatgtcatcgcgtcaaaaaaaaaaagcatttttattgcatttttgttaaaaaatttctgaattttacatgaaatattcgaaaaatgccaaaatatttacacaaaattgataaaaccccaaaatattgaaataggaatatgaatgaaccttatttgcgtttcagaaatttggaattttttaattttaaaaattttttcatttttttgagcccgggaaatttatgcaaatttttggaaattcaaactcacttcagggttggacaatgttagtgaataaagctttaaaaataattatttccagaaattctggaaatttgcgattttttagaaaaattcagaacgccttttgaaagagcgttttcacaaattaaaatactaggaaatccgatattttttgattattatgaggtattttctcttttatttttatctcttttttttgaagaacgttttactaaacattcaaacgaatttcaaaatcaatttttattaaaatataaaaagaaattattttttagaaaaaataaaaattccattttagccccccggggagataaataaagacggggaaattattttcaacctacttcgaaaggggtagattattgatacgggcatataattagagaaaatacggtagtcatcagacacactttgtttggcatggcaatgcttttttaatttaccaaatttttccaagttttaagggtttgtccgggaaacaaaagccggcgaaaaattaattacaaaaaaagacatttgcaaaattcatgtaaatctaacaaattcgacaaaattgagagctctgctcgggacttcgttcgaaatcgattcttttgcttttttatgaaaaagttgtttaaaaatcctaattttatttggattttccagagaacggtgacgacggttgctcggcggactcgggctattcggcggcattgcacacctaaaaatgcattaagctggaggacttataatttgaaca

SEQ ID NO: 6779 - DNA, 4401 bp, Heterodera glycines
ccgtcggatccaatcgaaaaaccttagtcgacccatcagccccttttaatgcatccctacagcccctaaaaatttatttttcagcattttttgatttttggaaattttttaaatttaattgaaattttttcgaattttccaaaatcccgcaatcccgcacgggatcccgcaaattttaaatgcgggatttgcgggattgcgggatttgcgggattaatcccgcgggatcccgtcccgcaaaaaattttgagttccagtcccgcagcgggatccgcaaatttgaaatttccgggctctagtccccggtgatatcgtcagtggttgatttcgtcagtgattgatttcgtcagtgagtgatttcgtcagtaagtgatttcgtcagtagttgatttcgtcagtgagaaataattttaaaaaaaaatttacctatcaaatattaaaaatgaattcaaaaatgcaagtgatatgaacatgctcgtaaatactctaacggatcacgattatcgaaattttccacaagagtcatcaaattgttgtcctgccgaacccattttgcccttctcttttcatgaggtcctctaatcccatcggctggtgctgctcgaaaatcagctactcgccgttcccacatttcatcttcttccaccaattttcgcacaaaagaactgagtcgtgtgttgcctttgagatgtgagttccaaatgccgtgccatccctaaaccaaacaacaatttatataatacgcactcgaaaacctcgactgaattatttgtgcgaccgtgaccctcagcgatacggtcgaccatattccacagaggaggggggaaaagagcatccgtgtgggccaaattcagtgccaaaatttggtcccgaatccacctatctgctgccccaccggcatccctttgcaaaacctcctcattttcgataatttgtcttggcccaatccacgtttttatgaagtaaatgacaaattcttaattttaaaattttaaactcccaaaatttctctattaaccacccccccatttagcaccttgcaaatttggggttggctctattattgacataacaattgcaaagtaattatagacatattccactggaacaaaagcgagggcttgaagacacctcagtgctttacggatgtcctcattattgttgtaatcggttaataaatgcggaagagtttggattttccgaaaaagggcctttccaaagtgaaagaggcagccactgattatcgcatttgggtacacagtttttgctgcattgatcgccccggcttcaaaatcacacattattctgtcagggtaccatcctctgtcaacatttgcacagattgagtcaaaaaaaatttggtaggtgggggaatttttgtttggaaggagtccatatgcgcaaggaacggcacaatgttcgatgataaccgacattgtgtaaagttgtgcaaatccccttggacaactctgaaaatttatttttttcccattgttttatcccttctatacttcaaaagtgccgtcgattgcaatgctttctccgtaagttcttagtgcctccaaaccaaattgggaacaaaaaatcagcatttttttcccttggagattttggttgtaaataacacgattttgaagtgcatttggaaccactaagttcgtggggggcattgcgtcaagtccattatcaccttcctttaatattacacacataatttaataccccaaaattgctctacttgttcaaggtgggttctttttgaatagttgtaattccattgcatattcgatgaggatggagcaactccaatcctcacatcaactggaatatccgcccttacttgtctcacaatatttcgacttgtgggaaaatctgatcgtgcttcattgcgaagccgttcattggcttgtctgacctatacccaggaaaaatccatttcgaacaaattaaaatcccggatccgaacccagggacggtcccaggattttggtttgggggggggggtaccaacccctcgggcgacgacctttttttgctcttcggctgcataattttttgcgctcgattttcaaaagaataaggtggtcttgccccccccccccccaatgggaccgtccctgtccgaacccttaatacaataatttgaacccacgtgtaatgagccaaaaatgggatcgtggttatgttgcgcagttacacgacccattctgtaatttgaaccatcatcaccgactaataaatttgactgcacgattgccctcccagggcaatagggaggacgccgagggcatttccagtaactccagccgtcttcagttcgggaatcggccttagaaaactattaattttttccatttaaaagatttcacttcgtaaagatactcatagtcgccatgagtgatcagctcacggccacgattggatttgcatacagaaaaacggattaaggccattgaagacaaaaaaaagatcaattaatggggagaaattcggaaacgaagtctcgaggtcaatggaaatgaccactggcgagtctcgaaaaacgaacaactaagagacaaaaccgcaaaagcgacccattatcactgataagagtgaccaataggcaatgaaagggcaaacaaataattttttctcgaaagacgaacacacaagatacaaaacggcagaggcaaccctcaaaaagaattcttttctctgataagagtgaccaatagagagtgaagaggcaaataaagtttcgtattttaatgtatgaatatattttcattatttattgcatacaaatgtattatagttcatatgaaattataattagttcatatcacttgcgtttttgaatttattttaatttttgataggtaaattttttttaaaaattatttctcactgacgaaatcacttactgacgcaatcacttctgacgaaatcacccactgacgaaatcacttctgacgaaatcacatggcaccggggggccggtaccccccccacccccaagccgaaatcctgggaccgtccctgccactccaagacgaaccctcatataattatttttttatgtttagccaaaaagtataatcttaatgcattggccaaagcgtgtttgaatgttcccatttccgagctcggcaatgtgtttctcgcttatgaccaatctcgccttctcagcgaaaaagcatgaaattttgtttccattttatcattaaattaaaatcaatcaataatttttgtcatatacaaattttaattttttctttgaagtttggtacaaaaaatcagatcaaatcgatctcttattttttttcttttttttgaggatttctcttgtcgctgcttggattacattgaccaaaatgcggaatcgctgatccaatcggatgcctttttggaaatggaacaaaatttgctgtatgaaattatcgaacgtgaccagttgaaaatcatcagcggcgaactcattatttggaatgctgtactaataatgtacaaatttttgaatgaaattcattttcaggcactccgttgggctgacgcgcaatgccttcaaaatggcaccgaatgttcggcagagaatcgtcgtgttgtcctcggcctggcactgtccaaaattcgttttccgctcatctctctttcgggtttagccgactatgttggtaggtcgtccgtcaatacaatattttaaataatatttattttaaaattcctatttttgtcagtgccatccggcgtgttgaccagtgacgagttggtcggcgtcttcctgacccacgcccacgcggaccgtcgtgccaactccgagttgtaccccaaccaatttcccacccaccatcgatcgcactctgctcagcgcttttttcaacgaaaaattgattagtcgataaagctattttgcaaattgttctgatttttaaccaaaaaattcattaaatttatatcttttctttcttttgtcgctttaagttttgacttttgaaattaacaacaatgaaagatcgaactttttttggcattttttgcgatttaaatttgatttttgacaattttattgcacatcaacattatttaatgtgcaagaaaaatttacgcatttttcccctgaacatttcggcgacgggatcgaaagtttaaaattaactttttttttcagtatatcatacatatactgtacccaaagcaaagtagtttttgaaaatttttcaggcaaatgaccttatcaaaaaagtttttgccaagaccatacgtttcggcatcggtaagggcaaatctattggatttattggtcataattctgcggattatttttcttccacggaaatatgtattgaaaaatgaaattttatctttctatataaagcaaaaaaaaaatgttggataatctgttaccttcagaggcagtaa

SEQ ID NO: 6780 - DNA, 2122 bp, Heterodera glycines
  unsure (1)..(2122): unsure at all n locations
gtcgcgttggctgtgcgtgcggaaatagcgcaaaaagccgcaaagtcaattgcagaggatgaaaacgcacacatagcacgcagctttaaaccaaataaggcggaaaagacgaccaccgattgggaattacgtccgaccgacaaataaaagcgtctgttacaactgccgtaaaattggccacatcgcgcgaaattgtaaggtcaattcacttggaaaaaatgcggctttgaacaaaataacagcaatatgaattttcaaaaagagaaccaaagaattaagaccgacaatttaccgagagcaaaaattttcccaaaagtctccgcccctaaacgagcaaaggatggccgaaaataacgcaatttgtcgcagaagccgatagagtcagccgatgtttcaacaatttttgctggtctttttgcttcatttttggttgttgccaacgccttttcgaatgtgaaggctaaaactcatagccgccgaatcagctctacggctagtagcagctcgagattgccggcattatggaatccgttgaatgttgcatttgaaaaattgatgaaaagggaaaattccaaagaaaacggaatcaacagcaaagtgaatgtgctgttttattaattggaagtaaaagaaagcagtgaaaagaagcacccaccttataggggagtctgacccatatccgatttctaataaaagtttgccaaattcagtaccaaaactagagttgagcgggaccgggaattttgggcttaaccgggaccgggaccttttcaggttgaataaccgggaattttttgctgggaaaaccgggaaaaaaccgggactagtcccggtcccggtcaaaaccgggacttcggtactcagttgtactcagttatccgtgttcaggtcccggtcccgctcaactctactcaagagtaataaaaaaattttattcttgacaccattcggttctctattaatgttcaaatttaccaagctataatggaaccaaaacgacgtacctgaaactgaacaacaacatccaaaaataataaacaaatacttgaatttaaatatttttttacgaaaaaacggagtttttggaggatcgtcattacagactacgggttccataattaaaaaccccgtaatacgtgttaagaatgttcggaattgacaaaccccgtaattaagggctacggattatcttaacccacagttacgtccactcctgaacaaaagtggatttttcaaatttatcagatttttaaatgaacagcaaattttacagtttgaggtggagattagaacgaatatttgaaaaatcaataaatgtaaagcagtgatcgctatgggcactgagaaaatacactaaaatcaatatacgtaaagcaattatcgctatgggaactgagaaactacgcaaaaatcaataaacttaaagcagtgatcgctatgggcactgagaaaatacactaaaatcaataaacgtaaagcaattatcgctatgggaactgagaaaatacgcaaaaatcaataaacttaaagcagtgacgcatgtgcactgagaaaatacactaaaatcaataaacgtaaagcagtgatcgcatgggcactgagaaaatacactaaaatcaataaacgtaaagcagtgatcgcatgggcactgagaaaatacacaaaaatcaataaacttaaagcagtgacgcatgtgcactgagaaaatacactaaaatcaataaacgtaaagcagtgatcgcattggcactgagaaacactgagaaaatacactaaaatcaataaacgtaaagcagtgatcgcattggcactgagaaaatacacaaaaatcaatagaagtaaagcaatgatggcgatgatgacagaatgcctgcagcataaataggcggcatggcacaagcagaagccattatcaggaccgttttctagttttttcctatttttttttgtaaattctattttttaaaaaatattgaaaaaatcaccaattcttcatgtagaataaattctatccaatcttgtaagtatttacattttttcaaaatatttttcgagaggtttctagcaagcgttaaacaatttcttgtatnttatttnaagggctacccgtattctatttctt

SEQ ID NO: 6781 - DNA, 2414 bp, Heterodera glycines
gttgttgatgatttgaatactgtgcttaaaactgaagctgaggcaaaatttttggaccagccgaagctaaaaaaatgcagttcagcacgccaaatccatcaccgaagaacaaataaaatcaggcaaatttcagtcaatcacacaaattttcgagcatgtcaaaaagcaaaaagcttccgttgcggagagcttcactgggcccaaaattgcccaaagaagaataatgtgtgcagaaaatgccagaggagcgggcacatcgagcgacagtgtgacaaaattcaggcatatcacaaaaataagaggagccaaaatccaaaagtgaatattgtgatgttgcccgacactttcatcaattccgtcaatcgtcgggtctaatgaatgcaccaattttaatgaacgacaaatcaatcgatttcgttttggacagcggcacagaaataattgtcgtcaccaatcagacgtacaaagatattggacgaccaccaattcaggcgtgtcaggaagaagggaaattttttgacggaacgcgctgcaaattccttggccgcggtgttgccaacttccaattcaacggaatccgaacggagctaccatattatgtggccaaaagtggaacaattaatcttttgggcctgactgctttggaccgtcttggatttctggaagaaatgaagcggctgatcggcaccaaaaatattaatcagatttggtccactgattcaaccaaaattcgggacacaattgcaaattttgagaacaaatatgagcaaattttctctgagggccttggactctgcaccaaaatgaagggccaattgatgctcaaatccggcgcaaatcctatttttaaacgcgcccgtcctgttccttacgcaactctgccgacaataaatgccgaaatggatcgattggagaaattaaaagttatcaccccggttgatcacaccgattggtcagcacccattttggtggtcaaaaaggcaaatggaacagcaagattatgcgcagatttttccaccgggcttaaagactcgctccaattgaaccaacacccgcttccgcttccatccgacatttttgccacattaaatggaggaaaatatttctcaaaaattgatttgtcggatgcatatcttcaaattgaattagaagaaaattcgaagaagctgtgcacaattgcgacacaccgcgggcattaccaatacgaacgtcttcctttcggcatcaaatcagcccccggcatatttcagtcgataatggacaacatgttatcagatctgtcattcgcattggcatatttggatgatctgatcattgtcagcccaacattggaaaaacacaacgagcatttggatcaaattttctccaaaattcaggaatggggattcaaaatccgaattgaaaaatgttcatttttccaacccaaaattaaatatttgggagtgattatcgaccaaaacggacgacggcctgatcctagcaaaatttctgcaattgcggaaatgcgaatgccttcaaacatcagcgaattgcgttcctatttaggaatggtaaattattaccaagaattcgtaagaaattttcgcacaataagacagccgctcgatgagttgctgaagaaggattcaaaatgggactggtcgccgaaatgtcaaaatgcattctccaaaatcatcgcaatgctccaatctgatctggcatttacgcattttgacccatcattgccaatcgtcgtcgcagctgatgcgtcacaatatggcattgatggagtgatttcacacaaattcagtgatgggacaattaaggccgtttctcatttttcccgatcacttacaccggcagagcaaaataatggacaaattgaaaaagaagcccttgctcttgtgtaagcagtaaaacgttttcacaaaatgattctggtcgataatatactgttctggcggatcatcatccattatcgaaaaggtattcatcaaaaatgatgtcccaatatactccctcatccgccttgtccgatggtctttaattatgaatgcctatgacttcgacatccagtacattaaacccgaaaaattcggtcaggcggatgcactttctcgcctaatttcgtcacaaaaatctgacgaagaagtcatcattgcgtccgttgagcttgaagcaacattggacaacgatctatcaaatgtcatcaatcaattgccgatcacttttaaaaacttgatcgaagaaacgaaaaaggactcggcacttcaacaaattgtgaaatttgtaaaagaaaaatggccggaaccaaagaattttgagccagtggaaggcttgaattctgaaaaattcacacaattttaccgccgacatgaccaaatttcaattgtcaaggattgtcttatgcttggagacagggcaatcgtcccaaa

SEQ ID NO: 6782 - DNA, 2015 bp, Heterodera glycines
tcgcattaataaaaattcgcaatttgtaatttaattaagttaatgaaaagagagattcttaaaaattgtcattaatggaaacacgtattttgtacctttattttgtgaaatgcgggatttatacctgcggtgtgatgcccgaaggaagcggagtgtgggagaaagtgggagttggtaaattcaaattcgtcttgctcggcctaacagatcacatgataagttttacaaaaattattcataactttccacaaaatcactaatttttgaattctttgcattattctattgcactaagtgttctctattagcctgcaaaatttcaaaaaaatttccttaaacttttaattagtatggccaaaagaactcaaaaaaacctgcgttttggaacattttgtccataactttttgaatataagcaaggttttttattttaatggtttttcatattaacttcataacatcattcactctctaaaaacaataattatttctgcaccagcatttatttttgcaaaattaattcaataaaataaaagtaaaaaataaaatgaagtagagatctagaagaaacaaatgaataacaataattaaatattcctaattaggtaaaaccaaaaataaaaaacaaatttggcatttgtcaatgagaatatctataaagaaaaatcaatatggattataaaaattataatattttaaaaatcaatatgttttagttggcacttccgctttgttatgcgctcaagaagacccattttgaaattttatttaaaattagatttatcaacagaaaaacaatttgcttgccaacaaagtgacagcggttttcggttcctcggtgtagttttcggttgggctgatgatcggctcagtttcagttgtagtcttgatcggttgagttactgaatttgtaaatttaaatgtaatttaaaaaaaaatcgcttaaaatatgaatttgacattttatatattacaaggatataagccgatggtaaaaaaaattcggaagttttgtgaattacaaaattttttcaacatagaattttccacgtctttttttttattaaattagtaaaaaataatttttaatttgtttcaatgaatggatactttatttactaaatttatgtccaactcacggtaaatggtgtgagggcggcgtggcagaaagcatagccgataaaaaatttcaaaatctaactttgtctagaattttgttattgttaaaaattttgctgttttttataaaaatttaactaaacaacgcaaaatttcattatttgaataagcttacatccctgctagtaaaaccaaaattttaatttatctcatttaccgccttgcaagtgtccgagaatgagcggcggcaacactttacaaagacattgcatcaccttcaaaaaatggaaaatttaaatcatccatgatagataattttctgacaaattttaaacaacaaaaatggaaaaaaaaaattttaaaaaataccgccggtttggaaacgagttccagcatctaaacattggactaaatactaattttactgctaaaaaccacgatggcggggttggaaattgggggacggattttgtatgacaagcaaggtcgggacgttaaaatttctagacattcaagtaatttaaattgttttaaaaatgaacaattttggtgatttttatacaaatttttataaaagtggaaatagaaatatttaaattgcttaagcttaaaaaattctactaagtaaaggaaaattgtaattcagaaaaaataactttgtctaaaaaacaaaaatggtcaaaaaatctcacgcggcaaaaactgaagatagacgtgattagcaatattcactttaaaattaattaataggtttgaaatgtaaattaaattaatttttaacagtttcttcatcttcaattaataattctgcaatccacaattgcggacccactaaaagccggcaatttgagcaaaatgaaattatgttcagcccggccaaaaactattctgtacaa

SEQ ID NO: 6783 - DNA, 1548 bp, Heterodera glycines
aactgctttgcatgaaatggggattggcaattgacgcaaaaagaaggccggcaatgtcgccacatgtgcacgggtcccatgttgtgccgatcatttcgagttctcatgctgcacgacagagcaggtcgtccccccccccgcgaaattttttttaaatttttcaaaaattataagtaaaatttttttgaaaattttttcttataaatttttgggcaaaacagattgcattaaaaattacaaaaattttccagacggggcctatcggcgctgccggactcccatgtgttgttccccaaatgttcttggaaaaggatcgccaaaagcggtaaaaaggtcgtcgccatatggctcaaaatcccaaaaactggcctttatagaaagatcccgaaaaaatatttgggattgatcgggattcggtcgggatcccgggtatctgtcccggttgcttttcaaaaatctacgggatagatcggtatcgggattcgatcgggatcccagttattatctgtccggatcgcttttcgaaattcttcgtgattatcaggaccgggattcggtcgggataccaccgattccagctgtctggtccctaggggggggggggggaatgtataagtaggatggcaaaacttgataaacctcgattttaaaaaattatagcggacccgcccccccccctaaaaaaccgaatataaggcaaatccgccgtctgactctgtccccattttttattttaatgttcaaaaaacattttttcattttaaggtcacaatcccatcacaaagtaagttcaatttgagaattagaccggagatcatatacagaaaaataaattgaaaattaaaatttttgaattaaaatattcctgttttttgtgttcccatttttacagtagccacaaattgagcacgaatgagaaaatgacaaaaccgatgacaatgattcaattttcatccatgcacaagagggacatgaaatgaattcatcgtaaataataaatattaaaattaaattataatattttatgaattaaaataaaattatagccaaaatgcaagaaatggtacaattgctgggccatgcacttcttgaaaaccaaaaattcacatacttttgtatgtacatattcactaatgtaaaaaacattcgattttgagacaattccttttgttttgccaatttttaaatgttttgtcattaattgcaatggaaaaacaggaagaagtaaaattgttttttctgtgttctctttggcaaaaatggtttagccaaagactcacaaatcaacgtcatttcaagtcgttaagaaattcgtattttgaaaatctttaaatgcttccaaatttagcattttggcaattacaaattttttgtgttttgttcgaaaattttttgttcaaaaatgtatttatttttagtgcaatttattgggcattttttaataatattggttgattgattataattgtaaacatttaggcatcgtctcggcaactgtttgaacttggccatatccctcatttttgggaatctgtttgtagtggcggg

SEQ ID NO: 6784 - DNA, 2526 bp, Heterodera glycines
  unsure (1)..(2526): unsure at all n locations
ctcaattttgactattttttgttgatcagttggaccgattcgattttctccacccatttgaccaacagctgagttttctttttgttctgtttttatcactttttcttcatttacatttttgtcctcccaatcatcgccaaatctttccaataagaagtgccaaattttcaatagcaatggttttattggcgaaattaatgatttataaattttcaatttgacattctatacatcatagacatatgtaatatagataaacatatatcaaatttccctattataagcataatataagcgcagcaaagaatatgatgccaattaggtccaaatgggtaaattccatccatcccatcttcataccgtacctacgtgtgtaccgtacccaaccgttgccatgtttttggccaaaaatgtgatgttcaactgcaaaaacgccttcatccatgggcggaattgggcggtccagataaatttcgcgaagtttttttgcatgtgcaatgtgctcatcggaacgggaaagcatctatgatttatttaaaatattaatttttattaaaaatattaaagtatgaattaagtttgaaataaagaaaaaatttaaaaaacaattattttattaattaatttaactataggatttgcaaaaacccttaattaaatcgtaagactgaaattcctttcatttatttatgatttattattttatttaatgtaattttttaattaaattaaatttaaaaaatacgttatttattgtgttgaacaaatttgtttctgtgatgtaatatttgttgataacagctgatgcaatgcgtgtcttcaataaaacatgggcattgtgtgccttaaatcattaaataatttcatataaaaaatttttagaatttttcaatagagatttcaaaaaaaaagtaattataagaatttcttacaaaagatttttttctggattgtatttgttttgcaattttcctaattattttcacctttttgcatatttgagttaatatttatatagaatttcttataaaaaatcaaacttaaaaatagattttatcaaaagagtgatatcaaaagtaagtacttaaaacgttattctaaactttattgggtcttttgtggtattttatactaattcacctttccaaaggttttttgtcctaaaaatataatataaaatattttattttcttattttgtacatatttatgaattctacaatttcttaaattttccgggtttttttaaattattttgcaattttcttacaaataattagcatccctaagcaaaataaaactaaaattttatgtttatgtccaccggttttccacctgttctgcaaggacaggcattataatgagaggaacggcagcacaaatgccctcgcgaacactgaaaattaattacccaattaaatatatattaaaaaaaattaaaattttattatacaaaaatatttttaatatttcatttacctcttaaagccgccatgtgtaatgaatgcgtttgtgttcggatgtgcgagtatttcattctgcggagcccatttgacaatcattacattttggttcaaactttaagcaatttaaatttaaaaaattatatttaataatttactttttcggtttttcctcacatcctttgcaagcaaaaattatttgataatcaattaattggttaaaagcatcaaaaaatgcatttaatagatgctcaggtgcatatttccaatcaacatgtgttccaaatgcaacataaaggactccttaaattaaaaatttgtcatttttaagcatcaataattaaataataattgttaatggctaattaatacggttggattgataaataagtaattgaatcaacattcgaaaaagcaaaatattttgtgatgaaaaaccaaaaaagcaagctaccataccaataggccaagcgagcaattatttgaagattaaaaaaaaaaacaaattaatattaccctaaatttttccctaatttcatgaataatttttctattaaaagcccatttttacgatggataagcttccggttttcttattttgactgtaaaatctattttttaagctaaataaattttagatttcagaaattaaaattaataatttattattaaacatatttaattgacttttatttaattacccttcgagttcggcttctccataaaggtagacaattcgccaggaagtttttgtaaattttttttcatttcacaatgtgctccggtggcaatcatttctgccccaactaaaatataaattaattaaaaatatatttattctatttttaatttattaattttgttcatttaccagccaatggcatccccattctgtcgatattttcgaaaaagaacatttcactgtgccataaaaattcgaaccaattaaaatttgggacaccaaatttcgcaatgttcggcatcagaaatcgttcaactgaataacaaaaataattattatttttgaaattttatttaattanatttaccataaaattgacgct

SEQ ID NO: 6785 - DNA, 3229 bp, Heterodera glycines
ttttcgtacatttttcttttttctttataggtattttttaagaattatagaaaattcttataaaaaattcaaaattttttgaaaattttatttacatattttggtacatatcttggttttttgtatagatttattttgaattctttttgtacaatccctaataattaaataaattatatttggtatttgaaaacctatatttctttgtgattttgtccggtttataaaacatttttcaattgtaaattcatttattatatagtttaaatattttttaaatataaaatattatttaatttttcccacccgtcgctctgatcgaattgtgcacagtgacactggtccctgacgtggcatagaccaaataatgtggtcgttttcgttgtccctggcctcctccactcgattcccacaatcgctgtctcattgttgtgagtgcaaatccgaaggaccaaaaaatgtcatcgaccacaatcaaatcccaatccgtgctcacaatttcagtaacctatttttgaagagtaagcaagaattttgaatattttaggggtaaaaagattggattattttagaccttgacatgggtcaaggaagtctagaccaattcaaggatttttttaaatttaaattttttttactgggtttttattgggtaattttggacctggatttgggtcctttcttgagcccaggctaggccaagttccaagacttttagaaattttaattttactggttttattgagtaattttggaaatggacttgggttaaggacttttgagctcaggccaagttccaggagttcttaaaactaaaatttagctggaatttacacaaaaattttactggcccatgataagcataaacccaggtccatgctttttaatcaaaatgtggggctctcgaaagtagacatttttagttttcgtaaatttcgccacttgtatatttttcaatgagaaattcaaaacattgctcagaaaaaaattacatttaagagttcgctgttatttttaaaatcatcaggtttcaaaaaaaaacttatagcaaaaaaaaaatttgtttttttctgaatttaaaaaaattgagcactaatatataaatcttttaattaaatattattaatttaattggaataatttcatcaagatacataattttaaaatataaatagtaaatttgaacaaataaacttttttttttttgcctgcccacctgttcactatgatttgacaataaaagcccaaaatctttgtttgacatgtgataaacaaaagcaaatgttggctggattaaacgcgttgaccacaaaagaaatgaaaattgacgtctttccttaattagaataaaatttttcgcttttatttattcaacttttttgaaaaataaattttttttggctgaaaggcaaacatttttttcataaacaatcaacaaaaaaaaatgttcaaataataataataataaaaaaaaacattttcttagaatctgtaattatcctctgatccatctaaccaatcaatcaaagattagctgatgaattaaactgtttcattcctgcctaattaagaactgactgctgttctactgtactgtatgtatcgtatagttttgtaataattattatttaattttgcctcatcattgcttggaacaattggtaatggggcgcgaatatgatgaataaacggtttttgtttttccactggaagaattgtgtccaaaattgcaactgaatgtccacggctggcaaatctaagaaacaatttttaaataaataaggcagaagctttatttggagaaatattaaaaatgataaaatatttttatatatttatttttatattaatctaataattatatttaatttttctttcctaaaaaatgtgggtctttttgatcacgaatattatttacatttgttttgacatctgctgttgtatgtatgtaatctctatgatttttcgaaaaaatttaaaattaaaataaatcattaaatgagtcagacggggtataaatgcaaaaatattcataaaatcctgaacaattcatctaataacaagcaaatgaaaaaagatgtcaaaacaaatgttatttacatgatttagagaccatatgaaagccacttaattcataattttgggaccggggttttaagtttatacttattttttctccggctttaactcgacgagaaatgcacgaaaaacacattttttgtttgaaaattttaggtttttcgcccttattcgaaattagaaatccttattttggatgttagcccataaaatccgtaattaaatattcgcccttaaaataagtttttgcccatattttgacattttgtccaaaatttattaacaaaaatgcaataaaagcgaaaatacaccccccaagaatcgtccaaacaatttcaggaaaatgtatccctatgaatcgaccgtaaaattttcaaaaatagaccaataagaaatgaaaaattttcttaaaaattcaatctccaaaatttattttgcacctctgaactttagaaatcaatttaggccaataatcatatgtcttttacccccgaaaattttgaaatgtatctctgtaactgcaatcaatgaataaaattgtttgctttagtttaataaaaatgggcaatggatcttatcaacgcccgctttccgcgttttaaccgcccagccagcttcttccttacagttttaaattattttcattaaaaaaacaacaatttaaaaattatacccctaaatttgtaactttttcgaccttattttcgcccttatttactgccttattttgaactttttcgcccttaaaaattcgaaccctattcatatacaaaatcttttttttgttgggaggggtataagtaaaacctgaaccgtcaataaatttatgaatattttaaaataaaaaacaaaaataaaataaaaattcacttttcaatcattgggagcattgattgaaaatggctgccactgtcgtggaaaaaagtaaacaaaattttctcggcattgacaacattttgaagcagtaacacagttgtaataagtaggtatgaacaaaacagctttaattgattcatcattaaaataaatctgaaatttaaatattttaaataaaattttaaaaaaataaattttcgaaagaaattttttcaatgaaaaaagagaagaaagaacgactttgaaactgacgaaaaatctgtcctcgcttttt

SEQ ID NO: 6786 - DNA, 7220 bp, Heterodera glycines
acttttgacttttgtcatgcctaccataacatggccgagtatataatcttacggatttgtaagaaacaacccccccccccccccgcgttaaggcattcacatcatcaacattcgcaaaacgtgggagaaactgttgttcgccgcccgtgccatcgcggccattgaaaatccgtccgatgttgtggtcgtctctgcccagccgtacgcccaacgcgctgtgctcaaggtttttgcttattccatggttctggggtcgggctgattgtgattttttattcaatttcggtcccataatatggagcggtaaacccgttacaaatgcattacatggaaaagtttagtttggttttccaaggtaaaagaaagcacagagttgaagcgggtttctctttgcttaaccgaatcgatggcaataatctttctataatacctaaattttcttcatgtttcagttcgccgctcacatcggtgccacgccaatcgttggccgttccacgcccggctctttgaccaaccaaattcaaaagaatttcaaggtttttaattgcttctatcaaaaagattttaaacacaatttggtattttccgttcgggggccccacatttatttagtttaaaaaacgtcaaccgccatgctgatccattcgattatactctgggccaatttgttgctttttgactcccaaatagctgaagcgatgtttttgaaaattcatcgcgctttttaacgtttttaatttaaataaatgtggggcagccaaacggaaaagtacccaaagctttgcacttcataaaagccttggtttacaaccatttgtttgtacaggaaccgcgtctgctcgtggtgtccgacccacagttggaccaccaggcggtccgtgaggcgtcctacgtgaacacaccggtgattgcggtggccaacacggactcgccgttgaaatttgttgacattgccatcccggcaaacaacaaggtttttaccctaatttttaagctatttggagaggggtactgaattttttttactttcaaaacacgacatcgggcagctgcccaaatgattagtcaatatccgaccaaaaattgttgtcactgacaatgaattgaaaaatttttaaattacctgacatcgggacctgaaaatttaatacgcttacaattttggtattactcacccgggcaacaaaaaatgtttcggtactcttttgattgttccttttcatcccaaaacttcccccatcaaaaattaaaacaattccaatccccccacagcaaaagcactccgtcggactgatttggtggctgttggctcgtgaagttttgctgttgcgcggcaaaatcagtcgccagacgggctttgtggtggacgacaagctgatcatgcccgacctgtacttcttccgtgacccgcaagaacaggagaaggagggcaccgagggtgaggccgaggcggacatcaccgtcaaggagggcggctggggtgccaccggaggcatggacactatgggcggcgacttccccggagtacaggttcgcgtcaaaaatttatgccaaattgcagagtcttgaaggttttagccaaaaatcactggttttaaggatttacattttttttcaatcccggatggcttaaagagttgtaagcgataatttgatcgatagcaaagtttttgaaaatataatatttcaaacaatagaattattgttcctaaaatcaaaagagcacattttcttaaatttaatgctgcttaagacctctaaaattgaaaaaatgtaactttggacccgattttagacataggcgtaaatgtccgggggcgcaaatgtctggacacggttaatgggcctggcctgggtcgtctagttcaaaaatcctttttcggtcgtcccaacttcagctttttcacaattatttaattctaaatgtttcaggccgagccgatcaagctggactttgaagtgccgcacatcaccgactgggccgccgcttcgtcggattggaacgcgccgcccgcggagcagcagccgccgcaagcgcagcaaatggttgtgccgtcgcagccagccgctcaggcgccgtccgctgtgcctccgtcggcgattgcaccgccacaggccgccgctgttgcaccgccgccgccacagccgattcagcagcaccaaccgatgccgactcaggtgaaatgcttggttaattgtagcgaaaattgctcaacatgcatttgttgatgacctccttttcgacaaaaattacggggttattcgaaatgaatgttatttgcctacgaaaaagtacaaataatccaagacaaagtaatttatgagtgtacgaatttgggttttgttatttctgttactgattgatcatttgggttttgagtgtcacaggaaaaaaaattgttgctgtttgtcagcacacggttctcgagcagtacaccaccgctcaattatacctttcaatttgtgatttttcctatgtttacactcaaattcggttgcttttttgcagaaagtgtcgaatttccatttgattcaatgacgaaaggaacttcatcgtttggcaagcgccacaacaaaacccacacgctgtgccgccgctgtggtcggtcctcataccacattcagaagcacacctgctcgtcctgtggctatccggcgaagcgaaagcgcactttccaatggtgggtttttggcaggagcctcggcatttgcggccccaacctactcatttaaaaaattaactttgttccatataattttaaatcgaatctactatgcatgatatgttctatatttaactattttcttatcagtacaagaataattccagacgttttttgttaataagcgcatacattaatgggattggcatggatttcttcgatgtatcactggccgatgcagaaattcaggattagtagaatggatagaaatttcaagctttgttggggccttgagcaagcccaattttgttgaaaaaaagttagaataatgttcatgtaaattttaaaaagaagaaaaatctggtaaatgaaataaattggaattttcaaataactatatgacctccctgtgatatatagagaaactagaaagtggttaatttttttaatgagtaggttggggccgcaaatgtcgggaaataccccttaagaaatgggccgcaaatgtcgggacacgttttggcatatgattttctcgaacactttttccaaaaacattaattgttcaaattgcctttttagtttgaaaaaacataattttttgacaaaaatcactgatcaaataaatttcatttttgtattcgtctggctgcgttcgatagctccgaattcaaaattatccaactttataatattgtattaatggcatcgctttcttctaaaggtctgtcaagtccatccgccgacgcaccaccggcaccggccgaatgcgtcatcaaaagcttgtgcaccgccgcttccgcaacggattccgcgagggagtgaccgcgccgcgcaaaggcgagaaaaggagagagagagaggcatcagaaattgatggagaatgaatcttttaaatggaggaggagcgcgcaattgccaggtaaaaaagcccgtgacagcccccataaatggttcgggatttgaaaaaattgggtcgtattcacgagaatcggttgcacttcatttcgccttcttctaaaaaccgattttgtggccataacttattactaaattatttctgctgttttttgtacagtaggcccacttaaccagcggggaattgccccccccccccgcccccgaaatgaaaaaaatttcagaaaatgggtatttctttcaaggttactgtattttactcggagccccgacatttgcggcccagacatttgcggtccgacttttgcggccccgacatttgcgcctatgtccaaaatcggactcaaagttgaattttttcaacccctgatagcctaataagcattaaaattaagaaaacacggttttatggttcattatgatcaataattttttgtttgaaaattttattaatatttattttcgcgcatcaaacggacaccaacaacaaaagcaatagcagcaacaacgattaaaacagaagcagcagctggaggtggcacaagatttcacgtttgggaccattggaatgttcgggcgaaggtatggtgagaaaatgagcaatttaagaattggggcgagaaaaatgacggatccgggtttatgtcgggacaaaaaaaagttcgactcgagattcgcgacgagaaaataatggatttcgggactcgaataaaaactctgattggtctgactaaattgtcaattttcatcgaattagaattttcacctgagcaaaatgatctactaattaattcgactaaatttggcttaattttcagttttcttattttgaccaaattttatggattagataattgactgatctgaacgatttcggaaaccatatcaatattaaacctatcatttcgcaacatttggccaatgctcaaaaaaaacattcatggcttgcgattgtccgccgcaattttccgccgtttgcgtcattttactccgtcaattgtcgacgactgtccatcactttgcgttgtcaatgcctattccagtggtttcttcaccgaatttccatgcgatgacagtgccgcggcatcgaatggacaaacggtggccaaatggcttttcactccatttcaaaacaatgtgccaaaattgttcaaatgctcgttgtatatggatgatgggaattggtcatctgtgcgcgacgaaagcaaatggacaaaatgggaaaaggaggcaattgattggaaattttttgatcagtgaaatcaaattggcaaacttcatgcttatcgtgaggacgaaataatgggtcagcgaatgcttattcaacaaatcaaatttattttgtttccattttttagccatttcaccagcagccccaaatgatcagtagcagaaatgaatgaaagaatgatttggtgagattttaattgagcgacgcagttggcccatttagtagtgctgttcgagaccaaaaatttcccgagactcgaccccgagacccgagaccgagaccgaaaaccccgagaccgagactcgagacttttttcaaaaaattttcctattcgcttaaaaatcgttaaaaacattttttgactctattcttaactaatttttggtttttttttaattttgattcaatttggtacaatatttatcatttcaaaaacgcacaaaacaaaaattcattaaaatttaagtgcaatttgttaactgatttagtccaaaaaatgaaaatattttacgaatttaattgttaaaattatgattgaattcccaccgaaaaatgaataattttgaaaaattagaagaaaaacaactacttggaggggaattacttttttttaaaattttcttatttcttaaaaattatgaaaaattactattacgtttgaaataattgcatttattcaactgaaaaattatgaatcaaaattaaaatgcaaaaaaacagggctcccagattaaaagtttcaaaagcctcatttggtatgcaaaaaagcctcattttgagtcaaaaaacctcatttttacaactttattcaaaacaaaattaatatatgcttactaaaatattaaataaaatatatttgatattttttaattttatatttttatccaattaatgatttcaaaaaatttctgctatcgaagtttttcaaaaaattaaaatattcatatacaaaacaaaatttaaatgagttttaatttattttttgaattttgtttgaaaaaatagttaatttttaatattattactttgtttttttcgcagtttttgtgtcaatttaaaaaaataaagggtattttggagctccggcggtgccgataggcgccgccggggaaaatttttaaaatttgagtgcaatttgtgaacaaatttagtactaaaaatgacaatattttatgattttaatttgattagattcacttaaaaaggaataattttgaaaaattagaagaaaaaataactacttggaggggtactgatcccacgctaaaatgaagacatgaccaagaacataacccactgagccacgcacactattaaggtaatgaagcaaaaatataccaaaagtatatttatttctaacttacaaaaagccgatcattaggggtgtaaaaaagtctcggtctcgagtctcgaaagtctcaaagaccgagaccgagactgaaaacccgagaccgagactcgagaccgagaccaaaaaaaaccgagacttttctcgagtcgagactctcgaacatcactaccatttagtactaagacgcagttgacccctaccgctctaatgcacacatattaagaatggcgcatgaattctattttaaaatttttatattattttaaaagttttatcgcacttaactctttttaatcggaccgggtcagtttagtctggtcgttttagtcggagggtcggtttagtctggcaagaatatttttttaaattcagcctacacattgacattaatgctaatgtcctcaaaattattggaagccacacatgcgacatgagcgccgaacagtggagtgttagcgacgtgtgacccagctaaaaaatgtgcccgtaatgatttttcaatgttttgtttttttattggaaatacattgataaatgcactttgctaggctgaggcctaagcttagaataagtaagcgaacttaagcctaggctaagtaagcgaacctaagcctaggcttaggcttgacttccgcttagaaggccttcaaaattctgaggaaaatcccttttggttaacgaaagctcttcaaaacaaaaatcacatcaaatcaattagcaaaaataaaagatatttcttgaaacaattcatcttcaaaaacattttaccaaatttggtagtggagggagagatttgttctgatgaaaagcaccataaattatttgtaagcaaatttaattgaattttaaatggcatcacagcaatctttgggttcttttgtgacatcatttgaattaccctttcaaccttgtgatcatcttgtcagcaaaatccattaatcttggtatcattcaaaagccctaagttgtcttcttctctattagcctgcctaatttcaaaaaagttatggcaaaaatgttcgaatccagttttttgaattcttttggccataatttt

SEQ ID NO: 6787 - DNA, 2683 bp, Heterodera glycines
gcagtggtatagggtcaaattaagcacggactttcctttcattactagttctccaaaattggaatttgccgttcaattaacattttgagcattttaaacacttgattctattattcttttccatttatttaaatagatgctgcttttaattttcgggttctactcgcactttatcggacgtaattaactattaataactcaaaattgcttctaattccgattatatcattaactgactcgaaattgcttctattgagttgaaaacatcattttttgctagacttgtaaaaattttaagtccaaaggacgagaattgatcacatttctatagagtggataaaatttttacctaggattaactttatggagttttttaaaaactgagaagaatacaccctgaaattaaattccaaacctggtatttggtaattttctcatcaaaatattcctgtctttgcagtgtatagggtcaaattaagcacggactttccttttactactgttctccaaaattggaatttgccgttcaattaacattttgggcattttaaacacttgattctattattcttttccatttatttaaatagatgttgcttttaattttcgggttctactcgcactttatcggacgtaattaactattaactaactcaaaattgcttctattccgattggaactaactgactcgaaattgcttctattgagttgaaaacatcatttttgctagacttgtaaaaattttaagtccaaaggacgagaattgatcacatttctatagagtggataaaatttttacctaggattaactttatggagttttttaaaaactgagaagaatacaccctgaaattaaattccaaaccaggtatttggtaattttctcatcaaaatattcctgtctttgcagtgtatagggtcaaattaagcacggactttccttttactactgttctccaaaattggaatttgccgttcaattaacattttgggcattttaaacacttgattctattattcttttccatttatttaaatagatgttgcttttaattttcgggttctactcgcactttatcggacgtaattaactattaactgactcgaaattgcttctattgagttgaaaaaatgatttttatgctagacttgtaaaaattttaagtccaaaggacgagaattgatcacagttctatagagtggataaatttttacctaggattaactttattgagttttttaaaaactgagaagaatacaccctgaaattaaattccaaacctggtatttggtaattttctcatcaaaatattcctgtctttgcagtgtatagggtcaaattaagcacggactttccttttactactgttctccaaaattggaatttgccgttcaattaacattttgggcattttaaacacttgattctattattcttttctatttatttaaatagatgttgcttataattttcgggttctactcgcactttatcggagggtcggggtcggttcgccgcggccacttcgccgcggccacttcgccgcgggtttttcgccgcggggttttttcgccgccggctttttcgccgcggactttttcgccgcggcaagttcgccgcccgaagaaaaatgtccatttcgccgccataattaaaaatctcgaaaaattttgaaattatgttaaacaacccactatgtataaaaaatcatgctttattaaaatcctttttcataaaaaattaacaatctcaaatgaacaaaatcaaattacgggtccataacacaattatttgaaattccccggagaaattcaacaatattttgggcatcaaaattttcgataatattcaaaatgcgcttgtccgcgtttcggaacttctttttcttcatcggtggttcttcaccgttcacgcagctcacataatcggcgtcacgcgcacgctgatccattcgaaggacatcgatgaatcgccaaattgacgggtagcgacagctgaagattgtttggagtcgacggtgcgctgcttccgcgatgttgtttgttcgctgctcttcgttgacagtccgttcatgcacattccaataattcaccggaaaacgcggacgtgtgcgggtcccatttggcaaaggaacaccggtgtagttgatgaggaacctattaataaccatatgattggcaaattccgacaaaacttaccaccccagaatttggtcgagttcttgtcccacaacatcgttcagcgcagtaattgcaccagtcaaatgctgaattggcacaaatgcgagcgcggtgatcatacgagccgtttctgcgaaaatggggtcacttcgatagcgctaaacgggagactatttctttttttttgggactgaaacttacattttgaagtccttcggaaatcaggcgcttgtgcatgttgtgcactaaatgaaaaaggcaccctcgaagctgagcgcccggaaacactgcggccgcagcgtccatcgccgcttgttcgaagtccattgtgatggacgctggtgagaaggctggccatgcgtcaatgatcattctgaacattttttcgtagaccagtcgcgactttcctgtcagaagacatgtggcgattgggaaagtccattttccttttctgaaatttttctagaagaaattcaaaaaccaaacaaaacaaacttgaaa

SEQ ID NO: 6788 - DNA, 2015 bp, Heterodera glycines
tgctatcgtcatataatctgttggcaacgggcggaaggtctgtatgtcttctactaccggtaagtatttcatcggtaaatcgtgttaaatacccctttgagaaatcatgtttgtatctttctattctcacacggtcgcccactttgattttaggactcttttttgaaaattttttcgcttcattatatatcttttgtctcacttcctcggcattcacaatacatacgtcagcaggtcgcatgtcaattgaggaggttatagtctgaataatgcctgtaccaacgtccaaagctccctcaatccattgttagttactccatctgcggaactttcctatcagcattcatgtgtgcgattagtaaagtcccttttcacttctctgaaatatttggggaagaaatccaacaaccaaaccaaccaaactttgaaaggaggacgtaaacttgtgaaaatggatgtggtgcgatggaaaaagttccatctgcgaacacttcgaccattgcatgcgtccaatttgcgtaagagttcttggcaaaaatcagaatcctgaatataagcggaatttaaaaatatgtcacattaattaataccgatgttgggaattgtcggcattaagtgaaaaaacgccagagtcagatagtaggtattgctcctcctcaactccttcactgcgcttgtacacctgatatgcttggccaatttggaggtcgtgaatagaatttggagccgctggtgcagctacaatttcatggcgtacacgtttgacaatctaaaaacaaagcaaaaaataatagtatgtgtctgcttttcgttaccttcttaattccattggcacttggtaactgagcaagcaccggtgttgaaacgttgaccattgcatttgcacggagttgtgaaggcaattccatgcattccgccgcacgcctcttgatccccgtgacaattttttttgctttcacattggcaatgtttgcttcgtgtgtgtgttcggtgaccattttgacaaaattgttgttcatgtcggtgtgaattcgccctcgacattcgtccctttcgccagaatttcaaactaatatcaacattaaatttgtcgaaaatgtaaaggaatccatcgttaattaatttatccttgtgacgatttgtttcaacttcagacattattaataagtaaccaaatattgcttaatatataaagatagacaatatagatttaataaattatggtacacgagaagtataacaaatttttttttaattatggcggcgaaatggacatttttcttcgggcggcgaactggccgcggcgaaaaagccggcggcgaaaaaaccccacggcgaaaaacccgcggcgaaatggccgcggcgaagtggccgcggcgaaccgggcggttcccttatcggacgtaattaactattaactgactcgaaattgcttctattgagttgaaaacatcattttatgctagacttgtaaaaattttaagtccaaaggacgagaattgatcacagttctatagagtggataaatttttacctaggattaactttatggagttttttaaaaactgagaagaatacaccctgaaattaaattccaaacctggtatttggtaattttctcatcaaaatattcctgtctttgcagtgtatagggtcaaattaagcacggactttccttttactactgttctccaaaattggaatttgccgttcaattaacattttgggcattttaaacacttgattctattattcttttccatttatttaaatagatgttgcttataattttcgggttctactcgcactttatcggacgtaattaactatgactcaaaattgcttctattccgattggaactaactgactcgaaattgcttctattgagttgaaacatcatttttatgctagacttgtaaaaattttaagtccaaaggacgagaattgatcacatttctatagagtggataaaatttttacctaggattaactttatggagttttttaaaaactg

SEQ ID NO: 6789 - DNA, 1352 bp, Heterodera glycines
ctggtatttggtattttctcatcaaaatattcctgtctttgcagtgtatagggtcaaattaagcacggactttccttttactactgttctccaaaattggaatttgccgttcaattaacattttgggcattttaaacacttgattctattattcttttccatttatttaaatagatgttgcttataattttcgggttctactcgcactttatcggacgtaattaactattaactgactcgaaattgcttctattccgattggaactaactgactcgaaattgcttctattgagttgaaaacatcatttttatgctagacttgtaaaaattttaagtccaaaggacgagaattgatcacatttctatagagtggataaaatttttacctaggattaactttatggagttttttaaaaactgagaagaatacaccctgaaattaaattccaaacctagtatttggtaattttctcatcaaaatattcctgtctttgcagtgtatagggtcaaattaagcacggactttccttttactactgttctccaaaattggaatttgccgttcaattaacattttgggcattttaaacacttgattctattattcttttccatttatttaaatagatgttgcttttaattttcgggttctactcgcactttatcggacgtaattaactattaactgactcgaaattgcttctattgagttgaaacatcatttttatgctagacttgtaaaaattttaagtccaaaggacgagaattgatcacagttctatagagtggataaaatttttacctaggattaactttatggagttttttaaaaactgagaagaatacaccctgaaattaaattccaaacctggtatttggtaattttctcatcaaaatattcctgtctttgcagtgtatagggtcaaattaagcacggactttccttttactactgttctccaaaattggaatttgccgttcaattaacattttgggcattttaaacacttgattctattattcttttccatttatttaaatagatgttgcttataattttcgggttctacgcccactttatcggacgtaattaactattaactaactcaaaattgcttctattccgattggaactaattgactcgaaattgcttctattgagttgaaaacatcatttttatgctagacttgtaaaaattttaagtccaaaggacgagaattgatcacatttctatagagtggataaaatttgtacctaggattaactttatggagttttttaaaaactgagaagaatacaccctgaaattaaagtccaaacctagtatttggtaattttctcatcaaaatat

SEQ ID NO: 6790 - DNA, 2254 bp, Heterodera glycines
atttaatgcattcgaattttggaattaatttctcttcccatacacgcaaattgccaaatcggtggatacggtaacggagggactgttacagcaacacgaaggtgcactgcgaagaacacagcagcaaaatgggcaaatggaagcgaaaaatggggaaaatgggagaaacggaagcgaaaaaggtgggaaaaatttaaaaacccttaattcaaatggaatcagaacatcggcccgtgttccgagaacgtctccgcgacgcctacttttgtgagggggcggcgacggcattcgtcgaatgccacgcggtgggcaacccgacgccggaggtcacctttttccaccacgaaagtgccatctgtgacgacggacggcaccaaatcacacgcaatggcaacacgtggaggtgggggggggagggagaggaggaggaattggtgtcatgacaactcgtacaacggcttaggctgccaagttatagtctaaagcttaggctttattatgtacgagttgccttttgtacgaattgccattgactccattcgagattcccgaattttggcccaagaacaagcaaaattgaaatgtgacaaattagttttttccatcaatcactttccctgctaagaatgaccattgtgcgtccgatggtcggcgttgacactggtgaatactcttgcgttgcgcagaacgaatttggccgtgaccgatgcgcctgcaaaagcatttgcggaggtacaaataaccgaaattccaccgagattttatccccaggcccaaaaaacccagaaattgtattccattttcagatgcccctgaacgcccttcaaggcccgacgttgagctttcctcagacaccgaagtgtacgtctgttgggaagcgcccgaacgcctgccggtgaccctcgaaggcgtcatgtacaggtcggtgtagatggcatacgaatttgggaattaaaagaattttctattttttctagtttaaaccttttagactcgaatgccgcccggcgggggaaaaggatgccttttcggcatggactgtggtcagcaattgcgtggaggacgaagcagccgttgtaaagcatttgataccgtaagagaaacaaacttaaaattataggaaaaatttgtatgaaggaaaacatcattatattttatctgggagctaattaggcctaattccaaaatgttctatccacattatcaacattctctcattttcagaatgggcgtctaccaattccgcgtgacggcacacaatgaattcggctggggcaccccttcgatcacttcgcgcattattcgcacccatccgaggggtaattaaaggaaacaattaaattaatttaaaataattaaaggtatcccgaaactgaatttggatgtgctcaggcgggaaggacgacaatttacagtggtgacaatgccacagaaaacggggcgcaggggagccggcctaacgcaaatagcggaaggttgccccaggggaaagggtttaattagtaaatttacttatttatttatattttaacatttaatttgtatttaaatttaattgactcccaaaattaaaacagattttatggaggaacaacgtgaggaagagggaagggaagaagaggaagaaaatgatgagcaaatgggggatgaaagggcggaagagaaaaatgggaacgaaaacaacggaaatggcaaacaacgaacggtgccattgaacaccacggaggacccgctgaagcgctttcaggtcaacaaaagccactaattgaacttaattaatgttaattaacaccctttcaaattcgactcccccccccccccaaatttcagttggaatcggaattgttccgcggtcagttcagcgtcatccgttacgcggttgactccaaaacgggcgcccattgcaccgtcaaaatccgagcggcgcccagccacgggtcgctgatgttcgcggcgccagcggaacgcatgcgagccgcgcgcgctgagtacgaaacgctggcggaatgccaaagtgcgaatgtggcacgccttatagcggtgagtgcctgctagaccggttcagtcggaccaattgggcacgggttcggctgaatccaccgaaaaagtgccaaaaatgtttcgtttttgccaaataaggcttattcctccgacaacgcttttctgctccttttcactgaacgcctttacgaaaatctgttccaacgcttcgtccgattggacgcgtacacggaggagcaaatcgcattcacag

SEQ ID NO: 6791 - DNA, 2287 bp, Heterodera glycines
  unsure (1)..(2287): unsure at all n locations
ttantcgagcaaaccaaaggcacattagtagctcttatatctttaaaaaaagaaacaaacaaataaaattgatcaaattaaaactacaaaaataccgaaatataaatgaaaataaaataaatcaaatgttgaattcacaggtgattataaattgtaaatgtggcacagaaatttcctactcagaactcattgcttttagtaaatccctgaattcctttgccttattaatttgcaccgctaaaactggaaggttattccagtttcttactatcctatggaaaaaattattttgagttttggccgtgtggcgctttactcgtaaaagtaaaggcctcctgggcctttctgagaaaaaaaaattttgctcagcatcgaggctggtgaaccctttgattattttaaaagctgttgttaaatcattgatttttcttctttcttccaatttgtgtaaatcagtgattttaagtctttccatatattttttgtacacaaatccacattttcgaaaagcttttcttgtgaaaaatttttgtacccgttcaatttaatcgtattaatataattaattaatttgtttcgttaattggcttcggctgccactttctttcccttccctttttcggttgacttcggccgcgcccgtcgcttgggctcccgggaaggcgccgccggcgatggccaactgatcgccgaatggacggcgcccgaattgcttttggcacgtcaaaacaatggcacaaaagcaaagatcactgatgagggtgagctctaaaaaagggtgagaataattggctcagtttatggcgctttttaggcccaaacggcgcgggcaattggccaaacgcacagacggacatgtggggcctgggactgtgcacattttgcctgtaacgaattggccattcatcaaaaatttatgacccaaaaaatgcgcacaattcacagattggccggctttcatcccttcgcggacgacgacgacacggagcaggacatccgccgccaggtgcttgagcaccgctgtgacccgaatctgatccctgtgcaagcgtcggaagaagcacttcgcttcgtcacgtgggcactgaaaaaggacccgcggtaaaaacggatgagaggcaaaaaaacagattttgacgggtgtgccagagatttaaaaaaaggtttgtttagtaggcgaatgcgccctgacgaagcgttggaccaccgtttcctcgcctccgacgcggcgatggttcgtcgtcgggagaacattcgctacgcgtcccatcggctcatgcggacggtccaacggcgagttcggcagcaaacgcaattcgcgaggaacggaggagcggcacgggacggtggcggaacggcgccgccgcattcgcacgcgggcggacggacggcaaaaccgacgaaaggagcgatgaacaatggcacggcagggagaacaacggcacccaaacggcgcgttgtgaccatggaatgctaaccaacgcgagagtctcgaatttgtcaaaagccaaaagaatggccaaatgaactcaatcaattagagaaaatgattgtttattttattgaatttctcatattcatttattggctattaaattcatatggttgaccgaaaatgaacggattcgggcataaaactcaatttcgtcctcaaagttcatttaaaataggagaaaaacggatgcaaaagtcaacggatatattcttacaagacataaaaaatgtctcaagactatgtctttttacattcattgaatgtttttgtttgttttgttcaatgcataaaatggataaatttattttcggattaattattatttaaattaatttaattaaatattttttgggaaaatattcgaaataaaaggaaataatttcttcaataaaatatggtaaatttgccattttagtgctctttcccatggcatttctttctttcgtatgcgtgggattagtaacatttattttaagttttgccattaatttgtgcaatttttttaaatacgtaacgaaatacaaaaattagaacaatttccattgccaattttgggctggaaattcacattatttggcattttgccttaattatttccaatttaagccaaaaatttctaaaacttgcagaattgcattttgatgcggcatataaataagcgtatctttttacttgcaaatggcacttcgcatttcggcgccgtatttaatttttcaatttactttttgcctttggcatgggaatgccttgccattcggcttttgtgcgaaaagcggacttcaaacgggccaa

SEQ ID NO: 6792 - DNA, 3493 bp, Heterodera glycines
  unsure (1)..(3493): unsure at all n locations
aaacgggccaaaagaagcttttcatgcactagccgaacgcctttggcactcaccacgcgcaactcgcctatggcattggcactgcctaaagaaatttaaaaaattcaaaactcaatttatcacaaaattgctttaggcattttttttaatggacattccaactttcgctgccaacacaacagcagaaccagcagaaccgaacgaaatgagtacggtagttgaaggtggagcagagaaaacggtaattaaaggcggaacatcccccccccccttcccgcgccccattcccgcgccccacgccttaagaaatgcaaaatctaaaaatttccaaaaaatcgggttttatgaatttttacgtaaattaaaattccatatgttttaagcaaatgttctctaattatgatttataaatgatcattatccaaattcaaccttccctcccccaattatcagttgttcctcccctgttggtccgtgcttttgtgtgccgttgtgattgcttcagttgccgccgtcagcattttcctcaacacttttctagttttcgtcaccgtccaaactaagtgtgtctttggtatatcttttgtgccaaatttccccaatcaaaaggcaattgcatggctctgccaacgcacttttggcactcaattcgttgtttgaagtgttccatgcgttcggccacttcgtctttctttgcgtcgccctctccgatcggtgctctcccctctcctaccgtaactcctaccgttcgttgaccctttcgcttttcggccttttcgccgcttctttttctatgcttttctccggcttcgatcgcctcttttgcgtgtttttcccattaaagtcaatatttttcatctgttttattgctttatacctttttttagttactttcgcttctcccatttttggcgctgttttgccattgctttttccctttgtgccattccgagcgttgcgctgaccgtcgcattttggcgccggggcgaagaagtgccaacgatggaagtgaccggaagcattggcgacttgatcatcaatgttctgttaaattatattgagttttaaaatggttttgtgttcatttttaagggtggctttgccttcgctttgtacagcttcgcaaagttcgcctgcacaagtggaactgtccttttgtacgctttcctcgccatttggctgtggcacaaacgcagtgcgccgttactttatttttttactaaattaatttattaaatttgacttttttgaagatgaccaaattcagtcgatggcacattgtgccaaccgtcgcattttcgtctctctgttcgtcatcgttctgttcaatgtcggcggttattttctgatcgccattttctaccttttttggcctccttcggcccatccctcggcacagttttggctcgttcgaatggttctgtcaattccggccaatttgagcggtgcgtccaacgtgccgattcttttcatgacgaggcgagaaagagacaaaatgccatccctattcttactaaattttctataaatttcacagctcggactaccgaaaggcattcaaaaagcaatgccaaaatattttgcttttactcggccaaaatcgaaacagtgccattcatccgacgaccgtttttgtgttgccacagaggcaaaaccgacaaagacagcgacagaatgtgtttgccagcagaagatgatcaacggaggaaaagaagcagtggccaaaactgatcagagaatggatcagcagctgagggcaaaaagtgatcaaaaatttatcgaatcgatttgggataaataaaaaataataaattttaaaaaataattttaaaaagtggtcattgaaaattggggtgataaacggggaaaatacagcgatggaatgggggggcacagagataaagctcatttctggtgatcagatcataattaagaaatggatgctcattatgtgctctagaatgctcattttttgctgagtgattccacacttttgacaattttcttcgcccgcaaattgttcggattgaatcggaagggcaatcggatgggaatttcctccgctttgatctgattcttgaattcagcgatgaacgactgctctatcagtcgtctgttcacgacgtcatcaatccaaatcttaaatgatcactctgattatcaaagtttaaaggatttttgccaattctgtctgatcagaaagttcctcgcacataatggcacctcaaatttggccatgaatggcaagtccaacaagttgccataggatatcggatcacggcgattgcccgggttaatttcgcatcggtagaacaatccgtggacatggcacgcaattggagagggcattccgaacagcgagcggacagtttggatgaacagagcgtcgagtttttgcacggtcaccgcactttgacgacccgaagtgccgtgaaaatacaattggaaaatgccgccggagagattttcgacactttcgaattttggcggaatttcgtcgcggaaaattgcgacgcccaatttatgattgaaaactgaaaaataaattttaaaaaatactaaaaattgacaattttaaacgtgagaatgttattttttaaaatgccaattgtaattatatatatttttttaattatttaaaattaattaattaatttatttatttaattgcccaacttttactcacaaacacttttcgtcaatttgctgggcagaaatgtatcggtgttctcgcgcttcaaatacgaatcccagcgggcgtgcgtttcgttgacaatgtttttggcggtcggccgtaatttgttcacttcggcctcaattagaaaattgcaattaattaattgtttttccatttcctacacaaaatgcacatgttttcactgtgcaatgattcggaaagtcgcgacaatcgaagcgccacaaagtccatttggggggaggagaagcgaagggacggcagagattaagcggaaaactgaattaattaggacgagaatgaataatatgtgtgaaattaattaattaattaattacattgtgccacactcacttttgttctgtctcatttcgcaaatttagccgattaatggcaaaagcaagggaatgtgtgggcattacaaattaaataggttctattattacccaaatatttgtgcaaacaaaaacgagtgaattaggtaacgcaattaattaattattcaatggcgacggattgggggaaagagaaaagggaaaggcaaaagaaaagggaaaaggaaaaggaaaggcattgattggattggcatgttttaaatgattcatccgtccgcagaggaaggtaatgaggaggaataacgaagaagaagaagatgaagatgaagaagaagaagaagatgaagatgaagagaaagatggacacacggcggaaggacggaaatataaatataaactanatgaagaattngacaaaaaaggatttgttgcatctttttgcaagtttttctttgtaatttaa

SEQ ID NO: 6793 - DNA, 2580 bp, Heterodera glycines
  unsure (1)..(2580): unsure at all n locations
tttntaatttcacttcaccatncttttaattcccaccntaanacnnaacatttccaaaatttntaccacattttactncnnanantccaantaccttaattnnacaattacttatcaacnaacacantctcctttnccctcttatataacanaaaannntnnatatcanatnnnntgcgtcccttcctaaaaatttctcttttcgtctaaccatcccacctttttgtgctctatttcattttcaaaattgggaacatttttttgtatgtttttttgaaactaaaatgtaaaaaatttaataattatttttgatttaaataatgcttctgtttcgaatcttttggctttaagtaattaaattgtaaaaattcaaaactaaaaattctccactgaagtttttaacttggctttaccctgcttttaagtcccaccgtgaggcgggacagttccaaaatttgtaccacattttactgtggaaagtccaagtaccttaaggactacagaagagccaatgacgcagtcacctttggacagttattaaaaagaaataaggaaatattcgatggggtgcgatcctttcaagtctaccctccctcgctttttgtgcactgtttcgtttctaaaattggttccgaattttttggcattttgaaattaattgcaaaaattcgaaacaaaatactctgaagatttgtaatttcacttcaccatgcttttaagtcccaccgtgaggcgggacagttccaaaatttgtaccacattttactgtggaaagtccaagtaccttaattggacaattacttgtcaacgaacacagtcgcctttggcctcttatggaacagaaaagggtggatatcagatggggtgcgtcccttcctaaaaatttctcttttcgtctaaccatcccccctttttgtgcactatttcattttcaaaattgggaacattttttgtttgtttttttgaaactaaaatgtaaaaaatttaataattatttttgatttaaataatgcttctgtttcgaatcttttcgctttaagtaattaaattgtaaaaatcaaaactaaaaattttcctctgaagttttgaacttggctttaccctgcttttaagtcccgccgtgaggcaggacagttccaaaatttgtacaacacattttactgtggaaagtccaagtaccttaaggactacagaagagccaatgccgcagtcacctttggacagttattaaaaagaaataaggaaatattcgatggggtgcgatcagggctggccgtgatcacggatcacggctcacggatcacggaaatcacggggtttttggggtgccgtgatctcggatcacgggtcacggattttttcaaattttccgtgattttaatccgtgattggcatctaatcaaaattttcagaaaattttcccaaccctctaagaattttttctaaaattttcccgactttcagtatcttttggggtgttcagatcgtcatgaaggactgagcatgttggtccaaaagattttttccgcatcaaaagttagcttacaaattagaggaaatttctctacataaatagatttttggttaaatttaagaaaaatttgaaaaatttggaaaaggtcgccgcaaaaaaagcggtttatatgttttggtttctttaaaacattttttgggaatttttcccgcgattaaattccgttttttaaataaatttaaataaaaaatcattagaaaaattttttttataatcacggatcacggctcacggatcacggaaatcacggggattttggggtgccgtgatcacggttcacgggtcacggatttttttaaaagccccgtgatcacggctcacggatttccgtgattggaaattcaatcacggccagccctgggtgcgatcctttcaaaaaattactctcgtcgtctaccctccctcgctttttgtgcactgtttcgtttctaaaattggttccgaattttttggcattttgaaattaattgcaaaaattcgaaacaaaatactctgaagatttgtaatttcacttcaacatgcttttaagtcccaccgtgaggcgggacagttccaaaatttgtaccacattttactgtgcaaagtccaagtaccttaattggacaattacttgtcaacgaacacagtcgcctttggcctcttatggaacagaaaagggtggatatcagatggggtgcgtcccttcctaaaaatttctcttttcgtctaaccatcccccctttttgtgcactatttcattttcaaaattgggaacattttttgtttgtttttttgaaactaaaatgtaaaaaatttaataattatttttgatttaaataatgcttctgtttcgaatcttttcgctttaagtaattaaattgtaaaaatcaaaactaaaaattttcctctgaagttttgaacttggctttaccctgcttttaagtcccgccgtgaggcaggacagttccaaaatttgtacaacacattttactgtggaaagtccacgtaccttaaggactacagaagagccaatgccgcagtcacctttggacaggtattaaaaagaa

SEQ ID NO: 6794 - DNA, 1998 bp, Heterodera glycines
tccaaaaattgtaccacattttactgtggaagtccaagtacgttaatggacaaattaattgtcaacgaacacagtcgcctttggcctcttatggagcagaaaaggggaaatatcagatggggtgcgatcctttcaaaaaattactcttttcgtctaaccatccctccctttttgtgcactatttcgttttaaaaattgggaacatttttttgtttgtttttttgaaactaaaatgtaaagaatttaataaaattatttttgatttaaataatgcttctgtttcgaatcttttgactctaagaaattaaactataaaatttagaacaattaattctctgaagtttttaacttggctttaccatgtttttaagtcccaccgtgaggcgggacagttccaaaatttgtaccacattttactgtggaaagtccaagtaccttaattggacaattaattgtcaacgaacacagtcgcctttggcctcttatggagcagaaaaggggaaatatcagatggggtgcgatcctttcaaaaaattactcttttcgtctaaccatccctccctttttgtgcactatttcgttttaaaaattgggaacatttttttgtttgtttttttgaaactaaaatgtaaaaatttaataaaattatttttgatttaagtaatgcttctgtttcgaatcttttgactctaagaaattaaactataaaatttagaacaattaattctctgaagtttttaacttggctttaccatgtttttaagtcccaccgtgaggcgggacagttccaaaatttgtaccacattttactgtggaaagtccaagtaccttaattggacaattaattgtcaacgaacacagtcgcctttggcctcttatggagcagaaaaggggaaatatcagatggggtgcgatcctttcaaaaaattactcttttcgtctaaccatccctccctttttgtgcactatttcgttttaaaaattgggaacatttttttgtttgtttttttgaaactaaaatgtaaaaaatttaataattatttttgatttaaataatgcttctgtttcgaatcttttggctttaagtaattaaattgtaaaaattcaaaactaaaaattttcctctgaagttttgaacttggctttaccctgcttttaagtcccgccgtgaggcaggacagttccaaaatttgtacaacacattttactgtggaaagtccaagtaccttaaggactacagaagagccaatgacgcagtcacctttggacagttattaaaaagaaataaggaaatattcgatggggtgcgatcctttcaaaaaattactctcgtcgtctaccctccctcgctttttgtgcactgtttcgtttctaaaattggttccgaattttttggcattttgaaattaattgcaaaaattcgaaacaaaatactctgaagatttgtaatttcacttcaccatgcttttaagtcccaccgtgaggcgggacagttccaaaatttgtaccacattttactgtggaaagtccaagtaccttaaggactacagaagagccaatgacgcagtcacctttggacagttattaaaaagaaataaggaaatattcgatggggtgcgatcctttcaaaaaattactctcgtcgtctaccctccctcgctttttgtgcactgtttcgtttctaaaattggttccgaattttttggcattttgaaattaattgcaaaaattcgaaacaaaatactctgaagatttgtaatttcacttcaccatgcttttaagtcccaccgtgaggcgggacagttccaaaatttgtaccacattttactgtggaaagtccaagtaccttaattggacaattacttgtcaacgaacacagtcgcctttggcctcttatggaacagaaaagggtggatatcagatggggtgcgtcccttcctaaaaattctcttttcgtctaaccatcccccctttttgtgcactatttcattttcaaaa

SEQ ID NO: 6795 - DNA, 2564 bp, Heterodera glycines
gtcagaaatgttgccttaaaccatctaccgtattttctctaattatatgcctgtctccaataatctacccctttcgaagtaggttgaaaaataaactacccgtctctatttatctgcccggggggataaatggaatttttattttttcaaaaaaataacttcttttctaattttataaaaattaattaattctaaattgaaattcgtttaaatatgtaataaacatgaaaaaataatatagaaaaatcatttactaaacccggaaccggacctaacgctctccccccccaccccatgccctttttcagtcgttttcatatacgaaatttttttttttaagttttcgtgcagccctctgctggtgggggttaggaaaaattttctagaaaatatgaatcggcttatcagaaagaggcataaaaattcgtataaattggatgggaaaataattttttgaggggttttttttttaatattttggttagggtcgaaaaagtcgggtcgcaattgtcttggattttctgaatgattttttttgccccttcattccttcggctccaattccgaataattttgatcgaaaaatgcatttatttaaatccggcaaaaatatttacaaaaattgctataaaaaaaatgccgaaatatttacgtaaatacacataaagttggaggaaaaatatttaatccaaatagtaataattagtgctcaaaataatatcaatttaatctcagatcagcgattaacaacaatgttgtcgtacgctgatcggccgttgtgccgccgactccaatggcacaccgcgcacacaatgagcagccaaatgagcagggcgatggcgaacacaaatgcccacagggcgtaccatgcacgcctaacaaatttgaaaaaaacgataatgataacctagaaaattgacaattttttcaacaacaaaaaaaatggaaagcttttctgtgtcagaaaaaaaaattatcgcaattttttgaaaatctttgaattttgtaaacaaaaaatttttgaatttattattataatattaagtgcatgcaaagatcgtcaatatatttttttaaaagtatggcattcccgccagcagtgccgtgccgattaccccagggatttgttagaattacatacaattttaatgtttaatattcatcatatttaaaatatttattaattttatttaaaaaatgaaaaaaaaaatttataatttgccatttccaaattatcgccagaaaattgcatgcaagcaaaactcacttgtatgctcttagctgcacacgctcttcatatgttcttgagggggtaattaatttattgaaaattgtgtacagaagcaaattaaatgtgattggaaaactagagcccggcacgggattttgcacgatcccaatccgaaatcgggattaaccccactggattagggttcgaagttgtatgcactaaaaatacaaaacatgcgcataaaacatgcaactaaaaatcccccaaatatgccctaaaaaccctgaaaatgcccaaatatgcaaaatatgccttaaaactgccaaagatggcttttaactctgaaaaaaatgccaacaattgtgtatgtataaattaagaattgactttgaaaacaaaaaaaacaagggctaaggagcattttttagacaattgcaaaaatattgaatttccaaattttaaaatttttattatatgctaaaacaaaggtacatttttatataaataaatttttttccaaaagttcttacaaaagttaaaaatttttcgatttttaagggtgtattttttttatttcgcaaaaaaaaagtcgatccttagggggtgtattttcgctttttcgcatttttcttatgaaatttgccaaaaatgaccaaaatatgctctaaaagcccaaaaatggccaaatatgcatttcgaaaacccccaaaatatgctttatatgcaccaaaaaccttcaccaaatcaaaaaattttaacatagaaatgctatttttgagcccctttcttcatagcatatgcacagaaaaaatatgttaatccatacaatgtatagccctactcatcagtcattagttttaaggacatttgttgttgtcatcctttgcttcttcttctgtcccatcattgtttttgttgatactacatattgccaaattgttgttgtcatcagtttatgctgctgtccccccacccttttccagcaattttccctgtcggttcgtttgtccttgacatgggccaattgtgcgcgccgttcggcgaaagtcgccgcatccccgcggggcatgtttttttagtcatttatttacttataattttacaatttgttttgttatgtatttgggagcaaaacaacaacatcatcatcatcatcatcatcatgtacaaacatatttgcaaaaagccgaatgtgatgagcacttctgcataatcattttggtttttttttgttgcgacatttcctccaaaatctcatttattataaggcaatttaaagtgatctatctatgtatgatcatgatatctgcttcatactttacatatacaaagt

SEQ ID NO: 6796 - DNA, 2774 bp, Heterodera glycines
  unsure (1)..(2774): unsure at all n locations
atgctctaaaagaacncaaaaatggcaaaatatgcatttattctcgaaaacccccaaaatatgcttttatatgcactaaaaaccttcaccaaatcaaaaaaattttaacgtagaaatgctctatttttgagcccctttcttcattgcatatgcgcagaaaaaatatgcaaagtcacacaatttcgaaccctacgtataacaacaaatgataaaatttcaacaatttttctgcgaatttacccctggaaggcttaaaattttggaaaaatttcgaggcagggactatctcatagccaattaattaattggttaattaatgtcgctaatatcacacaacaaccgctgcttacaattcgttgaccgcctgctcgttggcacgtccgcttgggtcagccatctgatacttggacagcattcgcacctcgtcattccaaaaggtcggcgtcgggaaatggatcggtccccggttcattctgtaatttgctggctataatacagtaaccgtacaaaaaaaggggatatggtaaaaaaaaagagcaaaactatgaaacaaaacagctctttttaaaagtatttttaaaaacccgatttttaggggcaatttcttaatgttttttttgaaaaatttttttaaggatcaacatccagaccattctgtaatttgctatatcgtaactgtacaaaaaacgagagatacaaattatggaacaaaaattatttgagaaccttgaaaaatatgtaaagtacaacaatttcttatatatttaaaaaaattcgcttatttaggtttttttttttaaatttttttataataaatttttatctttctcaaaaaactcaaaatatttagcagaaccgcaaatatgtgccaaaaaaaactgcgaatatttagagcatggaaaatataggggaaaacatattaaatcccttccctaatgataaatgatcggggtttttttttggaggtggtctcggattttgttgttcacaatttttggcacaacacacactttggcggcatgttcagtgaagcgtgttgcattgtgccgttgccgcatggtggccaactgaaattcctcgtcgacggatctccggtggccacaaaatttgtgatcatccgagtcaaactgaagacagattttgatgattaggtcagtgttgatctgaactatcacaaaaaatatgtccatcaattgatcagtggaatatattggcattgaaatattactcaaaaaacctaaaaggatggacaaactttcaaattcattaaattggctaaaaccaaaaaaaaaggcaaaaatattcacaaattttgaaatagaaaataaaaattaattaattaattatatttcattcattagaaagaaatacaacttgaaaaaatgttttccaatttcgtaaattttagaaaaacaaaaaatttgattaatggtgagggtttttgtaattaaacccaaattaaaatttcaaatcttagaatttttttaaaagaaagtttcaaaaaaaaaaaagttttttgcttaaattgtgacattaatatgcttatttaatgcaattctacgtgtcctttgttgttatttttttaattcaaaagtaggcccaaaaatcgaaaggttccataaaattttgaaaaaaaatcgcagaaaaaatctaaaaaaaatttttcttgaaattttcttataaaaatgttctaaaatttttactgctgattgttaatatttttttaccctgatcaatcgattgccaatattattaatatgattgatttgaattggacgctttcttactgtaagtagacaaataatatatagtacacttacagtcgcgacattgccttgtcccgtcgtgtgtacggctcgagatggaagttggaggagtagccttcggtgaagatgaacgcatggtccaatccgtggaacgcgtcctgttcatggccttgaggtggatggtaaaaaacgaaaattcgtcatttccccttttttcgttaaaaacccaacccggttacggtaagtaaactctgctgtaaccggtaaactgttcgatttgccactaattatagttgaattgcttacaaaagcatttttgtggccggctcaccttttcgcttccggtcccggcgccgcacgcccactggacgctcgccaaacattgggtagaagcgccggtcctcttccaccacgtcgccccgtggcacaaagtcgaaggagtacacaaaggctggcacgccgctggccacatacgcgtccacctgaaagcgcgttcgctgttgttgagcgacgggaatgaactctgtttggcaaattggccaagtctcgagagcaaaatccgaaaatgccattttatcgagcagttcgtttggtatcgatttacggtttttcaagcacctctgcttggcacggtgccacaaattccacgtcactttccaggtcctgtagacgtgccaccacccccggcatatcgtaggcaaagtcgacgtcttgctaagccaaaaattgtttttgagttttaaagacctaggctaaatttaagcacagaccaactatattaaatttaagcataggccaatctttaggcataagtttgtgaaaaatttgtagagaaatcgtagagagttggagcatttttcgaaaatttctgagtcgtcggaaatccgaaaaaaatgttttgagccatctgaattccaaaaaaatttaaatccgaaaaaaaaaatttttttttagcgctcgtaataccggaaaattnttaagtctcagaataccgcataaatttttggc

SEQ ID NO: 6797 - DNA, 1437 bp, Heterodera glycines
taaaataagaaatcattcataaaaggatattttttttgtgagattctttggagctaattcaatatacaaacttccgcttaccgcggggtcggaattatcgtgtctccggcaccgcccgcgcgactctgacccccgccaacccccgcccccgcgaaaagccaccctcgccccacggggctcgaaccctattctaaaataccgtttttcttgtgtctaagttcttttgggtgaattttacaaattttttcaaatgtgataaaattatgcgtttgcaatatacataattttaatatgcaattatacataattaaacagaactcagtgaaaaccaattcgctcctccggcggtggattatgtggtgataatactgcggacatcctgaccatacagggaatgcaaaggattatccagtaattaaataataggtaagaactgtctttgtccccggagggatgactgttgttttgggtccatctttccttcattttggcccctgttgcttttgcgcccacagctttttcagctcccatagctattttcgatcagccattacagatactgtatgtacaaactgctgaactgtatttaaatactacttggaagctttttaaaccatttttagcaataaaaatttatttattttttaaatgataaaagctcgaaaattttgaaattctgtaaatcgtttactatttattgtatgtataacaacgaaataggttcaataccatttataattcttttaatgaacaagaaaaggacccaattaaagaattggggaaaaattggcaattttttgcttttaaaagaaattcaaattcataggaacaaggggtgtgtgcgaaagttcttgtcattttcgttttgttcccctgtttcgccatttttttgagtttcgttttagttttcggtaaaattttaattttgtttcgtttttcgttcgctaattatcccccatgggcaattattttccgaccttatcagaaatgggaggataattggagacgggggggaacaaaaatggttccaatttgtgaaaacgtgcctaattcggcggccaacgcgcgccagaacatcggcgactcggacacgttgacatgcagccggaagcaggccaacatttccgccgtgttcaacgactggcccgcactgttcgacaaacactccgggatacgctcctgcaggttgcaatgcttgtgccaccttcagcaacaaacaacaagaaaaattattgactaatgatcagtacagtagttagtcacaggctctgtactatactgtaaaatagagcccggaattttgaaaataccggaccgggcccgggaccgggcttcgaaaattgaccggggcgggccgcccgttcaaaaaaagcccgttttaccgggcccggtccaaaattttgaccgggcgcccgtacgggaccgagttgttttcaa

SEQ ID NO: 6798 - DNA, 1968 bp, Heterodera glycines
tatttgcacaattttcatctaaaatttctttaggggtcacacgatggatgatctgcagaaatcttcaaaagcgtgtcgagaagtcttaaattaaatttttttttttcattttttgtcagaaacgtccaaccgttcagaaatagtctcccatttttggctctcgttgagttcctccaatttaaccaaaagcgatcggagcagaataacacagtccatcagagctttgttggtcgattgtaagtcgtaagcgatacggtaaacattacagaatgacatccaacaataacttaaatgatcgatgagttgcaaaccatgaaaaagaccaaccaatccacaatttgttcgtagatgagtaaatggtcctgaccaaattcaccagggagtcgcaaaatttcaaacgaattcgagtctcgggagagaacgtgtacttcttcgtcgtaaataaaaaattcacctcggagattcgaaagagaacgacaaacggtcgccgattacgaacaaattcgtttaaaaaaaagaaagaaaaaagcccactcatttttaccttcgttaacgcttaaacgacggacgagcaaaattccgccagaaaaaacgtccacgaaagtgtcagtgccagtcgaaagataaaacacaaagaaaaagaaagaagagagcgaatttggcaaaataacggcggtaaaagtgttcaatcgcacaacaaacattttcgaaggctcacaatacagtagaaagcattttcgaagtgggagttaggaattcgacaagcctaaaaccaacaggaaaagtttaaacacctttcgaaaacagaaaatgcataatttagttccctataagaattcgctttttgctggtcaaaaaaagcaattccgtttttcaaaataaattggcaaaaaaagcatggaaaaggttccaatggttttgccatttaaccgctgtcaacgacgactggttcgccaataacgcggaaaatttgagtggaatggctttggtcgaaattttagccattcaacgcaaaaaggcgaatatgacaattttttaacgaaaagagtgttgccagtttgagtgtccaaataatagagtaagccactttggaaaacagtgagaagcacttggccatcgggggaccaacacagaaacaacaactgatccttcgacttggaggacgacggaacggacgaaacatcgccaagaaaatcaaagtgtttggcagaatcatcacgagaaaaatttctctaaaattaaaaagggaaaagtttaaactaatcgaattcaaaagcagcaccttccacccggtcttccacaagtaacgcttaaccaccacttctccgtcaagtgacccaagcgcaataagactgattttcgggttccaaactgcgtgagaaacctaaaaaataacagaggcaatgaaatttattagacattcactgatgaaacgaacctcaaatttagtcctaaatttgattttgtcaaaaatgtccttgttttccgcaaccgttattaattcctttttcatattccaattgttgaaatttagaaaaatgattacttttttataaaaagttttcttgaagaagacatatgttcacatttatttcatggaaaattgcaaattcaaaatccgaggaaatctttccttgtaataaaaagaaagtaaactaaataagcaatcttttcagcaaaaacaaatataaaaattttgaaattggaataaatacgatacgataaaaataaaatgataaataaacagaacaaaccaaaatcttctaactaaatattttagtagtataaatcttaaggtaataatactttaaatggtgggcattacaccatttttaaaattcaaaggatttgaatttacgatctttttgttcgattccgggtatagtataggatgaaattgatgccggattcgtattctccgaccctgaaaacagtttttttcaaaaagagcccgacatctaaagcata

SEQ ID NO: 6799 - DNA, 4730 bp, Heterodera glycines
gcaaaatccgcttttaatggctttaataagcgacttacaattagggcggtacgtttctttcccgaaaaatgacagcttcggaccaattaatcacttccgaaaatggcaacacccattcatcggaaagaatcaccggaatacaaacagaacgaagtgcctcgaggaaactgaatggatggacgagtttggattttctgtcattcaattgggacagtcatttgtttgtaggacaaagcaaaagcacaaaccgaaaagagccgagccgacgaccccgtggaatcaaacagaaggtggaattcgccatcaactgctcatagtcccaccttcaatttggcgttggaattcgatttcctttccccgttccgtccttttcacctgccataattcgcattgtcaacttcacaacgttcgtcctcgaacttcttccagtccgtgttgtgcttgcaagtggtggcaataacaatggatcggttatcgttcaaatggtgcaaaatgttgcgcgtcttcgacccaactccgtacacatatcgttttcctttaaaactggccaagtatttgtcatggttgggaaaatgcggttggaaatgctaaaaatgaaagaatttatggcgaaaggaaaagcaatggcaaattacaaagaaacaaaaataaataaagaaaattacccatggtttgtcgtccttaaacgggtgctcattgttaaataatgggaacgaaaggtcgaaatttggtcgaaaattctaaattttcaaaattattcgtataatcctgttataaaccaacaataattacatccataaacccatttatcaattggacctgcaaattcgaactcgcccacgcgaccattgccttgccaaagtcgaagcccaagtcggtgttagcgtagtcggggaaagtgccaaagtataaattaaacaccaaatgattccgtccgtcgtcccataactccgttttggtgtgctccgtcccaatttgctggtaatactcacttaaaatggcttttcgcgttgtcattcgccgtttgcttgccttattcggtctctgtccgttgtatccgcactcaacacaaataaacacgcctcctccgccctctccgtgtaaaaatgactttctttgatcactttcaacatttttgtgaacaacggactccgtctcaccggcgatccatcactgtacacgtaaattttcatcgattttggcgctaaacatttgctgaaattgaaacaatttgacattgaacagctctcaatgccatctttcgatgattttctaaatttgtataattgggattaaatgcaatgactatgtattattgaagatcacttcaaatccaataaagttgtttcactgttccatagcgaatgaggacgaaagtgcgggcgatttggagaaacaatattagcagaaaagacaaaaagcaaaaaatggaacaaaagggacactttccgatgcattcatttgtccttgatgttgaataaataaaaaggaaaaataaataattaaacacttaagaaaaataaataaataattaggtaatttgtaagtgagagtttaaaatgaacacaaatgccagcagggaattttactcgttcagtggacttggtgaaacggcacccccacaaagtgtccaagccacgaaatgtccaaaagagtaaaaacccacgaaatgtccaaaatttttcaaaatttataaaaacaaaatgagtctaatttaggatttttagggttttcggggtcgctgaatacgaatataccctttatattaccccttgcctaaccttaggcccatctgaataataaaaaactcaaattcgagacttggacatttcgtgggctggacattttgtgggtcagcgggtgaaacaacataaggggaacattttgacttgttaaaattttttgatctcaattacattttagggtcgcagggaacaaaaagaattttttttaattggtcaaaaagagaagcatcggtccactaacaaataagtgagaaaaatgccgccagcttctgctgaagggtccttaacacagcggcccaattttgggctctcagtgcaaataggtttattatttatttagtaatcagaacgccaaaactttgcaaaacttaaaatttttttgggattttcccttgtaaaaatagaagagccgatctcgagttaaaaactagacagctaaaaaataaactgtgattcgatagagggggacaaaatatgggcctatacaaaatttcaaaaaaagttacccacaggaaaaaattttttcccatggcaaacatttcaatactttaattcttttttagccaagtgcgcaatttaaggccaaatcaaataaaactaacaatattcatcgatgctgtacgtaactaactctttttgaaaataatttttttttgacacgaaaacttttattaataaaaaatatttctgccttcttcttaaaagaagaaattaaaattaacacacaacatagggaggacttgaacctgggaccccccttttggtgactaactcacagaccactaagacgaaaaatccaacttaattgtacttggagcccaaaattgggccgctgtgttaataaatttcaatgggaaattaatattgaatagatattcaaaaaatcaaattagaattcattaaaaacaattagtttacagcataaaatcttttttatttaattatttccagaattataattatgaaaattcaatcaatgatcgaaaatattaagctgataaaaatgtagaggattgggaagagatgagagtggatgagtttgttcggcgatgtccgccgttttgtcgccgtgccatcgaataaagcgcatccttccgccagcggatctgaatgtgtgtttaaatcgctttttcttcaatttgccgtttcaccgtcgttccgtccgctgcgttttgcctttgcccccctcctccgctcggattccccgctttgttctcttcggttgcccttagcactgccaaagtgcttcccccgctgctttgacgtcgtcgttgatttgcgtctcccctaaaggaacaaataattggttaattatgggccatcaaagagcagttcatctattcaccgtgtccaacgccaatcggacagcaaaagacggcacggcaattggtcagtgatcactgagtggtgggtgatcagcatgggaagcgattggaagtaacgcttggaaccctgaggaatgaatgatcaaattgccaagggaaaagtggcacaaaggaagcaaacaatgactgctcactttgatgcgaaacccatgctcattgcgaagcaccaaatagtgggcaatccctttctgattcttctcatccctttccactcggatactcagtgccaaaaatctgcaaaaggaaatttcgataattcactttttaaatggcaatgatcgaatgccgttgaccttcgcctcgtgccggacagtcgcagcgcgaaatggccaacgggcatttcccgcaaatggttcatcacagagtctctgaattttgctctttttccaccctaaaccatttccgaatgcccacttttcttgcgatcgacaaaaataggccaatttctccaattcttcaatcattgggccgacgtccatcggataaatccattctttgcttaaattacagtaattccaaaactttgacttgtttttcttatggtattatgtgcccacattctgtcgtcgtacagtagttcttctccctcattttttgtggcgtttggcggtgaaatttcgcagcattcgttttgcttctattaatttggatttaataaagtttcagttcattaactcataatttaatattgtgccttactttttgatcttccgctgacttttccaatgttcgaattggtgaagaaagatgccatcggaagttttgggggatttggttggaagagcgttttgtcagtgccgttgcggagacagccgaagaacgcaaattggagaggggccaacgcggttttcgaaagcgaaagcctaagaaaatgaacgatgacggaagaggacaacagacaaatcaacggcaaatgcaattttcggcaataaaggcaaaacccaataattacagtttttgtccaataatgccccattaatcagtcactcccaaatggcgcttttcctcgtaaatcactctctttctgatcatcgcatctccgccggtcgttccctcccgtggtgagtcgttccacaaaaaagctcagtgtgggcgttccacaaaaaactcagtggttgattggtcattttccaaaagcctatcgcaccactttcggggcaccaaaagtgcctgatccggaatccggaccggcccggttaagaacaattttttgttcagttttttcaaggactatctccctggccgggtccggttcttgatccattcactcggagcccgtcatgggtcgggcacatctgccggaggaccctcagcctcgcccccgaccctgtcggtggccaacccaagctaagcttgccggtaccagcggcttttttgtacagctcgatgagctctacaaaatggtatcaatggcgtcaggctatgtctactacaaatggagaaaattggtgagaagtgatgtcaaaaattgaaaaattaaaaaatttgaaaatgacttgcgttccgccgtagattactattaaccggacggcaccgagttttgtgaattgaataattaaatttatttatttaattttatcgagcactgagattttttgtg

SEQ ID NO: 6800 - DNA, 1603 bp, Heterodera glycines
  unsure (1)..(1603): unsure at all n locations
gtcatcatttctttgctggactgcatgacgttcncgcatcagcaaattgcttctttggcgttgaggaaccgccgcnngaaaattcgttgaaatagcgacgaagacgaaaagcgcattgggcagagancggcgaagagaacggcgacggagtgccctttggaaatgaccaaatccaagcaattaaacaaaagaatgtgttgtatttcttntaagccgtaacatgctatattttctctcattgtattcaccgatcgttaattaattaaccaattaattaattaattacccgcttagtcggagtgttcagcaggtgctctcccgctgctgctgtccctccatccgacccgaaattggcttttccccggcaaattgccatggcattgtccgggggatgccatgccattagcatcgtcgtggtcccgtcatcatttttcccgttctccatgtgacagttggccatttcgtccgcctcccccgcggcttcttcccactgtttttgctgtcggaatgcgtccgcaagtgccgtttggatgtgctgtgcattgagcggtgtgctgacgcggaacacgtggcacaacttgcggcccggcacatggtgcccgtggtgcgagtgctgctcgcgagtgatgtacgccaactgcgcggtgcggacgcggcacacggcgcagcaaaccttgcgcagagaatggctgagcagcggcggaggcgcctgcaaatgcgaaaaacactttcccagcgaaatttgcatttaattttgtcaaaatgctctttttgcccaaaggatggccatcatcattcccatgacctatcatttaccattttaataacatttctttcccgggaagtgccgagaataattaaatatgcaaaatgccaacagagaatgacgaatgtgatggatgatgacgaagaaaattgttcgggaatttattccttcgagggtcagccattgaaaaagcaatggaaaggaaaaaagggtcaattttattttcaaaatgttcatcattcaaacaataatttttttcattttaaacttttctcttttttggtcactcaattcatcatttaacgcaccgaaaaccagcggaagaagcggacaaaatcattcattctgatccggcggatgcgaaagaatgtcagcaggtgggagaaagagagtcaattaaatgggggacggaaggggggggggagtcgcaacaggacaaaaggcaaatggtggaggaatggacgacgcatctgttggggctgacattctttgcccttttaatgctgcgcaatttgaaattgagggacatcggcggagaaatacggacggaaggaaagattaattgaggcaggggggatgagagggcgaaaggcgggggataaaatagcccgggatatattttgaattgttatcaagtgccacttcctctcccccccccttgaaacttcggtgttttgcttccgtttttggcacggttcccctttgctttttccctttgcttttccttcgcttttccttttgcttgttccctttgcttttccttcgcttttccttttgctttttcactgtgcttttccttcgcttttccttttgctttttccctttggactcnntaga

SEQ ID NO: 6801 - DNA, 1166 bp, Heterodera glycines
tcagtcgtggccacgggagccaacgccgaaccggtccgaccgagaacgactcccaccacaaccgcactgctcgtgtgcgacgagggcgaaaacattcccgaggcgttatgcgccgccgcctttgaccctctccccgtcgacagcggaaatttcccccctcccaaatctgccagagttgcccacctgatgacccagacccttaaagcgtcgtgccaagggggcccacccgacggaattcctgcttttgtcttccacgaccctggcagtcagtccggctacataagccgggcaatgacagagaagctccgaccccctcggctctcagagcacctcctccgaattcacactttcggagactcccgccccaagaccgtccgatcagcaaaattcgccattcaactgcagcgcctggacggaggctgggagaccctcgagctcaacgtaatcgacgagatcacgaccaaaatcaaggccctccaatgggacaccaccgatggacccctccccccaaatgccgtcctcaaggtcgtcgaaaaagcgccggacattctgattggcatccgagaattttgggaattcttcaccggctgttcaatgctccattccgggctccacctcatccagacggttttcggtccgatggtggggggagaagctgagtttcccgaggccccacgacacatcccgacaattgccatgctgacctcccaccccagtaacgtcgagtcattcccctcatcccgcgccgtcaatgacttttggagtcttgaggcgattggcatcacggacgacccgagtcagaacgacgaccatatcgccatgcagcaattcagcaacaccgtccgccaactaccgtctggccggtactctgttcgcctcacttggcgggaacctcgtcctccactcccctcaaactgggccatcgcttatcgccgccttctttcaacaaccaagcggctgcaatgctcccctgagctcctcgaccgctattctgccgaattgacacggcaagtggacgccgatatcatcgagctgaccgggcgagacgacgacgagcatttcctaccgcatcatgctgtcatcaatcccaaaaaattgcgcatcgtcatcgatgccagcgcccacgcccaaggcactccaagtctcaacgattgcctccaccgcgg

SEQ ID NO: 6802 - DNA, 4396 bp, Heterodera glycines
aatttttaagaaaaataaaggatttatagtgcctgccagtccgaataagcaccgtgggggaattttttttctttgaaaaaggggagtttaggtaacattagtatcaggggggaatccgctaaatgagcgtaaattttcagatatggaaatggcgcgctcataatccgccgtttttttcggatcgccttatgttataaattacatataatttttatttcaagcccgcattcatatcactcatcaatgggtgtatgtgtttaagcaattgcttataaaatcccgaaataatccgaaggccaataaacgagatcaaatggaaaaaatcttttctgttctcagttttactgatacaacgcccaaatacaatggaatatgtaagtgtgtcgttaggagaatgaaggtgctgatccaaatcggacaagattctctaaccgacctaataaggaatccttggtcggtaaacgatcggcatcaagaccagtcaagtcggacgtccaggacgccttacatgccattgaagtcgagccggaggaccggctcttctgcaaaatcctgtggttaaaaaaccctgctcacccgtctcaggcgacaatctgttggtctatcgctacaagcggctcgttttcggcgcgacatgctcccccttcatcctcgccgccgttcttctccaccacttcgataggcacgaccacccattcgccaaggaattggccgcgaatatgtacgtagacaacctcctcatcgagtgcgagacggaagaggaggccatcgacaagtcgtccaacgccaaacaaatcctcaaagacgccgacatgaacctccgggagttcctcagccactccccaaacgtcatgggacgactccccgaggacgaccgactcgacaaaacgccggccaaagttctgggactgacctgggacaccccccgcgactgcatcacctttagtctcccaaaggacacagacatcactgctacacggcgttcagtattgagcatcatcgccagcacgttcgaccctcttggactagtcgggccatgtcttctgcccgccaaacggctcttccaacgcctgtggggagaaggaaccgcctgggacacacccctccccgagaccgaggcggaaacttggattcaaaccctgtccctatggcaaaaccaaacgattgtggtcccgcggcattccattctcggcaagcaaagccgcctgcaactccacgtgttttgcgacgcttccgaacacacctttgccgctgccgtctacatccgaagcgagactgctgacaactcccaagcgaacctgattttcgccaaaaaccgcctccggccacgaacagcaaaccagcgcttcaccatccctcggctcgaactcctcgcaatcctcgtcggcatccgcgccatgcgtttcgccgagaaagagctccgccgtccgatcgaagagcgacatttatggtccgactcccaaattgccctctcatgggtgaagtccgaggagcccaaagctcaattcgaacagcgacgactcgtcgagattcggcaaggaccaaccaccaccttccatttcgtcagaaccgaccaaaatcccgctgacatagcgacgagaggctgtactccggccgagctctgcactcgtcaaatgtggtggaaagggccggagtggctcacgaacctggaaaccgaatggccggacgagctaacgttcgcaacaccagccagccatccctctcccgattttccgtgtgaagactcggaacccaagactctcttggtcaagcaaagccaggtgccccctcccctcgttgacccagcacgcttcagcacaatgctcaccctcctcggaacgaccattctcatcctccaattcatcgggcgctgtcgtccaaaatggctcacgattggcgcctccaccatcccaaagagcggccccccgactggagatgccttccgagccgctcggaccttcctcatccgacaagaccaacaccgcttactcaacggctacgataagcaccctaccgttgtcaacgaggacggcctgttgtgcctcaaaacccgactcatatacgcaaccggcccgcccactctcgcctcgccagtcctcctcgatcggcattcccccctgacccggctaatagtgcaggaagtgcatgccgatctcaagcacgccggcgtcgattggaccctcaccgagtttttgggccgttactggatgccacaagcccggcgaaccattcgcggaatcctccaaggctgcccgtcctgtaggagaatcacggcacccccctttgcgaggccaaccatgccccccctgccccccatgcgcgtcaaaccggctaatccttttgagttcgtcggtctcgactttgccgggcccacctcctctcgactaagcgacggatcgctcaccaagacctacttggtcatcatcacctgtttcgttacccgagcagtgtatctagaggccaccaccgatctgtcagccccaagcttcatcaatgttttacgacgattcatcagccgtcgcggccgaccaaagcgaattctgagtgacaacgccccgacattcgtccaaacgagcaaggccctcgacatcctgaccggcccttcggccaaaaccgaccccgtcacatttgccgcgcgccgaggcatccagtgggacttcattcccgcctacagtccatggatgggagcttgctatgagcgcctgatcggcctcgtcaaatcgtgtatcaaaagaacaatcggccggcggattcttgactacgacgatctgagtgccttccttgccgaaattgaagctagcgtcaacagccgcccgatcacatgggtatcagatcaaccggattcatcgaaagcccttactccgaaagacctcgtccaacccggcctcctcaacgacctggacatcgccgactctgatcttgactacgacgggggcatctccggtcccgagcgtctcgctgcactgtggaaggcttaccgggaagccgccgatcacttttggctcaaatggagtcacgagtacctcatcgccatcagagaacgcgccggatggacccacaaaggcccccgcctacgggcccccaccgcaccccgcgtaggccaagtagtcattatcgaagaggacttccgccctcggaacttatggcccatgggggtcgtcgccgccctaaatggttcccctccgaatgtgcgaagcgttcaacttcgactgccgaacggacaaaccatcactcgaccaatcagccgtctttgccccttagagacagaaaatgaggctccggaaccagccctggacgcgaccaaatcgacccccaccaatcaaagaagcagagacttcaaaaccgccgaagtgtcggtacccgaaatgccgactgttccggcaccttccggagaaccgatggtccatccccaccatcacggcatgcttacgcggcgaaaagcgcggctcctcggaattgctcccaacaccacaatggccttcgccttcctcgtcaccttcctctgggcccaagtttccccgacccaaggcctctggccattcccggaccaccctaagccgtcccccggatctgattgtgtcgggaatcacctcaactgcaccctaagaggggtcaaaatctcgtcgaactccgccgtccagaaggtgaccatctgctgcttcgactcatgcttcgaccgattggcggccgctacgattgattatgagctgtcctctgaccttcttgtcaatgaatatagttgctccaccacctacagtctctcgtcaactcgcaactgtatcgacgagatcacttgcccggccctagatgagtgtgaactcatcgattgtgcactttgcgtcgaacaactcgtcaattggcggtgtaacccccggctcgccctcgctctgtttctgctcaccggatcgttgataagctgtctgatcggctgggtcgtctgcttctgctcctcggttcggctcgggatcaaactcggctatcggatcatcgcactactcctctcgtggccgctacgggtagcattcttcatcgccggccatccgtggacgcgagaagatcgagaacgcgtggcggaacggctcgagactggagtccaaagggttcggcgacagacccgacagagaattcagaacgcacgtcaacacggcaagcgggctcagcgagctgccattcgcctcatcggcatccttctcgccactcctgccctcctttgtaacacggagaccatctcagtcatcactcagactgagtcgtgcctcaagggaccctccgggctcacctgccgaatcaacaccgccaccaccctgactttgcttccggccgggcaaacgagtgcgctactcctccgaaactccagggaaacaccctcgggaccgtcaaactacgcctacagtca

SEQ ID NO: 6803 - DNA, 1749 bp, Heterodera glycines
  unsure (1)..(1749): unsure at all n locations
gatcccgagtcgtatggccttggtttcgctttcggcctcgacatgctgtcccccctcccgtttttttggccctggtcccatcatcctgctcggcataaccgttgtgacaatcggcctttttctcctatttttattcgtcaaatattcgccaatcttcgccacgtatcgcctaattttacgaattntcgtcgggtgtgtgttgattcgccccgcaatttcttcatcaattgaatttgtttcccccaccccctccccaacctattcttcacatactttcgccgaatcgcaaaactttgggttatctctttctccaagtgtctgcgtcgtcctttgtgtcgccatgcccgctgtacagcaattcagccccacctttccctgctccccccctttttgtcatcgccaagctcttccaaattctccgtgcccttcggcagatgtccttttgttggccatcgcatcaacagggggagggggaggaaccaatctttggagcgacaaacaaaaggagacggataagttgggcgggtgctgtacgatcctttattttgggaagggccgagcccatctgtttataaatacattccccccctcgggcgacatccacttcattcatcaacattttttttgcatttcatcactcaacaaatttcggatgccttcccccttaaacgccaaacccaccgcgcttatccccccaaaccagcgaaccctcaatccttcccccccttttgctaatggtgggttcgattctgacgggggggactccggatcatttggggctcacacccctcgccaaccccgtcaactcggcccccctcgcttcgccatcactcatcgccaaccgccgatccatgctcgctcatccccttctccaccgccaacaatgccgattttaccccgagccgacactcttctcgagcgtcgtttgggcggaggatggtggctccatcccgagggacgccgattggctgagagttttctgcgagaaaattggcttcgccactccatcaatggccaactcgtcaattgggaccgcttggactccgtcccggcccaggaacgtcgcgttcagccgcacttgtccgtcgctgaccattggcgaacggtacgagaaactcctctccgtcgtcctgagctcccggcggtgattcaagaacgaggagtgagaggaacgtccaggcgaagcatcgctcgacggcgccgcaccggaataccgacgtggctccgaggggctccccattttgatttcttccccttagaggctttggaggtggaacccccggacccgatctaccgggccccccactctcgcaccccctcggattacccctcttctgatgaggacgatcgaccaattcagctccaccgccgattcgaacggctcgccatatcttcacaggccaattggaacccgccgcaacccgtcgttccgccatcgccaacctcaggatggtcagaggcggagtcgccctcgggaggaaatggcagagggagaattgaaaattcgggcccgggagcgatcccggcggtgaacaacccgccgcatttcgtcctccagccctccccttctcacctcttcctttgcgggaccccccttcctccaatgtttgtccctgtgacttatgtgtttcccgcctctattgctccaattcattcatcaacgagaatggccgccggggatggacttncgggccctcccccctagactcgcgcgggatgaacgcaaaaacggtgcctcccctgcgccta

SEQ ID NO: 6804 - DNA, 2486 bp, Heterodera glycines
  unsure (1)..(2486): unsure at all n locations
atgaattgcgactgaacggctcccatttgttgcccattgaggagaaatcgcaccaaatgttcggcgccacaattgtcgcctcaaaggacggcgattccgtgctggttctgtcattatcattatcattatgatcacttatcatatttatgcatttttactttctttttcccttaggcttgtgcgcctcattacaaatatttcttcgccaaatttgaagtgatcgaaccggtgggcagctgttactacgcccgggaccatttcaacaaaatccaagaatatgcgccatgtcggcaggaacgtgagtaaggcgtgatgagtacccgttgaatatcccccccccctcgccgtcctcagctgctcgccacggtcgccaccgacttggctacggaatgtgcgggtttagcgctgctgtgccggataagggcgaccagcgactgttcatttcgggaccaggagtttggtattggcaggtgagcattttccaaacatcgccgacaaaggcattcgaatttcgagagtcgccttttcagtctcgacttgtgaagagtttggaaactcggcaatgagttgatattctcttttaattgtcgatcgttttcatttccattctttcccatttcgaatgatcagttaacttatcaaagtttgggtttttcattgttttctcttttaggggtctgtcttctcccaaaacattcaaaatttgactgatcggccgggcaccgccgatggacccgcgcacaccgaccaccaccaattgggtaaattaagcaagacccaaatgaattagacttggtcgcactttcgttaggctattcaaccgccaccggcgattttgacggggacggaaaggacgacattgtggtgggagtgccaaggggaaacgaactgatcggaatggtggggagaggaaagtggggaaagtgatcgggaaatggaaatggttgaggtgtccatttacacacgagagctgaagccaattgtgaacataaccgaacgggacggacagaggtgggcatggggcagaagaaattgttaaacggatgagccgagagtgggcgagaccaacttggcattacctcttcaggggccaatacttcggcggttcggtggccgttttggatttgaacaacgacggactgcacgatttggtggtcggctcgccgctgttcatcgattggatgagcaacgactcgaaaacgcaggagcgaaagccgcgttacgacgtcggacggatcagcgtttacctgcaaacggaaggggtcagttgggttggaaaattgagagctgatcagagcaagagcaaagaaacgaatgatgacaattccatcgttttgcgattgagttgaccgcttagccaaattcaaattcaaattgcagcacggcttccgtgacccggtgcacatcctcggccacgaccaatggggccgttttggccacgccgttgccgctgccggggacctaaacggagatggatttcagggtaaaaaatcactgtcatttacaacacaaacttttatttcactttttggatctgttggtgggtgcaccatttgacggcgaagatgggcgcggcactgtctttgttttccatggctccgaaaatggcatccgggaacggcacgctcagcgcattttggcacgggacattggcagggacatgctcaccttcgggtgggcattggccgggggcagagacgtggacggcaacggatacccgggtcagtggggctgaacacttatttggatggacgggttcgaattcagacattgccatcggcgcccctcacagtaaccaagtcgcccttttgcgcgcccgacccgtcgcccaagtgcagggatcgatcagaacgacgaggaaagtgagcaacagaaaaggtcaaaggaaacatacccaatccccccctactattaagagcatcaatttggacgacaaacagtgcgtgacggagttcggtcggatggcatggtccgtcaagggccattagcacttggcaattgcttttccctccagtgaacgtctccgcgtttgtctgaaactgttggtcggcaaattggcacaaaacgccgtcgaaatgcacgtgcaaatccaattggactcgcgcacaaagggcgattcgccccgggcctttttctcccgcaaggatttggacaaaaagcgcggcgtccgcgtcgacccctcgggcagccgcgagcagccgtcgggtgttgagcaaattgtcacactgagcaaagggcgcgaggtgccgaaagcattgggcattatttaaaaacattttttggatggaatgcttctcaatttgaaatttggggggggggggggggtgacagtttggattaatcaattgaatttgatttattcattttgccaggtctgcgagacttacgacgtttacgtgccggtccgtgaataaataataaagcctttgccttgttttatgcttttttggctccattaattcactgttaaggacagnnactctaga

SEQ ID NO: 6805 - DNA, 1092 bp, Heterodera glycines
ataataaagcctttgccttgttttatgcttttttggctcattaattcctgttaaggacacaattcgtgacaaaatttccccaattattctgtccatgaattattcgttggtggaaaagggcggcaccggcgttttggagccggcggtggacacaacggaaggggcacaaatggagacggagttggtcatcgagaagaactgcggcgaggacaacatttgtgtgcccgatttgcatgtgcaggcgtatccgtaaggagggcattcattttaagagacgtcaaattgagaatcaaacggacaatcactgattgatcgatcatttgtcaataaaacgaaaaattctgattgatcgatcaatggccaattaatctgaaaatcactgattgatcaatgtttcggtcaaacgtacaatatttattgatcagtgatggctaatttatctatacattgaccgattgattgatcagtttccaatttccattcggcgcttcccttttttaggacaagtgacaaatttatcgtcggtgctctcgaccaagctcttacgctgaatgtgactgttgagaatcggggcgaagattcttacctgacgcaatattttgtcacaattcccccggggtgggattgaattttgttgaattttcacgaactttttaaaacattttttagctttgaatacggcggaattgaaaattacgaatcgaaggcatttttctttatttgcttttattttgctttcttattttattctttcagtattctgtgagctgttctccggtgcctggccatgatcaatcggacaaaagtcagccccaaccgttcgtttgcgacgtcggaaatccgttgccctctggcgcaaaggctacttttggtgtcaaactgagcggtgggccggacgtggacgtgtccaaggagtacgtggaggtgcgcatgggatcgaactcgacaattggggaggagcagggcaacgaggaggacaaccaattggtggtgcgcattccggtggaaatcaacgcacaattggtcagtgatgagtggttgggtggggggaggagggaaaaagtgatcagaccgaagagggggggggggggg

SEQ ID NO: 6806 - DNA, 3167 bp, Heterodera glycines
aagagaggcagagggatagatagacacactgatcaattgaatagaaagagcaattgaaagtgaacagaagcgggtcaaaaagaacgcatcaactgattggaagataactttgggcttttcaggcgttggtcggcagaagcaacccggaacaagtggactacagcatacggaacagaactgctggggtggcggcaacctttgactttgagattggacctgttgtcagtcatctttaccaggcaaatagctgccattaatgctaattgctcagttttatggtcatttctgataggtgacaaaccgtggccccagtgccatttctggcgccgttttggacatcgtttggccctcctattcggagaagggcaaccacttcctgtatttgatcgacatgccattcgtcagcgactccagcaaggcgaggtgccgagtgaatcagccgcaaaatttgaacccggcaaaccttgcagtgagccattagctgaattcgttttcctgaggttttctatttgtttttttattttcagatttccaatgagcacgtgccaacgcccggccctggcggagtccacggcggcgcaatttcgctggaagacgccgaagcggcggcggaagaggaagtggcggagacgccggcagtccacgggggaggagttgcaacgggcagaatgaaagaggaggcggatgaagaattggaagaggaggaggtggaggaggacggcgaagaagaagcggacggagaagaagcggagggagatggaggtgaagagtacaacagcaacggagagacacggagacggaagagaaacgcaagaaggaagacggcgacgagacagcgcagcgacagagaggaaagcggcgtggcatccgcggcggtgcggcgcaacctgcgccagcagcggcaaatgctgcgcgaggcggtggagcaggcgaaggaggcgggcacggccacggaataccacggagtgttgggcagaaagacactggtgggcgagagacgggcagagagacagactgatcagtggcgaaaggacaaacgaacattttaaggaggagggggggggagagcgatttttggagaaacaaagtgtttggggagacgcaaaaaggggcagacatattgggcgattggaagaccaatttagcatttcggtgatcagagattttaacaattagaattgcgcggcactgaactgcacacacatcgaatgcgacatcgaccgattggaagagaatgaatttgttctcgtcgaaatcttctcccgggtgttcatttgatttcccctctttctcattttcctcttttatccctttagctttgggttaacactctgatcgacgaggatttgcttgaggccgatctctcctcgttagcttttgctcgcatttcggcacttccgttcgccccaaagtacagcccaccgccgctggtgatcgctgtgaacaccgaagtgaacccgacagaccccgaggcgggcacttgggaattgccggtaaattctgccgatcatcaggaagaattcatcgaatttctgctcatttaaagtggtggctgtggctgctggccattctgatcgctttgcttctgttggcagtgatcattttctgctgctggaaggtgaacccaagggaatgccattgcgaaagagtgcccttccctttcttttttgcccttccgtttttaaatttaattttgatcagtcaaaagggtcccttgcccattgcaatcgctgcgcctatccttccaattgcttagcaatccctcccattgcttctgatcactttcagtgcggcttcttcaaacgaaatcgtccgccgcgagaaaaggcgcgcctttcgcgtgggcctgccgctgcggcgacaaatggcggcgaacatttcggagaggaaaatggccgcgggcgagggggatattacgcggataaccaagcgagatacgcacagccacaaatgtaaggggggcgggaggggggatttcaatttttatttaaatttattaaatttaattgaaatgtttaaggtattcccccgaaagacacggcgcgcgagtgtgagaagaaaggctaatgaagaagactaattggttgactaaccaacagccaatagatgagattctaaaacccacacttttacttgttattttttcattggttttgccgttgccattttttttgtcgatttttcccttttccgtgtgcctttctttttcttttgtccctcccaccgaccaaaagccaaattcccagagccttaaaatcattgtttttttctttttgtttcttttacccttccattttctgctttaaatttccttcaccacggcgttttcttgccaaattaaccatttaattaagcacagaatttcccccaaattgaaaatgttctgtttttttcacatattttgtcattctcattcagctagtcaatcccttctttcatttcttaatatttcgtggtatttgtaattatttttataaatcctttgaaaattttctggaaaaattttcggcgctaaaacccaaaagaataattgacagactttcgttttcaacgacaaggctaatccagaaaaatatttgatattttcaaagggtcttaaaatcaacaatttccatttctttcccccaatatttcaataaatttttcatattaaaatggttctaaatataaaatgccatttgcaatttctccctaatcgtttctccccgtcttggcacagctgtcgctgctctttttgctgttttcctccgcctgcccccccttcccacgcctttcactcgccgccgttttacaattgtcccacggcagcaaaaagtaactaaacgccacgccacccattcatctcacacactcatcaccataccaataaaagcagcattagcacgccatcgccacaattccttcattattttgctagccaaaaggaaaaagagtaaacttcaaccaccccccccccctaaaacaaaatcaaattaaactaattagctgattggccaggaggaatcggcttttcatcttccatgatggacccctcggaattatcgaaaatacccccccccccccccccctcctctccccccgatcaccgtcctgtgaacgatcgaggggcaaagcttttactttatctcacggctggtaatgaggaaaatactggtagattttccatt

SEQ ID NO: 6807 - DNA, 1332 bp, Heterodera glycines
  unsure (1)..(1332): unsure at all n locations
aaaaagtttaagtggaaaaacgagctggcgccgaaacaccggcgccgaaacgccagcgccgaaacgccaggccccgaaaacgcggtgngtccgtaacaattaatggtatgtaatatttaattttattgtattttccacccaattaaaacaaatgtcgctccttcccgcccatccttttcttgtgttgggattaattcatttgcattttgccctgcccacggtcataaatttcacttttttgttttgaaattcgttgatgactcatctttgcctttttcttttgtccattttcatcgccttttattttcaccgcccttaaaaaaggaaaagggcaatggaaaagaccaaaacaaacaaacatttcattctttcttttatttttttcaaattcgaccttaaatattttcggcctttccattttagttgttgttttttattattacttttcttcattttgataatggcatccgcaaagtgtgccagggaagactgtggcaaaacggtgtaccctttggaggaattgaaatgcctggacaaggtgaacagctctttttctatgaacgtatttttgttttttcaaatcctttttattttttgacaatttaggtatggcacaagacctgctttaaatgcacaggttaattactaataatctaaaaaaataatgtgaattgtgtcaattttaatttctaaaatcattttggggttttcagactgcggcatgattttgtccatgaaaagctacaaaggctacgacaaaaagccatactgccaagctcattaccccaaaacggttccgtcggccgtggccgcaacgccggagatggaacaagcgaagcgaaacacggcctatcagagtcaggtggaggagggaaaggaaaatggcggagaagggaagagacggagcgaattttaggtgaaataccacgaggcgtatgagaagcaaatgaaaggcacgaagatggaagtggtgagaaagttatgaagaaacgaaccatcaataaagttcaaaaacatccgtcaccaaaagacaaagtttcgaatttaaattgcaaaattcgaaaagtaatccattaaagctttatgataatatttggtctgtgccttaggacatacgaaatataaaaaatacgaaaacgataaccatttactaattgtaatgcttacgttaggccgatgacccggaaacgatgcgacacaaagccaacatggtaaaccaatccttggcccattaccacggcgaactgcagaagaaagagaaacaggactcacagagggacaccactgcaggttcagccccgtctggtcagtcaatcctttgcagtcctaaca

SEQ ID NO: 6808 - DNA, 1885 bp, Heterodera glycines
ccttgtacctcaaattttttttcaaaaaatgcgccattaaaaaagtttttgaaaagcaaaataggtcgatttacatggcttgatataattctaagctaaaataaaaaagtaattttttttaaagtttgttaatcaaaattctaaaaattttgaaaaaagcccgggcccggcgggcgcccggccaaaattttggaccgggctcgggacgcccggtaaaacgggctttttttgaccgggcggcccgggcccggctaattgtcgaagcccgagcccgggcccggccttttcaaaattccggactctattaactattcatttgattaattacaaaaatggacaatcattacaacaaaaatatatcaacattttctaattcgaatgatcaacgctttggcccttcttatttactgtgagcaaatgtttggttttgttttcgtttcacattttatgccgtttccccacccatcagtgggctttgctctgtccacttttgctcctgctgcccttctttccatcggtctttggcattcttttgcaggcatggtgaagaatgcgaattagtgagtgccaaatttgaggcggcgctcgaaattgtcaagaaatgttcgtcgtaattttccgctgtcattttcacgtcgttctgtgggaaaccttcactgctttgtggcactttcagttggccgtttgtcttttgattatttgccggggaaacggtgccgacgagggattgctccgtctgctgattttgggactgagtgaaagttacgacgatgttttgaagttcaacaatgcgtttggtgagcacttctaagaagagaatgccatttggaaatggacaattggactctttgtcaggcacatttccatggggggggggcatatgccaccctttaaacaatttcagaaaaataagcaattttttttgaatgcccatttcaaaataagtgccgaattggcaatgccatgccttttttggcactcaccgatcattccagcgaaggtctcttgagttcggtgcatttcccataatgtttcgtgcatttccgcgtgcaactaaatgaatggtaaaattgcattttcctccaaattctctccgtttccttcgtaacctttcccacgtccaacaacaaattgcctttgtcctgcaacttcctttggtcccattttattcgtcggaattcgttgatggcattcagaaacctttttgatcggattaattagtaatttattctccgattgtgctttctctgttcctcactttctctggtgctgtctcagtctgagttcgtctcccttttgtccatttctctgctggtatttgtggatgaacctgtgatcagttagtgatcagtcaatcagtgccaacaatcaatgcttttccaattcctttggctttcccccccccccattcgctcttttttcctcttttcttgccaagtgtgttgaaggactgaagcagcggcatttttgcacgcatttgtcagttttgagtcggccctgaaagtttcgatttcattttcttcgaaaaagagtttcgtttgctgttacataaagttgttcacatgcttttccgcccgagacagctccaatttgcgcgaaattactgcaattaatgcggaggaaacgccggcaccctaaaaagaaggaaacattggaggaaggcaattaacaaatcataggggaatagggggcaataatgaccacaatgcccgtggtaattgacaggaaacggccgcaataactcgtcgggacgacgtcgccgtagcctaagtggcgggggaattgctaatcgatgattgggacgggattgaagggtaccgatggacatgaagtgacctaaaggggacaaaacaaaaagaatgggcaattaccataattacttacc

SEQ ID NO: 6809 - DNA, 2674 bp, Heterodera glycines
cattcagaaacctttttgatcggattaattagtaatttattctccgattgtgctttctctgttcctcactttctctggtgctgtctcagtctgagttcgtctcccttttgtccatttctctgctggtatttgtggatgaacctgtgatcagttagtgatcagtcaatcagtgccaacaatcaatgcttttccaattcctttggcttcccccccattcgctcttttttcctcttttcttgccaagtgtgttgaaggactgaagcagcggcatttttgcacgcatttgtcagttttgagtcggccctgaaagtttcgatttcattttcttcaaaaaagagttttgtttgctgttacataaagttgttcacatgcttttccgcccgagacagctccaatttgcgcgaaattactgcaattaatgcggaggaaacgccggcaccctaaaaagaaggaaacattggaggaaggcaattaacaaatcataggggaatagggggcaataatgaccacaatgcccgtggtaattgacaggaaacggccgcaataactcgtcgggacgacgtcgccgtagcctaagtggcgggggaattgctaatcgaatgattgggacggattggaagggtaccgatggacatgaaggtgacctaaagggacaaaacaaaaagaatggcaattaccataattacttaccataatgaaccaaaatgagttggagtagaccatctccgtgctgcccgtatagccttcgttgtaccgttcgcattgagtgaacatccaagacatgcaaacccaataggaagcggtgaaaatgatcgaaaatgacgggacaatcgaatgaatggcaaatggtcggcggatgtatgtttttagatgcaaacttacgagcactgtcattggatggtcggccatcatcgtttttatgacgaatcggaagtccattgaaatccgattgagtgctgcgaaagggtggacaatttgccagggggggggggtaattaagcgacctgcaattgaccgagttgccgcgtcctgtgggtttatcagatcagttcaaagtaagccaaaaaactacctgaaattgtcgggaatggaggaccatgaagcgacaaagcaaataagcccggagaaacattggcacggacaaaaggacgtccaaaggcacagttttggtggcaattcttcgttcatggatataaggccatgaaatgtttccactgcctgagagcggcgggtaaaaaaaagaaacaaattgggaggggggggggggacagacaaacggacaaatgccgactgactgaccggggaacggacacacggcacagacggcgatttcgatgaagctgacaaatggcattttgagggaacggacggaaatacaccagaagccaatggccagaacttacagttttattattcggtcggtggtcaatgcaactcgccaatccctggaggaaagaacaaagaaacaaaaatcacttttcgaattatgccaccgactcggccccgctgtcaatcaaagccattttgacctgaaaaagccaagtgagaaaagcttcgctcaaaattaactatgaatcagtgttcggccacctcaatgcgatggtaattaatcagcgaaacaattagcatcagagtggaagtgacgcaaagcgaccgcaacagcacggagagaagcgactgcttgccgatcaatcggttggccgtcaactctgaagcttggccgctcagagtgccattcactcggatgccctggcccaccttggtccatcacgacaaaggccaagccgacaatggccaaggccaagctgaagtcgcagtttttgtttcgcttcacaaagtaaatcttgcgcatcttgcaacgcatcttcgcctgactttctctgtgccaggaaatgtttgtgtagaaattgtaattaattgggttccatttggacaacgaacggagagaaaaaggacgaggggggagggcattggcactcatttgaaaacgaacccatgggagggaaagggaatttgagccatgttcccctggggttgtggggattgattgacatagggaaataagtcggaaagtgagcgtgggtaaaaacaaagccaaatgggtggcgcggggaaagttgagttgtgtgtggcactgttaatctgttttacacactgtctcttaatcaccatggcacccgtcccgggggagaaaaaaggacctgagaacggcgcccaatcacgcaagtcattcccacggcccctctaattgacccccccccccctcccactgattctcccacgcggtcgtggcattgttctacgggaaaaagccttctgaacgctcacgtcgttatggaaatgccgtagccggactgacgacgtcgaatttggcggtgtgtggccgaagacgccacttgctgctgaagggcgcaagttttgttgcgcttggcaggcgcttcttctgctgccaaattccattccaaagactttgccttatcaaaaacgacggatcgaagaccgccgcccgtcggttggagttcgccgttgcagcgttcatctgtgaaaaggatgcaaatttaatagccaacaaaaagaaatgcatttgaaacggataaaaaggaggagagacagagaaaagagttgcaatgaaggggagggagggcgaagggaggggaaatagggaggggaaaga

SEQ ID NO: 6810 - DNA, 873 bp, Heterodera glycines
cccccccccccccctccaattggcattgttcccacgcacctatggcaaataacattttcagttgtcggagaataattgtagatttgggaaagggaaattgaagagaaaaagaaacggagagatgaagaaaaaagtgaacacgaaaatgaagagaatgaagggcacacttcacagcagacacacaaaaaaggaagaagcatttggccgacttcatgggacaatttgggcaaatgcaaatgggtgaaaacgaaagcgcagctgatgaagaagagcacgggaaaaggaagggagaagggaggggagaaaagcgggagcagtgggggggggcaaagggagaggaacgaatacggcacgaggggccaagaatttcaatagtttgaattaaaaaaatattaatcggtctcgaggtttaatctcgcacaccattaacactgctgattcatttttttggctttgctttcaaattcttgccatatttttctatttcctttccaaagcttcatccatcatagactgacttgtgcgattggattagtcaacagattgtcgtcgtcatgttgcaacagttgaacagtgttcagttggaaggttttgacagtgccggggccaagccaatcgcacgatttgttgcatcggtttgtgagaggacgatttggacaactgaacggttcggggggggggggagtcaaggcagtacaaaagccagttcgtacaatgagtggtttttacatagtttttataactcaattaaaatttattatttttcaataaaaataagaatgaatttttctctttaaaaaacaaaaaactaaaaaatggttttctgttaatgaagagtttttttgtcaattaaaaaaaagttttgaatgtcta

SEQ ID NO: 6811 - DNA, 987 bp, Heterodera glycines
ccccggtgtactgtaaggaacggtcgcaagagaacgcgcataggcaggtggtggcacagctgattgaactgataatgtagttatttaattaaaaattggaaataaaattcaatttctaaatttctttttcgaattatatttttgcaacctaaatttcccataattttggggaaattaagatatgaatcgattgacactttcagcatacctttctcattcatcatatccgtttgatggtgcggcactgcttttacaaccattggcttggctaaatagacattttaaagggattaatttgtgcagaaattgatgtgataaaatttaaatgtttttaccctgtgactttttgtctttcacttgcgctgttttggcaattgcgacttttgactaaattaaataattaattaattattcaattaattaattgcctgttttcggctctccctttattgcttttgccgctttgactttcttagctggctttgctttttttgctgtttcaaatccttttggcgatgcttttccttttgctggagatgccgccactgctgctttaaagtaatattttaataaatttttaaaattgtttttacctttttattgtcttttttgacagcctttgaatttgctaaaataaataaataaaaatatattttttataattttaataaaatatttttgcccacccatttccattaggacagccatcaccaagcaaaccatggccatgaagagaatggtacgcattttgggaggataatttaaatgaaaaatgatatatttttcggcattttcaaatgctttttatatgctccgatgccaaattttatttcgaaatatttgattaaaagttggccaaacagacagagagagtggaaaagacatcgactgatttttttgttgacgaattttttttttcattttttcattcataaatttttattttttccattttcggtgatttcttcatttatttgccaacatcaa

SEQ ID NO: 6812 - DNA, 2070 bp, Heterodera glycines
cgacattcatttattttgctggagcattggcacttagtaaacaaatttgaaaaatagaaaacactgaatttctctaatagagccacgggtgttctattttttgtattgctcgcagggggttaaaaatgtaaatttttaatcaaaattaaaattcacagctttatggattgtcgagagcacggcacaaaggtctttggcactgaatcgctgcattgaattggtgtcatacggtagtgctgcgaggttactgtcccatggcaaacgcatatatctggatgattttctgcgtcatctacggcattacgtcttcatctttaccatcccgatcattttcaccggggtgtacggcatggtttttcaacccacactttggctacatcaatgacccaaaaagagaaattgtacgaaataaattgcaaaaaataaataaattttaattgcaataatttacttttacagtatcgcaacaaattgcttactatctacgattataccatggctactgtactcacttcatatatctgtcctttttgcttgttctcctcatcaaaattggctttaaatacagcaaagttggcttatcgaatccaaccaatggcttacaaacggcgaaaatggtaattaagaaatttaaataaaaaaataaatttggatgaaattgttacattttcatatttcattccatttttataaattacgctgtttaaattttttggtaaccctcccaacagactaataaaaagaaaaaaatttttgttctattttgtttttataagttcgtcgagcatttagccaaaagcctccaagtttgaatcataaatgagcgaacaatcatatacaattttttgatgcaattaggcgccacttgagaaagcagaaattttggacattcacataaatttttaaaatttacctgacaaaataatcacgcaattttaaaagtttgccttttgtcttgtcgacaagaaacaccgctactttttatattcatccacttttttgtgcttgaatcatttttgaaggcagagaatttctctgacatacactatttcttaattttgctttcccaattttattttattgcgtgagaatttgttaattgtacataatgaaagctaattatctaacaattaaaattgcaatattgtgtaatgacaatgactcgggtgtttgaacttttaatttgtactcagacaaccacacactttttaaggccccagtgaagggaatgaatggcattattaggaagagacgcacattcaaagttctagcaaaaaaaaagtcggaaattttgaccaaattaaaaatcttattatgtttttttagttgtttattaacataacaaagcttcaaaaacttggaaagactgtataatccaatttatttttaaaattaagcaaaactcaaaaatgctgaagatattaccatctactgcccggttgttgggtccctaaaggtcgggatccccaaatatgttcataaatctgagtaaccaattttgctggtccctataaaattatatttaaggcccgccactgcccaaacttaagtcattaattaatttaaaaaatttttgtttaaattattgccattccccaatagggtccccgaaccgaacaattttaccgacctgtcctcccaggcgttccactagaatttcttacccgagggttcggcgacacaccatacatttaattaattgttggattggattttcatttctttgcatttttaattaattcaaattgaattgccattttttgataagataatattctaaataaaccatcgaataatatgagtaataacggtaattcatcaccatcttcgtccgttaatgaatttggagagtccgaccaaatttacgtgtacaccgtttgggtgacaatcattcagcaaattttgtcactttttggcattgcgctaaacagtgccatcgtttacatcaccatcaagcacaagtagtgactgaaattttttggcattgtgtcaatttgtcattcctaaatagagtagagaacatgaccctaaaatgcgtcagtgaaaatgcatactgatacaatattttta

SEQ ID NO: 6813 - DNA, 3454 bp, Heterodera glycines
atttagcaaattttgcactttttgtccttcgtcatagcacctcataatccatctgtttttgttgtatctgccgggccagaaattctccattcttcgaacaaacaaattcaaaacaaatgaaaacgttttttagttgatttttagataattaattaatacaacaattgaacaattcctaaaattcgcatcaaatattacattatatttgctcattattatttttgaatagtttaagtgtcgaaagaattatttttgctgaggttctgtgatttgttaaccaattcgtaaaattatctgggaccatagcaacgcgagatttttgggccaagaccaaacccagctatttctccttcaattgctaaaaagacggaacggtgtccacttaaatttgttttttttttgataaaacaagattgaacccgatttttgatttagactaaatttatggagcgcatatgtccgcagcgcagattcgagtaatctttatcgtaattctcaaattcccgatgcccaaattccatatttcccgatttttctcacaaaagtatgcaaatttttttggcataatgttatttcattttttaattaataatttaattagaaactccaccggagttatttaataatatgctttttatattgtttccaaatttcttgtaaggaaaaagaagaatggcaccgaattgacaccaccagataaaattggaatttttatattaactttttagtaattttggcattgttttctttaatgtttcattaattttaattaggaaacttcaccgtagttacggctttctgttggccatctgttctttttgtgacgcactcaccgaattggccaccccattggctaccggtaaaataattaaataaatatattatttcattatttattttttaaaattatctttagttctcgtttttcttcgtgtgcggattcctttgttgacttgtgtttatgcccaattttttgctttcactggaagtattaattcatttataaatctgttttggataagcgttgatcgatttgtggcattggcattccccgttttgtaattatataaattattattaagaaaattaaatattcaggaaattaatcaaactttctttaagttttcgtaacatctcaaggttttccggaaaatatgtgttaattgccaatgtcttttccttgtcaattgcattttatattatttatttgtcgtttttatttgctctacaaaatcccgaaatgtaattattaataattgattaattgactaattaataataattttaccaattgaaaggatggtctattgtgagcctggtgatatggttcaaggcgaagtatttttggttgcttctcttatcgtggttatttttactttgcctacaattgtcatttatattataatggggattatgttaaaggtaattaaaattaaatgacttacggtggttgttaaaaaaatgcattttgatttcccagtgatcagaagtgatcagaacaacagcaacaattcgtcccagtcccaaattgaaatcactcgtcgcattttcaaatcattggctgtgatcatggcagtgatcttttgcttttggttcaccagttgtctggtggttaacattgtggggcgcggactgatcacaagtgatccgtcatctcaatttctgatcacacgattagtggtacaaatggtcacaattgcaggggcgatcaatgcaccaatcctatatatttgcaggcaaatttagaattaatattaaaaaaacttttttaataaataaaggttttttagcaaagaatatcgtgatatcttgaagagtgagttcggttgggtcattaaattgtggtcaatttgaaatcgaatttcatttgctcatccgaaacccaatcaaaatgcttccgctgttatggttgtgtcaagaactttgaaaaattcaaacgacaatcgagtgcatgtcagatgaaagaaaagaaaaatgttttaatagcaaaaaattgagcgttatttttacaaaattagattaatttatgcctttttagaattgatcatagaatcaaataattattgataaaaaatcttgtacgtcatttgtcacttgtgattcacacgggccaagtaccgtaagccatccagctttttcagagtgtacagaaactgcgagtcccttcgaatataataaaatagatttaggatccattttttcttttacaatttttctataaaagacaacccatcatccaatgatggcattatgcaattctgaaaaaagcaatcttatctagtgttcattattcttggaaaacccgtgaattgaccatgcgattcatgaccgtgacaaaaaaaaagcgtgaaaatcacggtaaccgtgaccgtgccgtgagtcacggcacatctctaccattggcacgctaatccaattcctcctttggcccaacgccgctctaaatgcaaacagaaagccggcccggtctcgccaaacccgagggtcaccttatagaagggcggtgttggagtgataaatacttcaatttggcgagcttttaatactgatttattttgtgcgtgtcaaccccttcccatgaccttaagtagggttcggaccccgtccccgtccccgggggcgggacaggtttttggggctcacccccgtccccgcccccgtgactctgacccccgcatcccccgcccccgcgaccttcgccctcacgggggcacgggggtgaaaaacacacccctaagaatggcatattcgtggaattaaaggcaaaaatttatacaattttgaattttttaaccatcttttacaaatttttatgaaataaagtaaatttgcttatattgtttaaaatatttgtggtttagtggttagtgcttcaacattaacaaactttttgttatgagttcgacaccggttgacgttttcttttgattttattttttttccaaataaatacagggtttttctatgttgttattctaagaaatgttctggttttggggtagtaccttattttcatctaaaaaagggaaatttctaaaaaatttgactaatttctaacaaaattcatatagtcttaaaaattttccgcttgcggcgccaatcggctccaccggacctctcccctcgcacactcaccaagttttttggaaatacatttttgatcgaataaaatgtaaaaatatttgaagcaattttgcaaaatgttcttatttttgaccctaaaatcttattttttggccttgatgttcttattttgaaaattttgaaatagaaaccctggatttagacaaaaacacccataaaaagattttttggagctaattaaaaacaaaccctcgcccccgtccccgggggcgagaaatttctcacccccgcccccgcccccgcgactctgacccccgcaatcccccgcccccgcgaaaagccacccccgcccacggggtccgaaccctaa

SEQ ID NO: 6814 - DNA, 4016 bp, Heterodera glycines
  unsure (1)..(4016): unsure at all n locations
aaatgttcaaaaaaattaaaaagtcaattcagttttcgcttataagaattaagaaaatgccaaataaagtctaaattttacatttttttaataaaaaaagttcaaatttttcataacaaatttgttatggccaaatttcactattaaaaaattcttcgaaatatctttgccgttaaacatggtaatgatttccacctcaacaaatggcctttggcttactcaaaattgttttgctacctttttatttgtcctttttctacgattcaaatgggctctttttttaattaattattattttttacacatcccttctcattatgcgctaaagttttaatcattttctgatcacttccgtgcccaatcccccctcctcccccccccccccgccggtgattgatctccgctgatctctcactgatcattcgttccctgatcgtcgtccgtcacacattcattcaatttgactgaatagacgacagacagtctctgttcatcattcattaatgtgtctacacaacatagatcatcattatattagtacaaatcattcaattaaccaacaaatattaaaggtagctatgcccgaaaaataagtatcacaaaatatttccccaaattgcgcatttgacacccaaataaaataacataattagccttgagagcaaaataacaattattgctcgtcgaataataaaaaacaatcgaattaatatttatgtaattgtcaagtgacacggtattgacagtttaaagacaaaatgggtctttttaactaaaactctcaaaaacattttttttaaagttcggataaatagtcttttaaaattctatttctttttttttaaatttcaaactccgaaaatcgtgcgcaacaacaaataacacaacacaaaacggatgaatgggagggaatacattgagcggattttcagtacgcgacttcattcttcactgattgacccttccttatggaaaaattttgttcaatcaaatacaaaaaatggatagttttacattttgacgtgctttaaaaagagcgttttttacattatggttgtttttaaaattttaaaattatgataatagctacaatttcctaaaactcgaatttaccaaaatttgtctctcagtaatttcttactgatttgatgatatttttacaattcatattcattcaaaaaaatagttattattcctcaatatgaaaaaaagctttcaacgtgacgttaatttatttctgtataaattttgccaattttcttcaccaattcctacacaaaattcaaataaattttaaacattgttattaaaatatttaatcaatttaattgtaacataaaaatgattattaataataatcttttcatggtcaattattcctactcatataactgtcatgttctccgcctctgccctcattctcccaatttttcccagccaaatcatccaaatttttcaccctttcatttcgcgcaaaacactcaaaaattcgttcgtcacaatatactcactgtttttcccaacagcagcagttaatgtttgcccaaaaccttcgttttcacaattattgcatgacagactgacgactgattaagaggtaggtgaatttgtctgatcagtaaaaaagaaatcgtacaaattttgatcggagaccaaaaataatcattattcaattaatgattgggtttttatgatcaaaatttaacatatatactttaaaaaaaaaattttttttttatcaattattactaattcccaattttcatattttatatttattatgtttccattttttaagctatatatttttataatctcaatgttattaaatccgcttaacaaaatgtgtgaccaatttaagaaaaaattcgctcattttatttgttaagtatttttctaaatttaatctctcatttatccatcagataatataataaaaattaaataaaatattatttaattttcaatcaaaaatcccaaaaattcctatttttttcttccctttgcacagctgcatatttaatctcaaatttttttatctttaataattgaatatgctttatttaatgcattaaatgcataattattattcctaaagtgctaaatgagcaaaaaagggagcagagaattggtctgaaaaattgttttaaaataatccttaataattagtactaacataaaattaattttcaatcgatgtagaatcaattaaattttctttaaggaatttaattatttctttttaataatttgaatggaccgaatgaatggcaaaaagcgttgttccactaccgttgcgccacgaccatcgcgcgtcgatgcgccgtcttacggtaaccgtaccacctgctgttgctgcagtaatggcggctttcgctacgcaattttgctgatcactgtactgtgcctgaccacaatttgctcaaatatgatcgccttcaatttcacgctgattttgatgcgccggccgaattgggccaacacttcgtaccccgtggactcacacatggtcaaaaacagtcatttggtcaggaataatttataaacttaaatttaaaaaaaaatttttttagcttttttggacaaaaaataatgaaatttaaaattatttttatttttatgtttaataaaaaatttaattctgagtttgcttctctaaaattatttttggctttgaatgtgacacagaatttggttgggtgaaccatgctgaaaataagcacttggaaaaaattttaaattttcccatataagttttcaacgactatttccagaatatttcttcccccgctgatttcaccgtgctcaacgagtcatttgtgatcccgcacaccgtaccgtactccagtgtggagaagtcgcgcctactttacgcggtcggattggccagcatggtcagcacatttccgttcagcgcactgtatacgcggtacggtgcgcgctacgtgttttttgctgccggcgtcatcagcacattagccaccgcactgttgccgctggccgccgcccatggcatggccgcgttcatggtcatccgtgtgttccagggtcagcaaacaaaccattgcattaccaagatgggacatgggccatcgaattgagagccgaccaatctcgcactgggcaatctgttgctttataatgacgaggcttaaaaattataagaaaatcccaattttcataaaaaatatctttttaccaggttttagggttcaagtctatttcatatttgtccatactttgacagattttcaacagtataatgttttctatttttttttattctaaaaataatttttattacgtatttagccatttctaaattttagccttcataacgaattgaagagttttgagaaatttgcgatcaatttgtgtgtccatatattgtaatttttatgtaaattgaattagccgtcataataaaattgctaacatttgagggcttgcttatggtgccaactttgctgccattggctttgtgtgccatcgatgggccacccttagacaacatggctttttcctgtaatttagttaattaattattaaagataattatgcgtatcttttcaaaaaaaatttaagtgcttgcatgactaattttacttcaattgcggtcacattgacaaatccgatggcagcatttgtaagtgctaattagtatttgttattattctcataacaaaaataaaaatttatatttttcaattattgccattttttctaagataagctcaacgcctgcacttggatggccttgggtaacaattttaacttattattaaggctttgagttgtgttgactaaaaaaggacaaatatggaaactaaaaaatgggctatttcagggcacggatttttagatgctcaaaatcccgaaataggtacctaaataattgctanaaaactgccaaaatagttgataaaaaactgaaaagtgctaaagtagttgccaaaaaattggaacataattgctcaaaaatgcgaaagcttctcaaaatctcaatggtcaacggg

SEQ ID NO: 6815 - DNA, 2569 bp, Heterodera glycines
aaatatatatatatatatatatatatacatatatatatatatatataaataaataatttatatttgatttaattttaatcatttgacggggcggagtcgttatttaaaaaacatcacaaagggcgttatttaaaaaaccatcattatgaaaatttttgtcgaaaaattatttataattttgctccaaagcagccaatttttaattcttgatatcattcgatagccctaagtgttctctatcagtctgcaaaatttcaaaaaatttcttaaagtttcaaaaaagttatagctcgaggaactcaaaaaaccgtggttttcgaacatttttggccataacttattttaaagttaatagattttttttgaaattttgcaagctcataaagaacacttagttctatcgaatgatatcaaggattaaaaatttggttgttttagagcaaagttatacgcaaaaatttttattttgatggttttttaaataacgcgcataatgatggtttttaaataatgacatagcaccatttgcacagtcaatttgctcatttcgttgtcgctggcattcaattcgaaaagtccgtcactttgttcatctctccgctcatttttttgctgttcatcaaagacgaatcgtcacaagaacaatggcgaaatgttttccttggaatgagtgttgttctgctcgtagtaagtcaattagtaataattacattatttaagccgaaaataaattaataaatcacaattagccagagttatggctaaataacttattttatttattgtacaatggtaattcttttcataaaaattaaagtttaattaaatgaagttatttactttaattaaaaataaattatttatttgtgttatctagtttaaagtaaatttttataattatttgtgtaattcaatttaaaataaattttatatctttttgtttttctcttgcaatcggaaattaataattttttaaaaataattaatggtattgaattgaacaaatttttgccaattcttaaaatacaaaactaagacaatgttagttagcactaaatttaaaaatactgccaattcaataaaatgaaaacattttttaaatttaggctaacattttcttttggttttttgcggatgatcagccagcaaaattcaccaaagaaaagatgaagattcgaaagcaaaaccaccaaaacaatttggaagcaccggccaaattggcatccgcagaaaaagcgaaggacggaggagaaccaatcgggagaaaacgaattgcacaacattggatttaggaccaacaaaatcaattgatcagacaaattagccccaataatattaattgttaattaccaaaaatggaaaaataggaaataaaaagtcacaagggagacgggctaatccacaggcaatcctcagaggaataggatttaatccgttcattaaatttaaaacattttcatcctaagacaattatttgtggatccgtttttcgtttgtttcatttcaaaaattgggaagtttgttcattttttcaacaccctagaatattataaataaaaaagattcattatgaatctgatcatgattaggtccgatctctttcaattgaactgaatccccttttaccaactaaaaaatatgcataaatttcattgattttattgtacgtatagttttgtatatcaatgatttaaatttttgatgttgattatttgataacaaataaaattgatttgaatatataaattataatttgaatttcatcaatgagctgtaagtgaaaaaacgtcctcatggattttgcgatgaccgagaattttggaaatttataatacaataaaaaataataatttttgattaaaaacaaaattatttgttctaagaaacagaaagaaatgaattaatttatcttaaaattatagattttatcatattttcctagtctcttacaatatgaaattaattattttttcatatttttaaataattaaataatattgaattaaataaatttttgccaattcttaaaatacaaaactaagacaatgttagttagcactaaatttaaaaatactgccaatttcaataaaatgaaaacctttttttaaatttaggctaacattttcttttggttttttgcggatgatcagccagcaaaattcaccaaagaaaagatgaagattcgaaagcaaaaccaccacaacaatttggaagcaccgccaaaattggcatcggcagaaaaagcgaaggacggaggagaacaaatgggagaaaacgaattgcacaacattggatttaggaccaacaaaatcaattgatcagacaaattagccccaataatattaattgttaattaccaaaaatggaaaaataggacataaaaagtcacaagggagacgggctaatccacaggcaatcttcagaggaataggatttaatccgttcattaaatttaaaacattttcatcctaagacaattatttggggatccgtttttcgttggtttcttttcaaaatctgggaagttggttcattttttcacaccctagaatatattaataaaaaagat

SEQ ID NO: 6816 - DNA, 6895 bp, Heterodera glycines
  unsure (1)..(6895): unsure at all n locations
cagagtcgaaatcgcttatttatatttatttttgtatggnaatatcaccggtgatatgnagaaaggaggaaagaccaaaaaggatttaaaaagttaaaattcggtctccgatcactttgccatgctatgatgcgagttgtgttaagtaaaaagcaaacaaaagtcattctcttatgcttaatccaaaaaacaaattatattcattaaaattttagggtttattccttttatttgccttttcttggcaaaatgcattttgaagagcaaaggccataaatgacatcattaagcggagccgaaaattcgtataaattaaaataattgatattacaactgattcgatgctttgttttgtatttactgaagcaaatcttgaaacagacagcttattttgccaattatttttcataaataattcattccgttgcactttccttctgctgattggaaagccaagcagcaggcgacaaaaaaaacaaagtaaatgaatgaccaattgcataagcaaatggcaattaattgctgcttttgtaaacattgccttcggccgttctttccttcgctgtgccattcattcattccttttgcatccgttcgtttgttcgtttcgttccgtccattagccttcctttgtttgccgttcattaccctttcagtggcgtgggtggactttgaaattgggcagcagaagcggagggaggttggcccgcgggcattatcagcggaaaagccaccgttggcctatcgcatttcaatgcggtgaaattggcatttcaatggccaattggcggggaaaacattttcagagacaaaacaaaatggcacaacatctgcctaatggtcataataagcactacagtatggaaaagggaccagcagggactaatgccgaaaattaaaagaaacaattaattaattgattaattaagagccaacggtttattctctcatcaaaaataaataggtaatcaatcagactatttatttggcttcttctctgtctttaaatggggttttactggtgctatgacgttagtccaaaaccgggtgcaatggcgttagtcaaaaaccatcaaatgaaaatattttttgatataactttgttccaaaacaactaaatttttaatttttgatgtcattcgatagccctaagtgctttctattagcctacaaaatttcaaaaaaattcgctaagatttaaaaaagttatgaccaaaaatattgaaaaaaacttggttttttgaacttctcaggtgataacttttttgaaacttaatgaatttttttgaaatttcgcaggataatagaaaacacttagggctagctaaaaataccaagataataaaatttgattcatattgggtgaagttatgaataattttctgtcaaaaaatttccatttgatggttttttgactaacgcccattttgatggtttttgactaacgtcccagcacccttctaagcatggaaaatttgaaaaatatgtcgctaaaattgaaaaatttttggattacaaaaaattaggcaaaaaagaaaaaaaattaagagcaaaattcgggtaaaaattaatttttttttttttttgcaaaaatttactaatttttgcttctatttttttctagattcatatttttaagtaaatgataaatatgagctcaattacgaaattctatattcatgcattaaaatgattttttcgacttgacaaattttatgggtttacgaaatttttttaaaatccaaaccaattcccagaaatttattgtccgtattttcgtatttaaagtggttggcggtctcctttgagtctcaccgtcaaacgacccggtccgtgaaagttgtgacaaatttgggatttatcacaggggtggtaattagctaattaggtttatccaccagaaatgtaacgaaatccaactttcccatttttgagtttttaagttaaattaacgaaaacgaaaaaaattattaacttggaaatacttttatttttcaattatgcgcatcttttgcgattttatgttcaaatatgattctagtacagtatactcgtcccataaatttttacgcgttctataaaatttttctgaaacctcagcgtgtcgaatgagaccgtggtgagtcgttccacaaaaaagctcagtgtgggcgttccacaaaaaaagctcagtgtgggcgttccacaaaaaagctcagtgtgggcgttccacaaaaagctcagtgtgggcgttccacaaaaaaagctcagtgtgggcgttccacaaaaaaagctcagtgtgggcgttccacaaaaagctcagtgtgggcgttccacaaaaaatgctcagtgattgataaaataaaataataaggttaaataataattttgaactgtaaatgtaattttgatttaattttattgcatgcttttaaattataatttttattacaaaactaaaaaaggaaaaacaaattaattgaagacaattgataaggtgctaattttctttgcatttcatgtaaagaatttataattttgattcccgaaatagcgaattaattgataacataagaatgtcatagtaaaatctgagtatttaagctaattttattaatctataattcaaaaaatttaattaaataatccctcccaatcgcaacaatgcatccaatcaaaaaatttttatttttgtaccttatactttaccaaagtgtcaaagtcgaacaaaaaccagtacatcgtcgtgctatcctcactgttttagcaattggaggtattgcagctctcgttttgataccaattgtggtcggatcggcggtggttggatatttgatatcctatagcatacatggcgttaatggaaaatgttagtcagtttacctacctactcaaaaggcttatatcataagaatttaaattcccctgttaaacagatgtccaacgactgaaagttttttttccccttaaaatgagaattgacgaacacacaatcacgatggatgttgagacttttaataatgagtttttattttccaaaatcgaacaaatttggcgcactccaaatttagaggagatttgttttaccggttagaaaaaatgactatttatctaaataaaatttttagaccatgaaggaaaccgacaacgccacgcccgctcagcccaaattgagatgtttttatattttgctgtgaaaaaagataatttaaaaatttcaatgtgttgatttttagtgcttgttagtccttaagcaagacaataaaattgaaataaagtcttttgttatcagttaattttctatttcgggaatttataatttgttaaatattgaaaaggagtcaaagaaaattatcactttatcaataaaaatccttatcaccgattttatccaattttctttttcgctttaaatttttaaatttatttcttataatataaatgccattttataaaattaaacctcattttttctagcatctttgtttcttttatttcctggctcattcatttgaagaataaatatgaaattctattaagaaaatgctcagtattttgcacaaaatcactttcatcgtgaaattgagaaataagcagactctatatttataaaaatgctatttttatatttatatgaagattagtgacctcatattcgtttagcgtgttgttaagattttcatctagtgctaaatataatttatttcttggtctaggtttcgatttcccatttttaatttttatgatgcggtcatctatttcagacataactgtttggaaaaaatttaaaaaaacgggtaccgtcgcattacgaacactgcttggttcccttccctaaaaccttttagttgcatttgttcatggagtttttttaatgttttaatttctttattttgatagcgtttgacaagttctatagctttgtgattttttataaattcttcaaaaccggaattggtagaggtcgaatactcaaatcgaaataacaaaaaaataaaaataaaagtcttattcattttctaaattataattttattaaacatataaaaatttattgtattaattttacattttcagtggtagcccaaaattatatgtattgatggttattgatttcaacgtggatgttaccaatacaataattaaatttattattttaaatttattattttattttatcaatcactgagctttttgtggaacgcccacactgagctttttttgtggaacgcccacactgagctttttgtggaacgcccacactgagcttttttgtggatcgacctagcaccgaaatgttctatttatttacaaattttatttttcctacaatttttttaagtaaaatgtattgttgttaattttgattttggctttttaataatgtatatggaagattttattgccggaattcagtatataaagatataattattaaaaatttttacgtgaaaatttaatcctttttcgatttttctgggtttacatattctataccaattgatttccgtactctccattcattcactacaagtagcttatatttttgttttttattagtgtaatacatgaatattatgaaagcattattttttattaggcaatttgtgaaaatttgttgccgtttggccactgtcggtgctttagacagcgccaggggcgcagcggcacgccctgggaaaagtaagtgttattttttatttctttaatttcctttttttcatattaatcgaaaatattagtttcttcctttaaattttattaatattttaagtcatcattagggctaatattattaggctctaaatacacacaaaaggcacaaaaaaggttataaaattacaaaaacatgttttttgtgcgtttttggccactgggtgcacagaaaaaataaataaaaattaaattaataaaaatttgcaaattaacgtatagataaaaaagcacccacaaaatcattgcattaaaaaattaataacagttaaagaaaaaatattttaacataaataaaaatatataataaagactaatcgagaaaacaaagagctaccgaaatataaagattttaaaatttattcattttcacgaagttatgataatttcctatcaaaatttttcgtaataattatagaaaattttcaaatttttaaattgaaaaactgctaaatataaattgttttaaattttaacttaatttttctttttgtgttagaagaaaacatttttgttaaatttattttttttatatttcatttttttttaaataaatgaataaataatttaatttattcttatccgttactgatattttgattccaattgattcaagtttatatgccctatcgaaatcatgctgatatgaattacaaaatccaaatgatcaaattaaaattaaaataattaatttaaaaattaaaagcgaacatatattttaattaataataaataatattgaaatatttgctatgttgacaaggtcttcggtcaactctcgatttttgctaaataattataatgaatgaaaaggtttacagtttatacttttgcaaaaaagtgcatcattaaatatactataaaatgaattattaatagccatcaagtaaacaaacaaatttattaataatactttatttcaatttaaaaaactaaatttcatttattaaataaaaatattatctcataatttaatatattcagtaatatattatatatatattttttataaacaaacacataattaatataaattaaatcgtaagaaatatttcttccaagtataccacataaacattaaatattaaatttattatttaatatgtatgataataaactcaagttaatctttgaaaaaaatttatgaagttagttaaaatatttcacttatcagcgtaaacagtttaaatgtcgcgatatgagtgaaaaatgttcaaaatgccactttaaattaaataactttttaaatctttcaaattcataaatctttttaagatgcgcataagcagaatccaaatacaaaattcaaaagaaaataaatagaaagtgaaaatttaataaaatcaaaaaatgcattagataatactaatattaaaatattaaataaataatacgaaaacaaatacaacatagaattacttttattaatctttatctataaatcatatcaaaagcttggcatttgagattaacaggcatgaattttgtattataattacaattattatatatttatttttaatgtaataagttcatatgtttatcctttttcactttttagtccagttttttattaattataatccatttattttttaaatctaatttttacgtaaattttcggtatgattttaaaattgtaaattttaggctatttggtatacaaaattactgaaatattagatatttttaattttttaaaatttgtaaaaaaatatactttttaatatattattttaaaattttataaatgaataaaaaaaatcttacattatttttcagttatttttaatttgttttgttttaaagaataatatatttttaaaaactattaatttttaaaaacattcttcaaatagtaaagccttattatttatatattaagtttattagtttttttttaataaattaacttaaattgccagactcgaaatgtaattcatttgaaattaaaaatttttgtgctgaataaaaatgttcccattcgctccaatcgtcgttggcaatgacaaacgcctcggcgttcgccttggcattgcgattaagcggattaaatttatattttaggtaaattcaaactattattttacaatcatttgcttatcatataaataggtgtacaatatatttgaaaatagtatttctattttttttttattaaaatagattaatatattataaaaattttatatacatttattca

SEQ ID NO: 6817 - DNA, 3840 bp, Heterodera glycines
  unsure (1)..(3840): unsure at all n locations
aggaagagaagaaatggcaaaaaaaggaatagatagggcttgtaggaaagtcgcctttaaaacgatcggcatattcaaaaatgattttgactccggtaggtggttttcttctgccagtcccttcgaaattttattttattggagagaaatttgttaacaaatatttcaatgcacaaaaaataccaggattaagccgaagtaaaatagtccaaataagagatttaacataaataatttgtacaattaaaaaaaattgaaaatgaaatatcgaagagaaaaacacagaaacattggtgggggagggaaaagcgtttggcaattggcaaaatgccggggctggcattatgttccgaagatatcgccaaaatgggcttttgcttactatgcaaaatacggcacacaatgtcataacacaagccaattgatcagtggtcacgtcaataattttaaaattgaattagaatcgatgactgctcagcatgcgttattaaaatatttaaaataataaattaaaacctttaaatattttacgaaaagtttttaaatattattttgtattaaaacaatctttttccatttcatgttgatttcccgtaatattcaatccgtaatttttttgcataatttatgtgtaagaatttatttattttttaatttgtttctttcgtacattagcgaagagatattttaaattttcaattattttttattataaaattaaaaataattttttagtttaaatcaattattttgtaattttctgatatttttaaatattttacctaattagttctataaattttcctttttanatttataaaatataatattttttataacttaaaaataccttttaaataactttctcttaatagataaaaagacaaaattgtttaatccatattgctgatttataaaaaataaaagaaattgaacttttaaattataattcatttttcggtataatttcatggttttctctgttctttagcattttctcatcaaagttgaaggtttttttaattatattttttttagcataatgaatataataaaattattttttgtttgtgcataattaagatttttaatatttatttatttttagtatttttaaacaatatttattttattaaattatttcttttcgtttctttatgtaaattaatagcattcttcccttgtataacatctttctttcttctttttattattgcttcgaaatttaaattctttaagtattttaagttatcatattgcttatcgattcaaaatattaaatttcttttaaatttaaatttttctattgacaataataatatactttttattcaataaaattttgtattatttcttctgatcagtacaacatttggtccctaatatcgggtcccaaaatttcaagtctcccaggtatcgtgtgccatgtgtgaaaatctgttcataagtctgagtttcaaatttttattatgccgtcgagttttctaatcaaagccgaaaaaagaaagatggtgaaattttggcaaaagtttcaatagtttatttgtatccaaaataataaattggtatttttacgacaaactgtctgccccagcagggcccgtcttatttattttttgaaaaaaaaatatttacaggaccggtggttaatttagaaaacgaaattcaaaaagcctcaaattttgtcactttatgataaaatttttttgctgtatatgaagaaatgaatctgcagattaaaaagataaaaaaattcgatttaatgcaactttttagcacttaaaacaaaatgctgcattttctaaatttttctttaatgttaaaagttacatgaaatcgcaaaaatccgcaacccataatccataaaccgaatccgtaattacgcccagccctgcttacaataggtaacgaataaaaacttttatggaaaaaattttaatttaaagcaaaatatttggttagaataataacagattaataaaaaatattttagtttttggcaaaatgatttatcatttatttattattaatatatttattgttttaataaaattacatttatttttctgattatttattatttttcttattcctaatttaaaaataaatgtttactcaaaaagaaaacatttttaattttttttatttatagaggttttcttcgtgttttccgctctaaggaattcgtaggttttgtgccggttaattttcgtttctatttttttaaaactttttttcataaattttatttaaacttataactatataaccattcttttgagtctgctttttttcggtttttatatcaatattttcataattttttttttagcgaatgattccttaattttgttgaatttttttattatttataatagaaaatactaattactctttaacttttttccaatccattaaaaataatgtttgctaattttttgaaattaaagaataatgaataataaacctgaaattttctgtttttaatttatgtatttatttaataaatttttctttttattatataatagcattttatttatgtcccatcgtattcttaaaatgcaaataaatcaaagagaaaattataaaagaaaactaaatttgaaagaattttttttttctttaatattttcttctcgcggtcagttaaatgcgtataaaatatataattttttttaaaatccaatcattttttaaatttattcatcattttttataaagaattagagaaaataaattaattaatataattgatgatgagaaatataaaaaatcattaaaaataacaaataattaataaaaagtatataaaacgattatcatttaaattaataaatattgttttaatcaaaccttttttaaattaatattgtcgtcctacaaaaaggttggaacatgcctagtattctgcgcaagattgaaaatattatagagaaaattaattttaacacataattttaaatatttaatttaataagaaaatagttgagctaacagcattttgttaagtaaaattcattaacaaacaaataatcaattaaattaaataattttattaatcaacctttttaaaatatttatagatatcataattttattaaaaacaaaatttataaagttataaagtttaagaaataaataaaatttcttacaaaaattgtaaagtcgctatctgataatcattagtatataattaactactaaaattaacaaatatataaaagaaattaatgttcaaaaatcaaaaataacaagtttcaatttaaaaaaattggaaaaataaaatattaaatttaaaattgtgttgaaaatattcaaaacatttcattttaattttctatttgatgaaaaattaacaaaatttagactataaaaggagaaggaagctaaaccaaatgaatccactctcgccttgaagtataaatttaaagtgtttaaaggtaattaaagtttttcgagaaacattaaattcgacgcttcatttatatatctaatcaaaatgataaatgataaataatatattaaacatttgaactaatcataattgagtataaaaataatttatttgcagtcaataaaaaaatatatatttgaaaaggaaaaaaagtataaaattttatgtttaatttttagaaggtttttattaaaataattttaatattaaaataagaatctacttcaaaaatagaaaactaaaactgaaatgcaaaaaattaagaaagttttaataaaataatatgaatgaaataaaaaaggtcaagaaaaacaaaatgacaattaaagtggaacattagatataaattattttaattatttttataatattaaatgataata

SEQ ID NO: 6818 - DNA, 1041 bp, Heterodera glycines
ttagatgtaaaataaatgataattaaatgttttccttggtttttgataccattttacaaaaaaaacaaaaatttttttaattggtctaatccttaaataaaattcttacttataaatacatttaattattaaacaaatatgtgttaacaaaatagatttattttttggcgtcaaaatgaatgtgaaaaagaagctggtcagacaagagaaaattcaaattaatttataatcctaaataaattgatcagaaataataaaataagatttttacgagtgccattatttttagagaaataaattattttataaaagtataaagcaaatatacgaaaattaaaccaataaaagataaaatataattttccatgattaaaaaagttaaatattgttgtgtatcaacaatttattaataaacaccaataaaaataaaatgcacaaattgatgaggtcggaggagtgcagcgacggaggagaataaaataataaaaatgtccaatgcgaatgaatggagcgtagagccatgagtgagggaatgggcacccttataaagacgcggggtcagagaaatgtggaggagataggcagagagagagagaatggaaatagtgttggacagagaaagggggagagagaatagtcgataacaatgatgggaaagtgatctttgatccctatccaacacctccctccttaagtcgaatgtccctcgatttgggagtcatgatcggattaagccgtatttaggctttgacgggtccaggtccagtcgttgaggtgcttgtttggctcttcctgatcggcgcaaaagaactggttgagcaggcgattgctgacgatttgtctgcggtttgtgcgcgatcggcgattgttgcggattttgtgcctgtgtctgatcattttcttcaacacgatcattgtcttccaattcaattgggaaacgtcgcctgatttggttggcatgacgatgaatggctcggccaagcgtcggtgccaaaatgcgatacgtcggagatgtgcctaatttctcaataatttttcccg

SEQ ID NO: 6819 - DNA, 2442 bp, Heterodera glycines
  unsure (1)..(2442): unsure at all n locations
gtatatgaagaaatgaatctgcagattaaaaagataaaaaaattcgatttaatgcactttttagcacttaaaaccaaaatgctgcatnttctaatttnttctttaatgttaaaagttacatgaaatcgcaaaaatccgcacccataaatccataaaccgaatccgtaattacgcccagccctgcttacaataggtaatgaataaaaacttttatggaaaaactttaatttaaagcaaaatatttggttagaataataacagattaataaaaaatattttagtttttggcaaaatgatttatcatttatttattattaatatatttattgttttaataaaattgcatttatttttctgattatttattatttttcttattcctaatttaaaaataaatgtttactcaaaaagaaaacatttttaattttttttatttctagaggttttcttcgtgttttccgctctaaggaatttgtaggttttgtgccggttaattttcgtttctatttttttaaaactttttttcataaattttatttaaacttataactttataaccattcttttgagcctgctttttttcgctttttatatcaatattttcataatttttttttagcgaatgattccctaattttgttgaatttttttattatttataatagaaaatactaattactctttaacttttttccaatccattaaaaataatgtttgctaattttttgaaattaaagaataatgaataataaacctgaaattttctgtttttaatttatgtatttatttaataaatttttctttttattatataatagcattttatttatgtcccatcgtattcttaaaatgcaaataaatcaaagagaaaattataaaagaaaactaaatttgaaagaattttttttctttaatatttcttctcgcggtcagttaaatgcgtataaaatatataatttttttttaaatccaatcattttttaaatttattcatcatttttataaagaattagagaaaataaattaattaatataattgatgatgagaaatataaaaaatcattaaaaataacaagtaattaataaaaagtatataaaacgattatcatttaaattaataaatatttgttttaatcaaaccttttttaaattaatattgtcgtcctacaaaaaggttggaacatgcctagtattctgcgccgttccacgtattcgacacgaaatgcttttgctaattctgtgacggaaattattgtgccaccatattatttttgttcaacttattatatattaaattatagaaactttttcaaatatatgagcagaatgttatttgataaatgtaaatatattttttaatatgatagaggatttatttattgattgcttcataagtttaggcgtttctcatcattatcactatataaacattttttgtgaatttttattgacaatctcagtagaaaaggcaaaattcttgcccatgatgtttttttctatatttttaaatttaaattaaacacatatacattaatttattatttctagagaatatttgttagttatttgccaaatgttcaataaataatatattttatctaattgaatgaggcacattactttctgacattttatttgtttattggtttaagttaagatgagaaattccataattttatttaaattcataaattaatttttttaatttttacagaaaaatttgttttatatatctgaagatgattttaagagcgccagcccttgtttttgaactataacttttttctttgacaacctaatctaataatcttggtatcattctatagcccttcagaagtcctattatacctactaaaaagcaaaaaaaaaatttgacctggaaagaagttattaagaaaaaatcacaaccattttgacttttttgcaattattagataaaacttttttaagaatctagtaatccataatttattgttcacaaatatatgcttttgttgatttatttataaatgatacaattaaagaaggcatagattattattttttaaatagcggattttatacaatttaaaataaattaacagaagattgaagaaatggcacaaaatacggtggagattggttggcaaaaatttaatatggcaaggaaaatgacaaaatatcacaaggcacagaagcaaagtgagatgcattaggaggagagaaattagaagaaagaggataaatatgagaagagaattggaagagataggataaataatattacattgaaaaagcaatttacaacaaaagggaaacaatgagcaaaggtcagaccaaaatgaagtgcaaatgggagagaaacatctcggcgaactgacgactgatttccagcgcaattcgcaacaaatccatgtcaaaggagttgggccgccactgaaaatcgttcggttattgcctaaa

SEQ ID NO: 6820 - DNA, 7378 bp, Heterodera glycines
  unsure (1)..(7378): unsure at all n locations
taaattaaattacattttatttttctctcagaacccccctaccaaggggacgcggagcgggctaggtaactagtgaaaacatattttaaaccctaactgcaaaaacattcaaaattttgctgagctaatttttaattttgatcaaaaaagtattttacagaattgatttttttgcaaatattctatcgctgaaatttaaattttcaatcagagcgagtttgagcacataaaaaacatattttgttgtttttcgcatatatttgggggttgaaaaaatttggattattgaacgggatgtttttgaattttattttttttcattattaaataatcgcttattcttatccaagataaggtcaatagtagttattgtacgtatttcatcgcagggtgtgaaacagggatgggccaaattgaaaaataaaaagcgaaatgcgaaaagcgaaatttgcgaaactgaaaaatgcgaaatgaaaaaaaagcgaaatgcgaaaagccaaaatatgcgaaatgaaaaaaaaagcgaaatgcgaaaagccaaatttttttcaaaaaattttacgaatagtcaaaatcatacatttntgagttgtgatgcaaaaacaacaaaatctctgcattttccggagtcaatctttttctcagatcattaattattaatcctgcagcgctaaataggcgctcactttctgcagatgtcgccggcgcggaaagaaaacgatgcgcaagacatgtaagaaggggccattttacagcattgtcccccgttcagtacccgtatgggtcagagtcgattgggaatttttttgtcatgcaaataatcattgacttcaacctttaattaaaaacaaatagattttgaaaatttaataattatgacttccgctttttggcggttgttcagtgtttctggactaggtaacggttgcgcagtaatgtctaatccgcattctgtggcaatattttgttcacatcgggagaaaagatcatggaattcacttgagccttgtgattgaatttgatcagtctcgcacacttcagttataattaaatcctgaaaactattaaaatataaaaaatttttatacaaagcaccttaatgttttggacatttctgcttcatttgtaagccaaattttatatcgatcatgcttttctgcattcaaaaaagaaagtttgaaacgagggtccaaaattgtcgacagaacaagctctctgctttcatcccacgaaaatcttttaacgtttccactggcatcaatttttgcatccattcgatgcttaagcccatcggtaattgccttttttacatgtttcaaatcgccttcttcttcaagtgcaaagcaaatcactctgaacaaaggaatcattgcagaaattggcgttccacgtttttgtaagtcattagttgccgaatgaatttgagaaagaatctgtaagaacaattttatcaaattaaactaggtatttgctacttttctcaatgccgaaataaccgtccattcgttggacgaaaaccgtggcaaatcagtgtcttgggcacataacaaatttgttgcctgtcgattaaccaaaaaacgatcgatcatttgaaaggttgatgaccatcgaacctgaaaaatacaatttttgatatatataattcattcagcacttcagtgtccttagttaatgataatttcggcaattccagaagtttttgtaaattctcaaattgttctttctgtacaggcgattttttaagctttctgacaaattttttaatccgttcaagaaggctttttgtcgattcgtcatcattcaactttcgaacaccgtcccaaatggcctgaatacataatttaaggttacataatgcataaactatatttaaccaaattgcatttgtgcgcaaagcaatcgattgattttaagccaaggtcggtacaaactttgaccatcacctctgcagcatcccgtaaaacgacaaaattttttgacttttctaatgaaaattcaacaaaaactttcattaataaatcctttaagacagtagcgttatgccgtcctaaaatttaataatttaatagaatatgatgacatttgttaacctttaattggcttagcagccaagacaacgaattttagttggccctcgtaaatgaagtgacaggtaactgaaagaagagagtgcgctgcatctttagaactccaacaagtggctgcaggtccactgcgatcattcccattattttggtgtttatgattgaagttttttcgccatctttttcccatgggcctaaaatcattatcaataaaaacaaaaacctaaatggaataactttttgcttgtaatgagtgcagtataatcaatttaatgtgctttggaggccaggggtgccattttgccctggaaacccggcatttgccgggttttgggggtccgtgccgggtttttgccgggtttttgaaattgccgggtttttgccgggtttttgggttttttgccgggtttcctgtgtccactcatttatttgaattttattaaacatttcgccaaaattaagaagcaaatatagtttttgttaattgttcaggtttattttattcatttttgatcatcattttctagtgcgcagaatgtcccaaaaatctatttctgatttcatttccaaagttacatttcaacaatcatcttcaactcaaatttccagcgctgaggaagcaatttcagatttagccgtttctgtctcgagtgatgaatttggggtgatttcaacaaattgactttttacatagcaaagttcagatcacctctccaaaaaggaagaaatattcgcacaaaaagcctggaggaggaatatcaaattatgattctaaatatacagagaaattcaaggcagattccatccaaaaaagcaacaaaggaaatgacaaatttttttgcaaagcctgtgatcaaaattacaaaatacacaaaatgggcgaaaaaataatcacggaccagatcaaaaccaccaaacaccaaaaaaatttgtctgaacttaacagaagcgtgcctttgaccgattttgtcaagcaaaaatcggtagttcattttgggactcagtaattaatctaattcaatataattaaggctactgaagagaaacgttgtctcgccgcagaattaacactggcttaccattgtgcgcgtcacaatttttcaaaggaattcgaaaacagtttattaggtttgggtgaaatggtcgtctatagggcaaatggtgtagtacaaatggtcgccagatagggggagacttgggggtaggccatttgagcaccaacaggcgctcaaatggccggctgagcgctggtactgaaatgtcccggcgctcagatggccccagttacctgaccttacactacttataaattaagagtaaaaaatcaaagtaaaatttattttaaaaaatggtaacaaaattttatttttatcattttatggtcggtcgatggttcattcatttttttgaaaattgaaatatttaaaataaagtcaaacttttgatgaaataatataataaaaaaaaacattgatttatattctgtattactccaatttaaaaataacaaaaatgcatgaaaatataaaaatttggattaaattatagctaaataatattgaaataatgaatacataatttatcatcatatcagtaatttgataattgaaatgatgtttgattaaaaataaaaatttcattcacatttaaaaggttaataataatttcgttttgatacaattaattaattcagatagattaatcctacaaatgaataactccataaaagtagaacttctaaaaatatactaaaataaaaatatgcgtaaaattatattatatagcaatcggacccgacataattccccgcagccatcataagccatgaaatatttttatttaaattacaattgaaatgaaattaataattaattctaacaaaaataataatttaagacaattattaattttattatattatagataaaggacctgatttgctaaacaactagcgaataattatcacattaaataattgaataagaccatttaatttaattaaaaaaaaccaatgttttttgttattgaattaaaaatatattatgatgcagaaattggtaaacaatacaattagcccatttatataaattaaaaaatcaaaattaaaacagaatttattaaagatcaaaggacctaaattgctgcgggaaaatttttgagtattttaatgctattttgttaagaacattgcttaaaatttcaaaaaatttactgaattttttactttttgggtttcggggggggggggctttgtcccccgcagcccctggcgatttgtgtgtgtttttagtcactaaaagacgcggccctaatataatccaaaaattaaagagccaaaatgatttttaaaaataaaaataacagattttattttattttttggaattttctattacttggacatttgcttatttgataaacgcatcaagacgaatttatgatttttgttccccaatatttgttcccattctctttattaataaatataaatatttgttaatttcgactaaatttttcttcggatcgaatataatctaataaatttacataactaatacataatacagcattagaacatattctacaaatacaaggaaattaatatgaaaaatatttcattatttgtacatctattccaatcgttggtataatggttgggagcactcaagaaaatccgaaaaatgagaaaagcaaaccttcaaacaaaaaattattatatgatataattttaaattatatatttgtgaagttcgagaattgtttgatgcataaaatgataatttttataattatgcctaattgtgggtgccatataaatttaaaaattttaattcaggtcccggaaacaactcaaagaaattctgtgtgatacgctgtgtaattatattataaaaaaataaaagttgtgggccaataaatcaatcacaacgaattcaaaaaatgtcaaataaataatataaaaattacgttttttttggaaacaagaactcattgagttttctcatgttttaaatcaaaattttttaatcaaaataaattgcttaatacatttaaaataaaaacatgttgaatttaatgcattatttaaatgtaaaattaaattatttcggaatcataaaaacggatatgccacgaaagaaaattttaaatttacataggtttgaatttggtgtattgaactgcaaaatgatttttgagtaaaaaaaaaagtaatgattttgagtaatataaaaataagtaattgccgcagctaaggtattaattttgaaaagatttattacaacagcataattattaaattcaaaaataatttttatactatagaaaaaaaaacttttggcgttagttgcaaagagcactattttgaatttttttttaagattctaacataaaagccattcaaaaatttggattttcgactttttgttcgaatttggtttcggggtttgaacaggccaaaataattgtcatattcgtgatcagagacctcgaaagatactataaaataatatttattttaaatataaaaaaaagcaaaagaattaaatcaaaaaatgacaacaaaatataataaaattacaatgaaatgacttaagatttaaacaaaattaatgaaatatttgtaactaatttaaatggacttgcatttttggtagtcttgacttcaatcaaatcattgaagaccaccaccttactcatcagtgacccgttttttcttaatactttattggttacagtaactgctttatcataagaagcaaataaaaaataaatagcttaaatacaattaacaaataatattactaatcctattgtcaacaataattgatatttaaactaatttacaaataatattaatgttttaaaaaaaacaaataacgccgaaaaagagcttaaactcaaaggcaaaaaataaacagtcaaaaaacaacagtacacacaatcgaaccatggacatgatctgtttaaatttattcttataacaatttttttaataaatctagtgcaaagaataaaatgtgaatcattgtgaaaaaataaaaaattgaaataatttattaatataatattatttgaataaacaataattattaaattatatataatctttagaacaataatattatttatttatgaaaaatagaaagaaagcatttcatttttacagtgtattaatacaatacacttatgcttaaattaatattcttatttttgttataatatggattcatttttttgaatgggattgaaacttttgataaatatctaaaaatcaagtttaattggcaaagctttatattaacaaaaataacttatattatgtaaattaaacataattacagtaataaattgcaagattaattataaaattattatatttttaaaattttgactaaaagatgaaaatttaaacataattcaaaataacaaaataatactattaatatactcatatttatacgaaaattattattaggatcaaatatttaatgaaaaaatataaattttaatatagcctaaaagtacattagttgttgtagaattagggaaagcagctgtaccacaagatctggaacaaatgctggaacaaaagctggaacaagagctggaacaagagttaaaaaaagttctggagcagggaatatttaaaattgtaaatgtatagctgcaaatttatttccataacactataaatgcaaaattcataatcaagtataaaagtaaagaataaaattgaagaacattttgaaaaacaaaagcaaaaaagatgcaaattaattaataataattgaaaaaatgcttgtataaaattattaagcattcattttttacttattccaatttttacctacgtaataaaatattcgagatttcgaaaaaatcaattattttcgaaatgaaaagaaataattttctgaaagtaactttttatataaaagattacaagtaaatntaattagaataatatttttaatttcggtgcataatccaataattttcttcaaatttacacatttgataggatgaagtttgcatacaaaaaaaatttttttttgcttttatggatttaaatttttaaattattcatattttatataatgaatttttaagcatagtttaattcatttttagtcaactgtattttgtttgaataatttatttttagtttcaataatataataaatatataattttttaatattttatataatttttaacttttatgcatttttagcggaaattcattagatatcattaaaactttattttcgtgagtcgatgatgcaagtttc

SEQ ID NO: 6821 - DNA, 2159 bp, Heterodera glycines
cccccccccctctcccaattaaccgctctttttttctatctaaatttgcatttgcaatgaacgattgtggaattcttaattgtaaaaaatagcttatgttggcggaataaataaatacattgggaccaattcaaataacgaatataaattaaacattccaataaaaaaaaaattttttttaaataaaaattaacacctgtaagataaaaaatttcatgctcaaaattcatatttaaataattatttgacaattatttttttcaataaataaaatttattttttgatttaacaatgagtcaacagacactgatgattaaaatactttttcgcttttagtctcaaaaatttaactcaagtgaacaaattgataattttgatattattaggtacccgtagtattctcgtagccggcaaaatttcaaaaactcggttaactatcaaagaatttacagcccaaacaaatatttaattaatgaacacatttgataattttgtagtaatgaccgagcaccactaaaagcatgcattcctgagaacagtaaaaaaattcttaaaaaataaaaatgaaacaagaaaaactcatttatttaaaaaatttatataaaaaggttgaagatttacaatttgtttttaaggcacttaaaatagcaagagttaaaaatcacaaaatttgtttcatatgttaagccgctcattaattcattctccgtcaatgctgcttaaatattccgccaaattaattgtgacaaaatgcttatacgataattatattaacatcgatagagcaatttttgttaatgaaaatcgcagacattgccgttaactcactggtaaatcttataatatcttgagcattgactgtttattttccgaaaattgtaaattaaaattcataattttttttaatatgttttgttttctatgcttttacgcttagctcaaaaaataatatttgaggagctggcatggctaaacaaagcctgatttcaaattaatctttaattaaattctctctgttttggttaaaaattgtattccttgtttaattattattttgttgtagtctctttaactaatcattcagtaattactaattctcttcccccctgatgccatttctcgaatacatttgaaggcacacggacaacaatattagcatcctctttgccgcctcgtatttgcatggtcaatgcctctttgttggcactgatgggtgccggtcaacaaaaggtccgaaattggatgctcatcggcacaatgactctaaaaaattttaaataaatcatattttatttctgttaattttaaatttatgaagggcaatgactattctgtaaagaagaaaaagacgaagaaaaaaacttggaaaaacaaacagtcatttgaatttggatcgagctggaaacttctttttttaatccattaatctatatgtccaattattgatctattattagtaccgaaaacaattttgagcattttatttttgaggaattcaattatttaggtaattatgattaaattgccccaccgcgaaccattgaaaacggccatcctttgtgcgaaagtaaagtcttttccatgtctcatctgttccgttcacgtgctcattgaataactgagaatttgcaatggaaaatttaaaaaagttttatttttatttaaaaatttcatttatttttgaaactaagcaaaaaataaataattatttttgcaatttcagaaaaatgtaagcaatattaaaattgcaatttccctccacacctccaaatgcccttccattggcttgaaacgccgattttccactaatgggttccattcgacctgaaaattgacattaatgaatttacatgttaataccaaagattttcgaattatgaattgcttgtgaataaaaattataaatttaatttaaaaaatttaaaaaaattatagcaaaaagaaaaaaaaagttaaaaatatttaacacattaagctaaaaacaatatatcgaccttaaacagttggctggcaagccaatgaattggccgatcatcgaccaaagaaccatttgggatggtaccatccgacaaatgttaggatgaactattttccattcaaaaacaaaacaatctatgaaagatgcctaatatcccttaaaaaaattaatattggatta

SEQ ID NO: 6822 - DNA, 1566 bp, Heterodera glycines
atttaatgaatctaaaattgactattttttattcattctgaaaaataaaacgaattttttcgaattttacattctttttttgtgcctatttcgacattttgggggtttttcaggactttcggaaaaatacttaacaaaaatggaataaaagtgagaatctccctttttagaaaatataaccccctaagaaatgaaaaatttaatgcctatttacgattttttctgcctttttttttgtgcctatttcatgatttttttatcctaatatggaagcaatacaaattacattcgccgctcagaaaatttgtaagatcgttatatctgtctgtacctatataaatgattctttttttattttgttcgtcatagagatttttttaactatatatttaaattatataattatttcattgttatgaatgtttagtgtaattgtagcacgacacaatgtgccgctgggttccaatgcccagttcggattcccatcgttctgcttggcaatcgaccatttgcacaaatttctttttttgccaaaaaaataattaggcaaatattccagagcttaattgaaaaccgattaaaatagaattgtgtatttgattaattagcgaaaataaattccccaacattcttgaaaggttttaataaatttaaaaaaataaatgataaggaaaagatcagaaattacgtatttgttaatgaattttcgaaatcaaccagctgtcaccacatttacagttgaatatagccttctctacctaaaaacattttaaatttgcttactttaccaatgtttgtttttgttgcacctctttactgtaggatacagttttagccgcaaagtcttgcatcagaccacagtcacctgtcacattactgtacacaattttcatagcaaaatttccactttcgcttctgaaaagccttttagttcattatctaattagtaaatatcaagatagaagcgagcttaaattacaaaaatgtcggaatttcattgcttaaaaaattaattgggtgaaattattgatattattctatttaattttgctacaaaaggcttcggtattcccaatgttttttaatcggaattccgttcttagatcaatcaaaatggatcccaaccctagtacaatacattggctgaatcacatgctggccaaatgaggacagtttgatttgaagaaatgtttcaagtaggcccagcttaaaaaattcaattagcgattataaaaaaatggcgctactgaaaagaaggagtccctttgaattttattaaatttaaaaatcaaatgggagcaaatgaatcattttgtcgaaactggccagttgcgtctgagcctgtttagaccaccataacttttttctttgttgaccaaatccaacaatgttggtatcattcgaaagctcttaacaagctctatcggctttcccaaaaatcacaaagatataccgacaaatataaaagttataaattaaaatatgcaaaaattctgactttttggtagtgttcatgttgcaacttttttataagttggtcaatcgcttagcaatattttatcaaaa

SEQ ID NO: 6823 - DNA, 1829 bp, Heterodera glycines
ttttgtttgcataattttttttaagatgatggctagtcgagtagacttattcccggtgggttttcgtgatcggtgatcacgaatcatttatcactccgaccaatttcgaattccttaacccaattcgaaacaatagtcgaaattcgaaaaaacgatgaaatctttctatgtcttttatataatttcaattagcgattcgtgatttgtcaaaatttatgtcagtttcgcaataagttagttagtacttacattgactcaattttgggctcccagtcaaaaagtaaatgtatgtgtgacgacgtcgtttttgtaagatagtaaagggacaaatggcggaggttcgcgtcacttgggcaacatgaatatttttttaattaatttttgttcaaaaaaattaaaaaataaaatttttggaaattttttttgaaggtttttgccaaccgaattggacaacaagtcccacctgcctcgccccccccccccctgatttttaataaaattcaaaaggcgccttctttttagtagtgccaaaaaacgacatcaattattttgttgtcacctttgtcaccaatgagatgtaatcagcttgtacagtatgctcgttgtacggttggttagtcacggcagtaacagaagcgctcgtgcaacccatttttgttgaaacaattagtgatggtgccaatgttgtggtatttgaagcggagttcatcgcaacaagttccttattacttagaatttttgtaaattctatagtatttgaaaaataattttaaaatatttgcgatgccaataggcgtcgctaggaaaaaataggaatttttaacgagattttttgtatgtaaaattttgaacatcaagatttagacaaatcttaaaagtttagggcatttatttgcagtttcttagattgcctatctcaaatgcaggacaaatctgaaaaacctgaacacttggcatcccttttattttaaaagaaatgttgaacgattttttaaataattcgattttggccaaaatttttgtttttaccattgtttcgttaaataaatgttgctcatctttgtcaaagtggtgttgttcactttcttttcgagccgatgcgctaaatttttgtttcaaataaattaatttactggaacggggataacgcaaatttatgttgagaattggaagggtggttttttttttggtatttgcggcttataatgtccactaccgtctgtcaaaaattttataaaatttaattagtggtttcatgttgctgatcacgttggcaaaatctcattaaattcgtccgtattccggcgaattgatgatcatcagatgacatgaggtgaaatgttaaatcgtgattagcgacccttggaaaccgaaaaatcgaaaatttttgaagggttagcttaatctgggagcatttttttaaatcaattatttcaatggatcgaaactattcaatatgacttttattttaaatcagaaaataattacaataattttcctcgctgtattggcacatctgctggcaatggaaaagttgaaattggtggtaccaattgtgatgattgacaggcaaaaatggttgactgttaaaatataaataattggaaattgatattaattatatatttttaaatactttttacccataaagtgaaaatcgttgcaataaaaattatttgaataacgaacatttttaattttttttcttaaataatttttgacgccaaattatgtaatttatcaatagtttaaataacattttttggcttcatagaatccaaaaataggaatgaaaaagtctcctccttttccgggacaataacatattg

SEQ ID NO: 6824 - DNA, 2873 bp, Heterodera glycines
  unsure (1)..(2873): unsure at all n locations
tccgccgatctgtcatgaaaagtgaatagctgtaataaaatgctttattatacgaacttttgtatgcgaatttttttattttttataaatttattatgtaattgtatagctaatgaattgaataaaaatatttgatctttcgagattttccgagcattaatttttgaatgatttattcacgtgttaaataaaaattttatatttttaattaattcaattaattccttttgttggaaatttaatttaatctaaaatcatatatctactctttatggagcttaaaataagcaatataaagtaaaacacaaaacaaaataataagatatgaaattttatttaaaattttttgaaaatttaattgattgcattaaaattattgtgtcggattttttttattttaatgaattaaaaatgatttaattagcttaattatttttctttcaggtgtaacataaatattatattcaaatctaaaataaaataaactaaaattaatggtggttatttaatttgatttaattctttttgttaacatttattaaatgaaaactgctttatattaatgtggtgctaaattagtagcttaaccataaaaccaattaattatgtaacacagtgttttattcaaaattaaatcacaacaaatttaaatatgtattttaaaatgtgtattttcaattgttcaacccgttttgaacagttgtgtttggcattaattatcctgaatttattggttttcaaattttacatttcattttctttctcctcctcctgtgcattttgctgctcctcctttattaaaaaaacagataaaatattattaattttacacattaaatgagacataattatgtaatttactatcctgtcttccatttaaccactatattatatcctgagggtattggacttgtgctgggattttctcgaaaatctttggttataacttttttggagatgaatttttgagaaatatttcatttcttacaaattaggggtgtatttttcgtttttattgcatttttgttaataattttggacaaaacaccaagagttgaaaatattttttttctanatttttttttagctgctccacaaaacattgtatagggcatgggatacggtattcctagtctcttgtttcttgaacagttccactacagtatccgnaaaacgttgttcagcttcacagcaaattcctacctcgtncacatgttcagtatttctcttttgcgctttgcgttttcagctcaccgtagctgacattgtaataatcttttttggcatcaagcttcagatatgcatatctgaaaaaacgacaaaattaaaaaaataatttcttaaaattttctaaattttcacttactcatcgctgacattttccaactgaagcgcaagttgttgccgaatttgtgcaaaatcttgtcgcattcgtgggtcaccagtccaacatgagcacatcacacgataacttaaatatatatatatatatatatatatatattcacaaactttttagagacatgaataggaccgtgggcgggttttaccaagacttttacagatgaacctgatccggatatatttcaaaaatgcacccggatcaggaatttttcttgaaacccattcattgatcatgaattcttaaaaaaaatttataaaactcagcaattttcaaaaaattttgttttcttgagttttttaaaaaattttcgaagatttttctcttgaaaatttctatgtttgaattttttttaaagaactacggtaggggggggggggttgggaacagaccaccttgaacattttcaatattcttttttttgaaaattatactagtcatcgggacaattgtctggctgtatcatccgttttccagactccaaatacagtagcatttcatcaggttgcatcccggggtacggtgtgccgcccaatgtaatgatttcgaacatcagaacgccaaaagaccagctgaaatggtaaacaaacattgaaaaaaagaattaattccttcttgcaattgacgagatattgaagaagcatttaaaaatcttaaagtgtcttttcgaaaattatttaaaaaaattaatttttaatttagaaaaccctaaaaatgataattatttcaaaaatatttaaaaataaattaattttctcttttagcaaaaaaaaaattgtgaaaaattatagaattttttaagtgagagtgaattgcttcgccgtgctcgaacattcattagtcagttatggcgttagtcaaaaaccatcaaagggaatttttttttcataacttctttcaaaagtaaccaaatttttaattttagatcattcgatagcctatctttttcaattagcctgcaaaatttcaaaaagattcgttaaatttgaagaatgttatgaccaaaaatgctcaaaaaaacttggtttttgttttttgtcaaaaatttttcatttgatggttttgactaaagtcccagcaccgggcattctctcttcaaatgcttacacgtcagaactggtggtaaactcgtaatgccgtattgcctcgggtgccatcctgaaaatatgacaaataatttataatataatttaaataatttatgaaaattaccatttaattggcaaacgccctcctcggctcttataattggagctgtccgcataaatgaaacggcacagaccaaaatcgccaattttagcataagttttgtcctggacaagaatgttacgagcagccacatcccgatgaacaaatcccttttggctcagatattccttaaatttaagcatgtttaaaagagtggaaaaaatttaaaacttcatggtaaataaatgaaaaatagtgaaagaaaattgtgcttaaattatgc

SEQ ID NO: 6825 - DNA, 3950 bp, Heterodera glycines
taaaaaggaatcaaaatcattgaaaaaaattcaaattatttaaaatagtgttacttgagattaagccaaatcttctcttccattcataaattgtgctatacaaaacgccaatttttcccgctattttcttttcaattttccaattcgttggtaaattaaatttttgtgaaaatgcctttttcacgcttttaaattgtttaattttttcaatttgctgactttttgtaaatttcttgattaaaccttaaagggaagaacggggggcggaagtttgggcaccgggaagtttgggcaccaggaagtttgggcaccagaaatttgggcaccgggaagtttgggcactaaatttaggatttaaaaaataaaattatttttaattgtctataaattgcaaccatctaatttaaaagcatagtaaatttaatcaagttacgaatagaaagtttttttaacgaatattcactcgattaagcatgcttattttgctaaactgattaccattcattctataaaatgccttacatatatatgtattatttgtatcattacaaggctcagtatgttcaagatttaaaatttataaatttaaatagtattagacgggtctcttgtcatttcgggcccaactaagacggtattcagggtctaagtccataaccagtacatgtttaattctacgtttaaacaaccgtaagaattgactaaataataagaatgccaggtttccatataaaaactttttaattttcaagaacatagaaatttttgagcacaagggttgttaaatttactaaattttaatgatttatataacattttatatatttatattgttttatttttttgaaatccctccctctggtgcccaaacttcccggtgcccaaatttctggtgcccaaacttcctggtgcccaaacttcccggtgcccaaacttcatgtcgccatttttattatatattgtgccttatttaagagttttatttcattctgtacattcgtttttgtttttattccaaaaattatattttttgctttttattataattattaaagtgaatattttattttataagtgattttgttaatttgttgtttgtgactgattttttaataataagaaaacggaactgcttaatttgaattgaagagttttggtgcttttggtcattatttcgcttatattttttaatttatgatttattattattattattattatttcgatttataataaacacaagcttattatgaaaattttgactaaaaccaatagtatcaaatccctcttgttcatatcttaaaattttaaagtcttttttaaagtattccttaaacaattggaataaagattttaatgaagaaataatcttttattataaagtaaaaatgatgttataaaaacgtatttccagagaagtttgaaataaatattgtctttattataaataaatttaacagctttctaaattttgattattattttcttttgaaataaattaagttgatcaaaatctgtttaccataaacattcaatagtgaaaatttattattatcttaaattgttttttaaaaatattggcagtgtctaatcaaatgttgatacataacaccgtgttgacattgcatcatattttataattagagcgttttaataattttcagttggccattttttaacaaaattcattaaaaattcttaaaattttcctccggcaccgccgaccccccaaaaagctatcctaaattttgctgatttattgataattcaattttataatgtttttcaataaggaaatttttaaacctaaaattttttatcaagaaaaaaatgaattttggcgttcaattcataaaggtatattctctgaatttttttagatcatttcttaggggtgtatttttccgatttttttgaatttttaatggaatttttcgggaaaaaacgccaaaaaaggcaccaaatcgctaaaactaatctttgtggttttttagaatcaaggagcaaacacatgttttttggctgccttttctatcattttccaaacctttagtacaccattcaatagagtttcaatagctctacaattttactcagaggtgatctttcgctttttctattgataaaaatggtttttgttttttttgggaaaagattaaaaaattcaaaaaaaccgaaaccgaaacggtataccgaaaatttttcttcggttttttcggttttttaaccgaaaccgttcgaccgagaattttttgagtttttcggtttttttcagtttcggtttttttcggtttttaactgaaaccgttcgaccgacccacttgtcaggtctcaaattttaattaattataaaaaaaattcccaaacaagttttatgaagcttaactgaatttgatatattttttatgatatgttacaacagaatatttttaggatttcaaattttcccattctttgtagttagtaaattttgcttctcttaagctgcacttttttatcttgggaaagtattatgcttctcacccagacccctattcttgccagagcttatttagtcccgccgggaccgggactggcaaaaccgggactgggatttctgtttttccaaaaaccgggatcgggaccgggacctgaaaaaaccgggatttgccgccccggtcccggtcccgctcaactctagttgaattggttggatggtgggcgtccctactgcgcgttgctttggaaaggcgtaacatgcagcaaagaaataaaattagacaagtggataaagatagaaattaaagaaatagtgagataatgagagacataagatagcgacagaaagatgagagaaagagggcgttagagtttatgatgtacatattatggtgctatgtcgttattttctgcatatgatccatattttataaatataattaaaaattaataaaaattaaaaattcaaataaaaatttaaaaaatgaaataattgaaaagatcctttcgtacatttaaaaaaaacaataatacatgtgccacatcttttaaaaattgtgttatgctaaacaaactttcattttcagtttttaggttattatagttattcgatggtttactttatgtgctccatccattcatttactattaatatttaataaaatttttaaagttatagatttttaacattcctttataatattttaatttttgtcagaatttatttgacttctattccttaattaaccatttataaaatatttaattatttagattttagaaatttttgaaaataataaataattaagtaaaaatcttatttttttttgtaaacatctgttagaaatcgagcttaaatttcaaaattcgccaggcggcctatcggcaccgccggccccccaaaaacctattttttcttaaaaaattagccaaaaatctctaaaatttggtaattctttagacaaaatctgtgtaatttatgccaaaaggaattgaattgaggcgatacattgactaaaggaatgtggagccatcacatcattcataaaaaattaattttttgtaaaattttttggagttaattcaaatcaaacccccgcccccgcgggggcggaattatcgtgcccccgtccccgcccccgcgactctgacccccgccatcccccgcccccgtgaaaagccacccccgcccacggggtccgaaccctagaaaaaacagataatttctttataccaacttaaatcattattaaaggatgcaacattattattagatttttcattcaattttttgtgttaatttgtaatatttttgttaataagtgtttttttttgtttttcattttttaatcatatttgccctcgtcaaacttcgtaggctttgcgcttgttttatgattataattatatattttaaaagaatgctcttttacctaattgataacttattatttttgacctttcaatgacct

SEQ ID NO: 6826 - DNA, 2460 bp, Heterodera glycines
attcaatatattttaagtatactgattgaaaatctatagaaacttaattaatttatccaattaaaatttatgtaatttatcttacttatagtatttttaatttatgtttcataatcttttttggtaacgcatcctaaggcattttctttatttgtcaacccgaaagagcatcccgaattttcactttgtcatcccgaggacattttttatattaataatttgttatttttgacttcatttattgggggattttgtttttctctgtttttcttttttgtgaatttttaccgcctccgcaggttttttttattgcctaggcactgatggccatcatttccaagcttttaccccactcccttttcctctgtgattgtcccgctttcgcccaggccaaatgaatcgtggttgccaaattctctaacaatccgccgccggtgcttccagaaacacagcggtaggtgaacgcgctgaattagggctaagaacttccttaaatctttacctaaggtaacaaaataatattacaaataaatacaactaaataaagttacataatcatgattaattgaagtggaaaggaaaagtcagattataaattaattcattattcagtaaaaatacttcactgagttaataaaacataagattaaaaaattgctataataatttaattaaggggtgattaaaccataaaactaataaaatgatgaggctgagatgataaccaaaataacaataaatgtttttaatttttatttctaacgttaaccttacaaaagaaaaagttgatttatgctattcaatacagtgattcgaaaacataagtttgaccttacggaaattttttttttgttatttataactaaaaactcgaaaattataattattctccgtaataaatgacagattatctgacaaaaagtgcaagatttaaccgaattatttgcaagttgtcattaaaaagaatgcaataattttaaaactaaacacataaatttttttattatatattgaatattttaaattaaatataatagtttataaaacaaatcactagaacaaagaaaaattattgaatgatttatcaaaaaagtttaatgaatataattttatcatatttaataaatggtaaatatttgaatttcatctccccgaaatggattgccgttaacaattgcactttttcgtcgacgaaaatccaacagtaatattacatacatatatttagataaaattttacataaaattatttaaaattgttattttataatttcataaatacattttttgcaagtagcgtccatttttatataaattaatgagaattagtaaaaaaaaatgaagacatttgcgaatgaatagtcattttaatttcaatttaactattataactcaataaataatgaagatagaaatataacaatataaaggctaatgggttcttataattgaatgaaatgctttaaacaacatttccaataagcaattaattatttctataaaatcaaaaagtcaagacgtgacaagatatttttatcattttacctagaaagtatatttttattagaatatttttgacttaaaataattaatcaaaaatggggcgatcgatagaaaatattgggttgatgaaaaattgctaccccaaaatcagaacattcttataaataagaacaaatggaggccccaagtttaaaggccagcttgactcactcttactggcgctaacgaaatcagatgattaaagtgaaataaaataacaaacaactatatttttcattgaattcaagaattaaaccttaaaatatatttctaattgaaattataaataatagtcactttaaaataactaattaaaatgcataattttaaagaaacgcattaaatttcgaactgtgaaaatgaaatgtcatggagtataattactaattagattgcccttgcaattttattcaaaggaaaaatctgctgtacaaatatctgtccgcaagaaaataaacggataaattttaaaaatgagacttagaacatgcttcaaattagaaaagtataatgaattattaattaaaaaataaaattggatattactttttaaaataaaatgaaaaaatttctatccgtccaatgatgagccatagtaaacaatgagaatttttaaatttaaattaacctttttattattaaatacaaatgtgatagaattgttttcaacaacttttattcttaataaaatttaaatttttacttttttaaaatttaatttaatacgagattaaagtaaaatacttcctttatatagtttaaaattagggttttgaagaagtcattatattagctgctttttaaattttttgagtaggattgttacgagaatcaagtcctggagtgcgttctggacttcaccaagctcaatcgacttaataattgtttgtaattttttattccttcgtttattaataa

SEQ ID NO: 6827 - DNA, 2393 bp, Heterodera glycines
cgcccgtctcagggttgatcaccgaagcgcccaaatattctggccctgttcgacctgtgcccaaaattattttgcaaatttaaacccaaaaataccgccaaagaaggcgtcgtggaagtcaattggtccggagtccgggcagttgtcgaagtacgccttcatggctgggttgtcctccagcattgcgttcaggtggcactcccagatgatttccacctcgaactcccgcgcaatgtcccgggttcgcttggcatcacgggccctgagggctccggccgtttctcctccgcccacaattgccgcatcgtcgggaaagcagcttgggcatccatgccaatagcaccttttgaatgggtaaattggcacatttttcgaattctttccttacccattgacctcgatggccaagtttttgtcttcatcagggcgctccatcatcccgtccaagctgtagttgccgaatttgaactcccctccagggctttcgacatggcgcaggactcggccattctcccgcaattcttcttcggcacgccactgagagtcgacaaaatgtaaaattaaaataatttggatacaccttcaaatatttcctggcgatggagctctgtttgccgcgcttctcgtatcccaagtgtgggatgatggcgacgcgctctttgtcgtggtgagccaactgcacccaatacttcatgcagccggacgggatggtgaccgaatccgtgatgtcatgccgagtctcggacaagaacagctgccgcatctttaccataccatgcgccaggatttgaacatcttcaaaattattattaaaaatttttcttctttttataattttttacccgtcttgcagtagtccgcaatgacctcgctcagctcaaacccagtttcccggttctcgtcgtaccattgttcaaactttgcgcgctctgccggaaagagtccacctgggtaatagtcctccatcggcggaagagtgtccaatacagtgccgtaattttcagcctgtaattttattaatttttattaatttttcaataaaccacccttaccttattgaatttgtgtggaaaatatttcttgttttccacgccctcaatttccagaccaaacgtcttgacaaagttggccagtttgattgggatcagtttgtagctgaagtgatcaaaaattttaaaaatatttaatattcaaaatatttacctgtcccggaaaacggtggttgtgtagactcctgttttgcgggccttcatttccaggagatggttcccctggcggatgagttcagggcggacacccatgcgcagcatttcaccataaatcagcacatgatcgtagcgggaacctttaaattttatttattccaagttttttttaaaataattaccggcgtgggcgtacgcgtatgttgtcaccgactccggcttctccccggcttcttcgtaccccagcatccagttgttctcggcgtcctcatctacggcatcctcttcttcttcgcattccatagcctcgccgtcggtgttttcggcattcttcctctttctgcgcttcttcgctccgggctccatgccgaggacttccgtttcgaagttcagcaaccacttggtgaaggctgccagtgggtcttcgacgaccttgcggcattccacgtccgtgtgccagaattcgaacggggaccaggcataagttcggaatcggccacaaagcgcgcaggccatctccaattcctggtcccatatgcccttttcaatgcacctggtgcaagtcacgtgggcgaagcagaagttgaccttttaatttttcatatttaattacccactcaaaaaattacctgatgcttgaatcgcatcagttgcgggtccggcttgaagttcgttgtacactcaaagtcaaaaaacacaaaacgcttcaccttcttgactttgggccgataggggatgtagcagtcgcgcggtgcgtgaaatccaaggcagaccttgcagaatttttggccacaaatatgaccatttttcttgtcttggtcctgtgaattctttattttttaatttttaaaaacacgaattaccgccacacggtataatacgccacagtccacacatttctttgagcttttgcagaccgacttttcaattgtcgtgttctcgttcccacgtttgaccgtacattgcatgccgcgaacatgatgatcataacaattttggctttttaatgtcttgaaaagaaaattcaaaaattatgggtctcataccttattgcaggataaacacgacacaaagaagccattttcctcaacacaatttcccctaaaattgcgccccactcgttgcaaatgccaaaagtgcgcaggaatgtgcaaaagtgatcaactccgtttcgcttatcgagataca

SEQ ID NO: 6828 - DNA, 4483 bp, Heterodera glycines
gagacagagattgtcgttgtacagaagctcatacgttgcaccatcggcaatacggtagtcgatgttgaagtcgttacgcccttttccagccattttcggtttggcgcacttgctctcgattgccgtgatgtcaattataaatggttcttcaaggagtgatggcctttccttcgctttgttgctttggtcgaccatttcaaaacgcgtcaggattttttctgttgccgagttgtccagctttttaaagtgtacagccacttcgtagtcaaggtgttttgacgtcagaaggaaaatgaagtggtccgcggatattttcattgatttggccccctcggaggcataagaaaggcacatggtgaataaattgcgcagaatgtcctccggaaaaacagcaccaaacgttaggctcatcaaaaattgcccaataaaacggaacgctaaacaccatttaaaaaaaaaaatacctcaatcaatcaaagcacaacaaaaaaatttttttaaatataattttcatagataaattaaataataattttatatgatgtattatttacaaccacacctttaaaacgtcccgcttccgcctgttcggcagagagacatgtaaagccatcgccgttgaacaattccgcctccaattcgcgggtaattgacggctccttctgggccttgcgctcattgttgtccgatggcacaacctgaaaatgtctcccaaaattagaaaagaattttagaaaaacatttcgtaaaaactaaccgagatcggaaggcgtttcataacctcatccaatggcggtgcttcgtccatcaattcggtgccgtcatccccaacaggggaatacggtccgtcgagggtaggggggagggaattgtcggaatattggctcattgttttctttcttaaattaaaaaaaaattcacccattgagtttagttaaaaatgtcaaagaaaatggccgatcaaaaaaaaatcgggcatgacccctctccagggcgatgatttgggccatttttggagagttaaaaacgcgcataggtcaccccctacacgtgtttttaaccttccggcccaagccatcacattggagggcatgcccaccaactatgactatcatagcaagcgattatggaaccgctcatggaactcaaagtgtgtggcactaccatcccaaagtgcaaggattggtctaggcctccctatgttgggtaattactccctccataaggcacttgcgccaacgcccacagcacatatgagttccgtcaacgcgggttttaatccggggtgttgagtttgagcagctgcgcgttcgacactgctcagtgactcgcggtcctccgggccagccagtcccggttattctctcgctgtaccaatgcagcccgtaggcagggcacattagggctaggaaccgccacccccgctgctaggaacaggcacaccttcaccctcaaggccagcgagtgaagggcccccgtccacaccagaccgactatctggctgggcttaaacatcgctgtgacacccggcgggctatgacggaaacatggtttcggtcagtcactgccgcagccctggataccagcggaataagccccgtggacagtgaacgcccgtgcccaccactctgggaagtaacccagtaccggggcaggactcctcggtttaaggatggcccccaggatatttgaaaaggcttaacaaatatcctaaaggggtttagtaccgagtaaaccagcaaaataacaaaatggggtgagaaaggacagtacaaagtacttatgatcaatgaaaatgaataaaaaacaaggggaaaatgaataaaaaaggaaaaaagagtggaaaataaaaatattttaaagagggaaagcaaaaataattaaaatttggaagaaaaaagcggaaaattaatgaaaaataatttttaatttgaaaaaaaactgaacgccaagaatttaattaatttttaaatttcaaaatacagaacggcaagaatttaaataatttttaaatttgaaaaaaacagaatgccaagaatttaaataatttttaaatttgaaaaaacagaacgccaagaatttaaataatttttaaatttaaaaaatagaacgccaataatttaaataaattttaaatttgaaaaaaacagaacgccaagggttgaaatatttttttttttaatttgaaaaaacagaatgccaagatgtgaaaataatttttaaatttgaaaaacagaacgccataatttaattttgaaaaaaacagaatgccaagaatttaaatattttttaaatgagaaaatggggaaaacaaatgcaagaaattggcaagaaataaatagggaaatttggcacaaaaatgtgcaaaaaattggcaagaaataaatagtgaaatttggcacaaaaatgtgtaaaaattggcaaaaagatagggttaaaaattgtggcaaaataatgccaaaaattggcaagaaataaatagggaaatttggcacaaaaatgtgcaaaaatttggtaagaaataaatagggaaatttggcacaaaaatgtgtaaaaattggcaaaataaagggttaaaaatttgggcaaaacaatgccaaaaattggcaagaaataaattgggaaataagggggcaaaacaatgccaaaaaattgcggcaaaatggcacaaaaaactgtaccataataatgccaatctggcacataaataataaatggcaaaaagtaatgggtaaatgggtaaacaaatgccaaagaaggaaaaattaaggcataaataaatgataatggattattgattggcttttccttccgtaaagtgaattaaatgaaatgaaaatgaccaaatggacaaaaaatcaattaataaattgtttattgtctgaaggtgtcaaattacataatgggcatgcgggaaggagggcggcactacaaagtacgcgaccaattaaaaaaattgaattgtttatttggcaccgttccaataaccccgcccccttcataattgatttgtttatttgacccctcctcccgccttctcgccgcccgctctcgccccctgcccccgctggtgacgtcaatttttccctttatgagagcaaattaatgtttattgtccattgccaatgtggccgagtggttagtgcgtcagtctggccgcccccctggggttcggatccgcttggtgcggggaatttttggagaattttaaatgaatttaaattcaacgtctttgacctttaagacgtctaaaataatttaaaattaaataaatttaattaaaataatttgcataaagtcgcgcagtcaaaaaagtcgcgcacccccctgcaataggtttgggtttccaagaaaaagtcgcgcaataggttttggcttcagtactgaaaagtctggcgctcagatggcccgcgatcacttggcggcgctcaaatggctggcgctcagttggcccgcgctcacttggcggcgctcaaatggctggcgctcagttggccatgcacccctcccacgcctatggggggctaccgtaatccggtgaaatctacaagggtaactactaagattaatgaatattttaatactcattttaaattaaattaaattctcttaaaggactttcaatggaaagcataaaaaatgttaaataataaaattaaaaaataacataattaaaaatttaaaaaaagtggtgaatcaatagaatacacagattttttagattacccgcatataaacgatataaaataatccgaaattagttacaataataacattaaaatcaagttatcaagttccaaatagcaatcattgggctaaaactaaatattttaatgaatagtgaatttaaacacattaataaaaaaattaaaaattaagttattaacagcatcattaaatgtggacaaaatattttaattaaaccaaaagcataaaataaaagatttgattttcattctaaacaaggtctaatgttttatgaggaaaaggttaaagtttgagggctataatcatttcaaagatattaaaaagggtgaaaacaccaaaaactctaaaaagaaaaaacattaacccatttcatttcaaaattcaaaggaaaaattaaagagttcgaaaagacttgttaaaatattttttaatatattttttgagtttaataaattttattagaatttaattgaaaagcattaagctcttcggacatttatttttgattattcttctttttattatattaaattaggatttttctttgggtttaattaacttaatttattaaacatttcttgtggttattattttatatttaaaatcccgatcagctttttgccatttatataaaaaatatccgttcctaatcatcaattttctcgttattatttttcgaaattatgaaatcccgtaatcattttccaatgttttgttattttttcgttggtaagaaatacacatcttcatactatgaatttctttgtattagtaa

SEQ ID NO: 6829 - DNA, 2223 bp, Heterodera glycines
  unsure (1)..(2223): unsure at all n locations
aacataaataataataataatttgtatgacaaaaaagatcattaataaatgaaaatgaaagtaattagtcttaattggcttacacatgtcattacgttcgtgtggccctcttgcgtgtcaacgattttttggatttccaatgaaatttggttttttcattattatttatgttttgattttacaatttatatatgaaaaaaatttagttgaaaaacatgcacatcagataataattttatgccaaaacagaaaatgtataattaaaataattaatctgaattggcattttacgtctttgcgtttgtgtggccgtctttcgtgtcaacgattttttgtaatttcaatagaattggattttttgatttttttaaaattatattttgttaaggtccacattattaaaaatgagtaatatacagggtgcggatcgaaaattttcaaaatcagaacatcgagcccaaaaaatcagattatggggtcaaaaatcagaatatttcataaaatagcttaaaattgcttgtgtaacaatttaatcaattatagtatcaaattttgtatttttcgcctcctacgatcatttttaacaattttgaggaggaaataagataaaatcgtctcaaaaaatcagattttttaaattttttgcacacttaatgcgtttagctaagcaggaaaaaaaccattttacagtttaaatttctggacccaattttttaatacctctccttacatattttggagtttttctaactattaccaaggtacctatttttatacctaacttgagcatttttgtatctatttaacgtttttcttccataaaattcacaaccctaataataataataataataataaaataataatttgttttgacaaaatagaaaaagaaaaatggaagtaattagtagtcagaatggtcatgttcacgtctttgtttgtgttcgtgtgaccgttttccgtgtcaactatttttttaaatttaaatcaaattgggttctttggtggaatttttaattataatttgttatactcacacaatattaaaaaatggaaattcaattagcgtgcaacaattaatataccatgattatttttaaaaatataaaattatacaaatcaaataataaatattatcattattttgtatttacttagttaataatttacttggacagaatatctgttattaaatttcggcatttaaaaataatggctcccggacatttcgacaatgaccgtttcgccaatgaccgtttcgacaataccttttcgacaatgccgtttcgacaataaaattaaatatatttttttaaataaaattcaaatttctgcaaaattatatggacggtgcggatttgggatcaatataaaaaagtttttatttcgtttttttcaaaatagcattatgagaatggctttagtttgtcaattttcggcgcaaattgcttatttttttaattaaaaattgaaacattgttttacacctaaatagttgataatgaattagaagcttttaccctgaaaaaactattcttgattaaaaaaacaatttttttttgttcgaattcgggtctggagttcggaattgggcaaacccgagttaagatccgttatcagcaccctcaaaaacgcctaaaacggttcataaatttgactattttttcttttcaaacccacttttgaaatttttcaaaaaatatacaatataataaaaaaatttctaaatattttaataggctaaattttttaattcttaaccaagtaaaaggtatttcacaaatgtttttagtatattcgcttcaaaaaattattcaattattttatcaaaatctttttttgtcatttttcattattttagaacatttttgggaaaaggagtgactatttacacgtttttacagcgcgattttttcaaaaacttttgggaacttggagaagggtacagcggtgccgataggcgccgccgagaaaattttgttaacagattttgtccaaaaaattacaaaattttgcgattttgagcaaattttgcaagaaaaatagggattttagggtccggcggtgccgataggcgccgccgggaaatttttataaataacagatgtagaaaacttactagttttttgaaaaaaaaattaaaaaaatttccgacttttcatcaaaaatttcggaagtcgaaattgtgaccccanaaaatgtcggaaaccggaagtctttccg

SEQ ID NO: 6830 - DNA, 5514 bp, Heterodera glycines
ccaaatttatgggggttttatgcttgttaaataattttgtgcggcgttgtgaaggaagtcgatgatccattagatggcattttagcgcaaattgcggcctttatgcctccttactgtttggggtgtgtcagcataatggaaaagtacctaaaaccaaaaagtgcaaaaaaagggagacaaaaaaaacgaaaatattcatcaaaattggttcggattttgccggattaaatttgaaaataaaaaaaaattggagaaaatatttttcttacttttatgataatttggcagtaattcttttttccattttataaatgtttctttacaaatgcccaattctttcacaaattctttctgtttgccttggccatataattctttaaattcaccaaatcgttcaatgaatttgacctttttctgctcataaaaactctttttcatttttttttctttaaatataattcatttttccatttttatattaatttttcaacaaaaaaggctggtttttgggattaataggctcaacaatttgtaaattctgtatttttttaaaataaatttacaatcttttaaattttttgcttttaaatcgctgtttttgtggcaatgttttttcaaaaaacttttttggaacagtgggagggggcggggtccggcggtgccgataggcgcccccgggggggggaaattgaaatttgagtgcgatttgaataccgagctttattaatattaatcctatttacgacaatctttttataaaaagcttagtgaaaaatcgatttaatgctatgaaatacgtgacaattttactgttggcaaagatgtttagagaaaaaagaataataataaaaaaagattaaaaacaaaaagatattaaataaattcatttaatgcattttgattttttattaatattctaactattaagaatgaatttatggcctttaatattcattattttttgtatagcttataaaattgaatccggcaaaatccgaccaaattttgatgaaatattcggcgatgaatgggaaataaatgaaagtgtagaaaacggagaagaaaatgtaatcaaatcaattggtcaaatgcaaaatgatcaaatttttaaaaatgatcaaaatacgaaagaagaaccaaatgatgaacagaaaagacaaatcatccgaaaatatgaagccataaaagaaaagttgaagcaaagaggaaaatttcaacggaaaaaccaaagcaaaattgagacgaaaattggaaaattattaggcgaaagtcgctacaaaatatacaaatggaaaaaagatttgaatttaaataaaaagaaaaacaacaaaatgaaaaagagtttttatgagcataaaaagagggaattcatacaacgatttgaagaatttaaaagtttatatgcccatggcaaacagaaagaatttgcgaaggaattgggcatttgtgaaaggacattttggaaatggaaaaaagaattggcaccaaaataccataaaagtcaaagtaagaattattttagtgaaattaaattgtactttttctttaagaacatcataccaatgaggacaaattgatgaagatgaagcattatttgcaaataaaagaagcaaatccaaaaatgagtgacgaattaattgccaagaaattgggaattggaagtgcaactctgaaaagattgaaaaaggaatgctctcatccaattgatcagtgatttttatttgatcatgattgttgatgaccatgaatagtttcgaaatttacaatatcatttagttgagactctaacctttttttcgtttctttttatgtcatggtaaaaagattgtttttcaaaatgctggttcttacaaatgattaaacgatttgtgaaatcgaattaaaggaaaattattcttaaaattggttttcatttataaataaataaaaccattaaacttagtaatatatactaattctattttggtttatgaaattcctgaaaaaatttggcggaaattctgggcgaaattcttagaagggatgaaaattgaaataatttgacaaaatcgtttaaattattgattataatcactcttattgggtaattaatggaatgacgaaagcaatgatgaaaaaataactcttaattgaaaaaaaaacagaactcacatgtcccccctcttttgatcaattattgaaaatgaaagatgatgaatgatggtaaaattaaattgttcaaaacttcatatttaatatatttttaaaataaatttgtcaattatgtaaataaaacaaaaacatacaagtttttttttataaatctaatattagaaaaattctgggattttgttaattttatttttaggaccacataaatattcaattgaggataaatcaaaaaagatgaagcaatattttgaaattaaagaattaaatccaaaaatcagcaacaaaataattgctgggaaattgaatattcaacgcttagaaaaaggtaaaaagattattcctcaaatttcgatttatttccgagctttactttaaaatggtgtgccaagtcataaatcccccccccctaccattgaggatttatggacactgccattgaagtgccaaatctacacagtggccaaattttgggctccaagtacaattatgctggatttttcgtcatagtggtctgtgagtttgtcacaaaaggggggggggggtctcagttcgagtcccatgcatgctgtaactgtatttgaggttttaaagcaaataatataagtgaaatgataacacagtttttaatgaagctcaaaaattttttaaaaaaaattttatttcctgtaaaaacgaagaaaaccttttatcgaactgtgtctattcaaaatcgaattgctcttctccattgttttcttctcccgtcgatcaccaatttctttttctaaatcaccatcaataaatgacattgataagcgaaatttcgtcagtttcctcttcagattgatcgaactcatcatgctcttccctccgatcactttgtctctgaattattatatataaattttaaaataaaacaagtttaacgcaatcaccccctccaaacatacagacctgcttcatttcatcaattttgcccgtgtcgaggagccaattgttgacaaaatggtgctccaattgctgcaaaatttggtctgcgtccggcatacacttccacagttgctcaagtcggcgccaaactgaatggagcgcctcgtcacgtttaaattcagattaatgggatagaaaacatttttcaccacaaccctgttcatctaaaaggccaagaaatttgtgctcgcgagcgaagggaacaaaatggctcaacaaaagatgtgccttgggcttctttgagagaaacacgcgcattcgctcctgggcagacaaaaaagatttaaaatcgttgacacgctcctctagctcatccaggtcattcggtgacaatggctctgcctaaatttcatatttagtttgagaaagaagaaaaaagggacttttgaaaatttttggattttcccgaggtgcacaagggttctgcaaattgaaaaattttcgaaaatttgttccctcaaccagaaaaatgagaatctgtgcgatatcgtttgccatcatttcttgcataataccaaacatttcacactgtttttttcagtactggaaaacctcccgtgccggtgacaaatgaggcggtcaacgaagtgcggacggcactgatgcgggaatggaatgtcatgcagtggctggccaacccgtacctcaacgcggtgagaacagaggagacaatgcaaaattggcagaaagcaaaatgcgttcccgctcaaaatttttggattttttaaaatgaaaattgcaaattttaaagctgacttaagtataattcaattgctcccattcaggaaaaggaggcgccatatttggagcgttatgggaacatcaacgacgaatggacacagcgaacggtcgaggcgaaacatcgcaaaatgcccaacaaaccgaaaatccggcaaattgcatctggcgaagtggagaagagacgtgccaatgttggcaatttcttacatgcccatcggacggtggaggacgaactgaagaatttggagcgcagaaaccgatgggactgaacaatccatcaattcaatttccttgtcatttcaacaaatcattgttttagctctacttatatttgctggccacataaaatggggttgttcgtttggatttgggtagttttttgacaaacggcggggggatagcgatgattaggagagaaatgcaaaaaaacgggacaagagagaaatagcacatggaaagacagtgaggggaaaagagagggtgtctttttctgtcccgagcaatgaaatgctacgatctcactaatttgaggtcaaaatggatacatttttttatccaaacacaatacaccacatacaatccgcataacatataatacacacgtatgagcgagaaatattaatacataacacatgttcagagaaaaacatcacatatatgatcacaacatcttagtcttctcttctcgcttatgcaaaaatgagcgccagcacatgcagaacgcgtcccaggagcttgtacgggcccagcaaggcgaagcttctgtttcgatccacctaaaataacgaataaatatctcaaaaataaagaaaacgattttcctacccgcaagacaaccgcggctacacaaattgacgcgccgaactttgcactgaaggaaaatcaattaatgctatggtaaagtctaagttgaggagccccaccttgatctgacggaagagacgctgaaggcaccacatttagttgatgcgcatgttcaatcaaatggtcaggacgagacacagtccatgggctttgcggtggtccggttgatgagcgtcgcggcacatgaacattccttgggctttgcggtggtccgtttgaagggaattgcggcacatgaacattccatgggctttgcggtggtccgtttgaagggagttgtggcacatgaacattccatgggctttgcggtggtccgtttgaagggagttgtggcacatgaacattccttgggctttgcggtggtccgtttgaagggaattgcggcacatgaacattccatgggttttgcggtggtccgtttgaagggagttgtggcacatgaacattccttgggctttgcggtggtccggttgaagggaattgcggcacatgaacattccatgggctttgcggtggtccgtttgaagggagttgtggcacatgaacattccatgggctttgcggtggtccgtttgaagggaattgcggcacatgaacattccatgggctttgcggtggtccgtttgaagggaattgcggcacatgaacattccatgggtttcccccccccccccacacctcagaactgctggaatttatccgagtcaaaactcgagactcaaaacattgagcagaaataccccaaaaatagatgaaatattgaaagacgagattcgagtccagaaaatt

SEQ ID NO: 6831 - DNA, 4927 bp, Heterodera glycines
ataataaattctaaaattttacccaggaaatccatgtatttttgtgttttgcctggacctggattttttttcacatttgacctggacctggatttcatgacaaaaacccaggaaatccaggtttcgaaaaatggcctggacctggatccaaaaaaatccaggcctggacccaggtccaggtcgagctctagctaattcttatttaaatttgccctttagctgcaaaatgtgaatgtgagcacaattcggagcatcgaagatgctttggtgccgttgatcaagttcactttccaatttgatcaaaacactccgatcgatttcgacattggcctcgtcacttttgatccgaatgagcaaatattcaaatcaaaaatgccattaaaatacgagcaaagcaacgcattgtcagcaaaaattgccaaagaaattggcgagttatctgaacagagaaaacatttcggaggaggagaagttggagagaaaaacattgatgagaagctgaagaagaagctcagatcactttcaagtgggcgacattttttaattaaaggaaaataagaaaattttattaaattaatattcttactaaattcgttaaaagccctcggcttcgaaatttttctggttacgccttaacaaagaaactgtaagtctgaaaatgcatatgtgttatatactattggatagagaaaggtcgatttctgacatattaaaatgtttaatattacgggcccataggcaaatattaaaaaagttatggggcctcaaaattcaaaattttgcctgtgttttcccttcagcgataatgcccaataaaaaatgaattttaaaactgttttcttttgctatggactaataaatttatttatttatgttgagtttgaacccggacctccaaaaatttgaatttaaccaactgagccaatgattttgctcatttgcctcacttggccaccttcgctgaagggaaacacagacaaagtttcggcttttgaggcccataacttttttaattcttgctatggcacgtaatattaaaaacgcatagaagtccaccctgctctctctatacaatggtatataacagctatgcatttttcgacttacagttcgggtggttcccttgtataagacccaacctcctgagattttcatattcgctgttgacaataagctatatagagtttaatttttttctttttttaggtttcgaagtcagctcaataattttaaagcgaattttggccactgaaaatacagaaaatggaaacggaaacattttacaaatctatcgcacttttttactgatgatcaaattttgggcaagaggtaataatttaattttcacagaaagtaataataaattaacaattcttttgccattggcactttcagagcatcacatttatgacaacaaattgggcttcttcaatggcattagtctctcccttttggtggccaaagtgatgcttctttacccaatggcatcacttccttttctcattgaaaagttcttcttcaccttctccacatggtcattttgttttaataatttattttttaaaaatttttaataaaattaaattgtcacttttttttattttaaatgtataaattattctatgcatttttttaggccttggccaaccccggtaaagctgacagatttgccaagcttgtccattcttcgctggaacgcatccgatgagagtgacaaacggggggtaatttactcgagacggggcctaatgcccggactgacaatgccaattgtcacgccgggacatattgaacaaaatgccactttcaatgtgaaccgatccaccgcaacaatcattcagcgggaattgcaaaacggtgaatggaaagtcgggacggaattagccgcgggagagaaatttgttagcggaaaatccgggatatatataaaagccgagaccgggagcagcagtcaaacccatatccctcacaaatcagttttgtataaacaatgaaaaacaattatttatttttagctattaaaatcattcgaaattggccgatggatttgcaaaatttgcaagaagaaaaatgggaaaatctgttaaaagataaaaagtttgaagaaaaagtaattttaaaaaagaatatttctacaaattaaaattccaaatattttttcccgcagttttcccatttcattcgcattaattgcaaagccttcgctttggccgacttttacgacttttgcggctacgtggagacgcgaattcgtctccaattgctgatcgatgtcgaacgatttgatcgcattcgattggcccatgcgaagcaaatcgttgaaaagggacaaattttgggagagaatgaaaagggcgatgaaaatgaagcatttccagtgtcaaaaaggtaacggtgggatggcacaaattgaaattggcactattttaagcggtggttggtgggtgaacggcttcaactatattactgggatgttccaattttttatctgaaaatcgttagaattcgcttactgagaaacaaaaactgaacggcacaaaatcggcacacatttggggatacactacacacaaagggtaccaaacattttggggaccgtacatttatggtcccttctctaagtcggactaatccaaaaagtcactctccaaaaaaccgaatttcacaaatagcaaatcgtgtaaaaattcaattatttggataatattaaatttaattaaagtgaacattatcaaaaaatttggctaattgggcttgaattggacgataaaatcgcagcagtgggagatgagtggattcagagattaaactcaatgctttttcatcaatttgacgcgaccattgagaaggcgtaccgaataaagaagaatttggcaaatgaattgatacaaattgaactaaaatcgaaatatgaaaaagatgaaaattattaaatgtatttaaaaaaaaattataatttaagtcatatgtaatttaattttaaaagaaaaaaatgttatagctaattcaagataaatacaaaatttcaacaattttaggttggtaaaaaaaattttccgttactgtatgtctggtttttctggataatattttagaatttattattttgagtggccatattttataacgaacgccctttatgatgttttttaaataacctaaaaaaacatttgcaattggatgcccgtatcagtgtagataatctttgcagttaatttttgtcttgaagttgcttatctgggccttcggactgtttactcagaaattagataattcttgaaatctttagtaaattaatgcatgaaagttaggggacagcttttttccaaaaattaaaaaaaacaatacaaattttttcattgaaaataagaaaatgttgagtctgttttgtgtattgttttgccgcacattctgtgccgattcctccaatctcaaactgtataaacttaccatctttatttgctttgacctagaaataagtgaaaacaatttgcaaagtcgttctcgaaggtgtgccttccttaccttactgcaacagaaaaaaaacagagggattttgggttttattttacaaaaaattcaaaacggcatttttgccttctttttttctacgtgcccttatgatctgatcgatgcgtcgacccatcagcacaatgaagaagtacgttttcctctcattttttgttattcggacttagtactaggtcgttgcataaaaaagggcgcttttttattaaaaaaaaaatatcaaaaataacaatcataacaactgtaaatacaatatcactcaacaaaatagtttccctggaccctaacaacctttctccaacgagaaggaagtttcctaatgccgcgacggaaaaaatctgtgccgatctttgaggtcaggtactgccccaccgcctcctcgacctcggcgtcttcagtgaagcgcctaccccgtaaaaagtttttgagagaaagaaaaaggtggtaatccgaggaggctaggtcagggctataaggcgggtggggcaacacattccaactcaatgtctgggaaatgtactgggttgtcaaatgagaacggtgtggcggagcattgtcatggtgagagtaggggaccgtcaaattggccctgctggcgccggatgcgataagcgatatccaccgcccgcagttggtttatgtagtttggtgctgtttctccccgcccggaattgttggaaccatttttgcgcttgacgaggagaaatcacatccgcgccgagaaattcattcacttttcgcgccgcgggcgccgctttttcgcctttttttaaattgctggtgtaatagcttatgtgcgtgctccttattagcgttcatttttttagctataaaaatttgcaaattgagatatgaacaaaatcaataaactattttgtagacaacaattagcttaacaaaacggtatataaaacattttattatgttaacaacaaaattttttataagccattataaaaaggggccctttttatgcaacgacctagtattaattggtaaaatgcattgccctatgctcacccatttgtctctgccgccgatggcattgcctttggcggtggcgaaattggaggcgcaggcaccgatttttcagccaccactttgctgttgttgaagaagttcagcggagagccgttgaagaaactcaagcgcaacgcagaagaagaagactgaaaatttaaaaatgagaacaggacaaaatcacgccgctagaaatttttaaaaaaattttcaaacttagaattttttcaagaaaaaaatcttagaaaatttttttatacgaaaatttcaagaaaaataaaaaaaatttcgaaaaaacttagtaatttatcataaattccaaaaaaatgaaaatttttcaaatttttattttcatgaaattttcgtataaaaaattttt

SEQ ID NO: 6832 - DNA, 4060 bp, Heterodera glycines
  unsure (1)..(4060): unsure at all n locations
actgaataagccaaatgccaaactgatacgattgctgtaatgtatcacaagcgtcaaaaaagtaaatgtcgcaggaaaataattggcaattttattttagttttttgtaattgccacaaaggaaagggagggaaagggaatgagttgggacgcgaggaatggccaaatgttgtgaaaaaagctaaagcaaacattgaccgaagtttctttttttgtgaataattgaagccaacaagcactattaatgaataaagaatttctccgttatatttgcttttcattaaaaaaatccctttttattttccgttttcacaacttttttttcatttagtttttctgaattgggttaattttttgagttaatttctgagttgacacctttttataaaaatttattattatctaattaacataaatatcactctcttttgaaatatgaatcaattttaagcaaaaataagtaattataatctaaagcctttttatttaagtattattctaatcattttaattaaatcaatagaccccgatatcctgctttaattgcgctcaataccggaccacaatgcccggacctgtctactccggttgtgccggattttcccaaaaatgccggaccgtatgccaacacttgaactgatttaattaatttgcgctaattatataacatccataaatttattagatttcaaatgctttatctgccaattattaaaaatatgatcaaaaagttttttggcccattatttttcgacttggctgcaagcatgctgttcactggcttaattgtgttggtgcttatcaaaacaaattttgagtggctccttttttatgatgtggtaatttgaatttgaatttgaattaaatttgaatttattttattttaaattttaattttatgcaacaatttggctcatgtggctagcaattgcttttatggtgaacttcatttgttatgtgcactcatcagccgcagcagcgcaaatccgccatacagtaaccaaaaataattaattgtatccataaatgacactttaaatagttttataagtgtttgttttaatagacatttttatatatttttaaaaatatttttagagtccaattgccattccgcatccgacatttatctgcgcatttgcactgacaatttgtgtgacaatcggatattgttacatttttgtaatattttttcgttattcaaatataaattgtttataagtaatattattttatcttattttttaaataaattgtactaaagcttgatatttttcgtattagatttaataaaattattgaattttattaataagtaattcttttaatttaattagtctattttaattagaaaatcaaattaaggtttacaaaatggcactttatggatgcgataaagccgtggaggcacaacattggcacaattatgaccttggactccgtgttacgcttaacaatttctgcgttcgctttggtttcgttcatttacataatccaacggttatttaattttaatatttttattacaaataattcatttttcggtaaatgattatttacaaaattcagctcttacgtcggcagtttgcgtgacgattttgatccgattgccagaaacacaattaattttgtgttcggtgtgatttggtgccgctttttgctcctcaaggcacttttcataatcgaggcataaataccaagtatttaaaatgaaaatttaattcaattcagcaattttgtcgcgataacaccgaaatggactccgtcatcaagaatctttgtcctccttacatgtaaaatatttttgaaatatttttataattttcaattgataaatttattaattgtcctacaatttgttcctgaaacaaacaaaaatgatctttaaaatctcaaaaatctcttgctatattgggtgagtgcataattattgaacagctcacaaaacagcaaaattcggttcaaatgcttcacacaatgagtaatcgtttgcattgtatgcgtaaaagctgagatattccataatttatagaggacagattttggcctagcaaaataatttcatctttggaaccagcaaaccaatatttaagagtatttctaaattccttaaaaaggataaaaaaaatgtgaaatatataaaaattaaaatgaaatccaaaattattttaaaatttatttatttttaagcaaaaatggcttccattgcaacaatgcgtcactgaacaaacagcaacagatttggtatcggcttcattatgggcttttaaagtcggcaattgtcacttgtgccgccgaactggtccccgtccttctcgtcggacattggtcagaagattaaaaaaaaaaaaaaaaattaattttaaataaatatttaaattttaattaaaattgcttttaaggattgcctgtggacatgcaaaaaaaattgcccagcaaaatttgacacaccgggcaattagcaaattcaaggtgaagggagagcaatgattaaatgatttctttattcaattaaaaaccctaattaaggtcatcagatggtaccaaaactggttcaaacttgaaggtaaaatggcattaattatttatacaaaataaaacaattaacattaattttgggttaaaaagtgaataaattatatattgaattttaaaaacggcataattttaattttactaaatttactttcttttaaatatattttaaattcaattactgttttttagccgatgaattccccgaaatgcttacgctaatcgtgtcaaaatgctataaaaatgtgatgaaatggcaatccgttttgatctgtgtccttagcattttcctgtggctgttgtgctttcacaattacatcaaagacgacgagcaaagtgttgcggtactcagccaagacattgccgaagtgtttaccggattagtgcaactatgcttcttcataaatgtaaacattatttaaaaaatatatgtttactatactttttattatttgttatttaaatttttaaatgcggttttttatttttaaattcttaaattttcagaaaatttagaaaaaataacttgtttagatccataatttaatacaaaataactaattaattacgcattgtattgtaactttcagcttttcattctcacacgggaaattcccaaggaagggcttgacacggcacgtgctgctcaatcacgtgccgaccacgtgctgctgcttggctcaaccattcttttgacggtggaatgtgtttgtgaggtaaataaaaggacatttaaaaatattgttcaaatttatataaaaaagattttaaatttaaataaatattcaatttttattttttagtgcatagaaatactgcacttctcacacaagaagcaaatgcgcttcctgaccaaatgtttggacattttttacagtattttcacggaggtaataaataataataataataaataattaaaatgttattagattttttagttggccaattggtttgagatttattgtttgaagaagattagtgcgcttaatgatgatttggtccgaaggcttcgcgacactttgccatttgtcgccatttgcggcatcactttgaatttgtccgttttcgtgatgacatatttttacattgaggccgaaaaacaccatttacaggtgaactaacaaggagaataaatctaataatatttataaattaatttatatttaaaatcgtgaataaaaaataaaatcaaaaaatattatttaaaattaaggctggaaataaaattttatttaaagttttttgcttatacgcattgaagaaatgagttcaaaaaacgtatttcagagcaaaaatttttttatttgaactaattattcgtcaataaaaaaaattcttggaaaaaaaatttatttcnaatattttgaggtggtgtcaatatttttgtaaaaaatttggcatttttcgaattttatataaatttcagaaatttttacaaaaatgcaataaaaggatttttacgcgataatttttttagcgatttgcccaaaaaattttccaccaatttttgacaaaaattttt

SEQ ID NO: 6833 - DNA, 1196 bp, Heterodera glycines
tcgtgttttttttaattttagggtcaatattttataaattagaggtttttataataataaatataattcccagccctattatgtaattattttcatcgctttttatgccaaataaacacaaataaatctaataagtatttaaaaaagattattaatagtaatgctcttttaaaggaaatgatcacaagtttgcccaatgattactttgtgttggttggcgttgttgcacgcattttggacaccgccaattacgtgtacacttttaccagcgcactttgttggctcgaagttttgctacggtaaacaaaaacaattgtttaattttattaatttatttaacatattaatttagttataagaagaacaacaacttctttatggttggtaataattttgtgaaagaaggcaatgcaaatcacgcatttgaggaaacggccttttaaaaatgatcaatcccatttaatttaatttttgcatcatttataatatttttataaaaaaataataaaggattcaccacaaagaatttgccattgaaattttcaaaaaaaaactcataaaagttgaaaatttaaaaagaaatattttcgataaaaagaaaagcccaaaataaattgtaaatattcatagataagctgcatgaaaatatttttttaaaacagaggcacagttttcaaaaaaagtctctggcccccccccccccccctcctatgatttttttaacaaataagcattttcataggtcccaaaccaaatgcagtgttttccttggagcttctgatttcctaaatttttaaaatgtaaaatggagtacttattaaaatccttagaaatttcctaaactatttaagattttgctacgaattccgatttccgatcagttctgagttcgtcactcgtaatttcgatttccaaaattgcatccccagccgttgcttacttacttagacgactgtgccaaacataagatatgtcaaagtcaagctatttaggggttcctggacatttgggcgctgaattcatttgggctgaatcgacaaaatgttcagaggacattatgattttacaatcgtttatatgagcgaccgatggcattttcccaataatttgtcaggggtcttaccccccacccccccccccccttttttcatttcgcatttacttttttgaaattttattcacttattttatttatt

SEQ ID NO: 6834 - DNA, 2955 bp, Heterodera glycines
tccgtccgattttgcggaataatgacttcgccgccacttttttttactttgaaatttctgtcaaccatatgcaaaagtgagaaaaaacatttggtattataaaaattcacaacatctgtgacaaaatcattaaaaaaaagaaagaaaaaatttgtaaggaaaattgtcataattagggggttatcaaaatgtgaactgtggaaggagggaaacgcacgaaaaaccttttacctgcttggtttgttactttaggacgaagtcccatatgcatattttgtgatattttttcgcgatttatatgcatatttaatgtttggatattctggtgggcgttactcaaaaaaccatcaaatgagaaaattttttgatataccgtatttcctcgattataagccccggggcttctattgttcaacccccctccaaagggggcttatattcgagggggggcttttattgttcaacccctttccctatataaattcttaaaattttttgctttctgcataatggtacaatttaaatcttaatctgaaatttttgaattgaaaagatttttcattttttggcccttggaaatttaggcgaatgtttgaaaattcataattcacttctaaatgaatcaattaaagtgcaaaaaagcattaaaaatagagaaaaatctggagcattttatacttttagaattttctatcttcaaaatgaagaagttattacataaattttggaaaaattcgttttttgagaaaaaaaaattaatagcgctgttctgaaaaggttttttgaaaaacacgaaattcttcctctataagcttctgtttattctatatttttataagacttgaaaaaaagtacaaaaataaactgattttggaattcgggatcatagatggaagcaaatggtttttttgtgccatgggttcagatccacttgcctgtaaaaatgttttttagggtttttgagaccactaatcaagaacttggcatccattttgcccaattccaaagccttgatccgaactcgaaaccccaaaaataatttttttttaaatgttgcaggcatgtggatttgaacccatggcccaaaaacccatttttaacaaaacaaaaaatatattgggtataatatttctatatttgcttgaaaattttttagtgattttcatcaaaatcttttccagtgcaatttattaacagaaattttttctaagctattgcttcgctattagacaatttccaaaaaagttatacatgaaaattgcgaaaagtcgaaatttttgaagttttttcgtaataaaattttttccaggcttgaaaatcttttcgcttttggtaaggctaatagagcatgttaagagctttcgagtgataccaacaatgttgtatttggatgtcaaagaaaaaagctatcgtggaaaaagagctggcgccgaaacgcgagcgccgaaacgcgtgggtcccgtttgtacagtctttctaaaatattttatgaatttaaaaaaaatactatttttttcagaaaatttttgtgttttaaaagtatttaaaataacaaataaatattataaaattatccataaaaagcgacgaagaaattgatgcagaagtttcctaatattttttttgttaatgttttattaaaacaaattgttcaatagtttttgcacgtttctgacttcaaaagttttgaaaaaaaatttttttgaggggggcttatattcgaagggggcttctatttttcaacctccctccaaggggggcttatattcgagggggggcttccattcgaggggggcgtataatcgagtaaatacggtaactttgctgaaaaaaaccaaattttaaattattaaaagaagctatcaaaagatatcaaaatttgtaaattttgttcattctgggcgaagttatgaataattttctgtcaaaaattttcaatttgatactttttgagtaaggtcatagcacctaattgtcactataagctgattggaccgggataagtgtgatctaactacgagagcacttaaatattttcatatatttagaaaaacaaatctcttaagtttaagtgtgtgaaaaatccgagaaattcctgttaacttaactttggatactgaacaaaaaagggacaggaaggaattttggtaaaaaaaagcgccctatttgactgtttaagttttcttacagtaatgactgcgcattataattaggaaaatataaatgatttacacaattgtttctttcaatttgcatttttttttctaatctaatggcaattttcagctccgtccaattcggattcgccgaaaaaccgttaccaattcgaagacgcaacggcacttatgcttatgatagtgatggccagtttttgattgacggttcaccccaaggaccaaaagccaattcttataatgccggcgatgttgtcggaattggcattaatttggccactcagcaaattttcttcgtcaaaaatggccttcgtttgggttggtgaatagaaattttacggcacaaatcacttagaaactcaatctgcggatagcattttactaaaaacacaaaaaatcatcatttcgctgcctatttctaaaaaaaagtagaggaattcggccttttagcaacaataattgcacagttttcaaaaattattaaaaatgcattaaaactcaacaaattttttgttggcgcgcctacaaaatataatcgtaaaatgaatatttgaaaaaacagcttcaaaccagggcttccatctgtcctggtttgtcagatttgtcttgatttggagataacgaccaaaatttgttctgatttcttaataaactcataattttgaaattttatgacattatatcactatttaatcaagaaaacataagatttatggcaaaatttggtcattttttggacaaaaatcagttaacaaatcgcattaaaattacaaaatttttc

SEQ ID NO: 6835 - DNA, 5791 bp, Heterodera glycines
  unsure (1)..(5791): unsure at all n locations
caaaacgccagtttttgccgccatttgttgccacaaatgaaaaaacaatggcaccaaatttaaagcattgcgtgaaatgttaacataaacagaaaagaaatggagggtgacaaaaaaccattttaaaatattcaaaaataaaattaaattgcattttattagtaaattatcaaagacataaatagtattaagagcaatcaatcaatcattttgtcaaagtgaatgtgaaaaatcacaaaaaaacaacctaagaaaataatttatttcaaattcttattttttggtccgcctattcgttcgtccgacagccaattcaattgtcagtcagtcgaggcaattcagtttgttcacggagcatcgctcaaagcggcgacgccgggcagaaccttgccttcgagcagttcaagactggcaccaccaccggtgctcacgtggctgtaaatttgtggcaaaaaaaaataataaaattttcataaaaaatcagaggggggggggaggggataagatgttcaatgaaaccgaaaagtgccaagaattgcttttaccgcaagtcccaataatcgttaaaaaaagcttggtagagggcaacttgcccctctaaaggggtcgttattttaggtgggaggtgtctaaattttaggaaaaatgacacctaaataaaccaaagcaacaaaaaattacgacatttgggagactcacctgactttgtcctctgctccccatttctccgccgcggtggccgtgtcgccgccacctcaaaaaatagtaaatattcaattttccaattgtatcgtcctgctacaattctgcatttgtgatactatactcacagtaaacccaattaattgaaaggcccgtatccgaagtttagaaaatataaatgaaatgtccatattttaaaaaatccaaaaaaggtaccaattatggttgttgcacccgacttggtcgcgccaatgaccgcctccaacatgcccttggtcccatgcgcaaagtttggccactcgaacacacccgccggcccattccatacgacagtttttgcacgcccaatcacttcggcaaattgtttgagagtttcctgaccaatgtccaagccctaagaaaatcgcattttttgtataaaaattttctttcttttttttaaactcaaccatttttccgtccggaattccatcctttgcgtcaacattggcgaatggagtgccctctttgaactcatcgccaaccacaaaatcaaccggttggtgaattttcacatttttgtccttcgcttttgccatcaaatcgttgataattttggaaccctaaaaatacaaaaaacaaattaaaattttcatcgattttgtaacatttttaataggcaatttaataataatttcctgcatctatccagcataatcgtcctaaaaaaaacattaatttccaaagaattatgcacatatctatggctccaaatttttcagggtcgcacttttggacacaaaattcgacatcccaaggcgtgcccggtccccaatcccggattacagaatatgagcctgttttttgaagaccggacagcccagtcccaagaatgtgagtttttttaactcaaaaataatttgatgaacctcctcgtcaaacagcgatttgccaatggatttgccggtgagcactttgtagaaagtgaatgccatgccaccgcagatgaccatctcgtccaccttgtccaacaaattgttgatcagctgaattttgtccgccactttggcaccgccgagaatggccaggaatggacgggtgggcgactcgagtgccttggcaaaatactccaactccttcttcatcagaaaaccagacgccctcttctccatcgcacagccgaccattgaactggaaaaaaacgccgaattttcgaataaaatttcattttttcggcgtcgctgatactaagctttccaggactcacatttgtataaccaggatttgaaaatacattgtatcttataaatagactattttttgtacattttttccatttcggcacatcaaaatgcgctttcaaccgtttttttgaattccaaaagccgaaaaaatgtatgctaaaatacttacatggcaaatttcatgtttggtaaccccgaaaaatgtattaaaaaaaactcggaatgttaaagaggtggccccatcctggagtggtaatgtgccatcattgacccctcacctatgcgctcgatgcgccgtgccaaatgcgtcgttcacgtaaaggtcgccatgttttgagagagatgcacgaaaggcgttcaccgcctctttggacgctttcacctaaacgcatttttgtatatcagtgctaagcaatttactaaaattgagttggaatcggaaatggaaattgaattcacaagaaaaaggggtccgtcccatttttatgagatttttgtttctaaaaattgtttaggcactgagttggtctcaaattgactgcgtttatcaagaaatttgttctccgcacccgaactcaaatcagcaaattcgatgggtccaattgaaagaatcccataaaaattagtcgtaaaatgccaaaaaatttaccgtttcgccagccgaatttttgccttttccctcctcctccacatgaaaacgaaggttctccagcaaaatgatggtgtccggctttgggtcggcggtcgcattttcaatttctgtcccgacacagtcagtcaaaaagacaaccgtcctaaaaaatgttttttttcaaaaaggaccacgaaacatgaataattagcacacaacaacgtcactcatttgggtcgaatttccgtttttctacggaccaaatttaacactcaaaatcattttgaaaccattctaagccgtcaggcttggaaaaatgaaaaattcatttagaaataaaagttgagaacccgatgttcgggcttggaaatgtcgatgataatcctgaaactgttcaaaaatgtcggcgcggggtcccaaccatggggtcggatacaatttgctttttaattacggaaatccgtttccgtaattaaggggtgcttctaattagaccgtactttccaagcagtcgctccaattcctcgtgcaccggcttcatcgaatattttgcctgtgcttggccgtccggtcgtcccaagtgactcatcaacacaactgactttgcttcatggtcaatggcatactggtttgagagggagaaagaaacattagcatttttaatggagggacgaattttcaaaaaatttaggttagtgaatggaaagaggggggggggggacttaaaaaattcatttcttcaaaaacaagacccaatatacgaatgaaataaatactggcgagcaccagggaagggggaagactcatctaaaaatgcaaaaccaaaccacgaaacggaccaccgaaacgaaaaaaaacccgatttttcaggcgcccatgccaaaaataaatttttctcaaaaaaaccaggggtccttttttaatagaggaaggcatgaagcaataaaaactgactttgattgtcggcagagcggccacaatgcgctgattgctcgtcactttgccatcctaacaattaaaaaaaaacaactttggcatattccaactgttttgatgagtcacccccaactcatccataacgctgcgagtcatcgccgtgtcatggcattttctgcttatgtggtcttggccgtggtatttttgattatgcggtctcggtcgtggcattaaatgccacggcgacgactcgtatcgtgctatggatgagttgggcatggatgttgggtttaccccgttttgatggtggatagttagtttttaccttaattggcacgttaaaatcgacgcgcattaaaacgcgtttccccttaagttcgagttggtcgattgccaatttagagaaagaacccatgcttcttttcaagtgatttaaaataatttttaagtgctaaaaagttcgaagtgtaatgtgatttagcactttattatgcggaaaaaaaatttttggacggacggacgtgaaatcgagtgcaatcaattgataattagggctgggaattgctgggaacttaagtcaactgacttttttttttgctgactctaaatggccttaaaatgacttaaaaagtgttctaaactttgtttgaagcttataacatgcattttttgtgactttttttacttttttaattttttgggattgagtttttgcgacttttttcgtgattttttttgactttttgaggcaaaatttgaattttagtgaataacatgccgaaaaatacaaagaaaattacgaaaaataaatttagatcgataaaaaggcaatgaaacctggatgaattttttcttaattgttggaaggatcacttttttatgcctatttaggtacctatttataaaattaagtgcctaaaaatatgatcaaaatgttattctataaattattaaaaatgggattttttaactttcgcctaatttttcaggactttttttccatttttcgtgacttttttgcgttttttatgactttttggcgatttttagcgacttaaattcccagccctattgataatgctgcattaaattttgtttacttcaaatgaatacatagaactccgattaaacgaaatgtatttcaaattgatcgctctgaatgaaaaacaataaataacacaaacttttcaaatttgtcaatgaaattctctcggtttttatttttttattcatcaacacatcattaatactaatgaacatggctctactgcattttacgcgtccaatcgacttttacgcgtccaatcgacttttacgcgtccaatcaaaagtttacgcgtccaatcaattattagaaattatttaattatttaaaatattggcattaaatgcttaaatgtcaaaatgaagactttgattaatacaacgaaaagatgattagacagggtattgaatacgtatttcttcgagaatttgctgaaaaattttttcgttagatgcgacgcagtgttttcaattgtgtggccaaattgttaataaaaaatcacaaaaaattttgatatcagaggttatcgaaaccaaaataagcacgcacaaattagtctctctattattaaattttataacaattgattgaatgcgtatatacctatcgatactttgataataagtgatcaatgacggatttaaattttagtaaaaattaattagtaattttttatttctcttggtgttacgtttttaatatttaaattattttttgcaatggttggtaccttatgtcaaaaggatgttcgatttaggaaaattttgattggacgcgtaaaagtcgattggacgcgtaaacttttgattggacgcgtaaaagtcgattggacgcgtaaaagtcgattggacgcgcaaactgtgattggacgcgtaaaagtcgattggacgcgtaaaatgcagtagagccaaaaaaattccaaaacaatgtaaaattacttaaaatattttcaaaatcattaaaaaatttttttaaaaataaatagagaaataaattaaaaacagttagacattaccttttacatggttaaaaatttaaaaaattagcctattaaatattaaattttttattatatttttttttgaaaaattccgacttccgacatttttggggtcggaattccgacttccgaaaaatttttgggcctcggaattccgacttccgaaaaatttttgggcctcggaattccgactttcgaaaatttttgagcctcgaaattccgacttccnngaaatttttgagcctcggaattcc

SEQ ID NO: 6836 - DNA, 4306 bp, Heterodera glycines
tccccacttcatcctcattttgcgggttcccttaacaactgtctctcctcaaatcctttttcgtgttaattatcattttcatttataattttgtttaatttaattcatttctggaaaatccggcatttatttattttaatgattgaataataattattattttagaaatattttataaatatttatcaaaaattgactttaattgtaatatatcaaaaaatttgcttctatggctttttcaagaaataaaagaaatttttcgaaaaattgatgaaatttgttaaaaaatgagaatttttttaaattcgagcaatttcctattgtttaaaattggacgcataacaaaaagtaaatgtttaagcagtttctgttgaattgcttctgccgcctttactcagtaaaagcaagcataattttgtcactattccaattaattttaaattgcacaatttttaagaaaaaataaatttgtccgtaataacaatattaataattccctcccaccgccaaatttggacgtcacacggcttaatccgcttttcgtcggcacttcactctgtctgattgaaagcaaatctgatcgcctcctcctaagcgaaacagctaaaacaaattccaaaatcccatctaatgccttcgtcctgttggcttttcctatttgtcattgaagagatggcaacgatggacgattaatttgctttctaatacttttgacatcggcacgaaatgccgattctttcaacattggcacaaaatgtgccgtgccgtcccctctgctcgtgtccaattttttttttacagtattccggcaaatattcggcttattgagatctcagtgattttactccagagtctcgactccccataaaatccgggctttttcgaaatggactgaaaaagtgcgatatctaggggtgacggataaagccagtaattaaaatccataggtaatacctaccgtatactcaagaaatcacaaattacggtctacaataaatcattgactcggtctgctcagaacaaagaattatcaaaaaaaaattttttcgaaatctaatgaaaaattcgtgcatgtaatttttgccaactttttgctccgtctccccgccaataaataccgtagtaatccaccgtaatgcgtccacttacttccctctgtacaatactgtcgctgttcggcgtgttgctgaacattctgttcttggtggtcacacggcttcaaagggtcgaacgcattcaggtgatgagcactgtaatcggatgaataaaatccaaaaaaaaattttctatcaaatttaattgaaaaatgtgaaaaaaattaaaaaaaaaattaaaaggaaaaaatgtttacaaaatcttgaaaatcttaaaaattgaaaccccaaaaaggcctattaaacaattttttacattttgccattgactcatttttttcatcggcacccaaaatgccaaaacaggcgggaaatgctaatcaaaaataatcgtaagaaataaattttttcgaattcaggaagttctcatcttcttgcgctccatttcgatcggctatattctcgtcgctttgtctatcatggctgttgccccgcaggtgatccgctttgatcacattattttggcactgatcattgacagtttgatcaatgattttttaagtcgatcactttggcatccgcaaacattcgcattccgcacggactgctcgttgtcggcaacgcgggcgcttcttccaatttcatggtcagaaagacaatgtccttaaatccattcaaatgcttaatccggaaaatcaatacaacgaaaaaaaccaagaaattccggatttaaatgccaaaatacccaagatatttgggatttgaatgccaaaaatgatgtgaatcgccggatttggatgccaaaaacgcgaagaattctcagatttgaatgctacaaatgcgaagaatcaccgatttgatcggttacaatgccaagaatcccggatttgaccggctaaaaataatataattccggatttaaatgccaaaatacccaagatattgtgatttgaatgccaaaaatgatgtgaatccccctgatttgaatgccaaaaatgcgaagaaatctcggatttgaggatttggatgccaaaaaagccaagaaattcagggatttgaaggcaaaccatttctggcaacttttttcatcgatttttgattataacagttacagtgccactgatttttcacaatgatagtttatcaaattatcagagtgcgcttgctgcattcggcgtcggcagctttctgttcaccgccttctcctttctgttgctgtttctgtaccattaccgtaaaacggcgggacaggcaaattaatcaattaaaaaaaacattataaccacaagaataccgtatcaaacccgatcagaaagtgatacaataattttgagtgtaatctaataccgtatctaatctaagtggaaaacagtagggagatttacaattaggtctaatacagtatccaattcgatgataccttatccgatccaggcaaaaacaatatacttactttaaaaagcagaatcaaataccgtatcgatctaattaaaaaaatataggatgggagagttaaaattaggtccttacagtatccaactgatgcagaaactaataccataagctatcgttcgggccttcatcatactgtagcaatgaataaatctcaaatttattgttctcaccaatttttctattgagctccctcccccaacagatgtccactgtttttgcgccaaaaaatgtgcccgtttttgttggcgttgcgtttgtgtactgtttggtgcagtccgtgctgctctattactccaaagttgaaccatctgtgagtaaatcatgtcaaattgggtgaacaactaattgactctgggactgaatcatctccatgccgaaactcgaacaaaatttaaaaaaaattaaaaataagactgacatttagaaactgaattttgctaagaataagcaaagccggaatggacctcggcccgtgttttcgggatcatggctctacgggaataataaaaaaaattcacattgacaaattcttaaaatgaaaattgggattttcctaatcgactgaaatcattaagcctaggattagagtaagattttctactttttaaaacgtttagtgacagatattacagaatatctgaaaatatctaggtaatcgaattttgatttccctgattactcccgcttccctcggtccaaatttttatgtttaaaaattttagagttttttttgggggttattggcctagacacaaagccaaatgccaacacaaaattcaaaaattcaattggaaaggggtagaatttccaaaaaatgaagggtgggtacggcctgaaaaatttccgaatgtctgagactcttgacacacccaaaaatgccaccaaattttttctacaagcttctgctggaacggctgagccgatcaaagaagtgggagcaggtacagctgaacctgggcatgaacccgaacaacagtttcgccattgacgggccgggcggaggtggcggcggcggtggcgccgcgtgggacaaacaaacggaagcgaaaacgggcgccggcggtcaacaaatctcgggcggatttcagtcgattactggcggaagcaattactcgacgctaagtgtggcgattgaaagccgccagtatgatcagagcggagtcagcggactgaacggaggaggcggtggatcggagatggtagtggtaggaacattttggggtatttggcaaaattacactgatcaggggagggggaaactttggcaattgatcagattgaactcaatggattagtaagatactgagaattttacactggatcaacagaggcttaaagtctaactattccgacactaaactatgtttattgatcagacgcttaggtcttagactagtcaaatgataaggtagcagagggtgaactgatcagagaagagggtgaactggtcaaagaaatttaaaaggaagtgatcggagatcttgcaaaaaggaaatgttaaaattgatcagagggggtgaattaagcaaaactgtaagcaaaactgatcagtggtcaaagttttcaaaaaaacacattttaaaattaattactatggctatagactgatcagagttttagtgaatgatcaatgccaatttgtgatcccccttcggcacagaatcgctacttggagggcacttttggcacggactattcgcgcaatccgctgtactttttgtccaaaggtgtgctgatgatcacattctgtatcatct

SEQ ID NO: 6837 - DNA, 1125 bp, Heterodera glycines
ttgtaataaatatcataatgtaggatgggatcagcattctgggagtttactgtcgggaattaacggcccaaaaagtctgggatttggagatagaggaaaggcgtgggattagtgatatcgtggaccaattccaagtgttggcatgttggggatggcccttggaatcagtgatattgggcttcaattcaataggaaaggtttgggtaaggctcaatgtttccgggaattcggtttagaaacaccaccgggacggggatcagggtcagagttccccaatttgatcaataccgacctccagttcccgaagaggttgcggaatggtccaaaaatacgggaatttagggtctgatacatcatagggacagggcggggatcagggtcagaatacctccatttgatcaatctcgtcctccaatcaccggataggttggggaatggcccaaaaattccgggatccgggaggaaacatcacagggatagagcaggattagggtcagagacttccccatttgatcaatcccgtccccctaatcgtcaaatcccgtccccctaatagtcaaatcttgtagccctaatccacctctcgttcagcaccactcaagaatttctcggcatttcactgatcgcacccatccctgtgctgttcccgctgatcaacctgttgtgcctgaaggagttccgcaacatcaccagccaaattgtgttgtgcaaaatttggatgcgcaaaaagcgacaggaacgagcggcagcggaacgaaaagcgcaggaaaacattgacgaagacttggtatcggcaagcaaaaacaaggtgagaaaaggtggggaggagagagacgaagggagaaagagagacggacagaaagagagagagaaaggcggacagaatgattaaagagagaggagagggaagggtagaaactggagagtgacgaaaagattaatggacactaattgttggagcggagagatatagagaagttattgcgagagtgtgagagaggggaagaaagagagaggacagagatagagagagaagggggggggagagagagagaagacagagagaaggcagacagaatgattatagggagagagaggagaggtaggggtagaaactgaagagtg

SEQ ID NO: 6838 - DNA, 2031 bp, Heterodera glycines
  unsure (1)..(2031): unsure at all n locations
gagagggggagagagagagagagaagagagagagagagagagaaagtgacagagaaagaatgtgagttaaagagagagagaaagaaagagagggcgagaccacatgctctctcatccacataaaacctttcagttgcgcaacaaacggatgccgaattcaaccaatgggactgaagggtatgtgactgattgaatggttagaataaaactgaacccgttcgggatcaatgcttcaggcaaatccagaagaatgtgccgtccgaagcgcgcagtgaaggcggtgccaccaaaagcactgcgtcaaaagtcagttttatgaagattgtgggtaattagctccttgagactctcgactttcataagttttaatgctcgagactctcatgccattgttaatactcagccaaaaatgaattttttgaacagaatcgcccggaggacaaagacggacgctacaccgaggcaaaggataattcgcaccgtgaggcgcgagcattgttcggcaagcagtgatcggaggcggatcaatcgatcagaagcaatcaataaccaatcgatcggagagaatttctgttcccgagttgcttttcgagactaacaaaagttaatagtattttggattcaataagttatcatcaaaatttttcgactaacgcagtgcaaaaatgaatttttgaaattttagtaagaaaattttatagaattttttaaggacaagatttataaggacttttggggaagctattctgattcgatgtttcgttctctagtcacaattctcgtttaaatatgcatttatttctcgactatcattaaatctcattttgaatgcatttacagtatgtgtacaagttatccctataatacagtagcatttggggtaatttttcttttttccgctaatcctttttcacataaaaaaggcgatgaaaataattgtaaatttaaaaatatcatggaaactttaacattctttttcattaaaaatgcacaattagaaaattaagggggcctctattagcctgcaaattcaaaaatatttcgtcaattttgaacaaccttatgaccaaagtacatcagaaaccaagttttcattcatttttggccatgactttttggaaccttaatgaaattttttgaaattttacaggctaatagaggatagttagggctatcgaatgatagcagcaatgcttgatttggttgacaaagaaacaaattaaagtccgaggcccaactgaccgagtccgtcaggtcataatacacttgtgttattgggtggatcctcgctgatcagcaggagaagtgaaaactttatttgagtgtgactgatcaaaaacagaaatttcacacagatcagatagaactttaggtagaactacaaactatgcatactgatcagaagcattagtcatagacaccacagtaaatgatagggtagaacaggttgcactgaggaactgatcggaggcttttggaaaaggaaaacgccataaacgcattgatcggatcgatttggcaaatagactttcaatcaataagaaatccatttgagtatctattaaaatacagttaataaatttaattaaataagccatcaaaatcataagcatagcaaaaggaggagaagcaaatcgtgtgcttcaggatagtgaggatttgtttggcattgttaaagctggatatgttgttcatgtgtctngggatgctgccgctcaattccaaattttcgtgcaatataaaaatgaaaagaaagcgataaatgtatatggcacggaaatggtggcaaatctgaatggcattctgcccaaaaaaaacaaacacggacaatacacactgtgcttgaggacgacaaacaaatccaaaatttgngcattgagccggattcacaatttacttgtccgacaattgagtctagcgactaatgagtctgatcatacataattagtgagtgttttttgtttataatcttttttttggcttctaatgaatggatattgattctaatgacaatttgttattataccattg

SEQ ID NO: 6839 - DNA, 3339 bp, Heterodera glycines
ttttcgttcaaattcaaattacggaattgactgacctgttcaaaggtgaagagcccagccttctttccaacttcgtgaatgtcctccatgaccatcgctttcacttgctgatttcggcacaattcctccattgtttttccctcaatgcccaattgtttttttgccgcctccggcaacacatcaaagtcgggcacaacaacagccaccagacatgtcttcagactttcgccatgcacaaagcattgggccacgtattttgaacgcatgtagatgagttcaatcttctcaggtgcaacgtattcgccctaaatcatgtttttttcttattacatttgaattttttttattttttcaaaattcttacaattagaggtttttctagtaataaatctataaaatttcttttaaaaaaactcctattttaaaaagatattcacgttgatacatgaaaaccgttagggggggggggagggggaggcaatcaaaattctctgctaaattcgaaagggtgtcgagtatgtaaatcgacatgtgatggggagaggtcgacccaacccctctgtattatgtgtttttaacaatttgttagttcaaaaaatacacccgttttttcattaaatttttttttaatttcatggcctctcccagtgttggggctctcacctgggccaacttgaagatgtgcttcttgcggtccacaattttcagcgtcccctgctctgtccatcgtccaatgtcacccgtgtgcagccacccgtctgtgtccagcgtttccgccgtttgttcagccattttgtagtagccgcgaaacacgttgggccccttgatgcacacttcgcccgcaccatgcgtggcaaaatagttgagctcgggcacatcaatcaacttgacggcacagcacggaaccggcacaccaacatggcccggaactgggtcaccttcgatggtaatctgtgcaatgaaaatagggaatgcatagaatggaaagaacagaaaattgtatttagatttccaaaaaaaaaaaaaatttctcggctgcaactaacgacaccaccagaccaccatttgctcataattttttgaaattttttttttggaataaatttctggaaaattaattttaaaaaattaccgttgctgccgcaacacactccgtctgaccgtagccttcacacacaagggcaccggttgcacagcgcatgaatgtgagcacagtttcggacagcggagcggaaccggtgatcatcagtttgacacgaccgcccaacccttcgcgcacctttttgaacacaatttggtcaagaagcgaattgttgcgaacaatccaactgtgaaaaggggacaaatatacgaaaatttggacagtaaatggaaatatttttaaattcgtatcaatctttttaagaagttgattagaatttgttttaaaatgacctaataatgttgaaagttatttatttatgggcgaaatccagcctggagcgaaaccagggaaaaaacggggaatacgaagactttttgctcttcggccaccaaaaaaaaatgtttgattttttaaaaattatagatatggaggctagttttcttttatacaagtttcggactaaaaataacaattttgtttcattttttggtcaaattttgaaaaatttagtgagtttgtcgtcaagaaattaaaacaaaaaacaatttacttgttcagctcgcgcgttttcagtccaacagcggcgtcaaagagcagacgcgtgaagacggatttgtttgcctcgcccaacactttgtcatagattcgattgagcacacggggaaccaccggcaacacagtgggacgcagtgttttgatgtcgtcagcaagcaaacggatgtcgccacggaagaagcccactgaaccgccctcacagtacacatccgtttgcatgacacgctaaaaaaggaattttaagatttttaagtaaattggtcagtcatttttaatttacaaaatttagtttttagagggaaaaacaaaaaaaaattatttaaatccctaataaatcgtatgaattgagtggggagctgaccaactccgtcagaatcgaaattgattcaacataattttataggttgtttgattaacaattccccatcacaatcttggtatcatcgaaaactttaataacatgctctctagcccaattaatgtttttattaaaaaaactacaaaaatcctttcatttttgcagttttcaaacaataatttttttgtgagccacacaattgcttacaattagcattagcttacaaatatctattttctaaccaatcaaagctttcaaatgacaccaaatttgtttggttttaccaacaaagaatgtaagttttgacactttttaaccaggaggaaggtggagggcagggcaattaaagtaaaacctcaaacatgtgagccaacggcaggaaggagaacatgacgtcattgtggttgagttgcgtgtttttgaaatagcccagcgccgtacaatcggcaatgatgttcccatgcgtgagcatcacaccctttggaacacctgttgtgcccgacgtatagcaaatggtggccaagtcgtccgggctcggtggcacatctgacaacgaagcaacctaaaaaaaaaatttgtgtgtgatagcaaattttaaaacattttgactcttttcatatcattaaaaatcaaaaacaaaaaattttttccccctttggcaccacgagcccccaaattgcttaaacattttcaaaaaattgatccaaacaaaccattaacaaaatgaaaaatacaattttttggttacactacgttcccccttgccgtaaattatttctccaaaatttcatgatgaattaacaaacattttttcagaaaattttcaaaaaaaaaaattatttttttcatgaaatttttataaaaaaaattttccttctacctcttcatgaagacccattcgctcaaagttgtcaaatgagaacagtttgacaccattctgagcagcaatgtcacgcgcggactcagtgagttcgtcgtaagcgggtgccatcaaaacgatgtacttcaaggacggacacgctgattttcgttccaacaacccgttcactttagcgactgtgtcgcaaaacttaaagaaaacaaatcaaaatatttacatgtgggaaaaaagcatttaaaattataaactgtcacacttccattaaaattttaatttttacttacaattaggtctttctaaaattccaaaaggggtttttaaaaaaaattcttaaaatgtattttaaaaattcgagcgaatgatagctagcgggaaggatgtgcgggaaaataattttaccgt

SEQ ID NO: 6840 - DNA, 1037 bp, Heterodera glycines
gcgccgtacaatcggcaatgatgttcccatgcgtgagcatcacacccttggaaacacttgttgtgcccgacgtatagcaaatggtggccaagtcgtccgggctcggtggcacatctgacaacgaagcaacctaaaaaaaaaatttgtgtgtgatagcaaattttaaaacattttgactcttttcatatcattaaaaatcaaaaacaaaaaatttttttccccctttggcaccacgagcccccaaattgcttaaacattgtcaaaaatttgattcaaacaaaccattaacaaaatgaaaaatacaattttttggttacactacgttcccccttgccgtaaattatttctccaaaatttcatgatgaattaacaaaaaaatttttcagaaaattttcaaaaaaaaaaaaattatttttttcatgaaatttttattaaaaaaattttccttctacctcttcatgaagacccatgcgctcaaagttgtcaaatgagaacagtttgacaccattctgagcagcaatgtcacgcgcggactcagtgagttcgtcgtaagcgggtgccatcaaaacgatgtacttcaaggacggacacgctgattttcgttccaacaacccgttcactttagcgactgtgtcgcaaaacttaaagaaaacaaatcaaaatatttacatgtgggaaaaaagcattaaaaattataaactgtcacacttccattaaaattttaatttttacttacaattaggtctttctaaaattccaaaaggggtttttaaaaaaaattcttaaaaatgtattttaaaaattcgagcgaatgatagctagtagcgggagggatgtgcgggaaatcaattttaccgtaaataagggatcgaaaacgggaaatgaatgccccagggaaacaagatagaaacagtgaaaccaaaaaatgcggaaatttccaagtcgagattaaaaaaaaactggtataacccaccaccaatacaaagttgttctggatatcaaaggacacagatgcgtccataaccaatgtaacaaat

SEQ ID NO: 6841 - DNA, 4168 bp, Heterodera glycines
  unsure (1)..(4168): unsure at all n locations
gggaaatcaaatttttcccgtaattaaggggatcgaaaacggggaaatgaatgccccaggggaacaaagatagaaacagtgaaaccaaaaaatgccggaaatttccaagtcgagattaaaaaaaaanctggtataacccaccaccaatttcaatgttggcctggttcacaatgtacacagatgcgtcggcacccaatgtttcgtacagcggcaccaacacattgttgaatgcgtacaccgcttgctcgaccaacacnccactccaggccgattcttggcaaagatgccaacaaagcattgttgtccgacacttaatccggcaaaataatgacacgtattagtacagtagtaaaagtaaagagggttaaattgtggacatttgactaatattagagcaaaacagccctcccgcctgtactccattttgaaaaaataaaatcaattttctaaaatttatttgttatttttggttcaatccaataaaaacaaaatgaaattcataataatcaaaaaaaaaaatatttaaaccattttaattgtaagagcaaaggaaaattcaaaaaaaaaaaataagttccaacatattgttcgcattttggttctgggatttggattggtctaaatggaacctgacattttttcaacataaaaatttttgaaaaaaatggggatgcattaacggacagattaggaaaataatttataacgctggggcaacaacaaaaaaaccacctcaacccgagcgaacgtatggcgcgcgcaagaagcgccgaacggtgcaacgcgtccccataactcagccattcgtacggttcaccgtcgcattgtctgtttcgaaagccgagcattggcccattcttggacacatgcgccccgcgccgtacgccctcataaattgtctttgcgttcgcgtgagtgaagcgcatcagcgcgtccgttttcaaatacttgcacacgcgtgagccatcctggagaaaaagatacccactcttcattatatcgtcatgaaaaatacattaaatattttttatgacaaaaatctatgaaatatagaaaaatttaaaaatttcgagggggagggtttctaatttttaagcctatttatttgtccagaatcgctgattaatgaaaccaattataatttttatgagccaaaaggatcacccacgctttggtttttcccgtgccacctacctataaacaagaaaataccaaaattaattttgcccacaaataaatttttaacatccgccagtttaacccaccggcagttcacgagtttgagactcgggatcaaccaacggcaccattttcttcgctgacggtcgtgaggaccacacccaccacagtcccattgctccaattgtggcggcggcgccaattgagtacagcagtgaagtgttgccgttgttctgttcattccaatcgctgatgtcggcaattctgattaaaggagggaaaggggatgggttccaatttttacgctcattttttgtcaatttttagaatttagggggggggggggaggggggaagaaccgcgggataagacaaggaaacggaatcgggattaccagaggccggaacaagactggaccctgtcaggattcccaggatcctgactctgatccgggcaattcacaaatcataattctgtccggaattttaaaaaattctgggaccgaggatttacttgactgaaaacaccattttcccacccatcctcaatgcatttgcgtaaattatatcccggatctttactctaccgtccaatgttgattgggatggaaatccaaacgggagtcgcgtctttgaccatttcgggatattgaaaaagcgcaattgtttaaggggtcggaaattgcacacaacaatttattgggggtttcggggtttgttgtcaattgaaggaattgaagtgtttgattttaggagggcgggacaaagacgaacaaattttaattaattagctgtgctaaaatagtcgaaattaattaagtggaaagttaagttggagagaaaaatgcatgaaatttcaaatgttgtttggtgaaattccttcttactaacttaaatacaattatgtacaatcacatcacatactagaaatgcgcgttcagcagcgtgtgaaagcggagaaatcaaaaagcgcttttttgaaaaaaataaattccaattttggaacaagtgtaatggttaatggaatttggcgatttacgttgtaaaccgtcagtcatccaaatttttatgcatctttgagaagtgttcagtgttcatcaaagttacgtcgttgttctctagaaggaatttttacatttaagatgcgcaaattttttgataaatcaattttagtaggaaattgaaattgatataggtaatttaattgttactgcacgaaaatgagcgatatgattcattgggtttttaacgttaagccttgaagcttctagcttcaacttttaattaatgtatgatcactaaattacttgaagatttacttgaaaatacacattttcatttgtaatgggctgtgatataaaaggaaaagaaattttttgttttatattcgctttcttatcacaattttatgtggtggatttgccaaagtttagagagattgccttccctttctcacaaataaaaatgagttatgataagaaaaaaaaaaaagaattttttttggaggggtcgtctttcggcccgttgaacaaatgataaagtttaaatgtgagaattgttgtgtggtgtgtttgtgttatgttcagcagaatacttaaatacctatgtgatggaggaacggcacggaaaaacgatggcaaactaaaatgtgcaaaaagataatcggaaaaggggcatcacggtgatgtgatggacctggaccttggaccccacaaaaatcacatgatttgatttggacctcccccgccccgttttcccctctttcttataaagaaagtacgcacattctctttttggttttattcttattgcatgcaataacagttctctcttttttgggtgcggaaaaaaaaagtaattaattaattaattgtcggacatgaatggaaaatttttatttttatagacagagaaattattattagattttagtaaaattagtaaaaaataaataaataaaataaaataatgcatcttattcatttagaaatgtttaaaaatcgttatagaacattcgtcttattgttagagagtgttttaatgctgcaaaagtatattagcgatttttgacaaagaattggcatatttttttgatcattttgtggttcagtttgagtttgtttatttatacattgcaatgatcgctgacccacaaaatgtccagcccacgaaatgtccaagtctcgaatttgagtttttttattattcagatgggcctaaggttaggcaacgggtaatataaaggttatattcgtattcagcgaccccgaaaaccctaaaaatcctaaattagactcattttgtttttataaattttgaaaaattttggacatttcgtgggtttttactcttttggacatttcgtggcttggacactttgtgggggcgccgcaatgatttactaggttaactcattagctgtaaataacaaattttgatttaaactgccaaactctataaacaattagacaataaacatcatcgtttgaatctaattaaatgaaatcgtcgtcataaacttattttccttttcaagagataaaaaatattttatagttatgtaagaatataatttaaaatattttttttttgttaattagacgtggaaatcgatattaattctaaaaattccaagaaattaaaatgaatttttaatttttaaaatgggaaaggaatagagaaagagatatattgaacctgaataaaatctaatccaaaattccaatgactcagtgttaaaaaacatgaatagaaaccggcatgaaaacaagtttttattctcagggagctgggagttttaatcgaagcaacaggaatcgcgcaaatcctttatttttatctttttcggtggccattacattaaataatgttggcgaaaggagggaggagaagaaaaataaatagcttcaaaaacggcgattagtcagagccatcaaccgatcattagggaaaatgatcgccatcatagcgattttcactttgttttttat

SEQ ID NO: 6842 - DNA, 3905 bp, Heterodera glycines
  unsure (1)..(3905): unsure at all n locations
attgagtcccagagattgaaatgctggtgtgttagtcccagagatgaaatgctgttggttgagtcccagagattggaatgccatgaaagttggggggtagagtcncagtgtttggaatgccagagatttgagtctcagagattgaaatgctggtgggttgagtctcagcgattggaaagcctgagaattgagtctcagagattgaaatgctggtgggttgagtcgcagagattggaatgtcattgaaagttggtgggtgtagtcacattgtttggaatgccggagattttagtcccagagattggaatgccggagaattgagtcccagtattggaatgctggtggcctgattttcattgagtggaatgtctggaatgccggagatttgagtcacagtgattgaaatgctggtgggttgagtcccagagattgaaatgctggtgggttgagtcccagagattggaaggccatgaaagctggtgggttgagtcccagagattggaaggccattgaaagttggtgggttgagtcccagtgtttggaatgccggagatttgagtcccagagattgaaatgttggtgggttgagtcccagcgattggaaagcctgagaattgagtctcagagattgaaatgctggtggattgagtcccagagattggaatgaaattaaaatgctggtgggttgagtcccagtgtctggaatgccggagatttgagtcccagagattgaaatgctggtgggttgagtcccagagattgaaatgctggtgggttgagtcccagagattgaaatgctggtgggttgagtcccagagattggaatgccattgaaagttggtgggttgagtcccagtgtctggaatgccggagatttgagtcccagagattgaaatgctggtgggttgagtcccagcgattggaaagcctgagaattgagtctcagagattgaaatgctggtgggttgagtcccagagattggaatgtcattgaaagttggtgggttgagtcccattgtctggaatgccggagattttagtcccagagattggaatgccggagaattgagtcccagtattggaatgctggtggcctgattttcagtgattggaatgtcattgaaagttggtgtgctgagtcccaatgtttagaatgccgcagatttgagtcccagtgtttggaatgccggagatttgagtcccagtgtttggaatgccagagatttgagttccagtgattggaaagcctgagaattgagtcccagagattgaaatgagtagtataaagtcccaggggccggggtccagacccctgcccctgcttaaaaaaacacccatttttgttcttcatgattttgtcccaggtgccggggtccaaatccatgagagaattaattaaattaattcatccagaggcagagggactcgaacccaatatccctagagcaggggtccatatacttgcttccattcagcacccatttaacaaggatggatttaattcatttacaagcaaacggactcgaacatccagagggtcaaatacacaacactaccaaccggccaaccatctagttatccaaaacgcgacaatctttttaaaaatttgtaattttaattattttaattaaacgaaaataatttaaggctaacgaattggaactttatatgtatcagttaaactcattgtacagccacttaaccacagtaatgacttaaaaaaggttcaaaggaaaattacattatagattgagctaattcaatctataattaattaacataaaccaattcgtataaaaatgatttatcacaaattgagaaataatatcgcagataaaaattattgtattaaaccttcaccaaaaaaaaaactttaaaaaaaaacttaaattataagaaaaaataatctcaccaccatcaccacccatttaacacttttgctcttggttcccttattgttcaactttctcgtcatcatctgacaccaaaattcgaagtgggcattttgaagcagaacggtctccattgtcagatgacgaactgtcatcagacgagtaaattttttgtttttttgatggtcgcgtcgggccgccactgcgaagcactggagccttgggcggtgccggtagctgtgataatttgagaaccgaagacgcagccgaaagcggagttgcgcaaaagtcacttgtgcgaccagaacttgtagcagaagctgcaccgggaagagaaacgtaagagcccctcccatcgggaatcgagctgacgacgcatgtattaccagtaactgcaccacgaacacccacgctaccacacaccacaccgcaattctgacccacaacagtctttgcgttgccagtaaccgcggtcaatgatcgtgtgataatttgcttgtgataattaaagacattaaataaatttcgttagttaactatctattttcagaatttgatatggtcctaaaattatttggacattttcaacattttcactatctataattatttttatttaaaacattttttcatacagaaaaaaactgaaattaataaaattagagaaaatagttttagaaaaatgttttataattatgaaaataattattatttaaatttgttgtacgtttgttattccattaaaaataatttgtcaaaaaaatgcaggtattttacaatgactatttttttcagatccattttcatgaaaatccgatacgttaaattacatacagaaatatgatgggttgcttcaccatcacggccatttccagtaacgggaccacaaccagcagcagagtttgcacaagctataataacattattattattatcaaagaaaaacacattttcaacatgaacagtagacttacagactccgcgcgcaattctcgggtcagttggccgagaatcttgtgtaacggttttttgagcggccggctgagcatgagatgaggcaacatttggtcctccttgctctgctggtccataagcgataacgatggtgaacgattctgccgcctgaccatccactttggcctaaaaattcttttaattaaagaaaaattttagtttgaatattaaacattaatcctaaaaatgcgtacaaaatggaagacaagagttttcgggttttaataaacgcccaaattaatagacagaataaaaaaaatttttaaatttgcaatatgatactgaaaatctctatataaatttattaaaatttgaaaataattctattaaaaataaaacttaccatttgtggtattgtgataaccattgaagaagcgctacatgagaatcggaactgtccgcttaaaacagcggacttggctttgcggtattcatggcgaatctttatcaatgctcgttctcgctggaccacttcttccatgcgtcgcattctcagctttcttttttcaacttttattttattcatttcgaaagcatgccgcaccgcggctaagtcgcgtttacggccacactttgccgtgtttgaagagccagcgtgttgttgttcactcattttttaaaaaataaatgcttataactcaaaaaaaaggtttttaaaattattttgagaaaataattttaatttttgggtaaaatcgaatttaattattttatgataatttaattctttttgggaaaataaattttaattattttgggatatggagtaggctaaggtatttggcgaagtttataagcataaaaaaatggcgcagtgtctgggtccgttccgattcgtcttaaacaacagacagtgattacacgggagaaaatcggctaggacggacaggcgcggaaatgttgcgaagattgagacggagattgctgcgaaattttgtgcattttggagccgaggcaatcaatcacacacaaaattttcaaaatccagacaaatgtgag

SEQ ID NO: 6843 - DNA, 1196 bp, Heterodera glycines
  unsure (1)..(1196): unsure at all n locations
atatgcaaacacannaactcatcaatcaccaaaaataccagacgtattttgatcaaaaaaacttaacataatttattctaaagccggatctaggcgttaaactggtaaaaagtgccttcattctactgatcttggcagactgataaatcatattgtcacatttaccaaaaaaaatatactagacagttgtgaaaaccggacttaatgactttgtttgggtataaaagaagaccaaaatttctttcgaatgcagaataaatttaaattattaaaagttaattaactttaatatttaactgcaattaaaacaaacaatcagacaacacttcttctttattacacccaccaccaaagaaggacaatggaaagtaaggcttttgtagcgagttactgttattctttaacagttaattaatatttattaaaatacttttttttaaataaatttattcttttcttgcaaaataatattaaattggcatgaaatcgttctattttacttacgccagcaattttgtaaaaatggatacgttatcttttttttaaaattaataaatttattccttgcaaaattatcaataaatttgtatgaaatcgttctattttactcgcgccagcaattttataaaaaaattgatgcaaaattaatgataaaactggcgcaaaaatagcccatatttaattaagtgctaattttaataaataaactaccaatttcggagagagtaaaatttctttattttaatgtatcaacatagtgaccttttttcaagtttgatgctcttacttttacttcttttacttatatgacacttttgcaaaaaaaaaacaaacgaaaaatgccaattcatttcaaaacagcctttattgcatttatttgtaacaatttgcactaaactttttatcaatttcggagagagtaaaatttctttattttaatgtatcaacatagtgaccttttttcaagtttgatgctcttacttttacttcttttacttatatgacacttttgcaaaaaaaaaaacaaacgaaaaatgccaactcatttcaaaacagcctttattgcatttatttgtaacaaattgcactaaacttttcaatattaaccgggaaaagtttgtctgtgccgcaggacatcaaaaacacatattttttatcgtaaatatttattagcaaaacaaatcgattcgagcaat

SEQ ID NO: 6844 - DNA, 2384 bp, Heterodera glycines
  unsure (1)..(2384): unsure at all n locations
ttaaaaaaataatagcaacantttcaaaaaaaatattattacattacgcattttatattttttcagtgatatcgaaaaaaaacatcgatgaaaataaaacatctgccgaaatggcacagaaatttgcactgatcgattatgaccggaacggtcaaatttcaccattaaaactacagcgagtcctaaaaaacggcacgtctaaaccgttcaacatggagacgtgtcagctgatcattagaaaattcgacgaacaacgttgcggttatattggccttacaaaattcccagctctttgggatgtacggtttataaatgataagcagaaaattaaaatatcaaaaaatatataatattttttaaatttccaaaaccttaatatacttaatgcacttaagtgatgcgcctgtacaaaacaaaatatattttaatgcaaacattggggtttcgagtctaccaattacattaatttattcaaaataataaatgctgattaaaaaaaaaccttcatgagggttttaaagtttttatttgtgtctatttcacctatacgggaaattatccaaatttttttttcatttacatatcttttacatatttttgttttttttataaatgttttttacatataataacatttatatacatattatttaaatatttcgctatctttattacataaaattcccattcctaattattagtttttttctccacctgtatgtaaattcgggcaaattcaatgtaaaagaaaaattttttatttcaaaaaaaattcaaatatgtataaaagaaaacgtatttttctctgcgctctctttttatttcgttttgatttagtagtatacatatcaaatcattttgacaggattatgtgttctttaacgatacaatttaacgatttttattattacagtacataaacggatggaagtgggattttgcacacttctctgaacatatgggttttttaagtatgactcaactacagtatgctcttaccatatatggtaataacattttttttaaaaatatgttttattttttcaaggctatagttttactaccccgttttttaacattctgctacaccatttcgatcgaactaaatctggtattttttttttgctttaaaaatacatccttcaaaaggacgaatttacttcgatgattttattcatcttggcataactctaaagcgtcttacgccacccttccgtaatgctgacacggaccgtgacgggcgcgtaaatatacgtaagcaaaattttatctcatttttaggtgccaactcgttaatttttagtaataacataaaatttttcctccaattttttttttgcactaaataaaaatctaaatcagtttgcatctaaataaaatatttttcaacgaattatttaattttgtaaatctttgaagatttcgaggatttcatcttaatggtcttgaccgctgaagtttgatttctctacacaacccaatataaatagggatgatttgattaaaaatatcacttattctatttatctgtataaaattcttaattttaaaatcaaaaaaagcaattgcaaatatataaaaatatatttatgatatttaatacttatatggcaaatcatacacttgctaattcaatgtttacaccctcgtacccattaagcaaaaaaaatgagcggattaaaaagattccaaattgtcccatcctctcaaaaaagagtgaccgaagattttccaacgaatccaaaagatcttcgtgccattattcaatttaactcccctggcctattctatgtccgtgccagaattgccgatcttcagttttccctatacaaggtttcgggtcgtctattctagccaacattataaagtagcacggatttaggcctgtccgttgaagaattttggcacattttgtaagaaaaagcttgacgaggagctgtattgtgccagttgtgcccaccatgctaacaaggcaatccgcagtatttacttgagattggagctccgcgactgtgaagatccggagatttgccagactgttactgtcttttccaccgtagcggaacattacctgggcctcaaggttgaacgatttgccaaaatggtagaagagcagcctgaacagctcgaagcgttgcttaaatctaagattgagcgtactgtcaccgccaaacttagtataaaggttcacaaatttactacgtatataaatattatctttttgaattttaaggcaaagggtgagctcaagacgatggactggattgttctgtccatacagcatgagaacggggaaaacgatggagatgatgagacggctcctgatgaacaaaagaaaactgacaatgataacgaagatggagaaataatcgagattgagaaca

SEQ ID NO: 6845 - DNA, 1101 bp, Heterodera glycines
  unsure (1)..(1101): unsure at all n locations
aattattaagctaaaaattggacggtggcacggcatttttccgcggctattccaaactttcatcttggcaaagaaacacagagtgccattttaattgatgttttggacagtttgattcaaatttgggcattattttttgcaaattatcaggtcaaattggactacaaatttgaaaaaatactcaaggaacctaattatgatctgaagttgctgaatgaacacgaatttgaacaacttggaaaaattgggcaaaaccttgtaaaaaaatttaaagaaattaaattttttggaagccaaaatcaaacaaaacatttgacagcggaaaagggtaacaaaaaagaacttaccgtagctttactcacaacaggagaagagaaaagtgtgattaacactaatgaagaagcaattagcacacttaatgaagaatttgatgcaatgatgaaagaaaaggccgaaaaagttgactcggatgaagaatatggcaaaatgaacaaagaagcattgaaatggctggtacagtgattgctgattgcttttattcctatttttcactaaaatttctgtatttgaattcattttggcggggggagggagttaaggcatctcatccaaagcagggctgcacgcaagtggatttacaattacggaaatccgcaatccgcaattgcggcgattttctcagttgcggaaatccgcaatccgcaattacgggtgtccaaaaaccccgcaatttccgtaatttccgtaatccgcaatccgcaattaaaaaattttttttttaataattttaaattttattttaaaaaatcctataaatcttttaaagcaatttaaaagcatattaaaaagcaaatttataaaagcaaaatcattcaattgagaaaccagttaaaagcaaattgtgatgaagaaacaaaagttttgcaagattttctttaagtttgacatttttanattgctaaagaaataagaatttaaacaaatgtacatattttctttanataaaaatagaaaaaaattcattttataaaaaataatcttancagaaatcgtctcgaaaaataatccaatagtcaaattacggatcaaaattgcggataa

SEQ ID NO: 6846 - DNA, 3140 bp, Heterodera glycines
ttttcttgataaaattttttatttaaaaattggccttctttaaaaaaaagttgaaatatttaaattactttcatttgcaatgaaatatagacaaaataaaaatgtttatttgcctatttttgtgcctatttaatgcatatttttgcgttttttgtgcctaaaaaaggaatccctattaattaatgaatgcatataaatttaatttataaattttaaaaataaatgattaaaaatgttttttttaatttaaaattacggaaaaacaaaggaatattctcgagaagaaaaatgtgaatgaaaatcaatatgtgtatgtatgtacgcgagcaaatgttggtgaagttaagttgaaggaaatgggaacgaaacgggccagttgcgtctgagccaagtttagaccaccataacttttttctttgttgaccaaatccaacaaagttggaaacattcgaaagctcttaacaagctctataggttttcccaaaaagcgcaaagatataccgacatgtaaaaaagttataaattaaaatagcaaaaattctgactttttggtagtgttcatgttgcaactttttgataagttgttcaatcgcttagcaatatcttatcaaaagcttctaaacatgtagagctttcgaatgatgccaaatttataaaatttgacaaacaaagaaaaaagttatggtgctttatgcttggctcagacgcaactggcccctaccgtataaaaaaggcaataaaatagccaaatgccaaaagcaaaaaataaataatcaaaattcaaattaaaaatattttcatgttgttaagtattccatgtttattattaaaaattatggatgagtttccctgtatgatttgcctgtggatgagatgtctttggataacatttatctgtccttttggggagtctttcactcttatctttgtgttggtcttttgtgacgataaaattgtgatcagatttaatgattgcaatgattttatttttaccttttaaaatttttccttttgaagtaaaatatttggcgctatttacaaagcgtagtatttgaaaattttttgcacttttttgtctaaattttttcaatttttttcagtttaaaaagtcctgaaaccaagtacctgggggttttcgaggtcactgatcacgaatatgacaatttttacgaatatataaaaataaaatctaaaaataaagtgttttttgattgattaacagggctgtcaaaaatatgcacaaaaagtggccaaaatatgcgcataaatatgcaaataaagtcgtgaaatatgcatcaaatatgcacaaaaatcgtaaaatatgcaccaaatatgcacaaaaagacttgaaattaggggtgtaaattaattaaaaaattttattcctcataattttaccggttgtttttgcaatttcaaatcaaaaatttctgaagatttccggcagtgaaagctcactcactgttgacccactcgcgcacccattcagatttggatttaattttaggcataatcaattttttttttcttaagggatattcaaaccggaaaatatttgacgagaaatacaaaaaacctgaaaatatgtataaaaatggcaaaatatgcatgaaatatgcagaaaaacccaaaatatgcaaaaagttccatgttaaaaaaacaaattctgcataaaaaaaaactatgcaaaaaaaagtgaaaaaaatttccaaaaacggccacttttaaagtagcgccgtttttttcctactattcagagcatggagaatccaggaaaaaaatatgcatttgcatatttttgacagccctgttgattatattttaagaatgattcaaaaattttagaatttttcaggaaaaaaaatatgtaatttttcgtgtttttggggcgttcgagtttcgtattttgctttagtttcgcattttatttttcgattcccaacatccctgatccgcactattaccgaggaatgaatcccccaacttcttttccgtttcatggttttctttggtacaaggtgtgaataataaatgatgatgatgaagaacggatggatggaatgaatcaggttgggggatgaacagatgagagggaggaggagacgaccgtctcccacccctaaaaacatttttttccttttccccattttcttcccccgtcctctcccctctcttctgcagctttccgctgttgagaatgaaaatgggaatcgatttcaacgatgatgtgtgaagagagagcgattttcctccatcatcatcccttcccctccctccccccatccgccccaattccgccaccatttttgtgtgtgtgtgtttatcggctatcctcttctattccacacccaaacatccttttttcatttctatccccaaaaactttaaattcgggaaaaatggtttttattcatctggcgtgaccaaaaatctcataaatccattgcttgtactatgtgtggagatgaatgaattgcgtccaatgtatctacatactgttcatttgcgacgacgatttggctcaaattttcaatccctcccaaaaatttgttcggaatttcagaattttgtttttttaatgctaacagaatcagtgactacatattatttccttaaggcgcgacccctcggggaagaaattctcggggagcgcggaggaggacaggtcggggagaagtcccaaaaatgtaggggacggggttgaaccctaccaatttatttgaaggttgtcgtatcattcatattcaatgccaaaactggtaaaactaaaaaaaaaaatttttttttttaaagtgtgggaaggcctcacaaaatttttttttgaccagtcacagacagcatgcatcaacaattaatgacatttgtttagatttgctgcaatttcaattccattttttaaattttgtcgacaaattaaacagtgccgaaaactaaatgacttccagggatgacgaatatgactatttgtttaagggtttgtcattgcattttttggcatcaaaaatggccaaattttttttttcatttatgccatgtaaattataacgatttttattttgtttattaatctgaaagtgccggactaaaaagcgtcacaaaaaccactgtttgtttgagttcgaaattggtcaaaaatggat

SEQ ID NO: 6847 - DNA, 2588 bp, Heterodera glycines
ttccgtcccagcccattcattttaaagtcatttttttggtgtttcagttgtattaatcggcgactcgggggtcggcaagtccaacctgttgtcccgcttcacgcgcaacgagttcaacctggaaagcaagtcgaccatcggagtggagtttgccacgcgaagcatccaggttttgttttgccccacccaattaggcctgggcatgaaaattattggaaatcccgtacttttagcagccggattttatgggtcagtaaacagcattaaatttttaagaaaaaattctgttgtttgaaaactcaaatttaaaccatttaggtattcttttttttaattaaaaaggatattttctttcaaatattttttaaataaaaaatatgtaaatttttttttaaatttttctattcaaaattcttgtacttaaatgggctccagtttttttttttggggtataactccttagtagttgatcgaagcgaataaatttagtgtatttgatagccttaaatgttctcggtctacctgccaaatttcaaaaaattccgttagattatacaaaaaaaagtgttgcgatcaaaaaattacaaaaaaaaaaaaaacataaatttttgtgtcattcgatagccctaattgctctttgtttgtctgtcgaatttctttaaaaaacttacgacaaaaaaaatttaaaaaacgtgttttcccgaacacttggccttgacttttttttaaacgggagtcgaaaacccgaaaaacgattccattcaaaaaaaatttttaatgattattccaggtcgactccaaaacggtgaaagcgcaaatttgggacacggcgggccaggagcgctaccgggccatcacttccgcgtactaccggggcgccgtcggtgcactgctcgtctacgacattgccaagcatgtgacctacgagaatgtggagcggtggctgaaaggtgtttgtgtgtgccggacggaaaaaaatggggaaatttacggcggaaatttttggtttaccagaaattttctgtgtgccaaaatccgacattttgaaaaacttggacatggattttctgggtaaaaatcccattccttgtagagacctggacccaggaaaaaaaccaggcctggatcggggtcgatccaatattttttcaaaaattatttctactttttcattttctggcatttttttttcttggcggggacaattttgtaggcctcttcagcctcttcaccggtgtggggaacagcctcagattaattggacaaaatagcgaaatgacgtattttcactataatcgttttttaaaatttaattttgcggcaaaaatggaaaatttaattttttaattgaattttttccgggacatgcgctggggacagcagcctcagattaaattgctttcttaactttaataccccgttttttgtccaatgtatttttttttaatttggtgacattggaaaaaaaaggaattttttttttagaattttttgctaaatttagcccattgagataacatttgcaaaaaaaacattgaattattgagagccggcgactgttttctcgctttttttataatgtgtctgtcacattttttagagttgcgcgaccattccgaccaaaacattgtgatcatgctggtgggcaacaagagcgacctgcgccatctgcgggcagtgccggtgaattttagtgaaaaattccaaagaaaaaatttggcagtcgtcagttttttttgaaatttacgaggccaaaaattgggtatactttgtctcctctcgaaaaatttttaatttataaaattttcaaaaaattaaaaaaaaatttttttttgaaaacttggaaatcatcataaaagtgaaaaattttttaaatcttttttaaaaaaaactccaaaattgtatttcaagattaaatttttactttccccaaagactgacgaggccaaggcgtacgcggagcgcaaccagctgtcattcattgagaccagcgcgttggacgccaccaatgtggaggacgcgttcaccaacattctgaccgaaatttatcgctctgtcagcacacggtaagtaaaacaaaaacaaacaaaaaactgatctgaggggctgattaacccccgattttactcaaaatttgcaacaaaaaaaaaaatttcaccagcagcaaaacctcataaattttttaaaaataaggcttgcggtattccagaccacaatcccccatattttttggaaaattgctagtttaaactcttcaatatcggtacgccaaaaaaaacaattgaattttggtgccgctatcggatctgcaaatttgaattgttgttagagatcgacattttgaaaaaagcctggacctggacctggattccatgttggacctggacctggacttcctggacaaaaatccaggaaaatccaggtccaggaaaaatccaggctcatcgaacctggatccaggcctggacctggattttttgaaatttattttaaaaatcaaaagaatgtttgaaaaaattaattatttgcgtagaagcatctaaaaatatgtaataaataataataatgtgtttttaaatttatttaat

SEQ ID NO: 6848 - DNA, 4351 bp, Heterodera glycines
cgctttatctcgttgtccactcggtccttcggacacaatgcgaacagccgagtccaactttggctccttggtcagcggattgttgcactacaaaaaagcattttttaaataatggaatattcgagaatttgtgtgattttcgaaataatagtgtttacaagatcaatggtcttcgcactgtccttggacacgtcgtcacaccacgtctcgcaccacagccattcctggggcagcgagtggatgcgcacttggtgaatctgaaacattgaggaatggggataaaaatggaatgaattttctgtaaaaaatatgagaatttgatttttttttcgcagaaaataaacgcttaaaaaatctaattcttgggatcagaaaggccgaagttggagagcataactttcccactcacggaaatgaaaaaaaaattcaaacttagaaattaaaaaaattttctagaaaatatttttacaagaaaattgcaagaaaaagatttagttgaaaaatttttctaggggttttttcgaatctttgaaaaaattagtaatacaatataaaattttgaaaaatcgctttaagattttttctaaatgttcttacttgtaattttcttataaaaaattctctaatttcttttgaaaaattttggtttgtgattttttttttaaatttcggggaagagaacgatggcggtgactgatgtcgccgtcagacacactaaactcaaaaatgcatagaattgacgaattttggtgtaaagtttgtcaacaaattgcttgccaactcaccatgttgttgggcaaatcctggtccaggtttgacaacgagttcgggtcggagctgagcccttggtattggccacggagacgatcgccggcggcaatttggctgaaaatatttacaaagcatttaataatttgatgattaaaaaacatttttgaaaatcaacacaccgaaatttgaccaaatccaccacgtaaagagcactgatgtggtatttgcggcccgccaaatgctgggcccagtagccgctccgccagaaccgaaagccgtccatggacttgcgactgtcgcaaaacggcgtgtagctgcaaaagcaaatttcaatcatacatatacaaggggtgtctcgagacacccccccccccccccctcgttcgtcgtagggggggggggtcgtcgcggagtgtggtcgtaacgaagagggaaaatttccttagcgaaacatacaaaattcaaaaaaattttcccggcggcgcctacgcaaagaaaaagagtgtggctgaatagaaaaaaaagaataaatataatataaagatgtgagaaaacgcggatgcttatatggagagagaaagcgtaggtggagcaattttagcagagcgacaaacaacaaaaaagagtgactaatactaagcacagaaatcacatcacaggaatataaaaaatcacaattattcaaaattatccaaattaactcaattaaatttctcttcctcaatttccttccatttctctctctctctctctctttttccctcatttcttctttttctccactttcttagtcgctttggcgacagcccttgggctgagacaccccttgtacatgtatgaatggcacacaattaatcggaaacagtcctaattggttctaattaagcacacccttctgccggaccaagccctcgaattggccaaggccgcttctcaagtgacgacagcgaacgcaaatcgcaatcagcgaacggcacaacaacagctgcaagcacccactcaaaatggtggggacacttcctcctcttccacgtcttccgttgtcagtgagcgaaggacatcacaaatggcttatttcgaatttcccgaggtaaataattcatttatttaaaatccagaaacaatttgagattaaatgatcccctttcaggctgattttgacagtttggaagcactcgttgagtttgcgtacaccgcccgacttcgaattggaagtcgccgggtaaaggagctttaccgggtaaggagtgtttttgttgtgcttttttgttttccgtttgattcaccattttgattgacgtcctcaatcaatcaataatcaatcaatcgatcgattggtcagactgcctttgctctccaagtgtcctcggtggctcaggcgtgtgcccattggctagccgaacacctcaccgtcagcaactgcatcggtcttagcaaaaaagcaaatctctttcttaaacggttcaattcacatatgcacaggggccacttttccgttcccctccatttctcataaaggggggggagtatagaaagggttgaagaacacaaaattttgtcactgtttttgcaaatttttttccttgtgcatgtgtgatttaagttcttccagtgtttctgacaaatccaaaatttccaaaaattattctgcaaatctgtttcccgattttttttcataagaaagtacaattgaaacaccggttcattcctctttcttgggaccttaaaattcttatctcatcagtttttactggatcaagttgataattttttgctccataatgcaattaaattttattacctacagtatagtttttctgtcttgcactgttctttggtcttttgtcccttttttaattccattattttgtgggtcctttggtgactcattctctccattatcaatttatcactgattcgtttgttttttgttatctgatcatttaaggtattcatcgtcaagccaacctcaacaaagacgcttttctgttgagccgagtgaacactttcatccgtgacaatttcgaggcggtggtcggcgatagttcggagtttgcgcaattgccgtgtatcaaaagtcggattatcgtttcggcctccgacgggggaagagaatttggtgaattttgattcgaaattctaatgacacattgatttgctcttaattacgataagtaattattgtgtctatttgcatttgcagcagcacaaagtgaccaatcgcacctcaaagcgccccttctcccctcgggggatgaactcgccctgcgctgtcttcgctatttccagcacagcgcactccgcgcagcgggcgaacgcgtcgatgcgcacatcgaatcactggcggagaaaacgcaccttttggtgaccaactcggaggagcagcacaaaccactggcgaacaacaatgggggcgcaagcagtgcggcgccgacgatggcaaacaatggcaatgggcagcagcacaacaacggacgactgcaggacgccaacgaattggacgagaaagtgctgtggggggggggggaatgtgggatttgcaggaacacattaaaacaaaacacgacatgatgttacaaaactccgacaaaaaactttcatttcattggaaatccatggtaaattcggtttcagagtatgttgggatcgtgtgacctcgtcagggactacaaacggagcgcgagcatagcagcgagcgggaaaaagtcctttattgtagcatcatcaataccgaatttggatttttcctatttgttaggcttttgtcgagcaaaaccgaccaacagtcgtcgcttcacgtgatgggtgccaccccaattaagctgaacggtgccgacatgggaagactttcgaccaaggatgccattaaattcgcttcatggtgataaaaaagtgcgaaaatattttcttactaatttccaatcagtgagtcgctatgttcggtgggcagttgctgctccaacggaagcattccgtccgaaggcattgccgtaaacggcgattcgctcgccgccgtcaattccatcgcctgtcgtcagataatttgtgtactgcccactgctcccggcttctgggtttgtctggccctgctcttccaccggttggtccgcatcagcatccatctcagcgaggacgaggaactaatccgaaggcatcgcgaagatagagaaataattttgcattcactcccttttcagcagtcgtacaagttcagtcgcgagcagtacagatgggattggtgccgagtcggatggttcggtcacctcaaccgacgaccatggctccaccgacggcactgttgatggccgacgcgcagttctacctgcgcttggcgaagcacgttgtgccattggagcagcctttttggacggaaaaatcctgatttcgggcggatacgaccgaaatctttgcttacgaacatcggaggaattagacatttgtggcggagcggaagagtggcgacagttggcaccgatgtgttgcgaaagggcacgttttgacgcggcggtggtcaacggaaaagtctgggggaatcacaaaagataataaaaagaaaatgtgaaatcgcaggtgttcgcag

SEQ ID NO: 6849 - DNA, 1416 bp, Heterodera glycines
  unsure (1)..(1416): unsure at all n locations
tcctctanngagtccggaaanagtctggggggaatcacacaaataataaaaagaaaatgtgaaatcgcaggtgttcgcagtgtgtggctccaacgggaacaacgacctttcctcctgcgaatgttttgacccgacgacgggacgatggaacgaagtgtgtccgttggagccggcaagaagccacaacggtaaggaaggaggaggagacggggacggcattttggcaaaatgggcaccacgagttcaggttgtgcttccctcagcggactgctctattgcattggcggctccactgatcacgcaactttgggcgattgcaggtgctacgacccggcgacaaacgaatggcgagagatcgcaccgctaaaggcacaacggtcacaggtgggcataaaaaatttaatgaatttttcgtaaaaaatttttaatgatggggggggctgatccgtggggaaagggcgggggaaaccagtgtatcatactaccacaggctggctgcacggcgtggcgtggtttggtcgtgtgcgttggcggctgcgacaagtggaactgtttggactcggtggaggcgtacgacccgcaaatggaccaatggcatcaccttgcgcgtctccgtacgcctcgtcgcggctgtgcggtcgctgtgctcggcaattcgttgtttgctattggcggtcacgatggtcacaacgtgctggccaccgtcgaagttttggactcgccaaacgcacagtggcgccctggcccatctatgcagcagagcgctcgtgttcaccaccacgcgatttccgcctcgggcattggcatttttgtcgtcggcggatttgacggcacacattttttggccagcatggaagtaatggagagcgaggagagtggtgagacggatgtttaaatgtggaaacaaattctaatttaaaattttaaaggttggcatttttcgcttgacgaccggaaggtggaagtggatccgacacttactctaattagcgggtctgacagaagcgagacggcggacgatgagcccgaaactgccagcacgacgccgaccccgcgaggatgaaaaaaacgaaaatttccgctaggattgcattgtttgtgtttgttggattgtacgttatgccaatcattcaacggagaatggtttctgatcttccgggttttgctttcttcagttatcttttatttacctctaaattaaatttatagtataagatccgactctttccctttaactggcatttgacgaatgaaatgacagcttgaatttcatcaccgtcctattgttaatcatattatttagcccaaggcaactgtttcgatgaaacatttatgaaaaataaataatgtaaataaaatacaaaacaatgagaaatacgagctaaacaaattgcatctcaacaaatgaactggcgg

SEQ ID NO: 6850 - DNA, 1339 bp, Heterodera glycines
gctttttttgtataattagtgtgaccaaatatcgctttttcaactcacctctgtctcccaacggcacattttgctgttggatggcaaattgcattttgtttccgcccgtgtacactttggacactgacccgcggctcacttggtagcgataggcatgcccctgcaagaatttgacaatctttttctgttagtgttactgaaccacttacaaccggcggtggcacatagccttgggagtacggatgcgaacggggacggagttggggattttggtggtggtattggtactgctgctggacaatcctacgcaaaatggaatacttcaatattacgagcctcttccctttttaaaaacctatttttcgttgcatttttttaaattttggatttcagaggaggctttagcccccttcagcccccccccctttgggtaccccattcattttatacattgtggccggtgctgcttggattgtggtggtgggcgcaactgtcgcgtgcggtcgctgctgtagcggtggttgcgctccttcagcagaggcggaggacgaagtgcaagtgccggagacagtgttgacgccgtcgtcaccaatgacggtgggcgagccgagggaagtgccggtgccactgacgctgttcgactgctgctgcttttcagaaggaccgctgccacctccggtgagcagcatcaactgtttgtaagtgacagcgggcagaagagccgcgtcgctgggcgagatcagtcccgactcggaggacagggaaaagtccaacggattgtacaacagaggacgactcatcgctaaaggggaaatgaatgaatgcatcaggaagatgtggcaacaataaatttgatggaataattgtaatattaatacactgaccagcggttggtggcaattctctttccaacgcaatctttcgcaatcgctgtgcgtctgcaagtacggcgtcaatttcagcttctcaaaagaacagaaaataagcagatgaaaggtgttaaagggaaatgaacaattcaaatttgggcacttaaatactcttcacacccaccgtcgtcggtgctgctcatgtcatcaatttcgatgcgcccgtcccagattggtgccgaagttgtcaacgcggaggcatgcgatgtccaattgcgcttgaagtggacggtcgtcctttcagccgtttcagtgccctctctttcggcatggacaacaataatgcgctgatcctcgcccttttgttttgcctcggcttctctttgaagaacactttctgctgccgcttcttttcgatggtcagtgggtagcgttggagaaatttgctaaaggcaaaataacaatgccaa

SEQ ID NO: 6851 - DNA, 6272 bp, Heterodera glycines
  unsure (1)..(6272): unsure at all n locations
attcgggttcttacgcctctttccttcttcacagtgtcctaaaactccgattgcgacatttcgnccggttggtttcccctgcgttgcgcgagttgcctttgcaccacttgttcagtggccatgccggcgtggtcaaagcctggggtccaacgaacctatgagagttcataaaatggcaaaataactttcttccacaacttttttcccgagtaatcgctggtagcgacatattgcgtcttcgagggcgacagtgatggcatggccaatgtgcaagttgcctgtcacattcggaggtggcaaaaccattcggaagacttcttgggatggagaatcgacaaattgatgtgaagatgacgtcgcttcatcatagtgctgctggataagctgaatggctttctcattgtaggtaccaaatttggataaactaaatattaaatagaaataataaattgttgcatatacttgaaaactaacgaactgacttcgtcaaattgcgaacatgcaaattacatgaaaaatgaagataagagcgcaatctcaataatttcatctcaatttctgaatttaattgccaaaatcaagtttcatcaagcatatcccatcgaacatttgatttagagattaatttaaagtttagcaaaatgatttaagataaaatttttaaaatttaaagaactgctggaaagtgatcgaccgaaccctttcaagaaaaacacatttttatgaccaggaaaaacccgtcccagtttagtttctctctctgttcccccccccccccaccttcccacacagttcaagtgtcctaggcatttaataaaatgaatcaatgtgaaagattaattgtgtcactttttttccgctgatcgtttatcattgggttggtaattaggtaggtataattttattcgcaactccatttcccccccccccccccgcctttttttatttgctcccaccacacattcattcatttctcattatttattgccttttaacattttcttcgttgcacatagacatttaagaaaatggtattacacatcattaatgtaagaaattaattcttttgagtcgatgcatcaacatttcttccattcattctccgcgttcagcaggccgtcatcattttagttcaattataatgtgaatgagaatatacatttgtttcaaaatcatttttatccttaaatgctgctattaaggaaaaatattcagacgaaccaacatattcgtttatttttaactgtttttagattcatataaaaataaaaaaggcaatttcgccttatataattaattttctcccaatcaaattcatttcgtctctatgctacataaataaaaccaacacaaagaccaaacgacaaaataaattagaagaaaaaattgctattgcaattcaaaaggacatatattttacaacgacaaagcaaaaatgactacggaatcacttgtcatccccaaggacatagccaataaaagtaataaattaacaaggaaaacttagtgaaatcggaaatattgttttcgtttcattcctgaattttttttacactttttagattatttgaagggggagggtccggcaaatgcgacaagggaaaatctttggaaaataaagcaattatattaaaaaaaacagaaaattttcaaaatgtctatcaatttaattgaggaattcttacaataacaataggaataagacggtttctcaacaataacgaggcaaaactaattaaaagtcatttagtcatcgatgaactcgaccagaattcattcgaacgatggaaacgaaagggatgcgttctcgaaattgtttgtgaatttttgtttccttcatttttatttccccatttataaacagaagcagaggaacaacgtgcgcttgtttcttaatgggactttgacagaaaatgagtgagtgaaatcatttcgattttagtggaaattactcggactaaaattcttacttttttttattcttccaggactttgcttacaaatgaaatctttcccttgttcaaacaagcgcgagaagctcttggttcagacagttttatatttacgcttggtctgcttattccgaacccaaaatgcggctatgtgatcggcaaagaggggaaaaccgtccaaaaaattcaggttgtacagaactcgggtccacattattaacgttggattccgatgaaaatcaaaaataaatgcgctaattttgaataatttatacattgtttgtcgaaaaaacatttattttccataaaatattctttcgaaaaatggacatacttaaaatgttacgcgaatttgcaatgttttacaggaatgaaaccagaaaaattctgggaggggagtcggtgcactcggggacagtcccaggattttatctggggggggggggggtacctcccctcggacgacgaccccttttttttgcttttcacaccactttttttgcggcggttttcccaaaaaacttttggggaacagggggtcctgctatttgttgacgaattttgtccaaaaagtgacagattttgagtcgttttttagcagattttcttcaaaaaattgtggttttttttggaaaatttgggtgaggctaggtctgggggggtaccagaaaggaaaatctaaaattttcagcaaaaaactatcttttcccttaaaaaatgtctatgttattttaaaaattcaaattcctatatttattgccccccttttgcttgcgggcttggtaaccaataaaatttttcattgttttcaagtgtttttttctattttttaaaattacattaatttaggatgattttggggtcgaaatatttattgacaatggcaagagagaacccgtgccggaagggttcgcccgtctgttcgttcgctcttcggacattgactcaatgcgctgggcccgggcagaggtaaaactgacagaatatgcgaaaacaataaaaatacaattgtttttttatgtgttccataaaaatcgagaaagttttctccatatcatcccaatttccgtctccaattctaaaaaatgtctttgctaaactttgacaaaaagggttcatttttttcgagtcctcctttggctttttctatttgtatcaaatttcactgatttggtattgttcatttgttatgattattagtgctcggaattatatggatatatttcacgaagtttaaaatgaattgtcttacttggaataacagctaacacccgaacgtttgtaaaaaaaaacttttgaatgtatgaattttgaaattttgcaggatggtagccctataccgaggtattttcctgcaaaatttcaaattctgacactacgaaatgaacaggataatcaacgtttttaattcgtgaaagttatattatataaatccgagctctactaattatgcgctattgccaattaaattaataattcacaaaaattgcggtctgccgaaagctgcaaatttcataatttagttgtacggtgccaaaaagttttccttttttacatttatgttttccaatattttcctattcatttaatttacatatttttgctcaatttcctttcattgctctccgtaatttgctcttcccaaaaacaattttctcatcactggtgattcattttcattcattcatcggccaaaatgtccttttccaaatttggtagccctcttccccccaattattcaatcactttttgactttcatttagaattcagtatttttgttgaatgcgtttcaaaggccgccattctcagattcgtcgactcgaggcgcgttcattggagttcaatccgtacgcaatgccaagggacaacaaaaagcgatcggcggacggcaaatggatgacacagaatgaacgaatcaaattgccaccatttggacactttaccagcgaacagcaaatgcattttcgagaaattcaggtcgtcggaatgggaaatttcttgaaaaacgcggcaatttttcattttagtggcatttatttaatttaaaaaatttctgtagaaatcgtcggccatcaattgggttttcgatgagctgctcaatttgacggaggcgggcgacggacgctttgtgactttggaaggcgacgccgaattggtgctcagtgcgaagaagcgactggcaaaactgatcaccgaaattgaggtggcaaacaaaaggcttaagtcgtgccaaatttggcaattccctgccaaacaaattcccatttttctattatttttcaatggtcatattaggctcttctttcaggattcccatctccattcttcgtccgttcggctggccaattcgccgaccaccggccgaacgctctatcgaacggttgtcaaagtgccgtcgcccgcctggcgattagtcatcggaggcggtgggaagacaatcaaagggttgaaggtgggtgtcatcaacccaaatggctttgctaatacaacgaatgaatacttttaggagcgttttggcgtgtccatgcgctttttgggcgacaatttcgttgcctacccgcacttccgatcacttagcatctttggacacgatcaaatgaatgttcattcggctcgcgagcacattgagcgcgaatttgtggcgaaaaatgacgaatatttgggagtgcgtaaaaacttttccaattattaaattatttatttttaaaattggaaacaatcattataaatgggaattagcattttaagcaaaacacttcccaagcgaaagcaaaaggacgtaggaaattcctttccacgacggatgacccgaacaataacatcgatttgatcgatgcgaatgcatacggacacaaaacggagattggcggatgggaatcggacgaagtgaggcacaaagacagaactcgaattattttctcagcattctcccgatgattaataatgcataatgactcttttttttaataaaattaattatgttttacttcattttttctattttaaggaatcgtgggctgtagatgaaccgcatgtttgctctgatttcacaatgaatgaacagaaaactgatgaaacagtgtcaaattcggaggaggaattgctgaaatgggatgacgaagacaaagaagaagataaagaggaagaacaaaaggatgaaaagaagacaaaatccaacatttttggaggagagagaggacagaacggaggagacggaaacactgtgaaggaattgggaaaagaggcagagagtgcgaagaatgaagacagcggaattgtgggagacggagaggaggacgaactctttttgctcattgaggggaaagggacgcaaaaagacggggacgatgacgaagtcggaggaaggggaggacgaagtcaaagcggggagcaccagcaacagatcagcgccgaatttggcacgggcgaaataacaaagcgacgaacgaccaggtgaggaggagaagcatttgggattagttggcactcttccgaaacacagtctgagcgatggcattggcaattcctgcgtctcggccgcttcctccgccgatttctacgccgacgagacggtgcaacagctgatatttcagccattggatcgtaatgccttggcttgtcaattagaacgtgccaaagcgacgctgctcggcgatgaacatttgtcccgggagttggcgcgtacggtaggtgtttggggatactctcgtactgttttacagtacctatcaaaatgatattattgctcaatttcagcaagcccttctccgtgcccgggagcgcgagtgcgagcagttgcgtttggaaaatcagcgtctcaaacttcaattatcttcatcgaccgtagcataaagaaaagaaaacggaaatataaagaaaaagccacaaaatttgaccaacagaaagaaatgaagagaaaagattatttagaagcgattttagatttcgtttttccacggagttgcatttgtttgatgcctgacctttaagcccttttatttgttccctccggcgggtgtgtccgactttgtgtgccatgccttttttttgccgttatcaccttttgccatgtgtttgattcaatatattttttgaggagatttttccttaaaaagattgaattgaatggatggcctggatctaaaagcaccacacttttccatctcatcttattttcgaatttgtgccactagctttgtatttgcatgatctttgcttgtttacattgattgagttaagaaagacgagttaattgctctgtgcattttcacttaaaactgaagtgtactttgtgtatctctctgattcgaccgtgtcat

SEQ ID NO: 6852 - DNA, 2031 bp, Heterodera glycines
ctccgaatgtgtcattgcggctccaattcgtttcccttgggcgttcgattgcgcgactgcacccatctcagctgcgttcaatgtttcgtcgcatatgctgaagaacttttgtcccggatgagtctaaaatggcacccccaagtcggttacaccgtcggatgccccttttacgggtgcaccggtaaaagcgcttaatttttcgctttttaaattggcatttttccattgccctttttgtttcacaattccaacgcacttcagctgtcgtcaccgatgttcacactttgtatttgctggacaagcattaataacagcaataaaaacaaagcggacgcctcttcccccctctgtcccacaaaatttttggaaaaagcgcgccacaaaaaaagcgtttttaaagcagaaaaaagtcgtcgtaaatgaggaaaatgatcaggggaaataaaaaaatattggaaaaaatccattccggtgaaaaatacaagccatttgaataaatattaaccatttttcattgcatataataaaaattttaaatgtccttgaatttcatgaattttccccactatgtccttgcaaatcggcatacccgtccttggaagccgaccttggacgatggcagccctgagttagaacaattaatggtaatagtaccgatggtagtaccccttttttgaaaaaaagttaattttaaaagtcccaagaacaactttctaggggttttcggaatcgctgagcacgaatttggcacccgtttagaccaatttcgaaccccggacccgaattcgaacaaaaattcgaaaattcaaatttttaaaattcaatttatccgacaaaatcgattcatttgcacgaaggaacagcggaatgagcctattcacatggataaaactcagacttgcgaccaaaaattataaaacacgttttcaagatcaccaaagcgctgactccaaataaattcaggaaaatgtgtcgtaggcttacgaaacgaatcgaaacgacttacacaccgtttcaaaaaacgagatgtgtaccaataaatagagagtgccagagaaaaacattatctttttttctctaattttttgtctccttttggtgtactatctaatatttttattattaggaaaaacaacattccttctctccatataactttttttaatccatacaatctgcaccaaattttgcatatcgatagagaaaaaaataacacattcagtaatacatccattttatattttatacactctttcatgagatatattaagatttgtaataaaaaattattttgtgatttaatggcaaaattaaagcgaaatataaaaacagaggcggtgaaacagcggtggaaaaagcaagaggagcgaaggaccaaaatggcaaaggcgacgaaagcccgatgggccaagaaaagtgagttttttcactaattttaattcaagatcatttttttaaatttcagccgctccacagctgaatcccaatgccgaaattccaccgcaggacgaagcagggccgaggataggggcccgaagggaacaatttcgaaaaagggatttgaccggcaactcaataagaaaaattttggttcgcgctacagaaatggacgaacttttcacaatggaatggcccaaagctatttgtaggacactcgaacacctcggcaaaattcaaatttttttcaaaagtgttttgtccgattttattaagataaaatcataaattttaggcacaaattttgtccccaaatgacccaaggcccatcttctactcttccacttagtattgaaatgacatatattgaaacgacttagtattgaaatgacatatattgaaacgacatgtagccgtagaatcgatgtggaagaaattgaagagaaattttaagcaacagtttgacaacaaaactgaagcctacgacacattttcctgaatttatttggagtcagcgctttggtgatcttgaaaacgtgttttataatttttggtcgcaagtctgagttttatccatgtgaataggctcattcc

SEQ ID NO: 6853 - DNA, 2648 bp, Heterodera glycines
aagcataaaattcgaaaatcgtatggcagatatactcatgggcatcttgtcaatgagggtattattggtacaggaagcctatcaattctttgtccatgtacatctcatgtagtgtatggtagcgctgatctgagtccgacattcgtgatcagcgacctcgagacccccttaacacttattttcattaatttctgaaacacatttataggcatttgaaaatgtatgtgaaatctgtcccttaaactgcaaaagtttttctaggctaaaatccacttagatttttttttaatctaaaattctaaattttagttgaaaattcttagacttttttttttgtacgagttgccctgtgtacgagttgccatgacacccttgattcgaaccaaccctttgggactgaaccacccaaagggtaaaaatgctaaaggtgcatcaaaacataccaattgattcctctcggtctgtaaaatgatgaatccggaagaattttcaatgcgaagggtaaaagtttttcgggttttaaggatacactcttttggttgcatatacacgacagaaatcgccaaaagaggtgcgtcgtttgtccataatcttggaattttaataccgttccgtttagctctattcgtcttccaccggtgagtgaacaattctgcccaattgattttctcttcaaaaagtcgttttcttcgcggaatgcctgaaattactcataacgctgtttttcattttccgtgactgtgatttttcaacagaaaagtgtaaaaaggtgatgtgacaaatttattgtacaataaaccccccaacatgcagttgttggaccgcgagtacttctccaaaccgatggaacttttgaagatgagcgttccatcaattgcttacgctattcaaaatgtgtgcctctttggccttcactcgttttaacatttcaatacttttcagaatttggacttcgtctccctgtccaatttggatgcttctgtttaccaagtgatgactcagttgaagatcccttctactgctatctttatgatgctttttctgggcagacgcttttccaccaagcgatggattgccatttttctcctctgcgcgggcgtcgcctccgttgaggtaccaatactcagaagtagttcgttattttcaaatttaaattccgaagttaactataaatatgttttgaaatttttaaataaccaaaatattaggtactcatggactttgtatccacattttttttttttcgcatttttcaattttttttacttttttattgtcacaattactttaaatatcaaataaaggagctttatgtggttattggatacaattccacgatttgggtccacaaattaaaaaaaatgtccggtcctccaaattgcctacgccacaaaaaatcggaaatgtatgtggaaaaaagtgatctttgcgtgccaaatctcgttttgtgttgctgcttgaacttctgccacgtcgattcaattgtgttcgtatgttgaccagagacaggatccttgaaattctccgagtgattcactacgtaatgtgtgtatagctccggcagtttgtcaatgttcccgtacgcggcccatccgtcgctcacaattgttgtgcctgcgtgaatgtgctgctgaatgagtggcagcaatgtgtccgcgtctcgtctttccactggcacgatgaagcaacgtgcagtgccacgctcaactcctccaaaataccactgttgttgtcctggcaatttgccgcggtggtactttggtttgtttaagacagtctcatcaatttccaccgtcgtgccttctccgcctaaacttatcattacccttatcatttagtaaaacatatttaagcaaacaaaaaacggaaccgattttgattggatttctgctgtaaaattctgctgtcacatcgcgcatgaagtttttccaatcggtaactgtgtgcgtgtccaattccatttgaaaaatgatttcatcatttgaacagttgcgtgcccaatggtaggaaaattgaaaaaccttaacatcaattgtttcatgtaaaaaaagggttttttaaacttgtttaggcgacaaatgggctccttcaaaaaaagtgcctttgtaaaatccaattgttggttgtttgccgtcatgatttttcactgaagtgcatatccaaagcgggtgatgacgtcctttaatccatttgtagcgcatttccttgccacagtcgcaaaaacgggtggtgtgtagaagcttaagttctctgagccattcttcgaattcttcgtctggtagagccaaaactttgaataaagcatcaagttttaaatttttaagtgtttccattaatctaaagcaattgtgacaataaaaaagtaaaaaaaattgaaaaatgcgaaaaaaaaaaaaggggatacaaagtccatgagtacctccgcggcagtggagagagggggtccgcgcagccccgccaaagggcggaggcgacagcgaggaggggtccgtggaaggaagagggtccgcgccgacggagggaggggtccgtggaaagagggggggggggtccgcgtcgacggtcggcggaacagcggggaggggtccgtggaagataggggctcgtcaggggcgacggatagggaggggggtccgcgccgtcggacg

SEQ ID NO: 6854 - DNA, 2057 bp, Heterodera glycines
  unsure (1)..(2057): unsure at all n locations
cagagtgccgaaaatcgcatgtgatctaaccctagcaaaaatgggtgtaagtaaaaatcgtaattacgctcaaanagcttctcaaacaattttagcgcatccaattccttctacaatcgcctttatacatcccattatgaacgctaaaattatcagagtgccgaaaatcgcatgtgatctaagcctagcaaaaaatggtgtaagtaaaaatcgtaattacgctcaaaaagcttctcaaccaattctagcgcatccaattccttctacattcgcctttatacatcccattatgaacgctaaaattatcagagtgccgaaaatcgcatgtgatctaagcctagcaaaaaatggtgtaagtaaaaatcgtaattacgctcaaaaagcttctcaaacaattttagctcatccaattccttctacaatcgcctttatacatcccattatgaacgctaaaattatcagagtgccgaaaatcgcatgtgatctacgcctagaaaaaaatggtgtaagtaaaaatcgtaactacgctcaaaaagcttctcaaccaattttagcgcatccaattccttctacaatcgcctttatacatcccattatgaacgctaaaattatcagagtgccgaaaatcgcatgtgatctacgcctagcaaaaaatggtgtaagtccgcatcgtcggacgtcggaatgatggggaggggtccgtcgaaaagcggggtccgcgccgcccggacggcggaatggtggggaaagatccgcggcaacggagagagaggggggtccgcgccgacggacggcagaatagtggggagggttccgcggcagtagagaggggggtccgtagaactgagggggtccgcgccgcccggacgacggaatggtgggaaagggtccgtggaagagaggggctccgcgccgacggagagggccccgcgacagtgaaaagagggggtccgcgctgcccggcgaaagggcggcggtgtccagcggggagggcgtccgcgctatttaacgcaaaatatcacggccccgccaactgcatcggtggccgactggttaacgcgtcgggccaaccacactctcgggttcaatcccgcgcggcgaaactcccgcgcatttaatgcccacagcccaaaatctcgcgcaacccccatcccatacccccaaatcccgaccccactccgtcccgcgcaccagcccccatcccgaacccacctttcccgacgcaccccccaccccattcccgtcagagacgcacacacaaccacccaataggcacggacccccgctcatcctctctcccttcagtggagaaaatcaatcgataattcaagtaatcgtatatagtagtattaccaactaagaaatactgggagaaaggtaattgctttgacaggatttagtcctgtccaattaaaccttcaaatcgaaggtctccaaatggctttggaacttcaccaaagcctttgcacaattttgccgttgaacatatctgggtgttacagatgttcaacgggagcacaattccgttatgtgtgctcgacaaattttggcaattctcttgccgaaattaaatgcaccgatggaacacatttttcgacaaaatgtgattccaatgcatcaatttaccaaacaattttggcttttgataaagccagaattgacacaaagtgccaaacaaagtgtttgactggaagcacttcttttgttctaagcgggacattacactatgtccagcctgaacaaatagaagattacagcccaaatcactctggaaaagtgatggatagccaatccagttggcataactggaattttgattggaaggcgaccctttggtctttgattggcctccaatcatcacttgccttcataatgattatttgtgtaggcattgtttgcctaacaattttcattaaaatttctcctttctatagactttggaaatttatttcctggtctttaatgagaaagagatacggtaacgtgcctacagtattggcaatactgtacttggccgggggaggatccttcgtatgtggaggtgactcacggcctaa

SEQ ID NO: 6855 - DNA, 4841 bp, Heterodera glycines
ttatgaaatgcaaacggtttgtttttattttagataattataaatagttgcatttttgagtatgcaatttgaaaattaaaattgtctcgttccttcgccagtctgttccacaacaacgcgtccgctgccgaccaattgtttatacccgtcagcaacgcggaaccccgcgcggctgtcacctcggcacgcgatgccgcaatgggcgcgcgtgcgctgctccgtcctctgctcacactgcaccccgtcaaacaagcggaagcgatgagacgcgtccatttgcattccgaggcgctgcgattggcggaaaaacgacggatacgcgcggatttagttgccacgatggaggagatgcgcgcacgacggaaggcagacgcaacgcgggacggagaggccaaatccgaagcatttggcacaaactatcagcaggagagtgagtattataataacatttatgggtcttttttcaccctcctcctcaggtgaaggcgcccgtttttccacgcttatgccactggacgaaaagggaagggaggaacggtcggtgccgtcctattgggagtacatatcactcgaggcaaagttgctgttctgtgcgcatcggccaaattgccccaagcacactttggagacgaattggcgacgcgcacttggcgaagtgatcggcgaggtcagcagcagacttgttggcaaatattaacacaaaatgctcattttgggaagaattttgggtaataattgaaaattataataaaaatggcgacgaatagttccaagatgtgccgtcgaatgaatttttaaccaaaaattgttatgcaaattatagttatttgatcggttcaacaccgacgcacaccatcgcggacgcacattgcatttccagcgcattcagtacggttatgtgcgagttcggcccacatacggggtggacatggtattggacataggtaagccagccattcggcggccaaatttcagacattgttccctccctcccatttgggtgttaccgttttatttggctccattcagccctttggtaccgccgtttccgtgccccgcgccgtgccgccacgctggcggtgcgtcggcacgcgtatgtgcagcgtcgcttcgggcacactgtcgcgcgcgttgcctccattttgccaataggtggcagcgacgcttcaaccgctggtgcgctgctgcgcagccctacgccaattcattttgtggtggcactgaagggccgtcccgacacttttgaacgatttgcacaaaatttgatggagctgcacagtgtttttggacgacaaagcggcacgcttcagctggtccttgtgttgtacaggtaaatgaaaaccaaaaaaatcacctaaatttttttaaacatcttaatttcaactaataatttaattggttcattaatctaattactatcaatgccattgatcaattatagacctaattcatatctgattttccttttttgtttgtttgtttttattacccataattgggtgcttaaaaaattttgaatttttaatgaaatttgttaagaaataaggcaattttccaaattgccaatgagaaaatttttaaagtttctgtttttatattcgatcgactttttcgctgacttttttttctctccctcatttttattttctccctcttcctcccttcaccccccccccccacctcgtacgatcgactgtctcgaacccttacgatcgactaagagaccccccctgactacccccttgcacaggtatacttcaaatggtcccccgttttcagctcttcattcgctgccgatgacctgcgcatcaatgcgacgctcacccgcctcgtccgcttcggttttggcactcgcacactgcgcatgccctccggcgctgtgttcagtcgcggcacggcactctccgcgggtgccgcactgctcccaccgggcgcactgctttttgtcaccgacgtcgacgtgctggtcaacgctgatgcaattgaccgcattcggctgaacactgtgcgaaattgccaagtcagtcgcatgagtgccgtggcaatgaatacgaattttctctttcatttccatatcataagggctgtttttacaaaaatatcagaattggaagatttttttcttttataaattaagcattaaaaaacatattcaggcatttgtgcctgcccatgtccaaaatcggatcaaacttaaatttttcaagctgatagcctaaaaacattaaaattaagatttggacatatgcacaaatgtcgggtaaccttaaaaaacttttaattgagttttaccgaacaaattttcaattaaatatatgcaattttgctattttttttatttggcaaatttatataagctgttttatatgaaaatgtactttacgacccttttactacctttattttcttatttttcttgtttaggtgtactttcccatcgtgttcagcgagtttgccccatggacctggcaaaatatcagccaacaagtcgaaactgttcaacaacatcagcagagagtactttcactatcaccaccatcaccaccactgagttcccatttttcatacgggcaacgcagaggctattttcggcattttggctacggcattatggctatttttcgctccgacttcgatgccatcggccaatacaatcgcacattgatgggctggggcctggaggatgttgacctgtttgaacgggtggccaagtcgcatgttctgcgtccgtttcgagtgccggacccgggtgagaaacattctaccgaagggcgtcaccgggaaagacatctaattaaaaaaaaatgccaatgccaattaaatttcgaatttatcaatgcgttgttaagggttggtccacgttttccaccccatcgattgtgtcgacagtgcgcagaatgcggcgcagcgggtcgcctgtgaagggacgcgggcacaaagtcttgcctctgtcgacttcctcgtcgagcagttcggcccgtacctttgacacccatcaaaaaccaattcgtccgcctttttttaaccgtcccctcttcttttcttctcatttgcgcatttctttaacaaacattccatagttttgtcctcttttccattatttccttaattttttggttgtttgtcccagaatccctttgttttgccgccttaactttcacttgtcccatttttgtctaacaattgcaatagcacccgcccttttgtttttgttttgttaatctcaggttatccccttctttcgtgccaatagtcccttcttttttcgtgccaatttacaatacttacaattattctatacaaatcattagtcttttccccatacaaagcattttgttttctcctttacaaaacgagttttctttttgttcgttaattgttgatttttaatactttttgttagtttttttatttatatagaaatgaaaaataaatgatatttttcgtgaagataaaagctaatttagccgccatattcaaaaggtccaactaattaattgttatgccgttttataatccgacatttatgaaaaatggaggaaaaaccaaaatttgacgcgtatattttgtcgggtttctttttcatacggcaaaaacatttcaccgctcacaatcagtcgtcgtcgctttcattctccgtcctcttcgcccatttgttgcagcggagggacgacggacctaaaaaagcaatgcattttgatgaaatttaaaataaaatttaccgttttccccacaggccattggctgtttgccaatttgagttggctgatctgaaattgatgggaatttgttagagcaaagttagcaacgatgggttagcatctgatcagaggccgaactttgtctatgagaatcatttccgatcaagaaatatgccaacagaagtcgccccgatcagaggtggcttgaggatggtccaggtcaatttattcggtgtctatcattgccgtttattgactctttcatccgctgacccaattgtcagtcccttggcattgattggacaccttctaccgtatcggaataaagccactacagtattccatttggacaataatgttgttgtcacttcacaatgcctctcaccgttttccccacagggcgttcagtttgtgccaaccatgctccggccgcttgcgcattgagcgggcatcctgttcaacaatgatatgctaatcggctttaattgtttcgtcatttgacagggcacttacatcaacgagatcactgaacagtgccaaatttgtcaggtcatcgctccgtttgccccaaaggcccacgccgttgctccacctgcgaaaaaacatttgaaatgccatcgtaagcatttcaattttgaatccaaaatgtcacaaatttgtcctcggaatccgacttataattttgttaaacaaaacaattcaaaaacccattaggagtaaagcttaatattggcttcgcccttcgtatcccccgagaagttcggcacagtgccgaaccatttgctaatgccaatcatgccaataggcaatgcttgcgtcattcttcgcacctttgcccgtcggtggacgcaccggcacacactgtgacgaggccgaacagcagcaaaagcgcggcgacgagcagcgcgcaacgatggcgaagcgcatggcgcggggcgaagagcagcgaagggacgaagcgggcggaggaagcggaagacattttggaattttgtgttggcatttaacggatcgttcgaaccttagcacttttgcacttggcttttttgcaaatttcataataaaccatttgtgggcaattcaatgtgcaaaagaatgccggggggggggggggaggggtaattgaaatattgggggagg

SEQ ID NO: 6856 - DNA, 742 bp, Heterodera glycines
aattaaaaaaaactaaaattatcaaagaaaccttgattcttttctaaagaaaattcaagaaaaaagggaacgcgtgcacccaatttaagagaattcatcaaaggggtataatcgattttttttttgaaaaacccgaaaaattaaattttttttaaattgtttggttttgcctgtcccttatacaagccaaaaatcctgggcccaatagagggagacaaaaaaagaggttgaatctttggcactatgtattttacggcaaaatttcaaatttggggcaccactgaccgtcaacgtttcgatggtccgatttccggtggtgaccacttttgtggccacaagttcgcccacatcatcggccccgttcacggcggtggtggtgccaccattcacaatagtggtggtgatggtggtgccgtcccctgcccctgcggcggtggtgcccatttgtgccgactgcggcgatgttgcggaactgcgtcgacgcgccggtggcacaggcggaggcgatttgagagaggcgcgcggaggcaaagcggcgggcacagcgtcagcagtagcattggccatctgatttttgtaaaaaaaaaatcaaataaataaaaccaatttacattaatttcgaatcgaattttagttttccttgtgagcgcactagttgcctcccccgtgtcgtctcccccggaagacaaattttaaaaaaatcatagaattttttttgattttttggggagtaaacgatggg

SEQ ID NO: 6857 - DNA, 3351 bp, Heterodera glycines
ccaaaaatctggattttttaaagaaaaatttcctgaaaattttctagatttttttttcaaaattttttgtttaactgtataaaattttcgttgggagggatatcttgtttccatcaaaataaaattggaaaatattagaaaaatccaaaaaaaaaaaaatttcttgcgagggacatgttttgtatccctttttgaggtacattatctgtctgtgcccttctcctcctcctgttctacctgatcacattgccatgttcgtccacctccgttgtgatgcgctgtgggcccgagctttgttcatgccaagtgcgtacggaggtggtcgtgtgcggcgactgcggcgattctcccaccatttgctggggctgttgctggtcctttttaaaaaattttgaaattaattacctaacgattttttaaaattaatgagttgttgctacaataaattttttcattaaaaatttttccgaaaagaacattttttcatgaaattttcttatatagaaaactttcaaacaagggcaccactcgaactgttaagtttttcgctataggcacgcaaaattaagtaattcataatacgaatcgaccctggactgtatccaattgtaccatttctgttcactttccgacttacaatagttcgaatggttcccgaccccttttttaaattcgctatgacagcgctctacaaaaaaaaacgcttatgttgttcagtcgagaaactctcgtcaatcaatgcaatttttaatgatgctttttcgatgctaacattaattgcaggcatttgctgctgctgcttgccctcttcgtcttggaccagtacatggatttcctccgcgtcactgcttgagggtgatgatgaactgctcgaggccgacgttgtggtggcagcagttgccgtcgccttttgcccgttctgcttcttcgccttcttctcatggtccgttttcttctttttgcccttcttcttctgcttgtccttggaggtgccaatttgctaaaatcaagttttcaaataaggaattcacattttccacctaaaatggtaatttcaaattcgaattcataccctcatttaaaatggtaaatttaaatttcaaattttaattcattccttctacccaatccatgattaatgaacaattttctatttaaatatgggacaaaaaacggtaaaaatctaatcgagaggaggagagagataaagagaaagggaaagaaagagagagtgagagggagagagaaaggagagagagaggtgagagagaaaaatggagagaattgtcagtgagagagagaaaaaagaaagagacagagagagataaagtacagtaggacaaatgaacccaccgtaccaagaaaaacatgatcagatttgaatggtcaaaattggtccaataaaaatggttcaaagcatttactcagcacatccaaaaccaatcatcaaactctaatcaatcaattagcacctgccaaaagcccccaagaagtgccattttggcggacggtctcttccgcttgcgactcagtcgcttcccctcctcatcaacagcagggaatcctccgttctgttgtccttgctgttccaattcttcctttttactcgcttcatcatcatctacaactgttgctgaagttgaagcagtacacgtcacaaattcggcaatcggatggcactttaactcttcattacggtgaagtgaatgcatctgttgctgctgctgaaggtttttcggttcattttccagcaattgttgttgcgtttgttcaacagcagcaattgttttggtggtcacaattttggccgtaagttttttgccatttgttggtgccgctttttgcacgtcacttcttccttcttccatcagtttgttctttattggtgccacaaattcgcccattggtcggcattttaactccgagtgccgactaagcaaatggcattcctcatctgttgttggcggacacacaacatgatcatcggaaggggatttcatgacaattttgacgttgtacttcttgcaattcgccggttttggctcgtcattctcaacatcagtgcgtttttgttcagcagcctttgtcaaagcaacaaattctccaattggatggcactttaactcgctttctcggttaagcacatgccattctgctgctggtgcttcaaattgtttgtttgtcattttttcggcctcttttgatgttgttgccccatttgtttgggttgtttttaagacaattttggcggcatattttttccgagacgtcgtcttcactttctgctgctgatcatcatcttgtccaacttgagttgaccgtttatttgccattgcaacaatttgctcgattggttggcccatgaactcatctttcctgttaagcaaatgcaattgttgcagttgaccatctcttgcttcttcattggcgttatgacgggacgaagtgggccctacagtacccttcgtgatggcagatgttgttacagtaatttttgccacaaatttctttcctcctcctccgtttatttggttgttgtctgctgatttggcgtcatcatcatctttctgctgtttatcaatgcatgaaccaatggggacggacaataattcgctggtggggcaaagttcgtgtacaatttgagcagttggcgttatgatgatttgtagcgcattcacattgccagcagatgctgttgctgcttgatcttcacgcatcgttgtaacggatttgagcgtgacaaaaattttggccattttctttgatccatgccgaacaatgttggcattggcagcgttaattgcgacattatcagtggcctcctcctcctcttttttgacagatttaatcggcatcacagaattgggcggcagattttggcaaattgacgcttcaatgtcggtctgtgtcagttgttcagccggcgccaacaatttgtgtgggccattgtagacggaaattggtggtggctgccattgatttgtcgtccgattcgtcgatttcaaatgaagaattgctccaattcgtgttgcaaatggcaatggctcgcctctttcatccgccgattttggcattttgacatcacgacagtacgcacggcgtggatacgtctccaactcgttggcacgttcaacacgttgcagcggctcaaagcacacagtggcagcagccaaatggtaatcctccgggttgagttgatgttgttcgacatgctcctcctgctgatgatgtttggcccaacagtcgtcgccacggaacggagtgacggaatggccggaatgagtgataccaacaaaatagcgcaacggaaccgactccatttctcgtgccggtcgtatgtgacgtaacact

SEQ ID NO: 6858 - DNA, 3021 bp, Heterodera glycines
atgagtttgctgatcgatggtggtggcacttgcgttgcggcttttttgctggtgggagcccatctcctcctcctcgttgtccatggtttattgccggacaacaacaatttggttggcaaaaatttggtcgatgctgcgttggtgggacaatttttgttggtggcagcggtagtgccattgtcaatgtcgtgccgtcgttgttgttgtcggcgccgctctcgctgccccaacaacagcaaatcgtcgtacagtccggtgctgtacagggacacgcactgctcaatgtgtgtgtggggcaattccgggcaatgaaaggtcaaatcaatttgatgattcgggtcgaaaaaattttgatggttgttgatgtaagtggccattgtcaccattttttaattcctatgtagttaaatcattggattcggtcagaaaatgaaaaataaataaataaattggcaccaaaatgatggattatgcaaatgcgaagaaaaggatgaataaagaaagcaccataaaagttttcaccgcacttctttttttgtgctgttgacggcacaatatttgcgccgcttttttgcataaaaaggaggaaggagcctgggggtggaaggcaatccaatccaataacaacagaggagcagacagtgcgaaaattagagagagagagagagagaggggaggggaaagaagacgaaataatatagtagaaatcaagaggaaagagagagagagagaaagaggggaaacgagagagacaaagagcgagagagaaacaaagggaaggaagaaagaaaagggagaggagggagagggagaaaagggacaataaagcagaaaaatcgattggacaaacaatgaattatttttatttatgcaccgccgcgggggaaaagagtcgcatcctccctcactcattatcatatgttgccccaggaaacggcacatataaaatacctatcgtccaattgaaagggcattggtaaaagtcatatacaaaaaagaatgctactgtctacatggtgaaatcttggttaaaaaaaagcgaggattccgtttagggagcagctcgttgcccccccccccacccgccaccccccgtatcattcccgaaattttttattaaataaaatattcaagaattaaaaaattatatagcatttttttcaaattttttttcataaaattttattctaaaaaaatttagaaaacttttttaaaaatttctgagtttgaaaatttaaaaaaaaatagtttctcgggtgcggggctggaggaaacatcccaaagtgccaaaaatgtatttgccaacacctccaatgccttggctttgactgactgacctcatggtaatgcaactgctgatgcgtgacactgtccctttgttcctgttggttctgctgctgttgttgtgacttttgtggcgtcgtttcgtccgcataattcaggggcgacgaatgctccgccggcccacttttgacgacaacttaagcaaaaaaaaaaaaaaaaacaatgaaataattcaatgaaaagtatagcagaatagtgtacggaaaatttttttttttttttgaggccgattcggagtaattattccatttttttttgttcgaaattgcgcataggactcggaactggccagaaatggatgccattttcgtgatcacccaccctacttcgaaaatctccgaaatactacatgttgagtacaacttttttttaacttgaagttgttgccgaaaagggatggtttccgcaaaactttcaaaaaaaaaatttttttttttttattggggtccaaacgacggacctcccctaatggcaaatgccaaaaaatctctttttagggtttacacaaaaattcaagaatgtgaatggagggtgatattcaaaaacatggcttgcctcacaatcagaatgcttattgataaaattgacccaaaatcaaacaattggaattgtctttgtgccctcccctcactttggtccgccgatttggacgacttcacatgctcatcaatggacggcgcttcgaacagttgggaggccatttgcgattgaatgttcgtccgtccgacgtagcgaaaacgggcggacccaaacccaaacaaataatggtggtgcttcaatttgcggtccggctgaatcagtctgcgaatggcatggagggggggggggggtatggattagaagattaaatcaaccacaacaccaatgggaaacaggatgaaacacggtaaattattattattatttaaaaatggcgcggacgaaacggggaaaaaaacccacaaaaaaaaaaaatttatttttgggaaaaaactgagtgtaacaattctctctcttaaacaacgtttgaatagattggttctgaaaatttacatttgaaaatttttgtatttccccagtgcataaacgtgaagtaacaacatttcaaaaactggacctaaaaaagtgaaacttctctcaatttttgatacaaatttttttaagtccccctttttgtggaaaaatttgcaaaaaaaaaaaaaaatcgaacagaaaaaaatacctgaagaatccatggtgttcaacggcacattcccacaacaatttggcatgttccttcccaccgaccaaagtgtacgtcaaagatgtctcctttttggggtccacctgaaaaaaattgggctaaaaaatgccatcaaattttatttgggggatggacccccaaatctggtgacaaacctcgcccgccttcaatttgatgctgaaatagtgacgacggtgtgagaatttgatgatgcccggccatgcaaaacgatggacacgcatttgctgaatgaatttcaaaatttattaaaattcactcgtttatttgttacgcatttcatttttgagtgttttatttaatttttttcaaataaataaaagtttttcctcttttttttttgcaaaactgctctgatcttcgctatataagacaaaagtgagaaaaccctacctcactgaacacactgatcccatgtgaactgatcccaatctgta

SEQ ID NO: 6859 - DNA, 3370 bp, Heterodera glycines
  unsure (1)..(3370): unsure at all n locations
cttatgtgccacaaaatgcatgcagctgnttggaattcatattttttaaattttttttttgaaaattttgaattaatttttttatattgttgcagaattaattcaaaatgtatattagcttaaaatgaatgtcatagtcatatgttaaatgcataaatttatttcttaactttgaaatatccatttttttattttaaaatcattctaaagtccaaaatgattaattaaaaataatataaaaaattggatattataagtaaataaataagcaaaatgtatgtgtgaaaattttaggacaaattgatacagtttcaacatatgccaaaacggcgcgtcccattgacctcccagcaaatgtgaatttgatggtagtggttttttgttgcaaaagccaagccattatatttctctcacagcattccattattatctcttatgtgttcctttatttcgcattgattttcgccccgcggggaaattattttttatttttattaggaacagaaaatatttctaatattgtacattttgtcagtttaaacttgtgtcatatttggtcctaatttctattttgtgctttgggcgggacactttgacgcaaattctgtattaattcattagacggtaattaatgctaattagccttaatagttcattttttgttgattacagctggctaatggaccgatttaaccgcgctaatcaccaaagccaaaatgcggaacaaaggcggctgaaaaaggaaaaagcggagagagcaatgcgtgacattgaactgtacgaagagctgcagaaattgaagaatgaaacgacagcaatcagcgagacagtcaaaaagaggaaaagccattcaatgtttttggtgagtgaatgccaaaaaagtaattttaaagaagggattgtctaatgcttttaaagtgacaaataagtgcgctaaaaataaaaaacacgaaaattgttaaatatggataaaaatgtttaatttggttaactttgacaaaagttatgacgattttttgtcgaaaagtgctaatttttgctgtctttttccaattttttatgccctttttgttatttcatacatttttatgcattttttcacttatttcatgcttttctgtgcttatttgaaagaattttcgtgcctaaaagtccggtccctattgtttaaatttttaatcactatgtctagaataatagtaaatgatatctcttaggattaaatctatctttttcaaaaaaaaatgaaaaatatcgcggtcacagcccccaatgacaattcatcaaataaattgcctatctttaaatttaatgattaatctcttagctatgccattttgcccatctttgtatgtatgtattatatgatcttccggtcttctctctcccatttgtacgctcatttcgttccgtttttatcatatttaccttgagcaaatttcacgggcattgggtccatgtcaaacactcaaatttaaatctcggaactgccaactgtgtcattagtggtgccatagtttgagtccggcctctgattgatattgctcatggcattttgcacatacgagtagatatataagaaagatttgcagaccatttttaaatttctccaattatttcttcattttcttaactctttgttttccatctcatccttccccatttctgttcatattggcaatcgaccatttttatgagatttttcgtcctcccgttttggcattttcataatacctttcagtcattcagcttcctcaatccgaacatggttgcacttttctgatcacacacactggctttgattacttttattgtaattatctttcccaaattcggttttcctacatttctgatcacatacattggcatttggttactttattgtaattagctgtccccaaattcggtttttccacctttctgatcacattagtctaaattgacaatctatcattttgtatggcaattgaatgtcctattgttttctcatttttatattaagtttcaattattcattgttttcaatccgaacatgcaacttttttgttagccaacattgacagaatttgatatccacgaaatttgacatgttctacatatctgatcagtgatcatgttgccaaaattgacatttaatcttttttaatgtaagttctttgtcccttccttcctattttggcattctcctaacatctttcaattcttcatcgtccgaaactcgattatgcaactcgaacacgatgcatattttctgatcacatgaccaaaattggcattcgatcactttatttgttttgccgttttcataatgctgttcaattattcatgttgctcattcctcacaccaaatttaccttaaagtttgtggcattcgatcatttaacggcatttctatgtcctcctgttttgcatcactttgaatgttacaaatctctgatcagaaagccgaactttggtactcgattattttggggcgccttttctgcatttctgtcattttactcttattgtccaatttgtagttccatttctatttaaaatttttgccacccaattttaacgcttcttcttcacccaatccgtcatccaaaactaattagtaaatttcacaatttttgtccagttaacttttgcaattgttctttttttcatttttttgacaaaataaggcataatatttcgctaactcttaacaaacaaaaaaattatgtcatcaaatactaccgcacccgaagaaaacccctctggggccgaaccctcgaaagaggaattgtcttataaatgttcttttcatcaagaaacaaaacaaaagatagaagccgagtctaatgagttgtttactgagctcgtagaaaaggtgtactaaaaaagtccatttttacatgttttaatcccccaaaaattttcaggatgcacaaactgtggaactcgaagcacaaaatgcagaacacatcaaaacgatcaacagacagaaattacaaatgaaagagaaagatgaagacattgcaaaagtgcgaaaacaaaacgaggagcaaacaaaaatggttggcacacttcaaacggagatcaaggaattgaaggccaaagtggagttgcgcgataccaatttggagataaaggaagagataatcaaaatacatgaacaaaaaattggcggaatggagaaggcaaatgttcaactggcagagacaaacaaaaaccttcatgaagaaattgccgtactcacggagaccaatcaaaatcaagaagaattaattgccggacagggagaaacaatcaaaaatcagcaagaaaaaatttccaaattggaagggatgctgatcaccaccggccatgtggagcagagcattggcatgtgagtgtaaattgt

SEQ ID NO: 6860 - DNA, 2839 bp, Heterodera glycines
  unsure (1)..(2839): unsure at all n locations
tagttccatttctatttanaattttgccacccaatttttacgctctttcttcacccnaatccgtcatccaaanctaattagtaattcacnaatttttgtccagttaacttttgcaattgttttttttcattttttttgacaaaataaggncataatatttcgctaactcttaccaaacaaaaaaaattatgtcatcaaatactaccgcacccgaagaaaacccctctgggccgaaccctcgaaagaggaattgtcttataaatgttcttttcatcaagaaacaaaacaaaagatagaagccgagtctaatgagttgtttactgagctcgtagaaaaggtgtactaaaaaagtccatttttacatgttttaatcccccaaaaattttcaggatgcacaaactgtggaactcgaagcacaaaatgcagaacacatcaaaatgatcaacagacagaaattacaaatgaaagagaaagatgaagacattgcaaaagtgcgaaaacaaaacgaggagcaagcaaaaatggttggcacacttcaaatggagatcaaggaattgaagtccaaagtggagttgcgcgataccaatttggagataaaggaagagataatcaaaatgcatgaacaaaaaattggcggaatggaggaggcaaatgttcaactggcagagacaaacaaaaaccttcatgaagaaattgccgtactcacggagaccaatcaaaatcaagaagaattaattgccggacagggagaaacaatcaaaaatcagcaagaaaaaatttccaaattggaggggatgctgatcaccaccggccatgtggagcagagcattggcatgtgagtgtaaattgtgccttttaaattgaaattagacaaatatttttttattagaataacatgcttttacaatttaaaattttgtttataatttaaaaaaattactccttttaccagaaacgatcatttttctttcaatggttaagttatagttagggtgccggtcttattttgtttgggttctctgaaatcctgatcataataaaatgtcaaaattttcaattaaatatgactataatttataggaatctgtcgcaaattcaaagtggacataaggtactgacattggcagacgaattggccgactgcgagcccaaagcggagttagataaggcggcaaaggacgacaagcaggaagaattggaattggagaaaaattggttggtttaattaattatggagttattaattaagcaattaattaatttaaatattagcttgattaatgaaatttaatttaaataaaaattatttggttggattaattgattgatttatttatggatattaattaatttaatcaatttaaattttttaataaaatttcaatttaaattcaatatggagatatttggttgattgattaattaatttatttatggagttattatttaaataattaatcaatttaaaatacggagtaattttaattatggaattacttttattgttaattttatctattaattatatagtgaaaaattttgtttcgggcttttagttgttttttagtttttcactttctcaaaagggattttttggtttttccgagccacgagtaaaaaaaggaataaaaaaaatttaaatattgaataaaagattcatcaaaatttatgtcaataattttgtagcaaattgccggcaccaacggaaagcgtagagggtaaccaattggagagcatccagagacagcaggagaaggatgaaggggggaagcaggagaaagggtaatttggctaaattaaatttattttacacaaatttatttttaattataaaaattaatgaaatttttttatgaaattttttttattgttccaaaaaggtgcattaataacaaaagataaatgaaaatattaaaattgtgatgttttaaccgtgaaaatattaaaattgtaatgttttaacaaatcaagatttagtacaacagatgaatgtggacaggaaaatcagcagcaggagaagggagagaaggacacggaagagagcaacaagtaaaaaataataaatattgaattaaaaataaaagaaaaattcattgaaattttttgtaaaatttttgctcattatttgtaagaaatttggcgacatcggaggacagtggcaatccgctcaaatcttccgaggaaaaccaaaaacagcagcagatggatgaaggagaagagaaggaagaggaggagtgcaaagagtaaaataaaattaatatttaattaataaattaacattcaaaatttttgtcaaatcttttttaattatttgtagcaaaatgccggctacatcggttgacagtggcaatccacccaaaaacaagcacacggatgaaggagaagggaaggaagcggaggagaaaaaagagtaaaaaaaaaaaaattaaatatttaataaaaaaacaaataaaataaaaattcaagcgaagacgaagaatggaggagggtaataagcacaatgacatataaaattaaatacctaaactgaataatatttttatttttgcaattagaaattctcaaatgtttaataaacatagaaagggtaattttcgatttaaaatttattaaaaattttatatgtataatttttgccaactaattttcagttcaaaagaagactatgaacagaacgaacatcagcagctgaagaagacagaagagaagaaagtggaagaggaaagcgacgggtaaaaacaaaaaataataaaatatgaaaaagtaaattatttatttattataataataccatttttgctaaatgcatttggcatataatttataggaaaatgacggt

SEQ ID NO: 6861 - DNA, 4195 bp, Heterodera glycines
  unsure (1)..(4195): unsure at all n locations
aagcatcaccagttggcataaaaatgtatgctgacgatgttaaatatatatgcccatgaaaacgatgancatcaaatcagttgataaagcgatgagctnnnggaaaaatggtcaaaaataaatgggttagaaatttcaactgaaaaatgttttgttctttatttagggaaaaataatatgaaaaaagaatattttattaactcaaaaaagatttcagaatcggataatgttcgtgacttgggaattataattgactcgaaacttaatttttcagaacatattagcaaaattatacgaaacgcatatattagaattttccaaattttgagagtgttgaaaagcagggaaataaaaactctaacagcagcctataaaacttttgtacgacctcaattagaatacgctaccgaagtttggaaccctaatttaaaaaaagatatagataaaattgagcgtgttcaaaaatttttcacaagaaaagcacttagaaaatgtggttttgtgtacaaaaaatatggggaaagactaaaaatcacgggtttacacaaattggaagaaagaagaaaaatcaacgatttaacaacagcttttaaaataatcaaagggttcaccagcctcgatgctgggaaaagtttctttttctcagaaaggcccaggaggcctttacttttacgggtaaagcgccacacggccaaaactcaaaataattttttcaatagaatagtaaaaagctggaataatcttccagtggtagcggtgcaaattaataaggcaaaggaattcaggggtttactaaaagcaatgagttctgagtaggattttccatgttgccatatttacactatatttttatcacctgtgaatttttaacatttgattgaattatttttattcatttttattacggtattcattttgtatttttattttgatcaaatttatttgttgttttctttttggcaccataaagagcactcatgtgcctttggtttgctcgataaattaaataaattaaattaaattaaattaaattaaattaaaatgttcataagacaaggaaccaattctggatgaaattacagtatttaaaagggaaacattcgatggggtgaaccgtctcatatatataattttttgtttttgttttgtttgtggaatattcaaaatgaaaatttgggctgaatggtcagatgaaaatatgccttcttcaatagtacagtgtttaataagtttttcgttagaggttaagaccaggtcaagcaacgaatttccccttgtaggtccattggttgtattaatatatgagaatttgttaaaaaaagtcacaaaatatttcaccgagattactcattgttatatttctttattaattagaacaccacaaccaccaccacgttttaatatttttgattttctatgtgtttaatcgaaattataattttctacaatccatgggtaaaaggagcattcctcctttgtccatgtctcagtcagtaacaagatatctatttgattatttattatatttaaaaatatttcgttaattttattattaattgatctgatgttaattagacacgctttaacttgcccccgggagactattgtgtggccggaattttcagaatttttaggtgaatttgtttataagcgatccgatttcaagtcagttttccttatcagtgtcaatcaattgctgccgaaaactgtggacttcttctggaggatcacagcacccgcataaactatccattcttttccatccttctgtcgtttttcgacgcattgtaaatacagacgacgacgttcctccagctggaccttggtcagcgattcacggacccgaacattctgcagagagattggaacttcgaacagcggcggacttcttttgtcatgccaccaaagccagcttctggaaggcacgggacgacaaaagaactttcagcggtcgcggacttttttgggctgggtgataaggacggcccatccgataacaaatggtgccgcattcgacccccagcgagtcaaatataccgttaactgcggcacggtccatttcagccctctttgagggtgagttgtcggcctgttctgggaggcctatgacaacgacgcttcgctgtctctctaattcctctgctgagattggcagattagcacaagaagtgggagcggcggtgcggagctgagaaattgattgagtcagcaggtcaaattgggtggacagccaaagtggtgatttttactaaataccaagtccgctcatcacacattctctgagatggaattgtccgggttttgctgttcgttttcggttgcagttggcatttggtttcgttgtccagttttgtttaatttagcttaatcagaataaaaattcaattaagcatatgactagcatatttaagcatttttaataattaaatgatgctggttttcattgcttctcttttcactttttcgtataaaaaatatttttattcacgaaataaaaaccttttccaagccaatcgatattgaaaacttcggcacgacataatggacaattattgtgctttttaatcctgtgaaaaaggtattatttaaaaattttttaccatatttctttaccaagcatcaacgcattccgagtgaattggtgctaaataaattaggattaatgctattcgtgtggaattggtggtaaattaagatttttaaaatattacgaaaagaaaaaaagatttttagtaaatttttttagtaaataaacggtttatccgcgtaattatggcaaagtgagatgatcactaaaattccaactaaaaaattacataaaaaatttataatatcatatgacactaaaataactttttttcttgtaagtaattcaaagaatgcttttttaatttagcgagtttcatagttattcaaataaaaattttttgaaaatcacataccgtacacggcaaagtgcgtagcttatccccgatttcatagactcctaagcatattgagcaaccgcctctaccactactaccatcatttgggcaattgcactaccaccacttacaaatgtatgctcaggtattttgttaattatttccataactgcatttgaaacttaaaaaacagattaacactagtcttattttatttcatacttcttttctgttgaaagttagtcattgcatttctggcccaagaaaccggcaaattgacacgaccagccaattagggacaaagtcttggttggccagccatgtgccaattttcccagaaatgtaccatatgataagagaaaatacgataagaaaagctaagaagccaagagatgccagatcaacgaaccgcttcttacgcctgttcctcttatttttcttgtcagctgaaatagaattgaatattaatgagtaagattttaattattaaaataattttgaaaattaacaaatttttctcctatattaattaattatctcttttcccggcaattattatcatcaattacgttcatttttgatgtttgctgcgatatttaaattgtccactgctgtgtacataagcttcaacttctgcttctccgcagaattttttgatttttcatcttttttgtcctttttctgttgtcgattttgccttttttccgccaataataatttgattaatttggcaaatgatttaattccaaatttttcttttgattgaatttcagacactagaattttttccctttttgctcagatttcaatggacgataataacaatgagcgtaaattttccataaatgagtccgaatgatttcctaaaaacaattaaaattaatcaatttggcacaaatatttttaccagattttaaagtccatataaatccatattttgggtgttttcggtgttttcggtggctatttttagaaaattttcacgaaaattataaatattttcgccatttttttgcgaacttttctttttttttaaaatgaaaactttttttttcgaaattttggcaaaacttggaagtattttttatacaatggagaaaataaaattttgcatttttaagttttaaatccattttttggttgtttattgtactttttaagtttatttaagcaaatattgaataaacacacattttttggaatttttggtggtttaaaacatatattttagcagtttttagtccatattttatgtccatattttacgtttt

SEQ ID NO: 6862 - DNA, 4092 bp, Heterodera glycines
  unsure (1)..(4092): unsure at all n locations
atctgatagaattttaatattccatttaatcaatttagcgtttaaaattgctccattttaggttataggcactgtcatcagtagggagcggattttagcattcgacccttttttgcacctatttcggcattttagaaaaatttcttaccaatttttaccattttgggtccctatttcgccattttttgcccccatttaggcccctaattggaatttttcaaccctaaaaatccgcttcatagtcatcagtttttttaaatgaattctgctgatggttatattcatgtaaaaaggatttatagcgactaaaaaagcacaaccaaatacttacggatgcataaatcaaaaaaaaattatttaaatgtaaattattaaagaatgcttatgtatcaggtttccaattatattattcccccattctcccattttcacctcatttttcatgtcctccgccatttgtgccatcattttctgtccatccattgaaaagcattcttttgggaagagaaaaagcggaaaagcaaaagcgatcagagaaaagcggcagaaaagaatagatttcattttgttattagaaggtgaatttgatatttgtcgaaatttcactacccttttataagaaaattcccatgggcagacggacaattatcggaactaattaaggcaatttgattggacagagaacattaatgagttttgtgagtcaaaggtgactctcactcagcagttgtgctcaaaattcatttttatgcatttattagaaatattagttgttggttggttgcaaattggttgcacataaatacttaaaaatcatcatttttatttatttggcaaaaaaagaagcaatttctttcttggcatattattaaaatgttttttttaatggcattggaaaggcaatgacataaaacaacgaaagaatggaatgggagttttttattttatgttattttctttggtgttattgaacggaatacaggtaaagattccgatctcatttaccaaattcgatttccagacatttttgttggccaatatactgatcaccgattcctgaaatattcaaagggcttagaaaaccaatttcaaagtgccgatcttaattcagatccttatttttgaacattgacttaaaacccaaacgttgaaaaaaaatttgagacgatttttacaattttttgatatttatcaacaccgccttaattcatatttaaattatacaaataatagccatacaaataacaataaaattgattattttattttgtctttaaaaatatttaaaatttgacaaagaataaaaaaagataataaaatatttatttttttcttcattattttanaattatttaagaacacacatttgttcgcaaaccattcgatttggctaaaatttattttaaacattatgtactcaaaacaatttacaaagtacttttatattaaatgttaaatgaatataaaagtattagaattcatcctttttactatttttattaaattaaattgtcattgactttcatttattcgttcttaaataatctttgcgttttaaaaccattaattaaaactttcgcccatcaattctttccccattagcaaaatgattttatttttttttttttgcctgtttttcacttttctccgcgctttccgcccaagaacataatattgatcaatcaaatttttattaaaattactaatgcacactaatccattcgcttcgtcagcaggtgcaaaacgggcggcctatgaaaacgcgccgtttttatttccccatttttaacttccaaaaacctttttttaaattataataaataaataaatgtttattcgaatgctatttaaaaaatgctgtattgattttttaaggctcaaaaaatgaaatgacataaaatttaataaataaaaataattttatttttcttatcgtctttcattgtgctatttatttgtgcaacaaattatatcaattatctaccgaaatttttgtgaaatttgtctgtgtgtttaatggacaaaactgctaataaccagggaagtgttattttaatgatttattatctctaattaatttcccatgcgaaatttttcttaaaaataaaataattattccaataagataaattttggttccaacaattgaaattaataaaagcgactgatcataatattttaaaaatatgttatttttctgtattaatgaacaaattctcaaattcttttaaaaaatgttactgccttttttaattatctttaagcctatttctgacacaatttttcgcttttatttggtccaatttccgtggctaaacaatttaacacttttaaattagcctaatttcagtacagtcaaattgtcccaaattaccattttaattgccaaataatggcttacccaataattaccctttcagaacccctcttaccgatgctttctccaaaaagtgacttggatttgcacactcggcggccttctgttcggctacgacacaggcgtgatcaacggcgcgttgccgttcatgcgcgacgagttggagctgaccgatctgaccattgggctggtgaccagctcgttgctgatcggtgccgcagttggcgcttttgtgtgcggtaaattgtctgatcgacttggccgaaagcgaacactgattattttgagcgtatttttttcattttaaatatttaagtatgtattactagtattaatataataatttatttgaaatgattaatcaacttaactaattaacaatattaatttaggtcatttttataattggcacaattggctcttctttaatgccaaaagtttgggtattctttttaaatatttatgttcaatattttttattattttaatttaattaaatgaatttaatcaaaataaaataattgaaaatatcgaaaaaatatttcttttagtctatccttccctttcgctttcttcttggctttgctgtaggcggtgcttctgccattgttccggtaagaatattaaattaactctattaaaactctattaattaatattattatgtaattaatctttttctattcctcaatttttattaaattaactattaattaatttacaaatatttttctatttttaggtttatttggccgaagtgtcgccggcgaagcggcgtggtcagctggtgacacgaaatgagctgatgattgtgactggacaactgttggcttatgtgatcaacgccattctgggcaacatttggagtgatcagtaaaaaaaagagaaattatttatattagcgaacaatttttcctacactatttttgggcgagaaatttcaaaaaattttatccgttgtaatatttaggtcagtgtcggtttttttaggttcataaatntaatcaaaatatttttttttcatttgctcattaatcttttttaatcaatattttttaaagatatttgagaatttaaattgcccacctttcttaaatagggtttttgataacgggttttttagtaaattttcgaagtacattttcccttccctaattcagtgtttggatttggcgtttgatgatgttgctggccgtactgcccgcggtcggtctgctgcttggcctgctctttgctgacgtgccggaaagtccgcgatggctggtggcccatggacggcatgacgaagcattggatgcgttgagaaagtcgcgcaaaacggaggcggacgcaatggccgaattggacgaggtgcaaaagacggcacgagaagacgagcagctgctattcatgtaatgaaaaaagtggcacaaaaaccccattaataaatgaaattccattttttttttccttaagaataaggcgcttatcggtacttttcggttttgtgaccccccctgaaattttcaaataaaaagtcatttctagggtaatttagggcgctgatcacgaatattacatttatttttcaaaattccgaatcataacccgaattcgaacaaaaattcgaaattcatatattacaaggaaaacatatttttaggggttttcgaggtcgctgaaaaggtcaagacatacattttgaccaaattcgaaacccggactagaacaaaaaa

SEQ ID NO: 6863 - DNA, 3391 bp, Heterodera glycines
aggtacatcgatcattcagtgatcgcatttctccgttccaatcagcaaatttttgacagaatcggcaccaatttaacatttgatgtgtcttcttcatgcgaacatgaagctaatctcagtttaatttgggatgttttggccagtcaaatttggccaatttttgcgccaaacattcgctatttgcactttccaaatggtgatgatctgaaccatttgcttcgtctctgctcaacaacaattctcaccgatctcaacaacctgagctttatctatttcatttgtatgtcccccgaggggtttggttgtgatttggatgggccaaatgcaactccttcttctggccaagcgttgaccaaatggctgcacattccgagaagcgatggccaaccaaagcggttgcgttgcggtgataataatccagaaaactttgaatggatcaacaatttcaaacaggttgtttctcctactttttgcttcaatttcactccgacctttaagtgatgatgaaatgccatacctgtgcagggggaggggtcagggacgaagcgggccagttccgtctgattgtgagccaagtttagagcatcataacttttgtctttgttgttgaccaaatcaaacaaagttggtattattcgaaagctcttaacaagctctatcggtttaccaaaaatcacaaagatatacagacatataaaaaagttataaattaaaatatgcaataattctgactttttggtaatattcatgttgcaacttttttatatgttgtccaatcgcttagaaatagcttatcgaaagcttctaaacatgtagggctttcgaatgatgccaaatttataaaatttggccaactgagaaaaacgttataatgctttaaacttggttcagacggaactgacccctaccggccagggaaagggtcgagagttagaccatttttacaattttcaagaaccatgacccagtgtcaatttttaaattttgcccggaatatttatcatttgtcctttatttgttcaggcgtttctctgtgctgccacttctgctgcctgctacgaaattcaatttcattcaggggtcggatcgaaaatttttttgaaggacatcgataagattttgggggtcaaaaataagaatattttgctaaacagcttcaaaacggttattaaattgtgctaagacggagcaggtagtgtggcgcccgagcaagcggtactaaaaaaaccatcaaaataaaatattatataactttgctcaaaaacaactaaatttttaattcttgatatcattccatagccctacgtattttctattatgatgtaaaatttaaaaaattatgttaagttttaagaaagttaagatgaaaaatgctcaaaaaattgtttttttgagcttcacaggtcataactttttgaaaattaacgaattttttggaaatttagcatgatattagaaaacacttagagctattgaaaaaaattcaagtttataaaattttgttgcttttgggcgaagttatgaataattttctgtcaaaaaacgtcggcgtcttacaactgtccgccgtagtcgagtggtggtgcgctggttttagcacaatgcataggtatataattgattcaacttgctttgggttcgaaaaaagtgcatagagtatagaaacagtgcctgtatttttggcgctgacaatgaaacgtcgggcgaaacaaaaccaagactcattttcaatagagttgtacgggacagggacctggacacggacaactgagtaccaaggtcccggttttgaccgggaccgggaaattcccggcttttttcccggttttcccagccaaaaattcccggtttttcaacccaaaaagtccctgtcccggttgtgcccaaattttccggtcccgaccaaccctaattttaagaaatcagaaaaaattgtatcactgatccgaataaaattaagcaaattttacaattaaggaaattattattattttgatcagatttgggcaccctccaaatcagaacattcttataaataaggacagatccgacccttgctgatctgattttatgtgcccgcgttaatgcaaattgtgccatttgaatttgtgaacgaacggaccaaggaaaagttgaccctgtggaaaaaatacgttgacaaaagctttgttacttggcagctgaagcgatgcccaatttttttggggacggcggcggttcaatgggacccaaattcgaacaatttgaacaatgtcgagtttttgctttgtgatgacaacaattgcattgggtattaattagcaaagcatttgattttaataatcaaattaagaattgcacttaattcaggccattgtgtccaacagcaacagaggatcaaatcaacgcaaaaggttgtctgccaatgaatcccgggcccagcggccagcgggaggaaaagtgaaagaattatttgagaaatgatcgatcattttggaaaaattgaaaggttacagcaggaattcgtagcatttttctattaatttttttttataaaaattataaatatttttatatttttattaattgcattgctattaaaagagtaattttgccatctgaactgttggaggaattgaactaagataaaaatatagagaaaaataggttgtggttttttgatgagaagattctgaaattttcttttaaaattcaaacaattttttttaatttcaaattttcgagttttaaaccggttcaaaaaccggttttttggcatttccgcaactcgagacatatttttccgtgcttagctcctcgagacgaatcgattggtatataatttgacccattttttcacggggcgttcactacagttcacccttaatttaattatcatttttgcctttttctcttctcctttcccagccccccactttttccccccttttgcgttaggcgtaatgacccaacccaactgacccctcccctcccccatttgaacagctatgctccatacacacaaatcatcaaaaaaaaaaaattttcagttttcaatagagttgagcgggaccgggacctgtacacggacaactgagtaccaaggtcccggttttgaccgggaccgtgactagtcccggttttttcccagccaaacattatcgggttttcaacccgaaaaggtcccgggttttgcccaaaattcccggtcccgctcaactctagtttcaactttttcttaaatattttcaggcggaaaaattaatttttaatggaatatgtaaaatcctccctcgtcatttcttctgtcgaaattggtgaaaatcagcagcagcaatcgccggattcatttgtggcaacatcttttggaaggcgacggcattgctaacactgaccaaaaagaataaaaatt

SEQ ID NO: 6864 - DNA, 1434 bp, Heterodera glycines
attagcaccttattttttaggtttttatttttagccacctaaaaaacctaaaaaaattttaaaaaactatttttcacctattttggcatttgcccaaaatttgttaacaaaaatgaaataaaaaggaaaaacagacccctaagaatcgaccgaaaattttttcaaaaaatatacccctaagaatcgactcgaaaattttcaaaaatatacctatgaaaaaagaaaaatttctcaaaaatcatctccaaaatttatttgtttattttcttggcgagaattttttattttgaaaattatctatctcattaatgatttggcataatatttttgctttttgaagaaaattttcgattttacaccccaaattcggaactttttggcacctattttcccatttttagcacctattttgggggttttttagaacctaaaacctacttattttggcagtttttagcacctaaaaatcgaagccctagttttaactagagttgagtgggaccgggacatgaatacggacaactgagtaccgaagtcccggttttgaccgggaccgggactagtcccggttttttcccggttttcccagccaaaaattcccggtttttcaacccaaaattcccggtcccgctcaactctagttttaccagtatagtgcgggattgtttccgttctcgaaatttccaaaaatgcggactgctgggatcattcagcaaaattgctcaaagcagcgaaaaagagggacaaagtaacgaaaaagggatgtcttctgacaatgagttacgaacagaacaacaacaatcagtcgatgaccgacaaaaaatcagccgtgattcctgatcagtgatcaccaactttattactttacttcatttttttgttgcctaatttataaattttcacttacaaagagccactttttagagatttatagaaaattagattctttttctcaaaaaaatttaagatggattatttcatgaatttaaaatatcagagcagaaaattactcttcaatcggaacaaataaatatttcctttaaatatgactttttttaatttatggtgaatttccaatgaaaatccgttaaatttaaagagtaaaataagcatttcaagcagagaatgtcatcaaagcattcctgaaaaagattttctgctgtttgagtcatgatgagctttaaattgatgatccgccgctgctttctgcggacaatggcctaaaagatttaagatggtagccctatctttttggggttttaaaagaattagtgaaaatatttataggaaaatattccaaaaacttgaaactaaaatttgaacaaaaagtctaatgccgaaattaataatttgtaacagaaatattaccaatccttgtaaaaaaaagttaatacacaattaaaaaaaagtatgaaataagctctagaggtcccc

SEQ ID NO: 6865 - DNA, 1415 bp, Heterodera glycines
  unsure (1)..(1415): unsure at all n locations
aaagagcatatacggtaagtcataagttatttaattttggtttttcaactttcgaatgtactaaagccggagggggggggggcattgttcaaattgttcactcacncaagaaaattattggcgccatacaagaagaacaagactctgtttaaattgttcgaattttggtcttcccatttaaggatttgcccaatttggcaccgcttcattatgcacaggttaataattccctcatcttcgccttctttctccaatgtcagcttttcgtgggttcgttcattcaccaattcaaatggctcaattagtgctgaatgctccattccgaaactaatgatgtaactggcagaagaattgttggtgatggcacagagaaatgcctaaacaatgcgaagtgagcacaaatgccgcggaatacggataggaaattttcaaaaatttagccaaaaaactcgaaaacgtgtctaattgataacctatttaaaaaaaaagcttgggttttctgaaaaagatattttacaagataatgtgatgacctccttgaaattgctgacccattcaagagtttcttggtcattagaacaagtgcaaagcaatcgctttggctgtccaacttttgtcggagtgtgcaaccatttggacaatgcttggccagcggttgcatttggcccatcatcttcaagcaggtcgggcaacagattgaaatagattgaactcaggttgttgagatcggtgagaattgttggcgaaatgagacgacgcaaaatgtccaaataatgatttgaaatggtcaactggcgaatgtttgtcgcaaaaattggcaaaatttgccgggctataacatcccaaatcagttgggcatcgtttttggctgaccaaatataaaaattcaaagcgatccctttgtcccaaagttgttgattgcagcggagaaattcgatgacggagtgatcaatgtacctgaaaggggacaaataaattgtcatttagaaatttgaggctggacaaatttaatgcccatatttattcaatcagaacattgtaaaaatcaaaactggcgttttggggttgctgatcatgaatctgacacccattttaaccaatttctaatccttaacccgaacaaaagtcggttagaaaatcggaattggtcaaaatagttgtcagattcgtgaagggaccccaaaaacgtgggaataaattttcatgactaaaaattattagactaaagagtggcccttttaataaatttcaaaaacaaccgctttaaaaaaagaagcgcatgaaaactttagcaaacaacggcatttcccaaaatcaaatgttgcgattttcctcatggtacgagggttgggggggggggggaagatcgatcgtgaaggtacctaacagaaatgtttgaattacttaatacaaag

SEQ ID NO: 6866 - DNA, 5687 bp, Heterodera glycines
ccccatttgtgccgtgtcaaattagggccgagcacctgcgggaaaaagccaatgctttagaggcaatgagaagaaagaaaaacaattgcaatccaaaaaactttcaatgccgacaaatttttttaaattttcatgcaaaaattaatttattttttaatatggcacataaaaaattaatttaattgtaattttaaagcaattgaccaccgaccaggctgactttcatccgcgcatagtacacaaatcggaagaggcaataagtggcaccgatggaaagaatgaccaacgaagtgaacatcaacacgccgccaccgccggtgtgaaaagtgccgaactgaaaaagggcaaatggaatttgattgggtaattgttaaaaaaatacaatgagtccggccaaaaccgagcaaagaatcacagtggcaatgcaaaacaaagtggaacgggcacgagcgaagcgaacgccaacggacgaactgacaaaagaggagccaaaagatatgatgccacatttgggatgaggttgtaaaatgagtttgaccaatcaaaaatgattaaataattttaaaaacatgctattttaaatcagattttaggtaattgatttttcaaaacatttttttgctttttaaaaaaacccaggcccaggcttggatccaggcctcgagttttttcctgggtttttgtccaggaaatccaggtccaatatggaatccagttccttttttcaaaatgtcgaaatctagtgtttgtccattttttggtgattggtcgctttttttttatggctgaccattaaatttatgccttcccccctccctgaacttacacgcctttgcagtgcggacaatgggccaccgtgttggacagcgtgttgaagattatcacctcagcgcagtgcgcgcactgcacgcggcacgtgccggccggcgcccgcaccgccgtgccgacgggagaagaggcggccaaagtgatcacccgacgacagttctgccgagggcacgcaatgcgcgcggaggacgccttgcacacgagcagacagttgcaggggcagcgcacgtacttttttccgggcggtgcggcacggatgggcgtcacctatgacaaaatgaggggaaaagcggtgtaataggaaacggccgacaaaacaaaatggtttcaaatgcccaacctcgttgcagttttggcatcggacgacatggagcgtcgttttgccgtcaagagcaatttcggcctcacaaacccggcacacaaccattggacctgtgaaatgcggttgatgattggggactttggggtgattttacgcgaacagacctcggttcattagcggcgagtcttcgtcgtcctcctccccgacatccgatggcgacccattttggttgacattgcgcgcttggccctgtcccatcggtgttcttgggtccccgtgttggtaggacacaaaaccgcccttaaaaataagaaaatacgcaatttctaattttggtgcattttccggcaatttaatatgtcttatttaacttttacttgcctggacctccccttcttcaccggtgagcgggtcattgtggtcaatgggccgcgcctcctcacgcgacgaagtgcgactgtaagtgcgaggattggacgactgtaaaaggggcaatttctctgccgaactgacatcacgggacattttgaatgtctgcaaaatgcttttaaacttcaaaatttctcaatgacaaatagaaaaattgataaagccggagtgaaaaggggcagaaaacagtgggaataagtaatcagcagccacagatgtttattttctcattttttaaataaaatgctaagcattatgccaaaaatgaaaaatacgaattttggcttttaacgcgctaaatgctagacacacaattgattttattactttttgaagacggtaatcgacagtaaagctttaaccagtattagtttaaccttgatcacatttataagctctaatttaattttaacttccattttatttaaggtttattatttgacaaatttcccgtcagtggctgggcatgaaatgattgtgctgatgaaagtttgttgaatggtgacacaaggtaaagcattttggagttaatttctaagaacaataattacaaatttatttcccatttgaatgaatcgacgcctttcttcgtatctttgtgatctaaaagacaccgatacatttataacatatccgttaattcgaggcttaacccaatgttaatgcaattttaagctttgtaatgatataaatttgagccttcccccatttgtacaagcttatcatgtatttgcaacgtttcggctagccgagcgtttgctcagattattttcataactttagatatcactatttttgctcggtttgatacgatttatttgattgattagaatcgatcgattcgaattccgtttatttcacacattcacgatttgttggtgtaggcagtgcattgagagagagaaagattctacgaaatagacacacttccgtacgtacgtaggcagaacacagacttcacagaagaagagaatggttattgcttttgccactaattctagttgaattaaaagtagtcaatttttatttgtttttttttattgtcaaatggattaaaaagtactgctagaaagccaattttgttttcacatttaggagcacgtaaagttggaatcaaatggaggcagcaaagcggagttggtcgacggggagcaatatcgcaaactgttcattggtattgttttttttggaatagtcaggctccaaatatacccagaattttgttttatctcatttatgtttttaggcgggctgtccctcaacaccacaaatgagacgctcagtgatttctactcgcaattcggctcattggttgactgtgtggtgatgcgcgatccgcagacgaaacggtcgcgtggctttggtttcgtctcgttttctagtctggaagaggttcggtttctttaacaatcggaattggcttttcaacaaccctaagcttgtttgtttttaggttgaccgtgcaatgactgcgcgtccgcataccattgacaaccgcgttgttgacccaaaaagagcggtgaatttttcccgtccatgtttaaatgtaaaaaaaccaattttgccacaggtaccacgggaaatggcaggcaaaggcgagtcaaacgtctccaccaagcgtttgtatgtgtcgggtgtgcgggatgaacacgacgaggattcgttcaaccgatacttttctgagtatggaccagtcattaaggtatattttaaattcattttatgaaagtttggcgcataaatgtttactttgcataaaccttttcatcactgtctaattgtcaggttgaagtcataacggacaagaacaccaacaaaaaccgtgggttcgctttcatcacatttgacgattacgacccggtggacaagtaacaaacatcaaacccttttacaattcttttcttttaaatgcatattttttcttttacagatgcgtacttcttaagtcacatatgatcaatggggttttcgctgtgatgtgaaaaaggcgttgagtcgtgatgaaatgcaaaaggcacaacagagcgaccgggaccgaatggagcgtggcatgcgatcgggaagaggaggaggaggtaaacaaaaatcgtagacatgatcttaggctttcacgaaatctcaggcggtggtggtggacagcgcgggagaggcggtgtccgtggcggacgcgggggtggcggtggttacggaggacgcggcggtggttacggaggtggcggcggttacgccggctatggggacggaggagggtacggtgcggcaccaaatgcctggggcggtgcaccgatgggacagccggcggcacaacaatggggtacaaaatttcacttttggacaatgaatgaattacaacttttttttcgtttctcatggtgtccgagtaaattttatttttccgtttgttaaaatggatgggttcaggaggttatgttggaacctacggcactccgagtggcacttacggtggtcagcagcagcaagcggcgccaatgggtggtcaatggggtggcggtgctgccgcacctgtcgcagcgcaaccggaacaaatgggttggcaacaacagccggccggcggaatggcctctgcaggcggcgcacaatggggccaacaacagccggtggacaccaaccaatacggtgagacggcaattggttatttattggcacttttttttaaaacgattcttttcagcttggccatcaggcggtgcccagcagccccagcaatgggctaacgaccaattctgagctgaagatgcgcgatattgatcgactataccttgaaaatggatgaaatctttttggcactttgccccttttaaattatttttacccacttttttaacgttgtgtaccaacgtgaccatcgtcaatgcaactatttgtgtccatcagtagtcgtatattacaaatatgtatgattctctggtgatttcacgtattttcaatttaaatttgttaatttgatattctgaaaaaaaaatttgatcaacccttttaattgaattttttgagtttttgattctaatattatatttattgcttaatgtgagttgatgaatttgtggggcaatgaatatggataggataatttattatgagttcacaacaggagaacacagtaaaaattacaaatgattcaaaccggcggtgctccactgataattatcaatcggtcggccgaacgtgaacaaggccaccgggtccaaaagcagaacattgctgcggctaaggtacatcatcatttcaagtcttgtttgttcagtttcgacttaatttgtatgctattttaccaaaagttgtaacgaaaaacgaaatttggcgaaaagcgtagattatttgtctatctgccataatgaacaagcattttgcagatggttgccgacgtgattcgcacaagtttgggacctcgggcgatgctcaaaatgctgatggacccgatgggcggcattgtgttgaccaacgacggcaatgccatccttcgcgaaatcaccgtcaaacacccggccgcaaagacaatgattgaaattgcgcgcacccaagacgaggagaccggggacggcaccacctcggtgatcatcttggccggtgaatttttggcacaggcggaacagtttttggagcagagcattcacccgaccgtgatcatccatgtcagtacaaccgtacaatcaaatgaaaaaatacaatcggcgagtgggtcacccatccaaattcattacaaaaatgcttgattcagatttttatgtttataaattattgctttttgtagggctatcgcatggctctcgaggatatcattgagtggacagaggagaaattcaggttttattttggcgttgatgagtctaacactttttcatcgtcccctttcagcaaaccagtcgatttggcctccgagtcggaactgaccaccgtggtgaagtcatgtttgggcaccaaaatgttggccaagtacatggacctggcggtgaacatcgccctctccgcggtgcgcaccatcgacgtgaccaacaacgactttcgtgagatcgacatcaagcggtattgccgaattgagaaaatccccggcgctgccattgaggacagcaatgtcgtgaagggtgtg

SEQ ID NO: 6867 - DNA, 1036 bp, Heterodera glycines
ggtggtgttgcgtggaccgagcaaggacatcatcaacgaggtggagcgcaacattcaggacgcgttgcactgtgtgcgcaatgtgttgactaacccgcgtgttgtgcccggggctggtgcgctggaaatggccctttcgcatgtaaattacatattaatttgtcgaaggggggggggggtaatttttcgttgttggttttctttaaatcatattttctgtcgtcaggctttgttggagaaggccaagtccatcccgggcgtccgtgccggcccgtacaaggcggtggcacacgcgttggaaattgtgccgcgcacactcatccaaaactgcggcggctcctccaccatacgtcagctgaccgcactgcgtgccaagcacgcccaacagccggacaccaactggacatggggcatcaacgggcgggacgcgggcggcgagttggtcgacatggcgcagcccgagggcgtttgggactcgctcactgtgcgactgcaggccatcaaaacagccatcgagacggttgtgccaagacaaattacgaggggtatttcttggtggtaccgccacggtttcaggccattatgattttgcgcatcgatgacattgtcagtgggacgaagaagcgcgacaaagacgagaacggaggcggaggcggcggtgcaatgccgggtcccggagggtttgaataatagcgaagaaaggcgaaggagaggaaaggaacttcccaattcaacatatttaaagaagtggccattttgttggattgaacaaatttcgaaactccaaaatgctgttgtccgtttcatgctttacttatccattcaatcacaaattgaatttgctttgttttgcctaataaaatttgtttttgtttgaattagttattacaattgacttgctctggcaggtttttgccttattttaaaaaggaatatttattataaagtttgtttgtgcttaacatttattggcaatgtttggcctacttcagggtaaaggcctaaaatgaggcaatgaccaattcctcgattggct

SEQ ID NO: 6868 - DNA, 3368 bp, Heterodera glycines
aaaaaatcagaaatctcaaaaaaatcatatccaaaaaatagccaaaaaatcagaaatcgccaaaactcaataaacacaaacaagtcaaaaaaatttaaatttatttatttttatttaacacaacaaaaattgacacaatggtgcgggatgttgaggaagggggaggggcccattttattttaccacaacccaccgccttccaatttttctctttcttgttttttcaatttggcccaatcccaaacgtattgggcagcgtccgattttttgttgttgctgctgctgccacccgcacctgccgatttcgtccaaagttcatagtttcgccgcctccatttttcaatttgctggtccttttccattttccatttttggggtctttttcttcttcttctttttcttcttcccactctctttggagcaccatccattcaccagacctcttccatttcgggcgattttgttgctctctttgtcgttgttcttttcgttgccgccgttcagtctcccattgcctatgcgcttcatccatagccgcaaaatctgctgccgtcagtgccaacacatcaactccttgcgccgaaatttccatgtcgttttgttgggcttacatctaaaataatattaaatataagttagcgggggatattaatccaagtccccccccccccccctggaacccatacccgttcaaaagttgtaaaacggcagatgagttatgtgtatttttatcttcttaaatactcaaattttgggttgtaatgcatgacgtaaccctaatttagttcagattcaacaaacgaaattagtgaatggccttcaaacttgcaaaaactttttggtcttttgcacaagtaaggctcaaatattacactaaaaatcatgcgattctattagtaacgaaaatgtttcgttttttttgcaaaaaagttgcgattttattagatctgccgaaatactgaataaaaaatttctctttttctttccgtacgatatgggctaaaaaaattttctttttcgggtttaaataaatgtcttaaagcagttatcctaattttattatacaatattttcgtgtcaaatctataattttgcacttgttctcggaattcatttatctttgaaaaagaaaggtccgataaattctctgcttcttgacatttaaatatatttatttctttgtccaatttctaatttttgcatagctaatgcttggtttccataatcatgcataatagttttttaaagccaaattttaagtttttatgacaatatgtctcaattatggtacatttttccattttgctatatcattatttttttgttcttatatacccatatgctcccaagacaattgtttggagcctattttcataatttaacatttggctctgcaccctccgggactcgaaatgtaatctccgggcttccattaatgaatttgcgattgttcctcgagctttgttgcctggtcaaaagttttgcatctctcgaaatcacgccacgtagattcggcttttacgcattcactttaatgtaagcttactttttttttgcatttttttgccttttaaatttaaaatgtacaatttagaatgttttttcggccttttttattttccttatttttttcgttttttttgcggcactggtgtacgccgtatgttgcaagccacatgctcgcccgccttgccgatgcgattcggatgatgaggaggacccgaagcccgtcgattcagtgtcatcccacccgctcgattggatgccgaattgcaattttcagcagtgccaatttggtaatgagttttttaactgacaatttatctcaaatatttaagtgcatatttgactattttttacgggtttttttggcaacgatattttttggctatttaattatgcagtttgagttagcctaattaattactttgaacctacgtgaaataatagggtgattttttcaagacttgcttctaaatggccccaactaaaaaataattcccaaataaattggttaattacaaatgactatttaatgggtctttgtaaattaatgagttttttttgcgttttggggtgggtgtctaatttattaaacaatttacaagattatttagcgccagcacaaaatgtgccactgccacttctgttctctctctccccaccgccaccatattctgccgcgcttcaagcgttccccccggctttgatccgtccgttttcgacttctcccccgacttctttgtcttctccgcttcctcggccttctcccccttctccgctgcccgcgtcactttgccctccttctccttctccgcgttgccctccttctccgccgtcaccgctttccgctcattctccgcttttccccccatctccgcctttgccgctttccgccccttctcggccttttctgctgcccgcgtcgcttttgccctccttctccaactccgctttcctctccttctccggcgtctcctccgccttctccgctccacccgtcattgcctcagcctgaatggctggacgggtggggcgggcgccacttttctgccataggcggatgggaatactgaatgaagtacttttttggttcatttctctcatttttgaagaaaaaaaagggtgtgattttttgatttaagagtgtgggtcatgaaccgatggaagaaagaatgaatgaatgaagagattaaaggaggggagaagggaggggggtggtaatttgatgagatagaatattttttttgttgaattaataaaaaataaaaaaacaaacaaaaaaaacatttgtttatgaggacaaatgtccttatttacatatttatctttaataataaggcatttttattaataaagaaaagcataaagaaggagagcgggtgaatgaataatgaggagggatgagaagaaaggaggagtgaggaggtgaaagtggatgagagaggaggattagcggaaggatgagggaggagcatcagggaggagtgaagagatggaggaggagggatgagtgaaaaggggggggggatgaaggaacggggacgaggaggatgagggaggcgtgaggaggatgagaatggaggaagaggaagaggcaaagtgagacagatgagggaggctgttgaggaggaggaggattgggagggaggaggaggctgaggatgaggggaaagaggaggaggatgagggaggcgtgctgagggggaggcggatgaggtttaaggaggatgaggagggaggatgagggtgaaggagaaagaggagtgaggaggggaaggaggatgagtgaggagtaggagtgatgaggaagaggagtgaggagcggaaagaggatgagggaggagtgaggagggggaggaggatga

SEQ ID NO: 6869 - DNA, 3787 bp, Heterodera glycines
aataataatagttaaataataattataataatattactaaaacattaaataaatcaatgcaagactgtgagtactgtaacactcccccgccccgatacaaccgctttcccagttcatttctcgtcctatcacctcttttcttttatttttttacactaatcacttcgttaaatcgccattttttcataggaattcaaaaacactttatttcttttaccaatgatgatgcaagcctttaatcgatggggctccgaccatggccatcttttttgtccgccgccgtctcaccttggcagagtgatttatgtcggtggccaaaatttttccggtatgacagaactaataataaaataataataataatttatttgcatgctttttagaatatgccacaattctggcacgtaaccctgcgccccgtagagggattttttactttgaaataaaagttctgaagggagggtaaatatcaagtttttgtttttatttattatttttttaatgagactttcgtatttcagtttaatttggattggtcttgcttcgggagaagtcccattgaacaaagtgcctggccaaatgctgaactgctattcttatggcgcgggcggtgacttttacgggcacatgcaaatgtatgaacactacgaccctgcattacgttttgctgttggttacgtcgtgggacttgggctcaaccctttgaccaaagagctatttttcaccaaaaatgggcaccgccttggttctttttttcttttgaatgccttttatttttttaaaaaaccaatagagctgaacaacatgtatgttcaaaacgtgggaacccttttcccatgcgccacattgtcggagcccggtgactgcatcgaggccaactttggaccacacttcctgttcaaatatttctgatttggaggacatgtaaatgggctgacgcgttcccaagtgccatacgatatgttgatcggaaacactgcaacataattaaataaatttcttaattttttgaggacgttattgcattttgtatgtgcaaaaaaaaatatttattccactttcaacttatctttttttatcttccatttttagcatgtcaaactctcacgtaagcacttaaaaagtttattattattattattaatttttaaaaattcgattcacagaatttcgcagggttaaattctaacccgtcagctcaacaacacttatctgcattgctggaaacggtacagatccgaagttttatgattcattaatttttatccaatgtttacaagttgcggggttgcatagttacattggtttttcttctaatggtggtggtggttgtggtagtgtcggcgaaaacaataacaactttatgcacaatgcaccagtggcatatgctatgtcacaatcacgtaaaagtgaagcgcgaaaccatagcgtgatgctttgttattttattttattcttaaatttattttttgcctttataggtaatgatgccaaacgaatctttaaatgccgatagaacgacttgcaccgccttcctgcaacaatcatggcctctcaattcacggatttcgtagaattaacaaaaatattgtcgttttatttttaaaaataggctgacgcttcgtctgatggaagttgaattattgtctgcaacaaacacgtctggagggcacgaacgttatgctgtgtgcaatgcgctgctaacaaattctgaactggcgcgcgtccttgttgttgcatggcgtaatcgggcgcagcctgctgagcaagtgtttttggtgggtggaccaggatcattgtttcggcttaccaatcttgtgtggcgtgggactcgagagaggttgactgctaactacacgctggccattggatttgggtcttcaattgaattattacaggtttaaaaaaaaataaatttggattagaccaaatttattgttaagccaccggcaccgaatatatattcacagtttcatttgcaaacacctgctgtatcggaagcactaccagttcaaattcaatccaaccctgtgctgcatttggctcaacccagcaacaacgatgcggagctgattcaaagcataatgaacgagcttttaaatgcttcataaacacttgtttcttttatttaagtttttacatcttaaggacaacaatagtatggaaatgccacaaatcctcctgctatcactcaggcgcaatcgggaaatcatcaacaacaacaacaacaccaaccaaatgttcaattgggccaaatcccgactactattggcttggttgtaaaccaccagcagcagcaatcgctagttggcgcagaaatccagcaagggcaaagcgaggaaccgccacctggaccaatgacaaatcgtcatcagagccagcgccgcgagccaatacatggaagcactattgctgctgctgctgttgctgcttctgtggaagaagcaaacaccgtaagcattatgtttattaaatacttcaatgcagtatttttaaagaaccaaccggtgtttcggcgccgtcgaaacaacaacaacaattctggacgtggaaccactaatcgtgaaaatcctgttgaattggtgagaaacggttgagaaaacaaaagaaaaaaaaacttttaccaaatattttatttttcaataaattttgagcgacatgtgtatgtgtgtgtttaatattagggggcactgccaaccgtgagacgaaaccagtccgttgcaattagaacccaaccaattcggacccaactacgtcgaagaagaagggaacccattcctacttttgagattggagggggtctaactgctcaacaatgcgatagtattttgcccaacctggaagtgaaccaacaaatgctccaaaatgatgaaagatgcgttgtgtgccagattggatttactttgggatccttgaatgccacggaacttccttgccaacatttttatcatttaacatgcgctcgggaaggttgatgcgtcgaaatagatgtgctgtttgtatgcgttcatttgttattgaccccgaaaataatgcacttttgcttgtcctcgacaacgaaatcagcaatgatgaagaataaatcacatatttcttttttctttctttatttgatcaaataacagcggtgatgttgggtgcaccgtggtgtaatggtagcacgcgggtctataaataacccgaagtttgggttcaattcccaacggtgcacccataatttaaatgtcacatttcatttcattacattacattacagtacattacattgcattacattgcattacattgcattacatttcagtactttacattacattacattacattaaattacattacatttcattacaatacattacagtacattacattacattacattacattacattacattacattacattacattacattacaattcaatacaatacattacattacattacaatatattacattatattacattaaattacattacattacaatacattacattacattacattacattacattacattacatcacattacattacattacattacattacattacatttttttataaagttttttgttataacaaccaacattttggtatcaatactccattttagtattaatcattgtcattaaatttacaaaagctcgtttttatttattattattatttagtttagattttattaaaaaatgaatcgttttgaccaaaatgatttcactataacttctgttcatcaaatgcgcaatcgccctcggaacacaatggagaaattgcg

SEQ ID NO: 6870 - DNA, 4762 bp, Heterodera glycines
  unsure (1)..(4762): unsure at all n locations
attattcttcctttttttacagagctatttggacccgcctccattacgcggaaagttacaaaagcacggcaactttgagccctagttgcgcgcaaatcgcaaccggctggatgagatcaaagccacggggcaagaactgatccaatctgggcactatgccaacgaacacattcaggtggggaaaagcataaataaaactttttaaagaaaaggaatgcctaaatttttgaaaatttgttaaagaccgaaaaaatatatatttcccgctccctaattaggactgctcattgcaattaatcgttttagaatttctaatttgtatcatgggcctatttctttttttacaattacgattacgccatcgctaaattaaaaattgttttctgatcatatagacccgtctcaacgaggtggaacagttgtggaccgagctggctgatgccagcgggctaaagggtgccaagctgcaggaggccaaccaggagcaattgtacaaccgcaacattgaagacgtggagctgtggctcagcgaattggagggccaattggccagcgaggacttcggcaaggacctgatctcagtgcaaaatctgcagaagaaacttggccttgtcgaaagtgactacaacgcgcaccaggtgggactaacgggaaaaatgatcaatgggagggaagggagaaaagtaaaggaatatagaaaaagtttcgagactcgactcgggttttttctgggaaataattggtatagttttatcgaaactggtgaaatctttgggttgagacccctatttttcttttctcattttgagtgaataaattgaatattttgttctaaaaataattgtttgccaataagatcaaaaatgtcaattcaggaggcccgactttgatttactagtctaaaattgtatttaataattttaatttttaaacatttatcactatcagagcgaaattttcgacatttcaggaacgcattgacgcgatcgggcatcagacgcgcgagtttcacgacacgggccacttcaacgcaccgttgatcggtaaaaagttcgaggcgttacgcgcccgcttcgaggcgttgcgcgagccgttgcagcgccggaagcaaaagttggccgagtcgctgcttggccaccagctgttccgcgacatcgacgacgaattggcatggattcgagagaaggaacaaattgcagcgtcgacaaaccgtggccgcgacttggtcggcgtgcagaacctcatcaagaagcagaacgcactgcacaccgaaattgctaaccacgagccgcagatggaacaggtgaggggcggggtgaaggtatactgtaaattacggtagtgagtggagcagaggttaacttccaagggcatttcgcttactgtacattacagtacaccatggtcttggattatcaaatagggaataccatgggcggattagttgttaatttccagtgaaatggcgtaaactgagaccgatagatcaagaaattaatgaattgaaattttgtttttatgggataaagaaaaaaggaagtgatgtcaaacaaatttttggaaaatttaacattaaaattgtgtggatgattttatcaacaaaaaatcatgtttttttanacacgtgcaggttgcacaatccgcggaacagatggtccaacgtggtcacttcttggcaccagacattcgcgacaagaaatgtgagacagaattttttttttttttacttattttgggctcggggaaatttcttgaatctcggagtcacaattttcgaactgataattgtcattctcgttttcgactagttaaaatataaatttagcccaactgcgcgaccaattggcgtgcactgaaaaccaaggcggacaagcgcaagcaggacttgcaagactcactgcaggcgcaccagtacctggccgacgcgaacgaggtgggcctttactttttttctcttttataccattaaaaaatttcaaaaaattttcctttaatgacacgcgcccattttcactcaattaattttgtctctttttcaggctgagtcatggatgcgcgacaaagagccgctcgtggtatgttattctgctttaacgctggaccccattgtgccattattttgtgaaaaattgtcccaaaaatggctaagatttgtcatttttggcgcaaaacgatacaaatccgttttttttccccggcgctgaaaattttgaaaaagaacactggctaaaaaaattttaaatcagtagatcaaaaaaaaagaactctttcgggtgcttggatacgggcctgctcttccttcattttttgatcaaccctgtgctaatggattttgaaatttcagggcagtacggattacggcaaggacgaggacagtgccgagtcgctgctgaagaagcaccgggcaatgatgagcgacttggaggcgttcaacaccaccattgacgagttgcgccgcgaggcgggacaatgcaaatatcaggagcagttggatggacagttgggcaaggagtgtgtggtggcactgtacgaggcaagtggcagatgggatggactgatcggattgatcgggtcaaatataaagtaatgaggtgtcaattattttttattgtggcactttgtgagggtagataaatagatattcattagttgatcagtcagaaatttacggaatttgctcatgaactgatcaggcaagtgggatttcttggtgatcaaacattggtggaaattattaatttttgaaatatgtttacgtagtgttgctcgagaccgataatttctcgacccagaaacccataaaacacatggcttttctcgaattatagctctgatccgttatttttgattagcattattatgtgccacatgtggtgcattttattcccctgattcgtttcttctctcccaaacctccatttaattctaaattccaattgttcatataaattactcctaccaaatctcagctcagctcttggggctgggtaattaggcctaaatgctaaggcaaattttcttaattaattgattaccattactatcaatcactaaacacttttcgtatctcttataaattatgtctttttttatttaagtacaccgaaaagtcgccgcgagaagtgtctatgaaaaagggcgacgtgctgacgctgctgaacgcgtccaacaaggactggtggaaggtggaggtcagcgaccgccagggcttcgtcccggccgcctatgtgaagcggattgagcccggctcacagcaccaccatcaggtgggaaagccgacatagctaaaacaaaaaatcctaatcttaacggacaaccccgtttttggaattttatgagcaatttaatgagagaaattcccaaaattttcaaaaaataaccctagcaaaagaatcaattataaaaataaattattattatttttttaaaaactatttcaataaaattaaaatgattcaaacacacgatcgatcagtggacctgtgattttcgagaatcttgaagccaacataatttcgatctcacttctcggccaaattttccataacaaagctgctttatttgtcaggcgttggccggccaaccgatgaacaccatcaatgccaagcagagtcagattgaggaccaatacaagcgcctgttgatgctgggcgagcagcgcaagcgcaagttggaggaggcatgcaaggcctaccaggtgagtaaacgacggttagatcatttttaaacaaaattctttgtcaaaatcttgctcaaagcaatataattttaatcttccacctgtttaagttgttgcgcgaagcaaacgatttggcagaatggatccgatcacgtgagacggtcgcctcgcagcaagagattggccaagacttggagcaggtggaggtcttgcagaacaagtcagtgagataatgaaaaaagaggcagagagagcgaggggagggagagagagagattatacatattttcgggtttttccacaaagtcctatagatcattagcagcaatgaaatgaaaaaataaaatttttaagggacaaatttgacaaacttgaagaaaacaattattaaatattttcgtcctccccccgtcccccccccatcgaaaatttctctatgttccttcaaaaatatgctaaaattttttaaatttatccaagcaaattaacgtctaacactaatgatcactcttactaatttcagattcaacgacttcaaaaatgatctgaaagcgaatgaggtgcgcttgcaggagatgaaccaaatcgcgacacggtaagaagaagatttttggatgattttttcacttttattttaaaaaatattctaattttccaaagattgtcccaaatgggccaaactgagacggcggtgcgtattcgtcaacaaattgacgatttaaacgcgcgatggaaagcgttggagcaaaaagtgcaattttaaaaatatttaaaaataaattaactgcattttaatatttatttaattttcaaggccgaagagcgtggccaacagttggagtcggcccatgaagtgcaacgcttccacaaggacgttgatgagaccaaggattggatacaggcaagctgcagcatttttagcctctctaattagaaatttaaaaaaataataatttaaatgtttcggtgtatttgcaattttaaactttatgccccatggaaatccgatttttaaatttacgccttcgtctagtgaaattgtcatgaaaatccacttaaatacaaaaaaaaaaacccgggaag

SEQ ID NO: 6871 - DNA, 1214 bp, Heterodera glycines
aacgcaccctgaggcggctgaacaaatttatgacctgcaacgccaactcaacgagcagtggtcaggactgacgcagaaggccaatcgtcgcaaggacaaactgctggacagctacggtgagttttttcttcgatcaacactgatcggaagggactcagtccgatcatcgaactttaatttgtttgactcggccggaaattttcatgatcgcgcctcatttttctgcatccactgaactgattgagagttttttgcaaaaatttcaagccttaggcttctccgaataagtgatcaaaattgtaaaaaaaaattattttttttttgcacttgttactgatcgggttttatgtttgccattttttggctttgaattaagtatggaactgggggctgatttataatttgcacacttttatttaaaaatttcattataaaattttaatttatttactattttttagattatcagcgcttcttgtccgactaccgtgatctgatgcaatgggtggacggaatggtccaattggtgtccagcgatgagttggccaacgatgtgactggcgctgaggtgggtagcctatcgaactcgcaataaaaaaccgagaacgctaattcgtttgtttcatcgttgttgtgttgcaggcactgcttgagcgtcaccaagactaccgtaccgagattgacgcgcgcgcgtccaccttccacgcgtttgagcagttcggcaaccaactgatccgcagcgaacactacgcggccgaggacgtgcgccaacgaatggacgaggtgaaaactgtataaaataggggggggggggtctattttaggaaacacggtatggcatggataaataaaattttctatttgtccggctcaatttttcgcttatttaattttttcttccgttctttttttaatcctttattttaaaaatttgcattaattttccgctttttttcactcctcttttttaccctgtctcgtgttatctacttctttttctctctgtctctgtttctctgttctcctctctattttctattattttcttctacagtattatttacagttatcgtatacaaaaatcattttcacttaaggtgaatgatgctcgacgtcggctggaggaggcgtgggtggagcggcgcaaggtgttggaccagtgcttggagttgcagctgttccatcgcgactgcgagcagtgcgacacttggatg

SEQ ID NO: 6872 - DNA, 1383 bp, Heterodera glycines
tgactttatgatttttaattaatttaaatggcaaaatggcacggcgccataatttataacacaatagcatcagcttttaaatttgaaattctttcgccattaatactgcctattagggatgtgtcggccgatttccgatatttttgggcccggaattccgattttcagttgccgagatttgggctgtcgtaatctcgatcgccgaacttttttgggccatcgaattccgactgccggttaacgcaattttttcagcagtcttaattcggtttccgaaactttttgagggcgtcagctcctatccctgctacctacggaaagcattttagttttttagcaattttatttattaaatgcaaaattttagcatctttaaaaaatcttaaaaaaccaattaaaacagtaaaaaccagtttttggtcatgctccaaattgttctgtcttattttttgcctattgcttcaggcttttctgtcccaagaggacaccaccggggacaacgtcgagtcgctgatcaagaagcacgaggactttgacaaggcgatcgcgtcgcagcaagaaaagctgaacaacttggacatgttggcacgacagctggtccaagcagggcactacgcggcaccggcaagttgcttttaacagtgccaataatggcaatgccaatggacctccctgctgagtccggagcagaccctcgcacattccccccccccccctttctcccaaaaattacaaatttgatctaaaagattattttaaaacgattttttttgcgaattttcccgattttttcataaaatgagaattaagttaatttttttttaatttcttaaaatttcaagcaccatgaagttaatggcattttccccattttccagcaaatcactgccaaacgtgaccaaattttcgagcgctgggatcagcttaaggcggcactgatcgaaaaacggtcaaagttgggcgagtcgcaaaccctgcaacagttctcacgcgacgcggacgaagtggagaattggatagcggagaagttccaagtcgcgcaggaggagacctaccgggacccgaccaacattcagcagaaacaccaaaagcaacaggtggagtcgggagttggggacaaaggttttggcgccgagactcgatttctgagtggaattttctcaattttgggcaaagtttttcgtaattttgatcgtttgtcgaaataaaaaaaaacaatttttagtattttttgtgcatttctcatgctttttaggacagcaatttaccccattattaatttccatcatttcacgtttccaccctttatttgtcttaatattgccattaattttaattgctttctgcaggcatttgaagctgaactgtccgccaatgctgatc

SEQ ID NO: 6873 - DNA, 949 bp, Heterodera glycines
atacttaggttctgattagtgctctctcgaagatcggtggaaacaattttttgcatctttaaataaaattttgcaaaacaaaagccccccgggcgttttttgtttaacaaattttaacattttgacaaaaatttattctttattgaaaaaatctttatgcatatgttatgttttcataaatgctgatcaaattctttatgccaattagggggtaattaagcttattaattaagtattttctgccgttctttcaatgctgaatcattgccaaaaacagtgccaaaagtgccaaattgaacaaagcattgacgacaacaacaaatgattgtcggtaggatgaagaagctggggcgtagaaagaactgtcaaaatatctgaataaatttaaattaatgaaaagcttaaatttcaaataatttcctaaccaatcaatatttggcgaaatgttttttcgtttttaaattaaaaaaaagtgttcccgagtcccgacggtgccgagcgtaatcaaatgacattcaaaagaagtctcggcgtaaattcagaaaaaatcccaattttttttttgggtgatctcgacctcatcaaatttcgagaccggactcggaaaaaccccggattttttgggtgtctcagtctcatcgaatccgcttcgagaaatcccccccccccattaatttaataacatttttagacaatgacaattatttttgcaaaacagtagggactcataaatagttaaaaattaaaattattttaaaattaaatttttaatttctcactcatcgccaagcgcattttccaggcgttcattggatgctgatgagctgctcctttcgcgctgctcaattctgctggcctttggcctgtcaaaaaataaaaatttttaaatttaagtttagcgccaaattttggcattttgtttttgctttttgtttgtcccccgacttgg

SEQ ID NO: 6874 - DNA, 3107 bp, Heterodera glycines
  unsure (1)..(3107): unsure at all n locations
tttgtttcaaatttttcagattccctcttcgaaattttttctggttacgggcctattcacgggaatgggatgggatataacgttgaacggattaacgatcaaggatcctgtttactgtacctcggccttcagacgatccctttcctgtgccataatgcgacgcagcgcggcactgccgaacaccggctcgtactgatcactgtataaaaaggcaaacaaacatgctactctgactgaatgaattaacagcagaatgtgagagtaagggcaaatgatcaatcgataaatcctcgggttactgtaggaattgttttctctaccaattccagaccaagatcacccaccccatgttaccttaattagagcccggtgcatgacgggatcccgcgcgggattttacggaattaatcccgcgtgatcccgtcctgcaaaaatttgaatcccaatcccggcgtgagattttacggaatcccagtccgcaatcacgccttttttggaaattgctggatttgctggattaatcccgcgggctccggccccgcaaaaactttgagtcccaatcccgcagatctgaatccggatcttttgaaatttgcgggctctaattttaactaattatatatatattttttatctgctttacccaccggctgctcacgtggatgacatggacccgattgtgtcgatcatattcactttgcaccgtgctgttctgcaacggcaacaattttgaagacgaatttgatggctttggcatcgctgctgaggaagcagccgatggtgccaatgatggtgccgattttgatggtgtagttggtctgacggcggtggccgggctcttaattgaaggagttggaaaaaatggcaaaattttgcggtttttgctgagatttaaaaattaccgtatttactgaattattttcctttcccccccccccctgtaattgtaccccacttttcaggggtgttgtctaagaaatatagcccccgaaattatgagggtcgtcaatttaaaaaaaaagcatttttttaaataaatttaattattttttacatccattttttgacacatattttttacaattttttgctccttatgcgcacgatggaataatgagttcacagtttttgtgcttgttgaagaagtgagccgaaaatttgaaaattcgggtaaaaaataatttttaaaaaaatactttttcgatgacaaactctgagccgaagcgaaattctaaaaaataaaataatataaaatctcatttttggctgaaaaatatgtattaaaattaacttaaaaattgcgttccaagtgtccttatttgtccttaattttgagtttggaattttttattttttggaattttcagtttttatgattttttaaaatgttttggcgctttaacttatctttggtgccaaaatcctgtggtttttccctattttgaaaagttgggaaaacaccgtacttaattaagccaactccatcattacagtacacccaccatttatatataaattacaaatacagtatgctaattaaaccaacttacagtatgactgatgcttgttgttctttttgttgtggttgtgccgatttcttcagtgccatcgtcatttttcaccaccggatgttctgccaaatcggcaaagtccacctgccgaattgcgtccagcaatttttgctgaaattgcgcctgagacgtaaaaaattccaccccctaattaattaattttccttaattaattaatgtttgtttttgttttgcctcatttccgctcacaaacgcctcataaagcagcttcgaattttcggccgtgttgcaattggaacggccaaaacaccagcagcgaatgttgcctgaaaaatggcattttttgcgccctaaattttgattttgagtttttctttcgaccaacaggcctaagcaaggcctagggttttgaaaaatttgaaatataatgtttcattcacaaacaaaaaatttacggaagcgccaagattcactcattttctgaaatccatttttccaattaacaactgaattaaaaaaaaaattttttgctgcgaaattagcgaccgaaataagcttgaaatttttttttggttttttgaataaatttttcttactccgatattaacaattgaattttgaatgaaattttaattttactaattatttttccaccatggttttcatccattttttacatgttttcttacactatttttgttccttatgctaaagatgaaataatgagttcacattttagtgaaatggatttttggaaaattaatcgacccctcgggatttagggttcggatttcgaacattttaatttttctaattaatttgtttttccacctgaacgtttccgtacacagccggagccctgctgctccccaaattcgcccttcaacatacagacaaattggttactgtccaaataatcgtagaaagtgacggcatttcgctgcagggcaaaaaaaaaatatatttttttaatttctccaaaatttcccattttttacttgaattcgaattcggcagcctactgtatgagctggacaatgttcactgactaagccgaaccctaaacagaacttatttggttggtaaataaatttatatttatttattttgattaaatatttacaattaaaatgaaaatgcaattaaaaataataaaataaaaatttaaaaaaatttatgttatttttctcctaattttgagttcaaaaaataaattaattgtaatcaattggaaagtttttgcgactatcaaatttaaatattttaatccaatataaaattaatttaaaatttaaaaatttaattttattttgagctgaaataattgtttgattggattgttaatttgtgaaatttgaaattaataataattgatattaatgtatttttttattttcaatttttatttaatactaattattagagaccggacgggaccggggcccgccgggattttgccgggcagtcccgagatctcgcccgggtccatttttcaagtcccggncatttcaaattnccngtctatactaatttatgcccgatatattcaaatttcattcattttagtcataaaat

SEQ ID NO: 6875 - DNA, 1600 bp, Heterodera glycines
ggggtttctttgatgtcctcattatcgtcattcacagataatcagatcatcatcatcatctcttccgtaacatactttctgcataatatacattttgggctgtccgtctttgctcccacaaaccgcccgaaatctcataagaagtgaaattcctcgcctgtaaatatcaaaaacgtcaatggggggagttcgtcccgcaaatattcaaagacaccgccatcatatcattttgtgaaattgtttcccccccccccccccctcccgtcgtcgtccatcatcttttgcttgtcccccgggggtcggtccgtccaaaacggcacatccgtcgtgccaattccgcccttcccccttttccctcggcactttttcttcgccgtgccgtgccaatttgtttttgaccaacacaaattttgacacattctttttgctgctgccccggttagcgagaagaagatgtgttattataaattgtggagatttgggcaaagatttatgtgcacaaacgcggttattagtacataattttgaaaacaaaaaaatgaatggtaaaaacttataaattatttttaaaaaaaacatttattttgtttttattttggaaaaaaattaaaatggaaaaattttagtgaatattaagttaattaatataatcgagatgaaacttttttgaaaaaaaacagaatgaaaatagaaaaattggccattaaattttcgatcttaaattaatggagaatttttcgaatttttttataaaccaagttgttagcttaagtttggcatttaaaattttaaattgccagatttcaattaccaaaagctaattgccccaatttttcaaattttaatattttcccacatgaaaatcgagattttttggttcattaaattcttcacagtttccaaccaccccgtttcacagcacggaaaaattaattgaatttttttgaggcttcaaattggtccgttgggattttaaaatggcccccaaaacattggcaacacttttcacacattgttttgcccccgaggggccattggtcatttccatcggagaattgagcccacaaaaaaaagaaattgaattagcactttgttgaccaaaaatttcatcgcctcaaagcttttttggggattagagagaaatatttaccgggttatggtattttaaattacggtaaatgcggcgcattatggtattctatgtttttaaatccgtatttcctataatacagccccctgaaataaagccccccccctctgagggggttgaaaaatagagccccggaggctctacttcaagaaataggataaattgaaaaaaattttactttaaaatagttaaaaattgttttttgcatttaaaaaaattatttgtaatttttttgtaccaacgaataattttttatgaacaatctatttttaattatttttttttaaatatatttcttgcctgctctggacaccaaacattggatgtcagaagtggcacttttcacgaaaagtgaaagtgccaagcacaaaaatgaagcgtaaagccgtgccattaaaacaaatcttaaaaagggagattaaaaatatatttcaataaatcaaaaaacat

SEQ ID NO: 6876 - DNA, 7444 bp, Heterodera glycines
tctgtcccggccaaaggcggcactgacggaaaggcgcacggcggtccctcggccgccggtgcaaaggcaacggaaacgaagcccaagtcgaagttttgctcgattctctgaacccggcaataaaaaagagacgcggagaaacggggagaaaaatcggcgcctaagaaaatttgattgactttgtcttttttgacatggaattttgcacttttattatttttgctgtttttttttgtctcttttgctgcagctgagtgtctaactgtcgcgtaaaaataaatttgcttaaacatttttgcattggtgaattattatgatgggcataggtcccatcagaatgggcacaacactcaaacttgaaaaagcatcaaaagtgggaaaacaaatatatccaaggtttgaccgagcaaaataagagtttaattatttattttctaagaaaaatgggcggacaaaaaacaaaaaaataaaactggtgctgatcaataatcaatctatacgaattatgtatgaaattgtttgtgaatttgctaggccggaccataaaagtgccaatggggcgaacctaaaaacatatcaatgattattgtgtttaattaattattattttagactgtttaattttttgaatagtttgaactaatttgtaagttatggtttattattttgcaaaataaaattaaaataataatattaattaattattactatcatttgatactttttttaattcgtcccattgagtctttttttaggttcggctcagcacagtatgacgtaatatttatattgccatgtcaaatcggagaaggaattgtcgtcggaatacaattggcaaaataaaatataaaaaacatattggtaaaatacatattttaaattgttaaaataatatttaaaatatttttggtgaatttagtggcctcgggcagagagaagagagcgaaggattgaccagccattatttattaattggaaaatgacgaaaaaattatttaattaggtaataatgtgtgaaggaaggaggaggagaaggaaggcactttgggggaaaagagcgccaaaattatgtcgtttaatgggggggggggggcaggagaatctgtcaaaatgcacaacggtggaaaatggtgggaaaatacggtaacaaatggcgggaaaaaccgtactcacagaagagtcgagactcgattaatctcactttgaaacttaaaatgcaacccaaaatttgcatgagattgtcgcaaaaattacctctaaaattttagtcaaaaaccaaacgagacaaaaatctcgagcagtacacgtgaaggaatatcaccaagggaaatgctttttgcagattctcctgctgtttttgttgttgtactcacataaaaattgtggcattttttggaacccgataagtgcgcggtgttcaatttaaggggaaaagggacgggggcgagggataagaaatgtgaacgaatgtgttgtgttgcacagcaggagcagctggagacaaaaccgggagagatgtgcatggatgggcacattgtgccttcgccatcgatctgatccgactggtcagaaattgcgtcgtcgtcgtccgtcggcccgtccaaaaccccccgcggcagtcaatcagtaatcactttttgtgccgtgccgacggcgttgtctggtgcgagctggccggcgtgttggaccgggtggagcccgccgcggtcaccggcacagccatggaggagccgctgccccgcccggtgctgaacgttgtgctggagctggccgctgagctgctggatgccgtgaaaatctccggcttttgctgatgctgcagcacacccgggcctaaacatcggggcaaatggcaataaaaaagagaaagtgtaataaaccgacctccgagtgtcggctgccacatttcgtagccctccttgggcaactcctccctgatcatgttcagaattgtttgggaagtgtctgaagtgatcggaatagtaatcggacaacaaaactctgttgtgacaaatgcaattttgatcagtctgatccgttctcatccttttattgactccctttccctcaccaaatcactcacccggcttcagaaaggcgaacaaacacccgccaccgccggcaccggcgggaaaagtttccggcggtacagtcggtccatcctccaccaaaaaattttggaaaaatatgtaatgcggtaaaaaaaattgaaaatttgttagtagatctcacaaattaaggagttttagaaaattttaaatttagaatttttgatagttttaaaaaaaaggttgattggttaaattttgagatgatttttgttttctaaattgaaggcaaacaattttattcccgccccgttttattccggcagtttgaaatacaaattccgcccggcccgattatgttccgtaaaaatacgaaccaaaaatttctgattaattaataattaggtgttcgttaaaagagaattctcgtctcttttcttgacttttagcgcgtctcgttctcgtttttttctacattttctcttgtcttgtattttctttttcttttctcaatatccctgttgttagttttctcatatttatttttcattgaaaccaaagcattgtctaaaattggcttgtataataatccttttatttagcggcaataatgagtgaacttgccaataaggagaaaaagagccttactgccgcagtcagcgcctccagcattggtggttattccactctgctcgtttttgttgtgcttggcctcgcttggtttgttgggttcgcttctcgtctgtttgccattgtccgtttcgagtcgatcatccacgaatttgacccatggtttcttcttttcgttattgaatgttcaccaatttaattattcatttgttaggttcaattaccgtgcaactcattacatggttgagaatggattctataattttcttaattggtttgatggtaaatgttacaataattcatttccgtaaattactcctttacttatgctgttttcagaacgcgcttggtaccctcttggtcgcattgtcggcggcaccgtttacccgggtttgatgctgaccagtggtttcatccactaccttctttcttgcctccatattccggtgcatattcgagacatttgcgtttttctggcaccgactttcaggtcttctaatatttgttttaatgcttaaatggtttttgcttttcagtggtctgactgcaattgccacttatttgctgaccaaagaactttggtccactggggccggacttttcgctgcgtgttttatcgcgatttctcctggttacaccaggttggctgactcgacaaaattttgccgccttcaggaatccattctcttttcagtcgttcggttgccggatcgtatgacaatgagggaattgccattttcgctcttcagttcacttactttctttgggttcgatcggtcaaaacgggttctgttttctgggcagcactcactgcgctttcctacttttacatggtctcagcttggggcggttacggtatgactttaacaatctttttgagaataaattagtccatagtttagttttcatcatcaatttgatcccgcttcatgtgtttgctctcatcatcagtggcaatttctccaacaaaatttacatcgcttataccactttttacactttgggtcagcttatggccatgcaggtgttccctttttcgtcctttttgtcttttattgctttttaggtcccttttgttggtttccaacccgttaagaccagcgaacacatggcagcagcgggaatttttggacttttacaggtcaaaatgctataacgaaacgcatcactcagtgcatttggtacgctttcgttcgttgtttcagctcatcggggccctccgctttctgcaaggtcgtctttctcgcaagcagttcatcactctgtttgtcaccaccattctggccactttttgtgccggcattgccctgctgatgttgctcacttacacgggtccaatttatggattttattagtcatataagagtgaccatcatttaagaattcttttcatcattgttataattcctttaaggttatattgcgccttggaccggccgattctattccctgtgggacaccggatatgcgaaggtgcacattccaatcattgccagtgttagcgaacatcagccaacgtgagaagaatttaaacaactgtgagaataagtctaacaaaatgcttttcctttctttaagcacttgggtctcctttttcttcgatttgcacatcaccgcggctgttttccctgcgggactttggttttgcgtcaaaaatgtgaacaacgaacgaatctttggtgccactttttcaatatttgcccattgtgctatttgtccatttcagtgattctttacgcggtcaccgccgtttactttgccggggtgatggttcggctgatgctcacacttacccccgttgtctgcattctcgctggcattgcgttctcaaacatttttgagaaatatatgttggacgatggagacgcaagaagaggaggcgaatggcgagaaccgaaggatgtcaaagaaggaggtgagacgaggagcaaaacatttaggaatgcctttctgagatggctttttaatctttttctaattcctcgcccaatttagaccgccgtctctatgacaaagcgacaacaaaaggcgggaagccgccaaaggtcccccaggcgacgaccgcctctttcagtccaagcgcacaacaagaaactgtggaccacattgggatgaacacacggtacaggacatggtcctctgttccttttcggatgccttctctctcagttccatcgttttggtggcgttgcttttcatccttttgatgtacgtcgctcactgcacttatgtgaccagcaatgcctattcccatccgtcggttgtgcttcagtcgcacaccaacgatgggtaagtatttgaattggattgtcaaactattcacaaattgtagaggacgcatcatcatggacgactttcgagaagcttattactggttgcgcaagaacacgccggaggatgcgcgagtgatgtcatggtgggactacggctaccaaatcgcagggatggccaaccgaacgtaagtgatattcggccgtccaatggcaatgtccagcaatgagtcttttgcctatgaaatcatgcgtgatttggacgtcgattatgtgttggtcatattcggtggtgtgatcggttacagtggcgacgacatcaacaagtttttgtggatggttcgaattgctgaaggggaacatccgaagattgtaagtttttgtttttttcgagtcacttcattgatttcattggcataatcgaagattcgcgaaagtgactatttcaccgagtcgggtgagtacagcgtcggagcgcaggcgtcgaagacgatgctcaattcgctgatgtacaaaatgtcttattaccgttttggcgaattgagagtcagttggctttacttcctgatagcactgtttcaactttctgttcctttcagattggatacaatcagccaactgggtttgatcgcactcgtggctatgccatcggtcgcaaagactttaccctcgaacgtctggaagaagcgtacaccactgagaattggcttgtccgcatttaccgtgtggtgcagccttcttgcgcatctcgcgaaacattggatttttcgccaaatccataaaacgactatcatcttcaacgtcaatttgcttcttttttgctgttcgttccttcatcttcgtttttctaatatagtaatacaaaatcaaaagtttttgtaaacaaaaatgtgaaagtaaagtaataaataaaaagcctaactttaaaggctacattactcatcgtacctaaaacatcaacaatgtattcacttaaatattcgttggtttttattcattttgttctttgggttttgtacgttccttttctgtaccttttcgcaagtgtctaagtgctgacttccgttcttttttgtaaaactaaaaatggtctaaaaagtgagtaaaaacagcaggaaatagaaccttaacaattggcgctctctttttgtcccattccttacgcaatgtctcttctttttggtgccgacgaaatgaagaaaaggatgaacggatttcgggtgtgtgttcattgacaaagaaacattgccacatgtcaccatcgccgttgggtggtttatacaacgaaatctgctaattagagagcatttattatatttgaaataaaacatacatttttgagtttgggtgcacttttttctgtttcgttggtaagtctcgtttttttaaggaattgctctggtgaatcatccacaacatttgtatttttgctcttctcattttgttcgggataaatgcgtccgattgaagcaagaaaactaaatggctaaacaaatcccttttattaaacgatttgatttaacagagattactttgctattttgtgttgattcctcttcatcggaatcagcaaatcttgtttgtttgtttatcttcaattctcccgtcaatgatttattgataagccgtctcctctcatcaagctcattttttctccgagtaatgctttcaatccgtcgctcttcgccattttttatttgcgtaatttttgccattttagcacttaattgtataaatttagttattgggttgatgaaaaagttctggtacttttccattatgctgccacaccccaaaattttaaagcgccagttttgtgcaaaaaaattatttaggaggcataaaagccgcaattttagctaaaatgtcatcgaatgtatcgtcatcgtcctttaaagcaccgcaaaaaatatttaggaggcataaaagcggggcgctttccccttcttttttttaaattttggggtgtggccgcataatggaaaagtaccgagatattttcatttttcaagatatgtttaagagagaatccgagatcactacttatctatgtatgtacaaagaaagaatacaataaatgttttattcatttgtagcagtttagaatttagctataaatcataaaagttacatcagaatatctgcatatttactacctaatttactgcgattaaaaaagaagcatttttcattgtcaagggtgggggacgcactttcgaaaaagctgtgttcacggatcacgaaaaaagaaatgaaattcacattcgcagagtttgcactgacgctgtttcagtttggcgaaaaaatggtgcgaggcgaatgagaaattcagtgagaaaactgttcttttatgcagtcggttccaaattagagcgccaaaaagcgaatttttgaaaatttggattttcgactttttgttcgaagtcgagcaaatatgatcgtggaaatgaaatttggaaatatgaacattgaaggcattggcaccatttcaaatgt

SEQ ID NO: 6877 - DNA, 1611 bp, Heterodera glycines
  unsure (1)..(1611): unsure at all n locations
caatttgtcacaattttggcatntagttcaaattntaataataaatttacttaattttctgaaaattgtccggtgccgcttgtcagctccaccgcaaaaaagctaactttttcaaactttgtcgcttggttcaaaatcgtgtaaagataatcccatgcaaatttcaaaagagatttcacgccacgccgccaccttcttcagcggaggctctttttgtctttttgcctctgtttttaattgttttgctaatttctcaacaaggggtgaaaaggattgacaaaatgacagattaatattgaataattcattttttcttctattttttcaattaaatttatttaattgttttttcaatttaattttccgcttttccttcgcttttccttcggtttgtccccattttgtgcttttgcggtgccttttcccattttttggccattgttccgtccctctgtccgtccgttcctccgccttttcttccgtttcgccgcggtccgtctcgtttcttttgtgctgcgcttcgacgggaatgagaaggccatcatcactcattcatcatcaaaattatattcgaattgatcgccgtttttcgctataatttcgataattacgcttaaatatttttattaaatttagaaagaaaatgctcatttattttatttggaatgaatttatattttaattgatatttaattgaacatttttgaaatgcaattaagaaaattgtgcgaatgtaatttcaacagtagaagatattataattgtataataataattttaaattaaaatgaaggcttttaaaaaaatatttaatatttttatgtaatttttggctgtttttttggttggtcattttattctgttgtttgtttctgtccttgacctgataaaacattggtttaactgctcaaaaaatgattaattgttatgagtgtgggggaattatttgttgtgaatccatccaatccgatcaaaaaatgaatgattatttatttatttattcattaaattgtttgttgctttggtcattttgatcaatcatttcaacttccttttattttttaaatatttttaattaattaatttaatgcccattaaaatcccattctctcccccgcccatttcatttcatcgataatcataaaatgtccacgctttttttgtatgaaatgttttccgccgattttatgtgtttttggctcggaaatcccttcggtaaatccctccctcggtttttcggcttttattattacaaattaattacatttttttattttatacacaagaaatccgcattgtcaaaatgttttattataatcgcattaagctgaagagaaaaacaaatattcaaaaaatgagagggcatcgaaagtcaaatatttacaatacagccgataatcacagcaaataaataaaaaaagaaagcatgcactttcatcatttaccttaattagcttctttaagctaacatttaaaaggggatatcgacatttaattgaaagaaaagaagcatttcagcaggcattgagcatttgatgattaattaatgaatgatttgttaattaatttcatttccgagggccgtcactgattttaatttattatttttgc

SEQ ID NO: 6878 - DNA, 4992 bp, Heterodera glycines
cgcaaaaattgccgcttgtgccattattgttgtgatcggtttctcttttgggtcactcaaggttggcatccattttcgccaaatttcaactttgcaaattcaattttttctaattaatctgcattcttttttaattatttgtccatctcgcgaattgctcatttgtcaggtgcccattccaacaacttcgcccaaccctttgccaacagcaatttcgagccgggcaaagtcgtgttggcattgttcagcggactgttcagctacggaggatgggacattctgaacaccggcattgaggacattgcacatccgcacaggtgaaaaatgcagtttaaaagatcaaacaattaaattattaatttctaaaaaattatcatcaatttaatttattctaatcagaacttctttttttttgctccttttcctaaactaatcataattagtgtaattaaacattgatttttaatatggcatttgagaaacaatacatttggacatttatgagcaaaactggttttaatgaaaaataattttagtaacaataatggagtatatcgcatggcgtcgttggtgcagtggtagcattgctgccttccaagcagtaggggcgggttcgattcccgcacgacgcagaaatttattttttatttttttttgactaattgtttaggacaatgccattcgccattatcgccggcatggccatagtaattctgctgtacatgacaatgaatgtgtcctattttgcggttctcactgtgacggaaatgagaacatcaaatgccattgccatggtcagaggagagaaaaaatcaaaaaattgtggaattttttagtaaaaaaaaacaaccaaaaatcaatgaaaattttaaccaaatcgaatttaaaactgcttatttttctagtgagaacaaaataatacatatttcaaataataaaaattataatatttaaaatgggtaaataaatataagcaaaacaaattcacggatgaatattttttcaaatttaattttacccaaaatgtcgacttctaaaattaagctgatctcgtggatattgcgctaaatctgccccaatttaggggccatgttcggatttagacattctctgagcgtgtcttccacggctatcttcagtatttgatgccttttttggtgtgcattgtgctgattgggttcggcatcttttttatttgattaatttgttttttaattgtttttagttcgctaaatgccactttattcgggggcagccgaatgttatgggccattgcgcgggatgggtatttcccctcattcatttcgtgtattaaccggcaacacggcagtccacgggcggcacttttcattttcgtatgcattaattaattaattattattttttgttaaaattattcatttttcagtccaagaaaatatgcctgttaaaattatttgaatgttttaggtcgttctcgctatgcttttcacgtttcttggtgatttggatgttcgtctttctctctctttcattttattttaaatttaattttaatttctcaatttttaggaactgattggatacgttgagtttacgaattgggcaagttttttatttcaaaatttatgagaaattcaattattcaaaatctttgatccctccaaataaaaatttttattattagcattgcttaatgatcattggtgtttaattgattcccaattaattatctccaatttgcaggtggtccgttgctgcacaatggtggccctcttctgcatccgttttggccatcgtgccgatcgcattcaccccgaggcgctccgagtgccattggtgttaccaattgtctatttttttgtgtgtctttcgcttgtcgtggttactgtcgtcagaaatttcaagtcggcttttgaccttactatatttcctaatcttaggaaatacggtaattggggggggcattttttggtaattttcttcacaggtcggcaatgattggactttcgttccaggcctttggcctcttcgtttatttggttttcatttggccgccagcgataagccgcttctccaactaccgtaatgtggcacatcagatcaacagtatgcaaagggagactttgaaaattgaatttctgttgaaaaaggcaaaatgtccgccgtcgctcaaattgtttttgacggtgccatcgaagtgaaagatcggcgacaaaatgaggacggactgttcagtctgatgactgatggggacaacgactatttggcgtcaactcacaaagaaaacagcatcagcagcagaagaaggccgaggacacgacggcatttaaacgacggcaaaaaagtgtatccaatggaaaaataacgaaaaatgaatgaatgaatcgatcaatggataataaaagatgaaattaatgataatggattaattaataaattgcgatatatttttttcatttgcctttgaagcttatgcttttgctatacataaaatatgttaatcttaagccaaaaccttgtttaattagtggtgtggtggaaaagagttttataaaggaaactaattaggaaaataaaatgtaattgaaggcactttccgttatacagcacccctctaaaaatgccaggctcccaaaaggaatgcacttttctaaggtaatttttcaagaatatgacatcaaaattgcaataatcaatgcctttatctgtgattttcatccatgattttgtctatgattttaaaaaagaaataataaatcatactttgtttgtccttctgggtttttataaattctagacatgtttctggattctctaaaaaaaacattttttggggaaataatcgacaaaagcatgtgatcaaatcatagataaaagtgttttgacgccagattctcgaaaaattcgtcaagaaaagtgctttcctttgttgggactatgacattttcatttttaggggaggggggggggatgcggcataacgaaaagtacccaatttagcatgatttttcgaaaattcctatttcaaccccaccttttttggcttccatctgacggggacgggtcattaattcattcattagtctcttccccatggtttggccacaaatgatttgcgctttttctcagccaacaacggttgtcggttccaccttttgcgcgagaggacaccgccgccgcgcttcggcggtgcctttgtgttccgtccgtccgccgccgctaatcaaaatttattattcaccgattagtttttcaattagcagcagaagcagcacatctctttatcagatcagtacgccgtacaaacgcaagaaaagcacggaactgctgatgagccattacgaatcattaaaaaaggtggaaggtggacaagtgctaattggcagcggaaccgtccttagatcattttcagtgagagtttgggacgaaggtgtgataaatgataaatcaataatgtcagattgctgtcccatctgagcattaatgggtgattaatgatagttgaatgttgatttggttggtgattgggaattgggacccttccgccctcgcctttttccattaattgattgaccatttatcaatttttcgcttttccccgccatccgcgcgaaatgaaagttgcgtttgttgttgttgttgatgtgatggaactgtctttggccatgccccccaccggttttttctttcactttatgtttttcgctggtggcatttgggccgcctcccaccggtgggccgtataaaaggcgcgcgaagagatggcaaagcatcacaaagcatttattcgcttctcctctcaaaaggacactcaacggttagtcaactccactttttcctccagtttaagtttaatttagcaacatcttctctaaactctctgaacaacaatgatcgccacaactcggtgtgtagtgcttcttttggtcggcgccaccatggcggacgccttcctctcggcatttgagtaagttgcacaacccaagcaattaatgccaatatataaagcatggtctgatcagaatggcctgatcaggtgataatatgggtatttagcaacatttcatttagtgttgcacccggcgcactgcgcgaccgacgccaatgcggttgcggatgcggcggaggcgggggcggcggaggttgcggcggaggatgctccagcggtggcggcgggggcggggccgtccaattagcggtcagctgcggtgctgcacaacaggcggcaccagcctcttccggatgcggatgcagcagcggttgtggcggaggatgcgggggcggatgcagcagcagctgtggcggaggatgcggaggcggtggcggtggcggtggaggcggttccgttcagctcacgatcagctgcggtgctgcacaacaggcagcaccagcctcttccggctgcggcggaggatgcggtggcggttgcggcggagggtgcggtggcggatgcggcggtggttgcggaggcggctgcggtggaggcggaggatgcggcggtggtggcagcagcggtggcggatcagtccaactcgcggtcagttgcggcgctgcacaacaggcggcctcttccggctgtggaggcggtggcggtggcggatgcggttgtggatgtggacgtcgaaagcgcatggccatgcgtcgtcgctgtgttcgcgcgctcggacgcttttgaattggaaaagaataacaaaaaatgcctagattttaacgctttttaattgaatgctttcgccgaaatccatttctagctaattagccctaattaatgttagttattataataatgcgtagacgcaattatttattgcctctaattttcataaatttggtgattaaatgataaaatccaacatacatatggtaatctattgtctaaaagttcacgtgcaaatggcaattaagctccctattttttaagaattggcaaattaagtccaacttccagttttaattttaaataatctctggctaactgttgaacaatttgagcctttatttctcgcaaaa

SEQ ID NO: 6879 - DNA, 2211 bp, Heterodera glycines
gtcagctgcggtgctgcacagcagcgggcaccagcctcttccggatgcggatgcagcagcggttgtggcggaggatgcgggggcggatgcagcagcggctgtggcggaggatgcggaggcggtggcggtggcggtggcggtggaggcggtttccgttcagctcacgatcagctgcggtgctgcacaacaggcagcaccagcctcttccggctgcggcggaggatgcggtggcggttgcggcggagggtgcggtggcggatgcggcggtggttgcggaggcggctgcggtggaggcggaggatgcggcggtggtggcagcagcggtggcggatcagtccaactcgcggtcagttgcggcgctgcacaacaggcggcctcttccggctgtggaggcggtggcggatgcggttgcggatgtggacgtcgaaagcgcatggccatgcgtcgtcgctgtgttcgcgcgctcggacgcttttgaattggaaaagaataacaaaaaatgcctagattttaacgctttttaattgaatgctttcgccgaaatccatttctagctaattagccctaattaatgttagttattataataatgcgtagacacaattatttattgcctctaattttcataaatttggtgattaaatgataaaatccaacatacatatggtaatctattgtctaaaagttcacgtgcaaatggcaattaagctccctattttttaagaattggcaaagtcaaacttccagttttaatttttaaatattctctggctaactgttgaacaatttgagcctttattctcgcaaaaaatgaaactatttttcggggagtgacgacggcaaaagtgcagtcctagtggcattggcctaggattggcaacacttttaacacatcaacagaagaagcaaagggacgaagaaaaactagcaaatttgatgaaaaattggaaaatgaaatttgatggggcgggaagtgagatgagaaaatgaaaagaaaagccataaaaacaaaaaaaaatgtgattggatgccattgctctttttggtgttcgtgccaatccccgcactccgatgctcttgatgaaaggcattttctgctctcctcctccgtgcggtcgtgcagctgctgctcagaagcacttgcggtggacaatggacgggcccgactcgtcgtactcctgcttgctgatccacctgagaaagggcaaaagagtgctcagagggggaaaacaacggacaatgatcagctaattgggcaactgatcagagggggaaaagcattggtgggtcagatcagcccaatgcaaccacaactcacatctgttggaaggtggacagggaggcgaggatggagccgccgatccagacggagtacttgcgctccgggggagcgatgattttgatcttcatggtggacggggccagcgcggtcatctccttctgcatgcggtcagcaatgcccgggtacatggtggtgccgccggacagcacattgttggcgtacaggtccttacggatgtcgatgtcgcacttcatgatcgagttgtaggtggactcgtggatgccggccgactccatgccgatgaaggacggctgaacagagccaaatcaaattgtgccgttgccataggcacgcgccctccgccgggcactcacctggaacagcgcctcggggcaacggaagcgctcgttgccgacggtgatcacttggccgtcgggcagttcgtagctcttctccagcgaggaggaggaggcggcagtggccatttcctgaaccaagacgggaggaagggtaattttggcatcaaattggccaaatgtccgacctgctcgaagtcgagtgccacgtagcacaacttctctttgatgtcacggacgatctcacgctcggccgtggtcacgaaggagtaaccacgctcagtgaggatcttcatcaggtagtcagtgaggtcacggccggccaagtccaaacggaggatggcgtggggcagggcgtaaccctcgtagatgggcacggtgtgggtgacacctgtgcatggagattgatagctatgatattatgccaacgatttggctgcataccatcgccggagtccaacacgagaccggtggtacggccggaggcgtacagggacagcacggcctggatggccacgtacatggccggcgtgttgaacgtctcaaacatgatttgggtcatctgaaaagggg

SEQ ID NO: 6880 - DNA, 2649 bp, Heterodera glycines
tcgggaaatgtttgggctttttccttttgtgcaacgttcccaccgaaggtactactacataatttaatcagtgggggggggggggggaattctacgcgattttaggataaatggctattcttttattgacatgatcaatccttcatggtgacctggaaagtcacaaatggcttgaatttggaaaataaaaataaaaattcctagaggaattttaatttaacaaatttatcgtcttgagtcaatactttttccatcgctgtacattaagttaattggagctgcaaatgttcggcaacttttcgaattgtttctcgactattctgtaaagaagattggaagcacgaaatgaataggaaatttttaaacaatgaaaagcacaaattgggaattggcttcagaaatttttcggtaggtggtagcagtctttatgccaaaatatggaaaaattaagaatatgatggacccgagcaaaggattttacgacaaaagtgaggacaaaatgacattggcaattgatttctgtgtgaaagaagtagaagtggaaaattcataacatattccgcatgtattttttcgctgtttttttatatttgcttttcatttcgcttttcccattcaaaagctttgtacataaattgtattgctggatattttccttttctcatctcaattttccgtccatttctacgaattttgacattcttttcattgatttgattaaagttcataagccctccaaaaccaagggtctggctacggccttgtcagattgaatgttttatgcaattgttcaaacatgaatggacggacgacgacgaacgaataaaaaaagatggcattttcttttttaaaaaatcaaataacgaccaatttaatcatttgccgccgacttcttccgctgttgttgctgtctctgttgaagatggtcatggtccgtctccaagaattggtggtacttctcgcgcagtacacggaacgcgtccatgtccgcgtacggcagccgcgtcaccgggtcaatgtaacgcgcgggctgtcccctgattgcgcacacgcggaactcccttggcttcagcctaaaccaccatcatatgcaaggaacgaataatgagtccgtccacaccaatggcaatccaagaaatgaaaatccgaaagggtgaaaaaacaatttctcaaaaattatcatttttaggcgaacaaacggccaggcgttttgccccattttcgatgaagaaaatccgtcccccatcttttccatttgccggactaaaaaataaaaataatttattggtgtttaggctgtttaaaaatgaaaaaaaaacatggaatattttttaaattaggtttcaattaaaataatggtaaataaaatatgaaaaacattcgatcccattggggattgaacccaagcgaaaaataaaggaaggtagaaggtttaaacactaagccacacatgcatattaacaaagagaaaaattgaaaggaacaaacaaagattggcaaatgattgaatggcacctgatcagcgaattcttcccgctgattgatctcccgcaatattctctcgcacttacaaattagtcagaagctatcacgctaatgcattaaaatgggaaaatcgatttcatagcaaattttccaaataaataataaaacatttatggaattatacaaaaagaatctacaaaagctaaaatggtgaagaagtggaaggaccatcggaggcgaaagtgtcagcagcagcagagaaactttaataattatcgataatcattttcggaaagaggaggggaaaaggggcggaggagggaaattgacggaatgaaaggtgtcctctcaaagaacccacagcagggctggacgcaactgattttcaatgacggaattccgtaatccgtaattacggcttttttagttacggctatccgtaatccatcattacggaggtccaaaaggccataattttgcgtaatccgtaatcttgaaaaaataatttatatttaaaaatttttatttaagataatccaatctaaagaattaagtgtaatttatgatcagaataaatcttatgcatgattttttgaggcgaaaaatcccaaaatatgggtcgagatcagggctgtgcgaaaatcacaaaaaaactttttcgtatacgaaaacgaaacgaaaaagtgcattcgatacgaaaacgaaacacgaaacgaaaaaattttgacggacgaaaacgaaacacgaaaacgaaaaaataaccattttcgtacgaaacaacgaaaaaaaaaagttttttgaacttatttcaatcataattaagaaacataaaactttaaaattgtatcctctaactgaaggaatgaagatcctagtaggtggaaaagctaatgtggctctaggacaggggtgtgaccgaaatttttttaaaataaagaacatcaatgacaaaaaataaggtttagggtcaaaaaagacaatcttgcaaaattggttcgaatcagttaatatataattttttcgataaaaaatgtattaaaatgctatgtttttcacatcctattatggattttaacaatttttggggaaggaattagcaactgctgaaaaaaaagattttcaaacgtttttttttgagtgtatttttttttacagttgatgaat

SEQ ID NO: 6881 - DNA, 1654 bp, Heterodera glycines
accctggccgagatcgagagaaaaatagcaaaaataggggcaaaaatggcagattcagagctggtcgaaaattttcaaatttttcattaattttaaataaactcaccctttttacgactaaccgtattcccggtatgcttgacacaaaattgctaattcgggaaccggaggtggtttttcgtgaataactcggccggatttgctctggccggtttccaaataaaatgaacttgaacaactttttgatctgcacccaaccgtgttattggttttttgaaatcttcgcccaaaaaacccagaccccctcggaaattttttcgttttcatttcttagtggtgttttttcgtttttattgcactttttcgaatcataaaaattggcacattaagcacaaaaagcccgaaatatgcaaaaaataggccttataaaagtcattgtagacactccaaaccaagcggaaaatgcgtttttcatgcttattggtgccccccttcttgacgtagtctctgatcctaataagagttttaaaaacagtatgaaaaattcggaaaacctcgagatctcttcattgctttttaactttttaaagcgagttttgatcctttttatgaggtgccctcgtccaacattttggagatttttaattgagtttcaaatgggtatttgcgctggaggggtctctgttcccaaattcatcaaatttttcctcgctgtcagaatcgagataagcgtcgtcgtctccatccgagtcgaaatcaagaaaagtgtcagttgagtcggggccattttcagataaggaaagggtaaggtcttcaaggccccgaattatttgggacgtttctggatgatttttgtgtcgttggatagttgaatttaagtcatcaataagggcgtccattggaaagaagaaagaggaaaaatggccaaggaaataggcaaaggacagtgggatcgggtgcccctcccccccccccccccaactaaatttacattttttggtgtttcccacaattgttttggttcgatcccttcattttaaaagcatcgaagacctcgatttataatattttttgtaatgtgtgatttaaaaattgtttgttgttgaatttaaaatttaaatttgttcgagttcgggtcaggggttcggtacagggaaaagtgaatgtcaaattcgtgatcagcggcccaaaaaaccccataaataattaaaacacaatttttacagtcaggcggattcgaaccaatgccccaaaacccatttttaaccaaccacgcaattcgtttcccttcctttccttctgtcgagaatgtgccccgaggcaatgaaattcgcatttttggggccttgtaactctttaggcaggcggaatgcaccgctaaaattaaaaattcataatagaaatcgaccctcgtctatccaatggtatatcgtttatatgcattttcctactcacagctcggaatgttcccttgttagcaaatatttggaaaataattgaaaataatgaatgcaataagaaaaagcctacaaatatctctgaaaataaacaatcccgatttgcaagaaatttttggaactttttggttttaattttttttttttgaaattctgagattttctattttttttgcaaaaatgaatttctaaatatt

SEQ ID NO: 6882 - DNA, 3004 bp, Heterodera glycines
  unsure (1)..(3004): unsure at all n locations
ttacgactaaccgtattccccggtatgctgacacaaaatgnnctaattcgggaccnggaggtggtttttcgtgaatactcgnnnccggattgnctctgnccggtttccaaataaaatgactttgaacaactttttgatctgcacccaaccgtgttattggttttttgaaatcttcgcccaaaaaacccagaccccctcggaaatttttttgttttcatttcttagtggtgttttttcgtttttattgcactttttcgaatcataaaaattggcacattaagcacaaaaagcccgaaatatgcaaaaaataggccttataaaagtcattgtagacactccaaaccaagcggaaaatgcgtttttcatgcttatctgagagtatcatgtgcgttgaaagttgagcaaaaatattcactggttgcagttacaaatgaggtacattttctttctaatatttttcttacaattagcaaatatttggaaaataattgaaaataatgaatgcaataagaaaaagcctacaaatatctctgaaaataaacaatcccgatttgcaagaaatttttggaactttttggttttaatttttttttttgaaattctgagattttctattttttttgcaaaatgaatttctaaatatttttccagaaagtgctcagaaaagcacgaaattttattgtcatgccactttgcactcggtgtcctctcaaaggacccacaaaaaataatgttaattaaaaaataaataattaaaataagctatgagagaatacctgttattaaatttattcaaataggattatgagaaaactgctatatggccaaaaaatcactaatcttaatgagaaaaattttatatgaccaaatgttatgaccaaacatcactattcttactaatgagaaaatgctattgaccaaaaatcactaatctgaacaaattagaattaaatttcgtcaatggattgccccgaatagcctgaaagaagttctataaaaggctgaactaaattacaaaattcatttaattcttttttttctattatgatggctaagttttttccttcacaaatgggcggcaaactcgtttttgaaggccatatgcatcaaaaaaagaagcacgtagggaattcatttattggcgctgtgaccaaaacaaaacaataaagtgcaccggggcagcaaaaactatcgggatgagagcaggagcagaactccaattaggaaagccgcacaatcatgccccttctccaacacgatgtgaagccgctcagatcaacagaagcgtgcgcaacacagcattgtcatcacgtggaaatatgccacgcacagttgtgaatggagagccgtgccgactttaccccgctccatttggcatccgaggagggccatttgcagatggccgcactgttgacggagaacggatcagaggtgattaaggattgtgattagattgggaggcattctttttgtgtattttgtaatgcttttgagagtctctgtctcgagtctcggctcgagaaaagtctcggatttttcttttgtctcgggctcgagtctcaggaaattatcggtcacgaatagcactagtatttggcaacttaatgaatgccatttgcaacaatttcagttcgtcatttattttatttttttgtcagaaaaattttaatttaaattttaatttaaattttgtttttttgggttttttatttttataaaattacatcaatttttattctcatatttttaaattcatttcaatcattcagttcaatttcatccgtaatttccaaatatttcatttataaattatttttacgaaattttttttaattgacatttggtggaagaggttcaaaaaaataatgccaaactactagagaccggcatcatagaaaccggcatcatcgatttatcggtcgaagttttcaataaatattttacagtatttttaccccaaaaaacgatcgtgaaatttttggggttttcgatatcgattttttggtattttattgattgaaaaatatcgatcaaagcatttgttcggtctctagcgccactcactcactctaacaccctactaattttgtggttttggcgagatccgatctgctgatgagcacaacaaatcaaaaatgcataaacaattagtcaaaatgggataattagttagcgcatattcttttgtttaatggatccttaatgattttcttacagggatgcgatcgccaaaacccaaaaaccgggcgcgcgagttgaaaaacccggcaaaaacccggcaaaaatttgcaaaaacccggcaattttttaagccaattattcactgtaaaaaaggtcaataacatttaaacaatatatttatcaccacttttcacctgtttgagcaaatttggcattgaaagaatgtaaccatgagcgtttgggcacaaaatatttgaattaaatttgattgaaattaatgagtttaaccagggttgccagattaaaattttcaaaagcctcatttggtcggcaaaaaagcctcattttgggtcaaaaagcctcatttttacaaatttattcaaaacacattaaaaatgttcaaatattatatttttattttccatgatcactttgagcaattttttgttagaaataagcattttgtaaaattcttagcacgaaaatcgaagttgattttttgcggcgcttttttctaaaaaaaaacttggggaaaagggaggccggcggtgccgataggcgccgccgggaaaaattttgtgatttttaaacaatttgttaacagatttgaccataaaaatgaccaaattttgcgattttgagcaaatttttaagaaaataaaggatccctggagctcaaataaatgaattgaaataggaaacccggcaaaaacccaaaaacccggcaaaaacccggcaacttcaaaaacccggcaaaaaccaggcacggaccccaaaaacccggcaaatgccgggtttaccaggaaaaatcgcacccctgcgt

SEQ ID NO: 6883 - DNA, 2904 bp, Heterodera glycines
aaagattcaaatttattttgtcaaattaaattggttatttttaaggttttcaaatattttataaattttaaaaacatttctctctcaattcattaattatttttatattatttttaggcaaaactttttggtaaaaaaagatttccgttctttttgattttatataaaattcctccctaatattttatgacattttatccgttaatttccactcccgcgaaattaacagattggtaaaatttaattttttttttttaaatgagttttttaattttatatttgcgaataatttgttttcaataatttttatttttgcattactaatttattttattttatttgttttatttttcggttgccatttcgttttttgatttgctttaaaaactaaataaatcagtagattgggtttgccatttattatcttattttttataataatcaaataagaattaatttattgctaatgataaaacaaattatgcatcttttttatttccttttcaaattttaacttttaaaagctttttaattttgaattttgcttcacatttacttttattttattattagtccttcaaatgagataactatttcctctcttagatacataatattttaataattttttatatttttatatagaactttaagtgatttaaaattgttaatcttatagatttttttttcttttcattttttagaaagggatttttttattctttctaaaattctgttttaaacttttaaattaaattaatttatttttctcgtatttctctttttgtgttgtattccaaaaattgaattttttttttcgactgcttctttaaaaaatttttaaataaataaataagttaatataataatattaattgctgaattaattttgaagcatttatttttctattatactaaatatctaacattattttttgttttgtattattaatgaaacatttaattcatataattatgtgccaattttcattttgtttttttttttttgtcttaattctcgtccactatcgttcgctgattattttttattagccctctggacattccttttattttcgcatttattccaattaatttaaattgcttttttatgcctttgcccatttcaatatgaaaatttaacatttgtttgattttgttaaatgtgaaataatattatatttataatttcaattcaactctataatttttaagtttttctgttaatttcctccctatttttaaattgatttttgtttcccaaaatccctataaaattttgggtccaattatttcccttcccccaaaaaactaagttttaatataatttttaatattttcaacaaaaaattgaaaaatagatgacataaaaacaatccttaaatgaaattttcacattattaataaataataaagtaaaaaaaaaattatttattaacaatgaaaaataaaagaaaaaatgtttggaatgtacttaatagaaaaatgaattaattttcaaaaaaattaaactatattgttttattcagaagaacaaataaaaatttgtggctccttaagtttcagggggagtgcgcggcgttttggcgcctattcgatccccaaaaatttttttccgaccctctaagaattttttctgctacctaagcatatatttacggtaggtagttagttcatcactagggctgcaaaaaatatggaaatccataattttacgagtcccaacaacactttacgcgtcccatgcagggctggacgtaactgattttcagttacggccatccgtaatccgtcattacggcgattttttcagttacggccatccgtaatccgtcatgacgggggtcaaaaaaggccgtaatttggcgtaatccgtaatacgtaatccgtaattttcaaaatttttttttaatttaaaaaatttttaaatttaaaaaatccaatctaaaaattgttaagattaatttatgatcagaatatctgcttgtttttttgaggtgaaaatcccaaaatagtttttttcgcggtgtgcttttcccaaaaaactggggaatgtggggggggggggggtggtcaggcggggccgaaaggcgccgccggaaaaatttttgaaaaattttatgcaatttgctataagattttgtctaaaaatgactaagattttggagctaatatttaaaaataattaggaatttttggggcgggcggtgccgttaagcgccgccgaggaaaatttttttcagaattttaacgaattttgttaaaaaatagccaaatttttagcatttcctcttttcccctttgctagcctcctccccccctttatatatgttaataatactataaattaccaagaataagtcagattaaatcgaaatatgggtagtcttttaataaaaatagaaaaataaatttattttataaaaaataatcttgcaagaaatcgtctcgaaaaataatctaaaaagccagttacggatcaaaattacggaaaaatcccaaaaatccgtaacccataatccgtaatccgtaactccaaaaaggccgtaatttccgtaatccgtaatacgtaatccgtaattacgtccagccctggtttgtattgaccagacgaaccaaaaataaacacagcaaaacgataatgttgttggctgttgttccaaatatccaaaactctaggaagaaagtgtcggcgtcgtaaccctccagattcattggggcttcaatttgttgcatgagtctaattgtgtcgtgccgaaattgtccatgttgtccacgacgactgtgtaaataatcataaaatttccaacggggccatcctcgtgttttagcaaccattgttgcttgtagagtatagaacaggcaataatgtcattgaagatgtaatcgctgcagcagcagctg

SEQ ID NO: 6884 - DNA, 4702 bp, Heterodera glycines
  unsure (1)..(4702): unsure at all n locations
tgatttgcccatgatatttcatattatttatcccattgttttaaattatatttattgaatttacgctttgttttaaatgcttaaatatatttgaattattttttaacccctcgtcttgtaagttattttttttttgttgattggttgttggattctaatgattttacaatttatttatttgtcttatgaaatagtaatcaacttgtattatttttattgtgttttttcacgttttaaaaataaggaattaattttaaaaaattcttattttggcatcgtttttaattaaaaatgcatttttctatttaatttcaatagcttgtttgtatgtgataaaatttttaaatttgttttggaacattatttaaggctaataatacaaattattattatttacattatgaatcactatttttatttatattaaattttgtctctgacaatttttttttaatttctctcaattgtttgcactgtgccaaaattttcattatattttagtaatagtcccacggacgctccccgtgagataactacttattttgcatatttttcctataattgtttgaaatgtttaaagaattaattatttaatttgcttatgttttttgcttttttatataagtttcattaaaatggttacttttaaactttccatattttatatgaacttttgctttgcccagaaaataaaattaattggataacttttttcaataatttattatttattatgtaatcttttaaagtgattaatttgtaattaaaaagaattatttttacaaattttattattttctttgcttatttctggtctattttttgtgtatgaaaaatttaaaatccttcaaatagttaattatggattatgttctgctaaatgttacattatgccttgagttcatggagttgccttttcaataaaaaaatttcagtcccatagaaaaatgtcaagtttctcaaattttgggaaagtttatatgaattttttcaggtttcattcgctttaattgcttaactcaaaaaattacatataattattctaatcgctctgtgtcatttttatcagtgcttaatttttcaattttacggcccaaccaagaccaggaaaccataataaaaacaaaaaattttgaaaaaaattcccatagtttttaattctcaattgctttttatgtatttaaataattcaaattattaattaattgaattgttacttttttattaatttgcatttaaattaacttatatgtcatacatattaaagcattaaaattaatttctttcaattgattataaataattttttcattcctccacctaaaaagtgctaaaaaaaatttatttgtgccaattaacgcttattttgcgatttttttggtttttttaggtgcctatttcgcaatttttgtgcctaaaattcccatccttatatgtaaatgatatttttagtctttgaactaattttaaattatttaaaactatctttatgctgtctgagagttttggaagtttattaaatagaataaatatttacttaatttttgctctttaatttagggttactccccgacccctcgtggggcaaaatgtcgggggccggggacctcggggggcgacatgtcgggggtcggggcggggaggagctcaattgtcggggatcggggaccccgatcgggtagtgatcaacgaaattatttaacaaaaaaaaaacaatttttctttttaatgctcgtanatcttccttttttcactttaataatctgatttcgttagaagctggcctttaaaccagggcttacattgttcttaattataagaatttattttttttgatcttttggtcccaaatgtttgaaaaaatgttgtaaaatgttcatattttgatactaaaaaaatgtgagtaaaaatgcactggtatgaattgagtttttttttggcaaaattaataatttttattcaaaatctgctaaatatatagccaaaatttcaaaaattttcccggcggcgcctatcggcaccgccggacccttaaaatccttaattttcttaaaaaaactggctcaaaaaattgcaaaaattggtcatttttggacaaaatcttacaatgtattgtattcaaatatcaattttttcccggcggtgccctaacagatttatcctaaaaataataatttttgcaattttgggacaattttttgcaaaaaaaaaaaattggagttttggggggccgtggtgccgataggtgccgaccaaaagtttttcggaattattaattaattaatattaagaaaattgttcaaaatttcataaattttcaacctttccccccttcgttgttgaattaactttttaaatttttacaatgctcggagtccccaattccccgaattagtgtcggggagtcggagggcaaaaagtcggggggggccggggacctcggggagcgacatgtcgggggtcggggcggggaataggccaaaaaaatcggggatcggggtcggggaccggggagctcggggacggggagcaaccctagtttgtccaatagaaatttgtaattttgtgtcctgattttctgtaactgaatgcagtaatttttaaaattacaatttttactttttgttcaatataattcaaaagaaattgcaaatttattttactttttatgtaaattacagaaataacaataaattatttcctatacatatttatttatacatttgattaaattacaaacaaaaaaagaaaaaaagagagtccaattttagataataattagttgttcaaaaaaatctaattgatagacattaaataactaattacactattgactgttaattggtttcaattacgcgaaactaaagcaattagagtagaatagaaaaaaacacactacaaaacttaagatgcaaaagatccaaaggaacattacaagcccacgaccaaaattgaaatggatattgcatagaaaaactagaaaaacatgttggaacaaataaaaaccaaatataacggcaaatactcctgtcagggaaccaatcacaatgctaacgacacatttgagaaaattcatggtggaaaatcgccgttttcgtcgtgccatcccatggggcttcttcagcagcgtgatgatggaggcggtgttgcttgtctgcagctgatcagtcaagcaacgatcagaatttcctaaaaaggggcatagttttcttgaaactagggttggttagatgaaaattttccaaagcaactcattaccctactacaaaaaataaataaaaataacggcgctatttattatcaaagttaccccggttttgaattttattaaaaactaaaggtggatccttttagtttaatttaattgaacttattaaaaatgtttgtttcttgaggatttttctgtggtctctgatcacgattctaaaatctattttgatcaatttttaaactcgaacccgaacttgtacaaaagtctaattgaaatttctcgtttttgacataatttttttttttttaaattgggttaggaagtcggaattgttaaaatatatgtcatatccgtggtcagtgaccacaaaaactcccgggaaataattaaatgtgccaaaaacgggagaccaacctgcaacaaatttgcggaagaagttgagcccattagaaaatgtgccaattattttggcaatttcctgtttattcccctcattgaaaagtgcatcgttttccgcaatttttccaaacttttccattaattgaggtggaatattttccaaaatttgcacaaatttttttgccttattcaccaaattattgtgcgctatcagcttaatgcttttgccatctttgaacattgaacaaaaatgttttcggtttttttctgcgcttttcacgacaaaaaataattgttcatttaatttattttcttggattttttcggaaatttcgcccattttttcgttacataaaatcgcaattccatctttttgcatccattcgaatgcagaattattagagcttttatcaaacgtaatttggggcaaattgttcagatgtgatcgtaaagttccgaataaatcttcagctgctggaattagataaaaatattttttaatatattttttagtaatagcgaatgaagctggtgcccacccccttttttaatttttaaagattgttttaaaattgtctaaaaacttggttgcaaggcttttcggagtcgcttttcacgaatatggcgtccacttcgaccaatttcgaatccctgatcgaattcaaacaaaaagtcgaaaaaatttagtcaaaaaaccattggaatatcaaaaatagtcatgtacagatatgaacataaaagcgagtttggaaaattttgagttttcgactttttgttcgaatttgagtgctgggttcgaaattggctgaaatgatgtcatatttgtgatcagcgatcccaaaactctaagaatcatgtttttagagaattttttaaaaatttagaaaaatacaccccctaagaaattgactttttcaaatttaataaatgatccccaaaatagaagactttgaataatttataaaggaagaaacttcaaaaatttctcatactaggcgtatgattgaatccgagctctatttatatttatttgagtatttcaaaatatgtcatanaatttttagttttaaaatcaaatgaattttaggaaat

SEQ ID NO: 6885 - DNA, 737 bp, Heterodera glycines
gggacattcaactaatctaatcaattctgtcttggttttttaatgtgttttctcattataatataatgatgggatcaaagaggggcaagagagtgggatgtttgccccactatttcttcgttcgtctcatttctttgatcctacattatatttgtttgttccatttggtcttctttctcccatggtgacacggcaaaaatttatttgtttaaagtcagacttttttgcgtttattcaaaggatcataatttgaacataattttatcttaatttgtgaaaatttttggaacttatgataaatggatcatccattttttcctttattattttatagaaatttaaaatcgcagttaaagcaccgccaaagagcagtgccgttccaaaaattatgcccacgttaatattttgtttgttgctaatagtgggcgcttctgcattgagcagccatgtgcctcagaacaataatcatgcatgtgcgccgtttttctttttttaaatatcttctctctcgcctttatgatgggattaaagaagggaaagagagtggaatgtttgccgcactatttcttcgttcgtctcatttctttggtcctacattatatttctttgttcaaattggtcttttttctcctaatgataatgatggtgacacaacaaaaaattttttgttttaaagaagatttaccaaaaaatcatagagtaaagaggcgttcaattagttccgtgtattcaaatca

SEQ ID NO: 6886 - DNA, 2577 bp, Heterodera glycines
agagattggttcgaaaacaatggggaaaaccctttgcttcgaaaattttttaattttttttttttgaaaaatcacaaatggcaaaaataaaaaaattcctatcttcaagaacaagattttcgatccctactctaaaaaagttgcatttaccaagtgctagtgacatgagatttttgatgcctgaatgagtaaggaaattgttaaaaaattacattttccgtgccaacaatttttggcaacgaatggcatttgtcaattggctgtggcggcagtcgctgatcataattattgaacatcttcagcgcgttgtcagtttcattcggtgccgttgtttctgtttttgctgaaactggtgttgagccatgggaactttggtgcgaaaaagtgccctcctcggaatgtacactttgttgggaagattcatcaaatcctcctcctcccgtcttcggtgatagaaaatctgtgctgctttcggtggccgacgatgcattgtccaacaagtcaacattcacacccaaaacggcatccgactcattaagcgaactgcgacggctttgttttgtttggaattttcgaagctgaacatgcagaaaaagcaaaaactttcaatgtcccattttaattgtaccaagacacgggcccgtatcattttttcatcttcctcattagcactcattctgtcgacagcaaagtgaaagttctcgagaacacctatctataaaaaacaataaaaggatgtactttaaaacggcattttgcccgtgcccgtggcaatctctatattttttggcattctgtttgttaaattcgctagacttgaaaatacaatgaattataaagctcattgtcgctgatacggtataaaaaggcttttttaaagaaagaaaaaataataaaaggaaaaatgatcgaatgcaagccgagattctcggtcacttactcattaatttgaatgtattaatttgtcaattattgtaagaaaaacgaaacaaagtcgaaacgtgtccacaattgtcttttgaactttgcagaggcctttgattaataattggccattgttttttagtgtccaattttggtttttcataattcaaaatttctacttttgctaatttatttcgtataatttctgttctgtcttcatgagtatgctctcgtgcagctttgtctaaatttagcggcataaagggggaggcgatgaattgtgaacaatggacgggcaagcaaagcaagcggcgatcggtaacgcttcggtaggacggatgggtggtgagaagggatttggccactgatcggatgaacttctcccatttcacaagccaaaaggacaaacgcaaaaaatgaaaagattgggaagatcgaattagtgagcgatttgaacgaagagcgatcagcgagtgggcgcagcgaacagatcacttttcgtcactcattccttcgctaattgttttgttcaaagagtgcataagcactctcttttgtccaacttttaatccgactcgctactgctgctcgagaattcctcgagactctcgcaagagaggaggccggcccaagttttgtgatttggctcaatggcaatcagacttttatcgtgctgaattgcaatgccgagttctcgaccggcattcccatccctagcaaatttcagtgtcttcccggctcccggaaaatgcgtcagtaatacagtatttctaaaataaagtacattagcattaggcattgtattacaaaaagtcaaaatttataaaattcgtctgaatttttacaattaattttttaaggatctttgaaatttatccaaatcccaaaaataaatatactgtaaatggattgttttgtaagcattccactgacccattttccggtcacgtcttccccccctcccttttcctcaccttttgaccattcgtttttttagagttgtccgttcctgatttgtcagccaaaaagtcccggtttttcaatgcgaaaatcccggaccggttttctaaaaattctcggtcccgtacaactctagtttttttctcgcttcattcatttttgcttttactccatgttagcagatgctcgtggttgtgccgcccttcaaatgatggtccctcccgcccatttctttctgtgttggcttttctcggcactctgtccggcattttgtcgcatgtcaaatgcaaaagtcgacctctgcgaatattataggtcattattagcagactaattaagcatttatattgaattattttctgctcctgctgcaaaattaggacgaggatttaaatatttttcgtaaatttcttgggaaattattatatacaataataaaatgctaaatatattcaaaaaaattttgtttttaaatttaatttgaaatcccaattgctcttcactcccatccattcagagccattaacaagctccaagaacatccggaatgtgtcgaagaagaaagtgagaagccataaaccaataataattataatacctaacgacctaatagtcattaaattgaattgttttgataatgttgataaatgctaaagtattaaattttattggcgggaaatcgatcccgcgcct

SEQ ID NO: 6887 - DNA, 1921 bp, Heterodera glycines
cctaattaaacccatttttaattacctaattaggtctgacgagtgcccaagcagtggccaattgtgcacacaatccgatggtctcttgtaattgataaaataaacctaaattatttcttttgcccgtcatttaaggttctcactgctgtcaggatgcgatgcagggttttggattttgaataaatttttgatcaaatttcattcatgttaatccccccacagggatccccgtgagtcacatcaaagcaaagtcgggccattgtcctccgccaattggcatttccacgctgcaggacggaaacgtcggctgttggctggacaccaactgtcccggcattcagaagtgctgtctcgagccgaaccccggctcacacgtggccgcacgccgaatttgccgggacccggaaggcgtcagcagtcagttgagcgcgaggcgaacttgggggttgggggagggctaatccgcatagagataacggacaaacaattagagagagagacgtgagaaaagtagcgagagagagaaaaaggtagagagagagagaaaggtaaagagagagggagagagagagagacccaaatggaaaagataatttagataaattaggacagagaacatatgaacgggattttataattgaagcctgaaatgcccaagcttcgtgacctgtctcggcatgggttgggctctatcccggccgaccacagtgggaatgaaaagttggacggctccattttcagaaggctcttcaaaaattcataaccatggtaccaaaaaagctttctatcctcatttaggtccatacatttttaaaaatttgaaagttaagcataattgtttttctggacaaaattacattcgtaaaacattgcctcaggtgaatcgatttgcacacttccactgggtaattatcgtgagcaattattgtttctatcattagtgctttgtttagtggtcggcacttgtacagctttcgtcactcgctattattttgatgccagctcgggcaaatgcaaaccattccaggtgttttttgatacaaacctgctcgagagtcaaattttcgagaatcgtttaaatattatggagactcgaacagctcaagcgtatccatcaactaccgtatccctgattatccttatcacccattacagtactctggctgtggtggcaatgagaacaatttccaatcaatccaatcgtgccattccacatgtggtcttctgggtaattcctattatttcaatttttgcccctcaatttgtcaccatttttagggataaaagggaccccgtcttgtccgggcgaggccaacgcggaactgaactgtttgttgccgcacgcggacgcatgccacacagactcggtaagctaactaattgcaagttaattagaggcagccgattttgatgccttttgaattctttccatttttcaataactttttactaaaattggttcattagtggaggtgtaagtgtcgtgaatttgtttactgtttgaccggaattgccaatgggcgggagatctgaatagcttaattcttggggtttttttgggtccctgatcttaaaactgacatctattttgaccaatttctaatccctaactcgaacaaaagtcgaaatgcaagtttttcaatttatgaacttttttattcgaattttaggttaggaaatcggaattgtcaaatacataggtttagtatgatcaggcacccaaaaaatgtttcgttatttagctgtgctgtgttaattgaaacaattaaggattgtatgggaagagacggcgggcaacagccggtaagcttaaaaagtcaaattgactgacttttgaaaaatttgaagcaaatggtagtgctgctcgagaccgagaccaaaaaaacgcgaaattgtctcgagtcgagattcgagaccgaga

SEQ ID NO: 6888 - DNA, 1399 bp, Heterodera glycines
atattcttaatcagtgcctaaaattcgcctagaaaaggtgctttcctttatcgggaccatgacatttttatggggggtagcaaaacacggaagtaccgggaattcttgttttagtaggcgaaatgtctgatattaggttaatcgcaaaataggcacaaaaatagaaatttacattaataaatttgcaaccctcaaaattcagaaaatcaacaaaattgggaggaactctgaatttgagtattatatcacgattaaaagggatgacaaaagaaaatttttaaaaaaatcgaattttagtttttaaccaaattttgcctattttcgtctttttatgcttaatgtctaaatgcctattttcgtgtctatttcgccatttttagcgcctttttcaggattttcggaagtgcttaacaaaaatgttgtaaaaatgaaaaatacacccctaagaagcgacccgaaaaaattcaaaaaatatacccttaagaattgaaaaattttttaaaaaaactgatcccaaaaattaattatctttttcttgataaaaaattttggtttaaaaattgtccctattcgaaaaaaactttaaaataggtaagtgaaatataagcaaaattaaatgcttgaattaagtttttatgtgttttgctatctaaaaagcgttaataaaaaaattttttgcactatttttgtgcctatttaatgcctattttgcgatttttttatgcctatttcgcgattttttgtgcctaaaaatcgcagccctacttattataaaatacaaaatttgtgatggaactggatggggggggggagagcgtgggcgccaccgggaaaattttggaaatttgagttcgatgtgttaatcagttcataatgacctgttttttgtgatttcgagcctcttttttcttaaagaaaagttttttgtcagtgtcgacaggaaaaatggaattccgaaaggaattttttgagaacaataatccaagaaacaagaagttttttttacaaattagagtaaacaaacaacaaaacaatcgcttcataaagccgcggatcgcagtcgcggattcaaaatctcgcggttcgcgcatggcggatttaaattgccgtgaatcgcggacttcgctccactcctgttatattcctttcctcccaataaaagttattttattaatttttatgaatatttgcaacaatctaatttatgtcagatgcatatgatttgcgtggtgagtgagtgaggcgatcgatttgctgcactttttttgccaacattttctttttgcataatttttatttaattttttctgtaaataatttattttacattgtcaaaatggcttaatgccaataccagtgtcgcctgttgcaaatgctttttcattctgtgctgtctttt

SEQ ID NO: 6889 - DNA, 1296 bp, Heterodera glycines
aacaaatttagggcaaaaagtacatcagaaaccaggattttcagttatttttggccataagtttgttcaaaattgacgaaaatttttgagattttgcaggcttatagaggacacttagtgatatcgaatgataccaacaacactcgatttggttgacaaacaaagttacagccaaaaacatgctggggcccaaacgtgccgggggcctaactgagcgagtacggataaagcggcactggaactcaccggcacactttttctcccgccctaccggtaccgtaaccccggcacctggcttttaaaagttcctggacgggacctggaattcccgggccggtcccgattccgctctactctatttttaagattaaaaaatattgaatttaaaaaacatattaaaattggggtacgttttggtttcacacaccccaaaattttaaaaatatgtccaaaaaatgcacggagttttttgacagcacaaaagactgggaaaattaagtcacgaaaaatctcaaaaaagtcaactaaaaatgataagaaaattattgacaaaaaagtcataaaaaaacgccaaaaagttacgaaaaatgcaaaaaaaaaatcataaaaaatagccaaaaataaaaaggtcctcaaaaattaggcaaaaatccatcctagaagcttcaaaccaggctaaaaacatgtttttcgtgcgtttcaggccctcaacagtccaggaaaaaaatatggatatccatataattctatgccctactaattagggtcggcccccttttggctgtctcaacagtaaaaaacagatttcttttgtcatttattattttgttgtcaagaggaaaaaattgcaaaaattctttattaattgatctaaacttagttttagtaaccaaatttttgaaatttaaaagcattaataaatactcatataatattaatatattattataaaataaggaaattaagtaatattccctattattataataaattttcaattcgtgacctagctttccaaaaatttcgggaccgggacctggaaagacggggaattcccgggccgctcccggttctgctctactctattttaaggcaaaatttggatttccgaaaagaaaataccgaaaaataaaggttaaaccggtgaaaaagcaattgaaatccggcaaaattttttcgtaattgatgaaaaacaatcgcctagtatgtttcctataggtatattgtttttaaagtatggtcttttttattgtaccggatttttgaagactttttgtattttttgttactttttag

SEQ ID NO: 6890 - DNA, 2400 bp, Heterodera glycines
tgttctgatcagttcgtccagctgtcgatcagacacaaaacaatggtcaataatggcacaaaagtgcgtcaaaaggcgctccaaaactttggtcacttccattcctttggtttgttggcactgtgtcgatgtgccttaattttaaaggtttaaaacgatcattcgcttgtcccttcctcaatgtgccacctttgcctatccgccgcctcctcgacaaatttctgatcagaaagcatcgcgtggagtgaacaatcgttctctcccgatcacttagtatgtgctcctgactaggcatttccatcctcctcctcctcgtccgccttggccttggcgtgcttccgttgtgctgttgctgcccctccctcggtgttgtccctcccccgccccctttggtcgtccgtctccccgtcgttgtcgttgtccatcttcgtccgccaattgtgctttttcttcccccgtcggtggtggaaaatgccgcattcgaatggcaccgttcgcgcagagaattgtcagcagcaagaacagcagccggagatgaaaaagagcaagacggcttaggagaagaagaaggcttccgtcgctttgcgactgtagccgaggcgcaatcaaaagctaaaaagagagagaaagatgaaaggaaaacaaaggagtactgtaggaacaaaaaatacggtagaatggccaatttaaagagggggggggggaagcttacaaaaattagcatacagttgtctcattctcaattgacctgtgtgcacttacttttgcccgttgctgctcttggagcagtcattcgtttgatcgttgttagtgccgttggctttgccgtcggtgggcgaatccgcaaaatgattgggggtgtgttctgcttctcttccctttcgcccgcttcctctcgcttctcattccgctctctgcgttcctcctgaatgtttttctcctgcttctcttcctttttgggctcctctcgtttctcttcctgccctcctctttcgtcatgcattctctttgtctgtttctctgtctctccgtcctcttctcttccccttctcttacgtgtgactctctttttcgtctgatcttcttctccatgtttttcttccgagtttcgtttcttcacttttctctcccttttcgtatctctcacacttctttctccattcactcgctttttctctcccgccctcctccccacactaacttcctcctccttcccctcgtcctcttcccttccactctttcgcttccttcctcttccctttgccattgttggcatcatccattcttctcccctcgcttcggccctccggtgaatttcttcccaattcattttcttccatggccatcccttttggctaaactcggcggtccctccaatgggggaaaggttcaaatggcatttgtccatacgtctgatcactctctccaaaagtgccgtcagcttccggttcagctgctgcctgactcgggatcggtaaatggccaactgctccaagtcgcgcgccttcctctccgcctcgtcgtccccgcctcttccgtcccacgtttttccttccttcccttcccccgcttcttctccttcctccactctcccaacggcttcttccctcctctttgcgccgctgctcacttccgaattggtcttgctcctcgttgtccctctcttcctttcctcccctcccttttcctcttcctccttcttctctctttctctctcttcctccgttatcttccgctgttgatgttgttgttgctcctccttctgctgctctcgttcttcttttctccttttatcctcctccttttctttctcctcatttgtcctcttctcttcccttctttcgttccctccttcttccagactatttttctgctcttccgccttccgttggatcagcgaggtcaattgttttagcttaaataggacaaataagaaaatgcgagggaactctgaactttgtaattaagcgtatgttataggacagcggcgaatgaaccgaaaagtgtcgtccccgccaaagggggagggggggggcgtgaaatgtgccgttcccgcctaaggggggacgccgtccgtccactgcctctatgacgacgcgccgagaaatgaacaaaatgagaaagaagttggatggtggccacgactaaggcaaaactgactgcgtatggcacgtggagacggggggcggggagagaaaaagggaccaaacgcgtgcggaagaatgccgaggggggacgccacgtaaattataataatccactaaaggcaatctgatgttgcccgcaaagaagaaagattaaagtgcgttctcaccccccccccctctctctatcaattctccctctttctctcaattctctcggggacactctcggtcccctctgctctctcgtggactc

SEQ ID NO: 6891 - DNA, 1822 bp, Heterodera glycines
ctgcgtgtctacatagatgtacctgttcccgcgaaatattctaggaaaggcattctgccagctcatgcagactcatcccggggtggaacaacggctgcgccgtccctctttttccgtcgtcttccgccgccggcactgttgctgatgtgccgggtccaaattggtcctgctgctccactacttcctcgtcatgttctgagtgtgtcactggcactaacttgggcatgtccgagaagtcctcctcctccccgtcctccccctgctgttgttgtcccaacatttgacgtcgttggctctgatcattcgccgtttctccgtcgccgttttctccctccgcaaattgctcaatgatcagagaaggtggcacattcagtgaagaagacaaaaataaggacgaagatgaggaagggttaaatgtagtgattgtaagagattcttccgtaagggatgagtaagcggaagtgccataaaaagaaggggctgaggagcacgaagaagggttcggcagaatgccgccgacggtggcacaaattgcggaggacgacgaaggcattccgcagtggataccgttgttcacagattcacaggagcggaccttaaatagcataattgaagcttaaacaactgaattgaaaaagtcagggtctgaaatgtagggaaaaagtcgcttttagggggtccccggcactttttagaaatgcactcttaatatcaaaatgagaacaccaaagctaattacaagcataatgcaaacattcggtattatttaaaaaaccaacctgagaagcatacggagaaaccattggcggagtgtaaacggacggaggcgacccgtcgatggattggatgccactgtccggtgtggacgaaatgtgcgacggaccgccggggtgggcacccatgtacgggtgccaatgggaggggtgcggttgttgttgggacggagggggcggcacagccgcggagccaccggcggaagggacgaaacggacggaggaatgatgcgactggccgaggaggggttgttggtggtgttgttgattgtggatgaaaatggcggatgggcaaagggaaggggcgacaatggcagcgggggacgcggcattctgccaatgggaagggggaataagccttattagcctgaggaagtgatcagatccggcaaaatctgatcaaaattaacttgggtcggccaagtttgatcataaaacgataaacaaagtaaaattgatcagatcggccgacggacatacggccaagtgatcaaaaaagataaataaggctctgatcagactctgccggaatcgtaatgccaaagaatttgtcagaatgccaactttttcggcgtcggctgtttgttgtttttgttggcgctgctcactttttaattgaccattttgttgttggaggtgagcagcatttaaagaggacgcgctgtacatgtccatgttggtgtagatggggtcggattggctacaaaaagaaaattaagttgttttgtgattttttttcattggctataatgcattcattgggaggattttggcggaatgccatcccataaaatgccgtcccacccatgcgccgtttggcaccgcgtccactcatttggcagataatccgttaaaatcccagccggacggaaaggaatgtgcaaataagaagaaatagatgaaaaaaaggaatcaatgtgcaaaattggcacaaaataataattaatgcaaagggggagagaggtgaagccggaataatcgtcaattaattaagacaatgaggcagagagaagaagggtaaataccagcggattaagtgggccaatgat

SEQ ID NO: 6892 - DNA, 931 bp, Heterodera glycines
gaaaggaaaaggcggtaaatggcaaatatttgtggggagtgtttgccttatgccatgcccggagggcacaaaaaagggcaaatttatctccatggacacaccgaagaaaaagtgccaaaaatgaggggaaggagatgaaaatggaacagatatggaacagatttagggggcgtatgagaatatataagttacaaatttgccgggacacattcccacataaagcgaattagcagctacaaatggggggataaaaagggataaattggaaatttactccctccactctcactctctcttcgtctccacacattctctctccctatctctctctctctctctgtgtcactttcccttgcgctatttctcgccacctgctgtgtctgtgctgttgttggcgatggtctgatcagtaggccaaacagctgtgcctcgttgccgtcctcctggcgactcttaaacatgcatggcacagcctcaaaactcatcctggcgatgacgcattgggaggacaattctcgggggtaaattcacacatttaaaaatgaaaaattgactttaaatttctctgtcgttgtctgtcgatattaatttcgttgtttttacttaaatattattaaataaataacaaaaataaataatgagaagtaaataataaatcattaattaaagtgtgcgataataattaaattaattatgtgagaacaataaaattatttaaacgattaggtaattaattaagtaattcgcccaatgaatgaaactaaaattgattttggtttgtggaaaagaatgtgattggattaggctgatgtaattagagagtaagtgatcagttctcggcggacccaccgatcgatcaaaacgattaatgtgaagggagggggggattaacagctgatatgtgataatagccatttaatgttgcttatta

SEQ ID NO: 6893 - DNA, 2589 bp, Heterodera glycines
  unsure (1)..(2589): unsure at all n locations
ccccattcccatatttactcatcacatatatttgtatgtgcgcacattatataatgaggcnnatatcaaatgcagccattggattttggggagagaccgtcccctatttcactcctaagcttcaactgctggaaaatttcaaaaatcaaatcagtaaactagagaccgagatttccaaatctgccggaccggaattgccggatccagaaaaatccggtaccggatccgatccggctcggtctctagtaaaaacccaaaaagaaattatttgaaattcaatattgacagcacatttatgccatatttcatacgatttgtttaaattccataatttggcattttatgcaataaaaatttcatctatagcatatgcaataataaaatagaaaatatatatttcaaataaattaaaaaatagtcaataaatccaatccatgaattcataattcattggctgttgctttctgtttcgctttcatcagattgaccacaatgagtaaagtcagtgacttcgttagttttacgcaattcattgacattggcatgggccaacaattccatcatctgctgaaattaattacatataatatggcatatttgtaaatatattctataaaaatttcgaattaaaaaggaaaaaatatttttgcgctaataaggcagggatttttctatttgtagaaaatgcataaagccttctaatatattcaaaaatatgaaatagaaacgtttattttcaacctgtaaacattaaaagaaaatgttctatttttttcttctatttaattcaataaaaatttcgaattaaaaaggaaaaaattttttgcattaatcaggtaggaatttatatttgtaagaaatccactgttgtagaattttaattataatgactcattagtgttaattaaatttggcataatgtcttttttcgcgtttttctcacttaaaattgtattctttgtttttttccatctttcattccaatttttattatctggtaatttttattgttttgtgccgtccaattcttctgactttaaaattgatatttgtcaaattgtttctcatcggtatttgtcttttggaattaaagtgtttggatttgacagtggcctactctgtgtttggtataattgcgtccctgtcttaagtcagtagcaaaagtacaatttggcgctcccgaggaaacaggtacaaaagcggcgatttttaaagagtttgagggtgagatcgggaataaaaaaatttttcggacgggttttaatttggagtgtattaagtatcagtccggaccggacgatatttaagttgtgaagtggaaattgactattccggatcggaaagttaaaaaaagcgaaaaaaaaactccagcgcaccgaaaaatttattgtttatcataaaatttgagttcgggccgaaccttttttttctgtctacatcgccgtataaactattgacaccgggtcggtgcttagtttttctccgtcttctcgccgaatttttacatttgacttcgctggatggtcatcacacgcagtccgattttgacactggtaactgagcgattgaattctagagattgccgttgacagaaatggacatcagattaatgtcggtggaaatcagcagaactcgctgcaacgccaaaatcacagtgctggagaaagttttccccaaaatcagcaaattgaaaactcgccaatctcacccactgaactcgcgggctttaatggggaaaatggtgatgacagttctcttgttttagaaccaaatatgaccgaagaggaattgcgcagacgcttgttggtggtcagcattgaacgtagccagccgccagccaacggaaatgccggaaatggagaaaacgccgaaggtttgcgaaacgcaatcagggaaaatgatggacgaccgaattttggagtaaatggtcaaacatttgcccaccaaaggaggccgcatgacactttcttatcaaatttgatgaataatggaataggaaactttcctcaaaatttggtccatgtaccgcgtacttcaaccccaactcgaaatgttgaatttgaacagcaaataggaccattcccgtttgttgttgaccgcaacaacagagcaccaaccccacctttaaacatacggcaacaaattttccaccccatcccactgaatacacaccgcattaaccaaatgtcggttaacgcgcaacgcaacattgacgttcagtacgtaccaaataattgcgttaatgccccgccaaacgtacagcgtcattgcgacattcagtacaccgctcctaaccctgtcgccgcgccatcaaacgcgcaacaaattcaagcaggaagtagacttattcaaaacattccaatgcaggctcagctttggcagggccctgatggaaaaatgactttggtttacccccaagaccaacagcaacaagtgctgatcgagcaacctaatttggctcaaatcatcaaaaatcactcgncaggtctttcagattccggaacgaatcagagcctagacattccctacctatcnccanncgaatgtgcgccaagcacctcgaattaacttgatttggaaagaattccg

SEQ ID NO: 6894 - DNA, 3983 bp, Heterodera glycines
  unsure (1)..(3983): unsure at all n locations
atggggaaatgaggacgacaattctctgttttagaccaaantatgaccgaagaggnaatgcgtaggcgctgttggtggtcagcattgaacgtagccagccgccagccaacggaaatgccggaaatggagaaaacgccgaaggtttgcaaaacgcaatcagggaaaatgatgaacgaccgaattttggagtaaatggtcaaacatttgcccaccaaagtaggccgcatgacactttcttatcaaatttgatgaataatggaataggaaattttcctcaaaatttggtccatgtacagcgcacttcaaccccaactcgaaatgttgaatttgaacagcaaataggaccattcccgtttgttgttgaccgcaacaacagagcaccaacccccacctttaaacatacggcaacaaattttccaccccatcccactgaatgcacaccgcattaaccaagtgtcggttaacgcgcaacgcaacattgacgttcagtacgtaccaaataattgcgttaatgccctccaaacgtacagcgtcattgcgacattcagtacaccgctcctaaccctgtcgccgcgccatcaaacgcgcaacaaattcaagcaggaagtagacttattcaaaacattccaatgcaggctcagctttggcagggccctgatggaaaaatgactttggtttacccccaagaccaacagcaacaagtgctgatcgagcaacctaatttggctcaaaatcaacaaaaattcactcgccaggcctttcagattccggaaacgaatcaagagcctagacatttccctacctatccccaaccgaatgttgcgccaagcaacctcgaattcaacttgattttggaaagaattccggatctaaatggaaatgagggtacagattctgtgcgccgctttttcaaaaaatttgatgcatacaccgacggatggccaaacgcgaaacgaatttcggcgttagaaagcaaagtttacaacaaagcagaaagagcttttgaggcagcaaagtcaacgcagccctaccgatacgagcatatccgcaaagatatgattcagcagttggaagaaaccgactcaaagcaactaaatgcttttgatgatcttatgttgggcgttcggagaagacaaaatgagagcattgatgagttggctggaagaatttctcgcctagtaaagagtgcttatccgggtttgaccaacaatttgtgcgacgaatattcgatcaaatttctgatcagatcgatgggaaatcccgatcttgcgttaaatttggaattaatccgcacaccgggaatgactcttgatcattttgtgtcactagcagcaagggctgaatcgacccaacgcgccgcaaaacgattcagtacacacccaaatgatggctttcaacagcgcgagcaacaacccaaatggcgacaaaattttggtggtaactcaagccaaaacatggcgaagggtcaaaattttgctggaaacataaatcagcacccccagcccaaagaagacactagaaatcaatggaaatgttacaattgtgatgaatatggccacctttcacgcaattgttcacgtccaagaacttttatgcaaaatcagccaataaatcagcaaaaaaattttgttgctactggtgcgaaccgaactcaaatccaacccccaaatcagaaccgaaattttcaaacaccaaaaccaaattcagctaatttcctaaagcaaaattgtttggtggtccagcgtgaagaagttttagccgaggcgagggtaaacaaaattgagttggcaccggaagtaagtgaattttatgaaaaattggaacggatcaccgaaagcaaaaatgaaatttttttgccaacaattggaaaggttatgtcgttgaaacttgaagtgtttggcacagaaaccgacgcaatgcttgacggaggcgcacaaatctcattgattagtagtgattttctgcataagttgctgattgagaaagcgattacgctggaaacattggagattttcaaaacgaaaacccaaatttttgacgtaaacggaaaattagtgaaatgtctcggcacgattaaattgcctgtcaatcgtcacggtttttatgaaccggtgaccattcctttgcacatcactaatgccccaattggtttcggtcttttaattggaaccaacgcacttcaggatttgggatttaagttgtatgatgaacgaaataaggcactggttgaattcgaaaaagttgaacctgaaaagaaagattttctgacggtcatttatcggacaataattgaggccggcacagttaagaatttagaattcagcgttaacactgaattcgaaggacaggaaattgtcgttacttcggacgaaacttcagcaattcgtgtagaaccgaccataggaatccccgaaaaaggaaaaattgttgtcccagtgacaaattcatcgtttttgcccattactctgtttgaaaaatcttcgatcggaaaagtcgaacgagtgtactcaatcggtgagactgaaaatttgttaagtagcccaattatctgttccacgaaatatgaacaaaatgctgcccccgaatgttacgagaaattcttcgaaagtttacaagtcagaattggtgaactgaacgaagcgaacgacaaagaagtgcggaaaatgatttgcacttttcctgaaattttcgctttaagcgatgatgacttgaagcagacaaatttagtcgaacaccaaataaataccgcggaaaattcgccagtaaaaatgaaaatgcgcctggtcccatacgcttatcgcgaaaaaatagcagaaatgctccaaaattatttggcaagaggcatcattcgtccgtctatgtctccatgggcaagtcccattgtgattgtcccaaaacgtgatggaacgttacgtttttgtgtggactaccggggcttaaattcgatcacccgaaaagatagtttcccgctcccaaatatcgacaatactcttttaatgcttggaggacgaaaatacttcagcactttagactttatgtccggatattggcagataagaatggatgaaaattccattgaaaaaactgccttttcgactgagtacggtctttacgaatttacagtaatgccatttggtctaaccaatgcagtggcaactttccagcgatttatgtcgcgtctctttgagggaatgattaatggctttctgttcgtttacattgacgatattttaatcgcatctaaatcctttgatgagcatctgaaacaccttgaagcggtcttttctcgagttaaagcagcagaattaaaactaaaatttgaaaagtgtcatttttgcacaaccgaattaccatttttgggccacatcctcacaagggaagggattaaaatggatgcggataagctaaagcctgtgatggatttgcctatgccaacgaccaaaaaacaactccattctttgcttggttttctgacttattatagaaaatttatccattcattcggcacgattgctgctccgcttttcaaattgataagcgaaaaagctgaattcaaaatcggagaacaggaaaaacaagcaatcgaagaattaaagtcaaaaatcattcgagatgttgtgcttcattttccggatttcgatgcagcacagaatgacctaactaggcagtttataatcatgactgatgcgtgtaagaccggcattgcagcaattttatgtcagcctgatccggagaaacagattaggccaatttattttgcctcaagacaatgcaatgtccatgagtcacggctacagtgctaccgaattagaagctttagccgtcagatttggtgtaaaaaagttcgcacaattcatcactatgattccgactcgggtcattacggaccataaagcactaatttggatgttcaggagtaaaaatgagacaggaaattcacgtgttgaccgttggcttcttgagttaaactctcgtttcatcct

SEQ ID NO: 6895 - DNA, 1546 bp, Heterodera glycines
caaagtcgatcgtaagaccccttcactgacccccccccccacccttgttcaggtatgatgggaacgtagttcacccaagcggggattgcgatgttcaacctgtaaattttccgactcgtcctttggcttgtagctttagcgcataacttatcttatatttttcttcaagtccgggattgtcacacaacagcattcttcccaaacggattatggtcagttttacctctctacgcaaggcgaacagtcacaaggcgtcccgtcaactgtcgatgcgtcgcagtcgcaaacagagccggacctgaattttcaagacgaggaggaaccgcttgtggacaatctgccgacacacgcttgcaagtgccgtttaccaggggcagacatcgcatcaacttgttaatttgaggtactgcggaattcacgacccttcgtcggtgggacagtgtactgtttgtggcaaatggttctgtaacggaaaaggcaatacggcaggcagtcatttgatcaatcacttggtacgagcccaacataaggaagtttcactgcacaaggactgtcctcttggagaaacccaattggaatgttaccattgcgggtcgaggtgtgccacgtttattttcaatggcttttttcattttaataaattaaggaacattttcattcttggtttcatcccttcgaaaactgattcggtggttgtcattttatgcagacagccatgcgcaacacaaaactctttgaaaaatgccaattggagtgccgaagattggaagccgctcatccaagagcggcaagttctctcctggctgataaaaattccttcacaacaggagcagttgagggctcgtcaaattacggcatccattatcaatcgtttggaggaactttggaaggtgtcgtgttgttctcttcttcgattaaattatgtttttaggacaatcccgaagcgacaattgaagacttggaatgccccggtaaatacacaacggaccctgaccatgtcttattgcgttacgaagatgcaagcatttacaagtactcttttaaaaaacggttttctctatttggagttttcaggcgaatatttaaccctttaatatctctggaagcggaatatgacaaaaaaatgaaagagtccatcagttgtcctgtcggtcaagttaagtgggacgtaaaatcggccaacaaagtgcatgccactttccaactgccaggatttagagatggaagtaggacactttgctccaacacattttacaccaaattcttcaagatatgaaacttatgatcggcgatgacttgcgtctaaagcactatcagacggtcgatgggtcggaatggagttgcatgggacggctgatcaaaataccggacagtatgtttcggaactcgtcagcctattttccatagaatgtcgttaaacttaagatcacagtgaggacttcaccttggaaatgtttgccagcagcaacaaattgccaacggataaacggaccaatttcatatgtgaaatatgtgtggaatttcacagtttcgacagtttttgaca

SEQ ID NO: 6896 - DNA, 5037 bp, Heterodera glycines
  unsure (1)..(5037): unsure at all n locations
ttgtcttgaaatgtattgaaaaactaaaatttaatttttcctcttctggggacagttctcgtcgcctttctttcactgcatccttccctgaaggcgcttcagtcgggagacctttttaaactgatgaaattaaaggttggaattgcttttaagaaaatcttttgcgttcatttcgcaattttccaacccaaaggaagaaataggcgaactttctcaagccgaccaaaatcgtttcatggcactgagaagacagaaggaacaagagttgctgtccaaggcggatgtgatttgctgcacttgtattacggcggctgatgtccgcttagtcaaaagagaatttcggtgatttattacaaattctgtggtcactaaatttgttgctttcaagagttgttcttattgatgaaagtactcaatctactgaaccggaagttatggtttctgtggttaagggggcgcgtcagctcgtccttgttggcgaccattgtgcgttatttggggagggtgatctgtcccgaaacgattgatttgggggggggggggcggagggatctgtccctgtacgattggtcggactttcaattcccttcatcaggtcaacttgggcctgtaataatgtgcaagaaatccgcaaatgctggtcttggacagtctttgttcgaacgtctcgttttgctcgggaaccgtccccttcggctacaagtccaatatcgcatgcatcccgccctttctgcatttccaagcaatgtgttttacgaggggagtttgcaaaacggagtcaccgaaggtcactttttgaacttctctctgtttttacttgtatcattttaggtgaacgtaaactcgacgaattttcttggcaatttcctgtgccggagaaaccgatgatgttttggaattgcaatggtcaagaagagctcggcgcatcgggcacttcttacctgaacagagcggaagcggtcaatgtggagaagttggtcacgcgctttttacaagccgggtttcgcccggatcaacttggaatcattaccccttacgaaggttgccagtgagtggaacaaattccaattcactgaaattcatgcaggtcaacgggcatatgttgttcagttcatgcagtcccaagggagtcttcacagcaaattgtacttggatattgaggtggagaatgtggacgcttttcaggttggccaattcaccgaaattgcattgaaaaatgtcacattaatttactgcggaataagtaaatttgcttcatatatttcagggtcgagagaaggatataattattgtcacgtgtgtgcgatcgaatgagtccggaggaattggtttcttgaatgacccaagacgtttgaacgtggcactgactcgagctaaatacggtctgatcattgttggaaatgccaaagttttgagtcgtcaggtgagcattttttacgtacatttgcctattctgatgatgggtctttttgtcagttgctctggcatcatttgttggcttatttcaaagacaatgattgcttggtggagggaccgttgaacaatttgaagtcgtctccgatcacttttccaaaaccaaaagccttgagtaatcagcatatgcccgtgagtgtttttgtctgacgatgaactttcttataatggccattatctcataacacaagccaaagttgtaacttaagggtgcccgttatgtgaacagatcgttaggcttcacaatgaaggaattgggcattggcccttacgccggattaaaaccggcaccaatggttcaacaacacccactgcagcaactgcaagacccccaggggatgtttcaccccaattaccctatggggcatcgagcattaaggcaaggattgacatttttaattttcttaaaaaattcgtttattttattaaaacttaagaaattttgaaaacttaattttcaggggaggggcgggggggggcgaaattctacacccatttgagaaacttccaagcgaaacttccattcattcatatgttattctagctcccaacttcctgtccccattcacatgttttcgtcgttcgtacctgctccgccaccaattccgccaatacctccaccacccgtgccgttgaacgccatccaattgtctggagttaatggaatgccaaagaagaaaggccgtcgtccgatcccatctcgctcaaatgccacttatatttcgcaggcgtcccaagacatttaccaatcaaatcttttgagcggaggaggcatcagccaaatatcccaatcaagccaactttctcagccttattttggcgattaaaccaacttccgatggatggaaagagaaaggggtcgacggagcaaatgacggaaatgaaggattgctgttgattaatggaaatcacgcgataaagatttcatcctcattttatatgaattctctgagtcaagttaatttcgataaatccattgcagttttgttgttatgtttttttgcacggatttcttagtaaagccgttcatttcgcttataatttatttatacgtcccctaaattcatttttgatgaagcctaaaatggaagtttccccgaaaagcgattcgaatgcatttgatccgaaacatcggaaaaagacgtgcacaatttcaaaacaaaggtcaatcgttgttaatctctcacaataagtgttaatcttttgccgaaatgtgatgattttagacagcccgaaaaagggattcgccaaaattatgagctgaacaaattcgaacggaggaatgattcgctttttgggttttacaaaaagcaacgcatcgttcccgactcggaatgggaccgtttctgtgagattttggccacggagttgccctcgtcgtttcgcattcaacgaagtcttccggagagggattgccttgccaatttccttgagcaacactttttcaagcaaatcgcttccattgcggcgacttcggagagtgacggcgttggcattcatccgccaaaatctgtcccttttgtgccctatgcctaccagactaaaatgccgcgctcaatgcttagacggcacccaattctaaaggaattccacgagtttttggtcaatgaaactgaattggtgcgtattaatgggcattacaatggtaaaaacgtccaaaaaatttaggggaacatgagcagacaggagacgtgcagcatggtcccaccacttttgttggatgttcagccccaccacaggtgaacaggaaggggcctttgcaattggatgcttgggaaagggcaacggactgattgtgaaggagtcaatggcaagtcgtacaaaagccagtgcattcaatgtccaacacgtacacatcctttaatttatttatttttaattagaaagaaaattcattttgattttttttttgttaaatttctaattgtaagtccccccccccccacccttcccaagtcggtccctctgtttttgtacattttgttcgcctcttcgtttgcttcagagtgctggacgcctgcgctgccccgggcagcaaaaccatgcaaataattgagctgatgcacgagcactgtcccaacccagccagaagggttccctttcccacttaaatttttcgctgtctgttcagaagggtttgtgctggccaatgactccgattacaaacggtgctatttgttggttcggcaaacgttgaagcgaatgccaaccgcaaatgtggcggtggtaagtcacgacgcctcccaactgccggcccttttggacgccaatggccgaccgatgcttttccatcgggttctatgcgatttgatttgcaggtacttcccctgtccacagcagtagcaattggaatttttttaatttagcggtgacggcactctgcgcaaaaaccccgaactttggcggagttgggacccactgaaaagtgaacacccgcaatttacaactgaaacaaagctttaaaaggtgtaaatttgcacaaacttcaattacaaattgcgcggcgttgcttggaactattggccaacgacggtttgatgtaaatttgtgcattttaagtgaataattttgaattttgaactcccttagggtctattcgacttgttcattgaacccggtggaactgaaaagcatggaaaagtaatcaaattaactgcattaagctagaagatgaagctgttattgctcaacttttacgtaaatccaacggaacagtggaattggtggacatttccgaccgattgaaagagttgaaaagaatgccgggcatttccgaatggaaagtcgggatttaagagcatgagtggcatttttcaccgcgttgcctttcaggtgtttgacaaggagatgaacgaagttcgggcagttgacgatgttcgtgcggaatcgaaacgccttttcaaaccgtcgatgtttcccccgactttggaggaagcttcgcaaatgcatttggaacgctgttttcgaattttgccccatttgcacgactcaggaggctttttcgttgctcttttgcgaaaaaagggaccaaaatcggagaatgatttgcaacgacaaatcgaaggaacgaatgctcaaatgaaaagtgggccaccatcatttaggtagttgttgagaatcttcgacagaaattaaagtcattgttcaagaaaatcgactgcaaagcgagcgcgactttcgaataaggaggaccccttcattttcctggaggaaaatggccaacgcgacgatcgcttcgtctccgaattggacacgcactttggcatttcccccagcgaactcccccactccaaccttctcctccgttcccataacaccgaacgaaaaaaggaaatttactttgtgaacgatgccatccgcgactttcttcgctttaatgcgaaacgctttcgaattgtgagttttatttgtttattttggatttcgattcgaatggcttttctcctttttcgcaggtcaatgcgggcgtgggagtgctcaagcgaattgtgtctgacaaagtcgcccaatgtccataccgactgaaacaagacgtaatgggcggngatgggtaattaatgggtg

SEQ ID NO: 6897 - DNA, 1710 bp, Heterodera glycines
  unsure (1)..(1710): unsure at all n locations
ttgatatgaaaagcaaaaaaaaaggtcgtcgctagaggaaattagaggctataatacttagagtttaaaaaagtcccgacaatcctgctggatccgaaaaaaagtctcggtattgatcgggtcccggacggggtcccttcgaccccaattgtccggtctcacccttttacatatgcgcagttttgtgcctcaattgtctgttcggcaccggtactttcgttttcactttgttttttttctgcattacatttttcctttgtgccgtttttcccattggtcgtccctcctattccccgtatctcttctccccccccccctcagcaggtgtttcttctttcgtccagccttggcaacggtcccccccccccccctcccgttgggagtggtagctgttcgatttccatcgaagtacgccgaaaatggattatggtgcagagaaagggaaaatccataaaaatagaaaggctccgctggccgcgtgccccccgcccccgtgccgtgccgttgccacactccccacgcttttttctccccgatgccattttcctttctctctttgcttcattttgccaaatgggtgtggaaagtccaccaaaccgaactgtgggagaagtaagagcagaattggcttctgtcggttcgactcgttgtgcgattgattccccatcccccgccgttttttcgcttttaaatgttaagtgtgttctgctccgtgctttagcaatgaaaccgattggttgtgcttttcctttgtcctcttcctttcatctgtcctcaaatggccgtggtccttcgccttcaaaatgtttcgctgttaaattgccttttttcgccctaatcctttgtcttttgtccgtccctttctgcgatgggctcaaatgttctgattgttcgacaagggattgcatgggttgtgagggcgattactgtttgatggtcagttgggcaaaatcagtgaatggatgccacggattagacattcaaacaacgaagaagtattacaattcagggataatcccaggatttctgcttgggtctctttcagcaacttgatcatatcactccatgatgatctggtcaccccacatggaaaattcgaaaaaattacttctaaattttttagactatacacacaccttagaaaaagcttctaaacagattaagctttggaatgataccaacaattttggatttggttgacaaagaaaaaagttatagccaaaaaccgctggggcccaaacgtgccggggcccaactgagaagaaattgtatttttacagggattatatgtaattataattttaaaacccaaactgttttaccattttaagtctatttggattatctccaataaaatcctattaagctgtttcgaccgtgattatctttctcaaatttttatctcgctcacttcgttccggttaatgaacttacctaatcaatcagttaatcaatttgattaccaaacaagcactttaattactaaagccgggttaattttgaatttccgaatcctgtttgaggattcagtttttaaatttcctcctttttgttgactagtcctgcaaaatcctgaaaatcccaggtttcgaaaaatttacggtattccgggcagggatactgtacaggaaacctgtctttttactgggctctatttattaccatcttcatccctgtccttctgtgctaattgctgngtccaatcatgca

SEQ ID NO: 6898 - DNA, 1924 bp, Heterodera glycines
tagagatcggaacttttgtgtcttcctggattttttcgtctcttcaaatgcgcgtgctctctccgctctctcgtaaggcagagacgcatatagttcactgtcactcactgtccgctgagaccgtaagtcagagatgcatacggtcactcagtggtcactcgctgcgcgctgggatgcgatatcgatctctggtgcaaagagtgaccagtgcgtgaccatatgcgtctctgccctacgagagagcgccttcactgcagcgcctctgaagatacaatacttgtccaggaagacacaaaagttccgatctctattttaaaccattttttaaaactttttttttaaattttcatataaaaataattaaaatcccgatgcatataaaatttgggaagggactgaatgcgggagggggtgagtcagtgttcaaatttgcgaaggagttccagtcatggaaacccttttttttcggcgcgatttttctaaaaaacttttaggaactgatgggaagggggtggatccggcggtgccgataggcgctgtcgggaaagattttgaaaatttgagtgcgatttggttaaagttttgtaaaaaatgacctattttatgatttagagccaatttttttaaaagaaaaattaagggttttgtcagctctgacggggtaaaattggaattttgaaagaatttttgagaaaataatacaagttttcaaaaaaaatttcatttaaattttgaatattcaaaaaagacattgcttcaaaaaattttagaaccaaaaaatgcgcggcaccgcgcaaaaaaaaaaccccgcggccgcgcattcaaattgccgcggccgcggatcgcgcaaaaaaaaaaacgccgcgaatcgtggatcgcacatcgcggcgcggtcccagccctgctacgaatactgatacaaatttgttagtaaattgtttaaaatattgtttagaatttgtcggaaattgctcaagaattcttcaaaattctcttaaaattaaaaaaaaacctttctcccaatattttccgaccttcgccgtcccctcattgtcctctaagtccaccgcctccaactgttgtcccccgtagtgttccatgatttgcgctttgaacgcgtccaacactttgaagccgtctttgatgcacaccttgtttgccagctccaagctgtaattgttattcccattttttaaattcgttttctcttttgtacaaaaaaatcccatccctacaaatcaatagcttatcaagaaaaagcacaccgagccatttcgttaaacatgttctcaccgatcagatcacgggtcttcccatatgtagctttttcacaaatttggtgattttctgaaattatataatggaaaattctgccattgtggtttttttctattttctaaacggtttttacacatttcataaaaaaagtcagctacaaatcaattaagataaaaaaacaggtgctaattaatcaaaataaataacgaaaatttagtgcattctccaaaaatgctaaaaaacaaaaaatcgctcccttatcattttaataggttttcagattgacttcgaagttttttgttaaattatctttatgctttacatttttcatctcttgctttttcacattttgagtaaatcattgacgattgatggtacgagaaatttaaactcttaaaatttaataattttttttaataactttttgttaaactttatgcccttcggaaaactgctgattaattttaagaatttatcggaatttgcataagaattcttaaattctcttagtattaaaaaaacaatttctcccaatatttttcgaccttcgctgtcccctatttgtccccaaagtccaccacctcaaattgtcctccgaacgcttgaaggcgtcctgctggatgtacactttgttcgccggatccaa

SEQ ID NO: 6899 - DNA, 3204 bp, Heterodera glycines
agttcaaaaagtaaatgcatatgtggcgaagtggtttttgtaagatagtaaagggacaaagggtggtggttcgagtccgttgtgcaacatgaatatttttatttatttttaaaaggtttaggggccatacatgaacgattctatttttcgtaaattttcttttgcctaaaaatatcgttttttcaaaattgaaatgccaaaataaaaagaaaattattaaaagaaattttttgtttaaaagttatgggtagggagtccaaaacagtctttacctttcatgttttcaatgtttataaaacggaataaatagataaaccagagcccgaatatacagacttttttcataatgatatgattttttctgtttctcatctatgcttaaattggcatattttgccacataattaaacgtggcatttaatgcgtgcagcatctctctttctctcgctttctctatattcaatgtatttgtgacagtctaattaatatggatttttttgtgtacagaaaatttttttaatatgcttagatgttttcagcttgcccccctccaaccatattacaacgaaagaatgaacggatatgctggggcttacttatacttgacgacattaatgtcgttagaatattatgctaatgaatacttggaaagatgtcggaaatgccaaccaaatacacaattataattatgtttatcacccgtgctgggttgttgcgtaaaactgccaattttacagtttttcgagaaaaactcgtcatatcttttcttaaacacaacccaattaaatagtcttgaaataatccgatagccctttttgatttgctcaattaccacaaaaaatatcatttcattgttttagaaaagttatggcaatttttttaatctgttggtcgcaactttctgaaaattgaagtaaatttttaaattttatgagatttcatgctaataaaactcaatccaagagctatcgtttgatctcaattttatttgatttagttattcttaagaaaattattacgaatttttcttgaaaaatttctaaaattggtatttttacagaaaaattgggcaaaacttgtaaagacgagctcgacaacaattcgccagtgattatggcctaccaagaaattgatattgatatcggaacaaatccgttgaaggtcggccagtttggcatttgtatacttgacgacattaatgtcgttagattattatgcgaatgaatacgtggaaaaatgtcggaaatatgcctatttcacaattaatgctgtttattatacccgtgttgcgtcgttttgtaaaaattgccaattttagttttttcgagaaaaaactcgtcataatttttcttaaacacaaccaaataaaacaatgttgttatcattaagaaccagggctgtcaaaaatatgcacgaaaaatggcctaaatatgcaaataacgtcgtgaaatatgcaccaaatatgcataaaatcgcaaaatatgtcaccaaatatgcacaaaaaacttgaaaattagtggtacaaatcaattaaaaaaatttattcctaagaaattttatcggttgtttttacaattgtaaatcaaaaatttctcaaggttttcggcagtgaaactcactgttgacccactcgcgcatccattgagatttggatttaatttccgacataatcaattttttttcaagagatattcaaatcggaaaatatttgacgaaaaatagcaaaatatgcaaaaaaatctgaaaatatttacaaaaaagtgcaaaatatgcaaaaaaatctgaaaatatttacaaaaaagtgcaaaatatacaaaaaatctgaaaatatttacaaaaaatggcaaaatatgcagaaaaccgcaaaatatgcataaaagcttaaaagtcccgacttttatacgtaaataccaaaaagatgatgtttttcctactaaataggtgattatggtgaagtgatgtactatccatcattggcgaataataggataatgatctttattgcgtaaggacaaagaaatacatcattgtgattccccaactcgtaacgggaaaggggaggttggtcgggatccggatccgacaaaagtggaaaggggagttcaaagggaagagtttatataagcggagtcataaggggcggggagagtacaaagggaccgccccccgtaaagcaaaaatgtagaaaagcaggaggggccaaactaactaaagagtaacaattggtcatcgggggccccaaaaattgaccgtctcggtcaaaacacaaaatcaattaagctaagaaaggagatgatggtttaatattttttgattaataaaattgttttattattattattattattttatttttttttttgtaaatattaaatattaacagggcggccaagtgtgcttatttctaagatttgtgcttattttgaggggtcggatcttagaaagctaaaatgtgcttatttctaagatttgtgcttatttcagcattacgtgcttattttgtgcttatttttgggtttgaaaataaaaagaaaattttgaatgacagttttgacttatagttttttattgaagcgaatacttgaattaattcgatttttgaaaaaaaaattacatttttattttattttttgagtgaaattcacaaaatgccaccaaaacgtaaacatgtctacttggagagctacgaaaaagaattccggcacataaaaaaaagtcgaaaaggcgaagaatttgccctttgtgtcgtctgcaacgatgatattaatctcctttccattgggaaaaccgcaatttctctgcatcaaaaaacgggaaaacatcagaaagcggcaaaagcagcaaaccgatcaattccattgcaggaatttttgccaaatacttcggctccatcaactgaagaccgtaaagttctggctgccgaaggttaacaggcttatttttgatcaaaaattttataattaataggcactatcgcgtatcacactgcacaacattgtcaatcttttcgctcggtggactgtttgtcatctgacggaatgttgcgcacaatttttcctgattcaaccattgcgaaaaaaataagttgcggaaaaacaaaaacggcaaaaattctaactggtatcgcataaatacaaaacttttttcaattattgttaaggcgtgttggctccatattccgtgaaaaaaatcgttgaacgactg

SEQ ID NO: 6900 - DNA, 3945 bp, Heterodera glycines
  unsure (1)..(3945): unsure at all n locations
aaaaaaggcaacggatatttgagattgaagggagagcaatgacatgagggcagtgatttttaaaatgcccggacattttaaaaattcaaccaaacgaatgagggagctgaaaggattttgtgaggaattggaggtgcggaattaagtaatgaaaaattctaagctgttaatttaggttgaatttgaacgcttgaatcgacatgggccgacaagatggacatcaatgaacagcgtcttgggcaaaattattcggatggaatctgtcttaatcgcctacttttcaaaacctgacaaatgtccggcacttctttacgcttttttttcgtttttttctgaacaatcatttgcgatcattcattttttacaccacgtgctaggcctatttaacaagacaattgacttttttcaggttgttttactaattttaaatgaaaattctgttcataaatttagaaagaaaaagccattttgcccgaacttttgctggaaatggacaaatttagagcgaaaattgagcgacgaaaacaagaacggttttatggtgccgatttggcaatggaaaaagtcgggaagtgcacacgcgaagcgttggaggaacaatttcaagtaaaaattaatcggttttttattaaatttccaatttttccagtctttttacacctcggttttggcatatttgaacaaatggcatcgcattgaccgatttccggaaaagttgcaatgggttgcgctggcatcccgcaaaattccccacgacgatgcattggctctggctcgacaaattgcgcccgagttaacaaatgacttgtttgacgatgttagcgaagcaaaccaaatactgaattcttttccaaatgatgaatttcaaaaattaacccccgaacagaagtggaagaagctatttgaagcaaatttgccgcatctgctcaagctggtcagcattgttctttccattccggtctcgaatgcatttgtcgagagagtgttttctctttgcggctcacaatggactgacacgcggaatttgttgcaagtcgaaacagtcaaggcgttggtccaaacgaaagccaattttgatctttcttgcccacaaatgtaccaaatgctaatttccaatcacaaattgttggagaaaatcggcggatgggaaaaatacttttgataatcactttcaattgtttttgagctaataaaatgttgttttaagtcgttttttcatgctttttattgcgtttccttcgcgctactatcagttttagaaaaaatcttatttttggggtccgaatcttagttttagcctcatctgtccttattttgaaaaaaaaaacttggccaccctgttctaaccccaggtttccaaataggggattttcggtggtcgctgatcacggatttgacacattcatttgatcactttcaaatcctgaacccgaattcgaacaaagtcaacatttaaaaattcacatttatgtatgtgaattgtctatttttgatttgaatttgtggcatttacttaatctagaagggcctggaataagtgccgaatttggtacttaggtatgtcgtttacagcccataaaaataataatttttaaatcaatttataaacatttccgctgatcacgaatctgacatccatttcgaccaattttgaatcccggacccgaattcgaacaaaaagtcgaaaattcaaatttttcaaaaaatcattttacggtgcgaaaattacaaaagttcaacaaaatgccatgaccaaccacagacaaaatcaacgctcgcatcgatacaattcatgggtctgtatcgttttggcgccgccgttttggcgccagcccaagttttcggactataacttttttaattgttaaccaaatccaataatcttggtatcattcgaaagcttaacatgtttagaagatatttctaaggtattgcttcgcgattagacaattaccaaaaaagttataacatgaaaattgtgaaaagtcgaaatttttgaagtttttttttcataacttttttccaagcttgaaaatcttttcgctttttgtaaggctaatagagcatgtgaagagctttggatgtcagattcgtgatcagcgaccccgaaaaacccctagaatgaatcaatgaaacaacagaatatatgttattagtacattcacaatacacagatggcacatatttaggcattggtaacacatcatgatgatggcattttgngtgaaatatatacatacaaatcggatggattttgacggggatcaatttcattatacaacacataaaggggagccacactctctatgatgggcacaattatccatgctttttaattagtatcctctgcaaaaattctcatccattccgatcgcctcttttctccatgccgttgttattgttgttgtaccacgcgtcacgtcattcattcactgtcgtcacgtcgttcagtcactgtcgctgattgatgaggagctgctgctggtcgcattcccaccggtcgttctgttgttggcattcgtcgtcgtcgtcaccgcgccgcccaacggtctgttcgtcgctgaaaaacgtgacaattaattatctatgttgctacaacaaaaatgccaaaaaaaaactgttacgttcattcgccgtcgtgcccgccatgaagatttctctcagctcggcttccgtcatttggccatgaccgggcacatccaacactccttgcgtgatggtaattctccgctgcgcacgcgcactccgtccacgctgcggctttctcggacgtccacgcccacgcttcttggccgacttggaccgcttctttggcgttgctctgcgcgccacaatccggcgacgtcggcgagatgatttcctggcggacgacacacggcgcgacactcggcgagacgcgttcctgacggacggtgaacgacccgttgccctgttgccggttgctcttctgctcgcggaacgacgacccgtatgtgttgaacggctccgactacggccagcagcagcggttgaagcagcattggtggtcgtacgacgagttcgctgaacagggggaggtgggggataaatgaatggtggcagaaaaagcgcatgaaaaatgaatgaaaatggaggggaaagggatcaccgatcttgaagaagtcatctcgtcgatgagggaaaaggagctgttaacgaattggaattgtgttgtgatagcgcaacagagagagagggcaaaaaatgtgtaagcgctgaaattaattgcaaaaaattcaattaggagggataaagccgactttaaaagagagtgaaagcggtaaatgccattttctgtgaatttgaatgaattcgaaccaaaaaaggaagagtcgaaatcagagctgcgatagatttacatttcaaaaacctaatatacaaaataaaatctcggaattttatgcaataattcacctaatacctactttggtgtaggctttcgaaattttttgaaaacactaagtaagggtctctttaattttctattaaaagctcgaaaataaatttccaaaaaaatggtaggacaattaaaaaaaaggaagaatggtcgaaaattgacagagcggaagagtgaatttgatgaattcaaacaaaaaaatgagcaaaaaacttaaatttgtcctatttatacttttttgaaaaaggactgacaaatttatgaaattttctgcgtatttaagcgatgaattccccaccaaatgcattcattcattcaattgcattcacccattgtttctttccatcggtcgaatcgtcttcctatacaataaataattcccgtcagttttttttttcatttttcaaaatgaactgaattttgtgcccttttttcaggatggtcagagcaacaacggccnagacaagggcatcagcagcgcgagcacggagcatcaaaatcaatcgtcgaaatgccaagaaggcgcgtgc

SEQ ID NO: 6901 - DNA, 3663 bp, Heterodera glycines
  unsure (1)..(3663): unsure at all n locations
ataaataaaattataaatcaaaaattttggtcaagacaaaaataaattgtggaaatttttgaaactttggacaaatagccaaaaaatgtatccgggtcaaaaaaatctttcttgtatttttgttaaagaattactgaattttatatgaagaattcgaaatatattttaaaattaaaatattgaaaatccttttttatcaaaaatctcaaaaattttttattgaagaatttttttacaggcagcatttagtttatttaggctggttttttcttttcattttagtcatttcttcgaattcattattaatttttcaattttaagatttttaatataattttttctaaaaaatttttcaaaattaatatatagacaaaaataatgtgaataaataatatgacaaaaaaaaaaaatttttttttatctgttcacacacaattgcttcttttcaaagatcattaatttaataagaaaatgcatgaaatcttattttgaaattatttaattgtaacatataagtgtatacaataaataattttgaaatatataaatacgatattgacagggatgcgatcgccaaaacccaaaaaccgggcgcgcgagttgaaaaacccggcaaaaacccggcaaaaattttcaaaaacccggcaaaaaacccggcaattttttaagccaattattctctgtaaaaaaggtcaataacatttaaacaatatatttatcaccgcttttcacctgtttgagcaaatttggcattgaaagaaaataattgtgaacagtgacgagcgcaatggtaggccagtgttaattctgctgcgagacaccgtttttcttcagaagccttaatcaattgaattagattatttaatgagtccaaaatgaattaccgatttttgtttaacaaaatcggtcaaaggcacgtttctgttaaattctgccaaattttttttgtgcttggtggttctgatgtggtccgtgactgctttttcaccctttttttgatagtcctccgccaggctttttgtgagaatatttcttcctttttggagatgtgacctaaaatttaataattacaaaagtacatttgctaaaattcaccccaaactcatcactcgaaattgaaacggctaaatctgaaattgcttcctcagcgcttgaaatttgagttgaaggtgattgttgaaatgtaacattggaaatgaaatcagaaatagatttttgggacattctgcagactagaaaatgaggatcaaaaattaataaaataaaccggaacaattaacgaaaactatatttggatctcaattttggcaaaatgtttaataaaattcaaataaatgaattgaaataggaaacccggaaaaaacacaaaaacccggcaaaaacccggcaacttcaaaaacccggcaaaaaccaggcacggaccccaaaaacccggcaaatgccgggtttaccaggtaaaatcgcacccctggatattgaataatttaatattgtattacaataatttaataaataaatgtaatatcatttgatatttccaggatggataaaaaattgttttttgtataattttttttactgagtgtttttgtataaaaatgattgcttctaaatttgttatattttgtcttgaatttaattagttgttcttggtttttactattttttacttcctttccttaattttatattttttcaagttgccgccgaagaattctcatttcaattctattatagtttaaaattgttttctaaaatattgttaaaattttttcacttatatagaagaaatcacaatgaaagtttttagtgtattaaatatttttgattttaaactgaaaaaactattatagagataataattcatttttttagcgaaaaaggttatttttataatcacatttttttagtaaaaagctgccttagtttattttattaggtaatttatgttttattcttgtgcggacgtcggattataatttattgtttgtatgtacttagtaattaataaatgaatattttttgttgaattgaccataaatattcttttagaaattgtaaacaatttttcaaatttatcttctaaaatttttcaaatgttcaaatttttattatccgattgggtttttattttaattttttataaagaataattatatgtatatttacttatgtagaaattttaatagtaatttgttaaaattgctgaaacagaattgaaatttttgttcctttttttatatttttatcaaaaatattttgttaagccaatttatgttctatttttgaatgattcattctaaaaatttaaatagttcaattttaatcgaaattgaggcaatctttattcatttataattatttatatatatccgtttaaaaattttttattcattattatttttattttaatagctaaataactgacattaaagtaaatttcatttaaaatattttttaaatcaaataatttaatatttaaaataagttttttaaataatatataagtaagtttataaaaataatttaaatgtatccagtaaaatttgtccactattttggtttcatgaactaaaatgtaacatttggtattctgcggaagttgacgaaccattgcttatgtaaaaattatatttcctatatgcatggactgagaaaaaaaaaatgggctatccttaaataaacttaatttatgttaactttattaaatatgtttttattttattttctatcgaaaattttcttgattgttaaataataaaataaattctatttatttctctaaatttttagttttttcctcatcatcctccctatggtttttcctaatttttaaaagtgaatttttgagaaaatccaccaacacagttttccaaaaattttgcacaaaaatcccatattttcacggacccccccccccatccgcccgctctctcccattttctcaaaaaaaaaatttcggaaaaagtggtgtaaaaaaggaaaaaatgatcttctgtctctaaaccgcaaaaatcttatataataacatttttaaatgtacttgaagttaatggaatttttgtcttcatttccggtattttcttcttttatattcattaaaattcgaaaaattttaaaattttatcaatcaattatttactcaaatactttgttattacttttcatcatgggtaattaataattgtatttgacagtttaaattagactaaaaaaccacctttgtgttttaatgtcatttattgtttctgtataaatttgttgttgcaattttttacttggaattcgtcaattaaattgctttttctaattttgatgagaaatattttaacatcctatctttgcttaatgaattaatttaaaatttcatacaattcttgttcacggcatcctgactcaaatcttgattaattagaggttcaaatttattaatttacaaaaaaagaagtaaatgtaattttggagtaattttatttgtttgtttttttaaattctttatttgcaacataacatttaagtgtatataataaatatttttataaatagatcaaaaagaataaattatttatatttatttatcatttatatttcataaatanatcatttattattgtattatccatgaattattattttaacatttaaataactatttcatgctga

SEQ ID NO: 6902 - DNA, 2172 bp, Heterodera glycines
ttattaataaatattattattatttagggtttttaaacttttatcaaaaaattatttttggtataattcttttgatgtttgttttattttatgtcggtaatttttagtcaaatcattgtgttttcttatttcatagatttttatttagtttaaaatcttgtttttgaaaaaacttaattttttatatatttttcaaaaaaaaaataaaataaaattctttaacagttttaaaaatataatttactgtttatatttaaaaatatttaggaaggtattttaaagtgattattttttctgctaagagcctgttttgtttaatatattttaaaaattagaaaattttaagggaattttcgttttttgtttgttttatagtatatatttaattttttatttatttttatgcttactttttgtgtctttaaatgaatatataaatttttcaattttatacaataaattttctttgattaatcgattttttgtttcacttataaacgaaatttcgttggaaaataaagaaattttgtttaatgacatttgtcataaattgaatgaaatttcattctccaaatcaatgaaagttttgcttaaaaaaatcacaaaatgataaacatttaataaaattatttttaaaaaaattttattcctaaattccttatttcaggaagtaaatttttgaaaagtgggtgactacgaattttatttttgaaaattataattttgcaggttaattgcttcgtaaaaataaaattttgtacatatcaaataaatattgttgaatggaaaaaaaagaatacgagattaaccaaaaaatacgagacttaattctattcttactaaaagaacattttatgaaatataattcaaaaatggttcaactgcatcaaatgcataaaaaatggaaattaaaataaagctaaaaatatcttttttaacttcaattcttttaaagttgtacaattacattttttgtggagcttaatttcttttaacaaataattaaaaataatcatttaaaatatagcaaatattttatttatttgggtcttaaaatttttatttatttgggtcttaattatgtttttttgctattcaagtcaattaaatttattattttttgtttttgtgatgtactaaaatacaattcttcatatatttttgttgcgagtgatcattgtatttgtttatttatatttattttgttacaattctattaagatatataattttttaattagtaattaataattactctatctttttacgacatcggatgtttgtctccgatcatcattttgatgcgctttttttatttaaatttatgcatcatatttcttttattactatttttaatttatttttaaatccgagacctttaatttggaatatttagcttaaataacaaatcaatataagggaaaagtctttttattatattaactcgtccacagatgcatgaagcggaaaaataaattttttcaaaaatataatttttaataatatttatcttcacagttttatttgatctaatttattttcatttgatatttaatgtattcataatattttttgtaatgtgctgcttacatcaggctttataaataaattaattaatttataacgattaatttctatgaaaattaaatcaagcaaaaaaaattataatgtttggttatttgcatttcttatttgatgaaccaatgccgcttttattcaaagaaatatttacaaatttgtagtaaattttttaaatcgaaatatcaaaattaatatttattttcatatttttgtatttttttatattaaaaaaataagtatttcaaacattattaaatttttaaaaaataattatattactgttaaaatggttaataaattttttatcaaattaatttaatttcaaaattaattttgtatttttgagctcttatattatgatttcattgtttacttaatatgattttttaatatataaattttaattttatagggaaaatagtaaatgctatgtgtattttcaaggaatgctaatagtcatttttattaatatgcatgtatttttatcaaaataaattgtgttattttcttaacgttaaatttttattacaataaaaaaaaaaatattagtagaaaaaaaattccaaaatacggtagggtaatttttattta

SEQ ID NO: 6903 - DNA, 3051 bp, Heterodera glycines
accagcagccaccgttttttaaccattaattaagttcttttgctatacaaccaactttctaccatgaactcattaaaatttgcattatattattttaaataataaccataaaaataagacactattaattcctaaaatgtgtaaaattccaaaagaaccctaattattagctaatgattattaattcagatttgaagtaaaattgcataatttttgatagcattgccagtcacaaaaaaagtctcacatttttatgaacaaaaatactattttagaaagagcaatcagtagaaaagcatttatttatatttaataaagaatttataattatatatttgttatatcaattcatatttttaatttttaaattatatttaaaagaatatttaaaaatattttattttattcactattttttaaagtaatttattttaaaacttaattgcttttgttaataaaaatcgtcagaattggatagttcaaaatttttcttattttcttaatctgttattttcccggcaggtgaccccctcagtctcgggtaaatttcggtatcgaacatcacaacaaaaccattttatcaaagtttaaaaagaaaaacaaccaaaaagaaatatcaaacaaagtgcacaacttcctttcaataaaattcaaagaataagatgacaggattcatttaaaaaaagaataacaagaatcacagaatatagaaatagaattataattgcatctgctcatggggttataaaacaaaaattacccaaaatgtcttggcaaattatggaaccattcatacacacgcttggcgaagttttctttctcgtttttgtcctttccttcttgtttatttttcgtttgtttggacttcttatttttatgatgagaagggcgccgtttgccaaatttattttcttcactttcgcaagatgaactactgctacttctaggtttttgttgtgaaggcggtcgtaaaatagttgtcgttgttgaggactttgaggaaattgaagaagttatcaatgaagaagaagaggatgttactgtatcagcgtatgctgacgactcttcagtggttgatgctgggtcatcggatattgacacttcttcgttagccgatgctgacgactcttcagtggttgatgctgggtcatcggatattgacacttcttcgttagccgatgctgacgactcttcagtggttgatgctgggtcatcggatattgacacttcttcgttagccgatgctgacgactcttcagtggttgatgctgggtcatcggatattgacacttcttcattagccgatgctgacgactcttcagtggttgatgctgggtcatcggatattgacacttcttcattagccgatgctgacgactcttcagtggttgatgctgggtcatcggatattgacacttcttcgttagccgatgctgacgactcttcagtggttgatgctgggtcatcggatattgacacttcttcattagccgaagcagacaatacttcagtggttgatgctgggtcatctgatgttgatgcttcttcattagccgatgctgacgactcttcagtggttgatgctgggtcatcggatgttgacacttcttcattagccgaagcagacgactcttcagtggttgatgcttgatcgtcggatgataaattgtcagtaccttgattgtttaaatatttttatttgctttatttttttgctatttttacctgttaaaactgtcggattttgtcccgtaattctcaatacaatcgttccgtccgacaatgtttcctctgtaacagtcacactttgtcccgttattgtgagggttattgattttccatcgtttaaaagcgttatagcctgtcttttctttcggatttgcacttcttgttcttttatgttgtcaaaaattgtaacagtatcgccgctatcatttttcgatgggaataatgatgacaaaatcttgaaaaattgtatatattttcaattttagctaattgataaaattaccgggaatgatttgacttcgcaaatgtgtagaatgattaaaattgacaaaatattttggagccgcattttgctaattattcttttattaaaaaatttaattgataaattgcatgcatttttcgctttttatacgcactttcttttactttaaattttaatacgctttattctttgtttaaacagacaatagaaccttcattaaattacataaatttatttattcatctgctctttagtgacgatcgcctccgctttggttacgttgcatccgttaatgaaagctacgcaaataaaaaaaatgatttcaattttattttacttggaacccacttttttattcacgtgaatttaatttgaaaaaattcatcatttttagaactttaaattcagtcttaaaaatgacaaactgagtattaaaaattggaccaattcccggcatcataatttaattaaattcattttttagaacagtggataaaaacaaaatgccgaaaatcaactaattaagcataaatagatttttatcttattttaaaattgatttttgatttgcatttttgaaaaaagatttttatgacaaaatttcaaataaaattacaataaaatgttaataattaatatatacaaaatctcaaaataatttatattattaatttatgaccacccaaaaaagggtgtggcacactaaggcaatgttgctctgagtccaaaattacatagttggggaaattaatgatcgatgtcgttggaagcccaaaaaagtgctataaaaaatgccaaaaaataattttaaaacctttcattgaaaacttttatcaaagcaaataccaattggaagcaccttttcataaaaacatttgaccatctctgtatttttattagagttgagcgggaccgggacctgaacacgtacaactgagtacaactgagtaccgaagtcccggttttgaccgggaccaggacttgttccggtttttcccggttttcccagccaaaaattcccggtttttcaacccgaaaaggtcccggtcccgggtttg

SEQ ID NO: 6904 - DNA, 1100 bp, Heterodera glycines
ctacctttagctgttgttttaactctttgagccttcttgtgagcagttgttttcactctctattaataaagaattattagtttaattgaaaaaatttgctttcaatatccaatttcaaaattgttatggttaaattaccataactatgatggttaccctataattgagttaacagtatttgaccatcgtgcatgtttgctaaccctgccccgacccacttttaaaattctgaaaaatcagcgaaacaagataaaaagctctaaaaaattttagaaaataaagaagagcatccattatcgctcgctttttataaagattttcaattaagaaatgtctcaaaaataaagttcgcataatctttatatgtattttgtttgaattgtcatcatttttggctttttttaatcaatgctttggttttgctaacttttcttttttttaatgagaattttttataaattttgggaaatttggagatattttttagcttccgaaatgcccaaagcttcaaatcacattcattcgaccttaatttgctaatgaattttctaaaattgtgttttttgagtaatgttcatttttatagtcttttaacgtcaaagcacacgttttgtcctatttcggtattcgctttctcacctttcgtcccgttatttccacttccgcatcaacttcatagttcggcacaggatttgcatttgttttgctccgtttgttcaatgtaaaaattcgtcttggtgtcttagaaaataaaatttctattttttaattatttttatttgttttatacctttaaaactttcgtttctatttcctcctcttctgcgctatagtcattttttatttttaatgatccatcttgataagattttatacatttagattcaataaaattaatcatttaccgtgctgagaaaaaggcttattttgcatgttataactatgaagcaaaggttgaatcttaaattagtttatttattttttatttattgtacttctatgtggccttagattccgtgtctgcttcataattgggaaataaattattcgtgtgctttgtgtccatgaagtgtcaacgtgacgcggcgtgttaatcaaga

SEQ ID NO: 6905 - DNA, 2334 bp, Heterodera glycines
  unsure (1)..(2334): unsure at all n locations
ctaaaaattaaaacgcttattcaaatatccaccactgtaagcatatttgaaagcattntaaaaaatttgttctaaaaatntaaataaataaagcttcgaatttctcactatttcggatcgctgaattggtgctcttgttctgctgatcaattaatgattcaaagttttgcagttgacgaactttcatagaaatgttacggtccaaattgtacagttcgcgctcttttactgtcaacttcgagtcgatagttttggcccgattaccttcgcctaaagataaatgttctcatatttataaatggtttcgagttccaaaactttggaacggaaatgagaaaatattccagacacaaaatcatataaaaaaatattatttttaatctgttaaaaatgatgcaatttttggatttaaacaggctcgataccggtttaaccttttgccgcgcaattttttgattacttagtcatttttaacacataaaaacttacaaagtttgttttgtgattttgagtctagaagctaggaccaatatattcccgaaagagtttttgaagctttataaattcctattttctaattttcttaagcctctgatttcaatctatttacgattacgaatttttttagtccctgaattccgattttgagattttttaggcattggaattgcttgtttattacctctgtcattcgttttgttttctcctcctcctcctcttcgcacttcctttttcagttttgcaatttctttttctttcttttccaattcctttttcaactgttccatttgtttttcctttttctccaattccttttccaaatgttcactttttacaatgtgtcgcacttcgtttcttttcaactcataaatttctgtttctctctggcctaactctttttccaacttttgactcttttctttaaaaatctttacactttctttgttgtccaactccttttgcatattctttttaatttcgtcaatttgtttttcctttttggccaattccttttccaattgttcacttttaatcttataatgcacttcgtttcttttcaaattcgaaatttcaacgtctctttcccgcaattctttttccaatcgctgactcttttctttgtaatttttggcattttgcttctttttcaaatatttttgctcaatttttgactgtccattggcagcattagcagttatttttctggatgtccataaaacattattgttttccagctcattttcatgaattttgtaactgttattttccttgaaaatgccaaaagttttcaatcgttttggcgtgcttgataatttgttgtccttgaccaaattttgtagccgtattttttgaatcactttctgatcagtgattcgtaaattgtctctttctctttggctcatctcttttaaaataggcgaaatacgcaacacttctttaatgtcacctaaattttttttccataaatcgaaatttcaagtcgttcatcgtaaataatttcaatcaaataaaaatgaaattaaaaaatttaatgctgctatattaagagttttgtcagttttataaagcacttaatattgatattattattgtccatgaaaaacgtctaaggtaagtagggcgcccaactgaatttggcgattttgagccagtttaaaaaaagtttgggggtctggcggtgccgaaaggcgccgccgggggaaaattagaatttttgtccatcacaaatagttttcatggaaaattggggtgggggtcggtttagtctgagccaattttaaagcatttttctctgctggtcacatttcataaatttgacatcattagaaagccttcgcttctaattttttttttacaaatcgccgagcaaaagtttgccaaaactacaaaatgtcttttttggtgcaaaatgtcgctccaatttgaaaaactgtcgatgaaattctatttctatgcttctcatatgcatgcaattaaaagcaaataaaattgggtctttattaatcatccttgtccacctttgtcttcaagcagtccagcacgcttaatttcctcataaagtcgggttcgcaatgcaactccatcgctttccagctgcttaaacacggcatccagcgaatcggcatccaaataatattttgtggcactttgctctataaatgcggtgttcgcaaaatttggctcgtttaaaagcttttccgaaataatatttgccaattcgctcagctccgttcggctccaactcaccagacgctcatctataaacaatttttaacaaaatattgctcaaaatgcaacaaaagaggcgataatcgaaagacgaatttgaggagt

SEQ ID NO: 6906 - DNA, 4414 bp, Heterodera glycines
ttgattgattaattatttaatttgcaaatgctttttaaaggtggccgaagtgtttgaaaagaacggcacaagcgatgaatatttgacggagattcggatgccgttgaaccagggcattgttggccatgtggcaaccacaggacagatgatgaatgtgcgcgatgtgtacaggtaattaatgtattattagggaaattagtggaggaccaccagataattaattgggttgatcgaaacagttgtttccaggcatttataatcagacttcatttgaaattgatcaatgatcagtgtaggtatttctgatcactgatcaaaccatacacaagtgaattgagcattgattgacaacatccccgagattgattacatatttatgtatctctttggattccttatcatttagccatcccaatttctacccaaaagtggacgaacggaccggcttcatcactcgcaacattttgtgcttcccaattaaggactcctcaggtactgaattagccttctttttcacggcgaaaatattattaaaaaatcatacagtatcatcaaatctcacctatttactgttgcagctacagtagtttaacatcgtagtcccgtccctcattgtcaggcactttggtcggtgttgcggaactttgcaacaaaattgggcgtgacgcttttacgcggcacgacgaacaaattgcggcgacggtaggttgtaattacagtatttaaaaggctccttcgggcaaatgaaaaattagagtaaccgattaaacttttttacagtttgccgtctattgtgccatcagcatttctcacgtatgttgtcctttttgtgtcattgttctcctcatccaattaccgtttcctcccccttttacagtgccttctctaccgtaagctccaagaggcccaccgtcgttcgcacataacggccgaattgctggtccaaagttccaccctttcggtgagttttgcaatggcacaatcaatgccctgagaataaaattcaaatttggacaaacttacaagccaaggacgggttctatttcttgaattttcaaaatacgttttaaatccgcgatcttttccagcccccgagggcattcttctaattcccgattttaatttgtgatcagatccttttgtgatgattatcccatttcttttggccattaactctgtttattttttcctctccacagattgctcctgaggacattcttcggctgaccgtccgcgacattccttcgcccgattcgttccactccgagtcaaccaattccattttgtgccccgttccatcggaggtgccgacatttacgtggaggcatccttgtccatgttcaaaagcctgggcttcattgaccgatatcggatcagaagacggacattggcgcgctttttgttgatggtgcaaaagggttacagaggtgaggaaggggggggaagcaaaagtgtgggaatatttggatcaaaaatcgaaataatcttgttgaaagaattatatctttgttcgcctaattacggttttacctttccttccatcccacaagttcaatcagtactttccccctttcccaatctgttcagatgttccctaccacaattggagccatgcctttgccgttgctcatttttgctttttgttgctccgaatgccttcggtgaagtcatctttgcaggagttggagcggttcgccctgctggtcgcctgtctttgccatgacattggtgggaatatgggcatgtaattttcggctgattctagtctgatcaaaaggggcaaatcatttacttgtttcatatttgacacttttttagaccaccgtggcaccaccaatgcctttcagctccaatcggttaattgttttgatcaaactgatcattaactaattgattccactgtcccttcgttcagaaaactccgcttgcccaactatacagctctgaagggtccgtgctggaaaggcatcactttgcgcaggtgcgttgattaggcgtcgcttagccgatcaaagctaaacaaaccatcaacaaattatttattgtgccatgtttagacagtgagcattctcggcatggacgagtgcaatatttttgaccagttgaatcagaaacagtaccagcaggtacatacagtaccgctgtattttgattattgagactgatttccatcctctgtgctttgcattgaactttcgggtgatctgtccaatttccaaccatactctgatcagttcccacctggctaaagatgtggattactcaacttcagatcatggactgcattagggaagtgattctggccacagacattgcggcccatctgcgcaaagtggaacgaatcgctgaaatggctaaaggtgtttttttaaacagctgatcacttttcttactctcatcaatcaaatcccttccactaatcaagggtttgatcagtcctttccttgctttgcatccgctgatcacttcttctcacaattctctcggatcagtgatctttatcatgatcactctcatccaaattgttcatcaatcacttaatttatctgatcagtctattctctcctcgactgatcaccttaccccgttgcttctgatcaccattttcccctgtccttttgcagttggcttcgactcgcgatcagacgagcatcggtacctgttcacctgtctgctgatgactgcctctgatctgagtgatcagagcaaagatttccggcactcaaaagccatagcggagaacatttacaaggagttcttctcacaaggcgacctggagaaggaaatgggcaatcggccaattgagatgatggaccgggaaagggtgagttgatcgatcggagagaaagtgccaaaaaacgacacaatgccaatcccaccattttcccgttttaggcatgtgtgccgaaaattcaaatcgaattcatggacaccgttgcgctgccagtgtttaggtattatgacttggtcttgtcgactttctcgtatgttgtgacaaccgatcgcttcccagagagagagaaaagagagagagagaaagagagaaaaaaagaaagaaaagagagagagagagagagagaagcgatgtggagagacctaaatagatcacttcattttaataatggttaaacggcgtctccctcattgcttaaatatcttgccaatccgggattttgatggatgtccgttcccgcccctttcccttatctccctcttcgtttagactgcttgcgaaactccttcccgatttggtgccgacccatcagtgagtgccagtcccatcttgtctgattatctgatcactttccccctccccttaagggctttgctgcacaatcgccgctgttggatgaagcttgaccatattctgcaggagcagggactgccgctgacctcgggaggcttggaatatttgcgggaccaaaatttggaggagaaagtgacaaaacgggtgacagacgacgaacggaagggggaggacaatgtgtccaaaaatggacaaacggacgacgacgacactttgggcattccgatcaatgtgtggaggcgactgagcaacggcgaagcactgggaggaggacgaagaggccaatcgcaggacgagcagcaacaaatggagcggcagtggtcatcgggggccaaaaagtattcacttggccgctgacagccgaagtgatcggaatgatcagtcatcagcagcaagagtggccagcttgtggttgatcaacagcagggaggggaggaagcctgatgggattatcttttgatcagttcggcacacgccgattgattaattgatcgatcgacgaatcgcctataaaacgccggctttctctgatccgggcagaagcgaatgcgactggcagaaacacacttgatcgaattgtggagctcgacgtgtgtagctgtggcagacgatctgataggtggccaagtgatcaacttcacacagtcattacgggtgtttgttttccataaattagtcaatcaaatctctctcctcttcacattacctaattgtttttccttttttgggtttctttacattattttacactattattacaacgaatgtcaatgtttttaaattttcaaaaacagctgtaaattttatttttgcgtaaatgttgtaaagtaatgatttgcaaatacataaaatggggccgactgatcactctgatcaatttttcgttttgatcaatacacgtctgagcaatcgtttatccatcgctctacacacgttcatcatcgcctcctttccggcttttttgacatttttgcccagtacgaaaaaagatcggccgcccttttcagtccgccgtcgatgggaaggcattggcgcggatgtgccggatcaacgaccattcccgggggacaagcgcagtaaaaagagccttagagagggggggggggg

SEQ ID NO: 6907 - DNA, 908 bp, Heterodera glycines
  unsure (1)..(908): unsure at all n locations
aattagcagatttaggatcatcaaacnncattgctgnntnggtaatacagccacaattttttgtgttcggcgttgtctgaccttccgtgttacgcatccgtgggaacagccgccgttgcgttgtgccgtacattcattgacatctgtgcaaaaatgggtgaataaaatattccataatttttgagtttggttaaggagcttaagataggactgatcgcttttggacatccctgggctaaaatacaataaagactcaaataataattacataatattagtggtaaataattaagtaattgctcagccagcgggtctctcaattagcatttttttctgtctgccctcgccaaccttcgcaaatgttgcgactattcgttgtgaacccctcggggcattcccccgcagcatttgccgactttgcgcatgcacattccttctgctgctgctgctgattgtgtgcacatggcgtcactgtctttgtttgttgtccgttcccaccacaagggcacccggcacaattggactttgccggcgcaatggcaaagattgtgccttaagaaaagtcaaaaatagaagaggtcaatgccaagaagaattggtgccactaattgtaagctgaacaccaccatggatttggcaccaatgttaagaaatgggtatgaaataggcacaagagtcgagaataagaatgtttattgatctcgaaagtcgataaggccaaagaaatcttcgttttaaggcaaaatttaaaaatgccgaaagtccaatgcgaagtttcgttgggtgccctacaaattctgccaatggcacacctttgcccagccaaatgctgtcacattgtccattgctttgcacttcgcttagtgtcaccgctttttccatttggcgtgatttcaaaacgcacacag

SEQ ID NO: 6908 - DNA, 990 bp, Heterodera glycines
attccaaccgcattctcagattaatcacgcctatacgaattgttctggaatttttttctcggcgcgtttgtatgtgaaaagattggaaaaatggctatctctttttctgctcaacagtgcaaggaattccaaccgcattctcagattaatcacgcctatacgaattgttctggaatttttttctcggcgcgtttgtatgtgaaaagcttggaaaaatggctatctctttttctgctcaacagtgcaaggaattccaaccgcattctcagattaatcacgccaatacgaattgttctggaatttttttctcggcgcgtttgtatgtgaaaagattggaaaaatggctatctctttttctgctcaacagtgcaaggaattccaaccgcattctcagattaatcacgcctatacgaattgttctggaatttttttctcggcgcgtttgtatgtgaaaagattggaaaaatggctatctctttttctgctcaacagtgcaaggaattccaaccgcattctcagattaatcacgccaatacgaattgttctggaatttttttctcggcgcgtttgtatgtgaaaagattggaaaaatggctatctctttttctgctcaacagtgcaaggaattccaaccgcattctcagattaatcacgcctatacgaattgttctggaatttttttctcggcgcgtttgtatgtgaaaagattggaaaaatggctatctctttttctgctcaacagtgcaaggaattccaaccgcattctcagattaatcacgcctatacgaattgttctggaatttttttctcggcgcgtttgtatgtgaaaagattggaaaaatggctatctctttttctgctcaacagtgcaaggaattccaaccgcattctcagattaatcacgcctatacgaattgttctggaatttttttctcggcgcgtttgtatgtgaaaagattggaaaaatggctatctccttttctgctcaca

SEQ ID NO: 6909 - DNA, 1186 bp, Heterodera glycines
aaacacctgacaaatgagaaaaatttacgagggtcattatggtaattaaggatttggttttctaacggagtttaattgccgaatttgtgttttatctgcttaggctattgtcaaaatcaaggggcttcttgtccaatgcaaatagcattattttattccgaattaaaaataattggtaatttttaattaaatgaattggaaattattcctaaaagtgaatttttcattaaaaaattaatttaaaactaattttaattaaatcatgcttttcttttattaattaattagcctctagccgaaaggaatttagccatttaataattgcatttttggcattttttccaaaatgcttccgaattttgccactgcttttaccccgccccaccggttttgccgtttatcagctcaaccatttccaaatcggtggtcgattcggccatgctcaaattgcttccgccggcaccggcgccgacgctccaccgttcgatgtcccttctgagcaggctcaagtccacgctgttgctgcgcggcggtgcgttcaaatcgccgccgctgccgataattgccgcggcgcttatcgcaaattccaatggcattgccgtgccgaccaacgaacgggcgggcgagggagcggcggatgcggccgaggaggacgagttggagcagtacagcagcagcgagttggagccggaagtactgccgccactgccgccgaacggagggccgccgggcggcttaagcgtgtccatgggcgaccaaacgacggcaccggagacagaagcgcagtgaacattctgaaagggaagaaactgatcaaaggaccgatcatcacaacagagggcgagtaattgatcaaattaggaaagaaaattaacaaaacaattaattaagtttgcaatgaaagtaattagtataatattacaaataataataaattaaattaaattaaaaaatttgaaaaatcaaaatttacgaatgtgtataaaatctcattctgctgaattggtcactcaccgtgttgacagtggaaaaagtaatgtcaatggaagaaaggtccttgtcaaattcgatggaagaaaggggccttaattaattagtttaatttaattttaattgcaacaataatttgaattatattttaattcgttttgcaatgctttccattccgtttgccatggcattgtcc

SEQ ID NO: 6910 - DNA, 6194 bp, Heterodera glycines
ccttcgtccgcactttcggtcggcggagtttcttccgcagaattgtacgatgaaatgacaatgtccggcgtgccaatgttgcgacggagttgctgctgctgatcatgctcctggagcgggaaacagcagtgatcagaagtgacagttattattaaaagaacgtaagtgattgggggagaaaaaagatcaaaagtgatcagtgagtaatcggagggaaagtaggcgaaggagaagcgattagagagtgagagaaagaggtagagagacggagaagatgatacgaaaagtgatcaggaaaaaagcacccaagcatccaatcagttcgtgattgatcaatggttataacacgatcattttaatcaaatgcgtgtgtctgattaaaatgagtgatcatttatcaacagccgttcaactaactggtcgctggctaaacactactagcttttgggtgtcacctgctggtggtgttgccgttccgtctccacttccacgcgcactgtcgtcgccgtaaacgctcgtcggcgtgccgtcgctggcaacgccatgccgtcgccactgtcaccgcactttttgccgctgtcgctgctgttaagccgaatggccagctgcttcaccgcacattcgatctcggtccgcagtgtgctcgcatggtattccgcttggaaaacgcagtgcaaactaagcggggccgggcgataatcaattaattaatgacaaacaattaaaagttaatgagccagcgtctggattgcctttatcccgggcactttttgggcctaatctctaagctcctgccgaactcaaataaaaatgccaattttccaacaaaactgaccagttcaattccagtccaattttctccgctgttccgttggcccctttcgtcaaaccaccgcttttcttgcgccgtttccctttcggcttcttctccgagtgtcctcctttggtcggcattattttcgcggtcaaaaatattgacaatttcttgtttgtgtgtgccaatcgttcggcacttccgtccgaatggattcggccgcggagatcggcagcggtggcgcactgagtgccgcaggtgccgttggtggtgaacaaaggaaagcgcggtctgctgaatcggggaaaaaagttaacccaccggtttgatttgtccgggagggatgaagctgatcattctgatcagacacaattaaccaccggtttggtttgtccaagactgtgtatgtgatcagccccaccgccaagtgccattccaccctatcccctaaagtctgtcccgcttcggcacacctcaatttgcgctgttgctgttcgcactgttgcgggtcccaggacaaactcgggcccaaaagcctccgtttgtcccgctcattctgtgccgcttttcctcctccccctccttctgcggttggcgttgtcttgctgcgctttctcgtccttttcgagctgttcctcctcctgctgttgctgcttttgttgttttcctcctcctttttcccctctttttcgttctcccaatttccttttgccttttttcctccctttttttgctcttccctttgtccgtcttcttcttcttcctcttccgtttggcctttcccttccctgttcatctgctgctgtttctgttccgtctcgccaagtccgtttccgttgtccgttttaagcattttctggttgttatttttctggtagtttttcaacggatgctccgtgctgttggcccacatccaatccggcgtgttgcctccgcaatagccatgaactaaatgccaaatgccaattcaaattgatgaaaaatgacccgatttaatattgccaatttgattggtcggaaaaggtatttgaaattgaaacaaatattggatttgaccaaatcccaaatctttttgggacaaaaatgccgaatcggaccgaaagcaaatgattgatttgtggggaataaatgccaaactaatgaaatcgcttcaatagcaaaaatggacggattctcgaccaacccgagaagcattacgcgaatttgacatatgtcccaccagataatggtgtttttggagacgaatgtgtgctggaagtggacgcacgtgaagcgacagtgccggccgaatgcgttgagacgcgcgaaattttgcgcattgccaaccgtgcggcagagatgcgcttgcgcatggcgcgcctcgcagctgagccgtgccagcccaagctgaaatcggtggcgtatgatcggccgatgccaatgccaacagtcactgaccgcttctggcactgttgctcggtgccgtcggtggtgctgttgcatgccatcgtgctgcgccggctctcatccgtgcttgccggcacactctcgaagcgcattgcccgtcgcgagtgacatacgccggtcagtgttcggcatcgcaacggcatggcacttgcggagcagtcgttgtgccgaccgccgaattcaatggcactgccataaaaaggcgggttgccgccaccgaccaaaccatttggttgccgattgtcaccagagaaggaagcattgtcatcatggtgttggccattgttttggtcatcgctatggttaacaggcgaaggggtggtggtgccaatggcacgcatctaacgggaaaaaaggctattgaaatggcaaagaaatttgccagtttaatagcctacgcggaacgtgatcccgcgcgagattttgcaggatcccgcgggatttgcagggttaatcccgcgggatttgcagggttaatcccgcgggatttgcagggttaatcccgcgggatttgcggggttagtcccgcgggataccgtcctgtaaaaaattttgagtttcaattccgcagcgggacccgaaaatctgaaatttccgggacttagaatttaaatgcacaattaccaccgccgcgatggacgagcgtcgcaaattgcgcaccaaatgggcgcccgacttgcgcaggttggccatcgcgtccggcaaacggacgtggaaggaacgacgggaatttgtactgttcgaatcgacgggcgaagtggaggaggaatgggcagaagaacacaacgcggcgctgaaccgggacataagcagtgatcagacaaagggtgaacaaaaaaacgggtgggatcaatgctcaacgatcagcataatgatcaatcagcagcttaaaagtcgtgatcaaagcaaaaagccatgctcaaaaataatcagataagccaaaaaagatcaaaaaggttaatcaagaagttttgttaaaatgataaggactaatcacagtgaaaagctcttagagggtgatcagggagcttaaaggggaatatcgacatggcaaaaagtaaattgattgatcagctcgtatttaaagcgcagaaatattgatcaaaatggttgatcaaaaagcgttgataataatgctaaagattaatgaacacttggtaagctcaaagggggtgatcagagtgagcaaaagcattggtcaccaactcgggtctgaagccgttctgctcaaagcacagattgggcgttgctgttcggctgtgcattgggctggaagtgctcggcccaaactgatcagcgatttcgtcgaagtcgtccatgacgacgtcctcaatgattgaagactgtctaaatgggcttaattgatgatggcatggaatgccaatgcggttttccgtgccattctccccctcttccccacctttggcatctccgactgttcgcgttggatttggcaccgccctttgtcggttttttccccccttttttgacacttctgccgccgtttccattggcattctcttccgctgctgctgctccgtcggctgtttgttgtttttcgtccgcttttggcgttttgtttgaacattttggcgttgttccggacacttttggcggcagtgccgccgtctctctgccgctgaccgttcccagtgaactgcttgccaacgatggaatgtcggcagtcattgtgcacctaaaagtgatttgggactgaatggtggtgacaatttcaattaataattggtcaaaaaattacgaatgcttgttaattaattatttatttaattaatcagcattttttaatcgatgaatttatttttttaactatttacttattttatcagctattttttataaggggtaaaaaacgcaattttgtttatcagctgtgatcaatggatttattcattaattttaaggtatgatctacttttaatccgtttttttatcttgattattaagaaaattttcaaaaaaacctaaaaacaaaaggaaaaataggggacgaaacgcaaataacggcaaaagaggggacggacaccccggattttagggggataaaaactaaaaatggatttctagcgataaatagggagattaaaatgaagaatttcattttacgtgctttctcatcaaaacaaaacatcagaaaaaatagtttaaaaaactgaaaatcccatcaatatttttatcaattatcatttgttatcattttatcattcactcactttttgtccatggcgccgcacttttttgtcctctctttcgtgctgttacttctctcggccccctttctgctgaaccgtgccaacgattgcagcatttcgtgtgccctttgatttgcgaattttaaatatattttttaaaattaaatatgtcctttaaattcaccgaaaattttggacaattaatttgttggcctcgtattccttcagtttgtgctgtcaccgcttgaacttggtgtgaatggagaaaatgaaacgcagaaggacatttgaaatattgtgcttaattggaatattaaagaaatgcaattattttaggaaattattaaaaatttaataattaatacgcaaatggatgctgacgcaaattgaagtatgttttttgtttgcccgtgaatttttaaaaaaaaggttggttttaagaaggtaaggctaaaggggggaaggagaagcctttgttttgtgccaagggatggcaaagaatacaaactcgaaggtcttctccccttcggggatatttgaggcataaaaataaattgaggctcaaaaatcaatctaattatcataatttataattttccaaagatttacaaaaaataaaaagtgacaataatttaatcagaaaaactttttcaacatcgcacaaattaaaagttaattaattatgtgaaaaatggcaaatgaactcccgctgtttttttgatgcattttaattatgtgaaactaatttcgcgcgagggtcttgaaaggagtcgcaaattatttgggattgtctttaggggtcggcatgattttttggctaattggcacattttgacatcatcattacgtgccattccatgctatttcgaggcgtgtcaggctttttgtcatgtctcggcttggcctggcttggccgtggctcggctttgcattccatgtcatcttccggcttggcattccatgccataccatccgtgtctctccatgccatgactcggctttggcttggcttcgctttgtttggcttctccctgtcccatttttctctctgtctttcttttttgtcccttttttagcatttgaaattgaatttgccccgacgagaagcgaacccgtcgcactttgactttacactttcccttttttgccctttcgcttccaattttattttattatcggcgcattccccgcggcgcttttatcgctcggcgatctttgccccattcggcgacaaaaccgcacattccgccgtccgatcgcgaagaaaaataatcccaaatgaaattccaaagtccaaaaggaagaaataaaaaataaataatttaaaaaataaaaaagggcaaaaattattctgaaaattcaatggacgaataaatttaaaaaaaagaaaagaaaaggacacactttaaaatcaaagcaaacaaaggggaaaagcagcacactttattctgaagagattgtgctcaattagcacaaattgttataagtgcaaacggaagaagacaaaattcacgtaatttaaatgaaaaattaaaaaatataattatataaattgtaaaaaaattattgaattaatgtaataaaacaaccaattagattgttaatttatcagcgtgcgaagacttaagcaaataaattgccaataaaataatgccaataaaaaaagtgttggattaatttgagaggcgacgattagcgaatgaaagaaagaaagagtgggtggt

SEQ ID NO: 6911 - DNA, 2074 bp, Heterodera glycines
ccccaaatgtttggacaccaatatttttatcgttgaattcgtttcttttttgcattttattataaatttgtcaatcgtttcttgcataatcataaatttgcatcttcaaaagtaaccgagaaaccatgatcagctcactcattcactagggcatatatcatcattttgaataaaaaatgcctatcattataaaaaaaatgagtattgaaacgaaataaaaaaacataaaacatgaagaaatagcagacactatgagtcagacactacactaaatttaatgaaaattaaatgcatacagtgcgccaagagaaaaaagtgataaaacagtgatttttaagaaatttctaatgcttatgacttggtcaatagtaaaccaaatagagccattttggtctcattttgaagagaaaattctgaagaacatgtataactatcgttttttgcatgccaatatcatttttaacctttgaaatgacggtaatttattgaaatattcactagggtcaaaattttcctcgggtcagattttcttcaaattttgcataggcccatagtttgaccccctctatcgaatcacagtttattttttagctgtctagtttttaactcgagatcggctcttcagtttttactagggttgagcggtaccggtaccggtaccgaccggtaattaccggtttttttggtaccggtaccggtacaggttttttcaaaaatcaaagtatcggtaccggtttgtctagtaccggtaccgccggtaaaaatttgcactggtaagaatgggggtctggatgagaaaagagtagggaatggtgaagaaggagaaattttttgagaaaaaaaaaattaaattatttattttcatttaaagcatttgttcatatgcataagtggtcaagtggctaaaccttctgattttattatttctcgcttgggttcaattcccactgggatagaatattcttcatattttctttacaataattttaattgaaattttaattaaaaaaaatattccaactttttttctttcattttaagcatcctaaaaacccaaaaattaatcaattggtcttttttttacaaattctgttaacaaatcgcattaaaaaatacaaaatttttcccggcggccctatcggcaccgccggccctccttgttccccaaaagtcttgagaaaaacgtgccgcgaaaaaagcggtgttgaaagcaaaaaaggtcattgatttacattaatttacatggccggagatcccttcgcaaaattggaaaattggccgataagtcgcttctcttttcctggcttctacagtaatcatagcgaaatgaaaagcgtcacttcgtgaagctttaaaaaatgaattgtaattttgtttttgtttctgatcacaaaatgaataatgtaataaaacaataaataaacataacatttatagcaattttttggaattgacgggtcacaaaggatgagatcggcggaagagtttgaacaaacaaagagtggacaaatggcaggcagagagaacaattgagaatcgaatgaacagcttattgatttattgaaatgaatcaaatggacgtcagtccgatcggcggatggtgtctttgatgagtgccgatcagttagcgagcgaccggtcaggtaaaaatcacttcgtatcggcacggcaaatcggtgacgcgtcggcactcgtagttggcaccccacccaatgccgacactgatcgtgagcagcgaaagtgccgtcgcattttgtgtcgttgtcattgatggtatcacttcggcaccaaccgcagtatggccaagggaggagaacagcgtgaggtcgttgccaacgaattggtgccgatggaatggcgaagcgacggacggaaggggcggcggcgcgtggtcggcggcggacccaaccgccgcggggggtgcacaaatgcggtgcacgcgcacgcaatagcccggggacagacggcgaatgttcggcacgagcgcagagtcggagggcggtgccgcggcacgggcgacgttccgcgaaacgcacatgaacaggggctgatcactgctgaaagaggggagggt

SEQ ID NO: 6912 - DNA, 2827 bp, Heterodera glycines
ttttccaggcttctacagtaatcatagcgaaatgaaaagcgtcacttcgtgaagctttaaaaaaatgaattgtaattttgtttttgtttctgaccacaaaatgaaaaatgtaataaaacaataaataaacataacatttatagcaattttggaattgactggtcacaaaggatgagatcggcggaagagtttgaagaaacaagagtggacaaatggcaggcagagatttttaattgtcgttctcactctcattagggccaactcattttgttgaagcaattccagcgcggccattgctgcttgttcaacgagatttgccacctgcgcatcatttacttctaagccgcgcatctgtaacaccttaaacaaaagattcaaatgactaatgttaataaaaaatttccaatatgtatgttaccgctggtgccacgaggtccccttctcttattgcaatagcgtgtgcggcttcgtgcaacgaggtgacgggtcgttctgcactccttcttctactgcctgcttgaacaatctgttgaattttttctttttcttgccatatatttttcgtccgtcgggttttccgtatgggggcatgctaaattcaaatttaaagacattactgtaattaaaatgtagatccgatgaaaacggtaaaaagaaccagccaaaatgttcagggcgagtttaaacagaacagaaaacatacaaaagtaaaaaataggtttttggaaatgaaaatgaattacagtacggttactgttggcatacaacgtagacataaaataacaggcagagatcaattcccttcgtactggatggcaccagcggtttgttggaatgtcgagtcgaatcgctcacagttcggttgagaagacggtcagacatcgccaagtttgaccatttgcctaaaaccttgccaacaccgtgcgcacctgaaggtctttccacagccacattttgcagcagagataaggcattgacattggcctgaaatgcagtcgatagtaatgagttaattaataattatccctaattacccctcccctctcggattgtttacttgtcaatttgggggattagtcccgcgtccgggttcgtcagcggttgtgtaagcaattgccgccgtgacggactcgcggcgatcacttgcgactcgccgtcattttcagccgacaatcgccgccgttgtcgccgtcgtcgctccgttgtcgccgtcgcattggccatttcgtccgtgtccaattcggcgtcactgctgctccccgttctgggcgaactgctgattattgtagtgttcagcggccgaagtgaaatggccccggcggcactgtcttctggcggtgaagtgtaaacggccaaacgcctaaagcgatggactaattagtcaattaattggttaattagtggttcgccagtcagtcacctgctgaatttgctgtcccttctgttcctctgctgcagctgctgttctcgatgtgtcgaatatcgcctctgataccctccggcactgccgggcacagcggcggcgccgtccgtcgtcggaattggcaccaaaacgccggaggcggacgaagtcgccggctgatggtgaattgaggcgacggtgggaaagcgttggcgttggaagagaatacggtcacgctccatttgcctcaacaaaatgtttaaatgatttcatggcaattaaacagcaatttaaatttttgtttttaaaaggtgtggcataagaatggttgatttggtctgatcatccgatcactttttacagttttcggctttatttgccattcacttgatcgaatgccgtggccgcgtgctgacaatggtcgccgaacagcccggcatcatctccggctcctgctccgcctcttctccgctgctgatgctttcctcgcgttcctcaacaaggtccatcggtggtcccggcgcgcactgtttgatgttgatgccgcccgactcaattgccttgcaaatcgttgggatgcactttttattgggaacattagcccagggttccagttagcagcagatttcgtggcaaatgaggattttttgaggctatgattaggatttaaaaattgttcaggaatcgcatgatgaggggaaatgataattgatttccaaattgaaggaaaaccacggcagttaaacccattttatcgaaattattattaaattcataaaatgtaagttttaaatgttcgccacctttcgcagcacatccaagtcttcggtgtcgaatccgcgcatgaggttgagaaaacggcgcttcgcctttcgctcgtcgtcagtgaccttgtcaaatgaagagttaattaaaatatatttttattttaattgtttcaaatgaatcggaactgatcactactgatcagtgcgtgatttctattcgaaatgcccaccaacaatcgccgccgccttaattaggccaataaaattcaatcaaaaacaaatttaagaaaaagactgaactcattcccatttgcttcgatcaaagtcgcactctagcggatttgtttcaaattttagtcacatcattatacttacaattaaaaaattaatcaaaatcgctactttaggcatatattcctgggttctgttggccataatttaccttcatcgccaagctcagtgtaaatgttctcgggtagccgccgctttgaagaaacgaaaacgtccaccgtgagcggcataccaggtttcccctggaagcagtttaacgtcatactcaggacgggtaagtgcccggcaactcccctcgctggggtggtgattttgttaggaaacatttatcaaaggcctaaaacaaaaaaaaaggaaaataagaaaa

SEQ ID NO: 6913 - DNA, 3109 bp, Heterodera glycines
  unsure (1)..(3109): unsure at all n locations
ttacaacattgtcgtttggttccagtcacatatcacatataaagaattttaaatataaataatttttttgacaattaaaattattatatgtttattttttaattacagatgtatacttaaaattattttttattccttttctcgggattccgtttcaagcgctgttctccgttgttcatatcacaggcccaagttatggaatattattttaatttaattttgaaaaaattttcataatttgtttattattattttttttatttcaagaaagatagaaattttcatagtatcgattattctttctttaggtttttcccatttcaaaattttgaatgatttttcatgagttggttcacggcaattaatttttggaaacttgaaattgtattttaaattatttcttataaacattttcaatttttcttattttatattattaatgtttcattccagtttttaaattatatttatttattggaataaatttatatatttttaaactatttttagtatttcattgtttatttaattgaaatgttttatttccgacgcaaaggtcggttgtatattctttagccggtatactgttaaatttttatttattttctattcttatacatcaggttttcttttatcttaaatctataataatttgaaatgatttttctattgaatatacaagcatttaagatttgtttttcttaattttatatatgaattggttatttttactatttcaatttttaaattcaattatttaaatttttctaagcttttgttaagtttttttattaaactatttgttattattaataaatatttatgagttgaaaaagtggtgtatgcatcggcacgggaaacgtccagacagagcaacgagctgcacatggaagtgcttcagccacaagtatgtgccatggatatgatgaataggcagaagaaggtccatttttgaagtcaaatcaaaaaaaaattgaatgagctataataaaaatgtaaataaattattataaagtatataagtaaatgaaaagcactttaaattgtaaatgcattaaattttgtaggatcacacgcagattttgagaattgagaaaaaaagatatttaaattcaaaatctccaaatattacagttatcattttttaatgtaaatgagtatcgttttgcgttacacttgtttttattaccaaataaaattttggaattaaaaatatatattttttaatttataaaggtctaaaaatttatgttgttattcctggatgatcctaagaattttaatttatattctacattccttaaatataaaatttcggtatttaaatcgttttattcaaaatttttggtgtagcaaaaattatttttatgcaaaatgttgatcatattttcgcaataattaagctttaaaactttaaactacattttgacaaatattaacatctttttaattttacatccgcattaatatttattataattattcaatgttttccaattttttacattctcttgcctttaaagtttctatctatagttttactttcatttcctatttttcacattatttactttaaggatttttagtgatcactggagttgtttatcttttgaatttgttattttttctgtgaactttttcttgatacgttagacaatttattagattttgagtatttccagataaaaacatctcctctttatttttttcatataaaaaagtaaacattttgtatatttactgtatctttctgaagaaatattttcttatatttatgtctttgaaataaaatcataattttaaaaatttgtttgttttattaataaatattattttttaatttatctattttatgattaattgctcattattttcatttaagaaaaattatgctaacgattatgtatgcatttgaggtacgcatgttgcagtagcattaattaaaacggattaaagccacatgtaagtggataaatgattaattactttaataattattttatttcaaaaactttatttaattaattagataagattaattaattttttattgtatttcatttttaaacaaattataattattgatttataaaattattatcatctagaaaaggaaaaaatgcgacttacaaaaatatataaaaaatattttaattattggtttatgatgcgtgatgaaaataattgttcttttaaatgaatcacataaaatgtaatattgccttggtctttctttatttatattgcagttttttaatatctctatttgcttatattattatattttaatttttttaagttaatttttatattattttagagttgtcgtgatgctgctaaccaccacgttagagactttgggttgagcttgatggcattgagaaggaacagatagagcggcctggaattgtagacatatgattgaatatttggtttcagttttgcctttctttcgtttatttatgaattaacagatttctataattaaaaatgctttattatttaggtttttaaaatctctgccattccgcgccggcagtgcccgagtgaggaagataaattatttgtttatatgattaataaaatactaaatattttctgtttttccttttaatctagaggtcagcgtgataatcccctctctcggttattgaacttttctttttaatatgtgttgtaaaatttattttctcgatattttctgtatcttgagtaaacatatgattggatatttggtttcagttttgcctttctttcgtttatttatgaattaacagatttctataattaaaaatttaatatttcccaaataaaactgatttagatgagtaacaaattaagtcctcaatacttagttacattttttggatatatatttttctctatatttttaataaacgtttttccttttaatcttggcgtctacattcggtgattcttccaccaaataaaatttttattttatttttgatttttacattgttgaaaacccctaaattntcttanattaagtattttacatacattttcctttgttttaattcttatattttaatttgttttattatttanttatataaatctttttatttttatgcatttattctac

SEQ ID NO: 6914 - DNA, 4522 bp, Heterodera glycines
attttggtgcttatttggcgatgttttgccgtgttgaattgcattgattttgggctttggcgcctccaaaatttttgcttccgcctccgtttttagctgtgtatttaagtcctcaacgactttgtcgaataatttggacgttttcgtcgtctttgagtcctccgctgtgagacgtgcgaggatgtgctggcgtaatttggcgtcgcttgatgacttcagcgacgtgaggagaaccaggcatttgaattcctcttcgtttaattccgaaaaacggaatttgcggagggctgcctttagtcggttcacaaaaacttcaaaactttcgccgttctctcggcacactcgcaggcattcatagcgatcaatcgctaaagatggcggatgtgagaacaatttaataagacgagatttggtgtccgcgaagttgaatttggtgaattcctccggcaggcagtagcgcttgtattcgccgaaggcggccggattgagctttgtcatcaacaatttgactttcgcttcatccgccatattggccgctgcgcaatccaatgcgaattggaatcgctccaaccactcctcgaattcctccgcattttctgttgaaaacggatgaatatccggcaatgtgatgttttgtgccggtggagttgttgtggatgtcggcgcgctctgctgtttgatcgcttgcgttaatttttccaaaatttccgcgagcgttttgtccattgttgatttggaggattgacttagacgaagaaactgcacatagcagaaccgcacacaagattagtgattggttttttgaagatttctgcgaaatccaaaaatcaacacgagatttttgaatttccacaattcgaacaatttcaacacgagaaaatattcgaagtgaagtcctgaagaacgggcgtcgccaatgttgagccggttgattgctcaacaattatttgtggaagtagaacaccaaataaatttattaacacaaatggaaaataaataaacaaataaatatttgtcggagggacggagcaaattgggggagcacaaaatagcaaggaaaataacagaatgaatcaggatggacgaagggaagggcatgaatgaatgggaaaaaatcaatatggggtcaaaaagcccaagagagggaattgcaaatatttgaattatttgcctctctaacaatggcgctgagaagagatggtttattccgttttctttgacgaattccttaaattcgttggagctaaactgggtgccgttgtcggtgaccaaagtttcaggcaatctaaaacgagcgcaaagtgaacgtaattgttcaattgttgctgctgatccggtcgaacgcatttcgaacacttccggccatttggagtgcgcgtcgacgatgatcagatacatctttccaaagaaggaaccggcgtagtccatgtggacacgtttccatggcccttcggcttttggccaagaatgtagttccgttttctttggtgccttcgcttcggtggcacaaggctcacattttctcaccattgatcaattcccggccagtacatatgctggcgggcgagacttttcatttgtttggccattggttcaggacgaatcccttcacttcctgaagcaatttatcagcttccgtggccttgacaatgtcctcgtggacaactggaaattgtgcgtaaaggcattcacagttgccaaattagggctttccgtaattgttgccacaataaattcatcttcgggcactggcgcttttgcaattaagcgcgaaagagcatcggcttgaccaaaatcagcagtgttttggtattcgatctcaaaatcatacgccaaaagtatgagtgcccagcgctgtaagcgatttgctgtacacgctttaatgccctttttgttaccaaaaatggtcaacaaaggcttgtgatcggtctgcaggacgaagtgtcttccggaaagatatttgtggaacttctgaactgcaaagacaagagctagtccctctttttcgatttgggagtagttcatttcggcaggcgacaaagagcacgatgcatgtgcaattgcctttaagctgccatccggaaaacgatgggaaatcactgctccgattctgtaatcagaggcatcggcagaaacaatgatgtccttttccgggtcataatgggtcaagagttggtccgacttcagcacttcaatcactttgtcgaaggcattttgacagtccgttgaccagacccatgccgcgtcctgtttcagtagctcgtccaatggttgtcgaagaaatcgcatgttcttcacaaactgttggtattgattgatcattcccaaaaatgatcgaagctccgaaacatttgtagggacgggcatttcagaaatcgccttagtcttggatggatccggtcaccttgcatttttgtcgatgacgaacccgagatatttgatctgcttctgattgaacgagcacttgtatggtttgatccggaatcaagtttccgattcgtttgaaaacttcattcaaatgttttcgatgctcctcgtgtgaacgactaaccacaatcatgtcgtcaaggtaagcaaacgcgaatggacaaagattagaaaattatttaattaattaaaaagtattatcaatttttttcaatgctcccacagtgacattatagtttttatttttctatttcaactgcttaataatattattttttattttaaaagccaaattaaatttttagttatatttaagcagctttcattaatgcattatataaaggtgatgctcgaacctcgcggtttttgatatttttcgtgttgaaaaagcttgaggcttgatggggtttgtgtactcctaaaattatttttattttatttaatattgttttcttttctacatatgagaagatatataagcaatatttcttacccaaattcggattttttaaattacttgcaagtttattctttataaatccaatgatttttatatttacaatttttaagaaaattgtcacctttaaatcgagtttagcttcgttagtatattaactagtttatttaacattaaattaaattttttattatggtgtttatgtttattataatttattaacaagacgccatggttgactttttaaaatcttatatttttactgattaaatcctgaattttttattattatagctttaattataacttaacttaaaataaattttgtaattaaaaattcatatttattgtttatcaaaactctgaatatatgatcttgtaatgagctgtgtgtgatgaacgaagttttaatcaaagtttaattgaaaaaataaagtacaattagaattttatgattaattttcaaaaaatttttactttctttgatttgtttctttgatatcattttatttaatctttttatttattataatattaggaatttattatatcaatctttgttgtgtattttatgtaaatctcagatttgtgttggatatgatggattttaattattatttgaatcagcgccaatacagtagaaatgatgttcctgttgtttttggacgccatattcttcagtcaatattctcccccgctgttttgtttcattcattattattttattattttatcatcattttcagttctaaattatttctgttttgctccttccatttttgccttcctctgactccgtcgtcatcattattttatttgttttgttttattatttatttctttgttatcatttgtctttctaaaataaatttaattctgttgttccttgcggacacaacaatttgcttcaatttattatttattataactatttttacgtgacatttttcgtgcaattgatattgaatgatcaaatttgcaatttaaatttattctttttgatatttttaaaataaaaatggcagttctgtgactcactattggttttatttaaatacttctttaaaaaataatctcgtcccattttccaaacagattattgttgtatggtacttgtgctctttgtatttcaatttcttccttcatttttgccaaaattttttgagtagtgattattttttcaaatataatttaagcaatttcagttacatcacaaaatcagccaaaaatttaatatttgtgatacattaaataattataagaattatttatcagaatatagaatttcaaaaatctaagcgctctaatgatgcaattatgtttaattaattttattacattacagttggcacggtttttcagtttatatgcccataagattttttgctgatttttttcatgataaagaaggattttattcattgattaaaatttatattaagtttaaatatgaaatcagcttccatccccttaaggattagcgtttggattattatatttatttttagtttaaaattgtagtcgaagattgcctttgcccctgtacaatgtaattcaagtatttattttttactttaattattttttgtgtttttttagttaagatttgatattactaaaaaatatgaatttaagttg

SEQ ID NO: 6915 - DNA, 6310 bp, Heterodera glycines
ataggcgccgcccttacaagattgagaatttttaccagatttttagcagatttccattaaaaaattctttattttgtggttttttgattggaggattttcccccaaagcctcaaaatttgtcaaaaagccacaaaaatcctcaaatcctcattttccaaaaaaaatcctcattgacctatcaaaaagccacaaaatgaggataaatcctcagatctggcagccctggtttagatgagtttggtttaccccgcattgacagaaaaaaaagttattgcctaggaaactgaggacggtctttattggacctaaagggcaaaagagccaactcatactttggtataacctataatcagcaaataattatttcattttagcacaaacaaattatgataaatatcgtcgattaccgagattcttgtgcttcaacagatgaagaagatgatttattttttcaccgcgtttcttcaaatcaagcacaggaaaataacgatgatgattctgagtccgaatttatcaagtaattatcccagtcactgatgttattttcaataaaatttacatttagaatcttggaaatgtgtcgaaagcatcgtgaattttctgctgctaaaatgggagaagacagtcaaaataagccgcgttctttaaataagcgtgataaggtctttgattccgagtattattctttacctgcgatcgaccaacttaatatacaagtcaaagaggagactgaattcaaaagatttggtgttgttgattcgcacataaattttttaggtgagttttcatttcaaaagtactttttcatataaagaatttaagcgaagataaagcctgacaaggatacgccacatcttggatatgagacaattctattcaatcacgacaaaaagccaattggagagatttttgaaatattcgggacagttactgatactttatatgcattgcgattcaatgacgaaagtgacgctgtagcgaaactccctgttggtgaagtaatttattatgcaaattcggacaatgccatgacaaagcccgtcttcccaaaggaattggcaaagtatttgttagtgattgcaagctgttgacttgcatatttatttacaggctaaagaattgggaccgagttcggccatcgggtggcggctcatccagttccgaagagtttttcagtgacgacgaagaggagaagcgtcatttggcatgcaaaggacaaaaaactcgaggagaccgaaaagcaacagaatcacctacaagtttttgtataatttttcttaggtatctcattttggtattttatgtttagctaatgtcataccttcgaagcggtcgaggaatggaaagaatcggcctgagaagatatgcaatttcagtcacacaaatttccaacgtcaattatttgccagaccatacacaacattcgctcagcatcactatatgcacatgtatccacagttttcgccttaccatcaaccatttggtgttcaattgcctcctcatccatgggttcgtccacctcctcctccgccagtttatccactcagtgccgcttctacatcccaatacttttcgcaagcacaacctacttttccaaattttaacaatcctttcaatcaaggttatattccccaaataactcattccaatgctcaacaaaatggcaaacacaaatagaggagttattgttatttgttttttttcctttgttaataaattctttttgcattgtgtttccaaataacaaatgtaactaaatacattgaaatatttaataatggatttgaatgtacccatttatcacgtgaatgttttatctttaagtttaatttaattgttgccaaatgtcatcggactctgatgacgcgagtgttcattccgaggttgaagaggaactggaaggagcggttgacaacgaatcgggggatgaaggtgatgcagctgtggacggagaagaggaggaggacgaagacaacatcggaaaagacgtttcacggaagaggaaggcaatgtttttaaaagcaaatgttgattacgacatatgtgttcaagatttctgtcagtgaagaggaaaacgaagaagagcaggttgaggaagaggacgacttcgacgagaacgaattggcactgaacaaacctaaaacaaagaagaagcgcagagttagggtgggtatagggagggggagggcagtgataagcagggacaataatcaataatgctcatcctttttatcttatttttacgttcagcgtcgagcgactgcgcgcgattttatccaagatgatgtcgaagtcgacgacgacgatgaagacgaggatgactacgatgctggggcggacggcgatgatttgtttggagtggacccgaatgaacgcgcagaagctgaacgttttctacgagaacaggaaaagatgaaagagaaacgccgcaacaaatacgcgtatttgtagttgacagttaatccgttctaaaggattgattgttcagagacatgaccgaggaggaaatggagcggtacttccaggaaagacatgcagcacaagtggcgacacaccagggcgacatggacgaggacgcatatgacgacatcactcagaacggactgttgccaagcacgaaagacccgaatttgtggattgtaaagtgtcgactgggcgaggaaaagacgacctgtcttcgtttaatgcgcaaatacttgacttttgtcaacaccgacgaggtaagttattgtaaaaaaagcacaggtttcctgttcatttgtttattggatattttggcaaatacgactgatttataaattgtatttaagcctctccaaattaaatctgtcattgtcaaagagggcctcaaggggatgatctacattgaagcgtttaaaatggcccacgtggccaaagcaattgaagggatttcggcgctgaaccaattcaaaatcacggtaatatcggcttattattaccttttttcattcccttcatttcaaagatggtcccaataaaagaaatgtccgatactctccgcgttgtcaagaatattccaactttaaagcccggtgcatatgtccgtttggtatgacactcttaattgtatttaattaatattctcatcaatgatttgcagagcaagactctttacaaagacgacctcgcgcaagttgattgggtggatatatcacaaaatcgagtcaacctcaaactcatcccccgcattgattacacgcgcttaaggggggctcttcggtcacaagttagtttttgacgagaaacacgttaaaatcgacattataatttaaatttaggacgacagaattatgaagaaaaaacgccgtccattgcctgctccattcgatttggaccgtataaagttagcatattcggaattagttctttgttcaatgtattccttgggttttagatcaatcggtggtgaagtgacaaacgatggcgacttttacattttcgaaggtggccattatcgcagaggctttctttacaaatcttttccaatgaatgctattgtaagttagtgattttgattggtaaaacgatctatgtttaggaagtcgacattactcatccaacccttacggagttggagcggttccaagattccaccgacgacttaaaaaaagaacgtcagccagttttggaatttcaatatatttggggaagagaaaataattcattttcccattttagtggagaacactcacctaagggagaagcgccatagttttgctcctggtgataacgtcgaagttatggacggtgaactggtgaatctccgtggcaaaattcaaagcattgatgggcagaaagttgtcatccttcccgagcatgaggatttaaatgtaagcgattctaattttcagaattggaattacttttcctttaaggaacccttgactttgaatgcgagtgaattgcggaagtattttaaacctggtgaccatgttcgagtgattgccggtcgttacgagggtgacacgggtctgattgtacgagttgaggacaacgtagtcatcatgttgtctgatcttaccatgggagaggtaattagctcagttgcgattaccatttgtctttatatgctattcgcagatgaaaattttgcccaaagatgtacaactttgtgctgaggttgcgactggtgttgaacggatgggccaatatcagtaccaagacctggtgatgctggataaagaaacagttggagtaatcgttcgtttggaacgcgaaaatgtggaagttttgagtatgcatggcaaaatacttcgtgttaaccctcaaacgattgaatgcaaaaagaattcgcggttcgtcaaggcacttgattctcaaaagaatacaatccaagcgggagatacggtcaaagttgttgagggcttcctggcggttagtgctgtctttttgaacctaaaaactttaaataatagttattttttagcgaaagaaggaaactgaagaagaacgtcagggcgagatcaagcatcttttcagaaattgggccttcgttttttcacgtaaatatccacaaaacgggggaatgtttgtttgcaaagcgcggaatttggcattgattggtggaagcaaagcgtcggagtcacaaatcaacactactattttggataacagtcaacttatgagtcctcgtcctaatccgctcgaaagtcctcgcaccattcacggcggaatgactccccattccgggtcaagtgttgttggtgcacaatctgtccgtggcgatcatggttttaaaggtctttttctagatggtcatctgttcttgttaattcagatttttttagcaccaagtgtggtcgggagcatcgcaacatcagcaaccggagttggtcggcaacatgtacgtcggaacatggaaataatgggcaaaactgtgcgcgttctggctggtccaatgaagggttacattggaattgtgaaagatgcaacggaatcgactgtcaaggtggaactgcacaccatgccaaaagtgaagccctaattgtttcagtttggatcgataaatctttaactttagacggtcaattttgacatcaacaaagtgatggaggttggtggtgccgtcccgagggaattgatggacactgctggcgcaatgactccgggaacggccaccattggcgggcgaactccgatgtacggaggagcgcagacgccaatgtacggtggagcagcaacgcctatgcacgactcatgtaatcaatatctttactattctaattcggaattcgcagagttgtttcaaagattctgatcttttaatttagtcggtgctcgtactcctcattacggctctatgaccccggcttacgacggcagtcgaacgccttcgcaccaaccatcttcgtcttgggaccctggtcatacttattttgtttgatcttaaaactcaattttcgttcactttagctttggccaatacgccggctcattcaactgctcattttgacaatgaatttgacacaatgggatttggcggaggagcatcaacgccggcaggttctgtgagaagccgacttgggggagcgaatactccaatgggtgcgtgaggatttaaggtcttctgaatattgtttgtttttatcaggccaaatgacaccgcgagatatgttcggcgattattcttcaagcccttaccccaacccaagcacaaatggcaatatcattttttggtatttataacagatatcctttaagcttcactgcatccgtcgaaaacgcccattggtcagtcaccggcacttcaggaaataatgcgtaagaccactaaaactatccgcgaatattattgcatgcaatgcttcagccgattccgaaattcccactggttcatggtgtatggtcgacctgtgcgtcaatgttcttccgacgtgtggaaaggaccaacttctcggtttagaaggctcaatacggtcaattagagtaagtgtatttaattagtaatgattcggttgattcttcgtaggagggcgaatgttgtttgtatttcgaggagcttgacgatgacttcactattgagcacgaacatgtggtgcccattcgaccggcaagtggagaccaggtcagttgttgacaaaaccaaatacaaaaataaaaaatctcatgtctttcaattcaggctaaggtcatttatgggcatgatcgtggggtgtctggctctttatcaccacggaaggggaggatggtgtgctgcagggggcgaacgggggcaaagcttttattcgatgtccgttctttgtaaacttgttttgatttgaatttgataatccgattttattggttcaa

SEQ ID NO: 6916 - DNA, 3806 bp, Heterodera glycines
  unsure (1)..(3806): unsure at all n locations
aaaagtccgagggcattaaaattatttgggatgggaaaaacagtcagcggcttaaaagcttttctgattcattgtccttgggcggcggcggaaggaggggggggggggggtattttgtgggtacggtaaaaaacaagtcgaatttgactgcactattaaactttttgtcaaaaagcgaggggataaaaaacatntaagggaatgccagacttaaagaaaaaaaaattttaattggtggctataaagtgccacttttcgctgccttccctccattgctttaccattgattgttccgcctggcgacactcgcatggccaatcggttccaacggcgtcgaactgttaattatcaattggaaactgagcggaaacggcgtcggctgagtgttgttggtgtgccggtggagaacgaagcgcatagaattgacattcatctgaagcggaggccttttattatttaaatggtcaattaacagaatttggcatttttcgacaaaagtgccatttgcattaattaataacattttcattttgtttattatcagacatttcgctgttttcacctctaatgctatcatcagcaacaaatcatcaaattcaatgcacaaaagtgttttcttcgccttttccattttccaaattcgacgaatgaaagtccaatgccaacacattcaatccatcggcaaattgaatattttcgtcctctccacgacggagggacaacggacggcgggggagagaatggaccaaattgccgggcaaagggaggaaggacaaacgattgaaagtgcgagaagagagcacaaaacggagaggacggaagcggcgaagagaactttttagggaaattgagtaattaattaactaattaatgaataagcagaaatatgcaaaggaattctcaccctgttcacaattagcggactcaacttgctgactttcgcattggcaagtgaatgaatcgcttccctcaggtatacaaatgcctttttcacatgtcttccgggcattttctccatggcaaacatttgaccttttatttcgcgcacttccaattaacggacacatggatgaagtggttgcattgatctgatcaaaagagagcaatttattgtaataaaatgggcaaacacctaagccatgaattggtctaatctctcctccaaaatggccaaatcttggccaattatttcgattccatcgatggcaattcgtcgctgacagccaacgaatgaaaggtccgaagtccgaccagcagaatgacggagaaggtcaggcaaaacggagagatcaccgaaaatgacgaagggtgagaaacgaagagagggcggactgaaagggggtacggtagagacagttggggaagagaaagtagcatactgtaagagcaaattgttttcttgctgaaagtggacatgcactagataaacgccatgactcttttgagcacattcgtccccattttcgtcctccgtttggcactccgccaattccaatggcacccgtcccttcgtccaaatcagttccaaatgccaccattctgtggcattttgagagggtaaaggcatgaaatgcaaataacagaacacaccgagcacatccaaaacgccgaattgctccgggtccggcattctataacaaaattttaagcgaaaagtaaaaaaatagaaaacaggaaacctaactctcaactgttccggcggtacgctgaaaaagtgggcgaagcaagcccgactttttttgatatattccatggtgaattctaaataacaaaatgtgtctaggcaagaaaatgccaaagcttgggtagaaacaaccaggctaaaaacttttgaggaattctccgagattttccaacccggccattttttggactaatttttgggcagttgcattaaatcaaaccatttctgattgatcattacaaatcctattatttgagcattttttggaaaatccaccctgtcgatgggtttgtctctaccctcgtaaaaaaccaaaaaaaaacaaacagtaccagtgacgggcaatgtcagcacagtgtccggctgctcatagaccaggtcgtcgagtatttcctcaattgggtagggcaatttgcacagccgttccgctttgttgacaaacgcgtcgggctcgggctcgtcaagctgactcagatcatcaatcttaagcagcaaagggaaaggaatatgcaagtgcggggaatggaaatcctaatccgtttggaccttgttttttcgacttcttttcgggtagcgttcctcaacaaaatccctcggatcccattcaattgaagaagttgtgcttgaatccatgtgtctatcaaaatctgctaacaattttgtcaaggttaagaaaaattaagtcgaataggtctcaaggctagagaactcggacattacaaacagacaattcgagagcttaacatgtttcgaaggtgaaaattcaaaaaatcttgtttttatttgctcgttatgggaactgagcgtttcgaccagaatttttgtatcttaaggcctatctctgaccgagaacgccccccccccccttctttaaagctacatgcatttcgaacgagtttttttgcatgggaataaaagaaatgaagataatactaaagtaatgggaaaacaaatttatcgcttgaccagccttttacgagagaaaactttttcccggaagggaaaatgttattgtttctaaaaattttcagtttttttagagacttgaattagaataattgcaagtgcgcagaaagagacattggcataattgtgataattattaaatttgaaaataaataataaaaattagagaccggcgcgggacgggatcccgcgcgggatcgcgtccgcctttttttaaatgcgggattttgctggattaatcccgcgggacggtaggggtcaactccgtctcaacatcgttcaaaaagctataacttttttctttgttggccaaacttcacaatcatggtatcattcgaaagccctagatgtttagaagatatttataagctatttctcagtgattaatcagctctcaaaaaagttgtcagttgaaaaccgcaaaaaaggcagaattttcgaagttttttatttctatctttttttatagttcgaaattttctgtaatttttagtaggctaatagagcctgtgaagagctttcgaatgatatcaagattgtttgattcggtcaataacttcaagagttatattgactcaaagttggctcagacggagttggccagacggagttggcccgttccgtccttatgcccctttgtcggaaaaataaagcagcttgggattcattttggattttttggtaaataattgtgaatttaagagccattttattaaaaaggggagatttaaaaaaataataattctgtggtcacagaacaggaaagaaccaaatcatttacattggccctttctgtgttgaccaattctgacttactaccaatttaactttttggagttgcttaattagcctaatgattgctttttatcgcttcgaataaagcgaatgaaagcatttgtcaattatcattcctcttcttctgagctgctcccttttaaataatcattcattccccgtaatattcacttgtcattaataatcactcatttggacactttctcccccaaaagggccttcccaaatttcggctaattcggggctttatcttcttcaaattcttgcagggcaagaagggaagggacccaatggcacaacaaaaggaaattgcacgccatgccggtggtcatttgttcatatggaaggaaatttggtgggg

SEQ ID NO: 6917 - DNA, 3501 bp, Heterodera glycines
ccccctaaaatggaaaattttcaaaaaattttccccaaatattaattctttctttaaaaaactttattttattttttatttttgttcttttcaaaatgtattttttacatttatttatttaataaatttagtaacagcggttaggtaacttaactgggagacgggaataaggcccctgttctgtgacccaaaaattttttttaaatcaacaaaggcgcgcccagttttgcaaaatattttatgaattccttatgccggtaggggtcaactccgtctcagcaattctgtaatttttagtaggctaatagagcctgtgaagagctttcgaatgatatcaagattgtttgattcggtcaataacttcaagagttatattgactcaaagttggctcagacggagttggcccgttccgtccttatgcccctttgtcggaaaaataaagcagcttgggattcattttgcattttttggcaaatattgtgaatttaagagccattttattaaaaaggggagatttaaaaaaataataattctgtggtcacagaacaggaaagaaccaaatcatttacattggccctttctgtgttgaccaattctgactttctaccaatttaactttttggagttgcttaattagcctaatgattgctttttatcgcttcgaataaagcgaatgaaagcatttgtcaattatcattcctcttcttctgagctgcccccttttaaataatcattcattccccgtaatattcacttgtcattaataatcactcatttggacactttctcccccaaaagggccttcccaaatttcggctaattcggggctttatcttcttcaaattcttgcagggcaaagaagggaagggacccaatggcacaacaaaaggcaattgcacgccatgccggcggtcatttgttcatatggaagggaattcggtggggtcattcgggcgtaagtcacccaataatgtccatccactgaatactttattctttcaaatgaattttacgaccaaatccaaattttttttaatgagttttgtttaatattttcaattttattattcgcattgtcagaatacaaaattctaattatattatatttattatacacgagacgagtttgaaaaattttaatgaaaaatgactagaaagataaattataaaactgaagacaaaagtaaaacagaatcttgtctatgttttggaatattcggataatctattcgagaaacacaaaacgagccaatgaatcataaaaccgggctaattgggtaggaaaattcgactcgtaaaaatgggtagaaaataagtataaaattttggaatttgcgtttaagagagatggacaacaaaggaagaaaaactaatcaaaaattggattggtttctcctttccttccaatttttgaatttaactgcccaaaatacaatagaaatatatgactataaagttgagaaatttgttgaaaatccgtaagggtaaggaggttttcgtggtgtcgtcagatcatcgctttttttttgtttgtacagtgtcgggtcaacaaattgcgaaatcggcttttattgcgtggaatgggaggagctgggcctaatcagctgctgatgcgctcctccgccgacgccgtaaccgttcataaagccaaccgacggacttcggctttcgtccagcacactgacgcccacttgcaattggttggccttgcaaacgcaacgactttcacgctcctgaaaaggagaattgaaaagaacagagggaaaaaagagaaaggggaacctgcagcaaaaagttgagtcgctccaactcgcgacggaggacggaattttgggtctgaaaaggacggacaatgacaaggcgaacccaacccgaacttgcccacctccagagcgttcttttcttgctccatagaggtcacccgggtgatcatatcgtcatgctcttccctggagaaaaattgaaaaaattacgaattaagcaatgatcgaaaatcaaatttgagactaaaacaccccactcacaatcagaaggtaacaaatgtaccaattgttaatttcaaattcccctgctgccccgtgactcacttcttcctctttcggtaccgtaccgccgcggctttgttccgttccaaaattgtctgtcgccgttcgtccgggagcagttcgctatgttttttttattatcgttggcgtttgtgcgttctttctcactttataatcgaccttcggcctcggcctccccgcgttgaactcacttggctatccgcacttaaatagtcgcattttcaattgctaaatccccgccttttcattaccttccaccataaaatttggtgtatttgcgagttttctcctttccccccgtcggtgccgcattatggaaactgtccttgctcatgtcgctggatgctttggaagtgaccgaatcgggccctttcgcgtacggactttgctgggacttcaagtttgaaccaatttttggtgtttagaataaagaatgaacagagccattaaaaaacaatttcgtaaatcagtccccatttgtcaaatcggtagacgtgattggtttttgccctttccccacttacaattgaaatttggggcgggcagaccgactgctttatgccttcgccggctttccattggtcatcgcctgatttgccgttaagcattggcgatatttttgacggggcgctaagactaaaaatgtttttttatttatcaaattcatagtgcctaaaaagtctctccataagccatcgttcactcactctgtcagtccattgccgttgagttgggatgacggagaaagtgccgaactaagcagcgacccgcccgaccccccgggactgctctgcgcactgaacgaaggattgctttgtcccccgccggggagattggcgggcacggacaaagtggcggagcaggaagcgtggtgaagggcgagaagagcttcggagggaaaaatgggcgaatggagttgcttatgagcagacgcagctgagcaaaggcaaattgggaaaaatgagtgatgggggggacagagcgtcgcttttgccaaaccaacccgaggaaatgtttgcctggaggtgcaggtcgggagaggacatcgttttgccttgagccgcgaccggcgtgaaggaggaggggccggcgtggtccgattccaatttgaagttggggatggagctggtcgggaccaagtgactgtgaacagcagcctcttaaacaaatttaaatgacgaattttacaaagtatttaaagtttaaaaaattttgaaaattgtcaaaaccttggccggaggaattggcggaatttgtaagtgccgctttgagtccgttcagtccggcaagcagtgaagtggaagaaatgaacggagaggaggagccaacggaagagctgcccaagtggtgctgctgacaatgagcagcggagcccccgtttatgtgctgcatgtacaacacggcgttgagcacgtccgaagtgcacggcgtctt

SEQ ID NO: 6918 - DNA, 1208 bp, Heterodera glycines
aaatatagtaaatgcaaagtcaaaaataaataatgacatttgaatgctactaagaaaggtctccatggttttcaccgacccaaaaagtaaaaacgagcaaaattaatgaatactttcattttctacctgttgtactttgcgggaaaggtcaatggtttttctcaactcccccctcaatgtcagccgtgagaacattaatattggagaaaatgccgggtgaatgagtgtttgtcaacgaggacaaagtcgagggcaaattcaacagagagccgagacctgcgatggacgagattttcaaaaaaagaatatcccggccagaaaacctgaagtggttggcagtgaacccgaagtgccatcggcagaggtcccactttgtggtccttggccattgatttgcaaatttgcttcgcgaaacttcagatcgaatgggttcacggaaaggcatttctgagtttggcattcaattattgaggtgaatatcatttgtttatcacctgaattatttccgcggtcgagggcacttctgtaaaaagatttttatttatttttattgttttgggggacattgtttaaaagatggacctacgcgactcgggggtcagcgaggaaagaaaccaatcgaatttaccgctgctcatcaaaattcaaattgtggggagaaacaatgttttgtactacagataggtatttttattgtagcgcaatctaaaaaggaaaagaataataaatttatttttcagattaaaaagtttaaagcaaaatgtccggataaaatttaaataaaaaaaggaattttccaaaaaattgattatttatgttgtgtgtactttattttcattgctaattatggaatcgagaagaatctggtgaacgtcggtgtattatattaaggagtgcggcgagaatacagaagggacgggggaagaggggggggggcacacagtcacaacaaattattcaacataaatgagcggggagaacggcagttacggtccctccctccccccgcggggctaaattgagcgtttttctctctcttccattgccactgcctttccatttatttctcccatcaatacaatcatcagacaatccgattttcctcttcattcacacctcccccgtcgtcaccctctcgcaaattcgtcccttccctcctcctccccatcacttctcttccctctcttctcctctattatcccttaaat

SEQ ID NO: 6919 - DNA, 5696 bp, Heterodera glycines
  unsure (1)..(5696): unsure at all n locations
cttacataagctaaattantttgaaaatttaattacatttataaaagccattctggaactcgtcaagatttttcaggctttaaagcccattattcccgtcggaattgtttaaatgtaaaacatgatacaaaatgccacaatttgtctccccctcccatcgtccagtatttgcgctcgtaccacgaaatgatgcgaccgttgccgcgacgcgagcggctgtcctccagcgccagctggggtgccgcctcgtcatcagcggccacaaccgcgctggacggcatgggcggagacgcgagttggtccagcagtcgcggcagcgcgaacagccgcggaagccgggccagcagcatgcacaccgcgccggagacggaccaccagacgctgcagctgggctggcaccgggtcaacgacaagcttcgctacgactcgcgcgcggtgcttggccgcggctgcgacggcacttttgtgtaccggtgcgttgcttgcgcggatggcatcatggaaattgtgtttgctcgagagtcgagaccgaaggattgtttttggcattttgagcccgaataagttttcttcggcctcggcaactcggcatgctgtttattgagcctagctctcgacactgtcagggaaccgaaaatttcaacactttttccaaaaaacatttgggaacctccactcggaattctgtggccaaaaaaaattgagaatcgggaacgagaatcggtatgccatgtcccaaacangggaattttgggaatccgggatctgggaattgccatttttcgcattgtttttggttatcaccggtactcaagactgggaatctcttctcaaggttttgatcttgccaaaaaagttgagtatttttcactggacaataatgctgaaacccgagactctcgagcattacgcactaattgcttttccactaattggtgttatgtcgcccaggggccaattcgacgggcgcgacgtggccgtgaagcgggtgcaggcgctgctgagcgcggacaacaattggcaccggatcatcgaccgggaggtgacccatctgcgcgagagcgactcccatccgaacgtgatccgctacttttgctcggtaaaagacgatgcttgcaactcactgattgatcaattaaataaatacgattataacataatcatctgtctacaaattttttttttaaattctataaatttatttaaagaaagtttccttaaaatgtatgaaattttttggcattttttttttgtaaattataaaattcataaaaaataattactttacaatattcctaaatttaatctttaaaaactattatatcttttgattttacaaaaattttataggtggcacaagtgccaaattgatttgttaacaattttttattttggaagttaaagtttggaatttttcaaaaatctaaaaaattatagggaaaaaataatcaaattatttcacatagttatttttttttatattttattaaaaagtaatttaatataattcttttccgaatgaaaagttgttaaagaattatttttaaaaattttttttactctactcaaattttttttttgaaattttttccaaaattttttcaggaatccgactcctacttcagctacattgcgctcgagctgtgcgaccacacgctggaggacttcatcaaccaccagcggggcaaaatggagcgacggctcaagctggaactgctgcgccaggccacggacggcatcgcgcacttgcacagcatcaaaattgtacaattcatttgtttaattttcagacttggaaatttttacaaaaaaacatgaaatttttgcttaagaaatttcaagaaaggattttttaaaattttctagcgttttttggaaattttttttgaaaaaactgaaattttcttatgaaaaattttcttaaattttttttatgaaaaatttcgcacattgatcaaacccattttcatgactccgatcaatccaatcggttttcccattttcaatttgtcatcttttcaggtacaccgggatgtgaagccgaaggtcaatcacacaacattaaatgatgcggctgcaatttccaatttcattttttgttgtagaacattttgatcaacggcgtggccaagggccccccgcgggtcaaaatttccgactttggcctctgcaaaacggtgaagctgggccacaactccatctccaaagtgtccggcgttgtcggcaccgaggcaagggagaaaaacactatctgatcagagctgatctgagcaggctttgtcggtctgatcagtgccaacagccattgttgatagatcatttgtctttgaattttataagtgaacaattaattaggctcacatttttgtcttttagaaaggttctgaatgcccaaattttactttaaaaataatcactgatcaaatcaattttttagccaatcaatcaataattttgccacaaaaatctaacaataatcccatctttagggttggatggcgccggagctgtgggactcgacggcatctgtggtagaaaaaatcccaatcaaaatttcagaaattttaaaattttacaaagacctatgccattgacgtgttctcgctgggctgtgtgttctattatgtgttgacggagggtgaacacccatttggtgactcaaatgtgcgcctgtacaacatctccatgaacaagttcaacctgagcaaattggatggtgagcggctaactaaaaatggatgaaaaaatcacataaaaacgttatcagcaactgtgatcatgatcactgatcagtgttcggtatgataattgatcgggaaatgtttactgatcgctaaacatttcatacccgtgttttgatcagtgttcagaacccagatggatgaaatggtcacttgaaaaattaatcagcatccgtggtcatgatcagtgaacaaaatgatctttgctcagaacccatttcatatccgtggtttggggtcagtgatctgacttgatggttttgattactgatcggtgcatcatcatacccgtgatcaggatcggtggtttagattactgaattggaacccatcttgatcggaccattactcattactttttatctgatcgtttgatggcttttttccatgtctagtcattatattacataaaatgtctgacttaagttgaccaattacagattctgatcacacagcgcgttcactgatcgcttcaatgcttcggcttaacgctgcgttgcgtccaacttcgtcaatgttcgttcatgttcatttgttttgcgtggtttctatttttggcatgcatatttcagcttggtaactcatccaattttctgggagcccggcaaacagttgcaatttttgctggtacgttatggcatttttttgctgttgtattagcctatttggttcagtcttcgttttaagccaaactaaataatttttggaaattcttggtagctttcggctgatcgctttgttgagatccgataacccataggctggctgatcagactaaaaattacccgggcattaatttttctataaatttcattatcatcaggcatggtttttctttatatcaggtttttcggtcattttaagcaagaaactaatgaatgatcaatagagttaagccaccgatcaatttttttttgccattctaggtctcttctgcttgactttttttaatgaattgatcaaattggcatttttgggtgggctgaccaaactatcaatgctcatggcattaaatctggttagatcagactgaattaagccactgatcagttttggcttccttgatcaaatttcccaatggcaatttttctgtaggaagtgagtgatcggattgagaaattggaatcgcacgatctgatcatgcgccggttggagtggcgtcgtgccgtcgtggttggcacttggctgaaccgaattgacgaaccgttgaaaattggtacatttttaatcttggcttttcgtccgccaaaaattgacattttgtcccacccaaacacaaaacagatctcttgaagcagcgctcctaccagaacaatgtgcgcgatttgttgcgtgcaatccgcaacaaaaagcatcattaccaagtctggcaccaatttgcactcaaattttaattttttggcattttgtcactatttaaaaaaattttgccaggaactttctctggagctgcgcactctgcttggccgcttgcctgacgagtacattgcctatttcacttcaagattcccagaggcaagtttttttaaaaaaaagttctatttgacaatctgttgaaatttgaatattcgactcgaaaaccgtttttggggttaggggttcgttttctttgatcgagtctcgttctcgaactctgcgagaatctcgagtagcattaccattttattgtcttcatcgcatttgttggcatgatgttcatcaattgtcccacacttggcaaaacttttgtcaaattgtcccacatttggtgacattttgtctgccagtccttagtgactttgttcgacatctgtccaacaacttaaaaatgtttgtacaattatcccttagtaatattttattcccatttgtctcagctttggtggcattttatccaattcttcccctaatccataatgacattttgtccaattctttcttcaatctttggtgacattttgtcccattctcccccaacatttggtgacattttgtccaattcttccccccaacatttgatgacctttgtttggcacagttgctgatgcacgccttcatggcgttgacgctgtgggcccatgagaatgtgttccgccgcgacttctaccccaccgatcagctcgtcgagttcttcgagcgcgagcgcgacacgatcttcaaaacggaccaatcgccgcacgaccgtcgccgccgcagttcgagcccgtccaactggcgcagcgccagtgccgtaagaatggcaatcgattggaggcggaaaagcatgcccttgcttgatcccgaatcaatgggtcatggtgatggtctcgggaatttctctttcccgggactatttgacaaaggcacatggtgccggggaaggacgtccagggaaaggacgtacttggatttcggatttatagtaccagcctcaatggtgaagattttgtcgcatccaaattttcgacctccccccggatgagggctttattagaggggggcactaatagaggggctgggatctctattagaagaaaagtggtaccgcagtccgagtttggatatcccatttctttttagcatgggttcaattttcaacccaccctcccacttttaggtgggctttatttgagagggcggcactaatagaggggttgtgtggctctattaaaaggatcccttcctgatgcttttgttcaacacagtccctccccatccatcagcagttgtcccgagcgggaacaccgacacggaatggcgtcggcgccggcacaattgtgccaacaaattatgccattggcaacatcacggccgatggcatgcatcacccggttcgcaatcagttgcagcagcagcagaaacttcccttgcagttgcccgccttcaacccgttcatgccaccgccacttccaccggtggcaccaccaccagcagtgccgaaccagctcatcatcacacgggtgggtgggctgttgttgttttggggatgagtttcag

SEQ ID NO: 6920 - DNA, 1571 bp, Heterodera glycines
ccccccaattccatggcatttctctgctctctttgactctccccccaattccatggcatttctctgctctgtctgtgtttttccttaacagatggcttatctttctgtctgtagtctcttttttcctattcttccgctctttccgttttcttattgcccaattttcagcggccattttattggcacacagagggaactccgaaggaaaagaaagaaagaaaatgcgagaagctcgggcaatgcccatgggcacttttggccggaaaaggacaccaaagcctccagcaggcggagcccaattccatggcatttgtatcgatgccttccacccgaacaaacactttttactttggccatgcattgccgccattcaatctctttacccagtaaatattagtgatactcaagaccgaagatttcccgagaattgagacatataaaaaaaccgagacttttctcgggatttgaattcagtccctcccgaagccaaggatctgacaatgcacttgagtcgagactcgagaatctcgagcatcattaatcaatatgaatcactcatttcattttgcatttccaaagcgattataatactttttgttttttaattcatttttctttttttgtctcccccccccatccgccgatgtttccttttttccctcaattaaatttggtttctcacaattctccgcttctcgccatctgtcaatttaacttcatctcatacttttctccctttgtttttcctctcaccaaaaatgccatttttcctcattcagggcattttttgatggcattctctcccccccccccccctactctctgtcagaccatcatttgtactcatttatttacaaagtcttcttatcaactcgagaattgttctcccccccccctccccctctttttcatttcctttcatcttttgtcaattatcgcaataattaattaaatttacctaattgaatttttaatttctccacccgtcttttcctccttccctttcttttttcaccattccctcactacccatcctttctttccttaatggatgaacttgtaatggatttgtgagtgctgctggagggatccttaggccgaggatttgaataaaattgttaaagcagtttccgtacaattagcaatattattgaataataattatcaatatttattagtaatttgtgattaaattttgaatattttgtacttccatcagcagaaggcgaaacattcaaagcgaagcccacccacgcaaattcacttccattttcatcccaccatctttccccccccccccaatccgccatcactttttatacatttccttttcttcagttgggtgacagaaatttagtgcgcgaaaaagttggtacaaatcgatgcattttgaagaggaattgcgcaagaaaattatggcgggggcataaaaaggggaaagatttggaggacaaatcgacgcaatgggcgggtgagggaatgcgaaatgaattcggttgggttgtctcctttctgttttttggtcttcctttgtttgatggtatgtaaacaaataatcattcttttgctgg

SEQ ID NO: 6921 - DNA, 2780 bp, Heterodera glycines
aaaatgatttcgtccaccgccgtgcctcgcccccttcgctcttcgaatcaacaaaaacagcagccaaacgcactgaccaaacagaacggtgctcatcagcagaagacgcctatcaaagccagggaagacagcagaaacagtcagaaaatccaaattgggggataaatcaaaaatgaattgttatttaaagggagcgacgcattgggcgcacagaaaccaaacggtcattcgccgcgtacgccgagcgttccgccggtgaataagcgatacgctcacgtaaaaaggcaattaatcactttcatatccattgactcgttggttattcttcagcaaagtcgggtcaatcactgagtacactccgtcgcccagtcgcgtgaagattttccacgagtctgtccgagtcagcgccactcccaaagtcggctcactgcaaaatgcgtcccatgtgcccggttcggagggaggggagggggcgttaattggctgtttttccaaataaataaactatttacatttagccggtggaaatgtgacgatcgagaacaaaaaactcaacttccgggaggcagcaaagccacgggtggaggacaaatcggaagtgccaattccaaagagtgagaaaaaggtaagaaaatgggggatggcatcgccaacaaaagggaaggaatgttttgacagattgcgactcaaaagttggaatggaaagcccagcccaaagtcggttcgttggacaatgtgaagcacaaacccgcggggggcaacctcaaagttttaacagtttcactttcatccctttaaagagtgggccgatgtttcagatattccacgagtcggtgcgggtgaaatgcgagtccaaagttgggtcccttgacaacatcggacacgtgcccggcgggggcaatgttaaggtggcattaattagtccaaacaatggcactttccctcccccttcgctttccttctcttacccccttcccccccccccccccgtcctcattagatttcggattacgcacgcagtgtttccggcagcggtgatggctccagacgtgacacttttgattcgggccgcagttcatcttccgccgacctccctaaaacaaaaaacgttgtgctcagtccgcaacgttcgccgcgacccgtggaaatgattctgacaccgaaggaaattccgccgacggacgacgacgaacaaaatgacgcgaacagaggacacattggacaagcggaagaagggggaggagagaaaaggaacggagagagggcgacggaagaggaaaccccgcaggggacgaaggaagcggaaacggggcaactgatcaattttggggactgatcagtgagaagggcaaaaagcccattccgaaagaacaatagtgacgatgactgatttttctgttcgccgcctcattttgaatggccccatctgtcaatccatgcccaatcaatctcataaaatatttagtaattcatttttgtagattcattctgttttctgtcgattaaactatgaacatttaattttctaatatagttttgttaatgagttgggctggcatttttggaacttaaaatcggtcaaatattgtcagaaacactcaaaacgatttttgaaattgtcatttatttgcgcctttgtctaaatacattgattaagctatttaacactataaaaatataaaacccgtaggagggaagggaagggatggacgacggaagaatgatgagagatggcggggggggggggtgggatttggaagtgatcggttggaaagaattaaagacggatggggcggggattaatttgggtgtccatgtgacagatagaatgaaaggggaggaggtaagaaaaggggatcattcttttcggcatttgttaaatctcagattcgtgatcagagtatttttaaccccaaattcattgataacttttttaaaaataatttaaaaaatcgaaaaaaatcaatgattttcaaaatctgagtttagattcgtgatcagtagggccgcgacttttagtgacgaaaaatcccgaaatagctaactaaaatagtgacgaaaaagtgacaaaatagtgaaaaaagtccgaaatagtgacgaatagtgacataatttttagccaaaaattgaggaaaaaataatttttattcactgattgcagttgcaaatgagtagggctgctaattttaggtaagaaaaatcgcagaataggtacttaaaaaggttaaaaaatatatcaaaataggcatcaaataggtataaaaattccaaaataggtaaataaaaatttttattaacgattttttagtggaaaaaagcaaacaaatagggtaaattttggttctacatatctctttgtaaacgaaaatttaaatatattaatattttcttagataatattgacatttaaattaaaaattttgtcaatagaaaaaaataaataaattttgggataaatttttgagaaatttttccaattcttagggtgcatttttgaaaatttttttggtcgattcttatgggtattttttgattttattgcatttttgttaagaattttttgaaaatccttaaaataggtaaaaaaaatgccgaaataggtataaaaataggtacctaggtaataggtagaaaaccccccaaataagtaaaaataggtattataaaagtgggtgtagaagctccaaaccaagctaaaaactcgtttttcgcgcctatctccgtctattaagtgtgcaaaaattttaggtatttacctaaaattagcagccctacttatt

SEQ ID NO: 6922 - DNA, 1287 bp, Heterodera glycines
  unsure (1)..(1287): unsure at all n locations
cttggaacgactggcggagatttggatgttgctgttgactagcgggggaggtggaggaaactgcgtctgtggagagcgggaaggcggcgggagatgggccggcatcacgggctgttgctggtgatggagggagaccatgggtgggcggcattcccatccctccgggcccagtgggaacgaagaaaggatgacgcatttgaagcggatgaacgccctgctgcgggtgatttccctggaaacaaaatgacataaaaatatttctcatcattaaaacaagcaaacccacatggttcggcataaaagaaggcgaatttatgaaagaccgactggcagaagaaatttggttgttgttgctattgactagcggcggtggtgggaattgagtttgtggagagcgagaaggcgacaaatagggagggaacaaaggctgttgctgctgaacatgctggtgatggtgaagaaacccttggctgggcatcggcggcaatcccatccccccaggcccagcgggaccgaagaaaggatggcgcatttgaagcgggtgaacgccttgctgcgggtgatttccctgctaaaagatgaaatgaaccgcaaaataaaaaataaaagtaaaacccactgaattcgccagaaaaacgggtgaactgagaaaagaccgattggcggcgatgtttgagttgttagcaagcggtggaggtagaggcggaaattgtggctgtggagaacgggaaggcggcaaaaaaggcggacccatcggttgctgattatgagggtaaaacccggcagggccaggcatcggagacattcccaacccatcaaacgaaggttcgtagaaagggatgtgctgttggatctggataaaagtcgagttgacaaattctgagattctatctatcacccacttgtttcggtggaccaattgaacccccgccactgcttgacgcgttgttgctggaagcgcaacgactggtagtctcggcaaatttatgcgaatcgtcggccaatgctttgggctccgaaacggcgccttctcccatccactgcttaagtcggctggttgccttaacagcaaattatgattagcttcactttttcccttactaaagtcatgggcagagaaggaaggacagtctcgggagaactgttgtgctgttcttccaccgttnttgtgatgttgacttctgaaaatttcacagatagatttgtacgaataatatccgaagtgtacctttctcactttgaatgtcctccctcaatcccatcagctncatgatgtcaaaagctgat

SEQ ID NO: 6923 - DNA, 2046 bp, Heterodera glycines
aagttcatacaaaaaacaaagaagaatgtatcactcactctcgacttctcattactcccatgcttggaagttgttgcagttgacgtccaagaagttccgttacccccaatgtttaaagtgttttgactcgaactgccgcggttggtacgacaagtggcctcgagagcagatttttgcttaaatagccaaaataaaataattaaagaatctaaggtattggcaaatccctaattatcatccccggcccactcgctcagttctgaccgctcccccattccaaatgcacccacaaagtccggtttgaagtccatcccattgctagtagtcgaagcgcctctccgcagtcgagccgccttgatgttcgcctgttgtttgtcagtttcctgctgcggcgtgatcactgttgctgttgaatttcctgaaacgcttccgcctcctccaccgctcccagcggaagtctgactggccgctttccgcctcacacgattctccactccctcacatttccatttgtgctgcagccatttgtccggcgagaataacccatcatcactgaaatgaatgcttgaattttcaattgctgtttgtttttactcttatatttagacaatattaaacccctcttaatagaaaatttacttgtcaaaatctttcaataaaaagacaggtcgtgtccgacaataattgctttctcgaatcatcagcaattcttccttattgtagcagcgatatgttgtcaattgctgtctagggacatccattttttctggacccaaatacttggaattttctttcataacaaatgaaagaagttagtatatatggataataaataatgtcttaacgtcaaaataaaagaaaatacaattttaaaaatggattaaattaattgagataaagcattaaatcaaagggaaagccaaacagaagaaacagatgaattttggattggtataagaaatgtgatgaagatttttgaaaatattttgcttttaaataaaacgccataaaatttaattaataaaatagaaaatgaaaaatagaatgattgagattgtttgacgacgtcattcaactaaatccaatcgataaacttaaaaattgggaggcattttctgaaaaaaaaaattcgaaaaattgaattataactttttgtacaagttcggtttcaatgttcagattggtcattaggcaaagggtccctccaaataacacgccctcaatcaacttataaagttgtatttagagacaaaaattatcgtaaatggctgtcggaaagaacaagaagatggggaaaaagggagcaaagaagaaggccgtcgacccatttacgcgcaaggaatggtacgacatcaaagcgcccgcaatgttcacacaccgaaacgttggcaaaactttagtgaaccgcacccagggaacacgtaaatgagcgtttaggctttctcaaaaattttttggtttaggcatttcaagtgactttctgaaaggtcgggtctacgaagtttcgttgggcgatctcaacagcacggacgccgactttaggaagttccgattgatctgcgaagaagtgcaaggcaaaatttgtttgaccaatttccacgggatgacattcaccagggacaaactgtgctccattgtcaaaaagtggcatgtaggcgtatcttatttatacaaagtgcccggaatggaattaaactcctattttagacactcattgaggccaatgtggcagtgaagaccaccgacggtttcttactccgactcttttgcattggctttaccaaacgaaatgccaatcaaatcaagaagacgagctatgcaaagacatctcaagtaagacttatccgcatgcgaaaattttaatctgttccttagaaaattatttctaacttctcattatacatggaatttaatattctaaaattgctttaggtacggatgattcgtgccaaaatggtggaaataatgcaaaaagaggtttggtcgtcgaatttattcccatgttatgttgtgtcaatgtcttctttgctttgttaggtctcttcc

SEQ ID NO: 6924 - DNA, 4856 bp, Heterodera glycines
  unsure (1)..(4856): unsure at all n locations
cccaataaacacataaagcaccttttatttgtcatttaaagcatttctgacaataaaagagaaaaaaaaattttgaaaaaaaaatgaccaaaaaccgggaaccaaaccaccataatattcaaaaattcttaaaaatctgattttttgatcccgagtgcactggaatttacgatttgttaatttcctcaccaaaattttaaagatgatcatgggaggtgaaaaatataatatttaatacatttttgatcgaataaattgtaaaaataaaagatttgaagcaattttgcaaaatgttctgattttcgaccccaaaatctgattttttggacccgatgttctgattttgaaaatttttcgatcacacccctgttttataatcataatttattgtggcgctaatttcttcggtaactgattgtgagcgggtaccaatatcacgcatttagcatcgccgatttggtccccaccataattcccgcagttaaatttaggtaattgcatttacaattgtaatataaatgtcttatgcttttgttcgacaaccgcacaaaaattcggtgtgccttatgggatggccaacgacaaattcggtgattatcagacaaaggcacggcgctgaaactgaacaggcgcgcatttattggccaggaagtgggctcagaacgaagagcgaaattgaggaggaggtcagaaatggcattgatacttaagttaagcaatttactctttccgtaataaaaatttcagtttaaatgtgcccgcgacggcaaatacccagaagagaatttggaagattggtcaatcacaggcaaacggagtttgactcagaaggcgcttttccattacacggaccgtcgggcgggcaaaggctattccgactttggtttcgtttcctccccattaattcccaaccgaattcgactctttcagccaccaccctttactacggtcgcccttacatttggccgcccgttcgcgaaattaaccgatggcactttttcatttgtgtgacctttgccctggttattctcgtcgactgcaaatggtgagcagaattggttgttttacaaacatgcggatttttgtaaaaaaatttttttgtacgtaatcgaaaaattctgaaattttgcagacaaatagcacattaaagtattatctgcaaaatttcaagtctttctaagaactacatactgacaacgaataagaaaatcagctttttcaaatttcttgataggctaatgacttaaattcccatccctattcataagatttcctaaaattttcctgcgcgccgggtcttattttaccatttattttttgaaaatttgaacccaaaatgtcgaaaactaaaattccggctttcactgtttcatgtttcttcgcccttttaggtttgtttcgtccttcgaattgtttcgtccgcccaaatcggaagccgcgactttggaaggcgacgcggtcgaatttgaggatcggaaaaaacttcagcttcgacgaatggtcaaatttagtttaattcccttggaaataatcagtcaaaatgatttatttcttaattaggagaggcgaaataataaaatatttgcaacaaatcaaaacacaaaaaatgaatgtttttcgggttttgtttaaattttaagtgtgtgtanncacaatctaaatatactgtttttcattttatggagtcaatgtcaactcgtacaataattattagtttttcaattatttccgttggagaaggaaagatggggattgggatgcaaattaaaatgatttgttaagagattttgtccaaaaattgttcgatttttcactttcgtcgtacaaaataatacgaaaagcccctctcgttgcctatgtttttcgtacttcgccttttaagcccaaaatgcgtcagaaagaggcggcggtgacgaggcgaccgatcgctgtgccattgggcaatccccgcacaaaaagaaacggaaagtcggctttcgcgaacagcgcgtcgtccaatacgaagttagacgccgaatgttcgaactttcgcatggacgcgtttcagaatcggattcgtgcctattcctcgcccgacaaaatctttcgatatttcgcgacgattaaggcattgccgaccattcattttcgttgcatttagtagattcggtttagcttcactacgaagacggctctttcgacattttcatgacgccggaggatttcgttcggtcactgaccccgggggtaattcagccgaggaaatacgggttggacaagtacaaagtgtacaacgtagaagaggtggtgaaccgatggggggggggagtggacgagtgagactttcgtcaggtcaaagagcatttgccctcgggggacggcgttttcaattggatgagcgactctggcggactgatcaatttcggcgactatctttttctgatgacccttttgtccagttcgttttttcgtcggaatgccatttcttctccctcttttgccgttgtcagcttcacccagcgaattcaaattggccttccatgtttttgatcagaacggcgacggagtgttggaccagcaggtgaaaagggaagaaaatagaggaaaaaagggatggaaaataataggaaaaaacgaatgatttgaatgtttacgggccacttattactcactgctgaataatgacccccaaaataaaatgagttttgttttgaaggagttcgctcgggtgcaggaattggtgctgagtcagtctaacattggccaaaggcaccgcgaccacaaaacgggcgccggcgcatttgtgaagacgaaaaattcagtgaatttttaaaggaaaagcgaaaaaataaccgagtttaaacccaatcagatgctttccaagcatttcttcggcgaaaatggacaaaataagttggacattggcactttcctccaattccaggcgaataaattattttctttttatatattttgcattattttagcagaatttccacggggacattttgaaaatcgaattcgaaagacgcgaccccgagacggggccccgagggaatcatttccgaagtgtgccgaacgaagccctccccctttttttctttaccctccgcccctttttagctgtcctttgccgaattgctgatgatccactcggacttgccagagaagcggcaaaagcgaatgctgaagagagtgcggagacggcaaaaggaattggcggacaaaagggtcaattaaaggggcagcattcacaattatgtttaattaattaatgagtaattaattaattgtttcttatttgttttgccattgtttccttttgagggcgtttcctttgaggaggtggacagtttcttcgccttcatttaccacattgacaaagtcgacttggccctccatttttacaaattggccgggaaaccgttgtccaaacaacttttgcaggcaaagtcaaatgattttaattgattaatattgtgaattatctcttttcagagggtcgcccgcaaagtgacgggcgtcgacctttcggaaacggtcgtcgacgtcgtggtcactctgttcgacgaaaatgcggtgggcaaaggcaacggacggacagacgacgcgacgcattcaatcggtcgaattttaggacggcgaactgtcgcagggcgaattcgtggccataatgaaaaagcgaatgcaacgaggcctggagaggccgaaggacaccggccttttccgactgatggacgcgtactggcaatgcgcgacgcgattcgcaagggacgacggacaaagttggggacgaaaatgacaaagcggagacagatgagagacaatggagcagcaggggtagaggaacaaagaggaagacaatgcgaaagagaggggaaaagatggagagagacagacatgcttattcttctgattcgataaacctttgctttcatctgattgcttatttatcacttttatcattggcaagataaacgatgaatgtacaaacaaatggaaaacaaaacaaaaaaatatccaaaatatttggaacgttaacggatgaatgtgaaatacgctttttgtctgctcttatccgatgttcagcagcgtttgccgtaccgccccctgcaccagtttctccgcgtattgttcgtccaatttgaaatacgtttgcactcggatgtatcggtcgtggacagtcagtctaaaccggcggattggcaaaaatgccgaaacagaggccaacaaactttggactgcgcagcacaacgccacgcattgagggcaacagaaggccaatttggagaatttcggtcagcaatttctcgagaaattccgccccaaataagccgaggtcggcgaagctgctcttcaaatggaattcgtgttggaagtgccggggcgaaaagccgatggtcctcccccctcccccagttcatcctcttccattctccttcatcctttcctcccctccccctctcccctccgtcttctcattcatttgcccacctggtcaacatcgcgcacattcgtgctcaccaatttgaagtccaaattctcaacggtggcatttccgaggatttgacttcgctaaaaacatttgaatgaatggtgccgaagattgcgttggtccgactgacttcgatccaaaggttcacattggaggtcattgtcgtttccgagcgcagcaccaattccctccgttgggtcgcattttcgggtcggacgaactgaacgcggcaaataaattcacagaacggcacattttcggcatttgccatcgcttttttactcaccanatccattttcccgtgaagtcggaagcgtgccctcccccctcataaaaccataatgggcgcctttttggcgctgaactgaatttcgacctgaac

SEQ ID NO: 6925 - DNA, 2053 bp, Heterodera glycines
tttcgcaaattcaaaaatagttcaagtgattagcaaactgcttcctgacggccggggaattgttggccgagagagcccaaatattcgccgatgcaaaagcccgaggagcaagtcgtaagcagaacatccttcagttgtggcgatgactgagaaaatgagggggagggcaattagggcttaattaccgtaagagaaggagggatacggtagccaattagggggaaattacttcagggccaaccaccacgtccatatatttttgtttgaatgcgtggtaaagcatcgaattggcgacaaaatcagtcccaaaaaactcggccataaaaacgcctaaaattgaaaattgtgaagaataaatgttttttttcattgccctgcgcttgcggaatgataacattcggaggggcaaatggcgtttccccgaggccatcgtacgaaatttcgccgtgcgatttcatcagaactgtccccttgaaatggcaatgacttcattggcaccaaattaccgtatttacggtattagaaccaccgggggttttatttttaacctcccctcaaaaggggcgttgtaattcagggggggggggttcaaataccgtaaatacggtaatagtattttctctccttccctgcccgccctctctctctctactctctcatctcttctttctttctctctgctctccatcttcgcccctctctctccctctgtctttacctgactaacgaaagggtcgtcgatcagtgaaaagtcgagcaccaaatttctgtccctcagctgagagacaaagttgagcagtgtgaaattgcgtggcgcttgcagtttttttgatctgtaatttatttatttttttaaataaaattaaaagtcttttggcacatttttatctccgaatttttgctttggtcggggctaattccgaagtttctgccgattaagtccaaattgtcctcattgatgcgcaccttacaaattagggacgaatgttcgaaaattggggtcctttcgaattctttctgttgctcactttcagtggcatcgtcgccaaaacggcattcatatcgccgtttattacgccctcaatcatttggcaaattcgctgttccaccgtcggcttaaaacaaaaataaatgaaaaaagaaaaaaaatgaaaaaaatgaaaaatcactttaaaatgggcgatgagaaaggctttgaagacgtctgaattgaaattgaaaataaagaagcatccgacggaagaaaaaggtcacttatgaaaaagtcggtgatcactccgctgttccgtacgctcaaatcgacgtaaccaaccgcggcacggcaaaaaatcatttgcacctgaggcgctccgatcgcgcttcttcactatgggcagaatgcaaaatgtaaaaaattcaaaatcaccacttgcaaaatgagtgctaatccgttgctaattgtccaattagcagcaatcacttacctaagcattcggacagaaattgtgaggccgagatggccgagcaaagcttcgaattcgcctgaagacaaagggccattcaatggtttgatcgttcgttggttagttcaccttggattggcactgtcggcagaagaagggcaccgttgagacgggcgtcgaaattgccattcgatcagaaaaagacaaattggcacaatgaaattgaaaaatgaattatcagtcacctcaaatgcattttggacattcgccacgtgaaagtgtcgggagtgagaaggtccaaagtgtactccaccgggggccaatactttgacacgtaagcattgaaaatggacaccaaaaaagggggggaaagtttgccaagtgaatttgcaataattacttggcccgcgtcgatggactcagtgatggttggcaaactgaaaggacatttgcaaaaattgccaaagagtggtttcggcacctgattttgagtatttcatcgttgaccactttcatgccaatttcgcgcagataagccaaccccgtgggcatcaaacggacaaaaatgcccacagtccccgcattggtgttctgctaaaatgccaaaatag

SEQ ID NO: 6926 - DNA, 870 bp, Heterodera glycines
  unsure (1)..(870): unsure at all n locations
ggggcggagagaagcggcggcggaagagcggacagagcgaaaaggaaaagcaaaggcaaaagcaaagggacggcggaaagggcggggaagggcatccgatcgaagctcagcagaaaggccgggaaagcattggctgatcaaatggacagaacaaattacgaatggcagcgcaaggattggcgggggacggagcggagaaagcgccgatttttgagtttgggctggcgcaaaagatggcagaccaaccatcacaagcagcggcagtagcagagaaatcccctctccccgcagcttttgtttggcggggcagaacccgttcctccgcttctcccctccggcgaatccctccgctggacggagcagcgatcatcgacttcacccaacgcgatcctttgaatggagcagggggagggaggatcacgcagcaaagcacctgctggtgaaggggaggagcaaaaggtggggaaaatgggggaaaagagaggggataaatgggggggggggtgaatggtccacccaatccgaagggacggacgggcgatgatccaacggcgaagaaagtgtccattccgtggtgaaacgaccgacgcaatcccagcgcagcactctcttcttaagcccagcagattttcctcaatcgccacaattttccaacataaaaaggggggggggaacaaacgaggccaaaataaaggaaatgagcagagggacaaagaataattattgaccaattagaatttggcaaatgggcggcgggtaatgagaatgaaattaatgaaaagagattaattgccgcgggaggggggagaataacaaacaaatagaaagaagaattattattattattacaaaantatagcatccaaaaat

SEQ ID NO: 6927 - DNA, 3109 bp, Heterodera glycines
ttctcctcgatcggcataatataacatccccgcttgggcttatggctcacactacagagttggcaataagtctctccacattcatggtccttcttcgggttaaatcgataagtcttgtcacagataacgcaacgcctccataatttacaagtctgatgtccctgatgataggtgtagcattcccaattataaaagtaacgtcgacacttcgggcattcaatcttcactccactctccttttgacacggcattcctccagctctattgcagtaataacatctcgcccggcaatccatcgtatgataaacatcctgatcgtaaaaacattcacattcaacgcagaacttcctcccacggttgaaaaagcaaacatatttctttaatccatcccagtgaccattctccaaaaatatcggcactacattttcgcgtcccatagggcccttccacaaaacacggattgatttccgtggatcagctgacttttcaaatgccaccactcggtactttccggggtaaatctcatcctgaaaaatccattaatttatcactttttcatttaacccaccaaataattctgaaccctcgataagtgctccactccatagctatattcgttaatatcaattccacaattacgtaaaagctcagtagctgcgtccctctgtctcataatattgttcataaatcgattaaatgcaaaacggtccataattaaataattcatcgacgacgccagtgcgtaaaacaaacaaaatttatccacattcgaaatccttaataaataattataattttttctttttttttctattttcctttttttcttttttttttctcaaaaaacttaccttatccgttggtgttccttaaatccgaaatcaaatttatgtacattcctcggcccgtctccactgggcagtgtgacgcaagtaattttcatcataataggctccgacaacaaaagcgttttcttattttcatctccgtccccgctctgccccaacttattaatctcctgcataataacatccgcattgttctgcgggtacgccctgtacggtacccaaaccggggaagcaagcccggcacccgttattgccactccaaacatccgcactttccgcttcatcctttcttccgtagtcttaaaagccgccttaatcattgtgtcgattgcgtccctcatcgcttcgtcagggcgtctcacatccgaattgatccgaaattccgtaatgttcttcgtaaatccaaatttttcgcaaatcgtcgaccattcgtcaattaatttataattttccatttcttcagtaaaattgttcctgaaaaattattgattaaaattgtaataattgtatcttatatattattggaaatttgtttttaattgcttaccctatagctcgaaaatcccattttttggtcgacggcccgcctttttgcaaagtcccattgcgttttgaagtcattttaattaaatttaatatttttaaataagagcccacaatttttattttagcaaaatccaacttttggttgaactgaatggagaagtgaatttgggcggcttttatagtggccgcagaatggctcgtgtcagctgacacctggcatgtgactgtttttcattgacattgaggaatatttcgttgacaaatgttatattttcgatgcaatggcagaaagtcacgtgtctattgcgaaatatgcaacaaaaaaaagtcacgtgtagattgcgaaatcggcagggaaaatgcaaaataaaaaaatttgattgacaggtgacctaatttggtcccatattgcgaaatcgtaaagtcacgtgcagattgcgaaataatggaagaaaaataaaagaccatcaattatttcagaaaaattcaatttcattaatttaaatgaatttttatttattcaactattgtacaattaatattcctatatcttagaattaattcgaatttcattgacaattttggtacttatcgattttttttcacgactcggaatcgcggcacatcgacggagcggatgagagtggcggtgtcattatcgattaattttatcgattaatttgtgggcggcgacatcgatgtggagggtagggcggtgtcattatcgattaatttgagcggcggcagcatcggcggggagggatgggttgggcaaaaaaaaaaccgcacggttttgggaaatcggatttgggtgggcggcaacttcaaagtggtccaatagattttggttctgggcgggaactttaaagtggtccaataggtttgggttctgggcggcaacatcaaagggatgcacccctcccataggcacgggtccacgggcggcaacatcaaagggcagcacccctcccataggcacgggtccctaggcggcaacatcaaagggctgcacccctcccataggcacgggtccctgggcggcaacatcaaagggctgcacccctcccataggcacgggattgtgcggtaaacacccgctcggaacccgctcgcttttggtactctatactactgatgagagacgaaagataaaaataatttattatttttaaacgaaaaaattgtaagttaatcatttgaagcaattttgcatattttttgacctcaaaatgcgattttttgaatttgatgttctgattttgtaaaaaatttgacagatcaatggataaattggaacagaataacccttgctttttctcacaacttttgtttttaattaggcatattttcattttgttctctgcaattttttcctaattaatttacttaattaaatatacatttatgattttttccattacctaacatgatcctcttatttccttttcagtttttatttataaacaaaaactttacgaataaaaggctgacccataaaattaaatgaattttacgctttattctaatccaaaattataaattatctgtttcattaatattaatataatttattcaacctatgtacacaccattttctacaatgtttctttgtattgatttggatcaattttttacgccgaggggcaaagcgatgaataaatgaaaaaaatacggaaggatgggaacaacaaaacattacactcttctgacaattg

SEQ ID NO: 6928 - DNA, 2717 bp, Heterodera glycines
ctctcacacaatttcgacaagtttcgaactcaacgaacccaaattcgaacaaaagcattattaaaaataaatttgtttttctcacctccaagtcgaaaaggagagcttgggcatacgcaaagaaaacattgcgcaattcggagatgggaatttgcaaagatggacgaataaggccagggatattgtactttttggctaattagggaattgaataattaataaattaaatttaaaaataaatccaccggcgtaatttttatagtttcacattacccgatggtatttgaatatattcaattttcggctctgttccagtttacgcgtccaatcaatatttacgcgtccaatgagtgaccatcctcacttttttaaatcataacttttttattacttggtaatccaaaattcttggtattaatcgaaagcttaaagtttagcgtatttattaatacaagaaaaaaacaaatacttacatatattaagaaaaaatttacaatgagaaacccgaaattcataacttttcgcatatattcaagcatagttttttgtcggttgcttttattccagaattttgctatacaaaaacttccccaaattttaagctttcgattagagcacaattttctcccactttttttctatccaaaaatacaaaaatatctttgtttattaatacgtttaggtaatttatcgtacattgcatctatttttcaaaatatatttgtttacgtttgcatttagtcggatcaatttttttttaccgatggcaaagcgatgaaaaaatgcataaaaacagggggggggaaggagcacaacgaaacatttgcatgtttttttttgctacaaatttcctcaaaataatcacaaagcccaactgaacataaagttttgctgattttgtgccgtggtttttatttcttgccaattttgaaattgccaataatttcaccgcatttaaatagataattaaacgaatgatggaattgcttatcatgtcccaatcagtgcttgatcggatgaagcatttgttgagcacgggtgaggacgcggatgtttattttttggtgggcgacggagacgcaaaagaggcgagtcttcaaattaaaaatttaatttattaattataaattgggtaatttagtgaatggtaatttttgttgtgttttttaaaatttaatcctcttaagcttgtgccagcccataagctcattttgaaacacgcttccgacgtttttgaggcgatgttccgttttgatgccaaaaaggaaaaagcggaattcggtaaaaacattactgaatgacatttacaatttagtctctgcaaattaccctaattaaattttcaattagccgccgctaattacattaataattttcaattagcttctgctgattgtcccgtggaggtccccgacgttgaagcagcagcattcaaagtgatgttgagcttcatctatacggaagatttgagtgatttgaatggagacaatgcaatggcagtgctttacgccggtggatttaatttttaatttaatttattaattgttgaattccctaattagccaaaaagtacaatatccctggccttattcgtccatctttgcaaattcccatctccgaattgcgcaatgttttctttgcgtatgcccaagctctccttttcgacttggaggtgagaaaaacaaatttatttttaataatgcttttgttcgaattcgggtttgttgagttcgaaacttgtcgaaattgtgtgagattcatgatccaagtgtaagcaatttttaaggatttttccatcaaatgtttgcgttacatttgtcaaaatgcggctgacttgttcggatcagatgaatttttgcaaattgatcagaaaatattgtgcaatcttctcgagagtgatcgtttgttactcaacgatgaatttgaaatttggaaaactgtaatttcaatttaattttctattttcattttataatttcgatatttttttctatctaggcactccgttggcgcgatgagaaatgtcgtcagaatgtcgttgaatgctcctcgggacatcgtcgttcagtacaatctccagcaaagttcacaattcgttatattaatatacatgatgaggaagatgtaaagtgattcggtcagatttatgaagtcaaataccgaaatatgcacactttcactggttgtacaaggcgttttgcactagtatcgtctgccggttgcggagggaagctcagcagcgagcagttcaacatgacgagatacccggcgagtgcacatcaatcagcgaccggtggtgctgaacccgttgaagccgttccattgccaacgccggctgtggtggcgactatccgtggtcgtcaacacgttcatggacccggaggatgggccagcctcacgtctcgccctttcggcacatgccattggcaacctcagcaactttttggtgccattgcaaggcgacaaccggatggagggtgtaccgttggagaacggcgagtacagcttccggctgcacgcccgggaccggatgggccaggtgggcatcggctttttgaataccgtttttatatgcgagagttggaaaatgacgagaattttatttgtttttcattacccctgacgtgaaatgtaggtgtcataaagagttaattaattgcgatttttttctctaaaggaatagttaaataataattagtaaattctaaattaaattt

SEQ ID NO: 6929 - DNA, 2136 bp, Heterodera glycines
  unsure (1)..(2136): unsure at all n locations
tctgagagccctgattataaccccattttgaggagggttgaccaatagaatcccatcctcgaatattaccccccccccccaaaatttatttttnaattactaggtgcctatctaggtgggattttgatgttagaacaacttgggaaattgcaaatttaaccaaaacattttttttaaataaataacaatcaaatattataaaagttcaacatcgattgcttcgtcactttcgtcttcgcctaagtcgatttcttccaccattttcaacacttcttcttcctgtcggcgttgcttcaaaagagcaagcccgtttggaattgctccgtgcggctaaaaataaaattttcagaaaacaaattaagttagtacgcaacttaaaaacatggattttgaggtttccagctgatgatgttgccttttcgccatggaccatccattcgttgtacagcttccgaattgcttctttgaagggcgcgttccaaccagggctgcacgcaattgcggattgcggattgcggattacggaaattgcgggctttttggacccccgtaattgcggattgcgggttgcggatttttgggatttatccgcaattttgatccgtaatttgactattggattatttttcgagacgatttcttgtaagattattttttataaaatgaatttttttctatttttatttaaagaaaatatgtacatttgtttaaattcttatttctttagcaatttaaaaatgtcaaacttaaatcctggtaattggtggtattattttgagcgtcaaggcaaagcaactgctaaatgtaacccccagtccatctgccttggagacaagacaaaaagccgaagttgaagtaaatgaatatttgctggatccaaaaattaaatccagggccgatccatcattatactgggaagtcaattcacaaaaatggccaatgattggtgacgttgtacggaaatttctttctccacctgcaacaagttcagaaagtgagaggcttttctcaacggccggtctaatttcagatgacttgcgaaagagtttattaccagaaaatcttgcaaaacttttgtttcttcatcacaatttgcttttaaccggtttctcaattgaatgattttgcttttataaatttgctttttaatatgcttttaaattgctttaaaagatttataggattttttaaaataaaatttaaaattattaaaaaatttttttttttaattgcggattacggaaattacgaaaattgcggggtttttggacacccgtaattgcggattgcggatttccgcaactgagaaaatcgccgtaattgcggattgcggttttccgtaattgtaaatccacttgcgtgcagccctggtgggcggtgacccggataataattaatgctgaatttcttctgttttcttacaaatttttttcaaaatgccaatataaatgtatttttgggtatcactaaaattatctacctcctatgcattttttcgtttgtcgaactaaatttccggcaaagtcaatcaacacgtgccaaaatacaagattggccaacaatgagaaatctataaatattcgtcaattcgtcggactttaaaaagaattggtaatttttggaattctttgtaaaaaaaatttatcatatttttccgcaaagaatgttacacttaacgcgggaaacagccaaattgagctctgttactttcttgatcaaaataaaacatttaattttgtcactaattttgtaattttttgaggtaaatattcccaataagtttagccagaattacgatttatcccagtttggtattgttgaaaattatcgcttcaatttaattgtgatgtcagacagtgtgactgcctactttttattattcacatttgcctataatggacaatttttaattatttaacatttgcctgtaatgagcaagttttagttataatttattccattattagtggtgtgagcatttatgactagtggccgtttcaaagtatgagaagaaattaaatgcttggttaatcaaaaaattctaaaagtaataaacataaaatttcgagaaatttttacaaagtctaaatattttaataagtaaggggtcatatatttttgatataaatttatttt

SEQ ID NO: 6930 - DNA, 993 bp, Heterodera glycines
gcctaaaataaccgtcaataatcaaaattttggggttgacctgaatgtatttggtggtgcccctcgggacaaccgcggagtgaaaggccaagcgtcgaagcgttttctttgcgtcctcgctaatatggcagcggaaactgtcccaaattaagagactggcgccgaaatggaaattcccgaaaatcttaatattttggtcataggaacatacacggactgatagaattggtcgggatttctgtgggatctggaatcggaatcccgttttcccaaaatctccgggattcacctggtcgatgttcggtcgggatcccgacttgggatctctctgacgccagcagttgtccggtctctgatatgaaccagccttgcttcatcaaatggtacaaaattttatgccttctttccgttttaatcttccttttttaaatttttgttgagaatctccaaaaaaaataagaaaaaattttgcagctattctatataatataatatttattattttccattttcgtgcaaaaattgtaaaattatcgcttctaaatttcattggcatacgcatgacaaaagggcaacatgccataagccaatgttttactgatgccacagtgattatatttctattactaattcccagagaaaattcaacaaaaaaaggttggcaaagtgttggaaaaatggcaagctatggcccactttcgataaaatgccaaatttggagaaatttcaacgcaatcgcgcaatgacaatggcaaaagtcatgctgtcaaagccgcacgcatatggccctttttggctataaatagatatcaattactattgctaaatgagtggatttaaattaacaatgtttattttgcatttttagttgtcaaaaatatggtcttatttgttattaaacatttgcaggaaggggtatttttctccagaaccgaaagcccaaggggcctatggggctttcaaaatgggttttttacctcctcattctaagtc

SEQ ID NO: 6931 - DNA, 1364 bp, Heterodera glycines
tttcatcggtttgttgggttttaatttaaaacatttatttttattctttaatgagattagtcagtttcattaaagatcgttaaaattaaaaaaattaaaacaaaaccaagatttttgtgtaagcttttttaaatatcaaatttaaaaatatataaaaagaattttcagagtacggactataagaacactttgtttgtcggcggttccggcattttgaacggcgcgtgtgatgtgaacaatgacaaactgaaatatttgatgacattgaagaatggcgtgaccatcaaaaatgccattcttgacacgcccggtttgggcatttactgcgagggcaattgtgtgctggaaaatatttagtaaaaatttaaaaaattccttactattttctttaaattcaaattatttttttaataattctagctacaagcgattgtgttaccatgctactgggttcgggtataagagcaccagcacttcatacacttaccaagtgattggcggtgctggccaaggttcacctgacaaagtatgacaaatcagaaccaattagcaataaattcaaaaataattttgatagatttaattcataataatggtttccttgttttaagtatttcacccaatcgggcaaaggcactaccatcatcaagaatttttgcgctgaaggtttaaccccctctctctctaaaaataaatcgaaaaaatttaaataattcatgttttaatttcattacaccgttcaaaacgtctaattattttttaaaaacatttttcgttttaattaattaaggcaaatacggcaaattgtggtgttcatgcgggaattgtccgttccaaacggctcgtaccgtacaaatttccaacaccgtccttaaggggcccggactttcggttgtctgtgagttgaaaatcttatgaaaaatatttattttaaaaaaaatagaaaatgctaataaattcatttttagcgcttaattccaactacggtgacaaaatgtcactttcgggactgactttgcatggccaaaaatcagcgagcacaaaaacgtcatacatttgccaagtaaaacattcaaaaatgttaattatttaattaaacgagcaaaactcaaccgtatcttcccggccaaaatacgacactagcagcagatcacttatcaaaattttcaattcgaaaaatctcttgatttcttcaataagaaaataaccgcacttttttgatttgggtttccgaatttttttattactatatttcccacaatatttcatatttttgcactaattaaattatataaagaattcaaactttaggagtacaaaggcctcacttatatggcagccatgagtcctcaagcgaattatga

SEQ ID NO: 6932 - DNA, 700 bp, Heterodera glycines
tcaaaaatcaataaatttttcaatttaaggttgaaaattttaaaaatatgattatatgtcgtgttttccttgtgtggcatcctaatgatctagaagctggcttgatatagcaaaatacaatattcaaggccaaaaaattcttgatttatgtaattatttaataatcatgaaaacaaacaagggttaaatttattgcacgtaaattaaacttaattaaaaaattgaaaccattaaactttagacatacaaaggcctcacttacatggcatccatgactcctcaatcaagttttacgccaaccgaatcgggcagtggcacatgctcgtacagtacctcggcaattacaatttccagctaatttggggaaataaaaagaattgatggaagaaaaattgagtgaggagagtaaattgaggtgttaaatgattttaattagcaataattcaaaaaattaattgtcggacgaatataacaaaagataattttgctattattaaaagttcaatgatcaactcgatggtatttatttaattcataagtaggaacacggatttatattggtgctgggacgttagtcaaaaaccatcaaaatgggcgttagtcaaaaaaccatcaagagaataatttttgacagaaaattattcataattttgtctaaaatgtcaaattttataatatagatattttttgatagccctaa

SEQ ID NO: 6933 - DNA, 5027 bp, Heterodera glycines
ttcagaaccctttctgaaaaatatttaagaattaattcttttaaaaataaataaaaacgaaagactcagattttcgaaaatttttttgagccagctagctcggcgctcatttcagtgtaagttagtcctttaccggggagtatccctgcaaagtttggtacgcttctgctcaattagcaaaaaatatgagtgatcgaattttcactaaaaaagttaagcctacattttttggcatatttaaaaagcaattaaaaaatttttaaaatttaataattttcctgcaccgaaggtactcactcggcctcttcgcggcctcgtggtgggccttcgcccccccccccgttgaatttgttctttttagctttgaaaatttcattttcttattattttacaacaattgctatccttaaatatttcatcctccctttcccatttttgttttgctcattaattggaaaagaaaatgttatttaaaacaaatttatcaagcaaatacttttagaaccatttgttgtaatatcgaacaaaaatgtataaagcgatgttgcgttaaaggaggagtgacttacaaatccatttaccaagcaagagttatcaactaataagtagtttgtttttgatgagaggcgttacgcacaaaataggcaatcgtcatttgttcaagtgatggacgagacaaataaattttgaaccgagaacagaacaaattatagactcgagcatcataaattacaattggaagaaatatcaaaacccaaaggctgtcagaatcatcaaaaaatatcaaaattaattttgtctgacaccccaaaaagacattaaaaagactaacaatgcatggggaagaaattcattaaaatattgcagcggctttggaaagaataatgtccgaaattttctttggagtattataattaaatcgactggtcgaatagggagaaacagagttgagctgtgttgtttaggaaaaacataggacggaaaggaacatacgcaacagcaaaagataaattgtgagaataaggctatatatgcatatttatctgttttataattcccagaaagcaaatgaaaataggcaaaaatagcgtcgaaaaagctaataaaaagggataagttataatctataaaatagtcagtgaccacaaaggccatagggactacaaacaaagggaacggaaaataaaatcatttgtcattactgagattacacggtccttttttaaggtcgagggtgaagcgcaattgcttttattgtgaaagatcgcatcgatgacacactaagacatcttaaaggacgataaattttatgagttatcatgtagtcctattccttctcaattacctgggcatttgttggctcgggagggtggaattccttcccgttgatttcgttcccattgatctgtgggtcgtccggcggactcggatgctgcttcaaaaggatgcgttcatcgcgttcttcctcatttttcgagaagatagtcagcgatgccatatgggaaaattgatcgttggcagaaataaccttcaagagaagatttgtattaaaagatatggaatgaaaagctgtaattgcctgtccagggaggcaaaaggtcccttctttgtcggcactgccactttcgtcgagttctttcgagaggttcgtcgaattacgcgggttcgcctgagaatttgctgtcatttcaccgtctttctgttgttgcttttggaacttatgcaggtatttcgcgttaatgtccttaaaattacaacagttgttttcaaatgctttttgcatttcgctcacctgaaccaaagccgaggcgtccctttgggggagaagcggattagaagctgaaatcggcaaagacggagttgtcgaagggacaacagaactttccccgttcacctcaaacatttgtttttgttgaataaaatcaattttcacttccctaacatttgtcattccattattctgcgcatttggcgggccattagcttcttggcgagtgcgggcgagaagttctttgatgtgtcgacggcgttcctccttttcttcctggttcgggatgacgatgagcacgggcggtgtggtcgacttcggaggcgttattatgggctcattttccgtcaatggaacgtgctcatacatcgaaaccttgagtagtttaaatgaattttttccaaatgaatggaatttattaaaacttcgccaatggaggaactctcatgggcagtgtaaaaggatgtgttggtggcagttagagtcggagaattctgcttctcctgttgcacttcatttatgatattttggtcagcagtcaacattccctcgttggattgcacttcatttatgatattttggtcagcagtcaacattccctcgttggattgcacttcatttatgatattttgttccgtagtcaacattccctcgttggttttattggtggcagttagagtcggagaattctgcttctcctgctgcacttcttttgtgatattttggccagcagtcaacattccttcgttggtttgaatcattccttggttggccatttttcgctgttttttgatggaattcggcgtttgctttgtcggttgagccggtggcttgttgaaattgttctttctgttgggtgttgtccctattccgtttcccaaagctccaacaacgctgcgagtcattatagacgatcctccagctcttccgtccagcgataatgggttttgaaaacgcgaagttgtcggtgcggtattcgatggtccctaaacagtagaggctcaaaaagtgctgaaactttgatgggtcctttttgaagctccaaatagttgatttacatgactgaaatatcccgtcgtttggccgcttaccccccccccccttttttcatgtgaatggtgaatcactgtgttttgacctgtgcaagtgatggggtcgaaccacgcatgcccatgggagagtttctcgagccaccgctgtctcgttgctgctgttgaatgttctccaaaaaggccaacttgcgtggagtgctgctaccgaacgcataaacaggtttcttcgcctgattcaacgtgacaatacgcgaagagccatgatgggtacgtttgagaagttcctgaagaaaataaagattaaaatttttgtttttcccttgtgaaaacgcaccattttccttgcattcagctgttccatttgtgcacaacgccggtccaacaccgccttctgtctctccaactcacgctgttgtttcattctcgcccggtccctcaactcggcttctttcaactgagccgcacgttccattcgctcatgttgctcacggatttttacttcacgcctaaacataacaatatgaatatgtctacgctaaaatcaaattttgactatcgccctaaaacttacaatttaactacaaccaaattcaacccacttggctcgaagttccctttcaacggcctccttccgcttaagcacctccaatgttttgtctcgtccaatataaagacttctggtcacgcccccgtccataattatgactgtacaagagatgaattaatttcgattttatattaattgaaaggtaaaatgatgtatggaatgaaccaattaaaaataacaatcaagaaaatatgcactttctttgttggggataaaattcgggaaaagcaacaaatatcaacaattaatcacaatgccggtcacttcctgcccgtttttcgcagtttatccttccgttttttaacctttttgggcactttctctgccctcttttctctcttttcatccttaacggtttctttcctcgccttccgcgcactcgacgactcgcccctaacccgaacatatttttgataaacagtcttcttattctttttgagctgtttgtcgtcgttttctccctcatccgaaacatcactctgttcttcgctcgactcaaatggttcttcgttgttcgtatcagaatccaacccatccaaatgttcatcattccctgaatgcttttgtttatcaaaacgtgtatatgtataataccacagaaatcctcctcttccgattttttgacatccatcgttcgtccaatagtcttttgaaacggattgttcagttcaatccctcttttctccatttcatagtcgcgttcgtaatgagtaatgttgtcgagtttgtgtggaatataagccttcatgaaaagcatatcgtcaggaagtggcccatccattcgttcattttggagaatttgttcaaatgccaaatcatcgatcagcgggtcaacaatcgcctgaagtgtaaaggtcctggatacataatcattcacaaaaatagttaatttgtaaacaacacctcaaaaagacgtttcattccgagtacagcggcgtctttgctcttgaaaaaacgggtgacgtttccaatgtccatcctgagaaactccaacgagtgggggtgatcatgttcgacggactgagaaacatcaataataacaagccgttggttgtggagaagcatattgtattcggacaaatctaagttccacaaaaatgctaatgcaaaagaaaagtgcaatgaccagcatggacaaggtgacatgttctgtacataacacgcataattttgacacagtccaagtacagcttgtcaaccatgtccggacacagttcttctactgcgttcttcaacaaaggagccgcacatccgtcttcaccaatgaattccattacaagaacatttccctttaaaggatcatttcgacctaattttaataattcgttaggaccttcaaaagaacgggttttggcactggcagtccgacaagaaacattcgctgcaaatttctgacttccttttcagcccaaactgccaccattttgcgagggttgcgacgacaataaccagttcgatagctaaataatcattttgtcataaaattgagattgaatgtaaatggctgtcataccgaaactccccggtcacatatctgtctctatctttgaaggtcaaaatgctggttttatatacttttactgcccaactcccgcttttc

SEQ ID NO: 6934 - DNA, 1336 bp, Heterodera glycines
  unsure (1)..(1336): unsure at all n locations
gaaaagagtgaatcaaaggttctcagcgctaagagtcaacttcaatgtgacatttcactcgaacaattcgacgaaggatttggccaacttttggattgttcttctctctccaaaaagatgattaaggtgaaaaaattcaaattttactntaagataaactcttaatattttatttttgcacagaaaacaaaggaagatgacaattgcaaaaaattactgtgtgctttgcattgtcggtacaattgctttggttatttgaagaaaattgttgtgctttttgaacgtgtttgtctaaaatacgaacaaaggaagttggagccgtcctttctttttgaactttgtgttgagtctgttctgccgacaaagaaccaacaacagattttgtcttgtgagtgccattggcaaatattaaaacaataaatcttctgtttcagctctcagtttacgccaactttgtcttctcaattgcttggtcaagttggaatcatcggggtataaacaacgcatcgatttcacttaccaagaaatcgcaaaaggtgtctcatattattttttgtattagtattttattatttaaaaaatttttcagggtatattaaattcacaaatgactatgagaaatcgatgcgagtgtgcagttttgtgctgtatagagacttggacgaattggccgctagtggcgcactgagtttggcgaagggatcggattttggacaaatccaattcaagtgagaaatgttggcaattgtgaagatcattggtcccaaaattttttaatttaatttttttatcttaaaattttttaacacttttctgggggtgttttgaggagctgagcacgaatccggcctccatttcgaccaattccgaatccctaacccgaactcgaacatttttcgagaattaaattttaaaatttcttttaaaacatggttcttagtgttttcggggttgctgatcacgaatctgccattcattttgaccaatttcgaataccggacccgaactcgaacaaaaagtcggaaattcaaaattatcaaaattcatttttatgttcgtatctttacagaatgaccattttttggatttgaaatggtttttatctaaattaacaacaccgaaaacgttaaaagcaatgttttaagagaaatttgtaaaaaaatataaaatttaatttttgaaaaatgttggagtttgggtagggattcggaattggttgaaatggagcccggattcgtgctcagcacctccaaacacccctagaaaagtttttaaaaatttttcaaaaaaaaaaattaattaaaaaatttcgggaccaataatcttcacaattgcc

SEQ ID NO: 6935 - DNA, 4659 bp, Heterodera glycines
ctcattatgtgccgttgtccacaatttcgcacatttacataaacggaggcattgagctgtattcggtgggcgatggatgaaaagcattcaaatctttgatgttaattttggattttcatttcaatttttgcatgctactgaatgttgccaggtgtcctgggagggtcggacatattctgttccgtacgctgccgacattcctggcaatttctacccgggccgacgcctttacgtgtcgggagtgttcaaaaaacgggccaaacagttcacactcgacctttgtaaatgccaatttggcctttttattgcaggaaatgaatttaaaatatttttgaggtgccgatgccaacattgcgcttcgtttctcgccaaaaatcaaagcgccaaaggcattttaatttgacacaatttcatttgtttgagattttaatgcattgttttttaactgtgtgcagaaagtgacttgcaactcgcgggcagaccaacaaaagtgggagggcgaagaacaattggagcaggaggaggacttccctttcaaacggagcaaagcgttcgatttgctcgtttactgtgaggattcgaaggtgggcaattggggaggaacagcagcatatgatggattgggaagggatcggcggatgggatggataaaaaggacaaaaagagagggatgggtgggggaggggggggggggcgtcggatgtccgtccgtttgattcgtttgattgatggacccctcgcccatttcagttcatcatttatgtggatgattgtctggtcggaaaatacacacacaggtgggtggagaggagatttttcgtgaaaaaacaaacaaacaaatattagtaaatgaatttttaaggataaatccacggaccatcgacaggtcaatcactctcaaatcagtcgttaattatgccatggaattgtctcaaaatataatgtgtccatttcagactttgtatcgaaggtgacattgtcttgcatggtgtccatttgaaatgatttgaaacacttacttaattaatacttaattaatccaatagccataaatcactcacacttttccgccacatattatttgtatgtatttgtatgcaaaaagtatgggtttggaagggatatttcacttacatttctaaatattcgcctcttatcatattcgtattttttcggattacaaaagataattatcctctgctcatcattttacaattttcatttctatatttgttttgttatttttcatttttacatatattttatttccccttggcttttggccgtgaaaatgttactaatacaaacacaagtcatgtaccaaaatatattcttcttattgcaacttttttgggtttttaaacttaccatatttacagtaaattgagaatacaaataaatgaaagttgaagtttgaaatgatcgattgttggagcatgacggagacggactgaattttgaccttgcaaaatttgcaatttttgctgcggagtttgggtggtgcaatgacgggttaagaaaaagggcgggtgaaaagggagaggtaactgaacgaaagtgccctcaaatgtgcaatttatggagatgaatgggttggcgggtggcccttctctgggtggtctttgcgagttaacatttctgccttttcctggtcccctgcggggtcattttccgccattccgtccaatccgtcgcattcattcggtggcagccgttttattggcgtagtctttggtctccgccccttccattgggtggccctgccatccatccgactgaataaacaacaaaacgtcgtccaattgataggccgcctccactctttctttagccaggcgctgataactttttattatcatttaaaatatgtatcaaacattttgtcatctcataaatttttcacaaaatacataaaaaaaataattaattaaccgatttgttttatttttgtaattatatttatgcgttgccttggagttgtaaatatttaggtaatatttccacaattttccatttctcccttcctgcaaaagaaatgtcgaaagaatttcgtcgattcgatgatgtacaacttcgacttcgttcatttgatgaacgaatgtccaaagtcggcaccttgggtgctgctttattattttaaaattaatttcgaattttaattcccttctttgttaagatgtacctcccgcacaaattgtctcctccactgtccgtccaatctctgccaaatcgacaaatggcgacagtgccgttttggtgccctccacaacgatggcaccaccgtttgtctccagcacagccgcaacatccgttgagagacactcggcggaatcatcggaagaagaggagacggacaaacgtcacagaaagggcaaaacgccattgagaggtacggacttccaagccaattaaatcacaaattgcgaaaaagcaatttcaggcaatggcggactgagcatcagtgccgtttgggagggagtgaagcgaatgatgggcttcaccgccgactgccataacggtttgtacatttttccaaccaaaaacgatatatatgcatttttatattataaaatgaaaatcgactgggacctgctctaggacatggagttttcctggaccaagaggccagacaattggccattttggtttttctttcgaggggctggcttctctgggttttttcctaaattgccgttctccagtaaacgccccttttctcaattgtcaggcggttacaaaaccatcggcggcgattgcatttgcccccaatttttcgagggccatgcctgcgagcgcattgtctgcgccaacaacggcacgcgcgtgcgagtggccgcgttcggcggggaggaggtgtgcaagtgcactcatccccagtacatttcgggcaaacactgcgaagtggtgcactgccaaaacggtgggaaaagctcatcatcactgggaaaagcgattttgcagtggacgtattttctctttctttgccaggggggcgccttctcaacgacggcacgtgccattgcgtggacggatggtacacgggccaattctgccaggtccgttgttcagctagggccttttgatgggttctttttattagggaaggttttcctcatttcttttccattttgtcttttccctcttttaaagccaccctttctttttcagttttacacttcctcgtggctaatcgcctttggcattccgttgttggtcatcgccgccatcgtcttttgctgtgtgatttgtcgcttggatttgtgcgcattgcgccgtccttcaccgcctccgtcaagccgtcacaatcgaagttcgagctaaatagtcaattttctttttttaacttttaattgtttccttggcttggcttaggacccaacggacgtcggagtggccaaaacggcacacaatcggcggccgcacccgcggggacgaggcggtgccgaagcggagaaaatggcagagggaatcggcaccggcgcgaacaaatgccattccgtgggccattagcgacgaatgggacggaactgacacagcaacgcaaccaccaccaacaacagcatcaaatgttcatgcaggtgaacaaaatcggatgggaatgaataatatggcaaaggacaaaaaattatagcaaaatttgctgaacgatcgtcaccaaaaccaccaacagcaacagtacgtgcttcgactggaacaagttccggtgtacaacccgcgccttttcgccaccttagaacagtcaaaaccgttggagccaccgccgccgtatgaacaggtcgaattcgaatttttctgggtccattcaaaagcgtaacagggaatcaagaaaaggggaaagcgaattgtaagggtcaaaaattcgacaaaatgtaatgttttcaaaaaatcaccgacaacgcctttcaggtgtcattttactttcagtttgccaaaaaaaacttagatgtaatgggtttaatcaaccgctgttttcttatccaattggtgttgcttatttcactccttttttaggcaattcggtgtccacaacaccaacaacaacacaaccaacaatgcccaccaatttattctcctgtacaaatgaacgaggccaacaatgaaaatggaagggagacaaatgggaacgaaatgagaaatgctgacggaatggacagagcaacacaacggcaaagtgatgacgaactccttgaacttcttcggttgaggaggcaaccgacggatggcgacggagaaagaagaggaggagggacagatggaggaccatgacaacggccaaaagcgaaggatggcacaacaacagaaaacgatggcacgggggaaataatagtccggtaacaccgtcatgactcatctttaggaagtttttgtctacctcaggattcgctgtcaatgaatgaattgctaatttttaaacatttgcatcccctcacaatttaaccttctcatacaaaaattggggggaggggatcgccggtgaaatttttcttaaatcgaaatctcaagacgatcattttttggacaaaaaaaggttgatttacatattaagaaccccttcggaaaaatttggttgaccccaacctgcattttttatatatgaactttctgctaatccaattttacaagcattgtgattgtcctttactgtctgttaaatcgatt

SEQ ID NO: 6936 - DNA, 2041 bp, Heterodera glycines
  unsure (1)..(2041): unsure at all n locations
agtgcttaaaatgccattgaacaacatcaaagtgaacagcaacaaaactcacaacgcncagctcttggccacgatagtcgtacataacattggcaaaatatttactggccgcagccaccgaaatttgcgtaccctcgcgaagttcgaaaagactgaagtgccaaagggtcagaaataaaatatgacaaaaaataattggatggggcgaactggcaaaatggccacagaaacggacgcacttgcaatatttgctcaccacccgcgtccaatactgacagtccgctgcaccgcctgccatcgtcgcgaccaattggtcgttgatcggaatgattttctctaccgttttggagcctgaattttttggagtcaataattatacatacaaaaggagagtctcagaccaaagacggacgattaagacagcagggggggcgtagcgaaaggagaggaaaatttgtgaaaaatcctggctgatttcataataaatccatcaaatttaatgagggcttactatttcgtccaaaaataactaaattatgtggtctttaaggaaaaattttgacattatgaagcccatgccgatgccattttataaaaacaacaaaacaaactgatgtaagttccgcccgttgcacgcgaatcgaccgccacaataacgccgcctttgtcttgcggtgtcttcggcttgtacacaaaggacagtgtggtagtgcccttcagaaactgcgccattggaagccgactgttcggcccaaaatgtttgcgcacaaatttttttggctaaataaacaaatataagaaagagcccgagggatttataaatgttaagaattatttaccttaatgccgagcggaggcattacaaatttgggaattgcaaggtcgtccatttgtaccaactgttttaactctttatcatgactattttcgttgtcgtgcaagtcgtgataaaacatgacggacgaggagaaatttacttaaaccaatcacacaattaaaccctaaaaaagtacgggcaggaagaatgaataaacaaacgaagcactgcaaaaaatcacacaaaaatcaaaatcatcttttatttaaaaatctttaatatggcgttatgttgtttttccgctctaaagaaagaaaagcgtctctttttgccaaaagcctttaatcttaaattcaaatcccattttaattattcttttagcgatccatgaaacgtcaaaaatcattagcacaccgacgaagatcacaaaaggtttccgtttcaacggtgctgcaaaaaccgttgaaggtttctttctctttggcactcactaagccggactcatccagctccgaaaattgttcttccgatgagccttccatttgcaagaaaaaacgacggagtcgccgggtcaaagtgttgacttttgtattattaatttcgtttgttttctttacaattttaaaacttttaagctaccagtaaagcaggttgtcattccgtcctctgtcaaaaaggagacaaaaattcaatcgcttccaaaggaaacaacaaaaagtcaaaaacccaaaaaggaaagccaaacgcagccaaaaagtcagaagaaatctcaaaaggaacatcaacaacctcaaaagaaaagtcaatcgcctcaaaaagaaagtcaaacgcctcatccgcctccgatggaggggccgtcggtctccgctttggtgccgaacactgcggactgcaaaaggcgcgttaattttggcaacgtggaagtgttcagatttgaatttgcgcaagggcacgacactgtgccggccaaaggaggcgtctctttgggtatttttaccttttactggatactccttaataattgatgttcatacgcaattcccatagccaaaaaaattttggtgaggattttattcttaattttattatttgttcccgaaaccttttacaagaattagtagccgcttttcgccaaaaaagagaataaaaattgccattttttcctgtaaattttaattttgcatttcagaagcaggggaatcccccctggctacgggcctttcc

SEQ ID NO: 6937 - DNA, 1230 bp, Heterodera glycines
aggaaaatattaacaggtcgctggattatattatctcatgaatctgtgtctttatctcttagatcaaactgtggtgctattttcggatcagcagtaagtaattagtgctgcaaaatatcaataaaacattatcctatactaaatgatcataatgttgacaaaatcaatactgatcgccgcggttagtctctgttccgtgcgccagtttacgtgcatttttatattttggaaaatcatatgattttttgagaattaataatgagtttgtaaaggcacttttaaatataccagatttatagaatttggtcaactgagaaaaaagttatggttttttaagactccttggcacggaaacgtgcgcatggaactgagtcgatccgtgatcaccggcatcgatcacgcccatgccaaatctatctttatcaaatattgatcaacggcacaatagaatgatccaaatcaatagtttacttgatccctgccaacacacagatgccgtgctgtgctgatcattaaagcagacccttccccccccggctacgggcctgctttttttacagactgtcgctgacgagtcgctccaagtggcggaaacgcgttcccagtgcggctgtcgatgtgaggggcaaaagtgcgtgccggagcagtgtgagtgtgcgctcagcggcattcggtgtcaggtggaggggcgaaatgaatccatcggagtggtgccattggcactgcccacaccattttggcaccatttgtttcatctcccaattcactgccttcaggtggactacctcgacgagtccaacccctccaactcgttcccctgctcatgttcggcctcctcctgcggcaaccccgagggccgtgttgagttggacccgctgcgcattcgcaaccacttcttgcagacactgatgcgactgaaggcggcgaagaaaatggtgccgcggcaatgggggagggaaaaactgaggatgggaaattactcaaaatcggacaaagatttagcaaaaattgacggattgtgaagctggaaaaggccgagtgaatggagacaatttttaattgtattaagggaatggacgaaagtggcgaagtgtcttccccgcaacacatccttttcaaggaggaagaggaggaggacgacaaatcggagcagggcacagagaaggagaagaaagggcgaatagtccgaacatccaaccgacaaaaaggggacggaaacagtgcaaatgg

SEQ ID NO: 6938 - DNA, 1212 bp, Heterodera glycines
gtattttcgaatgataccaaaaaatcagggtttgttggaacataaacaaagttattgtataaaaaaccgggattgtcaattgattggacgcataaaagtccattggacgcataaactgtactagagccaataaaatcaaaggtaaaacgaaccatcctcgcaacgcgggcctagcttcaggcgttgactcgggcacagaagaaatgtcaatgtcgattttgaagaaaattttttgacgatctgaaaaaattgcaatactaaataaaaacagcgattcacccaccgtcggcgaacagttcaagatgattaacgtactttcgcagttcacccagcgccattcgtgtgtaacagacgacaaccgttcggttgtagaggtcacaattatcatcatttctaagtgattcagactttacaagacaattaggttgaaaaaacgaaccgaataattaaaacagacatcaattctttttcacaaacgcttgtttaatgtatcacaataaagaaataaaatgtttactggtcagagatcacaactaaattatacaagcaaataccgtatatgtatgtaatacacgtaatttaagtaagcagattatgcgagattagtgtaaaatgcgtttcaaacatgcgataaaataaagttagaactcaaaaatgtttggctgtcaacttttttacgatgccttggaaaggataaaagatttgtgtaaattttaaatttaaaaatatagaatttttatttgtaaataaaaggccaagtttaaatcttatttaaaagatgcaaaatgcatgcacaatgggcagggttcccagatctgaggctttagcctcattttgtggttttttgataggtcagtgaggctaaattttcaaaatgaggctttgaggctttttgtggctttttgagaaattttgaagatttttgaggttttttttgaaaattcgtcagattttttataatattgattaattttgataagttggcataatgttatgtttttggccatttttgtggacaaatctgttaataaattgcattaataattacaaaatttttcccggcggcgcctatcggcaccgccggaccccccccccaccccttgctcccaaaagttttttagtaaaagcgccgcaaaaaaatcaacgatttttcacgctcatcagaattttacaaaatgcttatttcgaacaaaaaattgctcaaattgatca

SEQ ID NO: 6939 - DNA, 3839 bp, Heterodera glycines
ccccccccccccccctgggaccgtccctgagggggggggggggaatttcttaaacagcggaaaagaaaaacacttgcggtgtctatttcaattcccgtcgtatctccgatattatgtcatatcgtgtaaaattttgtttcaattcccatcatttcacgacgtctcatcgtatttaggatcatcttttataagatgggagaaaaatcgtaaatacgacgaaaaatcgtgaatatgatgtaattctgtttcaattcaatttgcatgatgtgatgtcaaaatcgcgtatctgacatcatggaaacacaatttaaatgatttttttgttttgagaatttattattataaaaaaattaaattgcttaaaattaattaataataattttttaatgaataaattatttttaatcgagttgaataaggggtaaaatactgtatattaaaaagaatatgataaataaatttgggttcaaacctactagttgcattccataatttagaatgtatttaaaaaattgttaaaatcatcaactaccaatcataaattgaaagaattcaatctctgcttatgtaggccaaattcagcaattgattcaaatttttcttctgtgttccaacgctcaatcgatgttttggccaaagagtcagcaacatttgaagcaaattccttgttttctctgttctatatattttaaccgttttgctgtcagccaatttttgcctataactctttcgccaaccgccgttgctgccagcgccgattgtcccatcttttgtggattttctccgtcccgttcggccaatttatataaatcaaaatgctattttaatacaaattttaggaatgacggataataatagattaattgttgcccaattagtttccgataaaaaaaaatatactttttggtgcccttagcccagttttaacccgtaaagacaaggagcagtgttgggaaagtattcgtaaagaagcaattgccggcgtatctccgatatgatgtcatatcgtgtaaaattttgtttaaattcccatcatttcacgacgtctcatcgtatttaggatcatcttttataagatgggagaaaaatcgtaaatacgacgaaaaatcgtgaatatgatgtaattctgtttcaattcaatttgcatgatgtgatgtcaaaaatcgcgtatccgacatcatgaaagtgaaaatcaaattgtgtaataatgtaaaattaattaaatttaaatggaaattattattattaaatatcaatgaatattatttttaattttaataaagaatacactataggtgtccaatatataaaccaccctaaaatttgagttctaaaaatttacataaacatgcaaaataggaacaaaattaacttatgtaaaatagcaattcgaaataatggtctacaaatttatgacataatttacaaagttgatgtaagtgacttttttaatcagtatcaaaatttcggttgacacaattaaaatataaatgtgtcataattagagctcgcaaaaaaaggcaccaaaaatcgcgaaaaaggcaaaaaaaggcataataaaagtcaacatagaagcctcaaaccaagtggaaaatgtgttatttatgcttaatatatcgaaacaagtgcgcagaaaaaaaggcatatgcctcaaaatgcgagctctagtcataatttagactaattgaccaaattttttaataaaattattgataattttaaagattttttgaaaatttttgtgaaaacctttgagcttctgaagaaattctcgagaaaaacacagtaataatcattcacataattaattatccttttgaattttatatcattagaaagaggagacttcactgtataaaacaaaatttttttataatttatattaaaatttaaattttttgtgaattttttaattttacatgacgggaccaaatacatgggttgcaccacggatgaatttacgatttcttcccttagtttaatcgtatatatgatgtcggatatacgatggtcggttgttaattgaaacaaaatatacgacatcggacgttttttccatgatgttacgatgatcgtatatacgacatcgggacgatgaattgaaacagaaatatacgacatcgcatgttttttattgaaacagaattacacgatgcgatgtcgtatcggagatatgacatcacatcggagatacgacgggaattgaaataggccccaggaatgtttaatggttgagaaagaaaaaacttattgtccaaaaattcgtccagagacttttcggctggcgaaattttgtcctgctgcgcctgaaaatatagcgcatcacaattttaagttaattttaaatttttaacatgaaaattgatgacagttaatgcaaattaattcatgaaacaaatatgagtaataaaaagttcttttttcaaaaataatttctttaaatcactttaaatttttcgtcgagccaagacattgaacttattataatatgcattaaatcgcttatcattcgattgaaaaagcttttattttttggtaaatggataaacataaaaaaattaaaaggtggcggcaaactacaaaattaccaattcagaacgaagttctggtacttttccgttttgggcatacaattcaaagtttcaaaatttcaacaaaagctgcgctgaagggacaattatatgccttatttttaaaacgaaatggccctcaaatttatccttattaaaaacccaaatttaattggacacattttaaaattttgagatgtaggcccaaaacgaagttcttatacttttaacctaaactacgatactttaggctttcgtgggggaatttataggggggaaacggcgggggggggggggggagacggaaatgcagtgcatcccgaattggtggtgtttttaggacgatcaccgacaggtggcccatgaaattgcggtaagcgcttgctgtcgttcgataccaagtgacaccacccaccagtggcggctttatttagaataattttttaagcctaattatgttttaattttaacagctccgaatggttaagtcttatcatccgtttcgaagtgacagtgataaaggaggaaaaaatcgatgttgattgggcagggcttttgattaattatgagtagggtcgcaatttttagtgatttaacattttttgctcaattgttttggcgaaagaagctcaaaaaacacatttctggattgaaattttggtactcgtgggttatctgcctacagatttttttctcaaaaattcatctcctaaatttatttatttttttgacaatttttgatttaaaaaattaattatctcaatactgatttggcttaatttttttactttttaaaatagattttgccattacatccttaaattttaggatttttagtgcctattttcaatttttagtgcctattttaggaattttttagagcctaaatactacctattttgacagttttatagcctaaaccccatattttcaaacaatgtacacatatttggtaattattttgtttagaaaaaattgctaaaaagtgcttttccgccagtaggacttataattttgaaaaataaaccgtaaaaattttaggtgctgaagagcaaaactctttagcattcccctggagaattaaaataattccagtaatttttgctatttaattttcttttgagtgttttatgtgtaacttgaagaggtctccaatgaaagtttgaaagttcccttgcgcccatcaaaaatccccgttcttctcctattcatataaaaaaaaaaatgatcataccataaatatcaaatcatcatacaaaagattatgag

SEQ ID NO: 6940 - DNA, 1006 bp, Heterodera glycines
taataaataaaatttgtttaaaaatcccttagattgtattttgtgagccaaaaacattggcgagattgttgggtatttgttggctcaaccgcggtcctcaatccatctgaaatatcccttccgtgtgtttaacatttattaaataaatggaataattgataaatgcttttttatataagaatagtaatatctgaattttgtttacattttggcaccagaatttaaaagatttcattttgacaatattttgtaaatattaatattttatttttaatttaatttaatttaatttcgtataaagtattatttatttatttattttattaatctccgatagactgaaataattaaaataaaaccttttttattgcaatgtttgtctgcttctcactggctttctcatcacaaacaataaaaatagtttatcttttgccaaatgcaaagcttaaccgatttcgcggggggaacttagggccccagaaatttgagcaccgagaaatttgggcatcatattaagtaaggattttctttaaattccatatattaataagaattttactcataaattggtcaaaaatcattcatattttactatatgtagccttttaaagaaaattaaaaagagaatttgttataattttgaatttttaattaatttttaaattcgaaattaattttggtttttttggcttgcacaaacgaaatagtcgggtcgcattgactcaagtgatatcggttcgtctcggtttaaaaccaaaaattaaggaaaaatagggctccaaatttcccagatcgcaatggattgatttcaccgttattttttataatgagctcacaatgtgctttcgtataatataccaaattttatcggagttatacaaatttaatcgcttccgaaattaacagccaatatcggtccaaacttacgctggtctcaagtggcagttcgggaggtgctacggactatttcgtttgtgcaagccaaaaatggaacattatttgcttt

SEQ ID NO: 6941 - DNA, 1083 bp, Heterodera glycines
atccagttttttcatgagacaattatgaaaattgaaagtctcacactttttttctgagatgtcaaactgcttagcatttgcttagaaaaaacttctcctcattaatagctttggaatgataccaagattgtccaatttggttggcaaaaaccttcaaaaatgattttcaaaaatcgttattttttaatttttgcacgaaaaataattaaaaattaatattcatgttgcacaacggactcgaacctccaccctctttccctttactatcttacaaaaaccacttcgccacagatgcaaatcttttttgaactggaagcccaaatgactcggtgtgtacaattattctcaaattgttaacctgtcgaaccttttttgatttgcgcttttcatgtgctcccttagggaaagtgactagagcatcaataacagaaaatacagaaaacaaaattattagtaagaaaaggttggtggagtgcggacagaaagatcacggggatcgcgcatcgcagattcaaattgccactgtcgcggataacggttgcactccattcctggtaagaaaatggcacaaatacaaattattttatggtatataagtgaccggtcgaagtatatgttgacaatctaattttattttaaatttaaatatcgaatgaatttaattaatgaaacaataaaatttttaagtggttattatcactgaagaaatcccttactgatgaaatcacttcagacgaattcacatgttaccaaaaaagcagacttcgattttttgttctaaagcgatttactaatgtgtggaacagtcctacaaactgtggagaattggtttgggcaacaaagcgtaccgatcagaattgccgcgggtcaaaaaaatttcgggtcggccaaaaaccatcgggtcgggattcgggtttcgggacaagaaaagtcgggtttcaggattcgggtcaattaaaatttatatatgtttaaaaatcaatagaaaatttttatcaaataaaaaaatcgataaaaaaattttccgcggcacgctttttcctaaaaaaaatttggggactaggaggtctgtctggtggtgcc

SEQ ID NO: 6942 - DNA, 3496 bp, Heterodera glycines
taatcggcaaattatgcgaaaattttattcaaatcaacaaaaaaaaacaataaatttacaaaaggtcagtatcaaaaatcggaagtttttgatcatcgtgattttgtgtttctttcttgtcggctgttcagttttcgctttcattttcctcttcgaatgtttcgttgattgccgtcccattcgccattctgtccaacccattcttctgaggctggtcacccgccggatcccaatggaaaaactaaagtaataacaattaatacgactaattgtcagcaaaggcgccaggctgattgtgagttgtccaagttaatttctccgacttgcaatacctttttcacatcagcgcccaatccgaccgtttcaatacgaatggatggacaatgtttcgcgacgaatgcctccaaatgttcggccgtctcaaacgctttttcgcaagtgaatgacccaaacaaacacaacaacagttcagagagatcgtcgcgcttaattcgcaagcaaataatcaccatggaaaggcaaaaacctccaaagtgcgacggagaaacatcacatcgttggtcagagtcgccattcgcagaaagtctctctcgaaaaccttagtaaaaatcatgaacacataatgaaaccaatttgaatttttgctaatgtctctttatttactagtaaaaattgaattgggtagctaaaaaaaatcatttttgtattagacgttctgtgaaattgtataaaatctacatttcctgcttatctcgtaaaatgctatctgcaaaacatgcaaaaaacatcagctcaccttttttttgggctcctttgtaagcgtctgcctttgttcttcgacccgacggttggccattatgctgtccaaatgtgctgacaatgatttgctgatttaaccaatattttgagtactaacaaatgtaagcatttatgcctgcattccatttattttttcttcacaaaacaattcatttgatttgccaattcgtcgtgaaatattccgtcggctaattcagtaaattttttcttttcctcgcccatcagttgctggtaaagtatttccatctcttcttgactggtctcccctttcgccgtttgctcttccccaagtccaattggcagtccggcattcagaattcgtctgtccaattcctgatcatccagcgaattgaattgctcgagcgttgacgcaatcattttggagagatattccggttcgtcgtcggaatcgaataatatttcctcatccgcccttaattttgactatgcattttcatttatgcgcatccttttttgagtctccaaggaaactaggaaaagcggcgctactttgcaaagggttccgaattttattaaaataaagggaggaagattttgaagtgccatttgttgtacgatgataaatgaccattaaaaaatgttttggcatataattaatacaaaaatatgttgagaataccaacctgactgctatttgaggattggccgtactcttatcttttttgccaccagaattctgattttgctgcgccatatactgttcaaaagtcattactttcgttttcttttgtttgtcatctgttgggtttaattcaaaagggtcatttgaaagtaactaaaatagaatgctggtcaaattattttaaaaattaactttacttcgttatgcttttcacattccttgcggtaaaaatcctctgagcattttatgtgctttttacatcgaaaacaccgaagagaacaataaaaagatgaacattgtgggcatttataaagatcgagtttttcatttgggcagaatgagcagcttttaaatgaagacgagtccatcttaaagtcttaaacaatattttgtgatcactaataaatgaatagtgcgagtatacttttgcttttgtacataatgaacggcttttagtactctttattagagcccggacgggaccggggcgccgccgggattttttccaagtcccggtcccgttcccggccatttcaaaattccgggctctactctttattgtttgtattaaatacgaatccggtctaaaaaaaataccaacaagcaaaacagcatgtttttattttatactcacgattagagaccggaattttgaaaatgccgggaccgggcccgggcttcgacaattagccgggcccgggccgcccggtcaaaaaaaaagcccgttttaccgggcgtcccgggcccagtccaaaattttggccgggcgcccgccgggcccgggcttttttcaaaatttttggaattttgattaacaaaatttaaaaaaaaactttcttttttattttagcttagaattatatcaagccatgtaaatcgacctattttgcttttcaaaaacttttttaatggcgcatttttttgaaaaaaaaattgaggtacaagggggtacggcggtgccgataggcgccgccggggaaaatttttgaaaatttgtgtgtgatttgttaacagatttacaccaaaaaatgaccaaattttgaaattttgagctaaatttttgagaaaaaaaataatatttttgtacaaggcgacgctgaggaaaaatcttgacttttaatgaaatttattaagaaaattggtaatagtacggatggtacccccctttttcgaaaaacaaaattttgaaattttttttcgttaaaagacaatattaagagggttttaagggtcggagaatccgaatctgacattaattttgacctatgtcgaaccccgaacctgaattcgagtaaaagtcgaaaatttcaattttccaattttttatttttggtctaaaaatgacttacatattcagaacaaactaaaattggacaattcactaataaaaaatcatttcaaccatttttagaccaaaaatcgtcctccgtctcgccccactacttgctccgtcttcgcatgctcgccaaggcgggcgctgcgcgcatttagaaatagatttctggcaattagaaacaagaggaatcgactgattaatattttattgcatttttgtgcgttttaaggctttggacggttcagtcccacagccattttgccacttcagtcctgggtctgtaactcaccaggaaatggtcgcccccgaaaaattctttcattataggcctagaggagtcgaatgatatatcatttatatataaattcaactacgtcagtattcttcacttttacccaatttctggtcaatgtcaaaaaattcctctgatctgaacaatgcttctgcattttgacaaatataaagcaaacattggtgggaaaaagcctaaatatttatctttaaagatttagacaaaaaagccaatttgtgtctttgggtcataaattttaacacattaattaattgcttggaaaaatttttttgcgacgcgattttttgaacaaaaactgaaaaaagtatcattactaattattaagcctatcattagggggtgctttgctcgaagttcgaagctcaaaaatctttaagttttcaaa

SEQ ID NO: 6943 - DNA, 598 bp, Heterodera glycines
ggcccggcaaaagcccgccgggcccccgggcccgtccggtctctactcacgatatctcaccaatgagtactaaccgaggacgaggacgtgtgtctttatcgagtggaggtttcgaccttcgtatttttagtgtttttaaatttttagaccattctcaaacttctgaatatgatggtcgtggacgtgggatgtattcttttcaccaacaggacgtgaaaggtgaaagtttagtacaaattttggtaataataaggctggttcccccttttttcgaaaatattttttaagttttcaaaagtcatgaaaatatgttttcaaagcttttcggggtcgctgattacgaatccggcatccatttcggcctgttccgaatcccggacccaaattcgaacaaaaattcaaaattttcgatttttcattagcgaccccgaaaagccttgtaaacatgttttaataacttttgaaaacattaaaaaaaatttctaaaaagggggggaccagccttactatggctctacttcagtttatgcgtccaatcgttttttatgcgtccaatcgctttttatgcgtgcaatcaaagttttgtgagtccaattaa

SEQ ID NO: 6944 - DNA, 2411 bp, Heterodera glycines
  unsure (1)..(2411): unsure at all n locations
atgcaagtgagtttcaaccattttaaagaaaaaaatatcaattttcgatttttttagtggattttgactatcatctggagaatgatgtccaaatgtcgccgaatttggacattgacgatcaacaaccgccggcctgggccgcaacagcagaagcgggagtccaatgcgcgacacaaacaacggaagcctcaacccaaaccgactggaacatccatgcttttgggaacagtgcactttgcgaggccaatttcaagctacaacgtcgtgttgcacagctgcggcaacaattggctgagcattttaagcggtggcgggcctatgcatgtcactgagtttttgccacaatcaccacgccgcgacaacattttcatggctcttgaactcctggcaaaactccaatcatttgccgtcgctgatttgctttctgctgatcaaatcgctgatttccgcgccactgctgatcaattccgtgttcacatgttggagcacttacgccgccactgttcgacttcaaaatttcatcatttggtccaccatgcccctgaatttgctgaaaaccatggattttggtgccttctcagtgagcagcctgtggagaaatttcacgcgttgttcaatgacgatctcgcgcgcaaagcaaacaccaaagatctccatgatattttgatgttctgtgctagagaatctgccattcgaaacgccatttttgattcaaatgaactctgatcagtcttttgtagtttttttataagcttattatttatttttgttgttatttttcatacatttttcaattttttatatttaataaataatttgccctcacattacaataaatgtttagttttgctgtaaaaaactatattttctaatgagtttttatgattttaaaacatttgatcagatgaaaatataatttgtttttcaatttgagtgtgttggcgttttgttttacgccaattattttttggcaatttctttcgttttttaccgtccatgacttgttttataggttttcggggtcgggaaaaccgattctggcatctgttttgacccaattcgaaccccgaacccggattcgaacaaaaaaattaaaatccatttttccacgaaaattcactttgtcccaactataatttcattgggtgaccatttgtacacgtgcgcttggcgtgaagaagcccgcgttcttggaaaaaaacgatggcgtttcatcatttaggccaattttgaactccggatcaaactcgatttcgaataaaatgtcaataagtcttttaaaattcgcattatttcgaattcgtataaaaagaccaaattttggttatgaaatgtttccgtattgattttacgcttgttaaaaaataatttatttcaatcaatctaaacacataggtatacataaatgattaaatggacaatatggaatatgcgcaacactatacacaataaatacatacatactggttcgacttcatttcctgatttttagattaagctcgtcaagagctttcaaatgataccaaatttgtggggattcgatggtttaaaaaaaggtagagtgcgaaatctctcaatttttcgagttttgaaccggttcaaaaaccggttttttggcatttccgcaactcgagacatatttttccatgcttagctccttgagacgaatcgatcggtatatcatttgaccctttttttcacggggcgttcactacagttcacccgtgaagcggctatatgtaaaaggttggaggattgaaaaaaaaggaagaaacactggcgaagtgcacctgcgattcgcgtgacttctgatgtcgtaacatgtccaggaatattgcgcattcggctacgctgaacaacggtgtttttttgagcagggacattgagcaattgcgtatgtcgatgagcagtgtcgaagatgagggaagcgacggaagggctgatgaaatggcaaagttgcaaaaatggctctgtgagtttgttttttgctgctatttataacgaaatttatgcgaccgaaaaaatagaaaataataagccgaaaattgagtatataaggcggtcttttcaacgttaaggacacatttcataacggacggacggctgctagcaacgcgcgatggcagtgcccttcagccttcaagtggacggccttatctacagagtcagaaactccacttacgggcaatttcccttagatgtaattgttttttgcttttcaaaatcgtcattattcttcccttccctttttacaggtgacggagcacgacttacgccagctttgcgatgccacgatggacgtcttccggcagcagcagacactcgtcaggattcaccgcccngtcacgtctgcgncgacatccatggncaatttcacgacctgctgccgatcttctcgacgctgggccccc

SEQ ID NO: 6945 - DNA, 3869 bp, Heterodera glycines
  unsure (1)..(3869): unsure at all n locations
tgaaagtaattttggacttaccccccttttccttccctcaatggtctcacttaatcntaaggaaaacatggcncatttgccacggtttggtctgaccgtgttcgagttcttacaatggcattggacgcgcttattccgttggatgattttttggccgttagtgaggtgcacataaacgaggattgtcggcatgggattaaagttcgtttgttctttggagatagttatcgttaagcgtcagattgatttaattaataaaacattttttgatttttatttttcaactatatttttcgagctcataaattttaaggaaagttgtgccataattttagtctttcaatttaattattattgttctggtgcctaattttatggctccgggggtggcacgtacggatttaaattgcaaaagtggttcttgacacaactcaattgccaggcaatcgtcgaggacaacggattggtgttggaccaaattgccggattcattcgcggacggtcgttgcgcgtgtgcgacgtcgtgctgaatgagatgggacaactttcggctaacccttactgtgaaaatgtgaggagagcggcgctgcatcttcgcaacgaaagtccgtgagacactccgcctttctcccctcccctcccctttttttattcccctcttcccctctctcactcttcctataacccactctattcattcgttttctgttagttctgccacactttactcaccgggccggtgacattgtccaacgagttgccgaccaacaccaaagtgatggcgagcgagagtccaagagggacgtcgacgaaatgatcgatgcgtgtcaattggtgcacgaagcagtgacagacataagacacgcgatgctaatgaacagaaaccccgaagacgtagactcagacaacgaatacgaggaaggcaagtggaaaaccgacgcaaataacatttttatttgaattgttggttatgggtttcagaagggactcagccagcggattcaagcagtcaagcatcagcctctgacatggagaaccaacagcaaatcatgaggcaactgccggaagagtccaaaagagaaattcaaaaacaaattgacgtgtttaaagtgagtgaattgataatgacaaatgataatgtgcatttggtgttaatttttcttttagattacacaacgcaaatttgagtacgaagtcggaaaatgggacgaaacgggcaatgacataattgcattggccaagaaaatgtgtcagataatgatgaacatgaccgacttcacgaagtctgtttgggccattgaaaatatatgttaaataaaaaaatttgtttgatcagaggtcgaggcccatacaaaacgacgatggatgtgattaaggcggcacaagaaatttcggaaaacggaggaaaactgaacgaattggcacgtcaaattgggaatgagtcggtggagagcaacaccaagaaggacctttgcgcctatttggaaagggtcactctgttttgtcatcaattgaatgtcacaagcaaagtgcttaatcgaacaatttcttttgcgacccatcctctgctggttcaggtcaaagcggacatccaagtggtcggagacgaattacgagtcagcggattggaggcggccacttctttgatccaaaatgccaaaaatctgctgaatgccgtcattttgactgttaaatcagcttacatcgcaagcacaaaggtcagttttgttaaggcgaaaggatttacgacgaatgaaccgctcaaaaactttttcagtaccgacgaaaagagaacaccaatcccaacgtggtcgaatggcgaatggtggcgcctcagaaacagccgcttgtcagtgcatctgctacaaaagcgcacggagtgatccgccgtgcctccgtatggaaaggggcggcaaataagggttcactacgttccactcattgaaaaacttttcattagaaaaaacaatatttcataaaatgtaaaaaaaatgcggggtgggggaacagctcccggcaaaaaatgtaaaaatgaggcttattttaactgtatcaaattttaaaggaacggcgccaacctccgccgatgcaaacattaaaacaatttcacatatcgacgtgaatgaacggcaaaacactgagaaattccataatttaataatttatcaataggaatgcaataattcgtgctgatttgggataccctcttaaaaccttcggcataacaaagcacaataaacgagtcaattattgtaagtatttaaaaatttaaattcacggatcttaaaacccctcaggatttaaaacctatcttttttgaacaaggttgactcgttgtgtgcagtcaatgctcatttttcacttaaaaagaattcactccataagataattattatttttttgaagacccaaactctgaataatctgatatccaattgccttttgtaatttgttttttatttcaattcaaaatttatttaaatcgcagtaaaataattatgtgcgtcaagggcatatattgatattatttattcgaaaaaggttacattccctgcttattctctcttgtatgcttttattgagattattttcgttttagggaatggggggggggaggaaaggaaaatgtgtatttatttggttggggtggcgagtgttgggaagtgccgggtgagagaaggggaaaagggaaggaaagaaagaggacaaattcggttcattgggttcgagagagaaagagtacggacgaatggaggggaagagaagtcattccttctcgtttctcttcccttttctctcccccaccctcgctccgctgccgccgccgccagcgattggctgtgtcgctgacgtggaccaatgggcttgtgccccggcagagtaacgccggcgtgcgtttccgcggtgtgcacttcgcgacgctgcaccacatccaagccacacttttcgttctgattgctcaaatcactttgtgtgattgcgattggaaaagactcgctcttgacaaccaaaaaaacattacaatattatcaattttcagatttacaatctcttagggatgctcagttctttccccttattattgtccttggtcggcctcatcgccgtccacgccgaagtcttcttcaaggaggagttttctgatgacagttggactgatcgatgggtcacgtcgaaggtgattctgggcattagtgcttcgttttggtttttagtttggaacattcagagcaaggatgattccgggaagttcgatctgtccgccgggaagttattcggggacaaagtgcgggaccaggacgcgatgggcaatcagcgacggtacggttgtgcctcatctctaactagttaaggacgtcggacggcattatcatcgcaacatctgcaacgacactgattgctgtgttcattttgtgtttgaggccaaaatatagcaactcccgatcaccgcaaaaataatagcggatgaaacagcaaaataccaaattttacaacaaatcagtgcctttaccaaacaaggatggccgcaaaaatttgacgacattaaattgtctccttttcttccaaaaagggcacaaatacccgaaatcgaaggatgcctcgcctacggtgaacgaattatcatcccttcgtcactccggaacaacatcctcaaatcattgcgttttgcacatcccggcattgtgcgaatgaaagcaattgccaggaaccacgtttacttgcccggaattgactccgaaatcgaacgagtggtgaagcaatgtgaggaatgtcactcagccgccaaaaatcctacaaaagcgaatcttcagccatggaaagcagcaaacgaagttttcgagcgaattcacattgatttcgccggacca

SEQ ID NO: 6946 - DNA, 4664 bp, Heterodera glycines
atttattcaatatttttcgtgaaaattttgctaaaaaatttttttttttggaaaattttccggtttttgaggtcaaaaaggccaatttgtctgttgggggccgttctattagaggttttttttaaaaatgcccaaatatgcacgaaatgccaaaatatgcacaaatatgcaaaacatgcatatggaaagtcatcctagaagcttcaaaacacgctaaaaacatgtttttcgtgcgtttcaggcctcccacagtccaggaaaaattcagatttccaaaatttttgggcagtcggacttccgattgccaaaaatttcgatgaacaagggaaaacttcgacaatttattgggatttggcatgcttccaattgtatttatttgttagatttgtactaatttagagtatccaaatcttagaaaataattttattttttaaagataaaatttttagagagcaaataaacaaggcatacacagcaaagattaactaagtaacttaaatagtaaaaaatttttgaatgatgtaatttgagattttattttgtcattgtctcttttattttcgagagacttaattggcctgggacgagaatggcggaacacattgacttaatagcccttctcggccataactttctccgctgtctctcccccaccctcgctccgctgccgccgccgccagcgattggctgtgtcgctgacgtggaccaatgggcttgtgccccggcagagtaacgccggcgtgcgtttccgcggtgtgcacttcgcgacgctgcaccacatccaagccacacttttcgttctgattgctcaaatcactttgtgtgattgcgattggaaaagactcgctcttgacaaccaaaaaaacattacaatattatcaattttcagatttacaatctcttagggatgctcagttctttccccttattattgtccttggtcggcctcatcgccgtccacgccgaagtcttcttcaaggaggagttttctgatgacagttggactgatcgatgggtcacgtcgaaggtgattctgggcattagtgcttcgttttggtttttagtttggaacattcagagcaaggatgactacgggaagttcgagctgtccgccgggaagttcttcggggacaaagtgcgggaccagggcctgaagaccagccaggacgcccggttctacgccatctcggccaagttcccgaagaagttcagcaacaagggaaagccattggttgtgcagtttaccgtcaaacacgagcagaacatcgactgtggcggcggctatatgaaggcaattaattcaaaaatattggaacgaatttccagttcttagctcatggcttctgacatcagccaagagaacttccacggggagacgccgtaccatctgatgttcggcccggacatttgcgggcccggcactaaaaaagtgcacgtgatcctcggctacaaaggcaaaaaccagctaatcaaaaaggacattcgctgcaaggtgggcacttttgttgttcattttccagtgattcactcattcgttgcttaggacgacgaactcagccacctgtacacactgatcttgagcccggacaacacttacgaagtgcaaattgacggcgaaaaggtcgagagcggcgaattggaggccgattgggaccttttgcccgcaaagaaaatcaaggaccccgacgcgaagaagcccgaggactgggacgacaagtgaaccaatgggactttgacataaacaaacgatgccatccatattcagggaatacatcgacgacccggacgacaaaaagcccgacgattgggaaaagccggaacacatcccggacccaggttggacagtaacgagcggtctttgctagttgtcatatgtctgctttgagatgccaagaagcctgatgactgggacgatgaaatggacggcgattgggagccgccgatgatcgacaacccggaatacaaaggcacctggaagccgaagcagatcaagaaccccaactacaagggcaagtggatccaccccgagatcgacaaccccgagtaccagccggacgacgacctctacttgcgagaagattggggcgccatcggaatagacatttggtgactgacgctggaccgggtgggactggcgctttaatcaaccgaagttcaggcaggtcaagtcgggcaccatcttcgacaacattttggtagcggactctgtggaggacgcgaagaaacacgcggcggacactttcgaccagctgaaggaggcggagaagaagcagaaggaagcgcatgacgaggaggagcgcaagaagttcgagtgagttttgttggattgggtgatgggagcaattgtgggagatgaacacgggaaattcagggaggaagagaagaagcggaaggaagaagaggagaagaagccgaagaaggacgaagaggaggttgaagaggacgaggaggagaagaaggaggaggagcacgacgagctttaggacggcgcccgaccattggccttgtcactttccatcctcaatgattgcaccttcccgggttctccctcatctcttcttttcggttccaccttaataagcttcccactttacttaaatgtgccctccccccgtcgcctcttcaggtatttaatggcaatttgttatttaattggttcaagagggactgttcgatgattccttcgaccgcccacaatggtctctctcaccgcctttttgatatttctttctgaaagtgaataatgaatgaatcgctgactcccatctttcctccgtgcttgttgtttttcttttgttcttttacataaaaatatttattgtcccaatttgaaaataaattgttaatttgtttaaattttttattggaaattcgaaagcctttgcaattttcactttaattttataatgtttaatgtcaattaaacaaattgaattgtcactttcattccgcatttgtctgaaatgcgacgcaaaaaccgtccgtcacttcgcccgtgcaaaagcgttccgtcctcaccgcaaattccaattttttgggggcgcaaaaaacgccgaccccccaggggcccattgccgattcgtccgctcgtttcagaatggcctaaatattttgttaaaatgctttcatttgccccccccccttttcacttcttttgcctctgccatttccaagtgcgaattctgaaggggtttatttcatttggtcttcttaattggtttccgtgtcttctccctccgttaattacctcttccattattttgcccaatttcgcgtcgcattttcccttttctccgtccctttttcccttttctgtgcctttgtccaacaatgtcctcagtccgaacactttcttcctctccattcccagccgacattgcctttgggaacggccaatgcagcagttttgcacgggcatttgcggcgtggcgaaagggcgggacgattggatttgagggcattggcattggccgtacgattgggaagggaatgggaaccggtcctgctgctgctggggttgttggaattgttgctgttggaagggcggttggaagttgtaggcggagggactctgctgctggggcacgaacgactgacggagtgccgcggaagtcgggtaaataaccgggggaagcacggcactccctcccggcgctgtcgcgtatttcgacgacaaaaatggctcatccctcgacgctttcgactctttttcaaatgggtctttcaccgcttctaccgacttttctttcccaatttcatttgcaggaaatctttctttggccgaaattggcactgaatttaaaaaagtaacaaatcaaaggcgaaaatggcaaaaggaaaaaccgggcaaaggcgcagtccgcgaatattcgggcatcccaatttggtaggaggaagaaatcggcgatggaaacagcgactgttgcggaccggcgccgaacggttgcgaagcgtaagaggtaaacgcggagggaaagggcgacgcagacgcactcggaacacagcaggaggacggcatttggggttgagggaacggaagagaaggggagccgcagtaggggcggggaggcgacgggggcagcggcgaacagcacggggacggagacggcgggatgggcatggacggacacggacaaggggaggggggttggcattgtgccgaaacagagccgaattcggaacgggagatgagtaacagagccagaagaagggaggcgcgctgcatggggaaaagggactgggagagaaacaatggcagggaatttggtggagggagagaattgaggaagggacggcggggggggggggggggcaattcatcctttaattggacggtaggcataacacggcgcgggttggggggattaacgtgtgatttcggaatgaatgtgcacaagcaaagcaaagcttgagcaattcaccgcttaagggggagggggtagagattaatgaaccaaaacaagggataatgggaggacgaaaagcagcaaacactaagcatgacaatgaagcaaaacaattaaaatttaagtatcttttttagaaaaagaagttttaatggagccaaaaatggtgctaatagagggaaatggttaagttataataaatatatgcttctttaatcacaggaatctctctaaacattttgctctttctctggacc

SEQ ID NO: 6947 - DNA, 3969 bp, Heterodera glycines
  unsure (1)..(3969): unsure at all n locations
atttttatacgcaaacacaaaaaaagaacgtgtttttcctattatttatggcatggaaaaggcaggaaaaaaatacatttgcatgtttttggcagccctgatatttaatatgcctaatatttttgagtgttaaaaactaaaaactgccaaaatatttaggttttcggttctaaaaacctcaaaataggtgtaaaagtttcaatttaggggtataaaataacaaaatttttgaggaaatttttcatttctcaggggtgtatttttgaaaattagacgaaatttatgtaaattaatctttatattcgggttcggggtccaaaatgggtgccggattcgctgcaaacaaagtgctggacacattaaggctgctaaatttcccgacacgaggaccaagactgagaatcccgagcagaattactggatatttgccgctgacccacaaattgtccaagccacgttttgtccaagccaagaattgtccaaaagagtaaaaacccacgaattccaaaagtctaaaaaactcataaaaagccggaaaatgggtctattttagggttttcggggtcgctcaatcaaaattcgaacaagtttagggctcctatgtgatccgaattccctctatagacccaccctcagcttcacacaaaaataattttattaaacattcaataaaattcattacgggacatggacaattgaatcatcaaaattttcaaatccttcaattttcctgcatatccctcaatttgagagtgccggcggaattggaaaatgcggtgcccgaacgatttcgtcctcccatgctgtaaatgaatctttttattgagtttaaacggtttaattgattaaagaattctgcctgaaggcgctgtcgaagtcgatagcggactcaacaaatattgaacaagctgctcacgtggactcacagtggttggccatgtaagagttgatggtgccggtgagccggtgccgaactctaggggtagccgcatagcttgttccgagttgatagtcgaaattattgtcccgagtgtagctaaaaattttaatttttgaaataaatgcataaatctaacaaacaatggttgcgggtgggtgaaaattgagtggattatctcaaaatgcgtcaacaccatccaacatctggcgctgtgtcaagccgatatatgttcgagagaagtaaaggaagaacattggcattccaggagaagatctcacccaaaattggtttttccgcgctcaaaggtcattgttgaaagttcagcctcgttcaaagtctgttattcaacattgccggaagttatcacggcatgcagttcgtcaatctccactccaaaatttacggcctcctcagttgggtttgaaatgctgacaaacaaagcttcttccgacttttttgtagactttcaagtttattactagggttgtaaattatatggattaacatattttttctgcgcatatgctatgaagaaaggggcttaaaaatagcatttctgcgttaaaattttttgatttggtgaaggtttttagtccatataaatccatattttgggggttttcgggaataaatccatatttcgccatttttgggtttttagtccatattttggccattttttggaaattttcacaagaaaaataaaaaaaaacgaaaaatacacccctaaagatcaactttttggaaatttttaaaaattacaccccacaaaacacgaaaaatttgagttttcgtcgtcattttggcattttcaataaatattttcgtcatttttttgcgaacatttctttttttttaatgagaattttttcgaaatttggcaaacttggaggtgtttttgatacaacgaacaacaataaaaaatatgcatttttaagttttaaaccccattttttagttgtttattgtactttttaggtttatttaagcaaatattaagtccatatttcgcgttttttagtccatataatttacaaccctatttattacgaatcatttgttcaattaatgaatagcaaaatctgaagacaaaaaaagcacatatttttaatcaaatttggagatttttcttattcgggtggggctagggttaggcaaggggctatataaatgtcgtattggtattcagcgaccccgaaaaccctaaaatagacccattttccggctttttatgagctttttagactttggacaattcgtgggtttttactcttttggacaattcgtggcttggacaattcgtggctttggacaattcgtggcttggacactttgtgggggcggcgcgctgtcaaaatgtccctgcgtcataatgtcccctaaggtttaaaaatacgaaataccttagaaaatttatcaatcataaaaaaacaataaaagctgctaaaaagacaatgaaatacttccaattaattgaaaagataacaaaaaacagaaatggacaaattttaaaggacatgcatggttgaaactaattttttcatggtcctttattttttctgggtgtccctcgatatgatgactaagagggaatgaatttcggcatcgtttatttcggttttttcgctaattttaattggggacattttgactgattttagcttgggggacattatgacgcggggacattttgactgattttagcttgggggatgtcgggaccaaacagaggcaaattcggcccggcaaaaattttggcaaaatagaaattgggacaaacagtagacaagcaggggaatgatgttttattccgactgaacccatttcaataacaattccacgacttaaatagggtgtcattcgctgattaatacatttttgtgtgagaaatgaataagaattgaatgtaaacaaacaaatattttttgaatagaacgacgaagagggggaacatttccaattaaattaaggtttttcccatttttaatgaaattgcatcatgcttataaaatttatcatttccattttatttctcgtgacgtgagtcgcgacactccccacagcaaagttgtcggggggttcagttgctgcaagtctgcctgtatgttgttgttttatttcttatgcctcattccgggttgtctgtgctgagaaaggcgggcggttgattttggttaatcgtaaaatctgtgaggtgatcagttgaccaggctgatcccttgttgcttgtgaagatccgctccgcggcggtggacagcgatcagttgaccagactgactcctctccgtcctgtcgcccttgtaccagcgtctgccacccgctgatcacaagcattcatcagtgcagaggttcccggccgttgcaccacttgtcgggaccaaacagaggcaaatttggcccggcaaaaattttggcaaaatagaaattgggacaaacagtagacaagcaggggaatgatgttttattccgactgaaccgatttcaataacaattccacgacttaaatagggtgtcattcgctgattaatacatttttgtgtgagaaatgaataagaattgaatgtaaacaaacaaatattttttgaatagaacgacgaagagggggaacatttccaattaaattaaggtttttcccatttttaatgaaattgcatcatgcttataaaatttatcatttccattttatttctcgtgacgtgagtcgcgacaaataatgaaaatattagatagtgcgccaaaaggagacaaaaaattagagaaaaaaagataatgtttttctctggcactctctatttattggtacacatctcgttttttgaaacggtgtgtttaacaagtgtaaatgaatcaaatagaataatttactgcggtgattttaacgccccaaatattgattggaacacaaataaatattatcaaaaaatgacccaattggcaatgctttcattgactttattganacaaaatcattattacagcacgtaaaagaaaccactcgagaaaagtcgatttttggatttgattttttt

SEQ ID NO: 6948 - DNA, 520 bp, Heterodera glycines
catgccgtacacactacaattaaaatcctaatttcattttttcatagcgctcttttaatagtaatggccgagaatatttaaatgttaatttgagttctagtcaacattaaactttttagaaatgaagtacccaccggcgcttggtcatttagaaaatttgcacatttacaaataatttaatattattttgctaaatataaatattcaggaaatccaagttacccgcactactcaagcaattgttcagttgtccaaacaaaactaacatgcaaattccccgaattccaagcccggaactatattaataataatttttaatgtacaagttgttgttgttgtggttgttgtagtagtggtagtagtggttgttgttgttgtactagtagtagttggagttgtagttgtagttgttgtagttggagtcgtagttgttgtagttggagtcgtaattgttgtagttggagtcgtattgttgtagttggagtcgtagttgttgtagttggagtcgtagttgttgtag

SEQ ID NO: 6949 - DNA, 3741 bp, Heterodera glycines
  unsure (1)..(3741): unsure at all n locations
atttccttaaatccaaaattgttattggccaacaaattttttaattttaatttattttatatttaaaaaacaatatttttataaatcatatacttttttctctatagaattaataaggaacagacttatatagacaaaaaatcataaatctagatataatcagagtaatcgcataatatagaattcctgggaattagtgtaaacctaagaatttattgtcaagaaaaaaatattcttaatatgcgaattaaagaatccataattgagacaacctatttatttttaactgaaaaatattgaaaattttaagccgaaaatatatgaaaaaaagaaaatccatataaatccggtccctaaaaattaaagaatcggcagggtgccattgtcatataatttaaatagctgactgaccaataattaaataaatgttgctgaaagaattaattgtgcgggaaaaaatccactctaacccattaaagctgcttttggtgaaaaagtgggttgtcgatgatttcggcgaaagagcaatgtcaaaaacaattcataaaaagataagtcatatacataattaatagtacatatttgcgggtcgtggtcgttttcgcgtggggcgggtttttggactataacttttttctttgtcaaccaaatccaaacaattatgtactcgatagccttaatgtcctctattagcctgcaaaattgtgaaaaatttcgttaaggttcaaaaaagttatgtccaaaatactgagaaaaccagttttttgaattcttctggccataatttttttgaaccttagcgaaattttttaaaaattttgaaagccaatagaagacacttagggctatctaatgatactaagattgttggatttggttgacaaaaaaagttatagttaaaaactcgcccacgcgaaaacggcctggtcctcatatatttgcgggcagggtcggagtcagttcggcgcggactgtttcggcgccaccaataaatattataacttttttctttgccagttaaatttatcaaatctggcatcatttgaaagccctatgtttgtgcataacattttcatgcgaaaaaaatcatacaagtgaaaaaaagttatggcaaacggcgcctaaaaagccatgaaaaagtcaatagttgaggtttttggtcataactttctcgtgcaaatagcaaagtttttttgaaattttgcattctaatacagaatattaagaactatatgaatgctgccaaaaatatctaatttggttgataatgagaaaagttattagcaacggcgccgaaagggtcggcgccgaactgggcggttccctacggacaactatttctggaagaaaaaattttaaaaaatcataaagaaaaaaaaaaattgtttttctttgattgggtaaagcaatcagcattgaaatttatgaatctctggatttttccgaattttatgatatcatttataaatatggagatattcctttttaataaaccaaattaggtatataaattcttccaactaataattataccaacagtttcaaatacttaaatgtttctatcaaattagacactttgttgcacttttaattggcttaatggtatattggaaaatgtttttttcgggtgcggaactatttgttctgagctcggcttaaagatagcttaacctgagttaaatgtagcaaataatttggggttgtgtttgtataaatagataaagcttttgcttttcgtttcattcaaaattgttgcaactattatttaaattctatttttattaattgctatttctttataaatttttaatttttttgttgaaatcgaaaatttaccgactgccgataagtaataatttttagtatttaattcggcatttcatttattttttcaaaaaaataataatgtgttaagttatttagcgtatttcttctattaatagcctcccctctattagaaccccctctccaataaagctgttaaaaacgattttggagttatgccaaaaaatgttttctgttttttagtaaaaaggttaaagcgtataatcgaattccaaaaaaaaaaataaaataaaatttcttcttagaatgcgtatatggtttaataatttatagatttttaaatttatttaccgttataattgttttataagaatataaatttaattatttgaaaaattgagccccctgcggctctattagaggaaatgcttatgtaaatcgatttgcaaatatttgttacctaaaaaaactattttggagttatgccatcattttcattttctatcaccattattcttttcgtcacattgaatgtctggtatacaaacgcttgtatgcgttcaacagcgggaactggatcaggcactggatcaggcactggatcaggcactggatcaggcactggatcaggcactggatcaggcactggatcaggaactagatcaggcactggatcaggaactggatcgagtacgttatttaaattgtaaaattttggaaaaaacatccctaaaattaaaaaaatttgccaaaaattcattccataaaatatattttttaaattcgtctgatttaaaataataaaattttaattcaaatttgttaaaatgcattcaatttttagcaacaccacctcaaacatgcacagatgaggcgactgtttttgcaaatgaaaacaatggggtgaaaattatttcaaaattgtttaattgaaattttttttgattttaaaattcaattcagtgtgatctgatcacttgtcctgctggaagaacgtgtggcattctgattggatttgctaggcttggcaccggtccatttgaaccatttctttacccaaaatgtgtgtccaacccgttggaattaactcgtaacacggaacaaaatggcaacgagaaaatccttacaaatggcccaggagtaattaaaatcttaaaataaaaataaatatgtgtggtttaacgcccttgggcatttttgcattagtcattttgcctatgcccaaaattaagttttaaaatttatgcttttccaatccaaaatagcttaaacaatttctgcgatttaatgattatgccatttaaattgaaaaaatatataaatctgaagaaaattttgggtttgacgcaaatgtccggggctcttcccaatattttgaacaagactgtccgagattttttttgtatcattgcttttttcgaagactcaattttatttcattttttatctttattttaaatattttaaattatataaattattttattcttatgaatttttagtgtaactgtggcacgacacaatgtgccgctgggttccagtgccaagttcggagttccatcgttaggcttggcaatcgaccatttgcacaaataattggaggtgcgaatgaaaaaaagattttttaaagagaaaattgggcatttttttttgcgacaaaaatctggcgatatgtctcttaaaaaatttaaaattttgaaattattttccatttgtatttatttgactttttttttgtaattttttcaggattccctcaatgtgttggcaattatagcatataccaaaaccccttcacaatagttccttacggaccaggggtacgtttatttattanaattaaaaataactaaaatgattattatttttttataaaaatacaaaaattatttacattttcgattttcataattnnccgatttatatttaaatttaaattaatagtgtgctgaaatt

SEQ ID NO: 6950 - DNA, 3502 bp, Heterodera glycines
tttgacgcaaatgtccggggctctttcccaatattttgaacaagactttccgagattttttttgtatcattgcttttttcgaagactcaattttatttcattttttatctttattttaaatattttaaattatataaattattttattcttatgaatttttagtgtaactgtggcacgacacaatgtgccgctgggttccagtgccaagttcggagttccattgttaagcttggcaatcgaccatttgcacaaataattggaggtgcgaatgaaaaaaagattttttaaagagaaaattgtgcaattttttttgcgacaaaaatctggcggtatgtctcttaaaaaatttaaaattttgaaattattttccatttgtatttatttgactttcttttgtaatttttttaggattccctcaatgtgttggcaattatagcatataccaaaaccccttcacaatagttccttacggaccaggggtacgtttatttattaaaattaaaaataactaaaatgattattatttttttataaaaatacaaaaattattacattttcgattttcataattcccgatttatatttaaatttaaattaatagtgtgctgaaattccggcatgtttggaagggataacatgcgtgactgctgttggcatcgcaaaatattgaaatctgcagtgggctcaagtaaagaaaaatttttcaaaaatcttattttactaattttttttttttagtttttttggcccttttgtgcttgaacctggcgctttatcaaatatataaataaattcatttacaaaaatagatatttttaatagcagtttcttgttatataatatatatagattatatcaatggattcactaattatattttatgataccgaataattaataaatatgttcaactaattagcttttctgtcatgcccaattaaaaatgtcagtgtctttcaattccggatattatcatctaaaagattgaaatttgctttgtcggcttcagcttcatatttttcaattcattcataactccggcacgatttccatcacttttaggcaaaatgtccacaataaatcctttcttttcaagtttttccacattttttgcatccgacaaatttccaattttaaatggtggttgaaattctaaaattaattaaaattgaataaaaaatcggaaaaatattcaggcattttctgataacaccgtttgaaaagacttcttttttactcaatgttccttccttatctggatgattgtggagaatggatgacaattttgctataaaataaaaaataatttattaaattattaaaaaatttaaaattaaataattatttaaaataatttttgaattttgaaattattataccctcaaaactgttattcttcaaaatatttcgattggatgtcgcgggacgcgcaattgcatcaatccgttgaaaaagaacaaccatgaaataaaatgtaaaaaaaaaatgcatttaaaatataaaaataaaaatataaaactatatttattttaataaaaaatacatttcatttctataataaaaaggaaattaaaatttttaaataatgaggcttttgaaaaaaattattctttaaaaagtaaataattttttggttggcaaatatatccgaccaatttcctgcaattaatggattttctttttattattttaataaaaataaatgcatctttttcatatgccgcgtttaaatttttctctcaattttgacactgtttctccgattacattttccattttgattcaatttttctttaattgcttcaaatttttgaactgtttttcttttttgttgatcatttatttgttctttttcgctctttttgttcaatttttatcatgatgaaatgtgctgatcatgcaattttggtgaataagtgaaagtattttttttaggattgtttgggttttatacaaaaaaattgtttaaaattataatagataaatatttaaaataaaataaattttgatcagtgtgatcatgtgcttatttaagagaaatgtagaaatgctttttttgtatttaagtaaaaaatcgattttaaatttaataaaacatttaacgtaaaacattaaaaaagggtagtgtactggcatttcatggagtcaacaacttaaattgaaaataaatttactaagtattaataaataaaaagccgtttcaaattgaattataattttcatttaatattaaattaggatacccatttggtatttaacagtcagcattttttcttggaagaatttatttccaataaaaaaatattttcttaaaattaacataatgatattacataaccttttttcatgaaacctttattttctaattttaacaaattctaattattttccatttaataacattttttatacgaaatatatcattttagcctgaaatgttgttatctgatcaccaagatggattgatctgatcctttatatatatttttacaatcaaagaaaccttaatttgaggttttccttttttagttcagggcttttttccgccctttcattgaatttagttagatcagtaatattcactaaaggaaaaaagttattccagaatttctggaaaaattcgaattttcagaaaaaaattcataactcggttctgaaaagatattctggaaaaataaaatactacaaaaatccgcagtttttagctctattatataaattttatttggcatttttatcgcttttttaagaatttttataaaaataaaagtgattttgagattcgggcaccaaaggggtgagcataggatttttgagttggaaaattttttcaccaaaaatcttccaaaaacatgtctttaggggttatttgggccgctgatcacgaatacgtgatcagattttacttttgacatcgttaagacctcagaatccctgtgtgattggggattctgaggcatcattttttgggggggggcaaagttcgagtccggacggtgtaacattatttttctgtgcatttttacgttattttcaatgattttaattaatttaaaatattttgttgagttaataaataaaaaattatatttaaattaatttttttttgatgaatacattttataagtttaaattaattattttttaattgatagaatttcatgtatttttttaattaaatttgttaaaaaatattttcattttaatttaatgaatttactaatcactgttgtaccacttttaatcaaatttgtacctcttctaatcaaatttgtacctcttctaatcacagttgtacctcttctaatgactgttgtacctctcctaatcacagttgtacctcttctaatccctgtaaggtcaacaaattttgaaaaacgggcgcgaagcgcccgtatgagtttaacaaatttaaaaacgggagcgaagagcccatatgaaccaacaaaatttaaataacgatcgctaagcgcccgtccaaggctaataaaatgaaaaacg

SEQ ID NO: 6951 - DNA, 3366 bp, Heterodera glycines
attcaggtcacatccaagcgggagcgaaaaccaagcaggcaaacaagattggtactcaaaatgatagttatagtcgaataaaaaaaatgaaaaattaaatccttgaatccaacaactagaattttatttaaattacataattaaaatcaacaaattcaaaagaattaaatttctatttaatgttataattaacctatttaaaccgtaataattcaatctaaataaaatatgaaaacaaaactcgaaaatacaaattgtaaaatatgaataaattcttaattcaccatcaataattctaatgaagtttggaccctgcgttgaggcagcgcaaaaaaacatgggatgttgaattgtgtttttctcaaaataaatgaaggtaatcgatttcaataataaatttaaaaaaaataaaaaaatatttgtaggtgaaattaataataaaaaagactttaaaattaaaaatattataaaagacaattcttccactacttttctagttatatatttatgaatatttacaattaaatttttattcaaatatattaaaagttcgttatctttttatccattcgttaaatattttttctacaatttttataattttataaattgtcgatttctattcattttaatgttctgtttggtcgctgcttttcctattataatcattcgtcatctgttgattattaactttatcattttaagctgactaaattaataattaattgatgagaaaatattttactaaaattggcttttttgcattgcatttttaaaatttaattcttaaattatattcaactaaagtatcaaagttttcctcttctttaaacaaggaaatacatatgtaatccttacttttatatatcactttttgtcataataaatattaatgaacgtgatgattatttatttaaaattaattttaattttccatttttccaatattcggtctcgttgagtaaaattaaaagatttataattattttttacatttttatatttgatttcctagatcagtttttctcattttatatgaattgttttggatttgtttaagcaatgattcctcaaagaatataagttcggattttaattcaatgaaaaaataataaacaaaatccatttttctcaaaaatatcttttgaaacgttactgtgtcttttattttcctttatctttagtttcagtttttatgctatttcctgtttggggatatcttcattacaatgagtcatagttttttgttaaattatgttatattgttttcccaattataatttttaaattataatttaatgctttgttattaaattcttattatgcagaaatattctactattaaagtacattatttaataaaaaccgtataaagttatgaaattattcaattcgatgaaataaacagtacaataagttttgtatgcttatttctagatttgttatttaaatttattaaaatttctaagtaatctttttaggtttatatatcgaaaataaattattcaattaattttactatatttatggacgagctccatttattatttgttatgtccagagaagatttaatttccataatttactattttttatcgaaataaggtgacaatattttaaataatttagttttcaaagaaataaatctttttgaataatttttctaaatcaattggtttattaattattttcttttattagtatttttatttgtattttatttattttctttccgatttatgaacatttactcatgacaatttctcgcattatgaagaagaagatccacttaatattttttgaattttattttaatttaattttttttccttttttatattttgtgaatgaatatcgataacaaagataatggcgaattgttataattatttaatttactttttaaatgttttggtttatatataggtgaaaattagtgtactttttttaatttagtccaattcttaatgatgcaaaaatgactttttaaatgattttattttgctaattaatattttccactttacccaacatttagattattaataatatattcatttattcaaattaagattattttattgttttttaacccattgaaacttggcgagcattaaaatgttttttttattatttgctttaatttttatttgatcattaattaaatcaatcataaaagttgtttgataagaatctttttgaatttgtatttttgattaaatatattaacaataaaaattcatgaaatcaacagtcggttcttttcggtatatttaatccggtaattattttaaataattttttaccattaattaagattttcttttatttcaatctacaaatattttccacaaaaggggttgaatgaataacatttttaaatttaaataacacaattaaacgcttatagccttcacccatccgacataaattattaaaatagttgattttttattaatactttaaatttgttttaatttcccttttaattgaatttttatttttaggtaaatatatgaacaatattgaaagttggtttttgttcgtttaatttttgtattctaaatgctcttacttgcttttttgtctttgttgttttctttaatcatgttcaattgcgacgtatgctttgcggaagctgcggaagcggaggcggaatctcctttttgttaaatgacaaaaatttttttagttgtaaataaattcaaaattctaaaaattattttcactgtttttcttaaaatttttttattcattatactattgaaacttttatgagtattattttacacccattctttccataaattatttttataaatatcagcattaacatattatttttttaaggcttactaatatattaaagagttaatttatttgaatttatcgtaataagttcatttttattatttttcaatacattttctttatttggcattattagtatagaaattttttgcacaaatttttatttgaaatttaataattgattttgtgtaaaatccgtcgttttcgcaaatattttttattttaacttatatttataaacatttaatccgtaaagaattcattttttaatttatttttcattatgcttaagttaggttatttggttttcaattttttggaccataatgaggtgataatttttttatttttaacaaaatgaataagaatgtatttataataattatataaaaaatgcttattgaggttcgaattattctgtttaataaaaaatattacaagaaaattttatctaatttttaatagtcttttttaaatttattttttaaaaacttttatgctttcccctcaccaaataattaaattaaataattttactgaaattacccttttttt

SEQ ID NO: 6952 - DNA, 2938 bp, Heterodera glycines
taatttcccttttaattgaatttttatttttaggttaaatatatatatgaacaatattgaaagttgggttttgttcgtttaatttttgtatttaaaatgctcttacttgcttttttgtctttgttgttttctttaatcatgttcaattgcgacgtatgctttgcggaagctgcggaggcggaatctcctttttgttaaataacaaaaattatttttagttataaataaattcaaaattctaaaaattattttcactgttttttcttaaaatttttttattcattatactattgaaacttttatgagtattattttacacccattctttccataaattatttttataaatatcagcattaacatattatttttttaaggcttactaatatattaaagagttaattcatttgaaaaattattttcactgttttttcttaaaaattttttattcattatactattgaaactgtggggatgagacttattatttgctttattataataagtattatcatttgtaatttgattatatagttttggttttttccattttttcgttattcgatatgatttcttaattataatttgaattttattatataaataaatcgtttttgaaattcttacttatttttatgagtattattttacttccattctttccataaattatttttataaatatcagcattaatttatttgaaatttaataattgattttgtgtaaaatccgtcgttttcgcaaatattttttattttaacttatatttataaacatttaatccgtaaagaataattttttaatttattttcattatgcttaagttaggttatttggttttcaattttttggaccataatgaatataaaaaaatgcttattgaggttcgaattattctgtttaataaaaaatattagaagaaaattttatctaatttttaataggtcttttttaaatttattttttaaaaacttttatgctttcccctcaccaaattaattaaattaaatcatttttactgaaatttacccttttttttgttatttagtcaagacttgtaaataaagagatttattgaaacaaggagacggactaacaacttaacctgatttggtgagttaaatgcctttctatgcacaactcacttgacatttaatgccatcagcattttgctattttaaggatgtccgtaaagccaaagataaattttaatgcaatttcatttaaaaattccaaagacaaatttttttaatttataaactttcttttagaattttatttttttaacaaatggtttttagttaatgattttggttttgttaatgttttgtgttgtatttttaattaagattttttgaactatttattgcttgtttttgtataaatattaattattaactcattttcgttaattgatttaagttgttgtattaaatttatacaatatttttaattctcatgagtagtgacccgtgtacttttgttacaatttttggcgctaaattcaaatttgaatttccgcgtcaatatctttggtaaccgggccacgtaggctgcggctgccccacacgaacaaatctctcaaccacttaatttttttttatggaaccctgacccaaaatccttactcaaatcctgacgcagcccgtccgcctcgtcctggagttgagcaagcgcatttggcgaaagcggcccctcccattcctcatcccacgccttgctgctgctgttgttgctggtggtggtagtgttgctgctgctgcggttgttgttccacatgcacaacttggtcccattgtggtgtcggctggtagggaaccagttcccacgcatccgggagctgtgggtcaatttccaaatgctgctcgggcagaggcgggtccagttcccacggctgctgctgctgctcatgctgtagaccttgtccatggtccattaccattagctgtccatcatccggcgcctgttcaatcaagattaaaattcaaaaaaaaaaataagcaaaaaaccaaagacagcaaaatgaaaacttaccgcgttgatcaacccatcggcctggtaattgttgatcagcccttgaaccacaaagtcgacatcgtcgacaagtaaattcagccttgcgcgaagttgggcacgttccgcttggcgttgctgggagctcatttttggtgttgaatggaggaacaaaaaagcgactttcccgtttgcccttttgtatgaggcgggatcgtggccatctgtgtatcgaaggtccgacgcttcggcgaccgatgcgaacggggtcaaattcaaataacaaagggatgtgcagcatttctgaaccggcacaaaagagaaactaatgcatcatgccgctaccggcgatgcgcttgtcacatttacgggtatattaaaaaccaaaggggattaaataaatttaaacgaataaatattttaatttattatgaaatggtgattcaaatttattgaactattttgcaaaattgattaaagtttgtgatcaatccatccatccgacattgttatttaccatttgcccactttcattggcattgttgtatgcgttgttttggttattcccagtgtcaaagttcgtgcgattgtttccgaaagtgccaaatgttgagttgttattagtgaagctgcttctaaagcgattgttgttgttgtaatcgttgtttttatttgcacaattcatgtcgctcagtctcatattaagtgaaacacacccactgcacatatgaaattgcacttttacccctcctaagggatcggactcaaaagcataattaccgccgctgttgttattgttttttgttgaattgaacaatgtttgtgagcagcaatgacaaagattgaaagttagaatatatttttttcgtaaaagtttccataactgagcattagtattgttgacgctgttattgttgacgctgt

SEQ ID NO: 6953 - DNA, 832 bp, Heterodera glycines
atcgaactcaatcattgttgttcatcaattgttaatcgtcgtgagcagtgagcatcaaaaatggccgaagcagcaattcgccaactgtccgacgtgttccagcagttcttgactgctcagcaagcaaatgtggcagcaccagcacaaccgattccaatgcaaatttggcaaatttcgactgttttggtcttggtgaccatggcgaaagcgacatcgagggttggctggaacgctttgcccttgccttgactgctcaacaccgaaccttcaggacgatttgaaggttaagctcttgctgacaaagctgagtgagacggcctacgccgagtatagcaaacactgtttgctgaaaaagccaacagagtttgactttgctaaaacttccgaaatgctgaaaagcttattcgcgaagcaaaaatcagtttggatcaaccgatatgagtgcttaaaggctgaaaagcaagacgaggaggaatttcgcggcttcatcaaccgccacaaaaggctgttaagcgattttgagtttaaaaagctcaacgaagagcagtttaactgcttgatgctcctcgtggcgctcaaatcgccgaaggatgctgaattgcgaaagcgcatactgtcaaagttagcggccgatggtgacagagcaacatatgaaaatgttgtgaacgacttacaaatgtttctgtcgaccatttcggaagcgaaagcgatggagagaccatcgaactccaacattttggctgtaaagcgcaggcagcaaccgaagaaggacaattttggagaaaagggcaagaagcagcaatcatgttggcgttgtggcagagagcacact

SEQ ID NO: 6954 - DNA, 2970 bp, Heterodera glycines
ttccctttctttctcttactctccctctccttttctttgctctattctttctcagcctccgtctctctctttctctcctcttctcattgtttttcctccgtctttctcatttctttcaataacatacatcatctttaccagaaatggacacaccattacatgcgttgttttctgtactgttttctttctctcattttcctctttattttgcaattatttttctgtttaattaaattttattttttcccacgaattgttcattctcagaattccgaaagtaagtaaaaatatatgtattcatttagggaaattcgtcagcacatcaccaagcgacagtgaatagtgtggggacagtggcgagtggacaaatgaagccatccgtgaaggatctactggaccgggtgttggacgagtacaaccatttgcagcagcaattgcacaatgttcgggttgagctggagaagagccaacaggagagggacacgctgcaccgatactcactgatggtgggtcagggaagagaggccgacccaaaattgtcattctttacccctccccccaccaaaattggcattatttacctctcccccaccaaaatgtaaaattgcccttctttaccccccaccaaaattggcattctatcccccccccccctcttatgccatggattcattgttttttgttccctttacattttcttcactttttagtactccgaaacgtttttcactctcaacttcgaaatgctaaaacatggtgaaattgttaaacgtctcagcggcatcctttcggtactttcccggcattccgcttaaaatgtgccctcccatttgagcatgtcatccctctccttccccaagaacaccaagcaccggcagttcaggcgattgagcgtgccaagaccatcaaccaacaagtcgtttttgacttcattttctcaatttgggcacttcgtttaggatgttacttcgattgtcaacggccaagtacagcagcagcagcaatttgcttcgattctgcccgggcttggttccatgatgaatccgacggcatttgggaatccgatgggggcgatgatgtgagcgaaatgcgaaggcaaaagcattacattcgaataataatgaactgcaggggcatcaaaccggaggacgcgatacaggcggcggctatgttcaacaatttgttaaaaaacccaatgcttggtgccaccgcggctggacttcctcccccggttggactaaacggacccggcacaagcgttgcctcaaatgtcgggccaatggtcgctccgaattcgacatctttgccaccaaatggggatgacggccccacgccaacaactcaacctggacgcagttcgtccgcacttaacagcagtagcggggccgggattggacataatcggccgcggtccggcagtcggacgagtacgcccaactcaatggctgctaagaggaccaagttggagccggaggaaggcgatggcgaattggaaattgacgttagttggtgcaacgtccggactgaagaattattggagtttcaggtccaaaacgatgatgcgagttcatccgctgctccttctcatcatacgaacgggcggacgagtcaacctcctcgtcaaaatcacagcgtcaaagacgcggaaagggattccgcgtcggcttcatcttcccgcgactcgaccacccctcggtccggcaagcaacaggcactgactgtacttccgtgccattcgtttcaactttccccttgtcagttgtcctccacccccggctcttccgctgccggcttcgcttccataatgccgactgctgatgccaacatggcgcatatgtttctgaacacggcctttggtggacattttcctggcaatctgaacagacaaatgtttcttgggttgggtgctggcaatgcgccattgggtgctgctgctggaatgccaaccgcaaatgggaagccagcttatgcgtttaaagtttctcagggggagccgaatttgatgccagtgcaattcccctcggatgcttctcaagggccggaagttccaaagtgattttcgtaaaaatgataatttttgtctatctttattctttaggggtttgaagagaattggtgatttgccacacggagacgtcgtttgtgcggttacaatggcgcggaatggtcgccacgtgttcaccggagggaaaggcgccgtcaaaatgtgggacatcggagagcgtattggccttgcttcgtctgccggtggttccatttccccctcctcgtcgaccatcgccgatggaaccaatggccgagtgggcagtgccgagccgtggacacccgtgaacacttttccatgtctgaaggacagttacgtccgctcttgcaaactttttccggatgcatcaacgcttattgtgggtggagagacgaggaccatttgtgtgtgggatttaaacagtgaaaaggtgagcgtcggaataagaacggtatgccatgaggagggaccaaacttggcaacttaactttgtttggccatgtcactgaaacccctcttggatttccattgcccgcttataccgctcattaacaggtgaaagccatgctcgactgcgatgctgaggcgtgctacgctttggccatttcggccgactgtcgcttgtgcttcgcctgctgttcgagcggttccattgtcatttgggacttacaaagtgaacaaaaagttgcccaactcgatggacacactgacggggcgagttgtgtggatttgaatggcgatgggttgcgactttggactggcgggttggacaacacagtccgatgttgggacatcagagaacgcagtgagctgagcaagaacgttcttgagagtcaggtgagcaattagggggcgggactttttatagggactttggattgaccacgtttttggggtccatcgcctagctaaactttattcttttatacaggcccgtattcaggggg

SEQ ID NO: 6955 - DNA, 3324 bp, Heterodera glycines
ttttttgtgacttcggcggtgcatttttttgaaaaacaacactggtaaaaaaaatatagcccgaagagcaaaaaaaagctttccctgaatttttttctggatacgggcctgcttttatgtctaacaattcgttttttcccaccttagattttctccttgggctgctgccccaacgacgaatgggtggcggtcggaatggaaaacaacaatgtcgaggtgtgccccccccccctcactgcttgtaatataaatgctgtttttaaggtgttgcacatgaatcgccaggataaatatgtgctcgatgaccaccagagttgtgttctttcgttgaaattcgctaacagcggaaaggcaagccaaaatgagtcgaatttgaataattttatgtttttcagtggttcgtctccaccggaaaggattacgtcgtgaattgctggcgaacgccgtacggttaccgtcttttgaaaagcaaagagaacagttcggtcctttcttgcgacatttcgcatgacgaccgtttccttgtgactggttctggtgacaaaaaggcatctctctacgaattgagcttttgagggttcttcacttaattgttttcccattcgcttttgttttgtcatagccaattttgtcgcctccattttcccagtggccattttactttggaagcgtttcaccaatggtttaacaattcttttcgatgaaggccatcctagcacattttgttttgtcatttgtttttattaaacattttttctctcggattggaatcctagcgatggtgaattgcattatcagtctctttccccccgacagatttccccttcctctgttttcccattcgtttttctatccgcttgatccctccattggttttaaggtgctttctaagccccaaattctcactattgttcattgattaatttcatttgacacaaaagaaatcatttcactccacgaaacattcacattttcctacaaaatggtcggctatgaatttacttctttttctgattgatttgcataaatatgtatggatatttcaattcggatattcattatgacaaatctcggacctaattcaaacaaaatcgaaaattcatattatgttcgcacctgtacattaataccattttttatgttgcaatggttgagatttaatttagctttttcattccgagggggggggggtgagaagaacatttcgggattaccggttttcccgcgggaatccctttcccgccaggctgttttttcagaaggtactgacatttccaaattgtgcaccctccccctcggaatgatttcaataataaaaagaatggaaatatgaaattgattcgctgtttgcgtcactttcatctcgcattggccaacagaatggcactgatccggcgtctgttctctcctaggccctccctccctcggccccagtcggtctctgtcagcaatttcagtgccatttcagtcccatgttcgctgtcgtcggattcgcaactgaaaaactcgaagagctgttcggctgcttgttccctcagcgacgcgtatggcgaatccaacagagaaataagcttaaaaaatggcaaatcgaagacgaaatatgcccaccgagtgcaccgttccccccccccgagaaatttttcaataaaaacccataagtttttccaagggaaaatttcaaaaaattgattttttccgctaattttttttttgtaatttctttatttaaaaagttttctaaggctttttttgtttgtaaattaaaaaaaaattccttgggagggaaacggcttggggggacaagctgttccatgcctaccaggcgaagcacgcggcggtacatttgactttgcttattcagttgaagcagcgagccgagcacagagacggccaaagttttaacttttggccttcccttccccacggacagcttaagaaatatttgatgacaacgaaatgaaaagtcattccacttgactttaatcggcagctcacaaagtgccgtaaattcgaaatatccgtccggattttcttcaatttcttgcaattggcggtcgttgagaagcaatcggaagagttgaagcactgggccggggtcgccttgacgggaaacgatcgaagaatggacggagagaagatcagagagaaaagagtcgaggaactggaaaaagggggataaaacgaagacacagacaacaaacactaagggcaccttggcatttcgtttgttcggtttcaaatgggaaacaatcgccaaaaaagcattttgactcgtccaactgcaaacgcttcctaattttgttgcgattaaagccttttccttttcggcactccttttttgcctcaccggcagaaagaacaaagccagccaaagcatttcttccgtaagtgtccgaatttaaaagaggcgccaaccgcgcaaagccttgggaaaagcgccaatcggccgcttcgaacggctgcggtaaatgcgccgtcgttgccccaggcatcgttccattttggcacttgcctaaggataaattcgccaaaataatcaaaaatagcataaaaggcattcacctaaggtgaacagcgaactgagcaggtccctttcggcaattgcttcactcaacgggtgcttttcctccaattgcatcaattcacccagaattgagcatgctttcttaaaatgtcaatttcaaatggcggaatggcgtcgtcagaacggacctcgcgaaggccgtcgatggcttcgcaggccctttccacgactttgccaatcgctttgttcagctgacattgcgaaatcgtgagagagtttagggcagaagaaaaggcgagggggagaagccgaccgatggcctcaaagggaggaaaaaacacaaccaaaacattcactcaacaaatgccaaaattacagcgattgcctcgagtcgcacaaaacggccgatgtcgccgtttgttgttgtggtgtaatcatcggaaactgatgctaagctaacaaacacacttttcgtatcatatgtgttttcttacaataacattccatgagctgcccccagtcgaagtttggaggtgtatatttcgtctaacagagtgccaacggattgaattgccgcaactctcacaaaaacccatctcggagtgcacacgctttcattgttagaaagaaaatgacgcaatcacatcacttacatactctgtaacggcatcttttaacttttggagaatggaagcacccaaaagggaagtgccatcgaaatgggaagagagaaagccggcggggatatggccaaggggaacgatgcaggaaatgccggagggactcatctcggcactgac

SEQ ID NO: 6956 - DNA, 1531 bp, Heterodera glycines
tagggaagcatggggaagcatggggaggggaggggggaggaaggatagggaagcatggggaagcatggggaggggaggggggggggaggaaggatagggaagcatggggaggggagggggggggatttttttagcaaatttcatgaaaagattgctatttgttgattttcgaaaaaacattgaaaattttacaaaaattttctaaaacggcctactctgagggtggggtgcgttttgcctttcccggttgccccgagtctcttacggttgcccccccccgtgtgctcacctgctgcaccactttgtccgtctcctcctcttcgtccgcgtcgcccatcgcttcgtcaattgcgtcgtccatcatttcctccttcatgtccataatttcggattgcttctcaaattcgttcattatcttctgaatttgcggcaagttcagctgcttgttcatgctgcgcatcgcccgcgtgacgcctttcattgccttgaaattaattaatcgaatcattccgattttcaatccaaggggaagcacttgtgccattgagtcttggctcttcagcgtttgaaccttcaaagagactgcctggatgttcgctctcatcataataaactgaataggccattttaaatggcataaaccaaaaaggcaaaaacctttttcacgtattgacgcgtcctaaccaaatcctttgccattattcgtacagaattctaaaatgaaattcggaaattgatataccatagcaaaaggatgagggttaaattctataatgaaatttgtgacgacctttttttattcgttttctgccaaaaaaaaaataattaacacctaccatttgccccattttggccattttcttaatgtccgcgattattttcttctccgacatttccaaccgttggcgttccctgtccaattcccgaattgctttattcagtgcacgttggttttgccgtaacatttccgtcggagttttgcgctttcctaatgtattttattaatttacaaaaaaagaagattgctaacttaccaaaaagaaattccattggaacgaaagtcaaaatgattagttaagcgttaaaattggaaattatcagcaagcctttacctaaaaataaacacatattacaaaacaaaatgaatgactcatctcaccaaatgatttttagatagtaaaattcaagaaatgagtgccctactaaataacaagatgcatcaaataatttcaatatttatcaagaatttgtttttacaacatttctaaaaatgaacacctttcttcaaccgtactatgtgtcaagccctgtgttagacaaaatgactcataacgccaatttacataattttcaataaatattactggtcgctgcctttttgtattgttatttttgatcaggcacaaattacttcatatacatctaaattcagagttcacatcatgaaaaaaagagataccataaaagtgccatagttcacaattgaaataaatagacaaaatatgaatggagggggggggggggggaggat

SEQ ID NO: 6957 - DNA, 997 bp, Heterodera glycines
  unsure (1)..(997): unsure at all n locations
ttttccttttttgacagttctgtacatgattaatttattggaaatgtattgagnccattttaacggatggacctgcaatcgcttttttcgtcgcacaattgttgactgcaaaagttgtgcctccgttaactgctcattcagttgccgtaatttctcactcatacgctgcaagtcgttcattctttcggttgactccacattttcacttccctccatttctttttgcatttctgagacgcgttcgttcattgtttgcttcttcgctttcttcatttgaacctataactgctgttaagtaaaaattgccgtttaatgaaattttatgggaatagagataagcaaaatattcccagtaaaaatgtttgcctgcgaaagtaattgtcttctcagcagctcaacttcgtcttcgctgtggtgttcggttgttttactttctttggacatctctaaattaaccatctgtggattaaatacaatttgttttctgttagatttgtcccatcaattttttttgtcttacattagggaaaaccagacaattatcttaaaacttatcaaatacgtacaacaaattgtaatgcacctggatcgctttctaactccatgctgactgtttcataatcatcctcttcacgtcttcgttttaaaacagatgaattgagatgttctcgatttaattgaaatttgtttttttgacgttgattacgcgtaaaaagctcttcttcctcgacatattctccttcttcgagctccattacaagattacgtacaacaacgagaatgaaacttcaacgaatttgaatgtaaaattattattcgttaaaatttttaaacaaaaaaaggaaaaagtgaaatattaatttaaaacgcatttggcgtactatttatttaaaaaaacagcttttatttttctctttttctgtgtagcttttttcatatacctaaatctgcttattgcttcaaattcaagatttatcaaaaactttgggcaactagc

SEQ ID NO: 6958 - DNA, 2567 bp, Heterodera glycines
gcccttaatttctcctgaaaacttagaaaattcaacataactctgcctaaaagacagatttctgtctgcaaaagaaatagaaatgtgaaaaaagatttgttctttcttatttagcttattttatcagtttctttttggtagttattgagatttgattcgtttttatcaagtgtctctattttaaattaacacccctttttcgggaaaaaattcataaaaattttttccatcgtcatttcgccttctcctttttagaatcttaatattttcagaattgctacgtacacttaaaaattcagctcgatcggttcatgggaagtggtcaaactcccaaaaaacagggtgtctttattttaaattaacacagtgtatatggcacaacatttcttaacattttattgttgcataacatttcttagcatttccatcgtcctttcctcctttttggcattttttatggaaaagcatttcttcttggcattttctttcttttttcttaacattttcttgaaaggtacggctcggccgcttcgcggcctcggatcattctcttggcattttcttatttatttatttattcgtaaaaataaaaaagtcatcagaagggcgaaactcacttactctgacgactgttcagttaatgtgtcgtagagtaaatgataaaataaagtgatgatcacaggaattaaaagagacaaatatgtgaaaataaataaataaattgaggtcaaagtcaaatgaggtcgaaaaataaaaaaaaataccaaatcacttaggaatttgttataattctagcttttccggtttcattaccctagtgaacttctaagtttggttttaaattgatttaaagaatttgttttgattagttctttatcgagttgattccacaattttgttaccctcccagcaaagggaatgaattttttgcccagtttatattttgagttaagtctgtaaaaggcgatgttaaagcgcgttgagggattaaaaattgaaaatagtttcagaaaaatttaaaaaaaatttaactaaaaaatgttcggcataaacaattttatgcgccatgaacagatccaacagttttcgcctattctcaagtgttggcagttgcaggtattctaaccgatttaggtatggaattggtggaaggctgcatttaaaaaatacccttttggtgaaatatttttgacacttttctatttgtttaatatttttttgtagagacggattccaaacctccggagcgtattccaataaaggcctaatataagttttatataacgtaatccaaatcttagatgatttggatttaattattctaaacaaggaacgcatacgtaaatacgcattccttgttatttggttaacatgaccggtcacattttttccattttataattgcctcgtaccaatcttccacaactgctattagttgacttgtcgtagacctatttctaacaaaaccaaattggtattccgaaattttattgttttttaggaggaagttgtaaatattttggctaagaattctttccataacctgcaaagtgagcaggttagagaaataggcctataattttcaggattagatttatccccttttttgaaaagaggtaaaactattgattccttccaaatatctggaagagaaccagaatctaaagaaatcctgaacaggtcagtaataacagttgccaatgaagaatggcagtttttcaatgttttatagcttatatcatccggggatgtaccatttttattcgggagttttttcaaaagtttttgcgtttcgatgatgttaaagtctatatctgatataaagcattgattagcaaaagtgttgccccagtttatggcagcctgggtcaacctcagaatcgttaaacgaatttgcaaataagttagcaaataattcagttttttcatcaccaccatgatagcatttgttttcaaaaactaaatttggtatttcaaagggattaacatcgtatttttgtatgtatttaaaaatcgaattttttccctttgaaatagccttttttcaatttgagaatgaaatttatttgtttgtatttttatgtgcaaactaatgctatcatatagtgtttttttgatggatcagttttacattgtctatacagtctggctttctctttgatggatgcaattaaatgctggatatttaggggtcatatcttttttggtaatccttttcattggaatacactcgtttaaggtttctagcagtgtattattaaaggcactgtatttttcgtttatagtaaaatgctcattagataaagcgctaattctagaagaaaccataatattaaaaagagacacattcgacggaaaaaaccgtcgagtgtaaaagaattttgttttttgtagtgtttttggaatagtcaatgtgaaaaattgcgctaaatgatcagaggaaaaaacaccaccttcaatagtacattgctttacaatttgatcattcgctgataaaactaagtctaaccacgaattttccctggtgggtccgattcgtggcattgaaaaaggaaagtttactaaaa

SEQ ID NO: 6959 - DNA, 5872 bp, Heterodera glycines
aagtttccgggctctaattatcagtggaattaaaaaatgaaagcccgaaaaacgtgcaaataatcaaattcgctgacaaattaacatttgccagtaactcacttctctgcaatttgtgcagaatattgcccttcctgctgctgttgtttttcatcaaagcataatgcatttttaatatgagcaataactaaaaattttaacataatttaccaaagtaaattataaaatagaatttaaaatgtaattgttggtgcgttaattattctctcccctcccctttattctctctaatccgcatccgccatggaacgatatttattttatgaatgaaaagaaaagcaacgaaattgggattgatttacatatttattgggccgttttgcccaattaaatatcatatggaaattgcgttcatttcttttcttttcttcaatttaccggaatatatcaaaacataatttaaaataaaatttttaatgagttaattaaggtaattaagctaagccccacccctttattctttaaattggcatggaacgatattattactcattttatggatgaacaaaaagcaacaaaatttggattgatttacatatttattaggccgatttgcccaattaaagatcaaatttgcattcatttcgttctaatgagttaattaagataattaagctaagtctttaaacttacatggaacggtattattactcattttttggatcaataaaaagcaataaaattttgagtaatttgcatttttattggaccgttttgcctaatttaaatatgtattaaatgtttcttttcttttcgtccatttcgcccattctccgccgataagattttctgttgcattctgtggtcaaataaacttttttctgttcatcggccaattggactgtgctgtgatccgtccgataagaaggccaaagggacggcgcaaaatgaaaagggaaaaatggaaatggcacaaaaaaagggaacgaatgggagacgacgaatgttgtttatgattaacattttccattcattcattttttgtcccactcttctgctgttgctgattttatcggaaaacaacggcaaattaacgcaaagaaaaaatggccaaaaatgcggggaatgaacggaggggggggggaagcatttgcaacaatataaaattaaaatattacaacaaaatcccacgatttacattacacaaacaaagggaacaacttaaattgaacaaattcacaggaagaaatttttaatttaattaaaaaaaaaagattttgaatcgttttgttatcgatgaaattaatagtcgagactaaaaaatcatcgaaactcattatgtaaaaataatgaaaaattaacaattctaacttcatcataattgtttgtcaaataaagaaatttaattatgtagcaagttaattataaatttttggcattgcattttttggctaacgaaaaatacgaattgatgacaaaaaacaaaattacatataaatgacttaaaataaaattcattcatttgaataccgtcagtatttcagcggtccatctttttcttattttatttctttacttcatttttctttacattccttctgaaaattgaaaatattattttaaataaattagtgtaatcgagcaaatgaaactcataataataaacagtacggccaaattaacgagtgatgagccaagtcatagcgaaagggggaggttatgctagagagagaaaaagtgagacggcgagagagtgtgggaaaaaaagatgacagacagtgaaagagtgaagagagagagagagaaagagattgaccagtcgccgctaccgattcccccgtcaaagaaagagtaacaaattcaaaaataattatttataaaattatcagcattttggcaaaccgataaactgttgacattctaaggctttaaacaaaatgccaactctttgcattcatttatattttaattggcattcattttgttttggcaattttctaagcattcatcacctgatatagtgtttgatcagctccattggtagtgggaaaatgattgttcgattcttttcagcactaaaataattaaaaatataaaaaaagtttttttatttccacgctttttgccttatcgaagtcaaagtttgaagaaaacggagctgaatggcaaccggcgactgcgcaacagtgtgtgccgcttcgcttaacgcttttgaggctttctgctcgccttcagcagcaataatctggaaattggaaaatattaataaaattaaaaaattaattttaaaattttacatttatttttaaatcttcgtcttaatgaaataatttttaaattcaacccaatcttctaaaagcatgttaatatgaaagcatttgaacataaaaataacacatcccttatgatttgagaaaatcattatatttaaaattttcttgtaattttggtttcaacaaatttcattaaacttttatattaaaataaaatgtaattaaatattaattttgtatttttctcttcctaattagtgttacctttgcgcccgcttcgcgcgttgcctccgcttcagcggccatcgcccgttgaagctgcaccggaaggcggacatccttcatctccactcgttccaccttcactccccaggggcttacaaataaattaaaattaagccaaaaaggggattttttgtgttagggaggcatttaaaaataaattaaattaagaattgctatttttatggagtccatctgaaatatatcccaatccttgaattatatttccgactttgttatttcgtccagtgtgctttgcatttgcagcgagatttgttcgcggtcgctaaatttaaaaaaataatattattgtttaaaaaatattatttcaaccttaacatttcggccaatgtttttgtgcccaaaatgttccttagcgtggtttgggccaacaattttgtggatcgacttgaatcctccacattggttaccgaaatggtcgcatttgaaatacgaaaatagacaacaacatcctgaaaagaaaattcttatatttttaaaaataaatgtaattaattttaaataactgagaaaataataacaataataataatatgacaaatatataataacaacataattgaggaatattaatattcatgttttaccactgctacggtgacagcatcgcgagagagaatcttcaaattaaataataattagttttatttatttaatttaaaaatattaaatagtcgaattcaaacctcttggggtggcacgtcaaatgaaagcactcgcaggtcaacttttcggtaggtgtcaatgcatggaattacgataaaaatgccttaaaattaatattttagaaataataaaattaaattctcttgaaagtcacccgggccgcgggctccgccgggcaataaacggcccaatcggaaaatgacagctctttcatattcacggacaacctgaaaaatgaattttaaatatttaaataatgtaataatatatttttttgtacctttacgcaaaaacaaattgcaattggaaaagtgagggcaagcaaaatgtaggaaaagatcatcagaatgtagccactgatgcccaagttgcctgtcatcggctcttaaattgttgttgtttgtaatacaaaaaaatagttttgtataagaaaaaatcaaaatttaaaaattattttaccaatatttaattaaaaaaactaaaataaacttggttcaaatggcgaatattccaggcccagcacgtggctggaaaaccggtgatgaattcgtggattacgcatttcattaatgccaattaaaattggaaaatgaatttggaaaatataaaatcaattctctttggcattttctctctgccaatgaattgggccaccggcgctgagtttgtaaggcttaaggtagggccaaaacaaatatttatacacggggatttattggctgagttgcacaggaaggaatggttgaataattggttattagtccgaccaatttaatttgacaaaaaacggaaaatgggaaaaagatattttttttaaatattaattaaaaacggaaaaattaaataaattacgaaatttttatgggttcttaaatcaaaactttccaatttagcaatataattggagccttgcatttggagagcttctttttaaaaaagcaataaatttaaaaaagtggataataaaatttattttaaattatactttaaaaaaacaaggtaaattgaaatggattttttagagattcatttaatttagcaacatttttcaatgcgctgactcttttcttgcggaaatattaatgccttaaaaataaacaaagcgtgtaaatcctttgtaaaatgaatgaatgcaaaatgcctttttgaggtgttagtggtgaggatggccttggcaaaagaaaaaaaaaatggacaatggaaaaagaaacattgccaatgaaagggaaggaattggcattttattatttaaaatcagcataattttaatttgaataccaaaattaaacaaaataaaagtattttgttatttttataatttatagttatttaaaaaataaaaacattcttaagatgaaattataattttaatcattaaccattaccatttgcaaagaaatcgttacggtcattgcccttgaaccgaattgactggtgttgataatgctaaaaaaaagttttttttttttgcttttaattatcactaaaaaatgcctgtgatgcttggaaatggcgttggtgttgtgtccaatgcgatgtcgtcgccgtcatcggttgtgttgcagaagctgcttggcctcgtctgctgctgttggtcaaagttgacgacgctctcccttttctcgaactcaaaagtcctctcaaaaatgtcattttaataagaggctaaaaaataaattgaaaatggcagaattttttggcacattttttgggcatttacttcctctcaaaatttgtgccaataaatgcatatgaaaaattaatcaatgttttttgccgagttcgcctctataagttgccgcttttaagccttcggcttcgcttattagtgccgtcgttggcaattttgccaactttgcctttacgcgggatacacatcataatgatggaataattgagttaaagtaagtcgtaagtggcaaggaatgttgtggtaaagtctagcacaaataaatggcggaagaaaatgtgaatgattattggccaaataaaaacattcggaaaaatttaaattaaataataatttggtaaagaaaatagcatgaattttcaacactaaaaagctaaaagtgaagaaatactacatttttttgtttcttagtatgcttattttccaataattaatattaagataaatatttcaaaaaaattttttaactaagataatttagtcaaaatatcctagataattatagagaatgtaattataaattaattggagtggttggtatacaatttgaaagaaaaatgaattggagcagcccatgacattctgttgaaagtaaattgcatggtttttatgaattagaaaccgcacactctcacacaaataattttgtgccagggaatgccatcaaccgacgcaaaaaaaagtgccggctgagccctcaggcaattggcaattgctttatgtggggactcagcgggcatcaatcacctccataaaaaggagaaaaaaaagaaattaaaactgaaagcgaaatgggaagaaaactcaaaaaatgtgacgtcatttgaaatgctatttttatgaaattccctttgaaaacatccaaatttatagtagaagccgatatatgtagctaaaataatgggaatcaaaactgagttctaggaaaatgtgtgcttat

SEQ ID NO: 6960 - DNA, 2065 bp, Heterodera glycines
  unsure (1)..(2065): unsure at all n locations
aaggttaaaattggcgaagaattgtcagaaagtttcagaatattttcaggagtgccccagggaagtgtcttagggccattactctttttaatttttataaatgatctgccgtccgttattacaaatgaagcggcatcagttggcataaaaatgtatgccgatgatgttaaattatattatgcccacgaaaatgatgaccattcgaatcagttggataaagcaattgaggctttggaaaaatggtcaaaaataaatgggttagaaatttcaactgaaaaatgttttgttttatatttagggaaaaagaatatgaaaaaagaatattttattaactcaaaaaagatttcagaatcggataatgttcgtgacttgggaattataattgactcgaaacttaatttttcagaacacataagcaaaattatacgaaacgcatatcttagaagctttcagattttgagagtgttgaaaagcagggaaataaagactctaacagcagcttataaaacttttgtacgacctcaattagaatacgctaccgaagtttggaaccctaatttaaaaaaagatatagacaaaattgagcgggtacaaaaatttttcacaagaaaagcacttagaaaatgtggttttgtgtacaaaaaatatggggaaagactaaaaatcgcgggtttacataaattagaagaaagaagaaaaattaatgatttgacaacagcttttaaaattattaaaggattcaccagcctagaggctgagcaaaatttctttttctcagaaaggcccaggaggcctttacttttacgagtaaagcgccacacggccaaaacacaaaataatttttttcataggatagtaagaaactggaataaccttccagtggtagcggtgcaaattaataaggcaaaggaattcaggggtttactaacagcaatgagttctgagtaggaaattttctgtgccacatatacactatattttaatcacctgtgaatttttaacatttgatttatttttattcatttttattacggtattcattttgtattttttatttgatcatttttatttgtttgtttttggcaccatataagagcactaatgtgcctttggtttgctcgataaaattaaattaaattaaattttctgaaaattatttaatttattgttattttttatattaatattttgcgattctatatgaattatgtaaaaattttaaaattttgaaattttttcattaatttttttgttaattaccccatcagatatcattaatgatcacagcttagctgagacatatgctaatattttgtcaagagacgaaacaacacggcataatgctgaacatttgttggccattcgaatttgttccgcacgaatttggcaaatttttcagcaaattcatttggcactcaaacagaagcataatgccagattgaaggatgtcaaaacaaatgaaattttggcacaaattcaatcaaattggcgtcgcttttggaaaacacggcacgcaacttacaaatatatgccaaatgatttgtatgaacattgggcagcagtgcaaggtcaatggcaagatttgacatttttggcgcgccaattagtccaacaattagtgaccgataaatataatgttgctaaatattttcaacacataaagcaattgttgccagagcggaatctgttttatcagttggctgaggagcatgccaaaaacataaccaggtgaagggagaacctttgatcactgatcagatatcacttatctcaaatggaagtttttggccactactgtagtttgctgtatccctcttaaaacgaaaagggagacctttttgttttgaaaatttttttttatgacaacttgttattaacccgaacccgaacaaaaggataaaatgatttgcatgngaaaggattatataaaagatcaatttgatatacctattttgcattatttttccagaaatttggacgctaggcttaagaatttttttttatttctaggattttctcgggagcctatctcaataacccgcaaccgatttcaccatttcataaa

SEQ ID NO: 6961 - DNA, 1173 bp, Heterodera glycines
atcttttttattaaatttattaattctttttaaatgatatgtatttgaaataaataaaatgcaaataataataataataaaaaaaagaaactttaaagattggcagagacaaaaaatgcatttagtgaaagtcttaaaaattcactgctggaaggaaaagggaccaaatttcggctccaaaaatttttctcgcttagtcggggcgatattgcattatatgagcaaatggttagcaaatttcctcaattaaaaaatttgtctagatcaggtaggtgcatttaaaattttttttataaaataatttttaaatatttaattgattttattatacaatagaattaacgaacgacgaaataacggaattacaaattcgaacttatattaaatttcttgacaataaaaatgatgagcaaatttgtagacgcgcaaaatatttgctcgatattttagcattttatcaatggtattttaaaataatttttaataaaaaaaaaactttttaaggttaaaaaataaggacgacattttaatggacaaacaggccgaagtgttaaaacacttggagttgtacgaacttttgatggtcattaaaatttatattttttagttgcaaatttctttgtttttttttcaatttgaaattaataaataattaaatatttttattttaggattcggtgccaaatttatctcaaaatgagatcaataatgatatgattatgcagctgttgtacgaacagagaaaagaattatttccaaatttaaatattgtaaaattttcaaattttgacagcccccaaggcggtgaaacggatgctaaatcggcacaacaatttttgcacggcaaaatcctccaaaaattggttttaaacagcgaatttttgacgcagttaaaaggtctctgaaaattctttaaaaattagcaaaataaaaaataaatattaatttaaattttagattagatacaatatttgtaaatttcggataaggaatttaaatttagataattataaataccgtatttcctaaaatagagtccccgggggttttattttcaacccccctcaaaagggaggctttatttcaggggcggttctaatttagggggggggggggctgtattttaggaaataaggttgttttatttaaaaaattatttttatttttaaattt

SEQ ID NO: 6962 - DNA, 3402 bp, Heterodera glycines
taaattggaaatgccaaaaacggatgccaaaaattcacattgggatgaaatgcttcatcatcatctccttctatgttcatgaaattgagtaagcaaaattaattaataaatttaaacaaaataattataaaatttttttttaattcaaaaaatctctcaacaggcgattaataaaccttaataacactttaatgaatttgggttaattataatataaaataaaatgcactaatgaattaataatggatcgggggtcagttttcggtgccgaccgtttgggcgtcgccaaatttgaaatgctaaaactttttcctttatcagttaacatttagcaaaaatgccatcaattgaaaataaaaccatgaatccttttctaaacaatttgattaatttttttttaaattgaaaaaaacttggaaaaattagcaaaaataattttaaagttttttcaggagaaaatatagttttatttgaaaaaaattctatgttaaaaaaaagttatggcatgcagcgacgaaaagccagaaaaagcccgaattaccgaattatacaaaagcatttaatttgggttgctatttagaagagttattaaggagcattaccaacggtgctgaaccggccggcgccgaactggctggcggtttcgctaatgaattgcctaatgaattcattaagataaatgcactaatgaattgttcaatttaatgacaatgtacaaaaatgtgatgtttaaaggacgaaaaaataatgatgattcagatggtgtaattttggaaaagtcagaagaagacctcaattttgaggcaatttattttcaccacaaaacggtattaaaagaattggtcaaattgctttgggtctttcaacgatatttcagacatattaggtaattaatgtgaatatcatttaaaaaccaataaataatttcactaaaattcatcagcaattaatagagcccggaaatttcaaatttgcggatcccgctgcggggttggaactcaaaatttttttgggatacgggatcccgtgggattaatcccgaaaatcccgcaatttaaaaaaaaattcgggattgcggattgggattccacaaaatcctgcacgggatcccgtctcgtaccgggcactagtaattaatccattcataattcgataattaatacaatttggaggtttgaaattttctataatttattctctataactaaatttcacaaattaaactgttctcaccttggctttattttaatgatttttttaagaaaattatgaattagatttattgaaaattttgtttcatttaatttaaaattattaaaaaaaaatttttttttaaagaattaatgatgaaaaagtgaagagactaatcattcaattgaatgtggacattgcaatggctgaccttttcgtggaagtgaatgatccggcaaaaaaaacgtgccaatctttgcctaatggacagtttgttgactcatctggtggcaaatggcacattgtacacagaagtccaagaatggcaaacccacatgctttatgaacattttattaatcatgtaaaattacaaagataatttatttattttttaaattaaggttctttggttaatgtttaatcatgaaacttgttctcgaggggtttttgacgacctctgatcatgaaaatgacatctattttggccaacttctaactaacccgaactcggacaaaagtttaaaattccaattgtccatttatgattttttgttcaaatttaagccatttttaaagtagcgcaacaaattccattgatttaaagatgaatttaaaatctttaaataattccaaaaaaaaaacaaatgcaatttctttttttgctaagaatttcatacagtccatgattagaatcaatcaatatagccgcattgattgatcagcttcaatcaataatgattgttggttgaccaaaaccaatcaatcctcattattcagaacgaaattccgcgttcatcggatgccgatttgcgctgggccaaaccggagtgccataaggcggaggtggcccaagcggcagtgagcaaattattgggccaaatgcatttggtggtacaatcgcacagttttgtgctgggccaagttgcaaaggattgtgccgaatttgttcaatttgtcaaccaaaatgggattggaattttgaaaaatttatattgcggtaaataaatgtgccataggtcgtcgtatcgtaaaagtgccagttttgcagaattttcgagcaaaactcttcacactttttgtttgatatggttgtgcttataaaaattattacgagtttttctcgaaaaatctgtaaaattggctttttacgaaacgatccagccgcgtcaggatcaatcagccgaggacaactcagctttacgaggtgtcatgacaacttgtacacagacaactcgtacaatgacttatgctaggcctatgctttaggctaggcctaggttaagcttagtctttattttgtaaaaatttttattgtacgactgagttgtctatcagccgaattgtcccatcagctgaattgtcctcagctgactagtccagaagccaatccagcacattaaataaaaatcaattttaattttgattagatttttttcacagaaaatattgcctttaatgagcgaatcacttattacaagacaattttgggctcacctaattcggaggaaagaaaagtggcagaagcattgcttgtcattaaaatgacttttagtgaaattttacaaattgaaaaagcaaatttcaagtattattttcatattttgtttaaaaagcattaatttaaataaagatataaataaaataagtttgcatatatttaatgatttatctaaaaaacaaattcataaatccttaacaaataaaatattaataaattgaaaaatattttataaaaatgctaaaatataaatattcaaattttttttaaataaaatttgattttaaagagcatcgaaatttgacgaccaaattggcatctttcgagccgaattaattgccttgatgaaaatgcttcaaattgtccttggcgagacaaaagcaatgttttggatgttttgtccaattttaacttattttcattttctgaaaacgaaacaaggacattcatcagaaaagttagactacaatcttttaaatatgtgcttcaaaaatacggtgagtgattagaacaaaatcaaaaaaaaatagaattttaatttttgtaaatttttgaaattaaattcgaaggaaatttacaaatttatttaaaaaattatatttaagtgactaataaaaataaattaaaaattttaaattaatttcgaaagaattttaacaaaaaaatattataaatttttgaaattaatttttgaaagaatttttataaattt

SEQ ID NO: 6963 - DNA, 5865 bp, Heterodera glycines
agtcataaaaatccaaaaaagcaagaaaaaatgcaaacaatatactgaaaaaattaggcaaaagttaaaaaaatcccatttcatcaatttttatagaataacatttaataaatagagtaggatttttaagcacttaattttataaatggtacctaaaataggaatgataagtgattctttcaacaattacgaaaatttcatccaggtttcattaaattatttttaattaaaaatttatagatttaaattaaaagttttaatattatttaaaaattccgccagtgtcggattactggggagccattacggtggagtcagattttaatggctcgatcaattctttttagttttatcatcgttactgtaacttccacagtaaactcagtttcggtttcagtcaaaattccttctcccactgatcggcttctcatcgcccgaaaagagaaatccgaaaagtgttggcttttgtccactcccaaatgtcaaccaatgctacgggggcgaaatggcacttctgttctttgtcagtctctacgccagtgccgagatttgttgtgcgatttgttgccacatttttgaaagacggcgacagacaaatttagcataagcggaaaaagcaaaatttgttgaaattgaattgttggactttatttgaatttgttttatttggatttatctttaatagaaattttagattaaaaatataatgcgagaataatatacaccagggcctatttcaattcgggtcatatctgcgatatgactctatgacacgtgtcatatcatacgcaaaatttctgtttcaattaaacaccccaaaaatcatatgcggcgtatgatatgacgtgtcatagtgtcataggcgcgtttcaattgtgtcatggtatcatatctccgatatgatatcgtatctgcgacgccgtcatacgcggcgtacgactttttaatcatatgcgcgttcaattaactcccttttctacttatgatgccgtcatatatgacaccccttcccttgggcaaatcatatgcgggtgtatccgctccgaagcggagacatgcccaatcgtatgtagaataaaaattcataaacaattttaaacttaatcgaaaattttcattaaaagcattttatagaatgaaacctctattattgaatgataaataaattaaattatttttcccagtttataaatttgaagcgtaaatcaaaaatgcttaaataattttatttattttgggcacttcaaaattaaaattttttttataaatgagatttagctatgttaatttttttttacaaagttgtgatgttttctaaatataagaaaatttttgcatttttttttccaaaaaaaatttgttcagacatttcgaatatatccataaattttccttctcctatggacctaaaagtaaaaaactattttagttcagctgttaagctatttttcgaatttaaatgcttattaaaaattttttttataatagtaaaatatatttgttatttgcccttattttctacaactaaaaaaagatcaaaatttaaactatttttacggaaataaatttaaaaatgcttcattttttaaatctttgttaagttttttatttaaatggcctaaatctcattaataggtctttctttatttatcccaaattcggtatcatatgtaggcatcataaatagaaatcatatcatatgtagcaatttgaattgaaacaacccaaactgatatgacactcgcatatgataccatatcatatgtggctgtcagaagtgagttccgcatacgatatgatcttatggcacgtcagtttataattgaaacatgcatatgatatatgacacgtcatatccgggatatgatctgaattgaaataggcccagggaggcaaaagcgttactgctgcaaatggatgccatttttggttgacatttcctttgtccaaatgcccgtgctgaaattctccacgagttggcaccaacgccagaaggtctgtccaaatgaattgaacagaactccaaccaaccggtctctaattctactcattaagcaaaagcattttaagcaacataccagtcaaatgaaaaatttgacaacatggtctagagaaactcaaaccgtaattaaggcaaatttgaaaattggcaattgatttgcttcgctaaaatatttgtcccttcacaaagctaactttttttctcaaaaatttagagatttatcttggttcatcaacatttattccatatttattgatacaaatccctttagaaattattacgttttctatcctatttctcctttcattttcgtcctttctttaaattgccattaaaatttcgaaattcggcatttcttcggcgaaaaagcggcctttgcatccaaaacagtgattttcggctccccctcgccgcctttgacgctcagttcggcttcgagcgttttggaaacgtaaaggtagcgcaaggaatcgggaaaaatgaattgatcggtggtgccattgaacggtttcaggttgacgacattctccaaagttgcctgagggcatgcaaaatgggcgtttaaaattggagaattttgaaaattgaattaaaaaatgtgggtaccgtatttcattcagaaatataagccccccccccccttatgagggggtttttaaaacataagccccggggtttatactagaagaaatacagtagattttttacattgaaaattaacaccttcttaaggaaaaacagatataaaaaatatttttcattttatacttaataattgttgtgggttcaatcattaaacggataaagtacggtagtttcggattttgtttacccgcactcaacgaataattttgtttaaattattattatttaaatgtgtgtcagtttagaataaagcatcgcgttccaacatttaaaattctttagaaaatattaatattccaaaatcaaaaattgggtgtttgttaatcccttttaaattttgcagattcccgccccccccaactaaaatatttaccccttccggcaattggactcgaattttcaaatcgcacaccaaaaagaacacataattagtgatctccacacggtattttcgaagaacatcatttgtgcagttgttgttggtgttgttcaccaaattcacttcgatttccaccatttcttttgggtcataaattatcggtcgttcggtggtcgtcgttggcacgcgggaaaatgccgaaaatggcgaaacaaattggagcaaaacagcgacaaatatgcccacaaatttgttcattgttttattttatgtggattattgtatttattttaattaattttattttatttgggagtgaattttatttattcgtttaaacgtattttatatgattttgtgagcagccattttctgacagaattcataaaatttaaagtcattgtgcaaacatttgattgataaattccattttcattgaatattattttgtgcgtgtgaaatgtgagagcaaactttaaaaggtgagcaaattgtttttaatggattaataaatttatctatcgctatgtgtggcaaatttttaaaaatttttataaattcaaattattgggattggattagtgcctaggttgtccgttaaaaaaggctttacgcgcaaaatgttcaatatcatctaaaaaataagggaatatttcaaagctaaaaaccaacttttgtgtattttgaccgttttaaaagattagaaattcttcacttgttgagttttaaatgcgataaaaaatatttttattgacgcgatcacattttttggcgatttgctcagaattttcaaaattttcccaaaattatttttcattttttggttcggtatttgtatttttcttgaccaaagtttcgggaccgggctacttttttggttgaaaaactgggactttttggctgggaaaaccgggaaaaaagccgggaatttcccggtcccggtcaaaactggtcaacacgggaccttggtattcagttgtccgtgtccaggtcccggtcccgacctaccctagtcttcacattcgagtttcaaaccagttaaaagcaatttaacaagctacatttgacaaaataggggtagattttaggctctaaaaatcctcaaatttagggggtctaaaatcgtaaagcattttgtaactgagcaggaaagaacagtaagagaattgaaaaaacatatttattagtgtaattagagagaacagatagtcaaaatccacatggcaaatcaaactgtacatggtgagcattatataatacatgtgatcgaatgtcttccgaataattccgtccgattgtttttcaattcgattccctctcaatgacatcacatttactgctgctgctgctgcggttgctcgtcctgctgcctgaaaaatcaaaaataatttttgaacagaaattcctttttttttcttacgcattgccatcctcccgctgctcattgttagctgtggtgcgaaaaaggtcaatcaattcggcacgtctgctttctcgggccaaatccctcgctcttttgccttaaaaagggggcgggggagagcagtcaattgaagcatcacaattaagccctttttgggcccacccaccgtcaattcccacttggtctgcgttcgcgccgattgccagcaaatgacgcgccacttcagtctttttttgcttcactgcccacatcaacgcgttgtacccgtccatgtcagcgtggtcaatgtgggcgccatgttcgatgagaaaaacggctgaaaattggggaaaaaattgagtcggcttttgtaccaattgcttcttactaatgtccaagcgtccgtggatgcacgcgcccatcaaagcggtgatgccgtcggtcgcttgctgattgacgtcagctgcccattcttccaccagtaaacggcacacctccaaatggccatgagcggcggcgtccaaaagagcaaatcgagtccctgaaattgaaaaaagacattaattagggcaataataacgggcaacccaccgctgtaatcgatctgttcaacgtttgcgccgtgagtaagtaagaagctcgcaagatcgatctgagcgaaaaaaatgctaaatttttccacgtttggcatttttcacccttccggcacgagaagtgatcattatcggcgttgctccttcgctgtccccgagattgacgtcggcgccattctccacgagaagggtgactgaaaatggtgaaaaagtgctgatgagaaaattattccggacgattgattcaccgatttctgtgctgcctttgtcacatgcaagcagtagcggcgtcaaggaggcgtcacttcccaagtccacgttggcaccatgagcgatcagcacactgcacagctccaactggcgcatattgacagcaatccacaggggcgtaacggctgaaaatggggcaaaaaagagatgaattaggcaacagcacaattgtgtccgcaaaacgcatttctcacccatggtcacgttgttcacttggccaagggtggtctgatgcacgtccgcgcctttctccaactaaaaatgggtaacatttattattgttgattttttgcccctgaaaattgtgtctaccaaaagtgcagcaatttctgtgtgtccctgcataactgaaacaatcagggcaaatcgttgtcgggtgtatagcgggtcgttcatctgcagcaaggtgttcagctcatcggcgctcagcgagtcgatcagtgcacgcaatcggtcgatgtttccctgacggatgaagtcgaagaattggctggtgcgctgcgcaaagtcatcgacggaaccggaaggagcgggaggaccagcatcatcagacttaattaattggggaaaacga

SEQ ID NO: 6964 - DNA, 6130 bp, Heterodera glycines
aaattaaaaaaaaaaaccaaaaatggaaaggaaatttgtgtcaaactcattgagttcgcgagaaatgccggaagccaacaaagggtcgaatgtggcacttcttttgtggaagaggggcaatggctcgcaatttatatgtgtcattttagaacggatttgatgctccagttgagcaagttcgacggcaataagttcatgaaagcgatcagaaagggcagtgccaaagagttggcggtaaatcagcgtattggactcaaaaacgctggaccaattctgtttgttggaaaggttgatagatttccatgaaataaaaaggaagagaagcagatccgtctgtatccagggggaagaaggctggcacatgatcttccccccccccaaaaaaatgaaaattttttcatggaaaaaggcgcaaatttttggataaattagaccccaaaacggcaaaaaatttgttattttttgaagcgaaccgctacaaaagcatgatgctttttcgcggagcgctgaaaattttgaaaaataataccggagacaaacaatttttgacccgaagagcaaaacaacaacaacaaaaagcttatcgagtgcccttccagaaatttttttctgaatacgggtctgaaaagaagtgacaatgaagaaccgaccgatttgaaaagttggccaaccgccacagcgaattccaccgcctggtcaacatgctcaaaatatgagcacattttgcgcactctgtcgcccacaatttcgcacattctcaaatggtaaataaaaacagtttgcttcttcttttggcaaaatgtgctctcactttacagcccaatcggagcattgcctttgcacttcgctccgtgcgggcagttcaaaggacgggcaaatgccattcactcgctcaatggctgtcttaagcaattgtctggcactcatcggctgattttccacaaagctttcgacaatgtcttaaacatttaaaatcaggattacatgcccaaaaagtcgaaaatcggcatgccggcactcgtacgactccccccccccccccccccgaaattgttttggcactggcattccaattctatttttgggccttaccggggctccaccctttggtggtaacgcattgaatggcggagatcagtgcgccttgggcaaaaatttgttccgcactttgcacagtgtctttcatctgtttgatcaggcccagcaaagttgagtcgggttgtcgaagattttccatcaaaaaatccttaaaaatgcaattatttggacagttttagtcattgcattgcaaatacgcactgaccatcctcgacttgaggaaaagctgtaacagttcatccgcggtggtccgtggcctcaacaaaaggtaagcgaccaaagcactgacagccaaatgccactgggcaccggcagaacccattttggaagtggaaatgtcaagcaattccattcgaaaatggataaattggtcggaaaacatcggcaccaccggaggatgggagaagggaagtgcaaaggaatcggaggaggaaagcgtccgatggaaaaagtcggcgacacacagacaaaaggcacggaccaaagggtcgtcggagacaaaagactaaaagcgagtgaaaaattcaaattaattggaaaattcaagcggaagaacgaatcgggtgcaccaaaaatgtcgcaaggattttccataaaattttctaataaaaaattctacgatttttttcttgaaaaatttcagtttaatttttttttccaatttcggcggcgaaattatgtcgtcctgttcccgaacgaaccatggaaagcaaattttgaaggagcaaaaaacaacgactggcattgggtcgtaataactttggtgccaccaatttggtgccatcttcgccggcaaaggagggcatttcgctgggtttgtctttctgctgtccatgcacaacattttgcccaatgttcgccagcagcgaggccaattcatttgcaatttcggacagtcttttcactgtgttcgacgcctccaacacgtctctgtaccttctgccgaccatgcggcgcaactcctcacgctttttgtccatctcgcctctgcaacgatcgcaattttttttaattttcacagcaataaatataccaatacataggtttccgggggtcgctgatcacgaacacagcacccattgaccaactacgaaccccgggcacgaattcgaacaaacacttttatcaaaattcatttattacccaaaatcgatttgaatacaataaattagtcgaattgatgccggattcgtggccagactccggaaaccatacatcgttttttttgcttggaaagtgaaaaaattttgcggggccgaactgcacaagaaactggcataccggcgagcaaacaaaaacccactttagtgatgattggatttggacgagctgttcaacattaagctccctcatcattcggtccacgttatttaagtcaccactactcattattatgacctttcccaatatttgattagcaaaaaaaaacaaaacaaaaaaagtaaaacgacgaatattgcaaaatatcaaacggaaaaagcaccaataaatacatttattttatatgctttaccaaaaaatgaattacagaaccatattgcctaacaaaaaaaggtcatttcactgctctgattcacccgccttgccagccacctgtcaaattcaaatgtaaattttaagatttagttattctaaaatttttttccaattttccagctagaaacaaattttttttgttgtcataagttcttgatcagtgaccctgaaaacctatgcaaacaattttcacgaattataatgtcaaaaaaaacaatccaaaaggatctccccactagtttttttaaaaagaaaattcaattatttttcgaaggaaagcaactgaaagcatcggtgcttttacagctagaaaagtgcgctgctgtaaaaatacccgtgtgaaatcctgcatgttcgtagtcttcgcaattggcgtgccgtaaattcgaaactcatcgacaacggttttgtcgccccctccaacattgtccttcacgaaaaactgcagattgaacacattctaaaccgcgacgcagttgttttgcattattttatttcaccttatacaatacctggaacttgacgtatttgagcgcgacgagtttttcttcggacaagtcgatgcactgaaaatcattatttaataattagtcaattagcatcggttgacacattttctgaacctgaattggctcggtggactgtgcctggtcaaacccaagagtgttggtgatgttcgcaaatattttcacagttttcggcgccttctctttggggccgttgaaaaggacggagtgcactttgaccggttggatgaaggacacgctgatcagcagttgctcgtcacaatcactgatcaggggaccaactccgttcagcaaattgttcaaattgttggaatcgtcctaaaaagtaatacaaataataatgcacaaagagaacaatggatagggaataacctcgttcaaacattcgcattggactttgttgaaaagcggtgacaattcgcattggccaggaatcggtgagaccatttgagttggacaatttttggaccatttgtgggccaaattctgaagtgcagttttgtcggcaccacgcaaaaggtccacgcgttgactgaagaaaagaaaggcaatgatttagccaaaataaaggactgaccggcaggcccgtagcaagaggggaatttttcaagaaaattggactaatttttgaaaattattacataatttagggagggggacttgagcacccggccggccattatgtggaaaagcatcaaaaatcgaattaggtaagtccattagaatagaaagcagcgaacgaaaggactaccaattccaatctgctgttcactttactcattgtcaactaacccattaaggagaacaatgaatgttggcattgcactgacgccgtatgtgttctttgtttctgaatgaatttaaggtgtaatataaatattcaaggctttcgaattataacatgaattcaaagaaaaagtccttttatataaaatttcctcgcattatattgttattatggttaaaaatgtatgaaattagtttctggtacaagcctagtttaaggggtcatctttagctctcacctttgcatttgtcgacatccactttaacaaatttcaaattaagataattgttggataattcgtcaaaaaccggagcgatcgcactgcatggttggcacctaaaagttactggttaataatgaaattgcagattaaaaaatggacgataccaagtagcaaaaaaatcaacaatacacggagcagtcccaacgtttaaaagaaattttgtaaattcgctgtccgtttgtggttttacgacaggcattcttcagaataaatatatcagcagctaaagaatacgtcaaatgatgattttgtttgtaaagatgagattttaggcacgaaaaaaaactaaatatgtagtcctttacggtaggggtcaactccttccgggcaactccgtctcagaactgttcaaaaagctatcttttttctgagttcaccaaatttatcaaagatggtatcattctaaattcgaatgatatcaagattgttgaattcggtgaacaattaaaaaagttatgttgactcaaagttggctcagacggagatccggtcctttaagcaggcaaaaaaaaaacattggcattatgttaacaattaattttaaaatcctgaataagtaccgattctacagatcaactttaagcaaaaataaagtaaaaattaaggttcgagccccgcccccgggggcgggacaggttttttgggctcacccccgcccccgcccccgtgacgctgacccccgcaacccccgcccccgcgaaaagccacccccgccccacggggctcgaaccctaaaataaagcatacctctgctgctgataaaaaagaataattaaaaaggaggaacaaagaaatttgtttcaaatttaaattgatcatttgtttggcgaaatgttttctcaaatcaaatctcgacatgaactcaaaaaaccggcagcgacaaagatgcctttttctccatgtacataaattggtttgccttttttcgtcgtgagatttctttttagagtgctttatcatttgtttttttggtattttatttcgtatttatctctcaatgtttctttcctttctgtttcataatattttcttcctccgtcctcccttttcgcctccttttaaatggctcgtcagcaattgaatattcgccgccgttccgttgtctcttacgttggcatcagtgagcatggccaatgcggctactgcaaattcacaaaacgcgcccatgacaaggccaagttcggtacgttcgccctctgatgggctcgtgtcttttccatccgaccaattttctattccgggaaaaacaaattgtcgaaaagttttcgggtgggagtgagaggcgtctctggaaaagcattttgtttgtaaaaccaaccccccaacaaaacaactccaactcagcagcttcaaccagtgaatgcaatgcctccgtcgatgcgtcgacggtggcgagcagtacaaataatgatgggcaacaacaagcgaatccgcccaatgcacatgaagaaaatgccaacgatgatacaaatggagggggcgactcggccgtgttcggtacggcctacccttgtttttgttgctgttccgttggcatacatcgttttagaggggctggcgggggagggggaatttctgtgtggaaatgccatagacggactgggcatttgtgagtgcctttgatcaacccttttgtcacactttcatggaccatttaaaatcctctgtaaaacttaaccgagttttacaaaagccctccgattggttctgatggcattggtctcacaaaaacggcccttttggttgggattgaatcaaaaataaatgctaacatttttattagttccttttttaccgttgtgtcctttaattttgtgcttctctctgctcaggcttgcttgcttactgtctgaccattgactcatttggccaacttttggacatggggttggagtcggt

SEQ ID NO: 6965 - DNA, 798 bp, Heterodera glycines
ccgccaccgggggcgggacaggtttttgggctcacccccgcccccgcccccgtgacgctgacccccgcaacccccgcgaccttcacccccgctttgaatttttttaactatcgagaaattttatgaaataaaataaattttacttgttttttattttatttgtggattggtggatagtgcttcaatactaacagtacttttgtcatgagttcgattccggctaacgttttcctttaatttatttattttttctgattaatacagggtttctttatgttcttgtttctaagaaatgttctgatttgggggtaatgccttattttcatctaaaagaagaaaatttctgaaaaatttggctaagttctaacaaaattcatataaattcttaaaattttccccggtggcgcctatcggcaccgccggcccccaaaattcctatattttttcttaaaaattagaaataaatttaaaattcgcccctatcggcacgacccccacaaaaaaaaaatttttttttcttaaaaaaaattacacaaaaatccctaaattttggttactttttagtcgaaatctatgcaatttatgtcaaaagaaatagtatcgaggcgatcaacggatacagtaagcataaccagatcactctaaaacaacaaaacagtaaaagataaacagatcatttaagtcaaattgagaatcaattaaagtcggatgggtctgactcatcccattctcgtcctttcactggcaaagcgacggatgaacgttgagcagtgcggaaagacgcatggcgttatgcaa

SEQ ID NO: 6966 - DNA, 830 bp, Heterodera glycines
gcattttttgttttgattttttaaaagccgtgaaacgtttccgtaggtcttctccaaactcaatttgctcattgtctataagtgaaaaattcgacattttcattcaaattcaaaattaccaactcaaaatttaagaattttaaagttagatttggttgttattttctaaaatacatacataaatgaaggaaaatggaaaacattgtgatgatgtgaaggattccactaacatgacggccgactatgaaaagatgttcgctaaaaggtatttttaaagccgtgccaggttttgtcggttctagtgcagaatacgcgtcccatggacttttacgcgtcccataattttttatgcgccccatcaaatttttatgcgtcccaaggttttttacgcgtcccattgaattttcacgcgtcccatgaacttcatcaattaggattttttttttagaattaaccaacttttttatctttggtttccatccgaatagcccatgcttggcaaagcgtgtccagacatttgcgcctatgtccaaaatcggattcaaacaaatttttactaaaattaagaaatcgtagtcttctaattattaggaacattaattttgctgtttgaataattgatgtgatgacttttttaagaatatctaactatcaaattatcagacccccaatcgctttaggctatcagggattaaaaaaacttgttgaacccgacataggcgcgaatgtctgggcaattgtgaagatcattggtcccgaaatttttaattaattttttttctaaaaattttttaacacttttctaggggtgacttcaggcgctgagcacg

SEQ ID NO: 6967 - DNA, 2315 bp, Heterodera glycines
aaaattaagaaatcataaatcgtagtctctaattaattaagaacattaattctgctgtttgaataattgatgtgatgactttttcaaaaatatactaactatcaaattatcatacccccaatcgctttaggctatcagggattgaaaaaaacccgacataggcacgaatgcctggagcaaaacgtgggataaccttgccaaagatctctaaaataattatagaaaatctaaattggatgttttgattatgtttcacgcatccacacatccattgtactttttctaattgaaagaaagaaaagaaaatattcccaaaattaaaaaatccatgggacgcgtaaaaactcttggaacgcgtagaaattcaatgggacgcgtaaaaaaccatgggacgcttaaaagttcatgggacgcgtattctgaactagaaccgtttttctgccatatctgtcgcttttttctgttaagttaaatttaaggttcacagattcggatgtgaattacattatggctttgaaaattgttgagattgaacccatatgtatttctccatggaaaagttgtgaacatagacaaaacattgtcgaaaatggacgattttatgaggcacagcgattttcaagaggaggacggggacgtttttacaacagaagcagtggaaattttcgtgatgagaattttggaagacgaagagggggaagttataatcaaaggttttaaattgttggactttttgtttaattatatataatcatggcaaataaatgtctttttgatcccatcatagaagtaaaaagttcttttattattttatgatttttcattattacaaataacttttgtttgcatttttacaatggaaaaactgagcaacgatgagacgcaaatatatgacagacagatacgattgtggggaatggaagctcagaacaggtcttgaaagggatgtgtccagtcaaagaaactcgaggatttgttatcatgactaaacatagttgcaaattatccttcatctaaaaagggaatcgtgaactgaaaatggaaaatagagtaaaaatgggcggccatcggacactaaaattccagttttaaggtcctgtaactctgaaatgttgctatcggcagctaaaattaggaattcacaatacaaaagactgctttatatttttcgacttgcagttcgcgagcttccactgtaagaaatgacccatgagtttttgtatttaaaggcttcggaattcatccgttctgttggttggattgagtggtcttggcgcagaaattgcaaaaaacctgatgttatctggcttaaaatctttgacaattatggacaacaaagaggtactaatcggttgaaaactttccttttcattcattcaggtcgttgaaggcgattatgcatctaattttttgcttgttcgtgccattaaaacgaacgtatgtttttactttctcacatttgattgccttttgcacatagatttgttttagcgtgctgaagcttcagctgaaaatttgaaattattaaatccgatggttgaattaatggtgctctccgattctgtcgttggaatgccgtcgaacttcttttccaaatttgatttggttattgtcgttgaccaggattatgacacaaccaatttaattaacaagaaatgccgtcaaaacaaaattcggttgtttggttgctaattttttaacggacttttccgttttaatttggctgtttcctttaggtttgaagctgccagtgtcttcggttgggttggctatgctttttttgatttcaataatcacacctttttgatgtaaatcaagaaaagttgccgtgtagagcaaatacttttcttttttcagtccaaaaccgaaagagaaggaaacaattattgaaagtattttggatggggacgaagaagacggggaaactgggggaggaagagggacctgtggaatgccaaaaaagatgaaaatgaatggcattgaagaaggacgcggacattgcggcgatagccatcaaacactgaccatcggagacgaagaagacagcaaagtcaagaaggtgaatttacagagagcaaatgtagaaatgctctctattaatgcgaaattcctttcatccctttcacttcattttccgataataaaaagttcctcttccagactattccatttccgagctttgaacacacttttgccattgaactcgggacgaaacgcttccgacgcaaatttaacattccaagcacttattttgttgtgcggggtaagtaattcaagttgtattttatgtttcacaacaagggcgtagctagggg

SEQ ID NO: 6968 - DNA, 1880 bp, Heterodera glycines
atcggcacattatggtcaggtaaagcgtgagcgactatcgcatcggattatcctgaaataactgtcaaattaatagtctcaacaagcgtggacagcaccaacccagcatgaataaagagtggggtgaaaagacggtagagttggtcgggaatgtcacgcctcagaaatggagtcattccgcaaacctcattcagacaggaaatctgaagtttgcaagtaaataattaacaaacaatacaaaacctgagaacaaagggtcgcattcgggtggaaatgcccacggacaaagtcgcagtactccctggacgttatccgacattgtccgtgcatttgaatgcagcaaggccgtcctgtgaccgtacagtgcatatgcttttcggatttgggtattgatggagaatgcttttcgcaaatcttttgttgaatcaatttcatcttcaattgattggttaagattttttaccggccaattcgaaatgttcagtccccacacataaggatgtactgaacgcgggcgagcacagtatcggggatcctggccacaaacaacacgagagtaattcatttcgggaaaagtgccgttagtccatttcaagagagtcgcaaattgtttctggacaaaaatcgagacaatcaattagcaagtttacgtaccgaacactctgatgtctggaaacaaccactgagcccaacacaacagccttaacgataagttcaataaagaattgaagaggctaaatgtcgtttcaagttcggaggcgttatttggcggcgtgattttggggtgcacccgttataaataccaaattaacccaagaatattgtggtccgaatgaaaaaaaagaaaaattttctttatgttttgtggcctataacctaataaattgctgtttaacatatgactctcgaaacgagacactttcaccgagtatcaaaaggacgcacctcgaaatgcggagtaggacaaaacgtcgtcagccgaaacgtcgtcgaacgaatttttcaaccataacttttttctttctcaaccaaactaaacattcttggtattattcgaaagcattcgaaaaatgctattagcctgcaaattttcaaaaatttttatttatgcacaaaaaaatcagagcaaaaaaagttcgaattactgggtttttgagttccttctggccataacttttttgaaacttaacgaaaatttttgagattttgcaaattaataataaacacatagagctatcgaacaacaccaacaattcttaatttgattgacagtgaacaaagttatggttcaaaaagtcttccgacgacgtttcggccgacgacgttttggggtgcaccgctcgaaatgaccaatttcgaaattaagtgtatcgaattgaaggaaatattactcaccggtgctttcggcttcagtctttcgttcttcagtaatttgttcataaattttatcgtcccttctcatgcacggagtaaatttggcaccggtatggacgagatcggcctttatatttatgaaaaatagcaattgtaaaaccaaaccatgtaaatttgactcacaaatcttggacccatccaaatattgttttgttcccatacgacaatatgtaacggggagagcgaagagcccataacgtctccgcttctctcaataacattgagcccatttgaatagtcagtgccaatgccatggaaaatgagcataaaaaaagtgatgagtaaatgtacagttgagatccaataagtgaagtaaggtctgcaaaacagcgatatgaaagatgccaagaggtaaggaccggtaatcgttcgacgtgtctttcagcctacgcgcgaattcgacgttgggtcggaaatggccaaatattggcaggcgacgcaccctt

SEQ ID NO: 6969 - DNA, 1205 bp, Heterodera glycines
atttgattgtgtctttttcgactagcacttctcgttaattgacgactaaaataattgaaatgtcaataacaaaataaaaaacaattcaaatacccgtgtagtactgaactaagcccagacaatgccatttgaaacacactttccttttgctcaataatgccgcttcctcgcggttgtctattcaaggaatgtgcacgcttaacagaaagctaaaaatttcatcccaagaaatgccttacaatgactgcatttcttgatgatgaagttggtactgaggaatcgccatcgacgtaacaaaacgtttctaaaaactaggaagtttaaaattgccttctacaattaccagttaatctcgaacaacttcgaactttgtctgaaaccagtagttccgcctttattccatactgtttattcaaatgcctaaatcttctttgtgaccatttctcatcatccatgtccttttaggttagttaattcgatttttaactaaacaaaaattaattaagttaattttggaaataaaacttctggggacgaaaaatgaggaaatatatacatatgagaaaattaacttattttttaaaaaagattttcccaaaaaaaaatatgtggacttaatcaaaaatttaaaaaaaagtgccgatagattccgcttacaaattagtagggctgtcaaaaatatgtacaaaatgtggtcataatatgtacataaatatgtagaaaaaatcccgaaatatgtaagaaaaacccaaaatatgtaaataaaatttttaaaatggttatttttttagaaaaaaaattcttcggaaagggtgaatgaaataggcacaaaatgccctagaatcacattttagtattttaaaaattacctagtttgataatttttatttttcacaagaaattttataaattttcaaaaattctcaaaaaaaaatatgtaaaaaatgtatgaaaaagtccgaaaaagttatgtataaaactccaaaatatgtataaaagcccgaaatatgtaaaaatattaatactgacttttactggtcccataaaaaaaagaataaaaaggctgtttttctacggttcttctttccacccgggggttatcggagccggtggatcaacaatatgacttccattttccgaccaattcttaaacccggaacccaatttcaaaaaaaaaatcgaaagttcaaattttccaaatttgg

SEQ ID NO: 6970 - DNA, 2268 bp, Heterodera glycines
ttgtataaattgtctttaatattgtaattgatcatttatttattaagtaattttaaatataaatattgttttcttttttataaaaaaagtcttaataattatgactatcaaaaatatgaacgaatcttataataaatactcctctctttctcttcctttgtttgatcgcttcaattctcacagtttccaaccaacttcggaaattaatcgatgtagctgataaaatcccggctctactgcactttatgagccaatcgacttttatgaatctaattgacttttatgagtccaatcagagtttatgagtccgataaaatatttgtgaactactttttttctgctataaaaccgacaagttttcttaaactgctcaatatatctagttaaaaacacattaaaatgcaatttatttaacttaataatattagagaagaaggtggaaagaacaatatatggtttaattttaaaattaaaaattttcaatataaaattcaaatgaattgcacatcagcaatactccataaacacaatagtatttgacaaatttgttgctgtaagcatggtggaaaaccaaagaagtctaattttgaaataaattgatacaaattaacgcgggacaattgaaaaccgcttttatgaaaactgagcacgagtgttttagtgcaaataaaaattgaaaatagcttcaaataagaattgatgaaaaaataatattataaaatattacttaaaaaatgcattcaaagtgatgatacccctggcaacaataaaatcaaaaataaaatttataagatactttaattatattagaaaaataaactctaaaaacaaattaaaacaagaatttgaaaaagatatcaatatttataaataattaatattcaattcaataaaataagataacaaaacataaataatttatatttattgcaaataatataaattgcgaagataatctatttaaattttttgataaaataaaaacaatgaaaaaggaataaattcaatcaaataaatttagagtttgttttcaatgaaattattgatgagcaaactaccttacaaataattgtacatttaaataaataaacatttaaacaaagtggtattgtataaggaggaaattgactatctaataaaaatagtaattgaatcgtaaaaattattttagggcaaaagtatatttagtgataatatgatagacaacttaaaatttggataggtttaaatatacaattaaaaagtatatttgttttaataaaccagtcttttgaaaccattaatatcattatgcttaattctctaaaaataacaaaatattataacttgtttgactgaatacataaataagatgcataactaaatgatctttcaaaacaaatattcaaaaataagagtagttagcagcccgggattgtcgtaggagacaaattatgattgatgggtattggggtctttgaagttgccgcctaattgatgggtttcgggaccgtcgcagcaatttcgcgcactaaccaaagggtatggggagtaattaattaacgggaccgtcgtagggtatgggggggggtaattaattaaccggaccgtagcatggtcgggaccgtcgcagcaattttgcgcactaaccaaagggtatggggaggggtaattaattaacgggaccgtcgtagggtatggagaggggaggtaattaattaacaggacgtcgtagggtatggggggggggaaattatttaacggtaccgtcgtacggaattaaccggacatcgttggaaaaattttttttttgcacacttaaaatttaaaattgttttgcatgatggggagtagggagatgaggaccatttagctgccagacacttagctgatgggacagttcggcagatggacactaagttacacaataaaaattttacaaaataaaataagccaatatctaggtccatgcaagcctaaagtttaggcctagcctaagccattgcacgcagatttgtatcgctacactcaagcctgtgttaagcttttatcatttaattgcatactataggaaagaacgaattttcccttataaatatgaaaatcaataatttatgcgagcaattatcctaaataaattgaaaaatatacttttacaatattttctttcttataaaatgtctgtatcactactatgcacaaagtcgattgatgtattctaagaacaatttcccggaattcgggtaagcagccaatgctgaaaaatggtcacgattcgccttgtaaaaa

SEQ ID NO: 6971 - DNA, 5774 bp, Heterodera glycines
catcggtgaccccttattcctccctcccctttcgttaacggctataaatttcccaatttccattttaatttattttaaaaaatattcaaaaattttaaacttctcaattcttcccctcccccttgccaacgcttccatcctgtcggattgtgaaccttagggttccgtcctttggaatgtgaaccttagggttccgtcctttggaatgtgaaccttagggttccgtcctttgaggacctgagcgaattttcctaatccaattttaaaatcttttacaattttctctactctctcgctctctcctctctcttcgtggttatgtccttttaggacgtgaacctatggaattttcttcatccaattttgaagtctttttcaaaaaaagtacatttttacaaattttcaatctctctctcttctctctttcatggttccgtccttttaggacgagaactgtacggttccgtccttttaggacgtgaacctatggaattttcctcgtccaaatttgaaatctttttcaaaaattgcagtttaaaaattttctctctctctctctctcctctctttcatggttccgtcctttcgggacgtgaaccgtattaagttgaaatatatggaaacaataaaataatgaaacacggaaaaaatccaaaaagtaaattttgaattattaacccatataaatctaccctacaattaaaaattgaacctattaaatctactatccaagccaattcagtttctacgaattaccataaataaaataatttattcaaacattattataaataaccccaaattctatattctgatttattttctgcttttttctgcttggtactcaacattaagacgagggtctaatctaatcatatatatggcataattacacaaaataataataaaaatgctattttaaaaataataggaataaaattgaaaataatacgacgccacaattactattgaacacatttgcaaatgacaaccattttcgaaatttgaaagtagcaaaaaaaacaattcaaaaaaacattataattaaaaaggttttttgtaaatttttaataatatgtataattgattgaacctgagtcaaaaacgtaatattatttattatatcgattttagttgtattttaataacaataccattaaaaactaataacatttatgaactgacaccaaaaaatctaacgtaatttctcgcaacttagggcataatatgtaaatgatatttaaatgaaaataaacaaaacaaattattctaaatatataataattcttgaataaaattaaaaatttactatataaaatttgtgaaaaagtaaacttccacatccaattctaaaataataaaaaattgaatttgttccgttacatttatttcaaatttcgaactgccagttagaattttccaattgtcactttcgattgcttacaagaattgtcagagattactagctgttaatgttattattaaaacagaaaaagtaatatcattaagattataaaaatattattataaagatgacgaaaaaaggaataaagagtacagttgataaaccaaacctactttttaaatgaataaataatgtaaaaaaagcaatttattaaaatttcaaagttctggagataaaataatgaataatctatagactaaaaattaaatattataaatataacattaaattcttttttaaaataaagatattaaaattcaaaattatgtaacaaacagagctaagaatcttttcatgtcttttgtaacgaaaaccaaataaattggtcattgacgagaaggcgctaaaattccacttcaaaacgctcgaaaacgtgattattttaataaataatatacaagaacgacaaaattatattgatgaataactaaatttgttaagtaataattaataacatttatttatatatcacaaagtttattctgtgactatttattgtataaaatatgaagtaaaaaataaattctaataaaaaattttcttcaatgtatgaaaagaaagttataagcttatttgtttaaaatattaaaaactcacaaaaatcaatataataatataaaaaatttttcatcaaaaagccaaaaaaatatattaaacaaattataaagtcctttaatttttaatacaaaataaaatgaataaacaatttagaagaaacttacaaaaactaaaaatatttaagcaacataggagctcattccgcagcttgacattttttttgtaatacaacccagggatggtctttatccatttttttatttgatggttttttgactaatatcatagcaccattttattcagaaattcgggatctcgcctctgagcccagatgcaaaaaattgataagtaataaaatgaaatgaatgaacatgtaataaatgatctgaaaatattacaacagacagaattattataaaaaaatgaaaataatgatattaaaataaaaaagaattacattatggaaataaaaaactaaataaagattaattcataaaattattacgaatgttgtgtgaactttaggtagtgtgaatttatggaaaattaactgcatcaaaggaagcaagataattaaatttctaactttaatatccgatacctatttgaaaaatttaaattcaatatgcgggcctggtccgcggacagttgatcgatcacccgtcttgcacacagttaactcctcaaacagctcaatggtacctgttaatggcaggcaaaagtgaaggcacattacaacaaaacgcacaaaatgcaggaaaatttcaaaaattttagtctggcgatggctgacaaaaaaagggaattcttcgccaaccctcgtatgaaaaaattaaaataatttacaaaaaatattttatctgcctgacggcggcatctgagcataattcaaacatagaaatttttcaataaaattttttaaaaagaatttattttgttaaaaaagtagtattcataatgaaatttcaaaaaaagttaaaaaaatttaatttacaaaaaaaacgcaatcggagcaaaattattgttgaaaatacaaaaaaaaacgtaaccgaaaaaaaaaactaaaatttaagttcaaaacggaaaatgtgcatttccggtactaaaattacaagtacaaaatacaaatgtatttttttaataattaaattaaatttgaaaaaagacttgtccaataaacaaaattacaacagctttttttgttctctccatttctgccagccacggcgatacaagtcaccgctaataaaaaaaataggtgcggagcagaaatggaaaagagaagcgcctcttaattgatggaaaaatgaaaaatactggattaaatattttttaattagaaaattttaaaggaatttattaaatgtgataagtatttataacattttcaggagaaagaaataattgtatacaattagaaagaacaacttttaggtttttaatgaattaattttttgtgaaaagcaaaaaagttgcatttgtaaacaatttaaattgtgcaaataatatcggcaattgtattttaggtacctatttcttgagcacctaaaagtccgttccctaataaagacactttgtattctttttaaatctttggcattttttttaagccaacaattttctccgcctttttaacagtccatgactgagcttcaataatttagccttaaacaattttaatagttttttcatgtccaaaaacagagattgcacagaattccgatttccgaattgataaaatgtcggattttttatgttttctgaattttttgccataaatttattatttttttatctactttcaaccttttcacagctcttttatttcagtttaattctttttcaattttccgcactttcgcaaatgccaaaatggaagcgcgacagtgttggtcagcaatttattattctgcagccaaattcgtcgataattttttcaattagtttttcgtacagtttctctcacaaaattcaaatccagttctgctatatggaaatgaggagatgaacgtaatagctatttcaagcttaaagcggactatggctccggcatcatcatcatcatcatcagcagcagcagcttcagaaaccaaaaaacgaaaattgttctcggaagaagaccggggtataattaatgtcaaaaataaaaatacaaaagaataattgaaaagttttaagaagtggccgctcttgcactggcggcgttcacacagatcaaaatgcgcttggcggaggacattgagggccagggaaatgcgcacccgaaagcttgaagaaggtgcagccgcgataacggacgagcagatggaaacgatgcgccaacaaatggagcaaaaattccgtcaaaatctgctggaagccgagcagcggattgatcacaaatgggcgacgatgctgaacaaagaacaacaaaggactcagcgaattgcggcacaaagtgcgacggtgattggccaactgatgagtaagcgagtgacagagaggggagaagaaaaggaaaatacgagagagacagaggaaaaaagttgataataagtgatcggtgcaattggtgcctagagaaaggccaagtgttattcggagttaggggatgcggacatgtgtttagctgtccaccatgctctattgcgataatggccgttgaccagccaaaatgtctgatttgtttccataaattaactgatttggaatacttaggatcataaatgtgtacaggatatttgatctggatcctaagtatttacaatatttgtactcctataattgtactcctgcagtaatacctcatccttaacacttttttcattgcctacagtaatcgttaatgttttcatttttctaatttcattaaccaataaaaatttgccacatctatttgatcacacaacaacccatagaaaatgaaatttgcctgaacaatccataaatttcgaccgtgtattttgtaatttggtttaaaaaaataaaaaatgtgaaaatgcataaaaataaatgtgaaaatttaaaaaatttttgtgccattttttgttgttgttcgccatctgctttctccgccttttcctccttttttctaatcttcattcagtccttctcgcactttgaacgcttcaaacaatgcatttgcctgaatttttaaatatttttggttaggcttatcaacacaaataatgaggaaatgtgtgagagagagagagagaaatgagaagcaaaaaactatagggggaccaacacaagggaaggcctgcctaccgcttttcacagctccgaaataagcattgaaggggggccaacacgagggaaggcctgcccatcaacactcagactttatgaaatgtgagagagacagagtgtgagagagagaaatgagaaagaccaatccacctttgccctttgcgctggtgtgaagtcgacagaagatgagaacacaaatggcaattgttgctcgaccacttgcggaccattttgctgcttctgacgcactaattaataaaaatttcaaaaaatttaaatttagaaaaattttttattacattgatgaaaaagtgggcgagcattaagccgttgttgtagaaatggcgccaccggtcggcccacaattgcatggagcgtagagtccatggtagagtcaatgtcgtggaagtgcgtcagcttaagggcatcgcttttcgttgataaacaacaaacctcttgcccttgataatctgaaaaaaaggaaattaaatcgaaatttaaattgaaattttaaatgtaa

SEQ ID NO: 6972 - DNA, 5703 bp, Heterodera glycines
  unsure (1)..(5703): unsure at all n locations
atttcatcgtcatttttatcacagtgccaattctttctcatcaaatacataacgccaagatgggcctcatatttttgtgccaaatgctttttaattttctcaatttcgtataacccatgagagatcatgggtctatcattgccataaatactcccttcctctttccttcgacataaataatttgaatattcttctgccattttaaaaaatgtctctgaatttgtcgctaatcctttgacaaattccgaaaacagagcatcttcagtctaaatttttgatttatttaattttcattgaaggttaagtctcacccatgttaattgatcatcgaatttagaattgataattagcaaatacttatcagcatttattttattggcactttttgccctttcttccgcttttttgtacattttctctaaatattcttcaaaattttcattaattggtaattttgattcataattcaatcgttctcattcaacaattttggttccgaattataagtgaaaaagttgtttaatttataattcaaaaaagaactcagagatgaattaaaataaaattgcgaaattttggccaaacaattcaccgcataaattattgccccattaatttcaattttgtgtttaaacacaaattttggctttactgtgtgaattccgacgtattctctacacaaatattcgtacaaaatgtccaaatattttcgatatttttggcattctgtcagttcatattcttcaaatttccctgctattttgtcacatttccaattcattctcataaaataaaaaatgccaaggtgtgcatcatatttttgcattgaatattcactgatttgcattttctgatcatttctcacaaacgcaattagcattttgttctcaacctaattaaaatgcaatagtaaaattaattccccaaattaattaactcaccgatggatttgcatttgaaattggaactaaaaaatgctgagcaataataataaaggaaaatgcagaaatataacaaagcatatttctattatttttaaattttcaaaaatgaaagtgaaggaacaatgaaagaatggaagggtcaaaaaagaaacactgaatttaaattaaaaattcctttttggtgagggaatttttataaaaaaattcaaaaaattaaatgaaatattttgaaataaaaaaaaataattattaattaattttattgcctaaattttgaaattatgcctatgtattatatttttgtttgttaaaaacttttcaatcggaacccgtcagttgggccctcacggttggacatagaattttttggctaaacttttttctttgtccttcaaatccaatattgttcatatcattcgacagctcttcacatgctatattagccttacaaaaagcaaaaaaattttctagaatatcaaaaagttattagtttccgcatttttcatgctataactttttaagcaattgtctaatcacgaagcaatcttagaaatggcttctaaacatgttaagctttagaatcatgccaagattgttggatttggatgacaaagaaaaaaaagttatgactgtcggggagcgaggctgccgaaaataaccaaaagacggtagtttttgttttgagtggggtcgggacggtggttctcggcgtaggtcaattaccacaaattgaaagaattcacagcaacagtacaattaactggtcaagctccaacttgggtaattaagccaaatttacaacaaaaacaaaaaatgtaaaaatacaatttttacaacaaaatgatcgattgggggagaggaaagaggaattaggagttttcctcccaaatgatggtgataagcgaatgatgattggggagaattcggacgggcttaaatatgggccaaaatgagtgggtgacaatgatttcacgtgaagggaaggaaggtgggcatttcaaacaaagcattaacgcagatgaaaactctacttaatttaatttctttattttaaaaacgtggattgatattagtaattgcaatatttaaaaaatcggactggtcatcagtaggattatccaaatctgcttaataaaatttcttatattttaaaatttggattgatcatcagcaggattatccaaagcacttaagatattttcttttattttaaaaatttagatagatcatcagtaggattatccaaatctacatattataataatcaatgcaatacataaaaaatttgattgatcatcagtaggataactaaatctacttgatatatttgtttatgatattaaataatgaagcaatatattaaaaaattgggatttttcatatagtaggattatcgaaagctacttaatataataataacgatgcaatacttacttacaaaattgggatttatcatcagtaggattactcaaatctatttcatatatttatttagtataattaaataaagaagcaattataaaatcatataagtaggagattatcaaaatcctttttgagttaatctaacttgtatatctctccaaatacgtacaaaatttagcgttttcaaaatttattcacaagaaaagcatttgaaatgttttttatttacaaaaaaatgggaaagaccaaaaatcacttagttactcaaaataaataaagacgaaaacagcttttaaaattattaaagggttcaggcatttgtatttaaaattaatttaacatgtatatttagaaacccagatagtttatcattgtataattttatcaatgtataatttcgtgacgtatgtattgtcgtaaaaattgaacacgggcgaactgtattcatccataaaatgtattcaaattaaaagtggaaatttcaaaatttttattcatttttttctgaaaattgtcctttttcggaacccattttaataataaaattccttaaaatgtctttttttgcctaaattatttctattttaatatgtttttgtggcttttgaagaaaagcgtaaaatttctaattttgtaaaattttaatttgttaatttaacaaatactgaaatttcagaaaccttttcatgaaaaattacaattctattaatttacaatgtgtttaaattaaattgaaagaattaaaattattttaaatataactgcgaacttatatttaaaaacccaagaagaacaaaagtagcggatttgttgaagaagaaaaatggataattaattataaaaaattatattagtaaaaataattaaggaaaatattaatttgggaatatctatgcatgacaatgtgttggattatcggtcaaagtgaaaaataaacggtgaaaaattaaaattcctaaaaagttacaaaaaaatggatttcaaatataactaatagaattttttatttttaaatattactacgaaattgtatttaaaaaacacaaataaaaatacttcaaaagcataaaaacacagcccatggaatggcaccgaacattctgaggaagggcttaatgatgccaacaaattagtgatgctttccgagtgataaaaataaataaaagaaaagtgaagagaaaaaagaatgattttttgtgcatttttgccattttgtacaaatgtttaatctcataaataaaatgacgaaacaaacaaaaatgaaatgaaaaaatgggcaaaaataattggaggaggagggggaagaaaacgcacttttaaaatggctaattgaatttaaattgaccaatgatcagcagagacaaaaattaacattaaagaataaagaaaagatttggaatgtaaaagaggggaattaattaattaattagttttagcagaatggtgctcaaaaatgttgatggaacagccaaaaagcaaaagacgtttctttggtgtgccattggcttaaacttcggatacaaaactgctcgttgtgcgcgtactgcgcctgaattagtgaattaatttgctgtccatctggtcaattaattctcctacagatgggaaaatgacatttgccgcttcattgggtcggccgtcgccaaattttccaccgaatttgttaatggaaatttctgagctgcgtgaactccttccgccgcccaaatttgtcgcgctggcattttggcactgcgcataatttgcgatggcgccggagacggcgaaaaaggcggcattgttataaaatggtaccaagttaattagccaaacaaatttcgatcattttgtgcccactttcttctgtgatccatgtaacccaacggcggaggctttggtggaatttgtgtgccgcaaggtaacagggaaagattggcacattctctttgacgccaaaagttgtttttgtcgacgaattgtgcgagtattcaaaaagagaaaacagaaatgggtagaagtcggaggaggacgaagacgaagaggagaggccgcggcacgaaggaggacagaaggaacgggtcgcaggtgttctgcaagttcagccaattcaaaaggacagagcgacggacgcacccgcggatttatttgacgtttgaaagtctcgtaaagattctggtcaaagatgcaaccgaatcggtgttccatctgagccaagcccccggggttaaagtgaatggcatggtcgagaagggcaacggtggaattgggcagcttggaaaggtacggagagacgagcaaagcaaacagcgacacctccaccagcgcaaacagaaggccgagcataaggaacacctagggatttgtaaggattgggccagagtttaattggaatgccaaattggcattttggggccgtctcttgcgcggattctgagtctggcaaaagcaaagattgaatagacaaacgagttggacacaaaattgttttttgtatggaagtgtgtctctaattacaccttacaaacaattagtcttctgtcgaatcgccgaactccacacaacgggtggatgaaattaacaatacaatttttagacaccggaattccgtcgaaattttggtaacccataaaaaacattttttgtaaggaacaatcaaaataaaatgtgtttttaaatatgactccctttgcaataattacaaaatcagattctaaaaaaattgcaatagaaactgtctcaacaaaacctaaaatatctttttaaattttggtgtttcatgtgcatttactcgtcaaaacgctcacctttggttcatttcctccccatttgcctcatcaaaatgagagaattcgtttccgccgctcacgaaagagggcgactgcacactttcgctgctctgtcgcccgattttggcccattctgcgacttcctcctcctccccaacaaagttgaccagctcaactttgcccaccgcgttgttatggcaattatcttcaattaaagagttcgtccctttccggtccgttccttttccctttggcactgcccaccgcttttgctccgattcgccatgccgtgctcctcatcctttgggctcgcttcgtccatactttccgactcgcccagcccattgctctccttttgttggtcgaccaatgctttttcctccccattttncactattagcagatctgtcgtttgtattgtctttttattagttaattcccatttacctttacattttgatatttatttgttgcttgctgcttgcttatggtcggtttgaatccgcattacattttcccnaagtgacgaaaataaccatcatatcccacaaatctagatcattttcaat

SEQ ID NO: 6973 - DNA, 2564 bp, Heterodera glycines
  unsure (1)..(2564): unsure at all n locations
attaaaatttttattgcatgtaaatgcatatgtggccccctccctggtaatcacaataaaacagaaattattccctaaggcttgatattttaaaaattttcaaaaaagctagcccaaaaatattaattttttttacaatttggggacaattaaaaaacttttgctattaatgaattaagctaagaaagtttgttcaattttcctttttctccgcttccgaccccccccccacctattttggggcattttgcgggcgaaggtgaggggggtcgacttctgcccattttccatctatgctttacaataataatgtggcgcataatgttgccggaaagccttcaatttaaattaattaattgacgcagttgggggagggtctgcgccgtttgttccgatttagccgtcgccaattgcccaatttgccgcccaaaaattcgcaccaaaaatactccgcaaatttatctcaaactcaaacttgggtaattaaaccctacacttacaataaatgtgcgagaaatataaagaggaggccgtcgctccgccgatggtccgatcggcgtttttgcgctgcctcgggcgaccttcacgcgggtaaggcgccacatccgctttttatcgctttctttcccctaattcacgtgcccgccgtcagccgacccctcccttcacccctttctttccttcatcatttcccgtttgccctaattttctcatcatttcatccatcaatcactcctcgttcgctacttcgttcattcctccccgtcctccccatttgtccgctcgacggacattcgcggctgacgttcagtcgcgacattcccacgactttgaaaacgtcgttttgagcggaacgcgacgcgaccatttgtcgtttcagatccatcaccagcggggacggctcggggtcctcttgttgcgaacttgccgtttcattcgctctcatctcctggggcattggaggcggtaccagctcaattgcttcaattcttgaaattgccggtgctcgccgtgtgcctcgagtagctctgttccgctgcgtccactgatttcccgtcaccaaattgcggacggtaacgatgacgggccccattaagtagacccataccaagggtatcaggacatcgcgcccaaaaatgaatgtgacgtaaatgcagcatgccgtagtccagtaggagacgagcagccgaagtttgtccatgaaccattcttcggtgaggccaatcactccgctcgggagggctccgagtgtgagcgctcgtgccgttttgtgctccttctccttcgacttgtattgatccaaacgcagccattcgtccaaatgcgcgaatagcccttcgcctgtttcctgcgaatggtgatgacgctgtgaggatgtgaagctctggatcgaggaatgcgttgagcgtcttcttctcgatgcggatttagactggaatgtagcggtagcagttgttgactgcatgatattccacattttgcattgaaaactcagcgcatgaaaagattttcatcgtgtcctcgtttaaccacctggccataacatcctcgcgtgtaaaagtcgtctggcctgaatggtaggatttcctcctctggaacttctacggcattccttggaaaaaagctgcgcgattgattggcttgtggcgagttgtcctgcagttaattgtgcgcgagttgctcctcctggatggctctttttcccaatccacgatcgttgacgatcttcaggtaatcatcctccaggattccaaacgattggtccgacaagcgaatcggttttccgttgcatgctgttttcattttcgcctctttgctaaacgttagcgcctgttccttgcttttggatatccatgttcatcctgcacaatccgttgatcccgtgtgctctccgtccatactttcgacgaaatggtagtcgcatggcttacagctctccttgcactccgtttcccaattgatggactcgtgcgcacggcacgagtacacacaaaaggaaaaactcttgttcgcgcgattaaccttttgtaccctctagaaattaacacttctgcggaggacgaagtcagtcaaattcaagtgactgccattctggattagcaaagtgcggtgatggcggtgatgggaggcatggacccgcaagctgccacaacggagtccagtttgcctccagggacggtgaggcaggattcacaaatcgtcacgacagaatcgagtctgtctccagtcagaggaaggaatgagcggcaagctgtgaaagagcgaattcgaaagagacagccaacggaggaagtcagaggcaaaggcaaattgaagaagaatgggccatatgatccactgtgaccgggcaactacagaattcctcgccgaaacccgttcattccgtcacgagtggcgtacaatgagcagacacgtacgtatcgacgacaacggggaaggcggcttgatctttcgggattgaggaagttgttcgttggattgngcggcactgaatttgtaagacgagagctgcaagagaaggcgaacccggctctaagagagaaaagctgcgaaaatataaagtc

SEQ ID NO: 6974 - DNA, 1618 bp, Heterodera glycines
tttcgaagtgagttggctaagaaaaaaatgttttttaacctttaaatttaacgctcgaggtccccgattaccgactatgtatcgggagaaggggggaaaagtcggggggggggggcggagttcaggtaggggaaggggaataggctgaaaaatgtcgggggcgccgggcggctcggggtcggggctcaaccctaaatagaatttagccaaaaattgtcgccatattttgcaattgtcaataagaaacctagaaaattaaaaaacacaaaaattttattttgatctttttaaatatatacttatttattagccactgttttgttttattaagtcaatttcaaagttttaaataatttttaaaatttggcatttttatttgcgtgtttgagggattttaggtcacattttaagctccgaatttagcattttttagtgcctagaaacacgatcattatttattattctaagcacatttttcaaacacgaaattccctccacaaaatgaggcttgctcggaaattgaattaaatttgaatggattaataatagtttaatttaatttttaaatgattacttaacagtaaattcctccgttatttaagttaatcaactgataattgtgaaatgcaccgacaaaagcacaaaaatttttgtcaaaaacagaaagacagaacaaagaatcaatttcgttgagcgaacaattcagacgagcttggatgctgactcttttcttggcattggtttaaggtaaccataaaaatgttaaatattatcagaaattttaaaatttccacggctcgccgccttggaattttttttaaatggcgcaaagtttcggagtcatgaaagcttttcgagattggattcattcacatttaaagtacaatatttcttatgctgggacttatttgccaaaacaaaaaactcaagaccatggtgtcgggtagcgatgttagggcgggaaaaaacagcgtattgcgcttcgagtcatgttaaaaaaaattgttttaaattttttgatgatttttacaataaaaatcagggtccagtttcaccgacagcaccaatgggcaaaatttgtaattttaattgtatttgttaagatattttctaacagattcagaaacttttatgtattttgattaatatatatttttaagtgtgaacattttattgaaattctttaatcgattttctccattaatttagatggtattttgagattttctattctcatagaataacatttttagaactgaagacaataaaaaaatatataaaacatttttgaaagaaaaaaatagttaaaatgaatcattttgtcgcttagcaaaagtaaagaaccttgagattagcaggacataggaacacagttaagtcactgaaccatgcgcataagataagtgcaaaaatctattggtttgaccgtaacaagaccaaaatgttcgggtcgcggattaaatttaaattaaaaaagtagctgaaaaatgattaaaaataccgacagaccaatggttttttaatcctttaagaaaaattttaaaaaaactatttaaaaaaatgtttttttagtttctcgttgttagtaattaaatgacatatttttaacaaaacttgt

SEQ ID NO: 6975 - DNA, 2499 bp, Heterodera glycines
  unsure (1)..(2499): unsure at all n locations
gaagcatcacaaaggtatgaaattcgtggtactacatttgcagactgacactgttctaaatgtaaaatcttattgctttttggggaaccgcacagtttggcgggcgcgggtttttttgcncaggccttatgaaaatggcagatagttagttatgcacacagtcaaacgaaatctttttgaaaattttgtgaatttttaaaaacttgccccacaaacccgcgcctaaactaaccacgacgacctactttttgcaattaactgaatttaaacttgaaaatttttttaaaaatttcccatcaaagaaaatacataaaaaatacaatgccaaaataggtttttctcagtcgaaacaaaagactgaggagcaactacaaaatagtatgttcgtagcgctaataaaatatgaattttctcgattttattgatggggtttcttgaattgctaattattggagcctaatgcagggttctttctttctttgtactccaaaagcaaaccccgcctccccccccccccctaatttaagtattaatattaaaaacaaggtgcaatctatatttaaataaaaagatttctgctatttttggcttaactcgcaattttttatgtattttttaaagattttttggccaaataaattacaaaacacaacctttttgtaattttgcccgttggcaccgccggatattatcaatatgctaaagtcggtttttaaatgttggctaaccgtgaaattcactccattaattaagaaaagttttttgacaaacaaaacttctcttataaaaattttcttcgattattaatccacgtaaaaaaaactcaaattaataaatattagctaaattcacaattttggcaccaaaagagttttacatttttttcgttagaaatccgctcacctcgtggattaatataaaatatcttaataaaattttaaagccaacgataattttttaacgacaatttactcaaaaacattgcaacaactttcgcacaaaaatgatcacaccaaaagatacgagcatttagcccaatgttttggcacaatttcttttttctatggacaaatttataaggcactaattgtggcacaaaattggctaaaacccagtgtgaaatttgaccaaaaattgacggaactcaaacagcaatgtgatgatgccacaaacgaattggcaaaaaccaaccccaaattagctgaaaataattccatcaaaaatctgctgctggacaatgatggcattaaaaatttgacaaaaacttttcacgacattaaaagcattgtaaattcgccaaagagtaaaagtgctaaaaatagattgacagaagaaaatggcggcgcaatagaaatgattgaatttgatgatgatttaaaaaatatgggaaaccaaagaggatgacatcactctcaaacggacactgacgatttcatgggaaattgggtgtggattgactgatgagtaggggcacagatttgtatggatttccatatttttttgcacacttatttcggcctaaaaacacgtaaatagtatttttagcttggtttgatgcttctaggatgactttttattgccatatttcaggtttttgtccatgtttccctattttcatacatattttagcattttcattaaaaaagtcgaaaaaataaaccccctaaagatggaaaatttttaaaatacgccaataaaatggaaaattttgaaaaaaataccaaaaattgtgcaaaaaaattcattagcaactcgcttaaaaatgatttttttttacagaaaattactaatctttgcaattttttttctaaaactttattcttataaagtataacaattaattcattaaaatttcaaatctttatacgaatgtatctcgtttttcaagaaattctgattcactaacgcttttccactgacgcattttaagaggtgaactaaattttggcctgttcatcaacctaaaaaaatttatgtaagcgacggctgcatattttatttatttatttattcaaaaataaaaaataaccaaaagaagggcattgctgccgcttacacttgaggtggaaatacgaggtcaaatgggtagaagtgaaagaagacaatttacatttggtaatgaaatgaggtcaatgggtagttgtgacattattgttgaaattttaagcaaagggaaattggtttttataggaaattgagaaaaaatttttgggtaaatttttaggaaattgtgtagagatattttttttttcgatttgttggaggtctgcagaactatttatcgaagcactgggggaattgttttcgaaatgattccagttggaggagaaatttgtcagtatttgagagtggatttggattttcgttttgtgtgattgttttgtcaacctgcgatgattttgaagtgtcttcactggcctccttcggttctggtccattttctttggcaagagtcggaacatttgtctgtggggtttgtattgctgatgccaccggagc

SEQ ID NO: 6976 - DNA, 5996 bp, Heterodera glycines
  unsure (1)..(5996): unsure at all n locations
tttttgccccatatttctggcttttttagtccatagtttatgattcatatgatttttagtccatataatttacaatccttataatttactgttgcccgccattattaaatttntagcattctgagcaagatccaacgacagtaagaatgtggtcaaataatgaacagctagaaaatataaaggacaacacaattttttataaggctttttattttattaaaatagttaatgctgatgaattaaaattcattatttttaaagaaccaaaaagnttgaattttataaaattgtagtagtaaatattttcttaaaaatattagtgaaaaagaaattcatagacctaaaaaagttctaaatttgatcttttgtttcatttttcttagttgctttccaaatttattcaaaatggaggtgtgtacagaataatttatttaatgcttttattgaagtaaaaaagtcccaacaatagcttaatttggcgattgaaaaaaataagtgtatggagataaaaaccatctttaaatttttataaatcgggatggcatttgcaggcaaatacttaaaatttctgtgcacttttcatcggaaaataaaatatgataaaaataaaaatacatcttgaagaaatgagatgaaaataatttcaaaaaattcacccctatgaattgaaaaaaactttctccaaagttttcttaacaaaaatattgcttttgaaaaacttttcctaaattcttcgaaatttctttttcaattgaaatatactcaaaatattatgtgttttttttactaattaaaaagttttttacatattagaaatataaacataaattaaaaaaattttatatatttatttttatacgttttttagaacaaaaaaggtctttgaaacggtcagataagaaaaactctatcataaaatctcagccgaagaattatgattaaattaattcttcataacgatgttttatatcgtcaaaaaaaagtcaaattctccaggcgaaaacctaaccactgctcagggttaaaccaaaaaaagcaaacaattacaaatggacggactacgaaacaaatggataggatttattgctcatattttattttattagcttcatcaatgaaaaataaattaaaaaaatgatttctcgccttgtctgatgtaaatgttgtccttgcttttgtattcgctaaatgccatcaccggcagcggttttgaaatgcgttcgccatgttgccaaagcggtgaaatttgggcacaccttgaaaaaaaaactttaaaaaaattgaaaatgccatgcaaaaaaaagtgccaaaaatgttacgcgtttgctcacctttcagtcaatgaaaggagtcgcgcatgcaattgttggatgtattcactttaaagtataaaataaaatttaaaagattaaaatgtaatcgcggtttggattttggcatttttagtatagccagcttaagaggatttaaagcagaaagattgttttttatcaattttggagcggttcggaagaaacaaagccaaaggcttgttaggattttgtatgaatttgttattttaatcaacaaaagaaaattcaaaaaaagtttcaaaataaaccccaaaaaacagttaattaaattgaatgaatatgtcccatcaaacacaccattcgatcacgaatccattggatggcatcctcaactcgacgaaaagcgttgccacgcgtgccggacgatgcggtcgagtagcgttcagtgacgtagcgtgctccctggctaaggccaagctttcagacggtggaggtaggcagttcgacgttgttccaggccaataactctgaaaaattatgatcagcattttaccgatttagaaaaaaaaaatttttgaaatttcttattctaattcgttgatcctccccgtcccccttaatttctcatcctatacttaggaactaaaaggtttttagtttcgtggtcaatcctcggtctcgagcttcactgaaaatgctctataagtttccatattctttaaaaatccctcgattatccgctcactgtttgttgaagtcggccgcgtccgcgtgccgatgttgccgcagcgtgtccacgtccaggaacagctcgtcaattggtggcttcagcatcttcaggtcgtccccaatttggcgcacctgtcgctccaacagttcaatgcgttcgccgcgttccgctgcgtctaccgagtcaatgcgcgtcaataagtggtccaacttttcgttagtgatgccaatgccgcgcgtcagccgagagaccaagtcgtccaagtttccctgataagaaatagaggttggcgtgtggtacagcagcaacgacgtttgataaacattgttatcccctgataagctatcagaatatttagctaggttcaaattgatctattctggcgagaaatccttatccccgtctgatcagtttatgtcttgcgattatggtgactgatttcttgactgattggggagatcagcagaaatttgtgtcgatcacttggatttgccccacaaggtcttgtggacaaacaaaaccttcggctcatccaccaagacttacaaattactttaaaattaaaataaaacgaacatgtttcgaaaaatcagttccaaaaatttcagcaaaatcaaaggcaaacgccaaaatttaaactctcaaattcgtggccataaaattttagaaaaaaaaaattcaattaattttctatactgatcagtcagatcatctcttccgagtttatcagccaggtatggtaaaagtgcagaagggcacagaatgccaacccgtccttccaactgccggaaaagttggcaacattgacaccggggtatccggacgtaacatggcgagcccattggagcaatgcttcacgtgcagtcagcagtgcaagtgggagtttggagcggtgtcagcagcagcggttgattcagcattagcttgtggagtgccgttgttggtctgttgagtgatcaaatggatgggtgggaaatagagtggtgaatgaagagaattgtgagagaaatgagagtgcgagatacttgagagatagatagagagaaaagggcagaaacaaagaaaaaattgagaaggaaaacggagaaaaatcgcgcgcggaaagaccaaatgtaataaaagattggcagtcagaataattccagtcagtcaatgctcgcgtttcacacatttctcaccgaaattttcaaaaaattttaggctaattattaggactataaattattagttcggcgcataattatgttcgttgttttttagaaccagcgtatttctgagctttgttcacgtcgaacgcaagaaaccggattcgaaccgatcaattattcggatttttaaatgatacaaaaacaaattttctcagctaaactttgtaagttttttttggtttaaacaaaaaacgaacataattatgcgccgacctaataaacgcactaaaaagtgccaattcacaaaatcaaaaaattttaacttagaaattctattcccctttgttcatagcatatgtgcaaaaaatgtgctaatataaataattaaaaagactgttaaatgttcttaatgaatgttcatacctcaacatcagtgcgtcccgtccgtccattgtaattaaattttgtcgcaataaaataagtgttggtgtattggtcacattaaaatgatcataaattggcctaaaacaaaatatttaaatggttatagtggtgatgtgctcattaaagaatgagaaaacttaaaatactaaaaaccattcggcgctaattaattaccattttttctgaaaatcaacaaaattaggattttttagtaaaaatctcctaaaaatatggtcaaaattctcaatttttcccccggcggatttccatatttcgggtttttgctccatattttatgtgcatgttttgtaatttcactgctatccataattgacagcccaaatgataagaccacaatcaatttactaattgctttttgccgtcggtccaatttcctaattgaggagcgagaacattcgcatgcaagaaaaaatccaccaaatgtcattaatttcacagttgagcaagaattgtttatttcacggccagtataatgctaaagttggcggacgacataaatatataataattccacccaaattgaataaaaattattgctgatttaatcatactatactgactgatttactgtagaatcgtccatttctcaattacacggacattttctcatttttatgtgcgacttcaccaacctcttacggtcaaaccaagagctgaaattcatatcatgcaaatttgcccataagcgctccgaaaaaaagtgatgtgaaaatcaaatctgaatttctattaatattcgatgatttagtccaaaaatgattaattgtttgaaataattgaagaaaatttgtttgaaaattttcattaatttaatttattataaaaaaccaaataattttgtattattttcacttgatataaattaaaatttgacttttttttaaatttttaaaattttttgaatttttaaaatttcccggttggtcccggttcccggttcttgcggtcccggtcccgaaaaaaaatcgaggtcccggtcccggcttctcaggtcccggcaagtcccggtcccggttttggcaaaaattcccggtcccgtggcactctaaaaataatagaaaaaataatttttggcccttagaataaaaaaagttattctggtaaagggtatttttttaatttatttttaaatatggtcaagcctaggtttaattttttggtttttgcctattttttcctgaatccccagtgacctgaaactcaataaaaacatgttttttggttgttgttgctgttattgttaagcaactttttgagttacctattagtgcctattttctagattagaatctattgctaaaaagtcttaaaaagctagttgcctaatttagattttttttaaattttgaaaattctcttttttgagccagagaaatttaagctaaattttggaaattcataagacgagttttattttataattaattttttttattaaagttaaaaagaaattagttttttaattagaggctggcggatttatagagaatgggttataatagagaagatacggtagataattttcagtaaaaaactgtttacagaatgtcaaaattacaactttctcacggcggcgctaatagcaccgcacaaccacctaaaaactcatatttttcttaacaaattgacacaaatcgcaaagtttattttttggtgaaaatcttttatcacacttgaattcttaattgtaacttttaatagctgagcgttgtttttgaaaaatgcttaaattgcttatttgttagcggaaataaaaaattttgataaaattcattccgggaaaaaagaaacaatttgaggaaattgtcattctgtgaaaaaataacttttgtatgatccggagcctgattttaatgaattaatatctaaggtgtgtctctttgacaacaacccgaaccctccaacgaaagtaccatttgaatttgggccccgctttgaagactgcgtgcggcccaaaaaacaacgaaaaggcaaatgccctcatcatacagacgcaagatgaaatggttgagctctttaaaaccaaatagaccatggaagtcatcaaggaagtatgtatgagcttcattaaaaattaaataatatttaattcagctcgcatatcgtctcctggaaaaaaacccttcttgaaggtgaaattcaaaggtaatatatataaataggattgtaaattatagggatttatattttttctacgatatactacgaaggagctcaaaaatatattgctatgttaaaacttttctttttggagggtttttagtcgatataggggattttcgggataaatccttannatgcatnntttttaagtatatttgngccattttttagtaattttacaataaatgcaaatcgacg

SEQ ID NO: 6977 - DNA, 1133 bp, Heterodera glycines
  unsure (1)..(1133): unsure at all n locations
agtaaatttacaaataaaatgcaaatcgacgtctgggaaatttaaaaaaataaattcgcccaaaaaagaacgaatattggtttgtaatttttgtagtttttagtgttttttaagtttgtttaagcaaatattgtatatgcatacattntaaggaattttcgagggtttaattatatttggccatttttagcttttttgcccatatttctggcttttttagtccatagtttatgattcatatgatttttagtccatataatttacaatcctaatataactgtttgcccggcattattaaaatttttagcattctgagcaagatccaacgacagtagaattgtggtcaaataatgaacagctagaaaatataaaggacaacacaatttttataaggctttttattttattaaaatagttaatgctgatgaattaaaattcattatttttaaagaaccaaaagttgaattttataaaattgtagtaaatattttcttaaaaatattagtgaaaaagaaattcatagacctaaaaaagttctaaatttgatcttttgtttcatttttcttagttgctttccaaatttattcaaaatggaggtgtgtacagaataatttatttaatgcttttattgaagtaaaaaagtcccaacaatagcttaatttggcgattgaaaaaaataagtgtatggagataaaaaccatctttaaatttttataaatcgggatggcatttgcaggcaaatacttaaaatttctgtgcacttttcatcgaaaaataaaatatgataaaaagaaaataatttcaaaaaattcacccctatgaattgaaaaaaactttctccaaagttttcttaacaaaaatattgcttttgaaaaacttttcctaaattcttcgaaatttctttttcaattgaaatatactcaaaatattatgtgcttttttactaattaaaaagttttttacatattagaaatataaacataaataaaaaaattttatttatttatttttatacgttttttagaacaaaaaaggtctttgaaacggtcagataagaaaaactctatcataaaatctcagccgaagaatttatgataaattaattctttcatacgatgttttatatcgtcaaa

SEQ ID NO: 6978 - DNA, 5707 bp, Heterodera glycines
gtttgtttaatttttttttattaagtttttcaaattttaccttcaaatttcattttgagaaatttgagcaggtacgagtggaacagcccattgctccaatcgcacgcaagccgccaaatgtaggcacggtacacgtgcgtcaccttgtacccagagcggagggcggcctccagctcaatgtgcgtcacagttgtcgaaaatcctatcaagaaaaatatttgcttaattaaaagtttctaaacccacccctttcagagtcctcaaaatgtttgcagttgtactcggggtcgatcaagccgcgcgggtacatttccgaacaagtccggcagagggggaacagcgtccggttgttgacccggtagggaaggaccgggatgtcgtagtgacagtggcggggcggcacggcgtagcacttgatgatgccctcaaggcggatgccatcgtcgccaacaatgtccgctggactcctccattccacgtccttgtcaaactgcaccacggtcggatggccaaccgggtaattggtgtacatattccttaaaaagccaaaatttttcaattattaattttttccggcatttcttaccgcgaaggataaagactgttaaagtccttcactttgattgtgcggcttttccagtcgcccgtctctgggttgatcaccgatgcgcccaagtattcgggccctgttcgacctgtgccggaaaattagttaaaaattaaatggaaaaggtaccgccaaagaaggcgtcgtggaagtcaattggtccggagtccgggcagttgtcgaagtacgccttcatggctgggttgtcctccagcattgcgttcaggtggcactcccagatgatttccacctcgaactcccgcgcaatgtcccgggttcgcttggcatcacgggccctgagggcaccggctgtttctcctccgcccacaattgccgcatcgtcggggaagcagcttgggcatccatgccaatagcacctttttcaatggagaaattggcaccttttcggaattctttccttacccattgacctcgatggccaagtttttgtcttcatcagggcgctccatcatcccgtccaagctgtagttgccgaatttgaactcccctccagggctttcgacatggcgcaggactcggccattctcccgcaattcttcttcggcacgccactgagagtcgacaaaatgtaaaattaaaataatttggatacaccttcaaatatttcctggcgatggagctctgtttgcctcgcttctcgtatcccaagtgtgggatgatggtaacccgttctttgtcgtggtgagccaactgcacccaatacttcatgcagccggatgggatggtgaccgaatccgtgatgtcatgccgagtctcggacaagaacagctgcctcatctttaccataccataggccaggatttggacatcttaaaaaattatatattattattatagtttttccaaaaagtatacctgtcttgcagtagtccgcgatcacttcggtgagctcaagcccagtttcccggttctcgtcgtaccattgctcaaactttgcgcgatctgccgggaagagtccacctgggtaatagttctcaattggtggcagggtgtccagcacagtgccataattttcagcctaaaaaaattattttctaattatctataaataccccaaaacaatagttgcgtgcactgaaaagttttccaacatttttaaccgggtcgtagtgcccttcaacaccgccttcaccgtcgataaaaataacgcagacttcatgtttataatttttcacagttgatttccacgaaggcttcatttttccaaacgtctcaaagcagaaaagccgaaacattccgggatggagcacctcataatagtccttaatgataaatattacgaagaataaaaaattttgtgcctgaattatttctccatattcctctatggaatataagggcaggtgcatgtcaatgttgcacccctggcccagagcctgcacgccttcaagctgttttctctcatccctcttatactcagagaagcgttgtcggggcagaaaataaaaattttttttgtagtgcctgttaaggacagaatttttcaaaaaaggccggcccgggttgattattttagaagtaaaacaacatggtcgacgaatgagcgtgaaatgcgatccacgaccgcctagggcattcggaacgtgtccacaaacagttcgggcaaccgcagcggacatgcgtacgcaaacgcagccaaatggagggatacggcggcaacaacggaaggtgggatgtgggccagcgcgtagcagaccatgacaacttcgctgacgaattcgcaaatgcccacacactctttgacggcgaagtgtagaagcgatagcgatgccgaaactgcacagcgtacggcatgctgaggttgaacttgagcccggacaacacctttataatgcgcacacaaagttatgactaattttttgaattttcaagaaaaatcgtgaaaaacatttcaactttattttttgaaaaaattttataatataagtttaattatttaaaaaattcgccggtgagatttggggtgtacacataaaaatccggtaattcaaaattatgtttcctattcacccgcggttccatgcgcatgatgtactcccccttgaacatgtttgctgctacatagacaaagtcgtcaacatttggcttcaccaactcctcgagttttttcgatgtcagctttaagcgaacttgtacctgaattaataccgtttcaccgagttttcaacatttttaaaatggacataaacaagccaagcgaaaagaatttgtcgcattcgtccatctacggttttgtgcctggaccggcttctcaatgttttgctgttgaggttataagactgggaaatgactcattttaatttgctcttttatcattaatattctaaaaatcatatttttcaaattcttttacaaacatcggctttagggttcaacaccggaatttttgattcatttctgctgtgtactgtcaatgcttttcgaattcggttcatttatttggtgggttaagtgttgatgatcagccgaaaatggcaaagaataaagaaccttattgatttgaaaaaaatagggaaatgaataaggctgctagatgagaacgacggaccgccaatgaaaacaaggaaaaatcgaataaacaatgagaaattttttcaaaatatatataataaaatcgtacaaaagtaatcatgtagataaataaaactgttataaaaaaaaagattttatgagaaaaataaataatttatttgtaaatttaaaataaaaaatataattattatttcagaaataacaataatttgataaatctttttaattacttaatttaatttataaatattattttaattatttggtccaccatttcctttaactttaaagtttggaaaattccgttaattatttgtttattgggctcccttcccttttgataatttatttaaaatcaaaagttaaacaggaggcagtaaactaaattatgtattaataagaaaaaaatatttttttaattatttataagagtaaatgaatattttattattaattttagaataataattaattaatcaattttaaattaaatttagtttattaatttttattttacagtcccccaattcgttccattcaaaagcgaaaattagtcaaaaataatgttaattgatttgtttatttgacgcccttcccgcactcttttcctttgataattgattttatttagcccccgtaaagggtaccggagttaatttgagcttataaaaataaaatgttcttaaatacaaataaataaattattggttaataattttgttcaaaagtaaggatgtaggtaaattaattgttacaaaaaataataattttaatgagaaaaataaattttatttatttatttgtgaatttcaaataaaaattattattattgttgcttaataattaaataatcaaggaaaatttcgttaattgctttctttattgggcacccttccatggaattttttaaattaattttataataattaattatttatttataattttttatttgtgaatttcaaataaaatttattattattgtttgagaaaataacaatttgataaatatttttaattaattagaaaaattccattaattgttttctttattgggcacccttcccacactcttttcctttcataattgattgtttgtttagccctttttatgggtattggaattaatttgacctgatagaaaaatttgatgagaaaattcacaataaataaatttaattatttattaataaaaagattcaaaataaataattattaattgtttgctaatttaaaataaaatatttattattatttttagaataaaatttatagtaaatttaaaaagaaaattatttgttattatttaaataataataaaataataataattaattaattaaacatttttataataatttaactaataaatattatttaattataaccctcgttcctttttcctttaaaatcaaaaattgggaaaattccgttaattgatttgtttattaggtcttattgcagcactcttccccttcttcattgatttgtttattttgttcatcttaaggggtcctgtaattaatttggtttagttaaaataattatgcaaaaaaataaataaataaaaaaataaaatattgggctcataaattaaatttagataaaaaaaacattcaaagccaaagagttagaaaaaataaatttgcatcaaagtataaaatttcattgaaattttaattgtttgaaatttaaaaaaatatttgttattattttaaataataattaactagttaattaattagaacattttttaaaatttataaataaatattatttaattatacggtcccccatttctttttcgctttaagtcaaaaattgggaaattccgttaattgatttgtttatttgaccccccttcccttcccgccacccgaactcgccatttcccgtatccctcgctgcaacccttcctcgccactctcgctgccgagcaatttctcgccatttttctcgttgcaatgtactctcgccacactctcgcccccctgccaatcgctgctgcctactctcgcccccactgccactcgctgttgcctgctctcgcccccctcccgccgctggtgacgtcaaattttccctttatgagagcaaattaatgtttatcatcaattgccaatgtggccgagtggttagtgcgtcagtctggccgccccccctctggggttcggatccgcttggtgcggggaatttttggagaattttaaatgaatttaaattcaacgtctttgacctttaagacgtttaaaataatttaaaattaaataaatttaattaaaataatttgcataaagtcgcgcaccaaaaaaagtcgcgcaccccctgcaataggtttgggtttgcaagaaaaagtcgcgcaataggtttgggtttgcaaaaaaagtcgcgcaataggttttggcttcagtactgaaaagtctggcgctcaaatggcccgcgctcacttggcggcgctcaaatggctggcgctcagttggccatgcacccctcccacacctatggggggctaccgtaatccggtgaaaatggagtctctaactacta

SEQ ID NO: 6979 - DNA, 5721 bp, Heterodera glycines
tttatctgcaaaaatgcatgttgttttttatttcattaacttttctttctttttaaaattctcggctgtacgtccgttgccatttatgtaagggtggattcaaaccaattagaaggatattttattgttaattaggatgattatattatatgatatatcctgctgatgataaatattacaatgtaaattttaatatttatttatttttattttaataacattttaactcattaactttctttttcttttttaattcacggcgcaactctcattctgttgttattgaacggatggacccaaaccaatatggaagaataatttgataaatttaattatagcgtctttgattgattttgtaggatgattatttatataaaatattctgctaagatatattttcaatttattttaactttttatgtattctttttgtcattccttttacttaaactgtgtgatctttaagaaacttttggtaatctctgcgaatttcttttttttctgtgtggaataattttaatgtttttttatgttaatattttgctaaatattatttttaatatgaaaataatacataattgttacatttttgcaacccttaagaatggagagtccttaatctaaatttagtttttggatttaaattccgtggtcaaagttaggcaatgtttaattgggagaagccatgttgaatttggagtggccaacgaattcggaaaggaccaaaggaatgccaaaaaaagaaggccaaaaagacgaggatgctaaatcagcaaaaccatttttattggttattttaggtgcaaaagataaaaacaaaaaaaaattggtgcaaagcgtttaaaccgttttttgaaaaccgattaaaactccaaaaaaacaggagaaaattggtccattttctttggtaccgaagtattcattttctccatttttattttaaaccggcttaaatactttgccgttaactttattggctttctgcattgtattcgaaccaaataaaacctataaaattgattttgacttgtgccattaacgaagggatcaattttccatttggttcaccccaatctttgtatttgatttctcccatttaaaatgtcaaaaattttgtccatcgatacataaataatttaaaaaattattggtcgtaaaatatgaacgaacagagggcgaaaaagaaaacggagaaaagaatgaatgagataatttatctgtaaggggagcggtggacagcacaattaggggggggggggggaggagcagggggatgaagatggacatgttggcgttggttgggtcaattcgtcagcaaaaagttcaattgatggaacggcacaacagaagggcatgggaaaagaggggagaaaagggaggcgaaacaatgacacaacaattaaggcataattaaggaccgaaaggtgcaaatgtgaatcgattttaaaatggaaagacggaaaattgcataattaaggacgacagaagaaattattaatggaacaggtcgaaacgtaagcggtgtttttttgttcattttgggctaaagttaaaagtttaaagaattggggtccgacggtgtcggcaggcgcagccatggaaatttgaaaaattatgatttttcaaccgattttgcactaaaaatagtaaattgtggattttatgctaaatttaaatcatttttaatgaaaaaaaaattaagaatttatactttgaagaagtaaaaaaacatccgtattttctgcctattatttttgagtttgaaaaaattaaaaatttccttttaataaaaaacatattttattcaagtaattctcatatatacattattttttttatcaaaaataaaatatttggatttgctttctttttaagattttgcactgttatcttttggcattccttccttatcagtcattaatatcagtttttttttgttttgctttggtcttcttccgtcagtgataaggcgactgcttctgctccacttggggcgagtcgtcgtcgccgaacaccgcccgcggtgccgtcgttgagccgtgccggtagttgcggttcagcgccggtggacgccttggcgttgaagcagtgctcatcagttccgcgtccatcgcaccggaagcattggaagcggcgccgacggtggaggtggagccggtgatcacttgctgattgatgagcagccgacgcgggggcgaataagcggcggcggatgggccagcagcaggcggcccctgatcaagacgacgcgtcggggaaacggtgatgcgaaaacggcacggctccgcaggtggcggactgagttcggccttagcaaaaagcgaaacaattcaaaagttaaacgaaattcaaaaatgtaccgagtgaactgatttgatcatttttggcggggaacggccgcggactttcgctccatgtgccgctggcacaacagcagcaacacgctcacggcccaaaggggtcggccgaagctgacgacgaatttcattgggagccggccatggcacaaattggtccatcgttttgggaggtgtttcgtggctgaaagggttcagagtttaatggaggaaaagcagctcatcacccaacccaaaaattaacgagaattaaaaaatatatcaaaagaattaatttaatttttaatttttacaaaatatcaataaaaattgtttaaaaatgcattaattcttattaattcgaaatttttcaaaaacaaccaagtaaattgagagaaaataaaattaattttcctggatttttgaaagtaaatttgaatttctgcctcttccccttctctctctctctctcccactctctctcttctctctgctctctctctctctctttctgccttttctcacattttcgtgtgcgctgatgacggcagtgacggctgccgttggagaagtgcgggccttcggctgtttccgcttgcgctcgttgtacagctcgccgtcggtgatgttgatttccgggttgtcggtgtcgttgctgtggaggcggtcggcagtccaatgcgtcgcggttcgcgcgagtacagcgaaatgcgatgcggcgcctcaaccgacggcacgccggagatgacggacgcatcagcggaacgcgtcattgaggcggacggacgcggcaccgcatgggagggcggaaagtgtgttgatctgaaagagatggaaccgaactaatgatggcaagccgctttaaagagagagcagctgatgttgaactgaactgtctcacccccccccccccccccgggaattacaacaatttcaacgcgttcaaacgttttaagccttcgtttatcgtattgacaaaatttaaaccagagttattagaatgatttgaattgatttaaacgaaaattggttcttgaaatccacgaggtttaaaagggttgggaaaagcactcgccaatgcctttttcaaacatttgtatgtttcgatttttttttcgcgacacaaactaattaattaattttgattactttgtagaaaaacccttctatatttgtggttcatactcctataaattttttttaaatctatgaattattcacgccaagcagtgctcacgcacatcaaccgtggcgagtgaattatgggccgacccaacggcgccagcggtccctccaaacgaaaagccaacgaatgtttggcgggtggacaccaagctgatgatggcctcgactttgtggtcaactgcattgcaaaagtgggttaaattaaaaaaaaaaacaacacattagctatatgctgaaatggcaaaacgacggcatttcataggcaaagctaaacaattcaattaattaattattgttaataataattaagcattaaatcactgctttttggaattgactattgttaataagataattaatcactcttgcgcggctttttgatgttgccgaaagtgccgtgccaacggcgactccgtccccagcagttctcttgggttccttctgttcgttgtcgccttcgtcctctgttctggctgagtcgtcgatgaatttgggcgaatgcagctcctcataaagcgacttctcctcgttgctttttctctttttgttttccttcgccgttggcacttccgtgccgaaaaaagtggccattgcgcagccggcggcgtcgctgcgcgggaaatgcaccggtgatacagaggaaggtatgacagaagacgaagccaatggcgcgggatgatgaaaaggggcgaccaaagtcctacggatcgacagccaaaagttagcaatgagagggggagggaaagggatgttcgagagtcagtctcgacaatccatcgcacagaagcaaaacatgttgaatgccatttaaacggataagtcaaagcggaacggagtgggatagtgccaagagcatggccagagggaggggggataaaagggcattaggcccgggtcagcacgaaaaattaaaaacaaattgatttttaatgcaaaagggtaaatctaatctgggtgaaagtcttgtggcattttgccaaaggaaagcacacaatgaaaaacggcagaacaaacgcatttgcttatggtcactcaatgtcccccccccccctctaattactcccactaattaccgaagttcgtccggcgtactcaatctgctctcgtactcttccctcggtgctgaaatgtctaattgtcgtccgccactttccgcctcatccaatgagctaaaaaaatgttcagaaatttttaaaagtgccagaaatttacccgattgaaggcggatggtaggccaatttggcactccgaggcgaccaatccgttgggatggcagcggaaggcattcccagcggaggtttggcagcggcgaattgggcctataattttgcatgaattaataattattaatttttattctatttatgccttttgcggtggaaaagcatccgcagaagtgatgctgaagggcgcccgctgttcctccacacttggggagggcagcgtggagctgggcggctcatcggatgggcacaacgacgacagatcggcgcccttgcgctgaacaaaacattttggcacttattaaattgaatgcatattaataattaatcaataaagaattaacaaaaagctttttttattaataaactcaccaaataatcgagattatgtacttttttaaatttttaaacaatttaatcaccaaaatcaatgaagtttggagaaagggaaattttgaatgtaaatttttctcaaatcgtctggcgaaaatcccataaatttcatgttttaacccttcgctaagtttttcgcttcccacctcccttttttgtcccttttctcacattttttgccaaattggcaaagagtcgccacggctcgcgcctcttcctctccacctccggcaaatgttggccctgctccaatttgcgtcctgcacctcctcccattttcttccgctgatcctccgcttttgtcgacgctttcgttttgtttcgatttgctccgcccgccaattcaaaaattttgcgcttctcttcggtgcgttccttaaaaatgggacaattaatcaggcaattagttaattaattactaataaaaaataattagtttaaaaaaatgttttaattagtgagaaaaatgattggaattaaaaagaaatttagaaaataataatgaaaaaagaaatattttcacgagtggtttagaaataccaaaaatttaaataataaaaaaccaataaatttaataattttaa

SEQ ID NO: 6980 - DNA, 1040 bp, Heterodera glycines
agtgccaaaaccaacggcacgccccccgtcccttccttttaccctccgcttcgttcccaaccccacgcgcgagtggacacttctccgctttactcggcacaaaccttcgaatttctgttgcccccgccgccgcccgtgcgccgacgtcaccaaattgagacaatgacacaaaaggcaaaggcggaaatggaggaggaggaacagaagacgaagcaggaacaacagcgagaatttgagggggaggaggaggaggaaaattgtgaagagaatggcagcgaagagaacggtgtgccgaaggaggcgacggcaaaatgccaccaacaaaatggaagacgagagaatggcacaggcaaagtaggaactgtcgggaatggcacgcacggggaaagttggaccatccgtttccctggctttaagggtttgattattgggcataattttcagtctcacggagtcaaggaaaagtcattcgcgaaaaccggacgctaatcagcttaacattgatttggagaagccgctatatccagtttcaacaatgaattgggggggggggaatggaaaaattgatcctattttcgttgttaaatgaccaaaatcattgctttatccccccaggcgatgccgcagcactcgccccccggctcttccgccaattcgtcgtcctcctccgcgagccttttgcgcttccgtgccgcgttggacagtccgttcggctcgcgcgatgacatcagcaacaatttgacgaccgtaagcaacggatacgccgcctttccgcccgccccaccggtgcacaaaattatatttcaatttttaagagttttttcagcgatttttgggcggcccattgcgccacgccaatggcggcgctcccgtggctcacccgcagcattttttggcaccgccgtcgcccttccgtcgtgccgcgccgtgcccaggcgacagcagcgagccgctgctgcggcgcagtctccgctcgccgaccatgcgacggctgcaggagtcgctgcagagtttggcggaggatgtgccggtgtcgccgg

SEQ ID NO: 6981 - DNA, 2061 bp, Heterodera glycines
ttgtttggtgccctcccttcacacattgaaaagtgtccattaaaaatccttttcttgccggagggtctgtttttaaattttcggaaatttcgcctcattcccgcgactgctgattgatgtttttccacattccttctcaataaatgtctgtgtccgctgctgactttcaccaaccgatcaatccaccgtaatttaaggactatttcattaccgtatcccccgcccattgatacagtaatttccctacgacaattttcaactgtgtcattcattcatttgtttgttcgttcattcattcaccgtttgtgcattaaacattaacattttattagttgcattatttttgaaaataaaaaacaaaagttcttcaaatagccgatgagagcaaaagtacagcagcagaagtacgacatatttcgaatgaaaaagcgaaaaatacaccccgaggaattaacttccgataaaatttcaaaattccctaaaactaagaaatctaaatttttgataattttttatggcaaactttttgaaagtaataaaagaaaaagaaaaaatcgctttaaaacagagttctcattttgtctttttctaagatttgtcttttggagggctgggccttagaattccgatacaatttacaaattcctctcccatttcttgctacgttgggcgacatttctgttaacaaaaatattcttgcctaaaatcgcctcggaatcgcttgaaatgcacttttgcaactgcttcacggaataatttgcactttttatactttttaaaaaattcagaaaaattcgaattaattcttcgttttcaatggtttttgaaccccccccccccccccgaatttatattctcaatgattccgttttgttcagcgacttttcgaaaacaccgaatttcagtgacattttttcaagaaaaaagcatttttatgtccggcgtcggttgcaaaattggaacagagattttacattttaatcaccgttgaaaaacctttaattttcagcgattcaacaattaaatagcgctaccatggaatttcctctccaccatgccgtttttttaaaccaaattgaaatggtccagaagaatttggcggatgtaaagaagaaggacttgaatgggaacacgtcagttttaagaaaaataacaaaatataaaaaattatattcatttttaagggctttacacatcgctttgtatgttggggcgcacaaaggtagtcactgtaactgtattacagtattcttagattatattttttatttgacataaattgcgcggattttgttggagaagggagcaaaagtgcggagcaagaacaatgctggatggagcgctataaaatggacaatttcccgcttcaccgtgcggtgttttccaatgaagttcaaatggtcaagcagcacatgaccgaaatgaacaagaaggataagcaaggcaatacgtgagtttttaagaataataaaaagtacaaaatgtttttcttttcttaagacgcatatcgcctgtatgcttggccacaaaggtagccaatttgtactgtgtttacagttttttcgattattttttattttacagaaattgcgcggattttgttggagaaggcgcaaaactgcggagcagaacaacggtgaatggaacgcgttggatgaggccatcgcgtatggcgacattggattaggtgtgaaatttcaaatttcacatcaaaattgaaggggactatataagcttgtagtgcgtttgcgcaaaaaatgtctaatttttgcaattttgggcttaaaatttcaattaatgtaaattggggtcaatatttttcgaaaaattcccttatttaatttttaactaaattttaagtaaatttttttacgtattaaaaaaatttggttttttgtctttcatttaaaataaaatccgattactctctattattctcctcaaaaaaataccaaatttcggaaattttataccgttttctgtattttttttggttaaaaatccggtctatagttattaaagtaataagtttttccatttaatctttatacttgaacaatg

SEQ ID NO: 6982 - DNA, 5524 bp, Heterodera glycines
  unsure (1)..(5524): unsure at all n locations
catgtattgctaaaagaacagcaaagttcttaatataattttgtggcgaatgtcggaaacgactgagaaggaaggagatgcagttatgttgtgatattcctagtctcatttgcatgtaaacaacattaattatttcaacatttcattgtttacctttttntaacaacgaaaaagatggcattcgaaaatatttttgaccatattggtcagttttatgttgtcaatgcttaaatattgtgcatttttcgttcaataaacaagccgagctcatttttgagctaaataatagagttagaattggaaaaaatacttgatgaaaaatcatagatttgatgtcgtcatatgacaaatctgatggcatattcttgctcagcaccctcgataacccccgggtgaagtgcaaaatcattaaaatcgggctttttccctttttttatgggaccaatgatctccaccattacccgggttggtaacccgggtttttttcgactgtagaagatccatccctcttaaatttcaattaactgggactgtatatgtgatttatttttccgtttattagtatctgctgcgagtgttcgaaccgctcatcccgcgcttctccaagctgcgcggattgtgcaaggcgcgccttcccgatggattcccggtcaaagtggaagtgccggtctttcttggcgtcaaggtggaatttttctttttttctacatcactttttggcagggcagtttttccaattgtttgaaaaggcgaatccggaaaaatttttcacctttccctcgtgcaaaaaaacgtcaggcctcgaaatttctttcggttcaaaaaaatgtccccgacagaccctccccttcacccttccatccccaacaaacgaaccaagtggaattttcaataattttttgggttttgtgaaaatgtgaataggatttgcataggatattaaattttatttcttttcaatttaataatttgttttttttgttccagatgaaggtctcctttccgcgtttcgaatgggccaaccacccggacgagatgtttcgcgttcccgagggataccaaccggaacaagaagtcatgatgattgataattattttttgctaaattatctgtaattttgtgattttattgtttgtttatttttgtttaaatattaatctctttcaatgtttcaaaaaatatagccagaagaattcaaaaagcaagtttttcgaacatttttggccataacttttttgaaaggacatttcttgaaattttgtaaggctaatagagaacacttagggctatcgaatgattacagatgagttgaaaaataaactgtcaccataaaaaataacatttattttacttttatttttaaattttatataaaaaaatattttgccattttttggcactttctttccgcccgaattggccataaacaacagacggaaacacccattattattcagcaagaaacagcgtaacaacaaataatgcaatggcacacaaagaataaaaagagaagtatgataataatgatggcattttgtttaatgactgtgctaaaatttccatttcgtcgcccgaggggaaataattcacccttgagaaaaaaaacaaacgcttaatagacaattacgacagatacacatatttttcgatgaatattaaaattgcataaaatttatttatttattttaatttagaaattattttaaaaacaaattctttggccgtttttaatttaattttattttattttttctcaaattgttacaaaatgttgctgaacaaccagcacaacaactccaccaactacagcaatggttcggccatcaatggcaattcgtctcccaattctttggtcgccgattctccgattggtgccaatgcgtcgccgaagcgatcgccggcactgcaaaaaaattcagcgcattttcggggcgaatttgtgggcaaagtgataattgtcactggtgaattttgttgaatttatcttattggaattacaatattttaccaaaaaccatcaaataaaaagcataattaaatttaatattgcctaatttatttcccttttcgggtcatattaaaatgttaacatttcgagaagaattcatggaaatcatatgaaagaattgaaattaaatatttaaaatatttatttttaaattgaatttaaaattattattatttatttaaaatacgatttgttgttttctaaggcggaacgcgtccattcggccgccaaatggcactgagttttggccgcgaaggcgcctctctgaccattcaggagccctcgggggagcgtttggcggttggaaatttatatttatttatttcatagctaaaaaaatttccaaggctgtgaaggagtccctcgtgcggtcgggcgtcgacgaacggcgcattttggccatttcgggcgcaacgacggaggagggcacggccatggaattggtggaacggtcgctgcaacgcttcggcaaaatcgacgcattaattgtgccaaatggcatttaaacggaatgccaataataaagaaattgctttcaaggtgagcgtcgacctgatcagtgactccacacaacattctgccgctgatcagctgtttggtggcacaatgcgatggttggcattggcattttgttgggggatttaaaaattcaggctggtctacctgagctcattgctggtcaaacccttggccaaaactgaggggagcatcgtggcgatcagcggcactttgccaaaaacggcggtggccgcccaatggcacgccatttcgagatcgggtccagaaaacatttaatgcttgcttagtgtaaatgttgttttttcagccctcgccggatgggtggccaattcggcgcaaatgttcggcccaaagggaattcgcatcaatggcataaagtaaagagagaaacacgcatttgaagtgatcaatttgtgcctttaattatcataaagtgtgggcattgttcgagctgatttccgctctcgacaagcgaaaaacgaagatgaacaacagaacgtaagcaaaaggacacacaaaaaaaagattaaatttcaagagaaattttgataattaggcaaaacaactcattaatttttaattaattgccattttacacattgtcctcttaatcctcagttgtgctcctccgcagtgaatgccctccgtcggcccggcactttggaagagattggccaagtggcactgttcttggccagcccttcccgggccagtttcatcagcggacaagtgatcagcgcggacggaggagcgaatggggcatgagagagaagggggaacggagagaggagaagagaaagagaggaaaagggggaaagaaaagggaaaagaaaaaaaccaattaaaaaacatttaaaatgtaaaaaataagggaatgagacaaatttagaagataaaaacccaatcacaatttaattgatttattagttaattagttcattaattagttaattattgtgcaaatgcctttttcccaatgtacactataaaaatacagaaacaattccatcgcattttcttaaaacaaatcagcatttcttgttttatcagttgtccattatttcttctccgagtttgatttgggtggttcgatcgccgatcagtccaatgaaaagtcggtccctccgccgccttcgcctgtcactgccattcccaaataaataatcaccgaaaaagccacacacaaacaaacaaaagcactcggaaaggagttccaaaatgcgttgtttaattctcttttttcgattttggtcctaatttattggaatttcattcatttgccaataaagccctctccttcaaagcgcggcataatgggtgctttcagggtttgccaggatcatggtcctcctggctggcccggatactttgaaaagcgcatccggatcaacctggaaaattaggatttcatctgggaatccggcacagatcgggttcccaaattcttatcctgcttttgaatttttttttagattctcgtctcaaaaaatttgcaaattttttctttgcaaagttttcctttttggggtaattgacgttgattagcgtctccgcccttttacccatcgccctttgcaccctctaattaccccaccccaattaacccctcaattaccctccccctccatgtctcgtcccatctttggtcatatgagtgacgatgcctttctttttatttatctctgtgcaccgttagcgtgatcggacagcagcaaaagcagaacagcaacgaatgtgaaaataaaaaatgatcagtgtttggtcaattcattaattcttttccccctccccgcctttttaattgtttttttttcatttgcactcaaacggacggacggacaaatggacaaataataaacaaaataatgacggacaaatgaatggcattttgaggacgaacaaacgcaaaatggggacggacaaaatgttatcatttatttacctcccttttttgcattatcagcacggaaagacaattattaattgactggcgtgaattatttggcgtcatcattttttgggaaattccgccgacggaataaaataaataaattttgaatttcaatatttgcaaaaccaaaatgttgtaattaatggcggcattcttttgcattgtgccatcattttgtgctccaaaatgtccgctcaatttcattgctttcgtcggatggcaccgtcaaaattggcatttcaaattggacaaatgaatgcttttcctcctgttgttctttttcggattcgttcatccttcgccctttttgtttgctcgtctcattttgctattacctgttttcgtttttcgtcaattttcaattttcccctttaaaatgccgacaattccctttaggtctttcattttcttttggccctaactttggttttttcttcgttggcctttgccatgggccaaaagtgtttctgtttctgtttctctgccatcgttcgtcgtttgttgttgccattctccgtccttcttcttctcgtttttttgctctccgaattcgcttctcctgcgatggcattgccatccgtgccgaggaatttgcagagtaataaaattttaaaaaatttaaaagaatttaattgcctttgaagatgctgtagacgatcaccgacagaagcggctgatgttgcatccatcggcactgacgcgacgatcgttggaaaagctggtggaacgcattgtggcctcggggtacagcccggacggaattattgccattcggcccggcaaaaaatgagatggcggagaagcaaatgaatggcaccgaggggaggaggagggaaatgccgaaacggataaatagcgaagcgggggacacggcacggaaaaggacgaagcatgagaggatgaagaaaaagcagttgaaccgaaccggggcacccccgggggcatcatccaatggcacgtactaatgctgctcgagagtctttgtaagcgactcgagaaaagtcacaggtttttagatctcggcatcgagtctcgggcaattctt

SEQ ID NO: 6983 - DNA, 2232 bp, Heterodera glycines
caaattgcaattttacgtgtttgcctcagctgaactatcggtctctccaccaagtcggcctttggccaatgccaatttcgcgaccagtcatcgctttgttagtttcggctccccactcattcactaatttgtaagttcacaaatgctaagcttcaccacctttttggccaatttggcctttaactcggccaatcccagcgttattcactctttgcatgcgatgaatattaattggatttttgacaatttgccgtataaaagggagggcaaacgaaggcaaaagcacacgccgtccaaaccattcaatcaaaaccaaccaaatccccactcattagctcattatgaaatttgcccctctggctttgcttgtgatccttttggtaggcacttttataagcattcattgaacaccggtcaaaagtgccatgcttcaggtgtctttggtcgctgccgtctctgctaattccaacaacccttttgatgcggacgcggccgacaacggtggcatggtgcgccatgctttggcttctaatttccgtttttggcatttttgcctttgactcattaagaagcgcgtcaaacggcagcaacagcaatggcgttggagtccgcaacagcagcgctgggtgccaataaacattgcgaatgtgaacattgctcagaatggataagcgcactgagaaggagccgaaccgaccgaccgatggacggacggagacgaaaactgaggacaaaatgccaagaatatgtgtgatcagtgacaaattcaaacccaatgccgcgccctttcgatttattcccgatggaatgacaattccaaacttttttttaatttgttaaaattaaagagtgcatggtaataatttaaattcgtttaccgttacctgtcaattttggaaaagaaaacggtcaaaaaccggctgaaaaatttaatcatttaccagtcgacttaatttccgccgttaaattaccctgttttctggttaaaaaatttgcatgttttttgaagagattttttcgattttttattggattttgttccggaatactgaatttgcccttagcctggaaacgaacatatgttcattgtattctgaatagataaatttaaaaatcaaattgatgaaaatcatagacaaacttaatgatttttaaatctaattgctagaaaaattaaaaagaattttttatattattatctgccgagacacagtttctttttaccatttttccttctataactcgccaaactcttggacccaaagatttaaaagttttctttaattttagagttgcacgggatcgggtcgggaattcccggtcctccaggtcccggctgtccaggttgggggaaagggattcaatccctccgcaggaatcaaatatattttgattttttcttggttttttatacatttaccatttttttaatgtaaaaatttcagccaaaatgcaaaaatggatatttaaaagtgcaaatctgttagcaaaacatgcaaatgtttagttttcggtttttttttctcaggaattgcctgtcgacaaagtttgattcttcatatttattttaaattgacaattttttatcattttttaagaaaacgcgttaagaatttgggcctagtaatcgccaaatctggtcatttttggacaaaatctgttgacaaattgcactcaattttcaaaattttcccgggcccggcgcaccgccgccgccccccttttcttctcgaatttttttcttggaaaaagcgttccgcgaaaaaagtggtgaaaagcaaaaaaaaaaagggtcgtcgaccagcagcagggcgatggtttcccctccaaggcaaaaaaaatcccgttgaccgtccctgactgctggacaaacaaaacatctcccttattcttaaaaaacgactcaaaacccaaaagtttggcgattttttggataaattctgtcaacaattttttattaaaagttcaaagattttttaaggcggtgccgaaaggcactgcctcccccacttacattggatttttggaaaataccgaagttatgaagttgtcgacaaaattttttcgattttccaaatcggtgttaccttctgatcagattaaggttgaaattctgaatttttaataatattctgattaattgtttggaaaaaatgaagtaaatttgatttggaaatattattaaatatatttattttaatttaattttgctttaacttttagcttttataa

SEQ ID NO: 6984 - DNA, 4839 bp, Heterodera glycines
  unsure (1)..(4839): unsure at all n locations
gcagcaacagcaatggcgttggagtccgcaacagcagcgctgggtgccaataaacattgcgaatgtgaacattgctcagaatggataagcgcactgagaaggagccgaaccgaccgaccgatggacggacggagacgaaaactgaggacaaaatgccaagaatatgtgtgatcagtgacaaattcaaacccaatgccgcgccctttcgattgccaaagtgcaaaaatgccactgataaataaacaaagtgagagcaaaccaatggaattttagcaaaaatggagaatatatccttgaaacacagctgaaaatgggttagccaacagctgctgatgttctaattttgtgaaaaaaatcaaaaagttaaattgacaaaaaattgtttatattctgaatgttgaaattgaatatgccaaggcattccgcaaaattcaaacttatgacccattctttactgaacggtggaaacaaaatgaaccggaccggctcatttcggcccgcacggttcggccccagcccagtttttgttgatctataacttttttctttgtcaaccaaatccaacaatcttgatatcattcgaaagctcttcacatactctattagccttacaaaaagcaaaaagattttctagcctgcaaaaaaattatgaagaaaaaacttcaaaaaaattgatttttttagttttcatgctattacttttttgatatttgtcgaattgccaagcaatagcttagaaaaagtttttaaactcgttaccaagattgttggatttggttgacaaagaaaaaagtcatagatcaaaaaattggctggggccgaactgaggtagaccgaaatgaacataaaaaagcaaatgcaatttttaaaatttataacataaaatgtaaatattttgccaaatataattttaggtgaagtttcggtcagtttagaaactcttggcatttctgttttgaatataatttttacaaaattataataagaacaacgaaaaaattttgtttggcgcgggatgaaccttatgatatttcgacatggcctttgacttaaaaccgaaagttgagctgaggctttagaccgagactcgagactggcaccaaaaaaaccagctgccctgactcgagaccagagacaaacaccgttggcataatattaggcctaaatgatttcgggtattttttgtatttcctatttcgatttaaatccgttgctcgccttcccggccttagggtacgcccatttaaaattattttcaattatttaatttagttttaaaatatttttaatgtataattgatttaacatatttaataatttctctttgctctctttgctttaattaattaatttctctttgctttaattaattattttctcattgcttttcgtcgtaaacggaagcattcacatgaaaaaattctcaacattttaaaattattcaccaacaaaacaaaatcttacttttacttctctaaaaaatgattgcattttggcataattttggttttctttcttcaaaattgcaaaaaacatttgattttattttaaagcaaaaaaaaagaaaaataaaaataaaaaaggatgaatttcccctttttaatattaataaaattcttttgtttttgtttgataaattctgtcttaactatgccaattggtgatgattttttgaaggatgagctgaggaagaaaagcgaaaatgaaatcgcaaaattggaaataaacgacgaaagaggggcaaaagtcaaagttagtcaaaaataaagaatttaaaaagccaaaatatttataaatttatataaaattttgaattaaattgtaatttcctaaattattttatttaacgataaaggcagaactttttgatgagcaattttggggaaaaaggccgggccaaccggaaaagctgcttaatgtggcaacgcaagtcaagcaggaagctgggcatgaaaaaggcatgtatttgcataagaaagaaagcaaaatttaagaatttaaatgcaatttagataaacaaagccaaggaacttttaattgtctgctgaattttggcggattaaaaaaggaaattggaaaaattaatgcggaagaaaagccgcttcttcttcttcttcagcagaagaagaatggagaaagcagcagcagtgaaagtgacggaccacaaaagtgcagggaaaaggaggacggcactcaaagggccatggggcacaaacggcagcgcactgaagtcagcactggaacgtcagcgcttaaacggcttagaattggggagggaaatgaagaaaaatcgaagacgaacagccaaagcgaagaatcggaagaggaagaaattggcaactattatccgggagaaacggagagcagctcaaatgctgatgagtcatcatcctacaaagccgagagttgggaatccgaagaatcgaaaagccaagacaaatggccaagagcaaaccgatgggaaagccaagccgaattcgacgaagaagaaattgttgaacaatcggaagaagcggaaagccgagaatgggctgattttggtcatgaaaattgctatgatgaatcggcccaatcggaaggtcgagactcggtggactttaatgacgacgcatcagatgactcagaagaaacggaatgcgaagatttagaaggcacaaatcccttcccaaaacgaacccatcttgaaaggaaaacagaaaaaagtaatgcgataaataaatgtagtggtgttcgagagaaaatttcccgagactaaaacatcaaaaacccgagactttgttcggtccgagactgagactcgaaatcgcattaggacatatggaaatcttcagactttgtttaaaggcataaaataccatcgcttcgttttaagatgattctctgcctcatgcaaaaaaggaaataaataaataaaattaaatttaaaaaataaaattccttttcgaaatatttttctttttataataacaaaaaattaaataatttaaaaaacggaaagcaaaaaatattcaaaacaaaattaaggaacttatccaaccgatgaacaaagaatggaaattgtgaacaaatttatggaaatgaaaaaccgattttatgagagtggggaaaagcgaccgtttcgccaagtggacaaagaaatagcggacaaattggacgtaaacgcacggacaatttacaagtggaaaaagagattcggattgagtaagcctgcgacttaattaaggtaattaattactaaaaattaagaattgggagagaacagaaaaattggaattttgaaaaagatcaacgaactgaaaagcaaaaacccacagataacattggcacaaattgagaaagaattgccaacccttggatattatagtaagttgttcaggctttttattttcggcattttttaatttttaagcttaagtttaaattttaacgtaaatatgtgctgattttcataattatttcattaaaaatcccaattatggtaattttggagaaaattcgtcaaaaggtttcaaattttctaactatcggcatggcgtcgttggtccctccgccaccaaaaatttttgagagaaaaacgcaccgaagattttttaaactatgaattaaagtaattcacaaaaaaaggaattcaaagttacttccttccattgtcaaatttattaaaaaggagggttgcgcctcggggaagaaattttcagggagcggcgggaggggggggggggggggagcccaaaattgtcgaggaccggagaagccgatcggagaatgaccccttttaagcagattctgcattctctgattcaaaatcattgaataatgccagtaaaaccctgtccaaattggctttcactgtcaaaattatctattaaaaaaaattactaaaatttcttttaggaaaagactttaaagaatcttataaacaattggaaacaattagaaaatttgataaaattgtggcaaaaaagttaagtccgctttcatttgaagagaaaaccaaaattgctgcagaattgggcgtgaaaatcagaacactttatgattggaaaaagaaattaggaattaatggtctgttttaaggggtattggaaattcatgaattttgtaaaaaaacggacgagggccatgaaaaaactgggacatcgggaccaatcccggtgtcgggatttaaacgataaaagttaaaattaaaaattaatattgccaaatttagaagagagaggctacggaaaaaaggaaaaaatagcaattttaaaacggtatgatcagatcaaaaaagaaaacccacaaaagacaatgggacaaattgttaaggaaatgcaagtcagccaaagcatgttttatttgtggagaaaagaattcaaagtcaaaataaaacgtaagtaattaaggaaggaattaaaaatatttaaatttatcggcacaaaatcctcaaaattaattaataatatttaagcacattttttatctgaggatgaaaaacggaaaatagtggcaaaattcaacaaaataaaggaaataaagggacagtcaattaaacgagaagacaaaaagaaaattgccaagcgattgggcttttcactgaatgcaattttacgttggaaaaaccaattcggtcaaaaaggtcgtttaattgcagagaattaattaatataattgtgttttattttaattatgaaaatatttgacaatttctctaacagaaagtcgaaccttcgaattgtacgaaagaatggaattgctgaaaaagtattacaaaataaaagacaaacacccaaaaatgggggataaaacattgccaaaagctncgaatttgtgcgaactctgagaaatggaaaatgc

SEQ ID NO: 6985 - DNA, 5671 bp, Heterodera glycines
aaaaattggcttttcgcatcccttctcaacccaccgtttctccagcaccgtaacttcctacagtaacggtactccactgcccggcatcagcatctcttccggtacggtcactgttttgccggtgcgcggccaggacgcccaattggtgcccattaacgcgggcggtgctcatttcatcgttggcgtcaatagcacggagacaccgtcgacggaaacggcgccaacggcggaagaccaaccgacgcggggggacaaaatacgtggcgacgatgcgcacctgcagcacatgatgaccgggccagaccaaacattggccacgccgtatcctcaattgacctcaccggacggaagtccattgccaaccgacgcggtgggccacctgatgatgcaacaaggcaagaaaatgccgaaaaagcaatgaatggcaaagagagagagagagagagagtaatggggcagttgaagagagaaaaaaagacggaaagagtgtgtggaaataagaggaggagatatagagtgaaggtgctgatgtccagccgcagaatatgaggaagggaacgagtgagaacgaggattggatttggggggaaaacggaataagccaaaatccgggccctggataaatggcctccccaaattggtaatcccttgggcgcccactagatcgaatacgcgtgcggggatgggcgagaaggagtaaaatataagataaatattggccaatcacataaaataataattccgccgcgctttgctctcggctctcgctcgccgattaactgcccactcaactgactccttatcgagagaatgctcccgattaaatagttggacttatggaacggaaaatggaatggaagagagcggggatatgtgcttgggaaagagataaaacggatgtgattaattgcgctttacacgtccacccttccttaagtttgtcctcaaactttgatttacttttgagttggaatgaatcaaaaaataatcaagcatcaaaacgtgacagattgaccgaagtcataggaaattaaattattgatacataaataattagatttcgactgaatacccgaaagtcggtgtgaaaactgacgtggattaatttattctatcaacagggatgtctagaaacaaaactttgttttaatgttgtaaacatagttttattttgtcataaaaaaggcacggattttcaggcgcttaatcgcaaaataaatcatggctcatcatcaataaaagtatggtttaagatttctttaaaaaaaataaaattacctaattgcttgactaatggaccaaagtcctttctactatgagtgtttcattttcttaacgattctccgctcttttcacattgggattctaagaaacattaaaaagatttttgatttgttttaattctataattctgagtccgtttgcttccgtaaaagtttcactcattaaaataattactcattgtcaaccatgacgaatgacccaaaggtcgattttaacaattttacacagcatgccaaaaaaactccattaccaaaaagttgatttgtggttctggttaagatagtaaaggcaggacttaggttagagtccattccaaagcattaatattttaatatatttttttgagaatattagttttagtaaaaaaaaaattgggagatcttggtatcactcaaagctattgaaaaggagaagttttttaaagcaaatgataaacgattgactcacatgaaattcgaattgggaaaaaaaaattaattcgatatattcgatgcagaattttcttactgccgcaaaatttgaaaaaattaaataaaattttataaagcaaaaataattttgttatatctattagcaaaaagaaagattataatttttctgataatcttctacaaatcagtggaatattcagaattgtctaaatggcatagatttgtatgtgtcgaaattgaaaattttatattatcatggactttactgaacgatgtgaaataggggatttacgatatctgagccccaaattttggtattaagacacaagagtaattaaaaatgtccgtctaaatagattccttttggccgattttttagtattctattaattaaaaaaacattcataaaatttaatgtatattaaccacaaggcccgtaatcttgacagtgctgccgaagcagaaaacttttgcaaacacgaattagcataaattactgctacgatttgaatatttagctgtgcctcagttttgtgcttttccaagaattgcactttccttgacagatggaccgaaatccttgggtttaatcttctttatatttaacggcgatagtttccgaatacatttcgaaaattaaaataatttgacttatttttggttcaaaattttaatggtttattttaataagaaagaatttaaaataagtttttaaatgctgcaaatttttaataattagggaacaaaatcacatgactggtgacccgagggtacttttgttctcaatataattctaccttcggtgatggtagtcttgatcatggttggaagtagaccgttgttttgcgagaaactcacaccattgacggtaatcctcctctactggatcaatttgtctgacaatcttgataactaaatcaatgctggttccaatgtattggtgaggtactatttgggttggtttatcacttaacgtatttagaccagttaaagtagacagactgtcttcaaagccttgaattcgaaaacctaaggtaataagttctacccaagcatcatcaacaattgctgaaacatcaacatctgatccaaattggtgtgaatagaaacgttgtagtgactcccctacatcaaaacagacatcgacggcaattattttgccggttttttcgcattttagaattctttcaattgacccacagccatcctctgggagcaaggtaaaatttgtcgcaaatttgttagaagcattaagagaatttgactcattttccacaaattcttttatatcaatgatttcacccaatcgaaaatattcatctgattgtgatttctttttcataagcaaaaaatgaggccaagaactcacttcagttaatcgtgatgccaaggtccaatttatccctgtttgaataacaataaatttgtcatccgttgaaatagtttcagattttctattctctgattcactcagagatttgggctgtaacatggcccataacagagggtctgtcaaagttcccaaaatctgatatgttcgagcaaaataattttcaaaggttgtgaaaaaagctattaatgtcctcaatattctctattgtcatgttgtttatagctaaattagctctgctatgcatgactggtgaccctaaggccgtcttagttgttttgtccaagacctcaattctcacctcactctcttcataatttggctcattatcgccaccacttttattttcaatcatgacggatgaccccaaggccgagttcacaaacatttttttaatgtgttgcccgttttcagagcgagaaactcgcttcccatcctcatctgccatttcaggatcacccgaaaaaaaattcggtcaacgacgacattcgttgttggagttaatggcgaatgtttgtcgacagtggcggatcgcgcgatgatgtgaggtcttcataattttgtgccagtggcatttgtcgtgacggggccgccgagacggattttttagaactcttattcttttgatttttggcattttaaagctaaattttatttttattatacaagcgaaagagaaataaatattgaaaataaaaggaaattaaaagaaagtgaaaaataaataaaaaaaataattgtcgaaaatagaaatgaacaaaaatgagcggagatctgtggattatgggcagagtttgaaatgaacgaaatggtagaacaatctcgtttaagagaaagcattagctcctcccacagagcattgagtggccatgaatcacgtgaaccataaatgaatggatggctaatccattaagaatagctaaaaatatgatgatggacagagataagttggataacggtggcaaaaaaatagcaattataagtgaaatttgacaattataaactaaaaatctgtttaaaaaaatgtatttgtctatctttattagtagaaagtgtaaggattaattctttttgttttttgagcaccttatttggatggttataagtcggacgagaatcaaccgaagaaatatttgggagatgattcaatagtcctaattctgctctttcgaatgagcatttatttgttcaaaactattaaaatttcagagactagttaagtttttgtaacagtaacgaaatgagaggacaaaaaacaaatacagaaaatgtttaaaaaatatgaaacatttaattttaattttgtttggtatttattaattgcaaataatgattgtatataaattgaataaataataaatattaaatggaaaaggccagcggtgtgagtaaaaattagcattgaagggacattcaccttaccttccttcacatttgcgcaccaaaaaaaaaattaaaaggcggccacaacaacggtcaaaggagaattatggatggaaatttgaatatgcatttgtgtgtgaataggagagagagaatgaaaaaatggtgttattatacagtatattatatataagaaagtgggaaacataataattttaatttaaatataaaataataacaaagaaaatattttaattactatatattttgagttggattcattgcttttcatgacgagttctgcgaacagaaagtagaagtagcacagtattccaactttattaagatttgtttacatttattaaattcgcgccaataagttgaaattaaattaaatatttaattttttgagtgatttaatattctttactgactttaagggtctaatttgtttgtagatttggccttcgactcagcagggataacttcggataacgattgtttattcaacatgccactaataaaagaaagaaatttgtcgttacctgctgcttaaaaattttttttttatctttgtttcgaacatcatgcgaaaacccgctaacgggtataatcattattctcttttttaatcatttcttcacaaaaattaatgacaaaaaaggtaatttgaagatttttttgtcaaattctttgtaaattaaaagaaaattaatattacttaaatagaaaagcagacttagaaagaaaattatgacttgtcaataattcgtcagttaagctgaaacttcgctgaatgaagctgaaataaaatgttggttatagattttgttcattgtgtaacaatgaaaagcaattgaaaatgtcaacaaaattcggatattcataactgatttatttaacataataattttttttttacagttatcctagttgctaaaaaaataattgattttcttcaattattataaattaaacttatcgactaagcatgaagaggcatgcgaacaaaatgggtttttatttatctaattttaatgatacgggtcgagtagacaaattcagtaatttggaccagagattaccaatttaaagagtggcaaggaccgcgggttaaaatatcataattaatttgagttaagaaaaatttctatccatgcgacttgaaattactttaagtctg

SEQ ID NO: 6986 - DNA, 1750 bp, Heterodera glycines
  unsure (1)..(1750): unsure at all n locations
atatttcgatgtgctcactttcagtacaattattatgataaattagatcactgtgggaaaaaaggaaaaacaatatgttatctgctttaaattttcanaatagtcataaaagaaaacctaaattgttaaaaaaaataatttttaaaatttctttgtaaatatatttcgcccaatggtgacgattaagacaagtattgtaaaagctaaacaaaacataaatttctgtctaaataactgaatatttttccgttttctcgattaaatctatccaaattaaaaaaaaataattttccaattaataatagcaccatcagtctgcctttgaagaaactcagattgaatttatcataattacttttgagttgcaagtaattagggcatcgatggttcattaaacttgacggtcgccccgaaaggattttaagtagagatgtgtaaatgaaatacaaaaaaaaaaaaaaactgaccaaaaaaacaaaatttcgggcaaaagatgcctattttatttttttgtaaattcgtttaataaacttatgcataagactgaataaaaagaatcacaaaaattaatcagcataaaaaaatttgtgtagcgttctgactggtaacattttttttatattacaaaaaaaaaactttgttaattcttaatacttctttgcttgcaaaaaataaaaataataataaacctccattttctcaacaaaattttgatgtcataattagaaaacgaaaataaaggcaccaaaaatcgcgaaaaggcactataataggcatctaaaaattgcaaaaaggtatgaaaaagactcttttgcaaaacaaatcagattatgataagccaatgaaatagtcgtaaaatgaaccgaaaaattctattcataataatgaaaaaaatgtttaacatcccaagattattctgtaataccgtttaactacatggttctcaagttctcagaatatattgaattttctacaacataaaatgtgaattgttcgttcacgcaaaaacatcagtttatgtgatagttttaaaaggaccaaaataaaattatacgcgtaatgatgatttgaaagcgcagtttaagtgagtgaatgcgcacgaactcctaattttacataaataatttcgagttaaaaaaatactatttgctcgattcttcaatttaactgggacaatgaatgcatgacgatttccccaaagagaataaattaaaatattccttataatgcataccaacataatcatattttattagcataaactcatgttattggcatccaatgaaactaataagaaatgggactgaaaggccaaaaaaaaattgctcaccttctgactggcgttaaaagtccgcaaagataaaaaatttgtctttgttaccctttgtgtgttttaagtttatttcagcaagttaaaattcttttatccaaatgcacgaattgaaattaaagggatgcttagcatcatttttttaaaataaaaatcaccattcaatgctcattatggatcattaaaagaaccaaggtctaaccgcggtttgggttcaaatttttttgaattaagtatattttacctgtcaagcgacttctttcacttatcatagtaaatgttgaaattttttttttatgggatttgaggtctattatttcattcgaaatacttatttaatattgctataatttgtgcattagctaagttattgacttcgtgtttggttcctctagaactttctgattctgaaacacgaaa

SEQ ID NO: 6987 - DNA, 695 bp, Heterodera glycines
tagaaggcggaatttcctgattcggaaactatagaggaaggaatctggattccggaaatttaaggttgaacttgcgcatcccggaaatttataatagtagaaggcggaatttccggatcaggaaaaccgtatagaggaaggaattctggattccggaaatttaaggttgaattgcgcatcccggaaatttatgatagtagaaggcggaatttccggatacggaaactatagaggaaggaatctggattccggaaatttaaggttgaattgcgcatcccggaaatttatgatagtagaaggcggaatttccggatacggaaactatagaggaaggaatctggattccggaaatttaaggttgaattgcgcatcccggaaatttatgatagtagaaggcggaatttccggatacggaaactatagaggaaggaatctggattccggaaatttaaggttgaattgcgcatcccggaaatttatgatagtagaaggcggaatttccggatacggaaactatagaggaaggaatctggattccggaaatttaaggttgaattgcgcatcccggaaatttatgatagtagaaggcggaatttccggatacggaaactatagaggaaggaatctggattccggtaatttaaggttgaaattgcacatcccggaaatttatgatagtagaaggcggaatttcc

SEQ ID NO: 6988 - DNA, 5257 bp, Heterodera glycines
  unsure (1)..(5257): unsure at all n locations
ataatagaaggcggaatttccgaatacggaaactatagagaaaggaattatggattccggtaatttaaggttgaaattgcacatcccggaaatttatgatagtagaagacggaatttccagacccgtatataaaagaaggaattctggattcctgaaatttatatatattccggaaattaataagctatttatgtgaaattacccaaaattaattatttaattttttgtatattaataaaattaatttctaacaataaattaaaataaattaaaaacctttttaataatcaaaactaatttaatttccttaaccctgcctcgataaagttaaacccgggtgcaacaattataacaagacgagcaaaggcccctgataagcaggagaagaaaataaattagtcaaaagaagtggagtgattaatttggaaaaaaaaaagttttttttaatgagtagcaatttcaaaaataaaatgatccaaatgagtgatcagaaccgatgattaatcagtagcttttcaaaccaaaccaaactgatcagaccgttctcggtgaacaaaggtgatgtgagtgattattggaatgataaactggaaatatatataatttgattgttagtaattaaaactgaagtggtgtaataaaagtgaattaggtgaaaataaaattggtattgaacaagaattaaatattaaaatcaagaacaaataggtaaagagaaaatgttactttatttgcataattatttagaaataaaaaaaaagttattaattttataaaactattttaaaagcaaataaactgcaaactcataagaatttttgcaggcagagggtaattttaattaatatccatgtgccgaattggatagacaaaatgccgccgcaaccgttggcattgtaaaatgcgtattctcgttctaccataaccaaaatgaatatactacggtatgcctgcatttgaacgtgcaagggagcagcaaaataacgacgtcattatcgagtgccgaggagacacagtacagggaacttcccgttacggtatacaataagcaatttgccgaaatacggtgaacgcgagcacagcaaacgcgcacacacacacacacacacacacacacacacacacacacacacacacacacacacacacacactactcactttgatgcatggcgagcggatggacagcgcgcgcgcgagcgggtgccgcttgcgcggcgtcgagttggcggtggacgacacggacggggcgagctattattgttgttatggtatttgtatattcagtaagtatgttttgtattatgtatggtgtgtgagtatcgaaaaagacggcggttacggtaagtatactgtcaattgtatgcggtcagtaaagatagtacggtataatcaaagtgggaaaaaggaggagaaatggaggaaagacaaagagatacagagaggtacggttgctgggtgtactgtgaaagggagagagatactgtaaggaatgagcgttagtgctgtatataattgtaattagtcagtgagtagctttagtcaaacgcgcaattaaatcacggtaattagcttaagtacccataattaattttttaaagtcattaaaataaattgggaaattggtaaaaaaaatgccttcgcgttaacctccgttgctggcgaaatggtcatttcgtctatttggctgttcaacgcggaggaccaataagggattggctcacgaccaaacagttcatcgttggaccaagcgtagaccttgacagaatggagttttttaatttaaatttgattaaaattttaaatatattaaatataaattttaataaatttacatatagaaagtgaatgattattatttaaaaggctatttaaaaatttataattgcttattatatattcttattcattaagctttaaaggtaaacaaaatttcaatatttaaattttatttaataaataaattaaatatttttttaattttttaatttaatttacattattttttaattaatccactttaataaaattagtttgacctgtgccgcggtgtgcgcatcgattagcgcaaagccaactctggtgcccagtgcaatgagtccgtgcgcggaattcagtgccaatgcggtgaccaactcgggtcgaatgccattgatccacgggatttggcacaccaactcgggctgatagcctggggcgagaaaaaattcatattatgtagaatgcgccaaaatttcattaaaaaaattataacaattttttaaagaaaaaaacataatttttttttcttaactatctataattttaaaaatttacgaaatccaacttcataaaaaaaagtttacgaaattgtaaacgaagaaatttcgttaaaaattgaaacgaaattaaacttcattaaatttttggaagaaaaattttgctttttcccaatttcataaaaaattttcccctctttaccagtgcttttacgattttcgttgaaaattttacgcaatgccgcggacctctctatatgatttacgaaatttacccaacccccccccccccctgtccatctatgattggaaattcattttcaatcattttttttatttcggcatggcacccaccagcgggccggcgcaatgcgccgccgcgcactttcagcgggataagttccgcgcagtgggagcccaacgatgtgtccgtggagtgggaggaattgcgagaagacgacggcgctggaagcggcggcgatggcaccgattgttcggccgctggcgccgtcgtcgccgatggcattgctgtgccgtcggcagcatgcgattgtcgcttgaggcgaccggtggcggacacggcttaatgttcactaattaattgattaattaaattgcctgtggcaaagtgacaattaatttattaatcaactattcataaaaaatttattaaagttttaaacttgaaaattttccggcaaaaaacttagaaatttttataagaaatttcatccgttggttttttggaaaaaatttttgaaaaaacagtaatttcatcataaaatttcgaaaaacgcaagaaaattttcaaaaatattttcttcaaaagcttctttaattttttttgaaagatttatattagaaaatttttttaaatttcggaggaaataatacgcgggcggaggactagatatatccttaattaaatgaccgaaacaatttaatgattttttaatagcgtaattaatgcctaattaattttttgattaccctttggcacttcttggccaccattcttgggcgatggtggtgctgttgtgggtaaaaaagttgttgaaatggtggaacggcacaactgtggcaacaccaatgtctgtatgaaaaaaaattgtttagcaaaaattttcatttggcattttgtataaaaaaaattttgaaaaatccgggatttaccgcaatttcttggcaacattcggtcttggcaaaaaggaacagtgtgacttggccagaacggctggcaacaagcagctggcgcgagtccaagcacagctccacgtccgcaaccgcgtggctaaccacgggaacgatcagctgagaaaaatgggaaaaaatggtaaaaaaaaatatttttttaaattagaatttaatggcattttgtaaatttaattaatgaaataattataaacaacaataaaaataaaatatatataaattgaaaaaataatttaccaatgaaaattacaacaaaaaattttttaaattataatttaaggggttttgtaaatttaattaatgaaataatttaaataatgacatatacaaataaaaatttattataaatagaaaaataatttataaattgaaataaaattaaaaaaattgcttttataaacactttattttttattatataaaactttattaaaaagtaaaaaaataattttttttattgtaaataaaaacattttactgctttttcttcgcctccgtttgctgcttgtgccgcttgcagagaagcaatgtgtgccgcaacattcttctcgaaatgccttcccgttttcagcttgtacataatcttaaaaaattaaatttaatcttattttattttacagtattcgttatgtttttttttggtgctacaatattaccaaataaattaccgtacctgaagctgttcactggacgcttgccaaaatttgatggacccatcctcgtggccggtcaacagcatttcctgctgtcctgtggcacattctcggccaattccgcctgcataaattatttattttaaagagtttctatgccctcaatgaaacaacttttagttatttttatgcctataatttttttaacattttttgggccgactaattagccccaaatttcttagagtgatttttatttagattagatatttaaaactgggtaaagtacaggcctgaagccagaaaaaaattaggggggggggggggatccgaagatcctttttttgctctttgggtcaaaaatcccaaacttttttctccagtgttatttaaaaaatttcagcgccagaagaaaaaacaggaatttgtagccgttttccgctaaaaaatgacttctttttttttttttgccattttggggtcaacatttaaaaatttcccactttttcttgaaaactacgggcctggtacaatataataagggcaaagtacggaattttaaaaaatgaagactgattaaacgaatattgcattagaaaatgagagagtatcgtatagccgagggagtacggtattagaatttttatgggttggatcagcggcagcacttaccgttgagaggccagggcgtttcgctgagccgtacccccttgacgccgttggtttcgtccgaccagcgtcagggcggcgatcagttgggccggncaatcggagaaatacgtgacggaacagcagaacgacttatatatacaaaaaaaaaataataataaaatttaaggctactcatagttttttttttaattttaaaaacaaattttttccatttaaaagccgttttttttatcaatatcgttgttatttttacttgaaatagaataaaaattaacgtttttaagcaattaaattagttttaacattttaagcaacgcaatttttttttttttaataaaattttttcttgaaaaatattattcttttatccgcggggcccgtagaataagaacgtggttatggttaaatgaccacgaagttggtggtaaaacccgcagaataagagctaccacgaactttggg

SEQ ID NO: 6989 - DNA, 1932 bp, Heterodera glycines
tttttttgcatttttatgttttaaatccatttcctttttgtggattgttttttttttaatttatttaaggaaatattgaattgataaagattttttggaatttttgagggtttaaaatagatattttgggagtttttagtaaatatttggatatttttgagatttttagttgatatttggtgtttttttagtgaatattttatgtggatattttgggttttttagtgaatataatttagaatattaataatgatataaataaaattttcatttattttttttgaaattatgtatatcctcaaatgtcggatcctcaaaagtcgggtcctcaaatgtcacaccacggtcgagacacctttgtgcatgtatcatcagtagggcttcgatttttaggtttttacatatttttttcctgagctccccgtggcctgaaacgcacgaaaaacatgtttttttgggctgttgttaagctacttttcgagttattagcacctattttctaggtttttatttttagcacctaaaaaacctaaaaaaatttaaaaaaacttattttcacctattttggcgttttgcccaaaatttgttaaaaatatgcaaaaaaaagaaaaatacacccctaagaaccgacccaaaaattttttcaaaaaatacatccctaagaatcgaccagaaaattttcaaaaatgcgcccctaagaaatgaaaaatttctcaaaaatttatctccaaaatttatttattttattttcttgacgataatttttgattttgaaaattatgtatatccttaatgacttggcaaaatatttttgctttttgatgaaaattttcgattttacacccctaaattcggaactttttggcacctattttcccatttttagcacctattttgggggttttttagaacctaaaacctacttattttggcagtttttagcacctaaaaatcgaagccctaatcatcagtttcttaggccataacttttttcttacttggtcaatccatacattcttggtatcgatcgaatgcttaaagtttagggaatttacaatacaattgcattaaaaaatagcaatgaaaaaaaaactcaacattcatcatttttcatgtatattcaagaataattactgatcggacgcttaaagggaaatagagccaatttttctatgctaaaaactaaaataattttactttttttaggattttgccaaaaaatgtttgcgttttatttgtcaaaatgcggaacaattgtttgattctgaggaattcttgcaaattgatcagaatttgttgtgtgaaatatttggccgtgatcagttggtgatcagcaatgaatttggcatttggaaagctgtaatttgaattgaaagaatattacataaaatactcataatttaaatattattaaggcactccgttgggccgacgaaaagtgccgtcaaaatgccatcgaatgttcctctgaaaatcgtcgtgctgcgcttggcccggcactgttcaaaattcgtttccctctcatcccatcagatgcatttgtgaagcaaatcggtagaaatttaattgtttttcgacctttgcgcttttttgcagttccttctggtgttttgtccaatgaagaatttgtcggtgtttatcagtttcattgccatccgaatttttgtggtgtacccggactaaacccactgaaatttccatggaacggacgaattttcgattggaacacagccaaaggcaacagaggaacattgacgatggaaattgggagattttctgaatttacacaaaaggaagtggggagtaaatgctttagtgattatgaaatacgaataaatggatttggatggaaaatattggcaggaataaagccgaaaagcaatcaaaaatggctgggcttttacctttgttgcaccgctccaaaagaaggtg

SEQ ID NO: 6990 - DNA, 3037 bp, Heterodera glycines
ttttagggtcaatttttcactgtaaaaaacgtcaaaaaccatttaaacaatatatttatcaccacttttcaccttgtttgagcaagtttggcaatgaaagaaaataattgtgaacatttaggcacgaaatttttgaattgaatttgattgaaataagagaattcaacaagggtgtgcaaatactattcctctcagccgttttaatgttcttgagaacagaaaagacagattcacaaaaggcattggaagggaaaattgatagaattgcagagactagtgatttgagcaggacaaaattaggatttttgaaaatagccgctcatttttcatccacgtttttcctatttagaaatgaaatcagaaatagatttttgcgacattctgctaagctagagactagagatcgaataaaatagacctgaataatgaacgttgctatagttggctcttaattttggtgaaatgtttaataaaattcaaataaatgagtatagaacaggaaacccggcaaaaacccggcacggaccccaaaaacccggcaaatgccgggtttaccaggtaaaataacacccctggtcgcaaaagattaaattaaattaaaaattgacttaatttccatataaattaaaatatttccgacccgcgcaaagcactgccatggcattgtgtccgttcaattcgctcaaatcgtccgcataaatgaagctgagcatcactttgaacgccacaacttcaacatcgggcacctccacaggattgtcggcagatgcaaaagcaaaaaaaaaaaaaaattaatatttttttattttcgaacttcaaatgtaattttgttgtttgcactttttcacttttaccattttccgcttttccattttgcgagtcaaaacggaacatcgcctcaaaaacgtcggaagcggacaccaaaatgcctttatgggccgacaaaagcttaaaatgaatcgaaaaattaaaatatatttataaaaattgaaatataaactcgcctcctttccgtctccgtcccccaccaaaaagtgcgcatccgcatgtttagccgtgcccaacaaatgcttcatccgatccgccaaatttcccgattttgacgaaatcatgtaaaaattgaaaaaaaagaaaaaatttgttttggaaatttttgctaaaaacatagaaatttttaaatgagactagttgacaaaaacaagagatcggaatttttaacatacgcgggcatgtgttatgggcttggcactaacacgggttacggtctatgaacggacccgtgtccgatctctagtaaaaaccaaattcgtacttgcccaactcgtatagtcgagaattgtcatttttgtaatatggttaatttactaaaaattgaccaaaatttcagaaaatattcccctacgaaattaaaaattttcccaaaaattcgttttcaaaatttatttatttgttttcatgaaagttgcaatttgcgagtgaaattgatcaaaaatgagttatttgtgggatttttttgcgtaaatacacttggtttttccaattttaaaaaactatttacgcaacttttggcctttttcgggttttttgcaactattttgcacttttttagcaactattttagtaactattttggatttttagcaactaaaaacccgatctctaataatcgaatgtttatttacatgaaaatgagtcttttgaagttttcaatgggcaaccagcaaattaggcaatcgattgagttgtttttattggccagcacttgtgattttcggcagaggatgtttttcatctttcaataatacaaaagtagggttcctccccgacccctcggggggcaaaatgtcgggggccggggaccggggacctcggggacatgtcgggggtcgggtcggggaggagctcaattgtcgggggtcggggaccccgatcgggtagtggatcaacgaaattttttaacgaaaaacccaatttttctttttcaatgctcgtaaatcttccttttttcactttaatcaactaaaaatgcgtccaatttggcattttataacaaggcatcccaggctccaaaaattttcagaaactgaaaatcgaatttcgaggctcaaaaattttaatctcataaatttgaacaattttagcggcgcgattttcaaaaactttttattcgagccacatataagaaaaatttggagcttttcggcggcaggcggtgccgataggctccgctgaaaagctattcggaattcctagttcattctattaacaaacttgttcaaaatttttcaccctgtcccctcttcgtcgttcaattacctttttaaattctttacaacactcggagtccccaatccgccgaattagcgtcggggggtcggggggcaaaaagtcgggggccgaggacctcaggggacgacatgtcgggggtcgggtcggggaataggtcccaaaaacgtctcgggtcgggtcggggggctcggggtcggggagcaaacctagttcaaagacttaaaattttaagaatttaaacaaaattagacgggacgcttattatttcgggcccactaagccggatgtaagaattgactaaataataagattgccaggcttccatgcataaattttttaatttgcaagcaatttaaatttttaagcacaagggttgttaaaactaaattttaatttttttatataacatttttacattttttggttttgtttttttgaaattattatttttttttacttttttgaataaatttgtcaatttgcgcatccctatgaaagtttttagcaactattttggggggtttttagaaactaaaactaattattttggcagttagcattaaatgagtgatagaaaaagtgagtgtccgataattttgttgtcattaattatgaaaaatcattaattttatttaaacaaccgattattgttcctaataaaccagaatcccgttttttcgggggccccatactccctcacattcgcccatctcatttaccctctcataagtgccattttgctgatcat

SEQ ID NO: 6991 - DNA, 1643 bp, Heterodera glycines
ccgagtccacaatccccgctcaattagtgtcggggggtcggggggcataaactcttaaaaggggggtcctcgggggacgacatgtcgggggtcgggtcggggaataggtccaaaaaacgtctcgggtcgggtcgggggtcggggggctcggggtcggggaggaaccctagtttttggaaaataattctcaaaatgtccttcaatttgcattccaattcattgctttacctgctgctggcatggattggtcgctgttaaactgttgttgcgaagtgtaatctgagattatgcaaaagcgattatcattacttttaaagtcatttcgtagtcatctactaataattaataaataaattattcaaattcaaatctctaatgacttttaaaataaacttttcaaggtaaataataaaagaaagcatttttgcgatgcaaaatcgattaaaaaattgattaaaatttagcataaaaagtatgaccaacacaaaagctagaaaaaattaattaattaattatatttcatatgattggtcaaatggaagattttgtaaataattataaattaccttattcgattaattcaacgatttaaaaaattttggttgagaaatttacagttaaaaattttattgaaattttttaaaggcataattcacattaataattgaaaaccatggatgggctggccaggtcaggaaagagaatttaatttgtttaaatttttaaaagtgatgaaaacatggaaattttcggtcacactctgaatttttgccactattttgctatccccccaccccgagtttaggcctctattttgggatttttcgacctaaaaaatcttgcaaagattttatttaagtcatattagttttttaccagtttctattggatattttttgttcttaagaaataatttgaaaattacagattacgtattatggaaaaccttggcggattacggatttccgtaactgaaaatacatttacgccggccccattcaataatattaatggaaaaaaagttacgaagaaaaaagttcattttcaattttttgatacccggagaaattgggcaaaaagggtagtttaaaaacgaaacatttgtaaaagtattaaaacttaataaattataattgttgactgttttttgcagattttactccttcattttttgtttagaattctttaaacttacctttataatagggttaagccccgagccctcggggggcaaaaagtcgggggccggggacctcggggagcgacatgtcgggggtcgggtcgggggggagctcaattgtcgggggtcggggaccccgatcgggtagtgatcaacaaaattttttaacgaaaaactcaatttttatttttaaattatcgtaaattttcctttttttcactttattcatctgatttcgttagcgccagcaagagtgagtccaatctggcctttaaaccaggggcttccatttgttcttatttataagaatttctaattttggggtagcgacgaaaatttttctgatttcgtaaatatattttattttttgaaatttggtggcataatctcactatttttcaagaaattttaaggtctgccacaaaaattttttgatcttttggtcccgaatgtactgaaattt

SEQ ID NO: 6992 - DNA, 1037 bp, Heterodera glycines
  unsure (1)..(1037): unsure at all n locations
taacaaaacttaaanaggcaaaggaggtacaaaaaaattctgtttgctaattaattactcattagtacactaattgtgtctgtgctgtcccccctttgtcctctcaatgctccgccgcttcgatttttcattccctccgtccaaaggtgacattgtcgaggtgcccttccgctacctgcacaagcttccgctgagtgggtacgaagtgcgcgactttaccatccaaacgtccgaattccgctctttgggcattgacattgaattttccgtcgattgcaatgggttcgcttcgttttcccactgtttttctgtttctcaattccgtcccctcagagagcgtctcactggacgcgtttgtccaggcgttcgacccgaacagaaaatttccttctacgccaaagtgacactgtccgactgctcccggcccaatttggcggccgtatccgtcggcatttacggctacaacaccgtttccgccatttttgtgacgccgctttgtggctgcgagtgcgaacacgggcggcaacaggtgcaaaagggcacagagagaaaggcaatgccatccttttcgccttaggaacggcactctccccgctgcagttacatgggcaacctcatctgtggccaatgccaatgtgaccagggaaaaggcggggtaaggaaagccacgggaacataatgagacggcattaacaattgaaggagaagtgtgagtgcgacttggacaagtatggcgtgtcaagtgccgacgaattggtcggactgtgccgagagtgagtgagggggggggggagagaggagcattttggaaagaaatgcatcaccattttaccaacagacacaataaagcgccgatttgctcgggcaaaggtcaatgttcgtgtgggaaatgccaatgtcatgcgaattatgtgagcaaaacaaacggacgaacttttttggcattcttcattacacataaaattcagcttagcggtcgctactgcgaatgcgaaaacaccaattgtccactgagtgtggaggggcgaatgtgcgca

SEQ ID NO: 6993 - DNA, 1694 bp, Heterodera glycines
  unsure (1)..(1694): unsure at all n locations
ttgaaggcgtgtgcgaccatggctacagtggcgaggactgcgcatgtgacgatgacncggcaccgtgcactgagaatggggtacggtacaacgaggggggagggggtactataaacagggtctcaccatttaatgttcctttgagattgtttgctccaacaatggcttttgcgagtgcgggaagtgctcctgcaatgtcggctggacaggcgaacgctgcgccgtttcggcgcctttgccggaggaatccgccgccgtcggggcgataacggcgacagaaagttccgacgaaagggaaagcgacggaggaaatgcaatgggaacgacgggcgaagagaacgacgacggggaggaagggccgagcacggacgccgaactgttgccaacgcaggcggaccggacggaggaggaggcggaggaagaggcaccacaggtgaaaaaaggggctgggggaagactgatagagggagtgtcacggcacgggggaaacccccgggaaggagggagtaaaaaagtgccatggcattaccgggaaggtgggaaactgatcgagggagtgccacggcaaattttgactgatttgaggaacaaataaatccgccagtgaatgcctttgccttccctttcagtccgctgctgcttctgcccctttctcttcgcctttgctttccctccttttgtccacgacttttctttcccttttctttcgtcccattgaaatgtccaattaaatgctttgaatttgtcctttgagctgccgccgctttcgtttccttcacaatttctcactagcagaactgacaattaattaggacaaaagggcaatttttataaatttaattgcgacaattaaatatttttccctatgccctttttcagttctgctgatttgaatttgatttgtttatttttttgccttttcacatttttttctccaattctttcttcgtatagtggaacttatttgttaggtttctgatattttacaattttttatttctccgttaaaccaaagtgagtggacaaaacaataaataaatatgacttatgcaaaaacatttttgtgaactgataatcagtgatttaaagcgacaagtaaaattagtgaacgtctcagagggcacaaatacattcggatgaaaggaatttcctgtgtcccatcagttcagtcagttagttcacttgttcgctgcgtacgccgaccatcataagttcctctctgacgcgtcccaaataagaagggtccgggtaaccatagcttaatgaaaccatttagataaattctttccaaaagcaaaggtgtagaattgcggtcccgacagaaacaaggacttgattttttcggaaaactttatgaaaattaatcgggtacaaaaaacttatacacagaatttgtagagctcaaaaagagctttcgaatgagctattgaatgcttggagaaattaagtttttcgttttttacgattttttgaaatttaattactcgaccctacttcccctgtgaatttctcgtaattctcatcaatatacaagtttccggtcccggctttgcccataagtccctgtcccgctctactctaatcttttttccacataatttccgctttcccagaaaatttttcacatttgtttgatcaaattttgcttctttgataaatcctctttgttcctttgaaatcccttttccctcctt

SEQ ID NO: 6994 - DNA, 2448 bp, Heterodera glycines
  unsure (1)..(2448): unsure at all n locations
ttggtcaaggccggcaagcgtgccttttgtgcgcccaatttatataaatgtctcatggcttctcaccttgctcacttgcaattgaaatgttgattgaaatgcgcgaatctgagtgactctgtcctcgacggaaacgcgtggaagtgacgccgttgtttcggccgagtgcaattccttggaaaaactcctttcaaattaattaatcaaataaaactcacgaagattgcgtccgggtccggcaccagtggaacagaaaagttcaattggcgattgcgaagtccccgagccaaccaagcgaaatgactgttcgctgtcggtgttcccggttggtgtgctcactgtcagccgactgtcgtccgattgattgttttccgagttacttgaagcagatgaaccattttggagttgtgattgagcacgcaatttggcaatgatgaatttgtgaagagatcgcatatggaaatcattggtgtccacgatttgaattttctaaaatgtggagttggctaaatgaaaataatttccatttacctttaaacgaccaaatgaagaaaactgctgaaggcaagcccacaaataatttgaagcggtatcaagtgaggaaaataaatttcctaaatttaatgaattgaaaaatatgataataaaaaccgtaccaagcagaggcatcgaaagactctcaatccgaaggtccaaagctttttggatgattgcagaataaacttggtcgagagaatgacggtccatgccagaaacgggagccaacagcacagaagcagagcgaattccacttgaaataggaacagagatcacacgtgaaccacgctgtttgcgtttctcctcgtttaaagaattctaaacatcaaaataaagaactaaaacatgttcatgaatattatatccagtttatttcttgaaaggttgttcaaaaaacgaaccatgaagtcctgaccacctgtgtttctgattgcccttccgacacccgcattgagcttaatgtctgggtcacataaaattgcaatggcatctgtttcagccatcacaatgtccccctgaaaaaatgcaaaaggtaaagaccatttaaatgtgtgatatgtatatcttactcgaaaaatattcaattcaattcctttgagacggcaactgaaaattttatctaggggcggcataagtatgattctaaataaaatttttttgacttattgctattaaacgaccatgaaataatatgacatttttagaaaaaatggcgattgcctaataattggtggagtcgttgattggacgtataaacaagaagagagagagatagagccgaaaatcactgctcaacatttggtgcaaaaaaaataatttagctcccagtttaaagtcacaatcagaacgccaaattatgctctttcactttggcgtactatctcttcattttttatagaaaaaacagcatttagtgtttctttccctctcatgttggcgtactattttcacacctcacacacgaaaaaaaaatcaaattcgcaaattctaataattttggttatatgggtataaaatcactttgaacatttagaatcaataaaaaaagcaaaaattttcgcattttggttgaaacagcggcctaggatttgagttatacgtaatgaaaatttgaaactcctacaacttttttctgagatgtcaaattgcttagcattcgcttagaaaaatattctccttttcaaaaacctttttaaatattcggtttgattgggaatgaagcgagttatggcagatcaaaataaaaaaatacaaaaatggcattttctagtgcaaatttcgaaatagcgcgaaaaaattatgccaattacactttttggcgttatgactatttaaattttgaaaaccatccaactttaattaagtgctctgctgaagttcgacaaatttttgctctcattcattttttttattttgtaattaattctattctaacttaagctttgtcaaatatcatataaattcatctcatatgtcatctgcaaaaaataaaaaatccattgagaatgtaatcatcagtgttcggaatgagtttggttatctgaaccagctctgggacactgtttacatggacttgccaacccgggaattccgcgtggaagaagcctgcgaatttatgttcaatctcctacaggtgatcagaaaatcagaagagaaagtaagtacattaagaccttcatctacgtctaaatatatttgcaattttaggtggtccgtaatattgtttctgacttggaaatccgccgagaagcagtgaccaatctgaggaaatttttggggttgccttctttcgacgagtcgcttttcccgccncagtcgatcgcattggtacctcanattttttctaacattctcactgnatttttttagctgaaagtgcttgattcggaaaaaaccgattggaaagcgaaa

SEQ ID NO: 6995 - DNA, 1493 bp, Heterodera glycines
  unsure (1)..(1493): unsure at all n locations
tttttctaacattctcactgatttttttagctgaaagtgcttgatcggaaaaaancgatgggagcgaaaggnnanggaattgtgggagccaagcgaggctgacggaaaaatacaaagcattgtgcgatagggtgggaacaacggcgcgacaatcgaaaggagtgcacgacagagtgagagagcgattggggagacaacgctaaaatgatttgttacagattatgtccgaagatgagttggacaaactcaaaggcgaggtggacgcgctgcagacttttgtcaacaaacggctcgagaaggcacttcagctccaagcggagagcaaacggtgccacggcatattttattaatttcaaatttcgtttcagaatctttgagaccattcgcccgtccatcaatagtttcaatgaagactacctccactttttgcgtgttgacttggacagccaatccaccgtgttatcgtctgactttctgaagaagatggaaaaattgaatgaaagagtgagtttaaagaagggcgatcgaacgaagtgcttaacgatctctgtttgcttatgcccctaaaaatttagctgaaagaccatcacgacttgtgggctaaacaggtcgtcttccgctatgacgagctgctcgttaaattagacgagttgtccgcaaaatgtttccaaccttctacggagtttccagcaaagccaaatttgagtaagtgacaattgtcaaaataaaagtcattaaatccttgggaatttcaaaccgcttatttatttgcgtgattaatcttattttatatgtaatatttcagaaaatctgagtgagaaggaactgctaaaattggaggaggaagttcgaatccgtcagcaaatgtacgagcgagcgaagcccgtatttgacaaactgaacgaatggatggccaattggaagcagaagttggacatcgaacggcgtgtgtgtcgtgcgtctttctacaagaacagggcggggtgtctggacacaaaactgaaggtcctttaatcgaatcataattttacatgaataaataatttagcaacaaaaaatcgtggaacaaaaacttccgaaattgctgaacgagctttgtgagttatgcaacgactacgtcaaaaacttccaattaaacgacattatcatcgacggattgcgagctgacaaatacgccgaatcgaagatgcaaaattatcaccaagacaaaggagtgcaaaaggctcagaaggtcattcgttatcatccatcctttgattgtttttgttctaattacagcagttttcgaatcctcctttgaaacggtcaacgtcgaaccgtcccgcgacttcgtccacttctcgacgcaatgtattcgtacccagaaattcgtgtggtcgtgctgctcctcgcgcactgaacccaatcggggaaaagcagcagacgccgacgacttcccgcaaagaaggcgagacgaagcacgccactcgtaaacggtccttttcaagcagtca

SEQ ID NO: 6996 - DNA, 7681 bp, Heterodera glycines
ctggttttgaattgattcgaaacggaacgaccagcatcaaggtgcaatttaatgagcctataaaggacggcgggtatgagatgatcgttctgggggaatttgattcgattttatctattaatgctaatcgtgtgctcagtagcgacggaagcatatgatgaattcttatgagattgaaatatttctatccaaacatccgacaacccgaaaatattttatcgggtttttgcttccgacaagatgccaaaattgaaggacaggcattttccgtactgttttgtggcgaatactgaccgggcgggcacgataggtgaacactgggtcgcctgttttgtaaattcgccgacagaaattgaatattttgattcattgggcgattatcccaatgaagatttaagttcataccttaacttatttgaacgaattctcattaacgaccgcatcgtccaacatcaattctcagatgcatgtggtcaattttgcatttatttcttgacacagcgctgctccggaatcccttattgtgaggtcattgacggtctatataaggtttgcccgagggccgatttattagttaagcaattgtcagtaatgtttaatttaattgttctcctaacgatagccagtcaagtgattgcagaaagagttactattctttctgatacacaactttttgacgacaagtatctcactatgccaaagagttcggtcaatgaaagacagttcgggttcgatcgctcgagattatgtacgataaataggaatctgatttcagggtggagcctatcaatccaagaaattaattcaatagaaaagagcggacccactaatgttaagctttaccaggattttcgacaattaaagccccgagcgtgcttttattacaacgatcatagttatttaattttccaaaacgaaaagacaaatgaaacttctataacaagagggagtcaagaaatggttgtcaggaattttcccggtgggaaccttagatttgatcatattgatggtcgacttttcgtaatcagagacgatcgaatagacgagattgaccttagaacaatagagaatttatggacaaaacacaatgaaaccgaaattattagtaaaccgatcggatcaatgccatcggcatacaccgatttcctaataaatgaggggcaaatttatctaattaaggaaaagaaaatatacaaagaccgatttgactcaaacgagatacttcccaaatatgtttcagacacagatagagaattttttaattttgtcgtgttcaaagaatttgagaaaattagagtttcaagttcaaatatttgggtatattttttgtcaattttagatttggtagtggtcgtcatctgtatttcagttctcagaattttaaaaataaagaaaaaagcaaaaattcatcatacagtggtgaggtaatggtatataaggaattgcaacgaatatgaaaatgcctactcgtgctcaaaatgaattctctcattgaaattctatgcgattttaacgaatgcgaacctcacgaattatcagaaattctacgacagcggaagaaagaaaatttgaaatttttgagaagacacgccctaataacgagacaccttaggcacaatcagtttatctcaccggatgacatcgcatttaacggttctaatcgactttttgcctaccgaggtttcctcggggttactgtcgaacagcacctctactctagacatcgggtcaaactacaattccctcaactaccgtgtgtaactatgtaccagaataatggtcataggtgctattttccccttgaacttttagattttttataaaaaatataacggctaacaggagtgggccttcactttagaccgttccacccccgctagtcataatatcactttaatttttttattcaactttatttaacaaaaaaaaaaacaataaaatacaaattaacaaaatccaaatggcatcacattaagttcttcatcgattatccccttctggcagaccggcctgtacattttgtgcttctcccttgtcaccacttttgaatcccttgtcggcctaaatattgattttttaatgagtcaaatgtttgaaaaacgtacccaaaatcattcttgtacacgaagaacgccgggtcaacctcccctttcccgtaactaagaaccatctccctgaatgtatcgtaatgcaaagtcttcctgttgtccacgtcgaacgtaatccccctaattttcataacgtattccgtctcccccgtctgcttgtttttcatcttcaacgcgtactgcttcgcccctccacaacaatattcttcaatctcatgcccaccgtattcctcactcatttctcccaaaaatttccccgtcgtaatcggctccacgtccctatcgtgcaaaacaaaaatactgtccgtgtccgtgtacaatatttctccgccatggctctccgcttctctcatgaattccaataattttaacctcgccatactcgtcgtcctaaaattaggttatatacaaatttataatttttttgaactcaccataaactaatgactatgttgctcgacttgtgctccatcacaaagtcctccttgtccctgtatatcaatctaatcgcctcttccgaatattcaacaatatcacataattcaattttatggtcacacgctattttataaaactccgacgccctatcaattaccgcattcttgttcaaacaatttctcatcgaaaactttccctgaaattgaaaattacctatcgaaatttattttcaattttcttacccataaactatttagcatcaacttgcttatgtaccgcaaccccggattcttcttcactttagccaattcaatgtcgattccatatttttccttatactcttctctccacatatccttctgctcccccgtctcaacccccttcgggaaaccgctcgcctcctccttcagcttcaaaaataagcgcacgtatcccttgaataaatcattcgcctcctcttcgtagtgccacgctctataaaatctgtccacagtataaccgcattccaacgcctttgcctgaaaatgtcaaaattttcttaaaagttttctctataaattcttaccaattcaacgctagtatatgtcgccacgtatcgccgctgtgccccatcatgtgggcacttgtagttacatctcgtagtctccttcttaaattttgacacacatctccaacataacgggaacaataatctctcatcgcacttcaactgaagaaccggaacccgcaaccctcgcggcgggttgaccctcactttatacaacccattatacttcaaatcctccggtctcatccaattaacatcaatctcatcactcttcggtaaaataatctccggcaatccaatcgggtaagctgtaccgtaattcaccgacggatacagactcacaatatcataaacactaattttcttcttctcatccgatttcgcaaacaatttcatcggtcccgtcctccctccctcatatgccatcctcggatcatcggccccttctcatttcctctgtcgtcaaagaagtccctcatttcctcatcctttttcaattccttctcaatttgacacccctaaaaagtagaatttataaattcaaatgtcaaataaacatacccaaacttcttcgacatccaaagtcttccgtagctccactaatctctcctgagactcatcgttcaattcctgggctgtccttcctccaatcagttccgccgccgggtcataacaattcaaacatccgtgtatgtaacatcccataacctcaatgcatttgtcgctagctccgttattcgcaataaacccatccaatttgtaattcccaattttaacttctcgtccgttccccgcgtgtcgtatctcaattccatctctcttgctcctccactccaaatattttattgccatcacactggcgcgatcacaccgctcatatcccttctccggcacaatcgataattgctccgtcaataaaaacattgctttaaaaatattcatcgcaacccccgcattcgtacaactcctcggcagggggtcgaatcctttcgtaatgtcgttaatcaatatcctcctaaactcaataatagacaacaataaaatctccgtgtcgtttcggcaataatttctcaattcttcatccaaataaaagggtgtctccttgttctcattgtacctgaaaaaaaaaagaattttattcaaaaatttttctattttcctaccatttttcgaattttataaatttatccttattcatagatcccggcgaatagtcctccatcggtagcagatgttccaatcgtattccataattttctttcttgttgtaataataggggaaaaagggcttgtcctcacagtccaaattaaatgtcgccttcagcgactcaagcttcaccggcatcaataaacatgtctctccaaatcagccttgaatgtttcttcgagttttgcactttaaattcataaattttcaatccattgatgagcggtgttcttcccggtacggcagaggtaattaaaaacaaaatgacctaaaaatttatgatttaaattaaaatattaaattttatcattaccatcaaatcgtccggcattgtgcgcaaatatgtacgtatcgtaattggtaaaagccgttaaaatccattccacaaagtccttcgtcggctcatgtccctccgcctcgctccaatccttggtcctctcttccctacaaattttgcaattcgtcctatttttgtcgtcacagcattccgtacaagtcactctcaccgaaatataattgatcacatgctccttctggtccccttgtaaatcgtatcctgcgatgtctccgaatcctggagttaaaacttatttttgtagattttatttgtagaacttacccatactacaattcgataaacatctttgtcctctttctcctcgatcggcataatataacatccccgtttggggtcgtgactcacactacaaagctggcaataagtctcaccacattcatgtcccttcttcgggttaaataaatatgtcttatcgcacatcacgcaacgcctccataagttacaagtctgatgtccctgatgatagttgtaacactcccaattataaaagtaacgtcgacacttcgggcactcaatcttcactccaatctccttttcacatggcattcctccaactctattgcagtaataacacctggcccggcactccaatgtgtggtaaacatcacgcgagtaaaagcactcacagtcaatacaaaatttgctcccacgattgaaaaagcaaacataattctttaatccatcccagtgaccattcttcaaaaatatcggcacgaccttctctcgtcccattggtcccttccaaagcacacggattgatttccgcggatccgcagacttctcaaatgccaccacccggtatttaccggggtaaatctcatcctgaaaaatttattaattttgcattttttcatttaaacccacccaatatttctgaacattcggcaattgctccacaccataactaatttcgtttccatcaattccacaattacgtaaaagctcaatagctgcgtccctctgtctcataatattgttcataaatcgattaaaaatgtttcgatgcacttccaaataattttttgacgccgccagtgcgtagaacaaacataatttatccgcatttgtaatccttaataaatattattattattttttacctttttttcgttaaattatttaatttttttgtttttagtttatttttttacctttctttttattttatttaattatttttttgattaatttttttttgcttcattaaattatttaaaaataattatttaaatttattttttactttctttatttttaattttattgttttttttttgcttcattaaattatttaaaaataattattattattttttatcaattaaaaacacttaccctatccgctggtgttccttgaatccaaagtcaaatttatggacattcctcggcccctctccattgggcatggtcacgcaagttattttcatcgtaattggctccgacagcaacagcattttcttattttcatccccgtccccgctctgccccagtttgttgatttcctccatgataacatccgcattattctggggtacgcccgatacggcacccacaccgggaagaaaagcctgcacccgtaattgtcactccaaacatccgcacttttcgcttcattttttcttccgtagtttttaaagccacctttatcatgttgtcgatagtatccttcatcgcttcatcagggcgtcccacgtccgggttgacacgaaattccgtaatatttttcgtaaatccaaatttttcgcaagtcgtcgtttgataatccatcaatttataattttccatttcttcatcaaaattatttctgaaatattttaattgattaatttttttttgaaataattcttgtggttttatcttataaatatattttaaattggtataagaaattttctttaatatttttattaaaaatcacttacccaattgatcggaaatcccattttttggcaaatggcacggcgggttggaaggagttcgcgcgtttaaaagacattttaaaacaagaaattgcagcagaagaattaaaaagatccgaatttgaaaagaaaaaagacgtaggtaaaatagattagaataaatttaaagaaaaaatagagcggagcgaattaaaattagtgcgtgaagagagtttaatgaaatccaactatttagctgaatgatttgcgatttgggccgggtgtatgaaatgggtaaaaagggaggggtttagtcacgtgattgtctgggtctgccttaattttgagggtcatcaatcatttcggtagacaactgtcgcattttattcagcaaaaatcgtctggatattctttatttcgaaagtcatcaatcattttttgtgacaggtttgcaaaattaggggccctatcgcaaaatagttggaacaaaaaaactaaaaatatggagaaatttcaataagaaaccaatcaatcacattttattgacagctgacctaagattaagaggccacattgcgaaataattggaacaaaaagtcacgtgcagattgcgaaataatggaagagaaataaaaacacatcaatcaattttggttgacaggtgacctacttttgaaaaggtttttcatcccgatttatttattcattttcgatttttatttttaaacacaatttaaataattaattttattgtccaatttataattgatattgtttgcagtcatttcaattaatttgcacttcttccaaattccgttatcgattttttttcgcggcggcggcatcgcggcgcggggcgagcggggaggaaatgcaaaaaaaaaaccccgcactgttttggcacattttcaaaaaatgcattttttatttcaggattagaaaccgtcataaaaaaaaatctcaggatttgagaaaataaaaccgcccaaaaggtttgggatttaatttgcaaagaaaaaaattgaatttccttcacctgccactttggtgacaggtggatgattgatgacctttacgcggcgctgagcggtcgggtgaaaaaacacccgcgaggatttggggaaa

SEQ ID NO: 6997 - DNA, 2744 bp, Heterodera glycines
ataaagcgagtaaagcccataaaaattggggcgaaaatccgacacttagccccaaaatcgggcaaatgcccggttgctagggtaaaatgtcacgctaaatttaaacgagcaattatcgagaatgaaatctcggggagaaaatgtattatttatgggtcaataatcattataaccttttaagtaatttatggccattaattcaacaaattgtgcgacaaaacagcataaggggaaaacggaaaaagcattaactgatgataacatttgttctgctgattgagagattaacatggaaatgattaggaaaatttcccgcgaaaaggtcaaatatttataaattatttacccatttcctttgatattattaattaatgggtgggggggggggagttaatttgaggcaaacattttttacacttattattataaatattatataattaattaccaccaatcaataaagagagaaataatttggtttaaaatttaatgaatatagtaatcctgtcaatattttgacaaaattgttcatcaaattcaatcgctcaaaaaacaataccctcatcttttcaacaaatagttctaccagacctccaacaatttcttcaaataaaaatatccctcaaaatttctctaaaaattttacccaaaaaaaaaaaaaattttttttttcctcttttacaacccctaaaaaaacaacaacaattttccctttgttggaggtctgacttttctaatttctgcttcttcattcaaaatttcaattatcttttatcactacctttcatttcacctcatttccgccaaaagtataagtggcacatgcccttcttttggttatttttatttttgaataaataaacttttaaacgtgtagaatttataagagaaaaatatgaaattcattttcgagaattatattattatattatatatttacatataaaaatataaatttgaatttttagaaaagcttagcaatgaaactgtgcttattattctttttaattgttgaaattgaaattggagcggaaaagaaaaaagtgcaacaaaaaacatttgaagaaatatttggagaaaaatgggaagaaaaagaaaatgaacagaaaaagagagataaaatagaattgaaaatcggaaaaaaattgggcacaaatcgaaacaaaatttacaaatggatcaaagaattaggaatatacaaaaaatggcataacaaatcaaaaacggatgtacaaaaaattgaaattgttcaaaaatttaatgcaatgaaaaatgaatataaacaaaatggatgaaaatattcgacaaaagaatgggacaaaaattatgaagaaattgggaagaaaattggagtaagttatgtaacaattcaaaaatggaagaaacaatttggaatgggtgaaagattaacggagaaagaaaaaatggacaaaatgaaaatatattggaaaatgaaaagagaagacgcaaaaatgagtgacgagaaaatttcaaaaatattgaaaattcatcgactgaacattttcagatggaagaaacaatttgaagaagaattaaatgaggattaaaaaaacattgatgagataaaatatcttttcatttattcatttttttcttgtcatgatttgcattcactcaactttttgcttcctcctaatccaaggccttgtcttcatatttgttttttaatccctatattgtatagccttacatatttttgatttttcttaagataattaagattaaaaaaaggtaaaataaagacgatttttgagttttgaagactttatttactagcattgaaaaagaaaaattattattttttggttaaaatataaatttggtcatcccccgaccggggtccccgacccccgacaattgagctcccccccgacccgacccccgacatgtcgccccccgaggtacccgacccccgactttttgccccccgagggctcggggcttaaccctagttaaaatcataaagcaaaaatcatcattttataaaattccaaatttaaaaatcaataaaaagctttttcgcggtgcgctttttccaaaattttttgggaagagggggcaagcggtgccggtaggcgcggcctggaaaatttttaaaattttgaatacaatttgtttttggaatgagtggaaaaagaataacggagaaagaaaaaataaaaaaatattggcaaatgaaaggagaaatcccaaaaattagtgacgagaaaatttcaaaaatattgaaaattaatgaacggaccatttgcagatggaagaaacaatttggagaagtaattaaggaggactgaaagattaaagagacaaaattcggtcgcattgttcgctttttctacgataaaaattgtttgctttttatacatattttcgaaaataaagattctgttggtcgaatgtttaaaaaaaataataaaaaattttaaattaacattatatttgaaactcccgaccaaaagggacagaaattatgaagtcaaatacttccatttggcataaaaacagctcctggcattttccagtcgataatggaccaaatgttggcagattttgacttcgcgacagcctacctagacgatatcatcatcgtcagcaagggccaaaaagaacattctgaacatttgaaaaagatgttctcgtgatttcaagaatggggatttcgcgtcaaacgggaaaaatgttcgtttttccaagatgaaattaaatatcttggacaaatcatcgac

SEQ ID NO: 6998 - DNA, 2190 bp, Heterodera glycines
attggaaattcggtgaagtgtccaaaaagagaggagtcatttatgacgtggacttccgtgacgggtcgtcaggaagattccatgccaaccaactccgtcctcgacacactcccgacgaagccaaccaattgcaaatatttcccgacgcatttgacatcggaaaacccgccgatcgacaaaatgccaatgatttggaagctcgggatgagcaaaaccaaactgtccaagagcaaggactcgagaatgatctgagtaagtcagacaacgacgaatcagtggccgaagaagcagatcagcacaagttcagccacgccgatacccgcaacggaacagacgtgccccacaaaggtagtcgccgtgagcagctcaaaaggggaggtgttcggatgagcctatttgaattatattggcgatctgtctattcaaatctccgccatttgttgtcaatcgcccataaatagacggtcattccctccctccttgttttttccctcattttccctcatttcatttcattttattattttcctccgaccaaattttttcaatttttcttttgacttgttaggctctaaaaaaataaaaaactagaaaatagttgctaataattcgcaaagtagcttaacaaaaccaccaaaaaacttgtttttcgtgcatttcaggccactgggagcagagaaaaaaaataggctaaatcctaaaaattggagccctagtaataaaatcgtagtgcgacatttgcggaccgacatttgcgtaccgacttttgcggaccgacatttgcggaccgacttttgcggaccgacatttgcggaccgacatttgcagaccgacttttgcggaccgacatttgcggaccgacatttgcggaccgacttttgcggaccgacatttgcggaccgacatttgcggaccgacttttgcggaccgacatttgcggaccactatttctgggttgaactgtcaaaaaaaaaataataattttttcaaaaattgagtgactaagtagttttatttgtgatttttaccaagttgaacatcgcccttcaagagtaattgatcacctattttgcaatcaatatcgaaagaacccattttttaaagaagtttagtttccatagataaaaatagtatgtagttgctcatttttaattttggacccatagttttaataacagcaaattacggacaatttttgagaaaaagataaactattttagtttttgtttgttaatttaattggtttggcatgccggaaaaaattaagctctcggttaactaaagcgtggaagtgaaacaagataaaaaattttcttggtataaaattcttaaactgacttttatatttaatttagctaattttttcgccaattttcacagtttaattataagttagaaattctataaaaaagaaagaaaaaagttatgtcaaataaggcttctctccaattgagacagatcgctttgcatcagcttaccttcactaatttcaatttgggaatattaaatttattaaatttcttattatttttttctttatttagacagttcaacccagaaatagtggtccacaaaagtcggtccgcaaatgtcggtccgcaaaagtcggtccgcaaatgtcggtccgcaaaagtcggtccgcaaatgtcggtccgcaaaagtcggtccgcaaatgtcggctaacccataaaatatatgtttacaaaaaatcaaaaataaaatcatttttcttttttttcattcattttcatcctcaaattcgttgagcatgcctatcgtactttgaatcatgaattgcatttctaagtcgtcatactgttgttgtacgtcagcattttgactctgtatatctttcgtacaatttttctggcgcaatggatttggactgatgccaaaaactaaaatattaaaaattctaattaaaaaataaaattattattttcataatatccctccttaaaaattggaataaaatatttaatgatacaacattttttagataatttatgtatttttttttaccattttttaattcgaattcgtttggtagtggcggtggcgatggcacttcaagctttaattggacacttttttcgtttttcgctttcatttttaataattttgcgtctcttccaccatcttttttaagattttgcagattttttgctttatttgccgattcaattaaat

SEQ ID NO: 6999 - DNA, 1107 bp, Heterodera glycines
atgaaaaagcctcaatggcattgtcccatgttttacgaggcaagttcctccgttttgggtacagccgacttcgtgctctttgttgttgccattgcaattcgattttgtccgtttcttcctccgatgcactgtccactgatgatctgctgctgttgctccgtttcgtcctgcccttcccgttcagcaccatcagaagcccctctccgttctgtccatcctcccgacttccgtcttcccttctctgtcgcaatacgttaagccaacaatcggccgcccggtcattgtcagcctcaaattggtatttcttgcccttttcagtgctaaaatgctcaaaagagtgaatggaatggcgcggaaaagagcgagcacactgactgaagcagaaagacgcgcacatttccctcgagcaaagaacagaaggctccgtccatggaaatgtggccgaggcattctttgcgcgcgtcgaagtccgactttgagcggtaatacaccaaatgattgtccatctcctcgaggccgaaataaagccgtttgcgaggttggaggagcgaggcaaaagctgaatgggagggagcactgagaaggagaagtaggcattgagagggaccgttgccgagtgatttcatggaaaggtacccctccagcgaaaagcactgctcctttggccgaggctgggaggagtgaggcggcaacgaggacgaggacgcatttgcggtcatgccgaaattggtggaaatcaaagggccaaaggacgatttgacggaaccatcggcggagggggaacactcggagtgagcggaggggaggaaagaacggagagtgccggcaggagaaggggccaaattcatcatttggaatcggattggctaattaattgccaaattagcagaaattaaatggaaatggaagccaataatcaaaaatggggaagaaataaaacattatcaaaagaaaaaaaagaatgaatgaatttatggacaagctaagcaaatggccatcacaaaaaatggacgaatggacgatacaatttggacgaaccaaaagacaagcaacggaggagggaggggagggagggagggaatggttggatcggcggaagggtggcag

SEQ ID NO: 7000 - DNA, 3112 bp, Heterodera glycines
  unsure (1)..(3112): unsure at all n locations
cacaaaaaagctcagtgtgggcgttccacaaaaagctcagtgtgggcgttccacaaaaagctcagtgtgggcgttccacaaaaagctcagtgtggcgttccacaaaaagctcagtgtgggcgttccacaaaaaaagctcagtgtgggcgttccacaaaaaaagctcagtgtgggcgttccacaaaaagctcagtgtgggcgttccacaaaaagctcagtgtgggcgttccacaaaaaaagctcagtgtgggcgttccacaaaaagctcagtgtgggcgttccacaaaaagctcagtgtgggcgttccacaaaaagctcagtgtgggcgttccacaaaaagctcagtgtgggcgttccacaaaaagctcagtgtgggcgttccacaaaaagctcagtgtgggcgttccacaaaaagctcagtgtgggcgttccacaaaaagctcagtgtgggcgttccacaaaaagctcagtgtgggcgttccacaaaaaaagctcagtgtgggcgttccacaaaaaaagctcagtgtgggcgttccacaaaaaaagctcagtgtgggcgttccacaaaaaaagctcagtgtgggcgttccacaaaaaaagctcagtgtgggcgttccacaaaaaaagctcagtgtgggcgttccacaaaaaaagctcagtgtgggcgttccacaaaaagctcagtgtgggcgttccacaaaaagctcagtgtgggcgttccacaaaaagctcagtgtgggcgttccacaaaaagctcagtgtgggcgttccacaaaaagctcagtgtgggcgttccacaaaaagctcagtgtgggcgttccacaaaaagctcagtgtgggcgttccacaaaaaaagctcagtgattgataaaataaaataataaatttaaaataataaatttaattattgtattggtaacatccacgttgaaatcaataaccatcaatacatataattttgggctaccactgaaaatgtaaaattaatacaataaatttttatatgtttaataaaattataatttagaaaatgaataagacttttatttttatttttttgttatttcgatttgagtattcgacctctaccaattccggttttgaagaatttataaaaaatcacaaagctatagaacttgtcaaaagctatcaaaataaagaaattaaaacattaaaaaaactccatgaacaaatgcaactaaaaggtattgacttaagtttttgtaccttaagacgctacgtgtcaagactaactattgtttctgcgcatacaaataaatcaaaattacatttacagttcaaaattattatttaaccttattattttattttatcaatcactgagcattttttgtggaacgcccacactgagctttttttgtggaacgcccacactgagctttttgtggaacgcccacactgagcattttttgtggaacgcccacactgagctttttttgtggaacgcccacactgagctttttgtggaacgcccacactgagctttttttgtggaacgcccacactgagctttttttgtggaacgcccacactgagctttttttgtggaacgcccacactgagctttttgtggaacgcccacactgagctttttttgtggaacgcccacactgagctttttttgtggaacgcccacactgagctttttttgtggaacgcccacactgagctttttgtggaacgcccacactgagctttttttgtggaacgcccacactgagctttttgtggaacgcccacactgagctttttttgtggaacgcccacactgagctttttgtggaacgcccacactgagctttttgtggaacgcccacactgagctttttgtggaacgcccacactgagctttttgtggaacgcccacactgagcttttttgtggaacgactcaccacggttcgttgtttgtttgctcttactttgtcaatttcgaaatccacaaaatattaatttggcaaccgacgcagtgattgtgcaaatgccaacaatggcacggattgtgcataatgatggcacatgtaaaaattactggaataaattgaatatttaattggcttttgcatttttttaaaatccaatttactctagcaaatcttttcaaccaaatcccatcaatccctgtggacaatgaattggaatgtgcaatttgtcttgatcaaattggtgccggaatacttgcgaagcgaatgccctcgtgcgaagtaaataaatattattaaatatttttttaatattaattttagcacatctatcacgaaaattgcattataacatggtgagcatcagaaaaattataattgtaaaaaaataattttataaaatctattatttttaaacaatcgaatgtcatctctactcaaaaggttccccaattttctgaatttaatttctaagattttgaggaaatccgatggaaatggaaaattttcaaaatattataaattaattttatgggcgcaaggttcagagcatttatagaagtttaaaatagatttaattttgttgttgtttgtgatcccaagtgcgaagaattatgcttatttaaaaataaaaatttttaattttttaggtttcgagttgggcataacacttgcccaatttgtcgtcagcaaataattgaaatgccaatgatacagccccaaaatggtccatagcgaaactgtgtttgaccttgtgccaacagcgcatccagaaattagctgatgattttactataaaatattaagaaaacaaaaaaaaggtgctgagagattataaaagataataatattttattatttatgtctatatgtatttgtgatttacacaaacatcataactagggctgggatttttatgtgctaaaaatcctgaaatatgtaataaaatatgtgctaaaaaatgctgaaatatgtgctataagccaaaaaaaatgccaaaatatgtgcgaaaatatgtgctanaaattggaaaaacaatggtatttttgcataaaaattccaaaaactcattcttttcatnttcgccccgcacattgcaaataaaaaacattggaggtgttngnnggtaaaattagtccttttttgataaatttgtttaaagattatttt

SEQ ID NO: 7001 - DNA, 2036 bp, Heterodera glycines
  unsure (1)..(2036): unsure at all n locations
ataatcaattaaaaaattttttacattccaaaatatcaatttttttttaaaagattggaaatatttaaaggtaatttaattaggaattttaaatataaagcaaaagttaacttcaaagtaaaacatatataatccaaagttgaaaaaatgttaatgggtaataatagataatctgattttttacatattaatgtttcaagaaataaggaaaaatttctaatattcatattgaaaataatctagtaattggtgttttagattgtcggaataaacatactttgccattcttttcttcgctgagtctactcatcagtaagttatttctatgactttcggcttaaaaagtagatagctccgccactgatataggaattatagatctaagattggtgaattctttcaattaacatgctatttcttgtaattctcatcattcgataattttcctatcattcatgttttgttaatctaaaaaccaaaaaacattatatataaaatttgaaatccataatgcttaaagtgtttaaaacgacataaataatatcaaaaaaattatataatataaaatagaaatcagaaaatgccaaaatatgccctaaaaaattagataattaattaaatatagaaaattataaattaattcagctcattgttttttcactgaagaattaacagtagagttcgacctggacctggatccaggcctggatttttcctggatccaggtccaggtcattttttgacaacctggattttcctggatttttgtccaggaaatccaggtccaggtcaaatgtgaaaaaaatctaggtccaggtccaggcaaaacaggaaaaaacctggattttcctggacaaaattttagaatttattatttcaagtgaccgatattttttcaagttttcaaaaaatgattaaatatatttaaaaacaaattattattgtaaattagatatttttagatgttcccaagcaattaattgaatttttcaaacatttttttgatttttaaaattggtttaaaaaatccaggtccaggcctggatccaggtctcgaggagcctggatttttcctggacctggattttccttgatttttgaccaggaaatccaggtccaggtccaacatggaatccaggtccaggtccaggtccaggcatttttcaaaatgtcgatctctaattaacagtatcaatatttaaattaatcaaaaaaaaagtttctaatttttaataatcgaattatcacttttcaaagataaattcctattttttttttactttttgaacacttttgtcattttacaccccaaaatttgagtttttttagtgcccttttttccattttttagtgtctattttggcggtttttagagcctaaaaatctcttttattcagaagaaataaaatatccaacgaaggggtgaccacttacacgttagattttagtaaattaatatcaagtccaaggagttcttttacagactaaatttttgtttaactcaatccatttatttatacgttttttgaaactgtcaacagatggagcatctgttatatctttgttgagtttagaccatattaaggccgttctgttgataaaagaatttgaagttttactggattgtgattttaacacaactttacgtctaagattataagggatgtgaccagaaaattgtgggaatatgtcttttttaagatgagtgagaccattaataattttgaatgcctgaactaaatcaattgtttttctcctttcttctaaagtttgaataaatcaagtctttgtttgtaaggtatgtaaggaagtctgcatttaaataatgcaatttttgtaaaatatttttggcatctttctaatttattatcttttttgtatgtcggattccaaatttcaggcgcatattctaaaagaggacgaatatatgtcttataaactntggtccaatacgtatagagcgggattttanatttggcaatattgagaatccnttaatagcagcttagtaatttagtatatgattagaaatctta

SEQ ID NO: 7002 - DNA, 2469 bp, Heterodera glycines
atgtcacctcgatttttttcatgtcgcaatatggcgccgaattggaatattcttcaaacatttgcacaccgttcaactttatcacatcattgccattggtgatgccaaaaaacagttctaaaacagaaatgtttttgaatgtaattgttgcatttcgatgttcattttcaagccattttccgtcctaaaattttggaaatattttttttaattaaaaaacatttaaaataatttaattaaaaattacataaaaaacacgcagttcaacttcaaatacaattgtatcattgttaaatgatgtgtcattgttaaatgatttgcctaatatgatggaaaatgttgccagatcacttgctaaacattaaagattaattgaataataaataaaattactttttttccttaatttattttgaaattataatcaattgaaaaataaaaaattatttttgattattttatataatctaataatcaattgaataaaaatacagttacttatttaaaattaatttgtttaaatgattcataatcaatgaataataaaatacaattatttttattattttgaatttattttgtaatcaattggatataataaaaataaaactatttgttattttgaaatcgttaataatcaattaattaaaaattttttttatttttaaatcatttaataatcaattgaatattaaaataaaattatttgtcattgtttaataatcaattaacaataaaataaaattattttgttatttttgaatcgtttaataagtaattggataattaaataaaattttttgtttcatttcataattcttacctgatttatcattcgtaaaattaacaatcaacaattttgcttcatacacattaagcatttggacacggaaaaagcatgacgaattttcatgaaggccattgattccagtggagaatggaagcggaacagaaaatttgaactaaataataataatttaattatttaaattttaatgctaaatgataatttaattattttatttttaatcaattttaaattatttcttacattctcattttcaatgccatatgcatccaattcgggcccatagagaagcaacatttggccgttaagctttaaatgccaaaaacttttataaaattatttcgaatttttatttatttttttttaaattagcaaaaatatgcagcatcccgagtttgagttattgtaaacaagctttacattttggtgccaaaaagtgactacagtgtttcctataatacagcctcccccactgaattagcccccccccccgccctgaaataaaggcacacttttaagaggggttgaaaaatagagccctcgggaatacggtatatttatttctcgaaaccatgtatcaattatttttgtaaatccatgcaagaccaaattttcgggttcggccaatgcaattaaaattttgccatttctttttttttttgctcaccctaattgccgtaatgtttttccatgcctcgccgtgccaccattcatttggccaaaacacatcgccaagctgcttgccgctcaccataatgacaaaccaatgctctagcaggaaaatgtcaaaacgtaattcttgagttccgttcggcatctgtgttccattgaccacagttgtgcccatctacattaattaattgggcataattagttcactcatacaatttgttaattgccaaaattactccgggaaaagacacttccatgtcatccgttgtcccaattgtcatactcattacgattgtgtcattattgtcagtagaattggcggctgttaaatctgaaaaatttttgcgcagtaattaatttttttttcaattccaataaaaaaagtaagcgaataaatttttatttattttttcagagttccaagaaaaataaatgtaaatttaaaatttttcttcttaacccgtttaattctatttttttcaaatacatagcgtattttttatttatttatttttttgaatttgattttggcatttctcaccggttcctccacttaaaaattcaatagtgaagttttgccaatcttcatccgtcagcacagtgaacacaagatcagcctgcaaatgttccgcgtccaattggccaagttcaaaagtttcgtccatttgcttcatcgggcattgcgatgagccggccgatggcacaatcggctcaattgggtcattctcatcggttggtcgagtaaactttattaaaatatttaaataaattacagtcaaattatttaatgtacagtacccaagcgtccatcgtacaggagcagcttcggtagacgtacaggctcacatactcctcggccatccatggcaacatgtccatgccgagcatccaaagcccaacatgttcttccatgaatggtccttggcccatttgcttggcgtactgttcagccgtatcaaattcttcgtcatcgaatggttgtcctaaat

SEQ ID NO: 7003 - DNA, 1320 bp, Heterodera glycines
  unsure (1)..(1320): unsure at all n locations
aaagcgaatcgttctaaaattgaaaccccctaaagggaaataaattttttaaattaaattgggttattcctttgaagggganggggaaggggggggaaganggaagngggaaagagagggaaaagagagaaaaaattttttctcaaaagggnccccgganagcagagcagaacgccaaaggggaaggaaaaccnaacaacgcccaaacacccacgcaaccgaccccccagcacagcggccaccacgacgcaccggcaaaaagaacagaccaaagcaccgggaggcaagccncgggccacgaggaaggcagcgggacggcaagcaagggacaaacgcaaagtatggcacaaaaacattggaaatgttgcacccgttagatgaaagctcaaattttgaaaatttaaaattgaatttgaatttttaaattttacggttcagtgacgtatgctttgtctaaagtgtgaagaaacggtaggaattcgaagaaggcagccaagaagagcagattgacgatgcccattttagccttttaaataattattttggatactaattattttttttaaagatttaaatacatttttaatttaataaattaattttattaattttgtttttcatttaattaaatatattattcaaaaatgtgatccattaacaaatgtaataaaattaatttagacaaaaaccgtagtcatatacggtacatatcttttttgtgccccctctcgaatttttttaaaatttttttctgttgtaatttttgcgatgaaaacgaatctgaaatttggtacgtgggttatgtgaaattttacgtcaaaaaaaaattcaaaattggcaacttaaaacaaattttaaaagattgccgtgtaatttattaatgcagcttggaatgaaatagtctttataattatcactggtctatgaactttgacatgctcaaatattattatttaattttgaattctgggccaaaaaatcttaaatttttttgaggagcactctatttatttaattatagttttaattttatttatttagtaaaatcgaaaaaacatttatctctatttttaattattgtaaatatttgttatttactatttaattctcaacaaaataatgaattcatttgattagcgaaaactgcaggttgtccattaactgatggaagcaaatgataattcactttgactaatccaaacatatttatgattagcataaaaagtcgtgtcgttttctacgcgattggatggacgattttttctatgattcactgcgaaaaatgggaaaataaattaaacaaaatgaaattgagcaaaa

SEQ ID NO: 7004 - DNA, 3333 bp, Heterodera glycines
  unsure (1)..(3333): unsure at all n locations
aaaataaattaaacaaaaatgaaattgagcaaaatgtattgaaaaagaggttaaaattaaggaatgttttttttattcaaattcagaaaaaatttatgtttcttgaacaaaaataatgaatgcacaccagggatggcacggaattccgatttccgacttccgaaaattttggggcctcggaatgccatccctgatgcacactattcacaaatttgttaatttgatttaaaaagtaataacattaccatattaatttatctttctttttagcctaaattcacttaaatttcgaataaaaatatactttttttttggaatttttaaaatacaaatgcttttttttcgttaataaatttttttaaagcacaattgctctttttcaacaaacttttttcctttgctaattcatttatggcattttcgattatttttgtgctaatgcttgtgtttctttctttctctctttttctttactgccattctattgcacactctcattttccttttatcccatttgtctctctctctctcactcttcgttttccaatgtctctcttcttctttttttctcttgttacattcttatccactcttccatgcttttggcatctctgtttttgcacataaatttgtgtctggcgctgcacattaattaacccaatgcaaaaatgtagtaggagcagcaccagcagcaataatatattttgtgcatgcctaattgattacttaaatgaatcattaattccattttttggtagacaaaaaattatttttgttagccacagtgattgggatgccgaagaatcggtgagatgagtcccacgatggaagggataattgagttccaataattgggatgcaaagaagtgggcagaatgagtcccagttattagaatgccggataaaattggtgagattgagtcccaagatgaagtgacgaagaattttttgagattgagtcccgtaattggaatgtcggagaagaattgagtccctgtgattttgtgccgtaaatttgctgaaactgtctcatggttaagtgccgaagaatttttagattgagtcccgtgattgggatgccgtagaagaattgagtcccagcgactgggatgtcgaagaatcggtgagatgagtcccacgatggaagggataattgagttccaataattgggatgcaaagaagtgggagaatgagtcccagttattagaattccgcataaaattggtgagattgagtcccaagattaagcgacgaagaattttttgagattgagtcccgtaattggaatgtcggagaagaattgagtcccagtgattgggttgcagatgaattaggtcacagtgattggaatgtcgtataattgaataccggtgattggactggcggagaattgagtcccagattaaataaagagaagagtcccagttagaatgccggagaattgagtccctgtgattttctgccgtaaaattgccgaaattgagtcccaagattaagtgcaaagatttttttagaatcagtcccagtgatcggaagggataattgagtcccaataattgggatgccgaagaagtgaggagaatgacttccagttattagaatgccggataaaattactgagattgagtcccaagattaagtgccaaagatttttttacaatgagtcccagtgattggaatgccagataattgagtccttttgttttttgccgtaaaatcgttgaaattgagtcccaagattaagtgctgaataatttctagaatgagtcccagtgattggaagggataattgagtcccaataattgggatgccgaagcatttttgagattaagaggcgcatgcttgcaatttttaataagcaagtccttttataatttcaacagggactgaatagtgcgataaaaatttaaaaatgcgtttttttaggtcaatttctttcaattcggaatgtctaaaacgattttgagttttggaccaaattatttatgtttcattaggtttttctttgttacctattgtgccacaaataggctgctttatctattttctttttaaatttagacaatatgatttctgcaaaagttgaaaatattctctgcaacaaatcggtcatgctntcggagataaattctattggctttgacatggattacaccctggccggtgaaacatttaaaaccagttttttccgaggaaaatcaaaaattcattttccactttttcaggctatatatcacccaacacggaggaactcatcttcaaattatgcattgagtacctgcagaaacataaagggttttggattgaagcaatagctttttgtgtaattgagcaacgcatggcggagaattcttgacttggttttttgtttattttagaatgaatttgtgcaaccaaaacttcttttaggaaaaaattgctcaaatgtatcccagaaatatggtccaattgaacggagaagtgaaagtgatgaacactttctacgacttgcccgaaaccgatctgttgtcccaacttgttcatctcttcgacaaaaactctggagtgtaagtaattgaaacattttgccgacaaatttactattatttatataaaaataaaaaaaccactttaaattggatgattgttgggcttaggttttcatttctaagtaactcgaattggcactttgttggaacgaattcgacgttcagggaaaaagtgttttttgctgaccaacagtgcgtacgcgtataccaaggttcgttgatggatacgatcaatttctgcattttctgtcgggtacgccccattcagctcccattagtttcctctacaagaaaaccaaaaaaaaaagcctaaaaataatttttccaataataaataaaaatttttggccaaattcgtattacgacattttctgtatatagattttcggaattggaaaaggaaaaaaacttcttttatagtgtctgaactaataaatttgaaacaatttaaataactgaatgatgataaattgtttcattcggacaacttgaaaggagttttactcaaaaaccgggttgtatccctaaaagtttgtctaattgacgccagaacgtaaaaggaacactttgtacgaccttacagacacggacttgatgtcacaacttgttgagttcttcgacacagaatttggaaagtgagtaattgtaactgaattgtgccgacaattttacaaccttcattttgcacttgaaacgacaatgactccagcaagattttcaaaaaaattttattttccgctggttaaatttcgtcaatttttgactaatttgtggagtatgggtagaaaaaaagcatattttac

SEQ ID NO: 7005 - DNA, 1249 bp, Heterodera glycines
aaatgcgcaaaaatgtctgtcggaaggatcgacttaaaattcagaaaattaaaaattatttaaaattaacgaattatttatattttattttttgattctgacctactgagcgcgtaaatgataaaattgacagaaaaattgaagcaataaatgtaaaatgatccggcatacagtaaataatggttttggtacagtttttcattggacaccgaatccattacaaatttcataagacttcgcacggaataaggaatattcaacacaatgtaaacaacaggaattgcaaacagcacaacattgtttgcacgtgccacggctgatgaattgacattccctaaaacccaaattgttaattagcatttaaaataaaaacaatttttttagagtgtataaccaaaatttaaataggattttattatttctaaaataaacttttttcatagaaaaaacttaaacttatgcaaaattatgccatattttgcagcaaacaaaggctctaattgcagattttacgaatcaacctatcaccctcttcagagaatgttaaactaaagtgaataaattatttaaaaatccatttttggctcataaatctattggtatttttaaaaatttttccaaaatattatattttttgttctttttttattagtatattttttgaattgaaatttatttggaaaaagttgattacttctttttttaagttgataagtttctggaaaaggtggcatttgaaatattgacaagaaaattttcttttattagttcttatttaattattccaattatgattacctgtcagaattgaacggcctcgcaatttaatgatgattgttaagttggcaactaaaacgaccagtgttggcagcaaaaaggtgaaaaatgatcgtggccagtagaaaaaatacttaaaataataaaaataaacttttttttaaatgaaataaatttaattaaaatttttcaatttaatttccatacatatgcctcgtgaagagaataattgtattgacatttcacacgttcttcagatgacgaagacaccaaaattgtgtatgtgtcattttcagtgcttttcaatgcaaaaagcaaattaaaattcaataaaattattggcaaaatccatgccacaatgattttccaacgtttgaagtcagagtgcttaaatgaaacaattttagtttattagtttaacaatttaaatattttaaaagtgaaaattattattaaaatagtattttaaaaa

SEQ ID NO: 7006 - DNA, 1894 bp, Heterodera glycines
  unsure (1)..(1894): unsure at all n locations
atatcgtcgatcagttcccacagattccgtggatatcatgtatgcttagacagcttttctcagccattcatttcaactttaaggaaatgatctattgttttgcctggactatcttctattttatcgccggatcagtgttagccatttaagtcttttcctttttactccgatcaccactgatcagtgcctcccctgttctttctcaggttggccatcgcctcagtaagccatccctacgccggcggatgggcaattgccgcggtcagtgaataaattaaaatgggaaaatgaaaacaaatccatcgattgattcctttttagttcttcggattttcggcaatgctcgcctacgctttggattgttacctcaaatttttggcatggaaaaataacgaaagggcactgggcggaatgggaaacggcacagacggaagcggacgaataaatcgaaacagcgaaaattattgaaagcgagggtgacacgtactgccgatgttgcctccctcccctatttttgatagaaaatttttgtttaataaataatgaaaacgtatggcccttggtctgagacaccccttgtacatgtatgatggggggggnggaggaagtgaaatggaatcgtgcttttttcatatttatagacatgaaacaacgaaaaagacatacattttcatataaatagaattaagttttgcacaacatcacaaaatcaaatctccttccattcgagttcgagcacccgctgcaaaaaacagtacaaatcgacaagttcggcgatctgaaccaaaatcagcacagtatcacttgcctgtttccccaagagaatgcgttaccgttttggtggttggtttgccggctccgtgccccgcctttgtctcaatgcgcgccagcaccggcctccgctgccattcgcttgcctccgtgcgcagcaaatggtacagctgagcaacgtactttaaggtgtgaagaggcacaacgcggtccttaaaaagtaaacgaatgaaaaaggcaaactctggtaagtacccaacccccgcgtacccctccaaccctttgggaccgacccgctgcagcagacaacttacatcgtgatcggcactcatcagcagtgttgccggccaattcacgccgttcgtgaggcggagacaatgaaggcgcgagtacctttgtcgaagaaacaatgaataagcaggaaaaggggtaaaacatacctgtaaatgaaggagaagtcgtccggtttgtcggggtctccatattcggtagcccaagcagcgccgacggtgaacttgttgaaacggagcatgtcaaggacgctaaaaaaagttcataataaatagcaaatctgctgttattgcttacttacccaacacgggtgacgacggccccgaagaggtccggccgttgttgagagcagactgccgtcagtaatcccccgttggacccgccatggatggccaacctgaaaaaggaattgcgagttttacgaacggatactgcaccacaactcacttcttgttgttcgtgtatttttcgctgatgagaaagtcggccgcggcaatgaagtcgtcgaaaacgttctgcttacggtcgagcatccccgcctcgtgccatttttccccatattcgctgaatttgaaacaataaaccaaaaaacaagcgatcatcaataccttccaccccgaatatttgcaattactgatacaatgccaaaatgtttagcgagcatcaggcgagtaacggagaaatatggagtctgagaactgccgaagccgccatagccgtcgagaattgccgggttactgccatccaatttcacgcctttttgaaggacaatgaacatcggaatctgttattaatgttcaaaatgttttaaagttcgagttactcacttttg

SEQ ID NO: 7007 - DNA, 2494 bp, Heterodera glycines
  unsure (1)..(2494): unsure at all n locations
ttttgtgccgtctttgcgtgggtagaaaacctgttttgaaaatttgttttagtcagtgaaaacgttaacttttaacacccagcacctgcttcgagtcgaatgcataacatcctccaagtagcagacgagaagtttgtcgccgtcaactggccatgctctctaattttcgttgtttgtcctcctcaataaattcaccatcgcctggctggacgcaactaaaaaattcaaatataaaaacgaacaaaaacaaaaaagcatacttgttggactttttttttgtgtgctcatactaaattgagaaattttttagacaattactgttaaatattaccactaatctgtccggcgatcccaagcccatttcatggaaataaacacatttgtgttcaagtcttttcgtcgagctcccaccggcaagcagctcagggtacgtcttaattgctttttttattgatcatattggaaaataacgaacctaaatgcccgtattgtcggtattaacttttgaggcatctcattgactctgacttccattttattttttcattattgtttgttttaacctgtgatctcactcgatatttattcacttactctgagactactttactgtgatcagtcatcagagtaagtggtctccgcccttctgatggcaatttttctttatcgataaataaacacagcggcccaattttgggctcccagtacaattatgcttattttttatttagtaatcagaacgccaaaactttgcaaaacttaaaattttccggagattttcccttgcaaaaaaagaagagccgatctcgagttaaaaactagacagctaaaaaataaactgtgattcgatagagtgggtcaaaatactggcctatgcaaaatttcaagaagattggtcaataggaaaaaatttttttcaaggacaaagttttttctttttctctcattttgacgcactatttccatgtctctaacatataaaataacacatggttcatttttttgtcaataaacaatttttttaaacttttgactaattaagaaatattcttcagaattttcccttcaaaaatgtttttcactttttgaaaataaaattttttctcagatttcgggttctccgatggcgtcggaaaccactccctcgtcacttccgctcccaaattcatcgcaaagcatttatccgttaacaactcaatcagaaactgctgctgtgtgcttttcctccacctcgagtccaaaattggccgtttacaacaataaccattcggtcagtgatcagcagcggtgctctccgtcagtcaacaattcaaagtgcaaattgacgagcattttaatttatattttttggcgatttccagtataaaaagagtgctcagccgaagcggtactccgtcctcttccaacgcatcgctccacttaaaaattggcacgcctaagtcaaccgccggcgatgtctatgatttccatagcagtcccgaagaagatggcgttccgaccacgggccccggctttttcttttcctccgccccaaacgccggtgttattcaatcgaaaggtcgcaaagcattaaacaaaaaaagattacctatctacttaaaaaatataattaattcacaatcagttccagaaagtcttcaaccgccacaaaaaaggataaaaacggcaattttggcaaagaaattattggctgcggcagctgactcgaatttaattgactcaattggagtgggacaacccaatggaaatggcacaccaaaaaggatgtcatcggacgaacattttggaaatgaaaatctgagcatttttggtgagatttgggggtggtaaacagtaattaatttttttaacaatcacagagggaacacagagagaaaccgaaggaattggcgaaggactctttgaggaagatgaagaagaaacggaggagcaggaggaaagagaattggacgagcgaccggacggaggacgaacggatgccgccacttcagtggttgtccaggaacagaaaaaggtgggtcatggtacaatcagtgaaactctgattctagtctggaaaaatctaaatggtaaatgaatatttgattgtttttctcagaagggaggtgcggtgccgataggcgccgccgactaaaagccgggaaaaattggaatatttgatgaatttttattagaaatttgttcaaaattttaataattttcctctcccctttatccgtgacccccctcccctcatcaccccttcgattcgaaagggttccccatttttggggcctttttcggggaccccctattttttgtatgttctaaaatttttgagacttgacgagttattgaggttcctttagttttcttaataatcctttttgagacccctctctatttgaagctttatttacaaaagaataacatgaaattaatcctcacagaattttctccctaatttatctcaanaaataaataataaatttccagaataacaattgaccatgat

SEQ ID NO: 7008 - DNA, 2408 bp, Heterodera glycines
  unsure (1)..(2408): unsure at all n locations
ttttggtgagattggggggtgtaaaacagtaattaatttttttaacaatcacagagggacnnacagagagaaaccgaaaggaaattggcgaaggactctttgaggaagatgaagaagaaacggatgagcaggaggaaagagaattggacgagcgaccggacggaggacgaacggatgccgccacttcagtggttgtccaggaacagaaaaaggtgggtcatgcatggtacaatcagtgaaactctgattctagtctgggaaaatctaaatgttaaaagaatatttgattgttttttctcaggagggaggtgcggggccgataggcgccgccgactaaaagccgggaaaaattggaatatttgatgaatttttattagaaatttgttcaaaattttaataattttcctctcccctttatccgtgacccccctcccccatcaccccttcgattcgaaagggttccccatttttggggcctttttcggggaccccctattttttgtatgttccaaaatttttgagacttgacgagttattgaggttccattagttttcttaataatcctttttgagacccctctctatttgaagctttatttacaaaagaataacatgaaatttatcctcacagaattttctcctaaatttatctcaaaaaataaataataaatttccagaataacaattgaccatgatttgcctccatttgtgttaaggttccgcccttgcgcatttcgctgttgaaaacgccaagtgaggagggcaccgaagtctcttccgcccaaatttcgccgccgattcgcaggaacagaggggggagccgagtcggaggacggagacagggccacgggacgaagaaggacgatttacaaagaatcactaggtgatagagtggcccattcttcattttcctacgtcttttaggagtcgcgtccgtcaaattgcgacaaatgcaaattcggaggatggaatttcccttttggggcgtaagcggcgctttcaaccggcgggggcgagcagcggccttttggaggaggaggaggacgcgatcagcggaacggcggagatggccgaaagcggagaggcggaaaacgcggcagaggaagagcagctgaacagcaacaatgaggaccagcgcagcgaggaggactcgaggcacagcgggacgggcaatcggacgaccgaaggcgcaggtggcggaaatccgaagggatttattaccaaaaaccaaatgatttttaggacgaaaatgaacatgtccgttttcctacagcttgacaaaaccattagaattttacttgttataaataaactcaatgaaatgtcatacaggattctgggatacatcctaaaacatcgctggccgaagtttccgggacataacgtcaccgcaaaataataaaaattgtaacaaattttttaaaagcttttttgtaaacctaggtgttactgattttgaatacaaaaaatttgctgcatttccagaaaaaaaaacaaaaaaaaattacaatttttgattccttggactttcttaggtggcgttttgtcctgctcccattatttccgttcgattagtccaaccaaactccaattagatgcacctcaacagcagcgacagtctttggcagcttcggttctctcaaagaacagttttgaacaaagtgcgacctttgaagcgatggtcggccgtttctgtaaggcaaaatttaaatttttgactttttgtcagatccgtgagaggtgggcacttcaatacagggaatatttgagcaaagtcaccgaaaggatggaaaatgcaaatttaaatgcacagcaaacggaccaaagccaagaaggggtggccgaaaacaatctcatcggagtcggttctcctgctcactatcaccaatttgcgtattgcttttccttaagagtgccgtgacaaaagaatggcccgaattgctgcagaaactgtacgccgaacaatcgaatcgaagcaacgaaatggcggaagcgcaccgccaggacagagaacgcattcggacgatgatgcaaagagaagtgacaaaaatggcggaagcgcagggacagacgggcgaaaggcagacacttttcataacggcaggtgggaaaaggcgaattttgggtgggccatggttaaccattgggttaattgtaagtgtccatgctgcgtgactcggaatgttatgacccaacggtttttgctgcggggacttcgcctgccaaaaagcaccaaacgccctcactcgcccaaattcagcagaaattcagttatttggtgaacaccaccaaaaatagacatgcaatggaggcacacactcttggcgaaagccatgcaagttcatcgtaaaatgccaaaatttgcaaaaaaagacccattttattcagaagtccgaatgaacagagca

SEQ ID NO: 7009 - DNA, 2378 bp, Heterodera glycines
cctaatttttcttacgattactccaagtaaaattaaatcagattttggtagaattttaattttatatttcatatgtttattttttttagatttacctcttaaattttgttgaaattttcgcgattttttgactaaggtattcgtttttttaacgattttttccttttggttttgtttttaattttttttttttgctaaagtctatccaatccctttttttgaaaatttaaaattaaatctctaataaagaaaatgttgttgcttttttaaaactccattttattttaatttatttttccattttttcactgttttcaaaaatcctagtaaaatttttccaattttttcatagcccctaggtattcgggtttaattttttaacaattttttgccccctaccacaatgaatcgtcgcgcggcaatcagtgcgtcgttgtcgcgcccgtcactgctcagcccgtcctgttgcacccacatcggaatgttgtcggctgtctgagtgtctcctactgtggtgcctccaataaattaaaattttaatcccgcattaattagcaagcatactgtagctagcaaagggtttggtggaaactaattagcatactgtagaaaaggaccaccaattcattaatcaggtacggtaggaggaagtgtaatttacaaaatcaaaaaaaaaaaacctttttttgggggttgaattcgtgaaaattacagctagacaggctcttgccactgactaaatgaataagtgagcggaaaatgcgatttcacggtaagggtgacggtaaaaacggtaattaccgttaccggccaattttcaaaggttacggtaaaactggtaattaccgttacaagtcaatttcgaaaattggtcggtaacggtaaacggcaatttactgcggtaaatttattcccgaattaatttttatcatgccctctcgctcaactcattcaattaataattgcctaattaccacaattacccaattaatcactgtcaataatttagtaaactattctatttgctataattattgtttcaagaatctgcttgaaaaattgttcacccggctgtgtcattccgagtcccctcattgaaccgatgataaaagcgaatctaaaaaagaaaataaagttttaaaaataaaattttaaaatggcactctgtgtttttgccaaaaataaatgttttaaaaataaaattttaaaatggcactctgtgtttttgccagccaagccaaggtcagtgacggcaagcaaaaattgtcgtcgatcattgatattatcaaaacaagtgatcacaactttaggaaaatgtttgatttaaattataattttcttaaatctattcaacatttttccaacatgaaatatttttttttttttgtttaattttttatattcaaatattacaagcattttagttttatttaagtttttaattttttcttttgttaatctttttaatttatatttacttacttttgaatattttattattattattatttctacaaaaatcttcgaaaaatttttattagaaaattacaagaaaaaagtattgtgaaatatttttcagcgatttaaaaagtaatttattattaaacttttcaaaaatcgctagaaaaattcttgacaatttttttttcttgaaattttgttaaaaaaaatattttatttttttaaaatttctgagttggaaatttttaaaaaaatttcgggaggacgggtaacgaacgatctgctcctgccaataatatcctcttctattttctgaatattactacttttttaccatttattaaattaattttaaattattattttttttttttgattttgatttgatcaatttccaacttctggatcggtttgacactgcgatcagtgtcgagcgcatgctttccgcgctggagtccattttgcgccggaaaacaatggtcacgtttgggtcgtcgttgaccaacgcgataaaatccgtataaaaatattggcataccctgggaaattaatctttttttattaattaggctctaattaaaattaattaattaaataagtaaatcggttggtggccggctgatcaaattaattaaatccgttggtgtccggctgggcaaattgttaaataatccgttaaaactaattaggggcagcccataattaaaattaaataattaattaattacatccgttggtcgtccggcgtgtatacaaatgacacttcactccaattgtaattgcccaaaattgagcgaacagccattgcgagccttgaaaatagggttaagccccgaccccgagccttccgacccccgacccgacccgagacgttttttggacctattccccgacccccgacatgtcgtcccccgagg

SEQ ID NO: 7010 - DNA, 1928 bp, Heterodera glycines
tttttttgaaaatttgagttcattttgctcacagattttcaccaaaaatgaccaatttttgcgcgattttgagaaaatttttaagaacaattttgcggactggcggtgccgataggtgccgccggaaaaaaaaaaaattgaaaatagcattttttacataaaaaattttaaatctataaatatatttaagaaatctgaacaattttcgtcgctaccccaaaatcagaacattcttataaataacgcactcttgttggcgctaacgaaatcagatgattaaagtgaaaaaaggaagatttacgagcatttaaaaataaaaattgagtttttcgttaaaattttgttgatcactacccgatcggggtccccgacccccgacaattgagctcccccccgacccgacccccgacatgtcgtcccccgaggtccccggcccccgacattttgccccccgagggactcggggcttaaccctacttgaagatttaaaaaaattcaaaatttaagagaagccaactttaaattaaaaaaaaaattattagtctcaaagactatccaaaaacgaccctaaaaaatcattaaaaataaaattaaagaaaagttttgaaatgttttgagatttcactaattgcaaaggctataaaaaattgccttagggaaaaatcattaaaaatgcaaaagacagtgaaattaaaaacttaaaaaaatcattaaaaaacattaaaaattttgaattttttaaaatcccataaaaaattcttgtaagataagaaaaaaaaattacatttttttgaaaatttagagagaaccagctttaaaattaaaaaaaaattattactcacaaaggcaataaaaaaaaaccctagaaaagccccattaaaaatgcaaatgtccgagacacttaaaaattttaaaaatttttcggaaaatttttgagtttttttttaaatgcgtaaaaaaaattcttttaagataacgaagaaaaataatatttacattctcgaattgacattggtgttgaaaacggtggggtacagtgtgtcattgttcaaatctgatgaaacggttgggccccacaagaacaacggaaggttgtagaaggtggcaccgtagccggcgaccaatgcacccacaattttctgcgccaatccaccatcatttaatcactgggactcaacccaccaacattccaatcaacgggactcaatccaccaacatttcaatcactgggactcaatctcatcaatccttcagcaacacaattaccgggactcagttctccgacatttcaatcactgggactcaacctcagcaacggaatacagaactatttaaaaggaatccagaaattgaaatataacccataaatcaaaacactatggtgtacatttatattgctttttctatccatcaaaggatttttctttcattttttattactatcataacatgctttttattcaaaacaaatatcaaaaaccaaatcagattcttttcatattataaacaaggaaaagtacaaaaaacttttttaagtaacaaacctttttcattcaaacgaattctaatgtatttttttaatcaaacaattctccattatcgtttacataagcaaaacaaaaagctttcacatcaaaatggaaatcaattaacaaaaacgaaaatttagacaaaaaataataataacagcaaaaccacaaattttttcttacacacaaaaacagaaacttcatataccggattttccactcaaacaaacacaaaaatgtgctcattattttattaattattttatataataaaagatgggttataaataaggaagggatgcgagacgaatttcccgttatctctccctttcctttcttttgctctcttttcttggccgattgcagatttactctactttttttccccactccctccct

SEQ ID NO: 7011 - DNA, 1767 bp, Heterodera glycines
  unsure (1)..(1767): unsure at all n locations
ctgactgactttgatttgaatttggccatttgttgcggatattgccgtcccattctgctgaccgtctgattggtgaagcagaaaaataaccaaaaaaatttggagaaaaatttggcaaaatgttttcatttttttaggatttggaaaatttgaaagtatgctttttcaaaatgacggacatcacattttcatcccaggaaaccttatcatggcaaattggatattttgttttcacattttgtacggttttcaaccgtcggatttgacagacggaaaatttaaatccgacaaaattttgattaaaaaaattcatttacgacccacttaaaaaatgattaagacgaagcgaagccccatttattccaagtgagaagaaaagagaaacaaggaactgcgaaagttcaattaaaaaaaatttaattttcaaaaattcatttaaaaatataaaataaaagacataaaaaattaattggtactgaaaatttatttaactaaattaattatttaaatgataatttaaaataaattttaattttaaatggttctcaatttctttttgcaattaaaattatgagtcactaaggcttgggtttatcaattttaatttcattaacaaaaagcccgagatttatctttaatttattaaagaaatattgattcaaatttattttaataattaatttattttaaaaataattaatttttttaaaaatttaatttgtaatgcttcagcttggccccagctcatcggcgtcgggcagtacaagcagcagttcggcggacagtgaagcaatggtggcaccgaaaagcaatgggattgaagcgccgccaaaaatcagtgaaccatttcagttggcacacacggcaaatgggggtaatttattaaaaaaaacaaaataacaaaataattttttaaatttattaccttttgtaatttgataaaacattttttaatattattttttaaaatttctttatttattaaaaagcactttaaataaaaaattttatttttaattataatttgacaaataaaaaaaagttttagaagaaatgaatattttctctaaagatttttaaatttattgattatttaaaaataatttcaattaatcatatatttttttcaaaaaccttttggcaaattaaaaaaaaactttttaaaaaatgcgaaaatttctaacatttaataaatatttcatattttataggatttaaatattttaagccttttaaaatccaacgatttcatttttaaaatattcaaatatcttttctcttttttgaaaattctgtattaaattatgtcatttaattcatttcaattatttatttttaagttcacaatttaaattggcaatttaaattatttattttaaaactcgcttattttattgtaattgttttaaatttctgaattttcccaaattaatattaaaataattaaataaacttttgtccccctctttcagtcaatggtccatttcatccgtgcaaattgctcaacgagccaccaattgtgatgctcggcgatggcatcagttgcagtgccattggcggcggcgctggttgtgttgcgggctctgctcgccgtcgtagccgttcgccgggcgcgcgtcgcaacgcgcattcggtgcaacaaccgcagcccatccgcgcagcgcaacaactccaacaccaacaacagcaacaacaataccacggggcaaacaatgggtaaaagttgtgccgatttatgaattttaattattttanatgaatatttat

SEQ ID NO: 7012 - DNA, 2560 bp, Heterodera glycines
tttttgcaaagtttatatttaaaaaaatttaatctttcctgtgggaggaacggcctgctccatttttcttcttgaaataaaaagaaattatgaagttttttgttgttgaaaatttaattgaaaagggacggcgagtgggaaatgtactgttgccaaaaaataaccttgtaaaaaacgacatttgttcgaattcaggtccgggatttgggtttatgggtcggtccacaatcaccaaatacacatacattgatcaggccgatcgctgagccgatcagtgtgccaaccaacacgtcggaccagtggtgtttgtagttgctgacccgcgtgtacgccacaaacgcggcaccgccgaacagcgcaaattggacagcaggcagcaccaatttgctgaccagtggacgataaatgcgtgcttgcaaatacaactggcacaaaaaaacaacagaaaatcgaataattcttttacaaaaaaaataaaaaatttttaggcaaaatttgcattttttaaaaaatttctaaacagagacttcaaaaattttctttttggcaccgccctcgccgccccctcccgcgttattttcaaaatttttgttcaaaaaggagcgtaaaaacgggtccgtttcatccccgaaaaatttaaaaaaaaaaaaatttgaaacgtacaattagaattcttcgaaataaaatctattgttagaaaaaattttttatacgaaaatctcgtgaaacaatttttgtttcatagcgattttttcattattttatgataaattattaattttttttttaaatttctacaaaattgctgaaactttctcaaaggtttaaattgtattacatgcaattagatggcaaatttaacttttatgtacgacccatttattgcaaaatttttaaatttaaattaaaaaaaaaattttctttccttaccgctgtgtaccaagcggcataaaatgagaaggccgagtgcccggaatagaaggacagcatggactcgtggatcaaatatttgttgtcgcccaaacactcaaaatccgttacataactgaaaaaggtgtattaaatttaaatatatttttttgaaaccaaaaaaatgtcattggtgtaactcgtgtgtccaaaaaattttgaaatgcgccaaaatttcattaaattttaagggaggtgactcacacaaacaaaacattttttaaaaatgattccatagaggtacggacacccttttggattgcaaattttttttagtcgggaaaacgttttttatggggttttcagggtcgcgctatcacgatcctggcaaacattttgaccaatattgaatcatgaacctcagaatcaaaagttttggcttttggttcgaattcgggttcgggacagcgacccggaaaatccactaaaacaaatttttatgacattgaaattattggaattttaaaagcataaaattttcttttaaaaacatttacccaaaatttttgctgacctgtgctcttcagccggacagttgcttctgtactccttcaacaccatttgtgtgctgccgtccggtgaacggattggcatttgtgtggccggcttacacacgtccatgaaatggggacgatgacgtccaatggtgtactgaaatgggagaagttcttagtttttttttaaattttaagtgttgacgcaaggggtgattttggaggcccgatggccccaaaaactcgaaaattacaacaaaaaaacgaacaaaatgaatttcaatggtagttacggaggccaaaaatttttagaagacgtaattacgctcaaaacttaggaatttaatgttacaattaattccattttttatttagtgaattataaattttcagttaaaatctacctttgcaatgtcgaccatcaattggttaaagcaaatgccaaggaaaaaatagcctaaaaattgaaattacaaaaaaaaaaatatatattccaataaaattaataaattttggcatttttttagaacagttagcctccgtaaatcttaatttcaaccaaattattcatgctattaagttaaaagatgccaaaattcatttaaaaaattaattttccgaccaataaacacataaaagcggacaatcagtcgatgaacattgtactttttgtagcggtacatgccaaactcgtcaggacattggcgctcccaaaccaacgaacgcaacagttcggtgcccataatctgaaaaaatatgaaaactaaaaattggattattttcgtccaaaaaagtcgaaagttttggaatgagtcaaaaaaacgaaaaattcaaaaaaaaaaaaaaagtaaaatggctttgtaccagcatggttggcaccataatgccaatcacgatcagcatttgccggctcactgtgcttggccggtacgggtaccgaatggactcgtcgtcgcagtaaaagccccgcttgtacggcttcacccattcatggaaaatcaacaagggcacagctgggggaaaaaatttttttggtgactaatgcctgtccaaatcatccagaggcccatctaatgtacaccccctcccccaaaaat

SEQ ID NO: 7013 - DNA, 1129 bp, Heterodera glycines
ccccccccccccccctctctccccttatgcatgtgaaaacttttaatcgtaatggccaaatttttaagagttattcaaaaatgaatccccacacattaatgctaggaaataaatcgctttttatagttgggttttaaaaatgaaagcgaatagaaaatgcacgcagaaacattgaatcaatcgccaaaaggacggggaaaaaagtgacgggccaattcacacggctgggtgattcatttgattgaacaaacattgacgaaaaattaaaatcgaaaacccgatcaaattaatttaccaaataaaaaagaaaatacccatctaagtttaaaattcggcagaattccgagccaacaatatcgaaagtcggaattccgcgctagaccacagtctgtaccaaaacgaagcaaaaattttttgacattcacctatagctctactgcggcagtttacgcatccaatcaatgaccatcttctgtttcttaggccattacttattttttcttgatcaatagggctgtactgacccgactcgtactacagaaaaaatcatcataacttttgtcaaagtcgaccaaataaaagattttggtctcattcgatctatttccatgcgaatttgaaaaaatttagtcatgtttgaaaaaagttgtagatgaaatcgtggttcgaacagtttttctatttttgatgactttaaattattcttaaattaatcgaagtacctaggctgtgttgatgaaacacaagctaacattagttatactgtcaaattccgacgtcagccgatgattaaacaacaaaatatttttgtttgtttgttacttttctttacttaattaagcgacgaaagcaattaatttcaaattgtttcattgataaaaacaagagaccgccgaaaaagtgttcatttatttaaagcaaggacacctcagattttaaattatctatgtatattaattcaattctaagattttaattgaaaaaaaaatttaagtatgcaattttaaaaaaatgtaaatacatgtaaataaagattttatggtacttttctgtttcagaggcccagatttgaattttaaaaattcatcaaagagcgcatagacatagaattgaaaaactatgcgtaaaa

SEQ ID NO: 7014 - DNA, 1792 bp, Heterodera glycines
ttactttttcttatgacagaaaaagcatcaaattgttaagcaatcgaaattaaaatatgtccacaacattgtcaactccgttcataccatccactgtgcaaacaaaaccttttgctggacaaaaaccgggcaccagcggtcttcgaaaacgagttagtgtgccatcttttcaaaaaagcctcgtaattcggtggcttttcgcttacaaaaggacacataaacttcaaattttcgaatttcgcactttaaaatggttggatcttttattgcatgagtgctagctttcagtttgttccgtatatttaaacagtttttagacgaaaaaatacgaaattccaaaattaaactttcgaccttttattcgaattcgggtccgggtttcggtattgatcggaatgggtgacatattcgtgatcagtgacccagaaaaccctctattcacactcgactttttcaggtgccggagttccagcagccgaattacacagaaaatttcgttcaatgtgtgctcgacggtgggcttggcgaagcaaaacgtggcgccgttttggtggttggcggtgatggacgctttttgtgtccacaagcggtcaatgtgatcatcaaaatcgcggctgctaatggggtcagattaaaaaaaacacatctgggggctttagggtttagtgacggtaagggcttaggacgattattcagtaaaaattttttagccgtggcattacaaaaaggggcgttttcagactctcagtttacgactaaaaaaccatgaatttttcaatgggtcataactttttcaagaagtctccgaattaaacattcttggtatcattctagagctgaaagatttctctattggcctacgaaaaatgaaaaaaaaattgtggccaaaaaatctcgtaaaagcgaatttttaaatttattttagtcataattttttttcgaaaacaaaaaaggctaatttcaaaggccttttattacaatacctgaaaaaatgaggaggatttgtctattcggcgtgccaacaaaatttggtcaattcgaaaaaaataataattccgtcttattgttaggtgtccaagctgatcattggccgtgacggaattttgagcacaccggcggtgtcccatttgatccgcaaaggggacaatggacgacaaatcaacggttggccattttttatgattttttaaatctaaaaattttttaggtggcataattctaacagccagccataacccgggcggcccaaaaaatgacttcggaatcaaatttaattgcgaaaatgggggaccagcgccggacaatgtgcgtgaaaataaaaaaaaacattataaacaggccccagaaaaggtccctcacatttttgaaggattttcaaaaaaaattttaaagtgcgccatattttgtcttatttaatttttttaggtcaccgaacgcatttatcagctgagtacaaacattgccgagtttcgcatttgccccaatttggacattgactttggccaaattggcacaacaattgccaccattgagggcattggacaatttgttgtccaggtttttttcctttttttttttgtaaaaaaaaataagtaatggttcaaatttgcaggtgattgacagtgtccaggactatgccgattatatggagaaaatttttgactttcctaaggtattggattcaaaatgggctatttaaaaagattttaactaaaaaaatttttttttttaaagaaatttctcaattgagacatgttttcgacagtctgtaaaaagaaaaggttggggggtt

SEQ ID NO: 7015 - DNA, 1523 bp, Heterodera glycines
  unsure (1)..(1523): unsure at all n locations
aaaaatataatcatatgcatatatcaaagtccactgaaaaatgtaaaactccacatgaaaanataaataaataattatcatttcgagactaccattgtcatcgcatatgtcaaattagccgactggcattaatccctactttgacttaattgaaaaatttaggattggaattttccaaaattaagtgacaaaaaattaaagacgcatcttcaaatattaaaatattatttgttagttctttcggtgctgtaagttttctacagtaaaattttgttttcaaaacttgttctaaatgataagtgttgttgacttttttcaaaattaaaataatatgatttttgaattctgccacaaatcctgcaggtttgcatcttggcattaaaacccccgcattttcctaaagcgattcgggaattgtatcttttttttttgcaaaaaacctaggattaatttttccaaaattaagttacatttcaaggcaggctcgaaagtcagctggtatacacttgtcatagatgtcggttcaaaatcggcctgccaaattgttttttccttaaagtcaaaagcttccccaactccttcatatactcaatggtactcaaatggctgccctccttattttgtctgcccaattgtctatcttcaatcgcccacccataaacactctcgcatttgccctcttccattctatttattgactgaaatttgttaaaacttggtcccggcgaagaacatagcgaaaaatggtgagacttaaatcttattaatgaaagacaatgaattctggatcaagggagtttcaattagaggcaagggagctgatgaacccgatgatggtgataaagccgaaatttggcgagacttagtcccgatgaagaaatgcccgaagaatcggtgaatttgaatcccatgtaatagccgcgagaaactgatctccctatccatattaaggcttcttaaaggatgcaagattaattacagaaaatctttatttaaaatgcattatttaaacgttatacaagaaattctgaattttcaatttgcgattgaatcatgtctaaaattcgcacatctgaatatgtctatgggaataatagaaagaaaatcaatttaaattaggacataaggaaataataaaaaaaattatagatatgaaaacaatgacaaaaatgtaataaaatgcgtagacaaagcaatgaaagtataaaaagggctgacagatattaaaatgaaaatgtgaaaaatggttgttttttgttttttatgttatgatatataatgaataaatgataacacaggtattttacaaaaaatggaaacaatcaaaagtcaagttttttttattatgattatgatttatttattttatttttttgtaaaataatatgaataatgtaatttttcgggatcaattttcatgtcacataaaatataaataattttttttttgttttttaacataatttttgtgttaatgtgtatacaaaggaggggtactcagtttttcggcatttttgaatctg

SEQ ID NO: 7016 - DNA, 1593 bp, Heterodera glycines
gcctggtcggggagaacacttggcaccacaaggaccatcctgatccacaatggccgggattctgcgcaatgttttttctccaacaagtcgatcgaccccttgggtaaatttttcggagttttaaaaattaagtgcttttcggttataccaccctttttcgtgcaagttacatttcttaaatcatctaaggatttatgaaaagttaaataataaaattgcttaaagcatttgttttcttggtatggttcagtagcccaaggggtccttaaaaatagctaaaatgttaaaccaaattcttgattttatgaacataacttttttgaaatcaatgtaattatatattatggataatacatattcagaatatttgacttttacttgtgtgctttaaaaattacaccgtcataaaattgcatatctttaaaaaaataaataaattttgctcatattcagacttaatccaattaacaattaatgtcattaacccttagattttctattaactgtaaaattgcaaattaatttaatttacaaaaagttatttcttaaaactccgaaatcgacaatttttaattataatacttttcaatttgctattaattaatgttttggcattctgatgatcaacaatataaaattgattgacttaaacaattttattattttattttctttttattgcctcttgacggacttgtgaaatgcctatggtggaaaaatttatgaaatggtacagtagccattttttgttttttaaccaaaaatttatcatttttttatgcaggcaaaaaaggggaaaaaagccttcatagtcaaaccaaagtctctaaaatgccttgatgaggcaaggggaggggttctaaataagcatacggtgggtggctccttgtgtttgacgtttacctaaaaaaagaaatgaatttttttttgtatatttttaaaatattatttcattaattattatttattctctttttgcgttcaatttttgcttttacatagaataatcaaaaccttacaggattaacattcggctgagtttttgtgtctgttgcaattgtcgttgtcgtcgtggtctgaaccgggagctgctggaacttaaatttgaaattcgttaatataaaattatttgttcacaaattttcatttagaatttcataattcagctttcacacaatttgtccgtggtacatttttatttaaaacttttccaaatttgcttagttgtatataaaaaacaataaaatgaatattttgaacaaaaaatgcccataactttactcaaaaacaactaaatataactttatatcttaatgcatatgtaatgtgtggctaaactttctctgaccttcaattttctctcttgggttcaattccccaaaggaacacttttttataatttctttacattattttaattgaaattaattaataaaaaatatttcaacttaaaattattattttttaattttttgcagtctaaaacccaaaaattaaccaaagattgggtcattttttgacaaattctgttaacaaagctcactcaaaattttaatttttttccggtggcgcctatcggcaccgccgaactcc

SEQ ID NO: 7017 - DNA, 4982 bp, Heterodera glycines
ttaattaataaaaaatatttcaacttaaaattattattctttaattttttgcagtctaaaacccaaaaattaaccaaagattgggtcattttttggcaaattctgttaacaaagctcactcaaaatttcaatttttcctgccgaacgcatatcggcaccgccggaccccaccccccccccccccccgaccattatcacaaagaaaaaaatttaaatcaaaaaaactttttggaaaaaccgccgcagaaaaatttataagcaaaaaatttaagattattaatttattaaaaaaaattcagaattttgtgactcacgagagcacttaaatttttaaattaaaaaaaattttctcttgcgaaaattcccggtaggtttcgagttaatccaaatttaaaaaaaaaaaattttttttggtcctgcaccaaaaatttccagagactcgagggtgtaaacaacgagcgagctcgagattttttcacaattttcttaaatttttaaaacttgaagaaaaaattttaaaaaatttaaataaaattttttgtttctatttagattaattacatattcaaacagacataattttgtcaaaaatcccataattgcccattttgtgcgatttgtttttaagaggcaaaatgccaaaatatctgtttttatgttgcttttaatcaaaaattgttcggagaaaagaagctattttgttctacagaattcttgttattacccatgtacacttatgcacatatgcatagtcgcaacaccgacaagtatatgttgcgccatttatgatgcagacatcccaatcacaattgttgcattccgggtttttggaataaaaacacgctggccttgacggaacttcctttcaaaatgattttttaaatttaatttattttattaagtttttacttttaatcgtttcttagtttaagattatgcaagcataggtctcttccatgaccggaaaatgcgtcagtgaaaattttaatgtcataataacaagtcattgcgttttagaggtaaaactgatcatggattcatttcagccaattccgaaccccggatccgagttcaaacaaaattatttttggttcaaatcggtaggaatcaaactgaaagcgatcatttaaacatgagagcatttacgctgtttttaaaccaacaatgctaaatttcaaaacgggttcggatctgaggttcggaattggttgaaatggataccggattgtttttatgacattaaattttcactgacgcattttccgggagccgtctcttcgcatagaaaaattcgcaaaaattgtataataatttcgtaaatttacttatttgtaacactgaaacaacctaatgaaactataccaaaccttcaaataaccaatcgacgcatttcgaaactgcataaattgagaaaagcaaatttattattttgaaaagagaaggacaccttttcgcatcccgcttccattttttcccggcagcagctatcggcaacccagcttcctcggggatcgtttaaaatgcgccagaaatgtgtcacggagttgcagctctcattaacaaatcgaactgattcacaaaaagcactgtccgcggcagaaaaacacaactaaaaggtacggtaagccatttcaataccgttctctgcccgcttttgtgccggtatcattttggcccaaattatataatgcttttcctataacaatattaggcttggaaatgctaggaaattaattgctcttaaattattttttatttttttgtatttttgcgttttcgaattaaaatattattttttttaaatgttcaaggacacgaattcgcttctcttgatcaaagtttaaaagcccaactatttgtatttgaaaatttgttctcggtagtacatattaaaatccatagttttctcataatattaattaaaaaattataatattttttctgttactgtgcctaaacggaacccacccatttgttaaatatcactattataccagtttgtttactgtatcgatgacttgcgattccttaaatgatttggtttaacaatttacaattcaatttattaaattattttaagtttttgttataaaatatattttatgataaaatacggttgttgtggttggtgatggttgcagttccgtcgccgctgtttgcctaaaagaagattaatttaaaactaattttcttattatgatcaaattactatcatttatataaacatgaatttttatttaattgaatcgaatttaaaaaaagaaattaaaataaatttcatatttcttttattatatttgaatttttgatgctttaaattaagtggactttaagaaattcgaaaacaaaagagaaattaaagtgggtgcccattttgttttttttttaattcttaagataatgaataaaaaggataatggaagaaaaaagacatttgctcaaatcttcatttgttaattttttcctatcaaattttatgtttttattactcttatttatttatccctcccactgtaattgccttaaccttacttgtcccacacaacatttaaagtcgtaattggccgaacagcaatcactggatttggtgcctttgttttccacacagttgccataattgccatctttgcaattgcaatcagaacgtagttcggcacagtctttctttaggaaactatcgatcagtttgggggcaaccgcctttactgtctccaccacaacagctttgccgatgtgttggaaatgatcggatttggtcgaagaattgtggcttttaattgggaccgggacctttagcttttggagcgggaatttggaaaactctttataatatcaattccaaacaaatcaaattacacaattcgaataaaagcgtcggaggagatgaagaacaaaaattttagaatcggagagcagtgagaacagaacatataattaattaagtaatgagaagaaaaataaaaatgcaaaaatgagaacataatgccaacaataatttaaaatcacaaacaaaaggtcaaatattccaacagatgtcccacaataccgcccaaaagcgctttacgcgtctccgcgagactgccgtgccatttttgtcttgttcaacttcaaccttcacgagaaaatgaatgtgattttcttgcgtgcctggacattccgacattgaggacaatccgacagaggtggtgatcggacagtggacaatccgacagtaaaatacacaagaagataaaggaaaatgccatcaccgaagggaaccgattgcaccataattcagaacggcattcttgtgcgagggaatggcaaaaaaagcgcttatgaactcaacaaatgtgcagccatcacttaaaaatgccaaaccaagctaatttgcaacggaatgattttttagaccgcatttgcactttttattttcctttttcttgatttggcacaatcgggcaggtcggctatggcattttcttatcttttttgtgtattttactgtcagactattcactgtccaatagtctaatccacttctgacggattgtccgctgtcgaattgtcaactgtccgattgtctgggagccatttctttcttttacctgaagagttacacccaattaattcagactaatttattattaataaataattaaagcaaatataaatttaataaaatttaattatttgaacattttttggaacaatttccgaaattgtttcccaaaaacaccgtacaaattctttattattgcaaaaagaaaatagaaataaaatcttagacaattatgtaattaacttaccggacacccgcacagaattgaaaatccatcggggcaacatttatcaccggcccaacccgcttttggaacgcaaacggctccacattggcaaaacatttccacggtctctcggcatgcggggacaatgccggaaggtaactgaaaccaataattatgaataattaaaaataataattatatttcacactaaacatatactgctccaaaaacgcaaaactagagaccgatgccaaagcttaaatgccgaggcagttcaagccaaagaaccacacaatccctaaccaatcaaaaccaagagaaaattataaattaccggaggcggttgatcagctgtctaaaatgcgagaaatagtatatttaattgattgtaaaacatcacatatacctgagcaaggccaacggcaaacaacaaaaaaacgacgaaagaaagcataaccaaaattgggaatttattggttatcctaaaataaaaattaaaagccaaacaaaatcgctgtatttccaaaagtgatttgaaggatggcctcctgatttgctgctagtcgtacaaatgatttaacaaaatggagggatttgctgaacagaataaaagcaccgacaaatcatcagccacacataacagcccattaaaaaaagaattatggaatttctcactaaacgatggttaaacgatgaatcacacgcaaccattaaccaaattaaaaataataatattcaattgaaaccaattcgatgatcaaaatgaagggcagcttcatttgctgctcgactataaatgatttgtgataattggtaaagaaaaatgaaattaatgttaattaataatattgtaataaatgtaaaaacgattagaaaattatggagtgccttaaaaaagttaatcacttaattattacgatcagtgccagaaaatcgcgatgagaatgagttttgatttgtcactgcttaagccactcgttgcttggcacttatcttttgatttaaactttgctcaacatcaactaaactattggttttaatttataatttctttgttaatattttgataaattgacattatattttttgattaagcaaatttattagtcaaaataaggaaaaacaaacagtaaattaaattatttcggaataacgcaaagaatcgtttgaaaagattatcatttctcaacaattaatgatttatcacaactattt

SEQ ID NO: 7018 - DNA, 910 bp, Heterodera glycines
  unsure (1)..(910): unsure at all n locations
tgcaggtctgctcaccaannttttttttcaatggggaagaagcatcgacgtttaatgggtgaatcagttttacaaattatgttcaaaggtaataagttgaatcttttgaataaaatattaaagatcagaaatcattttcggggtcagggtcagaaacaaaagtttcagaattaagaaacttgcaaaagcgcagacggaggagggaaaatagggggaaagagtatatagaaggaagagctacgatagacactcggaggtagaggagaggatgtcggggagaaaaggaatagcaaatcgcatcgaaaagagaatggcatttttagggggggggggggggaattgcaaagtgtgcgttcaatgctaacacaggaaatactaaggcaacagttgtctcgttaagaatgaccgagatcggacggagcaagcacctgtggacgagcaagagagtcgatgggttttgaatgggggggagagagggagagtgaggaattcctcgttggtttgggatatgaccatatgatggcttttcagtgtaactgaaggcggcgataggcaataaattggcttccgttatacgaatgaatgaatcaatcaataccaacaaaactgatggaccgacaaacaactgacctttcctccaactcaagctgtgccttcgtcgtgccctctccgctcgcctccgtctcgccgttttccatgttacatttcaaatcctcaagctttttgcgcatttcgtcaagactccttaaggatgaaaaatgtgtgtaattagcgaataaataagaaaataacgcactgaacgcgtttcaccgcctcgtcgtaagcgttgtccattttccccttctccaaactgttcagtttcattcgaatcaaacgcattcgctgcttcctcgcctcgagcgatgcaaag

SEQ ID NO: 7019 - DNA, 5942 bp, Heterodera glycines
cgatgtgaaatgaagtggactaagattctgatgcaatttgctttgattcgcattcatttgttctcaccggctcaaccgaagctgtttccgccgccggggattgcttttgttgcgactgattctttttgccgttttgcgtcgtcccctgcaaagtgtcgccccccgtgcgcagtccgcgccgttccgcttcccttctcagtctttcgagttgtctctgctttctgtccaagctcgaccgttcattaacgactgaaaatgggaaaaaacgaatgagaaaaaatggatacaaaaagtggaacacttaaaaaatttgaatgtttgaggtgaaaaacgggtgaaaagggaggaaaagtgcgagtggacagtcgactcccccacaaagtggcggaattgttggccattcgtcgaccaaaagaatggactgacaatggcggtggcaaaggcctcctcagtcacgccttgtgcattctctgccgaaagggaatttgtgggagcgcgtagcgaagtgacggggaagagacatcggacaagggaaaggctgaaacgccgccacatcgcttctgctggccaaagcatctgtccgatgaacatcccactttctcggcttcgtccaccaaccctttctttcgtcattatccatctcccaaacagaaggctgtctcgactcgatgagaatagttagacccacaaataatgagcgaataatggacgagtgcgtcaggcgctcaatgagaggagagactgactttaattgagcgaaatgggggagggttggagacggagaggaacggaacaaagggagagaaagggcgagaaaagaaaatggaaatacgcacttttatgtgggaattgtagggggtttttatggtttatcgcgcgagttgaaaggtgttaacgctttcttatgtgcaaaatatacaaaaattatgatgccaatgatacaaatgggaccgaggaaaaagtgggactctgagcaacacttttaattaagtgagtgagtgggcagggattagatttatctgaatgaagcgagaaagaggaaaaagaggatgttgtcgtagaaacgggggagagggaggtgcacgactaattgcgggggtatgataaggaatcaagcgaaactgtgagtgttggccattcacaagcatcgaaaagccaattggacaagggaagttaagcgagaggacgcgaacaacccaatccattcgtattgtcaaatgcaaattgaaagtgagaaaagggccaaaggacgggcaaattaattactgagaggactaatggagggatgaaaagaatgaatgaatgatgacagatgccaacggaagaaacgtggaaagaatcgataatgccaagaatggattaattgtaaaagaaaagagggaggggagacgaatcaacacaatgaaagcaaaccatgtgaatacattgagagagaattggttatttttaattcttctttaaacaacaaatggcccacctcgacgctttgtctggtcggtgagatccttggtgctcaactccagcgaagccttctccttcatgtggatttgatgcatcagttccattttctttttctgaacgtgtccctcggtgttttttctgtcaattagacaaaatgcttcttcacctgctcataatgcaattcaatgcaaattttgaactgttcgtccatcagcgaagtcttttccatttcagtgaccatattttccaatgaagtgaatccgttcacaagtccatccaattgcgtactgacattgttctcaagtttttcttaaaaggacttaattcggtggcttttcctccaatgcctactctgttcctcgtcctcctccaccacgctcacttcggcaatttgttgcttttgttgcgattgctgaatggaattgagttcggatgtgacggcgtcgattgcttcgtgatacgatttgatgatgtcgcgcatcaaagcgatgaattctttttcctgggccatcaaaccgtcgtacgactcaatcaatttgctgacaagtgcacgattcgaatactgtttaattgtattttttaagtagagtaatcagagagagtttcagcacctctccgctttcctccttggatttcagaatttgcaaatggttcaaaatctttttcttcccaactctgatcgtacccaaacggtcaatcacaaatcgctgcctcgtcacctcaaatattaatataatcagcaaatgaatgaacgccaaagcctcaccaagtcgcccttgttaatccggtcaatgagttccctcgccatgcccaacttgtcctgagttgtcatgtcacttaaagttgcgtgagcttttgggtccaagtccatcggcctctattggttgtgttttctgttctcgcattaaaaattatggcttttcattgaaaaaataagaaaagtataaaaacagcaaaaccaatagaacacttaattaaattcactttttacaccaacagaattttgaatgagatcgaaagaaacaagaaatcccagtataaaatcatcggatgagaccgttgttgttctgttggtaaattgcgcgcagagactcgcccaatttgtggactttcaattcggtgttccggaacaattccttgtaaatgttgatctgttctctcaacacagtctgtttcgtctttgcccctacaattaaattttttactgattttaatgcaactttttaagaaaatgactaaaatttaaggaacggtgatataccccttcccccaactttgctgttttctttttttttaaaccaataagtctctcccccacccgtcgtcaccttcgcatattttgacaaggtctgcttccaactccgccctcaaattcggcttgctcactttgtgtcggtgttccatccgatcgtacccattgatcagggccaagccgactttcgttggctcaaacctattggcattgttcaatacgacatactttctgaatttgatccgctcaatatgttctgcatgcgtcgcatcagtgccaatgccttttttgtccattagagcgatcaaatcagcttcggtcaaaaggggaggaggctaaaagcaagttgtgttgattcaattatatgttcgtccttaattcggttataaaacctgagtcgataaattagccatcctaatttggaaattcggcaacggttggccatttcgatacatgggaagttctttgtcagcccatttttcgaagggataaactttgagatagccccggtcgtcgattataaggcccgtggcggtgaaaatctcttcgttgacttccgcctaaacaaaaggacttcggtgacaaaatttcttggcacttaaaatgctacaaatggcatcgggaagatgactcaccttcactttcgtttctcttccacttgcatcgcgagaaactgacgccagaaaataccgacagaccaattcgtagactttccattcgtccatactcgcaatttcattccttaaaatgcctagtccgacaaaagcgacgtgtgccctttccccctttttgccacctgttggcatttttgacgggatgtattggcgggtgcgccttgtcgctttttcgtccattcctcggttttgcacctccacacatttgcacatcattcatcgcaaaatccccccattggtcattctctgttagtctgttgactattgaatccaaatcaaaatctgcggaatagcaatttgtttctgtcctacaaatgtcccatattccaaatcaattaattcaaagtaaaattcaccgcggatacgaaataagcccgtgctgataaagcttttctgcagattccatgatgcgttttacgttcattttgaggaacttgctgccgagtttttccagctgaacggtgtccatcggcgggggtctccatttggtcttcggatgggagtccacctctttaacgcgagccgaatggacaacagcagtgcacgcttcgtaaagagcctaagagaaaaaagaatatttggacataaaccatggattgccgaccagaatagcctctcgatcgaacaactgagtggacagcccctcccgctcccatagaaattcaatgtttgtgctcccgtccttgccgctcaatttccaaaattcttggcttacaaattctttgttctccctgtatctctctacaacaaatcccaaagttgggaattggcaacttccgtagctgatcacggacttcgggtcgttgtcccggagaaattggtagaaatttttcttcaagtacaaagtttggagccgagtgaaggcagctcctaaaacggtttcataattctacgggagcagagatcaactgaatggcccacctatccgaaggtccaattccattcggcagtcaaccgcatctacccaattttggtcaattgctgtaaggttctgaatcgcccgactgatcgcctgatcggtaatctccgaaaatctcgctctacggactgtgaggagactgttctcctttctgcacactttgaccacttcgttgccgatgaattcgccttccctgtcacaatccgtccaaatgagcaaagtgtgggcttttcggctctctctccttaaacacattctcattgttagaagtaaaaaggacaaaattaaacttcaaatttgtttcaatgtctcgcattccgctgtcaatgtcgagaacgacttgcccttcgaataagtcataaatgcgactttcgacccattgtttatagctttcatggaaattatagttcataagatgtccagtaacgcttgtgaacacaaaagtttgactgatcccttggaacgttgctaaatttcattaaaatattccaacaaaaagttataaaccttcaaatgtgtagtttttattgtatttggacactccgttttctgtccttgcttgccccttggacaaaatccttgcgatatttttggccacatcgtttttctccgcaacacaaagcaccctccgatttgtggcgttgatcatacccaaaaattgcgtattcgttgtcagtgcccctcgattggcttcaaatttttgagtttcctttcttaaactgcaacttctgaatgagatgaaagtaaagcgaaaattgcagaacaaaaacaatggtgtagaacaacggatgttcattaacaaaaaaaggaagagacaagcaaaacaaagccaaaaattaataaaatccaaactaaaagggattaaggaatgtaaaatgaccaaaaatattcatttaaaactttaagcgattgtaaaaaacaacaaaccaagaaaaaacacaaataaataaataaaaaaacaaacacaaaaaaagatatttaaaacaagagtccgtccaaatgatcagtgtgcccgccaccccccactaaatcgtcctgacttgcgctgtttatgtgctcctcttcctcccgtttaaagcctgggtcgacttcgtttggcttgctaaccacgcttagaattgcgcgcatcacttccattttttcaactcgttcaggtttaagaaggccgcaagctcgagcgaaaatcacagcaatgaaatgttgacactgtcgaatacaaaattaggtagtcattttttgtaaggaaaactcggcaatcctgaagaataggggtatctaatttgacttttttttatttgggttgaaaattggtagatgggtatttttcggggtgaaaaacatcatcaattttgaccaattcctaatccctaacccaaactagaacaaattaaaaatcgaaaatgaattttcaatgggccatctccgtaccaaaaaatttttcgaaaattttcggaaaaatttcaaaaacagaaaggggattttcaacattttgatgtttctcgtgaattataagacaatatattttatgtttaatgttgtagagaagaaaatggaaatacttctaacaaaaaaagaaccgtgcaaagcttcaaaacaatgaccattcatactttttcacaaatcgaagtacaaattt

SEQ ID NO: 7020 - DNA, 1063 bp, Heterodera glycines
  unsure (1)..(1063): unsure at all n locations
atcggaaatttgccatttgaggtgtgtgggggttcccgcccncaatttgcccaccttcgttcatcgttttcagctgcgccttctccgccctttgcctccgtatgcctttctgcccacttttggtcactttttcggcactttgccgatacaattctcgaaaaaggcgaaacaaaatttgcaagtaaagctttttgaatgcgtccaactcgtttttggtcttttgtggacctaaaatgaattaaaaatgattaaaatataaaacgatttcgttcgtactttctttggctttgctggtcgaacttaacaaagtgtttgtcttttttatttcttcctccattctcttctcaaaatgactcaaaatttggtcacattcggcacgggcctcggcactgacaatgaaagggtgccgaaacgaagtgctaaaagagacaaatgaaatgccaacaatcattttgtgcgaatttcgaattgcttaactcaaacctcggctcctttggcccatttaaaagaaagtcgtgcaaatttcggacggccgccaatttggcgttttggcttcgctgcatcatttccatttccatttcgcgtttccattcgacgtgcgctcccatcaaatcatgaagtcctaagcaatgaaatgaaagatatcggcaatggtaaagaattgtggtcctcattttttttattttgtgctcaaaaccaattttaatggttttcgaggtgctgattacgaatcttaactcggatttacccaattccgaaccccggacccgaattcgaacaaaaaggttgaaaaaatttttcaagtgtgaatttttctggagtaaaagcttctaatccgtttaacaacaatcattttgatgtaaaacaatgggtacttatgtggtttacagaccataaaaaaaaattttttttaacacatttctagggggttttcggggtcgctgatcacgaatctgacatccattgcgaccaatttcgaactccggacccgaaatctaacaattagtcgaacataaaaatttaaaaaaaatcattttaaggcgcgaaaaaaacaaaagttcaa

SEQ ID NO: 7021 - DNA, 1496 bp, Heterodera glycines
aataaaaaagtataattagggaccacaattctttaccattgccaagatatcaacttaaaaaaatttactaaccctcccattaaaaatccgaatattttctcaaaattctcaccttcctcgtcaatttttgaccaatttgtcgcctcatcagtgttggacaattgagaggaggaaaaagtgtgatttatgcagagaaaagatattggaaaatagcgaattttatgtgcggtcaaaggaaatgaatggacagagcgaagacaaaagtgcggcacgggggaaaatcgaataaaaaattgccgaagtgcaaaattcaaagccattaatttctaaataaaagaaagcaaagaactaatttgtcaatgtgtagaaagagtaattctctctttgtcagttaaaatttgatttttccgggcctaggtaaattgtaaaggacaatttgatactaacatataacaagtttgtgtgcatatttttggtcaaaaaatcaaaaattttgtcagaaaataaatgaataaattaaagatgaatttttgaaaaatgtttctaatttttcatcttacgggtgcatttttaaaaattttctggtcgattcttaggggtaggggtgtgtttttggtttttattgcatttttgttaacaaattttgggcaaaatgccaaaaagatcttttcatcctggatcagaattcagaatcatgcagaacaaggggggaccggtaaattggacaccggaaaattggacaccagaaaattggacaccaagcggaaaaatggacaccgccggaattttggacactaaaggaaaattggacactaagatttcctttttaaaaaaaatcaagaattaggtgaaaataaattggcaatcatcaagaattggtatcccgacgaaaaaaaatgttaaaattttggcaggtattttttctaggcttaaaaaatgcgctgatcacgaatctgagctcagattttgaaaatcattgatttttatctaagatttttcgtcaactacttgatttttttccaaaattttaagaaatttagtcgggcgtaaaaactcatgcacagatgttatagagactaaaaagagctttcgaatgagctattgaatgtataaagaagtcaagttttaaattttttacgattttttaaaattcaattattaatccctaggggtcagatgagacggagaccttgggttcgagtccgtttggctgcggtttatttttttatgacatttgatgaaaaatcatagataaaatgaaggttcatgcataatcaaagctcagattcgtgatcagaatattttttaacccaaaattcattgctaaaaaatttttaaaaataatttaaaaaattgaaaaaaacaagtagttgacgaaaaatcttagataaaaatcaatgattttcaaaatctgggttcagattcgtgatcagcgcattttttaagcctagaaaaaatacctgccaaaattttaacattttttttcgtcgggacac

SEQ ID NO: 7022 - DNA, 2500 bp, Heterodera glycines
ttcaatcttttatcatgttataacgcaagtcctaggcagctctttctaaccaaaatgctaaatttatttatttttttattgattctaaatgttcaaagtgattttgtacccttataaccaaaattattataattttcgaatttatgttttttcatgtgttagagacatgaaaatagtacgccaaaacgagagaaaaaagaaatacgttattataattatttataacttttgagtttgagcacagacaataataattgagcatagaataatgcagaatttttttctctatcgctatgcaaaatttagcaaagatttaacataacgaaaaaaagctacacatagaaaagtaaaagttgtttttcacatcattaaaccgaggagatagtacgccaaagtgagagaaattacaaagaaaaagagaaacgacgagatagtactaggcttttctctgcacagtggcgcgtacccatagtgtcctcggtaggggtcaactccgtctcagcaatgttcaaaaagctataacttttttctttgttggccaaacttcacaatcataatatcattcgaaagccctagatgtttagaagatatttataagctatttctcagtgattaatcagctctcaaaaaagttgtcagtttaaaaccgcaaaaaaggcagaattttcaaagttttttatttctatctttttttatagttcgaaattttctgtaatttttagtaggctaatagagccgaagagctttcgaatgatatcaagattgtttgattcggtcaaaaacttcaagagttatattgactcaaagttggctcagacggagttggccagacggagttggccagacggagttggcccgttccgtttattaggaagatcattttatcacaaaactttgtttctgatgcaaaatcaaatcaacataagacaacaacggttatttccgaatatgttcacactaatcaacatacataaatacaacacaatgttatgcaatttcaattttgttcgccttttcccccttttctgctgctgcatcatttcgacctttctccgtgcatccattctttggccttctcaatgcatctgatcacttcttcgtcggtggtttggcaaaatttgacgtaaaaggacccgacggcgttgaaagtgggcggcgtcgccacacaaatcacttcgattccttcggcacgaaactgatctggatgtaatgaaaagaatcattcatctttcaattttacttttattcccaccaattgtttcgggcggcccaacaggaacagccaaaataattctgctgacatttttatgacgcaaaacggcgagcgcagcacgagcagttgcacccgtggcaatgccatcgtccacgacaattgcgacgcgtccatccaacggaattggcgttcgatgctcaccaaaataagtctgaaaggcaatcaatcgttgtgccttcgtgctcaattaattctgctcgtcatttcgacctttttctgccgttcgatttctttcatttgtctctccgtctcctgctgtatgtattgttcagctgtcgtcgaagtgggcagaagaaccgcggccaccgtttcgttgtcctttaatttgcattattatcataaggacactttccattaccaaaattggccgtgccaatccctcggctatggcaccaatcgcagagtcatcgttgtccggggcaccaatttttcgaacctaaaattcataagaaaaatctaagattatgtacgctcttctgcagaccaacaacaaatccaacggcactcgcattgctttggcaatttcaaaagcaattggaactccgccacggggaagtgccagaatgacctgaaccgcacgtcatcaaactttacgacagaagcattgttcgtcatacgattttgtctctctgctgctgaaggtcaagttgggccaatgctttgtacaatttttgtccggcgtcctggcgatcaatgaaatgaacagacattggaaaagaaaacgggaaatactgaagaatgggtggggtttcttattccttttttattgtacatcagacggtaaaaggaaaaagcggctctattgcgctttatgagtcctatcgaattttttatgaatccgataaaaatatttgtgagcaaataaatttaaaattttgttaatttgttggctcttcccaaactgatgaattcctcatttttttgttaaaaatccgttcataaggccactctctgttctccatttctccaaaatgtttctgaatgggcccaattaagctctcttctcccagtgaatctcgtccaacccatgcgcttttcgcttaatgtctttcatatgttctgctgctctcgaggtggaagcacaaattaaaattttaattcttcatatttcttccgttcgttgtttctccaaaatgccctttctttttgtcgttttttgctgtttttctctgaatcacgtaatgtcgctacaaatttccgaacagttttaagtgaattccgaggaat

SEQ ID NO: 7023 - DNA, 4545 bp, Heterodera glycines
  unsure (1)..(4545): unsure at all n locations
ggcatggacacggtcatccaaaacttggacgtcgcgcaaggaacggacgtcacaacattgtcggtttgtttccgctcccattcagctctcgtccgctgtacggaggccgtcttttacaaaccgcacggcgagcagttgacagcaagacgcgacgacgccgagcgggcactgatgaccgaccaaacagcgttcaagttgccgaaaaagggagtccccctaattttagtccatcagaacacgcctgcccagcgcgacgaagtgtccacctcgtcagccaatcctggccagaccgacacagcgatgagagccctctggcgtttggcacagaccttccccggcatactcatccgctgcatttgcttctacgccgcccaagccttggaaatcgaacggttggtggcccagcaagaaattcccgacattttagtgaccatggcggacgcaacacaggggcacgaatcgtcacttgtcgtcgtcgtcacaacatgttccgtcttcgacagtgcagctgactcacagccgttctgggcggatgccgcgcagggtggacgtcgccatctcccgcgccagccatggaatgatcatcattggcgatttgctgctgctcaaccggacggatacgtggcggcgctacctggaccaagcgacaacggagacgacagtggtcggcccggagtacttcgacttcgagcagttcaacaaccccgacaactattacgacaaggacggacagctgatctcagccaacggtggtgcggtacggtcagagcatttctacagcaagtacggtaaaaatgtgtggtacaacaactccggtgagtcaaggggggcggagaacagatatcaaccttaccttcctcaaggtggcactcgggaacgcactcgtggccgggcctctacttctggtgcgcgcagatgaaagaaggccaagctgtacgccttcagccatggacggcagccgcgcatggacctccttctttcttcattccccttcctcacgttttgcaaatttctttttgttttgactctcttctctctcactctctctctctcttgtccatttctatttaaaattatcattcattttccttttattccgaactgttaatggcctttctttccccccaattcaaaattcttaaaatgcgtcggtttcctcacactttttctgacccattctttctcttctctcatcatgcttttacatctcgtccccaaaccggaatgacccctggttgcttttctccgatttcccttgccatccatccgagaggaaggtggaccgctgttcattactgtaatgcgcagcttggccgtggaagttcggattggagagacgaagggcgaagccgagagtttggacccattcattcattcacttcattttttcttttaaggatcggggacgatcctaagggaagggggaagttgtaaggattattcgacgcatttccctcatttaattattccttattggccattatcaattcaatcacatttatccatttttcacacgtttttccttttctcattgtaatgtctctccgcccattctcttcgcatttctacttccccagtgatcagttagtcagttagtgatggaacagacttcaattattattccgatttctcgcttcgtttaaatccaacatcgaatgaataaacacatctttaacagtcaatgagtcgtttgggggttcggggcttggtcaaaggcgccttggcttttccccattccctcccaaattccatccgggataaacggtgcatagttggtctgggggcacagtgcgcatccctcattgaattaacaaatttattggcactgaatcaaaagctttttcaaaatctataaatattatatcaactttttgctggtgacagcattggggaagaagaaaatgagcgcggatttttaccaaaacggcttaggcctccaccacggtttccgagaccacgcccgacgagaccacggccaacacagccaccacgcccagtgcctatgacgaatgcttatacaccggcaccgtcgccagtgccgcacccaactcaggcaaaccatggcgattacccagcgggtccaccatataatccgcattggaaaaatcaatgcaattaactttaattaattaattagtcgattcgataatctcaacaaatgttataagatttgcaataattaaatgtaattgaccagctagtggacaatgtcggattgtttggttcggttgttacaaatatgccgtcgatattatgtgcactgaatccacaaaagtacatgtatcaaccgatgaatccaggaagtcaatgtttattttaacgaatttcaaatttaatttgtaaattacaaacagtgggaggacaagcaccctatagtatgtttacaaatgattttcattaaatttatttaaatttctaaaaacccgtaaatttttttgtcaaaattaagatgacaaccaacaaaatcctgcgcagccaaacacatcccctcccgacagtaaattctttaaaatgtacaattaattattaattgttcggatgagcctatttgaattattatggcaatctgtccattcaaattccccgccatttttgttgttgtcactcgcccataaatagacggtcattccctccctcctggtctttttcccctcattttcattttattttgttattttcctccgaccaaattgtcttcgcttttttttattgttcgtcaataaacatttatttattgatcgtcttccttaaaccctcggaccgaacaattggcgcagtcacaaaaatttggactttgctcacatcttcgggtaagaacaattgagagcattgatctttttaggactaaaagcaaaagccgagacggcacaacaaattcaccgaaaagccgggattggctgtgaattttgattttaaagccgagttggcaaaattcttcaacaaagcagtcaaagaaactgctcagtcgtcaaaagcctggtcggcaaattcttcaatttaagcagtcaaagaaactgctcttcttctaaagccgggacggctcgacatttcttctagccgagtcggctctaaaattcttcgaaagccgagtcggctcgccaaattcgttaaaagccgggttggctaaatattaaattgacacctattggtgcaatacttcaacgtttattggtttcgggtcgaaacaataatcgtcaacaatgacgtaacctgccgcgactcaacaaccaaatttgcaacaattaatcgacgtaattgctcagcaacagacgcaaatcaaccagctgataaatgttcaaagaaacaatcagccaaatccagcaatcatccaaacaattccgtcaatgccggacgtcgcaattttcgaacaatgcgacgaaaagcatcgcatcaccgaatggcttgagcgattcacttttgccattgactcgtgcgcaccgaacgcggccgatgacataaaagtcaaggcactgattaacaaattgtctgaaaccgcgttcagcgagtacagcaaatttgttctcccggccaaggtgacggatttcgactttgatgaaacaatttcgaaattggagaagctgtttgccaaaccacaatcaatatttgtggaccgatttgcatgtctgatcgccaccaaagacgatggcgaagaatttcaccaatttgtcaacaggcacaaacgacttttgaaagattttcagtttgacaaattgaatgaagaacaattcaaagggctcatgctcctaactgcgctgaagtcttcaaaagacgcagttcttcggcaacgcattctcgccaaacttacaaaggatggcgacgccgtcaaatatgatgaactgattgaggagtgcatcaattttttgtctacaatccatgaggcaaaattgatcgaaacaacttcggtgtcatcaaggacagtgaatgcagtgaagccaaaccaaagaagggaaagaccaaagccacaatccaagcaaggccaaccaagcgcaactccaaatcagcttcaatgttggagatgtgggaaaacgaaccacacccacagagaatgctcgcacaaatcggctaagtgtcccaaatgtcgctacaacggccacttggagaatcaatgcgaaaaagtgcaagagtggcgccgcaaaaacttcaaagtgaagaaagttggaactcttagtattggaatagcactgaaatcaatcaacagcgcttctcttataaagataaaagtcatgctgaacggaaggatcgtgaagtccattctcgactccggagcagagattaatgtcatcgatgaggaaacttatcgacagatcggacagccaaaaatttggaaatgtgccgaaagaggcagaatgttcgacgggacagaaaaatcttttatcggaaagggagaaggacacttcgaattccaaggcgtanaagtaaagaanatttttatgtcgccgagaagggatcgatgaaatctgtgagtgtccaacaatggatgcatttggactggtggatggcatttaagcaaaatcaactctcccgataatctttgcagcgcaggga

SEQ ID NO: 7024 - DNA, 1726 bp, Heterodera glycines
taaagccaaaatcacttctccgataaatcttgcagcgcagggaaagaatcgagaggcaaaaatgccccgatcaatccaacaaaagttgacggcacgccaaataaggacgccgaaaaacaaatcagtcagctaaagcaggagtacaccaatgtcttaaaaaatgaattgggactctgcacaaaggtcaaagcgcatttagaattgaaacccgacgcacagccaatatacagaaaggctcgtccggtcccgtacaacgccaaaaatgcagttgacggagaattggatcgttgggagaaaatgggagtcatcggcaaagttgagcacacagaatgggcagcaccgattttggtcgtcaaaaaggtcgatggtagcgctcgattgtgcatcgactattcaaccggactcaacaatgcgctaaaagaccaccagcacccgttaccattaccggaagacatttttgccaccttaaatggaggccagtacttttcacaaattgatctccgggatgcgtatcttcaagtggagctggacgaagcatcgaaaaagctgtgtgccattgccacccatagaggaaattataaagtcaaaagacttccctttggcatcaaaacagctcctggcattttccagtcgataatggaccaaatgttggcagattttgacttcacgacagcctacctagacgacatcatcatcgtcagcaagggccaaaaagaacattctgaacatttgaaaagatgttctcgcgatttcaagaatggggatttcgcgtcaaacgggaaaaatgttcgtttttccaagatgaaattaaatatctcggacaaataatcgacaaaaacggacgcagacctgaccccagcaaaatcaccgccatcagtgagatgccagaaccgacggatgtctcttcacttcggtcatatttgggaatggtaaaccattaccaacaattcatcaaaaacatgcgcttcgtcagaaagcctcttgatgatttgctgaaaaaggacaccgaatggatttggagcgacaaatgcaaaaatgcatttgacaaaatcaaaggaattttgtcatcagaattgttgctcacgcactatgaccctctaaaagagatcatagtagctgcagatgcttctgatcagggaattgggcagtgatttcgcacaaattcccggacggcacgatgaaagccattgcacacgcgtcatccgccttaactcctgccgagaataactattcacaaattgaaaaggaagcactagcattaatttttgcagtgcagaaatttcacaaaatgatctatggacgtaaatttacgctcctaactgatcataagcctcttctcgccatattcggcaacaaaaaaggagtgcggcaatgcagtgccaatcgcctgctccgatggtcactcattctcttggcatacgcctttgccatcgaatatgtcaacaccaacgctttcggccaagctgatgcactttcacggctcattgccaaaggaaaggatgccgaagaccgcgtcattgcaaacacttgcatctattcggaactcgagtcatttcgttggaaccatcgagaagcttccaatcaaatttcaaaacatcgtcgagtcgtccaaaagtgacagaacatcaaaaaggtcatgaaattcatcagaaatggctggcctcaaaatgtgggaaacaaaatgtggaaatcagaattttccaccaaaggaagggaccactcagca

SEQ ID NO: 7025 - DNA, 1037 bp, Heterodera glycines
cccctcctttctcccttttttctccctcttccgtctgtctgtcctttttttttgtcaaagatactgtagtagtgccccaggcgaaagaatcgttttccgaatgctttgcttttttgctgctgttgctgatgaacggcgaaggaattcggcggtggaggaacgcaacgtaaagcattcgaaaaagggaagggatacggtagataattaattaattcattaacaaatggtaaataattaattaatgtgcaaatgacaattagtgcagccaaccacaattattcacaacaaatacactaattcatttctgtgatttggcccccgcccattaaaaacaaaaaatatttttctttttcttttatcgtaataattcgaattttattacttttttaaaatttttttcgattattattatttttcccattgattttattttcatttaatagttaattttgctgtttttcaactctatttcagctaaataattaatcaattgctcttgtggcgttcaatcagttcatcttttcccctttggttcacgccctgtaaaatcaattttgtttttttcgccccctcacacactttttggcatttagcaattgccaatgccaatgccattctctgctgaagcgccgcatttcgattttaatggagggagaagggcctacagctaaaggagggagagtgatcaattgcttaggcttctcctcgcgcgcccttttggcccattgcctcccccccccaaatgatgccaatgaatgcgcatatttgctgtctttatctctataaaacgatccgaccccccgcacatttggcatttcattcccaaattccctccctactttcaattacagcatttttctcttcttttgctttcactatttagaattcatttgtacttttattttaaattgtttcgcttttcactccctttgaactgtttcttcttcctgctgctgctgctgctgctattactgcatcttctaatggatgatgttgatcattgtgtgctttttgccctttcccacaacttttcccca

SEQ ID NO: 7026 - DNA, 6455 bp, Heterodera glycines
  unsure (1)..(6455): unsure at all n locations
agcttttcatctgtccatcaaaacagttaaaatctccgtttctccccgtttttcgttccgtcgtttcgctctttcgaccgttttgtgttttgttcattaaaaagggtccctccctccccccccttttcccctttcgtctgttaaaaacccaataaatcccaatttccctcaaaaagttttcaatttttttcaatttgtccagcccatccttcgctgtttcacttcagtgtttttgccctttattaagtgggttctgttccgccaacttttcgcgctgtttgcgctgctgcgtcggctggcggaacatttaaatcggatgctttcgccaaagttttcatttcaaatgaaccgaatcacaacgtgccaattcgcttcaccgaataaatttgtctcacttccttaatttcttgtgccttttggcggacattaattaattagccaaatggtctttggtctcttaacgctaaatccgttcgaaatggcgaattatggccagacaaaaacagcgctaaattatttgcaccttaattttactgagaacacttttcattcattttaagagaatttgtgaaaattattttaacaatggtcattatcattactaatgagctttaccatttttctattttccctatttttcccctcttttttccatttttctcattttaattttaattttctcaattaagaaataattattgtgcgtatttctcctgtccaatgtttactttcgaccaaaatgagctttttgcacaaatcggcgcccaacagcagcaattgttgctaaatctgagcaatcagttaattgtcggagggatggaaacgcaaattgaaaagatcggccgaatggggcaaatggacattttggaggaacagctgaaggaaaaggaacggagaaagtgcaacggtaggaacaggaattcaaatttgaaaaataaacaaaatgccaaacaaaaaaacaatcaaccaatttaatttaaatataatgccaaacaaaaataaataaaaacattttgcagaactgtggaccgaattcgtttccaaaatgctattctttcaaaacggtccggtcgagcagtgtccgcaccaacagcagcagaatgccgcgccgctgtcccaccgccccacggcattttccctccccgcaacttcgcctttctcaacaatttcatcggtgggctcactgccgtcggagccaacaacgcccacagaaagaatgagcacaggaaatgtgatgatgatgatgagcccgaaaagaatggacaaaggaaacggaggagagaaaggacaaagacagaaaggtgagaaaagcaaagggacacacaaagacaatcactaattaattagtcaatcttttaattagtcaactccattaattaatgtctttagccccgggcaaagagcggccaaaggacggcaaagagcgcgtgcacaagtgcgaccagtgccaaaaggcgttccgcttcaagtccaacctgttcgagcacaaatcgctgcatttgggcagcagcagtcggaaccctttcgtgtgccctttctgctccaaaacgtgccgtctgaagggcaatctgaagaagcatttgcaagtgcacgtcaccagcgcggaggacttggaatgcttgtggaaacgctctttctcacggtccgtccgtccgtttcgttacgcattatttgtgtctattttctaacgaccaatttgaatttcagcagttccggtcgtccgagtaaaaatgcaccgcccgctccgttgccaaagcccggcgacgacctcggcatggtgccggtgctcgtctctcagcaggcaccgtttttgccattttggctctgttagctttgctaacccttccctccctgttcaggatgcttcttcctcctctccatttggctcctcccccaccatcaaatggactttgccccaaaatcgaagtgccgcttcatcgcctggccaaagcggcgccgcagaaagtgtcccccggcaacagaagagaagctttgagttgtcacggcaaagtgaggcgaacgggcggaaaagcggacgacggacagagcgaaaggcatcggcgaatggccaaagtgtgctgcgatcactgctcggagacgacgacgcgatgggcaccacggcatgagaatattggcaaatccatcaaatccctcccccaatttgtgatacgaatttattccgtccctccgctcaattttctctgtcttcccttttttcatttcattttgcttttctctttttgttggattattctgaggaacaaataaatttaattgctttaaaaactgaatgaaatttggaatttacaataaattcggctcgaaatgttcaaaaggcaaagtaaaagcatcaaataaaagcgcaaaagcatcactgaactttnttcgggtctttttttgtcgcttttctctccaatagtgcccccccccccctttcatttcgttttgtctgtgccattatgtgatgggtttctttggcacggattcccccggggctagccgagaattgccttcttttgtccccttttcctcttcccaaattggctgttcttctcccacttggtttcccctgctccattatcattaattaatattaattaattaattaatggtccgtttaacaccaaatgagtgtcattgttatcgctttaaaacaaagacactaacccaaatgccaaaaggatgttgcgaagaatattttgcggaaaatcaaagaaacattcgcattttgacactttggcgaagcgaaaagagaacaaataaaaaagaataattaatgaagcaataaaaagtaattagtccaattcacaaacatttgtatgttttgttaagcatttgcaataattatgcactgattaatgaaagtaatgctcgagaatggaatgaaaaaggaaattcccgagttgggctcggaatccccgagcattttcaattaatgaacgcttaattgaattgtcggtctctgccgttatcagactgattattctcaacaatttgtcaacttatctttcgcttttctctctctctcttcataactttagctgtctctctcaccgtctctctctcaccgtctctctctctctctctctttcttttgtttgtttgtctgtctgtccattcatttactgtctcataccctctttttttttgtttttaattctgctgattgacctcgctttaattacgtcacttagctgcccaattagtgatgggtctccgccgtcaccgctttgctttgacgtcacttttcgcttgtgtttccccgtgcgccctcaatttctcgtaaaatgttacaaattccaattaggaaaataaaatgcgatggttattttgatttnaaatgtttttttttaattattatatgctaaaaaccaaaaatgaaagaagtgccaaaatgtgtattaaaattgccataaaaattcaattgttttttaatgagttaaccatttgactttaatttcgacagcctaacctctttctttcttatgggctggattttctggattgaatggtgctatgaagttagtcaaaaaaccatcaaatgaaaatattttctgatataactttacacaaaagtaaccaatttttaattttgatataattcgatagccctaagtattttttattatcctgcaaaatttcaaaaagtttcataaataattaaatctcatttctctcctcctgaatttgtcgaaaagttcgatttaatttaattattctttaattattcagtgaatcagtgggttttcagttcccattaacacttagggctatcaaatgataccatggatgcttaatttagatgcttgtaaaaaagttgggttgcattaaattgtcaaattatttgatggtctcgtttttttgaagggtcgtgtatactaaaatagagccaaatatatttattattaaaagattgttattcaattataaatgaattaattaatttaattatttaaattaattttctgtactgaaatgacccgcctctttcgatcacccatcatccatacttttgactcttcgactcaccacgagaaaaactttgtttagaagaaagcggacaatgttatttcataatgtacatttacgtagttaaacttttacgatttttgacaattaccatgattttatttatagtctgttcaaaacctgagaaatatccaattaattatttttaattgaattcatttcgaaattattactaaatttggtcacttaaattatatttcccgatcattcagtaaatttcgtaagtgtttttcccatttctaatttttgtgcctctggcggtgcctaccgatcaaaacccatcactctgtgccctctcatttgctcatctctccctctccccttcccctctctctcgcccccttactattctctctctccatcccctttctctctctctctctctgccgctgattgcccctaattaatctctgatctcgtcccatctttgcaatttcttctctaaactggttgtgctgtgctgttcagcattttaatgcatttgaagaatcgaataactacacaaaaaatgctgaggttgggttgttgttgagtagttgattttcagttacttataaatttgggagaacggacggagggatcgattcgatcattcattggccaagggaaagacaattcgaaagaaaagaccttttcgaaaaaggcagtgccaccaaaacgaaccaaaatcggccacagaatgctaaaaacgtgaacagcagattgaatggattcggcaaaagtttaaatgacccaaaaatggcaataccaaaaaaaaaatgaaaggaagggccacattaaacgagttccctttttctttaccttttcccattctctgctcatccgtcgtccttttccatttcccctcaaaaaatgttcgattctttcgtcctcatttgtcagtccgccggagtttaaaggtgggaaaattacagttaaaatgcgtttgttttcagcagatggccctctttctcttctctctgtcctttctttggttcaattcgtttttctccatttttttttcgtttagtattaattaattaattttcttaataattaattaattttcttaataattaattaattgaactctcatcttggcacttatcatttatcaaattatgatttagacggtaataaatgttccgtatattccaaatttccactcgcatttttctgcgtttttttcgccaatgcccaaaatccgtcgtttgccagcgattttttcccttcttcgccgggtttgctgctgcccccagtgccgggggatgaacagaaagcaaagaatactccgacggaagaagaactgatcggaaaattgctaaagtcgggcgcgggattgcccccggggccaccggcggatttgccgagcgacggggaggaaaaagcagcgaagacgacggacggagcagcggagggacagccccaacaaccgcagcaacaacaacagggccaacagcaacagcagcagacggacacggaacagcccattcagccgatgcctccggtgagtgccatcgccgacgattccttccgccattcatcgcttttactttcccgccccccccccaggcagtcgttgccgaatcgccctcaatgcctcagggcaccgatggcggcgcgcccgcggcaccgccaaattacgtgcaatgtttacttaaaatcgcgccaaaagtgtgcgacccgggaaacattctgaacgcacaacaaaagcaagagattgaccaaacacttgcagaattgaaaatggccacgagaaaggcaaaagggggaaaatgaagcgaaatgagcgaaatgaaacaattagcaattaattaggaggacgcgaaagacgaatgtgccaagagtgggctggaggcgatgttcatcatcatcaaacactcgaaccttctcgacgaacagacgagcgtaagaaaagaaaagcggcgaatttcaaaacaaaatgccaacacttaatgaaggaagtccaaagaacgctgaaccaggcgatggacttttgggttcgggaccatccatgtgaaaagcccgtggtcattatgttgagcacggacccgtcaatttacaaacgaaaggtgtggacgggacggcattgggacgtgccggtcgacccggggcaactcgtcaaacttttcatggatcaggtgatcattgggagagagtcattcagcagaatgtcccggcaaagcaaaataacagttttttgtaatttggttttgataacactaatttgcgttctgctgaattgaattggcaaaacgaatcgaacttttggccttggggacggacgaactgtgcccgtggaaagggctgacccatccttaccatttcacacattatgccaactttatgactttggtgtgaatctgctgatgccattttcgacgcgggaacgacaaaaaaaccagaagagaagccattttcaggttgagtccattcggcaacaaaaa

SEQ ID NO: 7027 - DNA, 5483 bp, Heterodera glycines
tccaccatcagcagacaaacgtcgcagcagcaacagcagtcgacgacgccgacgcagaagacgaacagcaacaacgatgaacaagcggaagaacaacggcacaattctcagccggcaccgatcacagcgatccgaaaaacccttgaagcaaagatggaggagctgagaaagatacgagagcaggtggagcaattagtctaatttaacttcgaaccaattaaaattcttaaggaaatggtggcgcaccaaacggagaaaattgagtggcaaagagagagagaacaaatgggcggaagggcgcataaaatggtcaattaattaagggttgattatggcaaatgacaactgaaaaaaatttgtgcagaatggcgccgcttcgcatggccaaggcgtggattataagcaaatcgcggacaacgctttgcgagcggcggaagagctgcagaaacagtaccgcgagtatcaaaggcattacacggcggaggtgcagcggctgagcggacagctggtcaaattggagcaggaactggcgacacgacagcaaaaaattacggtagtggcaccgacggaaacggtagctgaacataaacaggacggccacaatgacgacaatgacgcggtcaatgtcagtgccgttataaaaatgccgacgcaacaccaggcacagcacgtgacacgaccacagaggggatatgaagtgaaacaatgccgaaagcgaccaatttaagcaattcccccttaagagtccatcaatgagttcactgacggaaaacaatttcactgacaacacaacgtgggacaaccgacttttggactgcggctcgatgatgacgcggtccatttcgcctcttaagggccaatcggcaatgttcaggggcgggtcaactggtgaggaacaatcaaattatgttgcccttgatattcaaattctcaaagtaccaatgcttcaatgccgtgccgtggacattcacacgtcctcaccgctggcggggctgggacagcgcgcaattgccgtaatggacgacggggactttggcagtgtggacgacgtgcagcagaaataccgcaggacgggaagtgccggtaaacagtgagcaggcatttcattggaattacttataactttttccaggcacaaacattctctaccgtatccgtcgagaagagcttgcccaaggcaaacatccgacagttccaaacggagaaaatggaatggcaaagggagagagaacaaatgggcggaaaggcgcacaaaatggtcaataattgagtgaggcatttgcatagtgccaatggttttgtgccttttttgccattaaaaatgatctcattattgctaatcatattttttgttttaaatttaataaattgttcttcatttattcgtcgtatttaataatacattttctgtcttggaagaaccggctgaaaatgttgttatcggttattacttgttccgctctaatctagattaaccaaaaaacaaattttattctttatgccataactgaacgcacaataaaaacaaacattgaaaaagggcaatggtaaagaattgtgtattttgggctcgaaaccaattaccaagtccgagtctagattcgtaatcaacaccctcgaaaacctccggaaacttcttcctagctaaattttacgatatcacaaaaaaaaatcaatacgggtcgacgatttgggggattaacttaaaaatttgcgaggatgattcatcagtttaagccaataaaaggacagcaaagagcaacgcatacaccagcatttccacgggactgttcataatggagggcaaatttaattgataaaacaaaggagaagcacaattggaggcactttgcttcttttttttttgagcgttgaggaacacactcacaaaggaaggtccccgggtgtccgtgggatttccgatgaaatttagtgggtggatagatcacccatggatccttaagaaaagtgtttttattttttgctgaatgaatacgagtgccgagtatgccgtgccaaagttttaactagagtagaacgggaccgggaattttgggcaaacccgggaccgggaccttttcgggttgaaaaaccgggaatttttggctgggaaaaccgggaaaaaacccgggactggtcccggtcccggtcaaaaccgggacctcggtactcagttgtccgtgttttggtcccggtcccgctctactctagttttaacctttttataattaaagaaagtaacaattgtttctgtactttacaagtgtgtaatggtgccacccaccaaaaagggcaatggtaaagaattgtgtattttgggctcgaaaccaattaccaagtccgagtctagattcgtaatcaacaccctcgaaaacctccggaaacttcttagctaaattttacgatatcacaaaaaaaaatcaaatacgggtcgacgatttgggggattaacttaaaaatttgcgaggatgattcatcattttacgcgttgtaattggacgatggaattgcgttttgggtggtgggcggtgcaacagacgcaccaatccgaaggaaatcccaccggactctcacaaattcatacagtccatcaatagttttgttcaattgtccgtccatttgtggaaagactgtcttggatgaatttcactttgacaggcgatggttggaaaacactgcagaaatattaacaacaacaaccaatgctttttatttgtcaatttgatttttaatagttttttgtttttcttacccaatgttcaaaatttataataaaaagaaaacaacattcagattaatagcaaatttctattgtttgtaaagtgcaattcttctcccttccttttcctaatgatgggaccaactcaaaagaaggcgaggctcaacttcaccatcgaccaactcatcgtccgtccgttgcgcgactcgcaacgcgtcaacgtcgttcctccgccgaccgtaacaaacgcagcacagcaaacgcagcagccgccgttggctgcacttcagcagcagacattgcagcaactgacaaatggtacaaattgaggagggaaattggcaaaagatgactcccgcttcaaaaagaaaaaactgtttttattttcaaaatccgaatttgcgtcttcctttttcagtgcgttggccctctcttccgtcgtccgcctttcgacccctttttccccctcctctctccgcgccgttcgctttttctcccttcgctcttccgtctctttttttctcttctccgcccttctctcttccgattccgtcttctttgcccaacaatttgtcttcatcgtttcatccgtcaccttttttgatgctcactccgccaactcgcgccgctttgatggccatcgccctccgaagacaacagcagcagcattttggaagtgcgggcagttcaacagggcctagcagcacatgctcatcctcacagtcagcggacacgacggaggtgggaaacgaaaaacaaacaataaactttatcatgtttgctatttggatttcggattaacaaaacttttttctgtatgtcgcacatttcctcttcagtgtgttgccattcgtaccgaaaatcgcccatgcgttgtttctccggcgttgcgacacaaaaatttgacgcttcatgagacaccgaaacgatcgaacagaaaaagaggactgactaatcgcacgcgatttatcgcagcgggcgacgactcgacgaaagccgaatgcgaaatttgtcacaaaaaatttggacgcccgtggctgctgaacggacatatgcgaacacacagtgatttataataatcattccaagccacaaattaacacttgaaaagtattttaggcggggacaaaccgtacagctgcgaaaaatgtgacaaaacatttgcggaccgcagcaattgtcgtgcccatgaacgaacacacggaggtatttggaatttggggctaccaatttgaaaattatttataaatttcagcggaaaaacccttcgaatgccctcgctgcaagaaagcattcaaagtgaagtcttatctaacgaaacacaagaaatcatgcgggaaaagtgaatcgaaatttgatgattgatgttttggtgtacttcgtctgtttgacctttttacggactttattctcatcttctcacaatttgttctttttttcttcatttgtattatgtgaatctcttttatgcaattacggtttttgttttgtgtttgaatacaattctgacatgggttcgtccatagtcgcccccgcaaatcaccccgattcgtagagacataaaaattcattaagctgaataaacaatcagataatagtatttaatcaattttatacaactaatacacacagaaaatacataagatcactgaaacgccttgtaagaaataagggtgagatccgcgggcggtgaattcgttttcgtcgaccgcttcccttcgctgttaacattataaacaaaagtccgttgtcggcgccgacggtaaatcagaagcacaaccgaattgatcagtagaagaaggagcaagctgaataattaagtgtaatagaggaggcaaagttgtgagaagaaggcacttacaacactccacccgctattagcacaaatcccaaagtgtttcctttggcgttgctattcgcatccaaaacattcgttttattcgacatggacgctggcgggcgttggttatggaacaaataaaattcctaaaatttcctgccgcattaagtgattttgtgttttatttgttttgtccaaaaatgaaaaattacaatttttgaaaattatttttaaaggttttggtttttacctaaaatgccggttccccccacctaaaatttatcgcaatcttaaacatctgatttttgtgctcacattttcataaaatgcttattacataataactttaataatacacaccgtttcaattttggcctcccagttccaaaaaaatttgcatgtgtggctcagtgatttttgtaagatagtaaaggaacaaaggggggaagttcgagtccgttgtgcaacatgaatatttttatttatttttgtgcaaaaaattaaaaaatgacgatttttgggaattatttttggaggtttttaccaaccaaattggtccatcttggtatcattcgaaagctcttgatgaggagaagctttttctaagcaaatgctaagcaatttgacatctcagaaaagagtagtgagagtttcaaatcttcataatggtttcatgcaaaaacgggatgtttaactcaaaaaagtatttgatacgttctatgcagaatttttttctctatcggtatgcaaaatttgatgcggatttaacatcagggaaaaaaattaaacatcacgaagtaaattcggtttttctctattaacagagataaagaaatagtacgccaaaaagagagatgtttttttctctgcactctctatttattggttcatctctcgttttttgaaacggtgtgaataagaatt

SEQ ID NO: 7028 - DNA, 1800 bp, Heterodera glycines
gggaaacgaaaaatcaatcaattatactttatcatgtttggtattttgattttggaattacaaaaacttttttctgtatgtgccacatttcctttttcagggtgttgccattggtaccggaaaatcgcccatgcgttgtttttcgggcgttgcgacacaaaaatttgacgcttcatgagacaccgaaacgatcgaacagaaaaagaggactgactaatggcacgcgatttatcgcagcgggcgacgactcgacgaaagccgaatgcgaaatttgtcacaaaaaatttggacgcccgtggctgctgaatggacatatgcgaacacacagtgatttataataatcattccaagccacaaattaacacttgaaaagtattttaggcggggacaaaccgtacagctgcgaaaaatgtgacaaaacatttgcggaccgcagcaattgtcgtgcccatgaacgaacacatggaggtatttggaattggggttatcaatttgaaaattaaaatttcagcggaaaaacccttcggatgccctcgctgcaagaaagcattcaaagtgaagtcttatctaacgaaacacaagaaatcatgcgggaaaagtgaatcgaaatttgatgattgatgttttggtgtacttcgtctgtttgacctttttacggactttattctcatcttctcacaatttgttctttttttcttcatttgtattatgtgaatctcttttatgcaattacggtttttgttttgtgtttgaatacaattctgacatgggttcgtccatagtcgcccccgcaaatcaccccgattcgtagagacataaaaattcattaagctgaataaacaatcagataatagtatttaatcaattttatacaactaatacacacagaaaatacataagatcactgaaacgccttgtaagaaataagggtgagatccgcgggcggtgaattcgttttcgtcgaccgcttcccttcgctgttaacattataaacaaaagtccgttgtcggcgccgacggtaaatcagaagcacaaccgaatggatcagtagaagaaggagcaagctgaataattaagtgtaatagaggaggcaaagttgtgagaagaaggcacttacaacactccacccgctattagcacaaatcccaaagtgtttcctttggcgttgctattcgcatccaaaacattcgttttattcgacatggacgctggcgggcgttgtttatggaacaaataaaattcctaaaatttcctgccgcattaagtgattttgtgttttatttgttttgtccaaaaatgaaaaatgacaatttttgaaaattatttttaaaggttttggtttttacctaaaaggccggttccccgcacctaaaatttatcgcaatcttacgtaggataaataatgatttatcctttatttatttatttatttattattttcatagcgattgttttcgcgttatatttgcatttaaatattttatttgttgtccttttatctttttcatatttgtcttctcattcgaaaattgtattcgaattatatatcaatgtttttatgttttcattttatattgaaatattgaattcgttatttatgttttatgaaattctcctttaatttcctgataaattccccaactttgattacccttgactttaaagctgccgttacaaaaacgagcagctaatatttgactaaaactaaagtggtgctgaattggaattatcccctcaaatccaatccccaactctgatttccaattccctcaccacaatatattccttctttctccaacg

SEQ ID NO: 7029 - DNA, 5941 bp, Heterodera glycines
cttcagcaaatagaggattaatcgaagcagaacttatgttaaattttatgggtgcaaattaagacgaaattgtaattagtgcaagaaggaaaagaaaaaaagtgcaattaaataggtgagattgttgagacccatctttttgactttttgttagtacgaatccccattagtgatgctcgatagtctcggtccgactctcgggggtcaagtctcggtctcgggaaattttcggtctcgagcataactaatctccatgcgacttcgttttattgagaacaaagcgagaaaagttcttttgtcaaagtcctttgtgatctatataaaggatataaaacccaaaagatttcttccttggttttttctttgcaaaaaagttttactgtacctaacctcaagtctaaccgctgaaaaacctatgggtttttgagtctcagtctcagatttgacaacaaacgtcaaatgttcagtcatgtcgcggggtcgtattttattcttatagtcagtcaaggtctcattgtcagagttataacaagcctgcagggtgtagctagacccttgacttcgggttggagattaaacacctacccctcccgagcgagactttttttggcttctcgacctcactttcttttcgtcgcgcttttttcaaaattttttatatagtaggtccgaaaatcgaatctcagtctcacatcacatagataagttaatatgtacatgacatcggtcacaacaaggtaaaagttcaatttttaaagggattttggtcagtctttggtcctaatctgtcagcccactgttggtaggcttatcggtctcgagcctcgtcaattcctcatcaatacatacgggaaaattgcgtcctgactaacaataaatttaatataatgcgggcgtaatctgttggctttatttaataaggtttcaacaactaacaaattttcatctcaccttactataaacaaagaattgagaatattcacacgactcaaacaaaatgaagaaaataaagcattttcttttaagttgaatgagtcaagagtctcgaacaagttaagttattcagtctttttaatttgcatatattggactaacttggcgagtttacgaccgtccctttcccctccccccccccccccacaccccaccccgatggatacatataactggatttcaattaggaaatgagtaaaggggtaattacggggatctgtagaacataaaaggtaacttgcccggtgggactcgaactcacgcccccagcaatccgtgccgtgctctaaccaactgaactgagctacgggcgatacttttagcggttctcccatgtcctttatcccaccccactttctcccacactccgttctttctggcatcacagatccaaaattccgtaatttccttaacaagtaattaaaattttttatcaatagattttttcccataaaaccttttttccctactttataatacgacatgatgaaggtgaggaaatttgcaggtgttcctaacaataaaaagaacaataaaaatcttttttatcccttctcccaagggactgaatctgccgagcaaattgtgtccttacaaaaggcaccatttttaaattagcgcgaaatttgctctcacattgcaacactctctagtgtatgacgtcatcaccaaaaagtcagtcgcttaagaaaattaatattttttgttggaaaccattaaaaattaattgggtgggtacaaagaaatttctacaaacaaatgcttaccactgaaaatttaacaaacgatttggcacttgggttgattctacccattcattctcttaaccaattactaaaacaaaagtcttaaaaaaatttcccaaggaaattgtgttgaaaaatgtattttattttgtttataattttttttttaatttttaatcagaaattttgttcagccgatgaacacatcattgcaaacaaattctgaatctgttgaatcgactgatggcgatgagtcgagcagtgaattgagagacccggtttgtcgattttttttccaactaattataagaaacaagatttaccagggccaacaatttatatatatgacttttttaaaattaaaaattatacgactaaaagtttttttaaaaattctctgattctcatttttaacattttacttacagtttttgtcgtgcatttttttacattaaaaaaattccatatctgttaaaataggaaacatttcacttttagcattctgcgctcggcgtggaagaaattgtgaatgaggaagaagcgcgcaggcgtcgcgagcagctgaatcgacgcccgtcctacaggtgtggcaccagggaagatccaagccagccttggggaacgaagctggcctgttttccatctgagtcatagttttgggccataattttccaaaataggccaaatttttcaaacgtaatttgcaaatttggtagatttttaaatttgacccgaaaaattgcccattggagataatctaaataaattttaaaaaaagaaattaagagacagaacatggcgctagggtaaaattgaagcgcatctttttaaaagtttgtttgtacctttaggatgattctcaaagatttggagacagtgggagacaaaccgatgaaaaaggaaatgcacgacgatggcaacaacaacacggccaacacattcaaccatgatcggaatgaccgaaacacgggcactacattacatcaattgggtgaggagactgaaaaaaagaaaaaatcgaaatttaaaccagccaaaaatgtcaaagttgacgaattcttcatatttatgttttacaaaaaacgaaattgccactttaaaaaatgaaatcacaaccttcgacgagttaatttttgtttaaaatttattgggtaatttaaatggtaaaattctttttatggttttctgggtcgtatgcaatatttctaatagaaaaaattcttccaaaatttaaaaataagtttcttatatgtttttccattctgccaaggttcgccgggtgaaaatcaagcatttgcaagcagttccaacaacagcagcaacaacaacaatgttggtgttggtgggctaaagccggcaaatttgccctcagggctccgtgttggagttgtaggaacagctgcagcttccaatcagccgcttactcagcacatttcgccgccgacacaacaaaatttggcggcacttggtatcacttactattttcaaaacataaaacatgcatttttttgttattgcctatttagggcccaaaaattaaaatgaacaggttttgacgatgaaccggggcattcctggaccaaaagtcctcgtttggtcgggattcccggtcttgctgttttccctccatatacccgggagttccagaaaagtgccgacggggccctggtcccatccatgcgttatattgccgagtctgggttcaacttgacccggtcatcgggcacttttatagtaggctaaaagttggcagcagttcgggggggggggagtatgtacccccactttttcttccttggataaaaggacctgacgttagttaaatgcaatttaccaatttgggattcgaaaaaattcagaattgaatagagagcaatacttttctctatctctctcttttctaaaaaaatgtacgcttcaggacagttaaatttgattggcaatccggccgcatcgattgcccaccaacagcaacaaaatcgcctgatggcaactgttgctgaaatgccgtcacagccgcaaccccaacaattgtctgccgcaacaaattcggcaccgccgccccaaccgttgctagccgccgtgaacaacctggaaatgttgggactcaaagcgccggatgcacttggcactgccgcatttggacccaatggtaaagctgaccttatcagacaaaaaacatggaaaggaaggcctgatttaaaaaacaaacaaacaaaaatttagaattttcaaacctgccagtgtgtgagggatttaactattcgttgcataaagaatccactttttttagttttagttttttcttctttttattgaaattaaagttttgtgaatgtaatatgacattcagttaaaattgtcgaaccaaatgaaaagtttcctaactcgttgacaaaatatgacttattgttaatccaaaacaaacactaaattagtttttatagcctcagtatgtctctaaaggtataaatattctcagtttagaaaaagcacccaaaactttattatgtgacatggtacggatttttgaaaactgtggcaaaggaagtctttggacaacggggttttcttaaattttttgataactttttccagtgctgtttttaaatttagtttcttaaatttgtacaaaatccaaaaaaaaatcatttttttaatgttttagattggcaaaacaatttgctatcttcgtatggccgaacccagcagcagcaatcgccccaggtatcgctgatgcagcagcagcaacagcagcagaacaatgctgccggcgctgttgttggcacgatggcaaacagtccgctcggcatgaacaacattggcgtcgttgccggacacgcagcagcactacagcagcaccaccagcagcaacatgtaacaccgccaccgcatgggcttggtaaattactagaactatccagaaaacagattcgggaggggcacccgaaaaccttttttgtttattcgacacagtgggaaatataggaaatttttttaccggttttcgcaaatttggccatttgggatcaaatttttcaaaaccatgggatcaggtatgcgatagtgaattcaagactgaacatttcccgatacttgcttactccggcactcgacacgaaatcgagattatcggataatttttttccattaatttttccggagaggggggggggggggaggaggtctggtcccgcgttcaatgacattgtttttgttacttaatgcaattttgaatttatctaaattaattctcattatgcattttgctgtgcctttcttttaaggttcgcgccaagggtccgcatcactcacttcattgtacgttaagtgccgacaaaatcgctgtaattgactgtttcagctccccaaacgttaggtcagagggcggcgatgacaacacccggaaaagacaagtgcgactgctcaaaaacaggtggcataatttaatttgatttaattttctacaattttttgttttttttttcttataattttcttacaaaaaaattattcaataattaaattccagggaagcagcaaaggaatgtcgtcgtaaaaagaaggagtatgtcaaatgcctggaaaatcgcgtaagaaaatgccgttgtgcatcaaatgcctgtttttggatccactatttcaagccgtaatttaaggttgccgtactggaaaatcagaacaaagcgctcattgaagaattaaaaacattaaaaggtagacaaatcctgggacatacattaaaatgaaaaaaaaattgcaattaacaaatttagaattgtattgtcggaaggaaaagggcgatttgcaatgacatctgtgttaatcaattcttattaattgacactgctagataattggcatgaatgaagaattattagtcaaattttgattataaaaaaaacaaacaattttttgcccctcctcaataagaaaaagaaaaaatttacaaaaaattctcaaccctttctttttgtttctctttgatcattttgcacacggttatcattttatcggttttcacattttgtgcatcacacacacacaaaacagatcataatcttttattatccttaattttccaattctaatcattacaattttgtttgtttattttcataaaggtgacagaaataatttaatttttagtagttccatccttaagggcgtggcagtcttagaagagcaatatacacattctg

SEQ ID NO: 7030 - DNA, 1101 bp, Heterodera glycines
atcattgtattgggagcacggcctcgggagtgatcagctttaatgcgaggaccgggccggccgggtgtatggtgccgaggcggacggcggcactttgcacggcaacggcaccaccaacagatgaagaaaagtgccaaaaggaagaaaagtgccaaaaaaaaataaaggaaagaaatccccaattagtggacggttcggattggtgccaatttggaagaaaaatattgagtgagaacaattcaagggagaaaatactgcccatttctaaacaaagaaaaaggaaatgaaaaattaaacaaaaaattgaagaaatgaaaagaaatgtgaggatgggcacccagcatgggtttaaatattagaatgagtgtctgtcattggcttatgtgaaagccgacttcggatgatcacaatgtcatccgccctcccacaccacaaaatttgtgtgggaaattgtttgaagtttaaaaatttaagattcgatcagtttattgtttggaaaagtgattaaccggaaatgttttttttattattgcggaaggggaagaggaggggggcgaacggcccaagcttttcctgggaaaaaggtcgatggaatttttctagggtcaacgttcgctttgacgggaaggggtggttgaagtgcccaattaaaacggggtatacggtaattcaattcctcagccgtttccaaggggtacaattggctaattgaacgaaccgtttgatggcctgagggcaatttaatttcggcagtgtccgcaattccggcctcatttcgattaattttcaaaattagcccggttttccagagggagcggggctcggaagggtggtggattaggacgatttctcccaatttgggccaacaattattagagggggccaattttttgtatcgctctcgcagggagggtaagtagtcgttaatccactggttccaaaacctttctgtgtgaaggctcgctgtttcccacaatgtttgcaatgaaatttgggtactttccggtaattttgattgggtcccatcgatttcggtagtgaggagggaaacaaaattttgaggaggattgaggggacgaataaatcaatcggtcttaaggg

SEQ ID NO: 7031 - DNA, 4790 bp, Heterodera glycines
cagtgtctcggtccgagggcgggtgatgggcttgctcttgagcaataagaaatttaaatgactttttaagttcaataaatgagataggggctgagttaggttttggattttgcttcttttggacaaatctgataaaacggaaaacgagggcggtaattcgaagtgcctttgggaggcgggaaaaatgagataaatcaattaaccgcttatcggaaagttgttccgtcgcaaaagtatacagtggagtggccaaaattgaagacgattcggatttagagttccgaaagtgttttatttggcggttatcaggccaattaattgggagaagggggagccattttggacctgaccaccacactgaggcattggaaagaatttgggcggagttcaggcctcttgtgccgatgtcggcggggttttcagaacctggtaaatggcggattaccaaatttgatgtactttttatcgacttaattcgattttggacaaaaatttccaatgaattttggggagaatttaaccaggaaaggacaattgaagagtccgaccaaatggttaattcggggtccaaatttaaggaggaaaagtgcgattgggtaaattttaaagcccgcgtcccaatttctacggcaatgagttcgagtcgtggaatggtcagtggcgtgcctttatgagtcggttttactttggtttttgaaaaaattaaaaacacttctgcttgagagaaagagggatgggtaattcggagatacactgtggcacacatggcgagagaggaggcatcagtaaaacaatgtaactgataatttcttccctccaatgggagtgtaacgggacaacggggaatggacaccttttctgcatttttccaatttttaattgcgcaatcccagtcgttttgaatttgggttgggagagtttgatcccaatcgctgccattttggaatattgattggagaaaaatttttaatgggagaatgagtggggaaataaggccaagggggtcgtattgagacgcaatgaaggacagaatggagcgtttagaagggataaaatcattattcggaggggataaattaaattccaaggagtcggtttgggtgttccaattaagacccaaaaatttttgttcagaacctgagagttttatgtcgtcggggagtttggatagagcattttcggaattactggcaaattctcggagtgtcattcctgccctttgaaaaagtgaaataatggatttggctttaatttgggcttcattgggactttgtacggaaaggagaatattgtccacataagtatttagggccacttcttgtgataattcggatggaaatttggataagtgatggcgtatcgttgcggcaagtaaaaagggggaagaagtcagaccaaatgatacacgggtgaagcggaaaatttgcatattggacttggaaaatgggcgatggggatctttaagccataaaaaacgtgcgcagtcccggtgttccgggtgaacagcaacttgtaaaaatgctttctcaatgtcacatgtgatggcaaagttgagcggaatttatggaccaattcaacattggaaagcaattcaggggaaaatggcaaatatgaggtgggctgggtaagagagccaattgcatttgtagagacaattagggaccgtccattcattaattgtaggccaaattggttcgaaaaagtctggatgactctggactttgggtcattaaaaacacctaatctcacagaaacgggggccaagttcaaattaagggttttggcttcgtcaaaattaatgtacgagtgggtacttgcgtcttccaaaagaccgatgccttcccgggaaattttgtaattttgagggtgaaaaattctgaccttcacacatttgagcaagggagggtggccaaatgagcagtggtgatggccgtatttgtttggttgatgtgtgctgtaatgccggaggggttatcagggatagaaggcgaatgagacgttctgtgagtaatgatagggggcggagaagaatggtattgaaatggaggaattaacggggcagggggcgaaaactgaggaaaagttggggtcggttgggaataactgaaattggtggagcgatggggattttccgatcgattaaaacagagcactcgatgatgagatcccttacaattagaacattgggctggagcaggacattgacgggaaaaatggccgggttttaagcatttgaaacaccagttgagagccttaagccgctcgaggcgtgttttttgatcagtaaatgtggtacaaaaacttgaaaagtgaccaggattgtcacagaaaaggcatggtaatttgggtttaggattggatttttcatttgtttgtttgtggttagactgttgacttctcttggaatgaaaagtaagagttgggaattcggggggcgaatgagaaggggtgccaaatttggaaaggggggaaggggtcgtttggaatttgtgccttggagaaacaggaactttggggtgaagcgtctgaatttgctcttttcgcttgagaatggcccaaaggcgtgccttcagtttgtccgttgaccaatcgtcgtcgttttcctttgacatgaaaatttcgtcgagaatgaagcggggaagtctctcctcaacttccatttggactgccacagtatcataggaacaattttgttgtgacatttgtacacaaatacattccaattggtcaaggagggaacgaaggtcatcacaaaaaaattcaccggttcggatttgggggagctttctaagagaattatgaagggcacgagcaacttcctctgggttctcgtagtgttttgacaaaagggcgagagctatgtcatatgaatcgtcaaaaactgggagggaattaatcaaagtcaatgggggaccagaaagacattgttttaaatacgtaaatttgagagaattcgggatgttcgtgtcatgaactcccgctttaaatgtgttccaaaaagtcatataagtcgtgcaatccccggaaaaagtcggtagcgtcgttttgggcaaatgaacgagggagggaggggcggcattttgagtattttgaaccttggcagggaggttggcttctaaggcacggccttggtctcgaagggtccgaaggtacttccggaggttggaaacagtcgaagggaagggacattcgatcacaaaattgtcataaatgggattatcttggattctctcggccccagtcatgttagttctaagggccatccatcggtcagaattgtcattaagaacagaaaaaattgattggacatcggaaacatgatcatttaaagattggatacatgaacgaacggttaggagaaaaacagaatcaggctgattattacgcgctgggatgggaaattgtcggtcgtccgagagaagctcttcggcttcagtataagccaatttaagttgcgcacggaaatgggcagacatgaatacgagaataagtgaaaagcggattacaaaagaaattggaaagggcaattagagaacaaagtgaaaaaccaatggggtacaattagacaaaaaaagggggggaatgggaggtttcccggccgttgtgtcggaattggccaatgagtgctgacccaattccgaattaaaaccaaattaagacaaaatcagaaagacaaacgaattccaaacaaaagatcgctttcaaaaactctttatctccaccaattaagtccaaggaaaaaaagcgatgaatcaaaggcgaaggctatgcgaaagcaaaggcgagcgaacggcgaagaaaagggggataagtccacaaaaggatccaagggaaagaatgaaaaggcaagaagaagcaaccgcagggaaatcaaagtcttttatggccagtcggccgtcgggaacggaagtggtgtaatgaagcgaaaaaaggaggggggataattgtaaaataaaggatttattttgtcaagggggcggagggaggaaatacaaattatttcgcaaatcgcgacaaagacgaagagcagcaacagaatgtaataaatggcgaggcgaatgatggcaaatcggacggtacggcaaaattttatttgataaatgggagtgagaggggggcaggggacagtttcaacaatttctaacagtacccaggacaaaaccaatgttgaaggacgtcgtagagggcttaaaggaaatctgaaaatgcgacataaataaacgttttttagtggcaaaagagttgctgatttgccattcttcctctcccactgcatcgcctcaaccgagcggatgtttcttaacgtccgccaatgtcgtagcggaatcggacggaatccttcgggaacagaacagaagcggagaagcggacggacaaagcaccgccgcaacgacaccgaacgcatcgcgaaggccgagcaattcatccgctgccgcggtgattagctaataaatcattattagtgaatgactcatttaaatttcaattttgtaggtcagtggaagcgttgaagacgaattggccaaaatcaaagtggtcttacgacagcacgagaggaggatccgattgcttgaggtgaatggcatttatacggaaaaactaaaaaaacaattcaggaccaattggcggatgccaacatggccaatgcttatggaatatgaaaaattaatacggacagaaatattgtgattgaagaaatgacgaaaggaaaatatttgaaaatttatagcaaacaaatgcaattttgttcattcacaaaaaatggaatatccgccagctttttgaaatga

SEQ ID NO: 7032 - DNA, 5465 bp, Heterodera glycines
atatgtagggacgcgacttttagtgactaaaaacttgcacaaatcgccaagcggaattttctaacacagctaattgttttcagaatagtttgaaattttgcatgaaaatactttgtataaggcctagcatcttactaaattttagaattttttatgcactgagagatttttaagaaaatccgatttttccagcctgaacgccaactttgtggtcaagttttgcaaacaggcggttttttgtaaaaaagttttaccaatattaaaaactctgaaatttggcagtttgctaggtctcatgccaaagtattttcatgcaaaatttcaagctattctgataactctgaaccgaattacaaaaatcaacttgagcaaaattcaaacttttattcactaaaaatcgcctcctaattatatgaaattccaaccattttttaattgggtctgaaataactttttcattctgaatttagattttaaattattttcaagtttgccattgtataaggatcttttaaacaaaaaattagtgtgaacactgatttcataactcattcaaacagcttaacaaagggaaaaatgaaaatcccaaaaatgtaaaataaaattttcatttgtttttcataattccgagaataaatgaagagtaacaattattacatactgaaaaactaaatcaccaaaaaaaaaagataaagataaatcctaataaatttaaaaaagcaaaaaaaaaaagtgtttctgtctttcttttcatctctcatctgtccattctttcaacaatttttatccatcactttttctcgttttctttttctcatcaaaatttacttctttcaaaacctcccattatttttccaattttttcgtttcttcttcaaaattttcattgtcatctttacctgactgattttcaaatttttttgtaaatgactcattaaatttttccccccatttctcgtaaatttgccaattttttccatttttgtttttctccaattttcaaaagtgccattttcagcattttccattcaacaatttttacatgacttaattggtgcaattatcattcttaaattccacaatcaaagaaggcaaaatggatttttgcatatctgaaaaatattatttttggttatttaattttttaatatttttaagtaaaataaaaaattaattaaattaataaccttcttgatggttgaaataccagtgcttgtttttcccggtttccctatcgggaccgggacttgagatttttaaaatccgggaccgggaacctggaccgtgacctcggaggacggggaattcccgtcccggtccaggtcccgtggcaatctaatttaaatatctgtttattaaaattagaattaaacatacataattcattcaacatatgtatacatcatattttctcatcagcagttagttttattaaaaaccaatatttgtttacatttgaattgatttggaaaaaaatctttccctgtggcaaaggggggggggggggggcacaataaaacattacactcttctgacacaatttcctttacatatttgcatttttttccagttttattcctccaaataatcaatgtgagccttcgccatttagttcattgttattgggcttggaatgggattaacccatggctgccaagtgtccttatttataagatttgtccttatttggaggggccggtaagatttgtccttattttcaggcttccccaaactttttaaattttttgtcttaactttcttttcttaaaaaattcgctcaaaatcgtaaaaattggtcatttttttggtgaaaatctgttaacaaaatagtgtaattgcccaaaatgttttaaagaacaatcacaattttacatttttctgaaatttttttgcaaaaaaatcacaaaatttagacaattttttgggcaaaatctgttaacaaattgctttaaatttttaaaaaaattccccctgcggcgcctatcggcaccgccggaccaccccccccccccccactttaagtttgttgggataagcgctccaaaaaagtgcatatgcggtcaaatgagaaaaatggtcaccggaaacaaattaaattgtttttatgttaataaaatgttgttttaagtcgtttcatgtattttattgcgtttttttttcgcgcaatattagttttcgaaaaaatcctatttttggggtcaaaatcttagcacttagcttcgtttgtccttattttgaaaaaaaaaacttggcagctctggattaacctgctgaattagtccagcagtacataaagattttgccgattttgttttgtgatttttatttattttttaattttaatttattgccaatgattttccacatttaaatagaaaattacgaatttttacattgcttatcatgtccaaacctttggctaaacgaatgaagcttttattgagcgcgggtgaggatgcggatgtttattttttggtggggaacggagacgcaaaagaagcgagtttttaaattcaaaatatattaattatttaattgaaaattggggaaattttatgaatttaatagtttttttgattgttttttacttatattttaatcctctttagcttttgcaagcccataaattgattttgaagcacgcttccgatgtgtttgaggcaatgttccgttttgatgccaataaggaaaaagcagaattcggtaaaaatattacggaatggcacttataatattaaagcattaattatcgattattctctgctaattaacctcattaattttgaattagcctctactaattgccctgttgtggaagtccccgatgttgaagcatcagcgttcaaagtgatgttgagcttcatttacacagaagatttaagtgaattggacggagataatgcaatggcagtgctttatgccggtgaaatttatttaattttacaaaaaacaattaaattatttaattagccaagaaatacgacatccccgccctggttgaccaatctttgcaaattcccatttcaaaactgcgcaatgtgttcatggcttatgtcctagccggactttttggattggaggtgggtacgaacaatcattagaatcagattcggtctcgaatttcactggtaaacaaaatttccctaaacttcgatttttagcaaaattttttttaaattaatttagagcgtatagtaaattaagtattttagaactcatttattagtgctatccaaggccaaaaaatccatgaattttagaatttcgcaaatgattgtttgttttacattgacaaaaatgcagacactttgttcgaatcggaggaatttttgaaaattgaccaaaaaatcttatgtgaaattttggaacgtgacgaattgcaaatcagtggagaaatttcaatttggaattcggtaatttacctacttataaaattaaattaattctaattaatacatttaattattctctattaaatattaatttaaaatttaaagtcgctccgttgggccgatgcgaagtgccgtcaaaatggcatcgaatgctcagcagagaatcgtcgtgccatgctcggtccggcactgctcaaaattcgctttccgcttttgtcaaacgaggaattttcgaagaaaattggtaaaagaaatcaaatttagtaaatctttttttttgagctatcctaaaaaataataattatttttaagaggatttaacttttttttatattttttaataatttaaaataatattttattttattcctttcattttcctttgttttacagttccatctggtgtgttatcaaaagatgaagtgattggcgtttatcaattcaattcccttctaaattgtcgtgagatttccgatgtcttacagttcccaatgcaatttccgactaatggacggatttctgatcggaaaaagggcacacttttgatggacattgaaaaagtgtccgaatttgcacgagaggagcttgagagcagtcggcacagcgaaaaagtgttcataaatggacttccattgaaactattggcacaaataaaaacgaaaacggaaagcactgacaatgagaaatgtttgtgctttttccttttgtgtgattctccagaaaaaggtgctaattatctgttcattaatgctaattaacagcaaaattaattgccattaagattcgccttggcacttctgcgttcattccgcaacttttcgaattatctcgcaaaagaatgggacagagaattccattgggacacttagtgattttgtgtttaacaataactcgaccacgaagggattcaattatttcatttctttttcggtcagtgccaattcaaaaaaaaatgtttttaatccaacgtttgtgggctaataatattcaaaaattaatttaaattctttaacttaagaaattgatggatccgagcaatgggttttatgacaaaagcaaagacaaagtgacattggccattgatgtcacaacagctgatgaaccaaaaatggacaaattcattttggatcaaagcaaatcgaaagggacactttttatggacattgaaaaagtgtcggaatttgcgcgagaagtctttggaagtgaacgtaaaagcgaatctgtcacttctgtaaagggattttcatggaaaataatggcagaaattggaaggaaaacccaaagcactgacaatgatgagaaatggttgggcattttccttttgtgcgatggtccaaaagaaggtgcaaattaagtgcttaaatgttgttaattatataattaattgcctttaaaaagaaaagtggagttgcaaatgttcggcaattcttcgaattgtctctcaaaaaagcggcgtggcagatatccgaagagaattcgaccacatttttgacaataaagaaaacagctggggatattccaatttcatttcatttgcagtgagttacaattaaactttgccctaattggtctaataatggattattaggaactgattgaccctgacaaaggattttacgagaaaagcgaggacaaagtgtcattggccatcaatttcaatatgaaagaagcaaaagcggatgacaaatcataaataccaaatgttctggtcactaaattattatcatttggcctttttttctttttttttctttttgataaactggcactgacaatgatgagaaatggttgggcattttccttttgtgcgatggtccaaaagaaggtgcaaatgaagtgcttaaatgttcattaattataatttataattaattttgcctttaaaaagaaaattggagttgcaaatgttctgcaacttttcgaattgtctctcaaaaaagctgcgtggcagatatccgaagagaattcgaccacatttttgacaataaagaaaacagctggggatattccaatttcatttcatttcctgtgagagacaacattaaattctaaattacccgaattatatacaat

SEQ ID NO: 7033 - DNA, 1346 bp, Heterodera glycines
  unsure (1)..(1346): unsure at all n locations
acattggctatcgatttcactgtaaatgaagtaaaaacggagggcaaatcataaagacccaatatttntgggaaaaatccgttattgaattaccatactatgtacctttttttaataaaattatccacattttgttgtttgccatttggatttttacaaaactgatttatggatttaatatttagtggagctgtttttttgttgagcctcgttcttgagtaccgagtttcaaaagtttcatagtccgggaactacataaatcaaatgttactgttactgaataggtcaaaaaggcatatgccttaaaagtcggtctctagtgataagttaacaaatttggccaaaaactttggcacattctttaagacaatgatacaaatctttaaaatataaatattaataattgatcgacgccgaaaggtcacattgtaataagacgctgatgaatgcattgaaattttttgaagttttaaatgttttatatgattattttaaccgctagataatatacatttatttaataagagttcgtaaataattttgtgtttattttggcctgttttgtgattttttttttttttggaaaataaggagaagtattagcaagattcgtgatcaacttttaaatcagcttatgtatttggaattttaaatttaataaaatatcaatttggattactactgcctctggctctttttacttttaaaaattaaacaaataatgtggtaattaatttaaaatattgaataaaaaataaacataacgaagtgttgtaactgaatgaaaagaacacgaaaattgagtaacataaaaaagcagtgaaaagtcattacaaccaaaacaacaacaacaatcaaacaaaacaataataattaattaatattaattaagcaatgagtataaaataaaaaagattcaatatgattttaataaaataaaatattatttatttgtatgatgttcattctcattgactttcttgcatggcaaaagggatggcaaattgttttcctgaaaaaacaaattttaaaaattattttcaatttttacaacatttatatacagtcatggtcatatgtttaacaacactcaaaattttctaccaaatttgatttaaattaattataaaatctcaatatgactatattgtgtatatttgttttatatttcttgtagcattttttgtgggctttataatgataccattcactatcccctgtcaaaatgttattattagttacaaaccattttaccaactgcactccctttttggggtggtcatatgtttaggaacactacccatattttttttcatcagcattaaaaaatctaaaaaaattctggt

SEQ ID NO: 7034 - DNA, 4657 bp, Heterodera glycines
  unsure (1)..(4657): unsure at all n locations
ttttcaaataatttttaaatttaatacatattccagaaaaatggctatctctttttttgagaaattttctatgcaacaaacgctctcgaacatgaaacgaagtgcggtgcgccgtggccattttatttttcaaataatttttaaattnaatacatattccagaaaaatggctatctctttttttgagaaattttctatgcaacaaacgctctcgaacatgaaacgaagtgcggtgcgccgtggccattttatttttcaaataatttttaaatttaatagatattccagaaaaatggctatctatttttttgagaaattttctatgcaacaaacgctctcgaacatgaaacgaagtgcggtgcgccgtggccattttatttttcaaataatttttaaatttaatagatattccagaaaaatggctatctatttttttgagaaattttctatgcaacaaacgctctcgaacatgaaacgaagtgcggtgcgccgtggccattttatttttcaaataatttttaaatttaatagatattccagaaaaatggctatctcttttttttgagaaattttctatgcaacaaacgctctcgaacatgaaacgaagtgcggtgcgccgtggccattttatttttcaaataatttttaaatttaatagatattccagaaaaatggctatctatttttttgagaaattttctatgcaacaaacgctctcgaacatgaaacgaagtgcggtacgccataattcccctgatcgaaatcatttcgaggagggctctggaatttattaaattaggatttttgatgcataaattattgttaaataattaaatttctttttttctgtttccatgttctaaagcctaaataattcccctgattgaaatcatttcgaggagggctctggaatttattaaattaagatttttgatgcataaattattgttgaataattaaatttctttttttctgtttccaagttctaaagcctaaataattcccctgatttaaatcatttcgaggagggctctggaatttattaaattaggatttttgatgcataaattattgttaaataattaaatttctttttatctgtttccaagttctaaagcctaaataattcccctgatcgaaatcatttcgaggagggctctggaatttattaaattaggatttttgatgcataaattattgttgaataattaaatttctttttttctgtttccaagttctaaagcctaaataattcccctgatcgaaatcatttcgaggagggctctggaatttattaaattaggatttttgatgcataaattattgttgaataattaaatttctttttttctgtttccaagttctaaagcctaaataattcccctgattgaaattatttcgaggagggctctggaatttattaaattaggatttttgatgtgtgctaatattgtgattttaaaatatatttggcgttttgttatttaatttgtttcatttttgtttgtgatttttgtggagtgttggttgttagtttatgctgtcgcagttttcctattgattgtcctcgccctaattttatttggaattaaacgataatcatcttcggcattgggctgtattgttttgtgtttgctttgggctgttgtcttttgccgtgggcagtgcaacaacattattaaaagccccctgacaacaatcatatctgtttttacgacttggcgctcctggcaccggtgaatcagcagtggacaataagaaatttggacgtggcctcgaattgaaaaaagggaaagtaaatccctcgacaagtgttgaagaaatcggaaaaagggaaaacaaattcccaacaagagaagagcctaatcaaccgactgtggacagctaaaaattgtaaacgggtaaagtaaaacccacgattagacgagccaaagcgacattccggtaaacgggaaacatcccccaactttcaacggactgtcgacaaaaagggtgaacaaaaacccgggaaacgactcgaggagcagacgaacaaggcggaatttttttgtttggaaaacgggaaaagcaaatccctctacttcaaaaggaaattgtgaaagaaatcacgcaattttgtcagtccggtaaagtaaatccgtcgacaaaaactgactcgcaaaaccgggaaaagtaaatcccaattcgacatgcagcaacttcgccaaaacaaaacatcggacaaaggcaattttgtggaacaaccgcagaggcaagaaggtctgcaaattggcgcgttagagttcgtcatagcaatggaacgactccccgaactgaatggaacggaaggaccgaaccaaattcggaaatttttccaaaaatttctgttggcaacagaagaatggccggaaagtcgccgcgtttcggcgctggaaagcaaaatcagtggaaaggcagaacgcgcttttgacgccgccatgaaacatcgcccggaaaatttcaacgaaatttgctgcggaatgaaggaaattttgagcgaatgggattggacagaaatgcgggcattcaatgaattgtgggaaggagtgaagcgacgatcggacgaatctttggatgaatttgcggaacggctgtacggcattgtcgagtgcgcttacccaggtttgccctcaaatttcgtcgacgactttgcagtcaagcacctaattcgtgctatggaaaatccggaaatttcggtgggattggaaatagctcgccgtccaggcatgagcttcgacagtttcgtcgctctcgcagtacgcgcagaggcagtgcaaaaagccactaaatcggctggatttggaaaagagcaccggccaaattttcagcaaaaatcgacagttccgccacaaaaaattttcgcgccaaggacaaaccgagtcgtctgctacaactgcaataaaattggtcatacatctcgcaattgtatactttcccctggactgaagcatttcgaccgtccaccaaaatcgccacagcatcaaaaatttgttaagaaaaatgccggttttcggaaattttctccagctgagaataaaccgaatgtttttcggttggacaaccaactagcggcacaacgaacgaacgcggaagctggaaataaattgaaggcacccaatcggcagcgaaattcgtcgtcgttatgcagtgtaaaaagagggaaaatggaggaaaaatcggcggaaattccaaaatggtttttgaatgctattttcgctgcgttggttgtgttcgccggcgtattttcgaaggaaaagtcaaagtgtggacaaatttggaaaagtaaaggctcaatgagtcgcaccgacgaagtgaaaggacggaaagcattcggaaaattggggacaattttttcgccgaaggccggggaggaattggcggatgtcgcagccgccaatcttgaaaatttgttgaaaatcggtaaaagcctgaattttccaaatggccatcgcaggtgtgcgcaagaagctaccgctgatgaatttataaggccagatgaaaagtcggaattccgttttgtccgttgtttttacaggtctgaccctgcaacgcgactttatgccgaaccggtccactgctgacacccttgccgcccctttcaacgccgaatgcactaccgatgagcccaaagcgctgaggacatcgcttcttagagggcgaggatgtgctaatattgtgattttaaaatatatttggcgttttgttatttaatttgtttcatttttgtttgtgatttttgtggagtgttggttgttagtttatgctgtcgcagttttcctattgattgtcctcgccctaattttatttggaattaaacgataatcatcttcggcattgggctgtattgttttgtgtttgctttgggctgttgtcttttgccgtgggcagtgcaacaacattattaaaagccccctgacaacaatcatatctgtttttacgactgatgcataaattattgttaaataattaaatttctttttttctgtttacaagttctaaagcctaaataattcccctgatcgaaatcatttcgaggagggctctgcaatttattaaattaggatttttgatgcataaattattgttaaataattaaatttctttttttctgtttccaagttctaaagcctaaataattcccctgatcgaatcatttcgagtagggctctggaatttattaaattaggatttttgatgcataaattattgttaaataattaaatttctttttttctgtttccatgttctaaagcctaaataattcccctgattgaaatcatttcgaggagggctctggaatttattaaattaggatttttgatgcataaattattgttaaataattaaatttctttttttctgtttccaagttctaaagcctaaataattcccctgattgaaatcatttcgaggagggctctggaatttattaaattaggatttttgatgcataaattattgttaaataattaaatttcttattttctgtttccatgttctaaaacctaaataattcccctgattgaaatcatttcgaggagggctctggaatttattaaattaggatttttgatgcataaattattgttaaataattaaatgtcttattttctgtttccatgttctaaaacctaaataa

SEQ ID NO: 7035 - DNA, 1433 bp, Heterodera glycines
atcaattttatgacaatttgctctaattgattcaatcatttttttgttttgttgctttttcatcattagcaaatgcaattaacttggctaataagtcaccgttttctgataaaaaagcgttaatttgtttcaaatcctcatcagtaatataagaattcgtaaaaacggtcctttcaaaaaaagaatgcaagatgaccaataataagcattttaagccaaaattaatacggaattctaaaaaatatttaaaaagatgttttttagggagaagaaaattcgtaaaatgggatgaattatattttttcaattgaagtgtaagcaaatcttcttcatatttttgaggatcatataaaatgggatcgatttacacattgaaaatataaaaaatatttatagaatgtaggcattcatccattcatgtgattgaatatattttttaataatttttttttgccgcaatatgaaagaaatttacaaaataaaataatgcaaattgaaatctaaaaataatacatcattattaataatcaaagtgaaaattattattatttagctaaaaaagtggcatttttcaacaatgggactttgttgtggccagagcatctctcgcgcccggacgagtgctgtgtcgtaggagttccccgacacgaatgctggccaattcttagaaattcctttttatcgtaaaaattaattaattctaaattgtatggaaatctccattttatgttcagtatctttttatccttctttcttttcttcctctttcttttcctcttcctcccatttttctcagcccctttaattaagattttcctcctccactgctcttcttccgatgcccttaagcaagtttcatggaatttcccggcgtctttttcatatttattttccatataatttgccgcttcttttccctttattttattccctttaccccccccccccctccctctcccccgtttttctccgcaccctttcaaatccctttggctagagcaaattaatttttgcataattaacagaaaggtcgtgtggtaaagtttggcgccgattttcctcccacaattacgctttgctgcgctatgttggcgaaacttctcgtcatttgcgcatacatctgctgaacctgacagaaaactttgtcaaaatggcaaagtgccattctcttaattattttgcccattttttcaggcaataaaaaaataaaagtaaaatttaatcattttttattatcatttttttttgaaaattgagaaaaaatttataatttacctatattaaattaatatttttgttgatttttcttagcacggaaaattgtcgatggaacaacgaacgaagaagcaaacataaataaccattcattctaatttgatcattggcctcgtccctcaagagttctctcacacattccctcacaaaaaactccc

SEQ ID NO: 7036 - DNA, 4387 bp, Heterodera glycines
tcgctcacaggcaatttgttcgcaattctcgtcatttgtgcccaccgttccgtgcgcaccgccaccaatttctttttggctaatctcgccgttgcggaccttttggttgccattttttgcattttccaggcaaactcttctcccgaagcaataggcattctcactttgttgtagaatatgttccatttggttggcaccaacgacggacgttggcttttcggtgagaatggtcaaatggcgtgccattcactcatccttcgctttgaggtgccactttgtgcaaattgtacgcgttcgtgcttcacctcttcccctgcaccagcattggcattctcgtctgcgcctctgtcgagaaatacatcgccggtttgctttccaagtgtgccttccccttttaaagtgaacattcgttttggtgctccacccgcttttggccctcaaagtgttcaccccgcgcttccgcgttttgctaatggcctccatttgggccgtttctctcctgttcagcttgccctattacattttcaccagttacatcttttacaagaatgttgcggtgtgtacccgctttcactggcattctccgatcagtctgatgagcacccgaaacatcgtcacctcctccttcgtcctttggtactgcgttccgttgctgatcatcctctttctttacactcgcaatggtttggtcctgtggcatagtgcgccgctgaagaaactgacccaagtgggcaaattgcgaaccaacagcaacggttggttaagagaagggaaagcaaaggatcagcagaaaaaggcgattgatcattgatcagagacgacgacaattgcctcggggataggcagtgccaaaacaagagccaaacgaagtgcgacgcatccgccgccgccgccacaaccgacggatgacgccgaggagagggccaaacggatgaacaatgccaatgaatgtgcaatggcacatttacgaagggcgacaatgagcagcgacagcgaaacacacggaagcgaagaggaggacgagcggaaaagggatgaagaagcattatttgggaaagaggggacggaggaggaagccgagcgagaggaggcacagcagggagacgcgagaatggtaccatgggatgacggacaaagctcgtgccaaggactggctaaggcgatgaggaacaacgaaatgttggcactgccgacggcaaagaatgacattaccacgaccacgctgggcacacccaacggcacagtgctcatgggcacggtggagtctcgtaaaaaggtgctgggaacgaaacaggatcgcagcaccgtcgctgttcaggtgatccgactttggagcgccattgttttttcattcgccgtgctcaccctcccccaccacgtccgtcttctctatacggtcggtcggctcccttttcgaccaatttcgaactcttttcgtcatgttgaaggtgtggaccgagcagatcatatgctccaacagtttggaggcgttggttcagccactcacttaccttttgctgtttctcttctcctcttgcaaccctttcctttacgcggtattccgccgaattaatccgcagattacatcgttcgttttttttagtttatgagtcagcaatttcggtctgccatccgcgatattttcaagtgcaggtgaatcgaatgggcgcgtgggactgattcggcggcggaaattgaaacattggttaaggagaggacgggcgagacgaaagtcggtgcgaactcagaattcgcatgttgtgacctacacaacgacctttgggggaggcgagacgagaagcgccggagggggtgcaacgacggacgacggattttataatccagatttataaaatacctaattcttttcgttaatgacgaagaattttatggatgtacgagtttttttttaaaaactcaaaccaattttcagaaattttttctccatattttcctattttttgtccatattttgcgactttttcgtccatattataatccatattttggattttttttgtccatataaatccggtcctaactataataagtggaaaaaacatgagaaatattttattatttacaaaaaattaattcgaaaataaaataaaaagtttaattctttaaacttagaaaacaacttggaaatatttaaagcagaatatgggaagcattcacaatcttaaaaatatagtaagtgaaacctaaacgtttttatctctggaaataaattgtgaagaatcacaaaattgcaaaatatcccatcaaattttatgatttagagtggaatttaatcactcattttattaaggacttaagaaaaacaaacaaaaatatcaccagaattgtttgtttaattgaaaatttttattgagtaattttttgctgcgcattaaattaaattattgaaattttcgccggtgaattttagcaaaatgttttagattttctgtaatacctaagtccttgtataattacgaaagaattgcatttaggatacagtgttgaccattatgaagatggccatgctcaaaaagcgagaatcgtcgaatgtttttctcattgatggtaaaaattgaataaatatggcagccaaatgcaaaaataaaggagaattttgactaatgatctataagcaatcaaattttaaaatattaataacatacgattgccctaagtgttttttattagcctagaaaatttcaaaaaaattcgttcagtttcaagaaagttatgaccaaaaaacttgattttttgaccttcgatgtcataactagggcataaaattatatgcacatgcatattttttcctggactgtgggacgtctgaaacgcacgaaaaacatgtttttagcttggtttgaagcttctaggacgtacttacatgtgcatattttgcacatttgtgcatatttcgcgatttatgtgcatatttgcatatttgtgcatattttggcatttcgtgcatattttatgtgcatatttgagcatttttcaacaaaatcctctattaaaacggccattttggcctctaatgaccgaaaatttttcaaaaatatcattttttggtattttctaataaaaaagtaactttttaaaaaattggaaatttatgccaaaatagtcagaaaatagaaaattcattattttttcacaatttcttcaaaataaataaattttacatttattttgtatttttagttttaaattgtttattcatactacatttagatttttcgagatttttatacttaatttaacaaatttgaagagatttggaaaattttgcactcaatttggaaaattttatctgcatatttgtcactttttatgtgcatattttgcaatttttgatgcatattttacgattttatgtgcatataattttatgccctagtcataacttttttggaagttaacgcttaattttatgagtgatgtgttggctccacattcctttagtcgatgtatcgcctcgattcaattccttttggcataaattacacagattttgtctaaagaatgaccaaatttattgatttatgctattttttaagaaaaaataggttttttgggggccggtggtgccgataggcgccgccgggggaaattttttttttatgaattttgttagaaattagccaaatttttcagaaatttcattcttttggatgataatacgccctaaaatcagaacatttcttagaaataagaacataaagaaatcctgcattaatcagataaataaattcaaatgaaaactcaaccggtgtcgaactcctacaagaaggcgaggacgggggtgaggcccaaaaaacctgtcccgcccccggcgggggcgggggtgacgggggcggggttccgaaccctatagaaaacacttgggtgatattaatattttaaaatttggttcatttaatcaatttaacaataattttttttcaaaaattttccatttgatggtttttgactgtgacctcccagcaccgttcacccccccccccccctcccgcatttttcgaattctgcattataatagagaaaattctgggctatcgaatgataccaaaaaattaatttggttgataatcagaaaagttattaccaacggcgcctaactgctttcacagaagaaaattcattcattttttatgcgattttggacctgactccgatcagtttttcctggttcgaaattttttagtcagcaggattttctggatttcccaaatttccattttttccatttcataaaattcggaaaatttcaatttctcgttctttcatttttataatgtatttacaaatcaaacattgattaaaccgagagaatcattaatgagttaaactatttgcccatttattattgatctgttgcagctgctgc

SEQ ID NO: 7037 - DNA, 1096 bp, Heterodera glycines
  unsure (1)..(1096): unsure at all n locations
gtcggcgancaatggataccagtaataaaaatntagtttaaatttaaatttaaattagaaatttcaataattcacttggacgatcaaagtccgcgaaatttgcttgttcaattcaataattttatgattttttgtaccttattttcgtttggtttcaaaaaaatttcaatacgaaatgccaaagcgcatattatcagataaacaaattaagctttttaactgagtaaaaaatgactggaaaaggaattgtctattttaaaaaattacactgtgcaagttttaattttctctcttaatttttttatttacagatttgttcatttacgattacataacaagacttggatttaaatttttttcccaatattctattcaattttctcgccaaaaataatcattaaggcacgaatttttagttacaaaaagtccaaaaatatttgattaatagtgatttaaaaatgggaaaaaatgatgaaaaatagcccaaacaattatttaataagatttaaattaaaaaattttttattcaagaaaattaaacaaaaattcggcattttgcgtttttgtcacccttattgaattggtaataacgcaaaaatgaagcggagggttcagtcggttcaagttttgaaaggttgttttcattttcatcaataaacacttcttcgctttgctcattttcagccggaaaattatcagaaatttccggatccattactctaaaaaagttcaaaattaaggactacaactaaaatatgtgcgtgaaatgaataaaatatttcatctttattttaaattggcataaaaagtctcggtctcgagtctcgaaaatcgagaccgagacttgaaaacccgagacttgaaaactcgagaccgagaccaaaaaaaacccgagacttttctcgagtcgagactcgagaccgagagtctcgaacagcactatttattacatttgtaccgtatgcaacatcaaattgacaccaaaagaaacaggtcaaagctacagcatgatgggcatctctacacattttccaggacaattgccgacgggatgactaattttggcggagtgagttcaaagacagcggtgtggaca

SEQ ID NO: 7038 - DNA, 1292 bp, Heterodera glycines
cctattttttgttgtaacttttttcaaatgcaaccaaaaatgaccaaaacatattcaaaatgtgcaaaaacagatttttcttacatacataaattagcagcactattcataagacggaagaaaaaaaaatgatattatgactttaaaaaaattgaaagcgaaatttgtatttgtaaattttatggatcggcgttcgtacatttttttttctcaatgtgctaaataaagcactatttaaaatttgtagaattaagaaataaatgaaaattcggcctattcttcagcacaaaaccgagccgaaaagttttcatgtgttttcttttaaattgtttgacacaaatattctaagacaattgtttatgcaagtgattttaaaattagtaaaatgatggaattgcaaaaattgccaacacttaaaaacattgataaaaaatgagtaaaatttaaaaagttaaaagtgaccgattggattaaaatgattgatcgttgtgccgttttttcgtatctgtttgttgtttgaatcgaatcatttaatgctcgttggaagatggaacagttcagagattgtaaacaaagtttggaccaaaattggcttggataatgtctccgggagttagcagaccgacgaatggcaccaattcggtttccgatacatcaatttttgtcgtatctgataaaaaatggattttttaaaaatgaaataaatttgcaaaagaataagaaaacataaatattaagatatttaattagtttaatttaactaagctcggtttaagaatttggacccttaagaaaattttatggccaacaacttttaaattttaattccataaaattattttaaaattaataaattcttgactttattggatatatatttcctcactcaattggatgccgttttttgtaaaaaacatctccttcgatgtcatattaacaccgcacccgacagtgtcgccgccgccgaacgcgggaaagcctccaacgatgccaaacgatgtgccaataattataccattattccaatattgataagaagcattttcttttttggcccaaagaccgaagtgaattgtactgaaaaatagaatttatttaaaatttaaaaccaatacaataattatgacagaaaaaaactaatgaaaatttgttgatttgtgttaatttacccaatgccgctgtccccttgctttttgagaattattatttcgaaatacgcattgaaaagcaaatttaacggaaattcagcaaccaagcgacaataagctaaaaagaaatatttattattaaaa

SEQ ID NO: 7039 - DNA, 1059 bp, Heterodera glycines
ttcttttttggcccaaaggccgaagccaattgtactgaaaaatagaattcatttaaaatttaaaaccaatacaataattatgacagaaaagaagtaatgataattagttgatttgagttaatttacctgctgccgttgtacctttgcttttcgttaattgttatttcgaaatacgctttgagaagcaaatttaatggaaattcagcgaccaaacgacgataagttaaaaagaaatatttattattaaaagatttaatttataattgataaaattactgaatatacacgtaatatgctaaaaatataaagtaagaaaccataacaattttataggcaaatgaaaatatataaaaaatttgcaatttttgacaaaaaaaattggattctgccaaatttcaaggacctcgtttttctaacttttttttcgcacgttttttgtacattcacaaaattttttaaaattttgtatgttaaaaaaatttaaaatttcaaattatatttgatctaataaagtcagaacatcagaatgctctctctctctctctactctttacttacaacttttaattccttggtgctgagctgtcaaattgtcgggcttgaaaatggccaactcactgtgtgaattggtggcactccacacattaattggctaaaaagaaaaatatttaaatgatgaaattaacaaatatatatgcaaattgcttaattaagagcaaaagcacaaaaccacctgttcattttgctgctgcacattgacaaatttcaatgaaatttcggtttcgcgaatcaaattaagcgtgggcttgaaatagttggtggcgaattggtccatgccatttgcttgcgcgatataatcttctagttttttgacacgggctgacagattgttaaagcgattttccttaatttgaaaaaatattcatttaaaaaataaattcaaaaataaaatcgaatcatggaatatcaaaaacagaaattgtttttagtttttttttgcttggcaaaaatctaaaatctccataaaaatgataaatctgaatgcaacggataagaaaa

SEQ ID NO: 7040 - DNA, 1200 bp, Heterodera glycines
gggggggggtccgaaatatggatgaaaaaaaatcgataatcaaagtactcgtacattgtagtgataatgaaaaaaaatctcaaggcgctaatttgccttaattcaaacaattataaattttcaattaccatctcagcaaattgatcgcgcagtttttgcatttcctccgccgaaacaggcgccgctgtaaaaataataataattaatttcacataatttcttgaatttagcaaaatctgaccaattccactgccgtttctgctatctttcataatggcattattttccactttttcgtcggtgagactttgggccactttcatttcctttgtcgcaagttgtccaacggcggattgttcattaggagcaaattcttgaaacaaaaaaagcgttaaatttgtagctgcgcgattttaactcaaaaactgcttatttaaaatcataaagatatttattttccgaaaaatttattatctcgaaaatatcgcaaaaccatcccaatgccaatctaatcaaagaatgacattgttcggcatctttcaattatggccaaaactctttagttaaatgggaaattaccctcggcctcggctggtggcaaatgtgatttgattggctgtataaggcagatgatcagaaaggtaagaagaaagtatttttgcattgggtaattgaaatgatcttaagtaattgtgtttcgatattaattatcggaaaaaattgcttatttgaatgtggcaaattaggaaaaataattaactgatgaaatggactaatttatgtttctatattaattatgggaaaaactgcttttttgaatgtggcaaattcgaaaaaataattaactgaatttgcaatacccattgaggattaaaagggataaagaaaatgatgaaaggcaaataattgaagtaaaaaagatgcctaatacacaaaatagtgcaaaaatcaaaactttttaaatttatctatttgcctttgatgaactttttaatatagtagaggtgagggtcagtggcaactcgtagaaagcaggggtggagcgcgcacagaaaaatcccgcggccgcgaccgcgcaaaaaaaaatgccgcgaatcgcgtatcgcgcatcgcggccgcgcatttttttcctattttttaaactattttttacactttttaaattttttcttatataaaaattaattaaaattccgatgc

SEQ ID NO: 7041 - DNA, 3069 bp, Heterodera glycines
ttgcctattgtaatttgcctgtgtacgagttgcctatcgttcgagttgcctttttacgagttgccatgacaccagaggtgaaataaaaaacaaagtctaaatttttcaaaaactgatttcaaattaagatttgaaaggaatttgttaattagtgatgctcgagaccgaaagtttcaacagattcgagatcggaacttgaccccgagaatgagaccgaaaattccgggatcaagatccaaaaatccgagaccctagactttttgcaaaaaaatttctaattcgcttaaaaattaagcggtgccgtgaggcgtcgctgcatataattcttagaaatttgattcatttgttcaaaaatagggttggcaggttccgggtatttgggcaaaaagcgggtccatgtattgccggttctagaaaagccgggaccaggcttggatccaagtttttcaaccgggtcataaaaatcaaaaattaattttttttttttctttaattcgtttttttggacaacttattcatttttgggtcaaattttgaaaatttgtggaatcttggaagccaacggcgcttgtgggcaccgtcttgaagcatggacggcccaggtttcggttcgataggtatggcatgggagggggttggggtgcctatcagggatgggctttcgcgtgtcgctttcgcaaatttcgcttttttctgtaattttgcgtttcgcattttggcgcgaaacgcgaatataagctctaagaatgagagatgaaattaccattaaatttcaaaatttgacatataaattggttagttttcagtgaaaaactgtttaaaaatggtcaaagactttttgttgtttttctaaatttggtatagaattttacaagtttctgacttttttgtcggccaaatgctgattttgaaaatgttcagttgacagccttggttttaagctcatgctggtttttgctttatgattttaactattaaagttgtagaaataaatttcgcgtcgcaatttcgcgttttttggagtatcgcgtttcgcatttattttcattttgcattttttgctttgcaaatttcgcgtttcgcatttttttttttgatttggcccatcctggtgcccgtgctgggtcgttttgttaaatacgccattttatcgaatttttcgacaaaacatagcataactttgcttaaaagcaataaaattttacattattggtagcatttggtagccgagcttttcctctattagctttcaaattaaaaaaaaaattggtcaaatttagaaaaaagttgtatgaaaattagttgtatttctgccttaacttaatgttaaatttgataatttatttgaggtttcgcaagctaatagagaaaaaactctcggctatctaatggtaccaagaatgtaaataattgtctttaagcaaagttattccatggtttgtcgaaaaaagcgtggttagcttaaccacggttaaagacgtgaataatacgttttttggttaaaaataaaccgcggttaaataaaccacggttaaggcataaccgggagacgggaataaggccccagacatttgcgccccggcatttgcgccccaaatatttttgcgcctatgtccaaaatctggttcaatcttacattttttcaagcttagaggtcttaaacaacattaaatttaagaaaactttctttgagtttattaggaagaataattatgatgtttgaaggatttaattgttgaaatcatacggggttgaaaaatgtaagtttgaaaccgatttttgccttacaaattaggcgcaaatagttggggtgaaaatgtttgaggcgcaaatgtggggtaaccgaagcgacttagcatccctggtgcctacctccgtcgacgaccttttttcggctttcaacccactttttatgtgctttttttaaactttggagacatggtggaggggagtccggcgcggccgccgaggaaaattttgaaaatttgatttctggttttttaacagattttgttcaaaaatttaatatttttgggttttgagccaatttatttataataaaattgttcaaattttcaagcaatatatgttcgagttaaaattttttctttaccacattgtcaacaatttgacccagaccccctattcttactagtgtacttttgaaaccgaagctatcggaccgggtaccgggtatttgattttcaaaaacacgggtccggcgcagccgggaagttttccttgtaattttggcctatttattaatagaattgcaacaaattttaaatttcttggatctttaaacaaaatagaaaatttaggtaattttggagcggtagtgccgagcagggttggaacgcgatcgcgatccgctgcgttttttgcgcgattcgcgactacgcccgcggctttttgggactaaatttttataaagaaaatttattgaatatgattgtttaattattaaatgaatattcaaatttgtatgtaaaaagcaaaagaaatatggaaacaaggaaaactgattgaaaatttagatgaaaaggacaaaatttcaaaatgaaatttcacattgactcctattggcaccgcctgactaaaaaataaaaaaaatttttagtccgcttttatgttcgttggcgaatgtccaatttttagtttagttggtcaaatgctcagttagcgataagtcaggtagcaattttttggagatataaagttttatcaatatcactttttttgatcatacaatgagaaaaattttcgatttaaattaacacttgaacatcaaatattaaattttttttgggttcatttattttcaaataatgtccgtatttcgtgcaataacggacttcaaattgactcgcatctcgttgaattgactattgatgtcatctgttcctaatttgttcgacagtttgccgttaaatttgaggaaatctctttttattgcccagtcgaaattgagcaactgcctattgatcagtcgcttttcattggcatccattaaatgatgatcagtgccaataagccatagattgcaaaggtggtaatccgatctgaaaa

SEQ ID NO: 7042 - DNA, 1494 bp, Heterodera glycines
gacaagaaagacaaatcccgatttatgacacggcttcctccttcggccttccaatccgaccacctgtggacaagagtgttcattttgcttgaacaacccttccgggatcggagaaaaacaaccgggattcgcttccggccacaaattaggacaattaaaattcccatagaaatagcatagaatagatagatagagacaagatacagagaacgtgcggcaacaacatatgtaagaattttcacatagattttcaatatacaaaaattaaatgacgtcaccactaatctaattatatttcgaattaacgaaatttaatcaatttcataaattaactgaaatattcatatttttatattattatctgtacatagaatgaatttaaaaagattttattattatgctgaatcagtatccaagtgaacaattaaaattattttaaatcttaaatatataagcaaaaattaaaagaaagttaaaaaacatttaattgatgaaaatccatcataaaagattaaataaactatcagatttgatttcggaaacattcatattatactttttctgaattgggtaataaactttttaattatctaattttagcctcaataatattttgttgagaaatttacttgatattgaaaatgggattgccaataagcgtcgccgaaaaaatgataaaattttaattttgagtcactagttgattgattttaaaataaattttaaattaaaatagaaaataattttcacctctttttgaatttttaggttcattttagtaaaaaattttttaagtctgataatttcataatattattttatattgaataccaatcgactctaattaatgctgaacccaatttgattgttggtgagctgtgcgtgccaatgagtgtcagtggtaaagctatgcccaaaaaacactcccattaaaagaccaaaatttttaaaaaatatattccttaaagtggaaaattaaaaaaaaaacacaaaatgtcaaaaaattttaatgttttaatttttttacataaattttatttgaaaatttatttctctcagtgattggaaatggcactttaccgttgccagcatttcattgtttttgtggagttgaacagaggtgaacagccgccgttttcattggcactgttgttgctgttgtcctgctgctgtttgatggaggcggtggttggaaaatggagcatggatacgcagaaattatttttttttttatcacaaaattctattaaaaaatggaaaatttttttagagactttgtcatttttatgcaataggcaatgggtgaaaaaatttctttaggatttcttaagaaatttaaataaattctcaaaaaaaaattgtgaaactttgaattgaatttagaagattttattttatttattttgagtataaaaaaaactaaaaatacttaaaattgcgaaatataaaaaaaattgcaatattatttataactttttaaatttggtgccttga

SEQ ID NO: 7043 - DNA, 2020 bp, Heterodera glycines
  unsure (1)..(2020): unsure at all n locations
ggggggggggggggggggggggggggggggtttttttttttttttttttttttaatgttttttttttggaagcatactccccttttcttaatttggattttaaaaaaattattattaaaaattggtttttttttagacattttttgtaaattttattccattgtattcggaggatcattttatttaactttctcgcccaacatggttcatttttatcgttcacaggatcgtgccttttccgcactttttttaaantttatttcgtcccattgtacgatgttattannaaattaatatataaatgcanntttctaanttatttnaattatgtgtattttctcntcgttcccaagaaaggtctcgcnnttaattanaatgattaaaaagtaaatagtagaaataaaatttatttcattatgcncaattcaactatttaaggtaaatatataaattaatttttttattcatactagttagtttgctttttataaaccttttccgtgccgaacgtttattttatgttgttaatattttaaacgtttatataatttattaatttaagaacatacacattcattaaaaaactattaagattttgttgcttatttttctagatttggaatatcgctattttctttatttttaaacgcatgctttctgcgctacaataagccttttcctacatcatcgcttttttaacttttggtgtaattttttcattattttttatttcttttatcttttatctttttttcatttctcatattttcgttatttttgctgattttttatttattttttgtttttttcaataaattaatttaattttgtagaatttttttatcagcttcaaaagccttacctattattctttgaccgtctcaatctgatctggtgactttatttttgttaaacaatttaaaatttattaaattcatttctcttttattttccaattttttcattatttccttaaagttgctatacaattaattatgaatgaattatttaattaatgttctgcttaaaatggcatttggattctatttttgatttattttacataaattatatttaagcacatattattttgaattgttttatttttcgcgtttttttgggtatttcatatttttcaatagaaatataaactaagttggaattattaattctattgattatgatagttttgtttatccccctcgttgtttgatctgctcccgggttgtcgctgttcactcttttgggcattgtttttattaattatgatcatttttatttataatatgtaaaaatgtttttttctaagtatcaaattgactcatgaatagaaatttaaataattaaccaagtgcatacaatgattaaaatattcatatgcttaaaaaagtataaaaatttttaacaagccctgtcaaatttatattatcgttgtatctacaacgttcagcattaattgtaaatcaagcatttttaattatataacattgcttccgtgggttttccgggtctgatcacgaatctgacattagtttgacaaaccctaatacttaatccgaactcgaacaaaaaatcgaaaatttccgttttttcatatttaggtcagatattcacatttaattgaaataaatgttagtgattagcaaccctaaaaattcccgcgaacaatttatacaaaatataatcatttacaaaaaaattttcaagccaatgggtgggttcccttaggtttaataaaattaaaaaacatcgatttgcaattttatgcccttgttcagcaaatattaattggatatttttaattcaagcttccccaaactttttaaatttttgtgcttaatgagttatttcgctgatataaatgctaccaaaattactaattttcaaaaaatgttcccggcggcacctatcgacgacaccgccgaccacataactttttttcttaaacaatttgctcaaaatcgtaaaaattggtcattttttggtgaaaatctgttaacaaatagtgtaattgcccaaa

SEQ ID NO: 7044 - DNA, 2033 bp, Heterodera glycines
aagaaatgcacagcattattatcaaagttaccgtttttgaattattgtgaaaaccataggggggccaaaagggatggaattttgaggacataaaaacaattatgttttaacttttgttaaaatattcttattttgatggtgttaatttatttatacttttgatacagttaattggcttatttaataatggaccttcattgaatagtctttcatcttccgacgcattacattatatgggttaattaattaattaatagttattgaattgaaattgaaattacatattaataaatattattcttcttaatttatattttacaaaatagagttttcatttaattttattttgctataattaattaagatatgttttcactttctaaatatttcactagcaattcttacaataatattatcatacatattaaaattagagatcggaccggtcggttttttttcggttttttcggtatttttcggtttcggttttttaaccgaaaccgaccgaccgaaaattttttgagtttttcggttttttcggtttttataccgaaaccgaccgaccgaaataatcaaaaaaccgaaaaaaccgaccgacttttttcaaaaaccgaaaaaaaaccgaatcaaattggagcgatataacctgctaataataataaatttattgctttttttgtgctctttttcattttgatgaattttttgtaaaatattttctgctattttgaaaaaaattattaacaaaaatgcaataaaaacgaaaaatacacccctgagaaatggaaaattttatcaaaaattcatattcaaaatttatttatttatttacttgactgcatttttgatttttaaaatatttatctcatttccatttttagcacctattttgggggtttataatagggttgctccccgaccccgagacccctacctccgactttttatcccccgaccccccgacactaactcggggaattggggactcttgaaaatttttaaatttgtacaattttcttaataaaattaattaaaaattcctaaaattccaaaaactttcggcggcgcctatcggcaccgccggcctcccaaaactccaaattttttttaccaataattggctcgaaaaccacaaaatttgacaatttttggacaaaattctcttaacaaattatactcattttcaaaaaatttcccggcggcgcctatcggcaccgccggacacctccctgcccaccccaagttttcaaaaagtttttgaaaagcgcaccactaaaattgtcaaattttttaggttaaaattgagcctcggaattgatttctgaaaatttttggggcctgggatgccttgtataaaatgccaaattggacgcacttttactggctggcgccaacgaatgaattttaatcagatgattaaagtgaaaaaaggaagatttcgagcatataagagaaaatttggtctttttttgttaaaaaagtttgtcgatcactacccgatcggggtccccgacccccgacattttgccccccccccccccccccaggggtcggggaggaaccctagtttataagaaaaatcaggaagatacctaacgttttttggatgcctctttcatatattttcccaacttttagaccattgatagacctacaaaaactctacaaatttactcataggtgatcttatcccttttactatatgatagaattggtctattgttctgtttgctaacatatatataataagatatatattcaatcctatatgatataccgaaaaatgatcttccgtttttttcgcgtcaaggaattgctgtgtttggattattaatcagtgattgcgaaatgaatgatccgatcgcaaataatgtcaaggtcatgattgacattaattttagttgcgatgtttatttgtgcacgttataacgaataactgctaatatatgatttattaagttggaaaaattttccaaatttttgtgagttatgggagaatttcatttacagttaaatcacatgattgatttgta

SEQ ID NO: 7045 - DNA, 1593 bp, Heterodera glycines
  unsure (1)..(1593): unsure at all n locations
gggactcgatgaggatcccgacntgggatccctccgaccccagttgtccggtctctaatccgaaatttgaatccctcggcaaataattaaatttaaattgtacattcaaccgacgaatcacatcaatgacaagtaattatattatgaaaattatgttccgaacacagtaatttgttgataaaattgaggcattgacaattttgttgaaattacaaacgaaaaatgctccggtaaaaaataatggaaatctttgcgccaattcgtgtcttagtttttgattaaaaatcaacaaggttgatttaattatattcagaaaataaatttaagtttgaaggaaaaaaagcatttgcactgtagagaaaatgacattttctgactttttttatgagagttcggatccgctcaatgacaatagaattttttaaattaaaaaaaattaacatagaagtcgatgcagaattctaattatatcaaaatttaatgcaaattttatgtttagaaaaaaatatttgtagagaagtaaaagtcgcttttttttacaaaatgcgctagcaccacgatttatttataggacagtattgtatatagaatattcttttaagaatatgaggaatttcgaatctataattaattgctttctttatcacctaactataaaatgagagatattcaaatatatttcacatacaaaatattggcaaaatacatattgtgaatattgcttttgtatgatttttggattttttaatccgatccctagtgatcaccaaaatttccggaatgtttcaatttgagtttggcctcttcgcatgggtccagcacaaataaattttccaattctatcggatgcttctccgccatgggatcattgatcaaatgcttgaactgccacagcagagggccaagctcaatttcggtgatccaatgctttggttcgccattgtaacgggcgtcgattttgccataaaattgtcctatcttctttgtggtcatccaaaaatgctttaagatgcacccattatcataaaactttgttttatactctaatgatgcatcacaaattgctaccaagtctgaaaaaatactaacatatttactcatcagtgttttcttctaaataaattcttctttatattaattttgttttgtcattcaattaattatttccttatttattagttcgtcaaccaaatccaacggtgctatgtcgttatataaaagccatcaaaaaaggcgttatataaaaaaccagcaaatgaaaatttccaacaaaaaactgtccataacttttgtctaagtaaactaaatttaacattgataattattcgatagccctaacatttctctattcgcttatctaaatttcaaaaaatttggccaagcttgagcaaagttatgccaagagtacccaaggaacctggttttcaaacatttttggccataacttttttgaatcataatgaaattttttttaattttgaaggctaatagaggaaatatagggctatcgatgtatcaagatactttattttgttcaatctaagaagtgttttgatcagaatatttgatcatcaaaattattttatgtcaaat

SEQ ID NO: 7046 - DNA, 1176 bp, Heterodera glycines
cccattgatttgtgagtcatgtccaagggtcgttctcatacacaaaaaacggcaaaaggggtgaaaaggaaaataattgcaattctgaaaaatatttatttacgaatttcataaaattaaaaaaaaaattttcccgacagcgcctttccctaaaagcttttacgacaaaagggcgagggagtgaactttggacatgcaaaaattatatgcttttttcgttataatttgttttaaggaacattcaaagcgcgaggaaacattttgaaaaattggattgcaagtgagtaagagagactaaaatcattttggttttaaatctaactaagttactaaagtctgtaatctgttgttttccataaattattgggatggttaataagtcggttaatttctttatcttgtgttttaacacataccaaaaaaacaaagaatgccttagaatagagcgtataaatgaccaaaaaattggcgtttaggtcagaaatcaaacaaattaataaatgatgagaaaacagacttattgtccatcccaatactaactaacctaactgcaattctttatagttgtactatagcaaattttatcaaaaagtaacataattcgtcatttaaatttacacatttttataggttggtttaaatattattgacttattgagagatttttgatttaaaaaataaaacaataattagttatatatgggagaagataaatttaacagaaaatccaaaataaattatttttctatcagggtcaatacttatgaaccaacctattactagtagatttcatcaaatatagaattgtttgtttttaatttaaaaaatttccagtctaagattttaattgtattccaaagcattttatcattgttatgaaatattttgagtaggaatttttcattaccattaaatcgttggtataaattcggagtctgtatgtttcagtttctttggtttggtttgcaaagatttcccaaaaattaagtaatggttcttgaaaaatttgctactacctttcttatttcataacatttttgacattcagtccttaattcagtctgctcttaaactttaaaaatttaaccatttaaattttaaaaacagcggatttttgaaaatgattttctctaatcggtcggatcagttcgctgatacgggagctgatccggaaag

SEQ ID NO: 7047 - DNA, 3642 bp, Heterodera glycines
  unsure (1)..(3642): unsure at all n locations
agggttgcaggtgtgcgctttagcgccccaaagattttgagagtcgnatgaggccaaattttcgaaatctggctttgagacctgtgattttttgggtgaggctttttgttattttntaggccaaatcctcaaagatttcatttaaaaatttttttccaagtaaaaatgactaataatttcctttccattttttaaaatgtagattatgattaaactatttaaaaatacaataactgcaattgttatggttagttctatatttgttgtcacgtagttttttttcattgcatgccaagttgccatcgctgataatcagtgcgtattttattagtgtttcgttacaacattagactaaaaagcttcataatattaaacaatatgactgggaattcaagtcgctaaaaaccaaaaaggcttttctttgcaaattttcaaaagaaatatcccccaaaatttgagtttaattgtaggaagcttttggagaattaattatacgaattttaacgctattctttttttatgagaattaaaatgaataagaaacaatgtatgcgtttttttttggggggggggtgggaggattaggcttgctgcatcggatgaatgttgaaggagattctgcattttctcgcgatattttctgcgcttgcaaaaggcattatgtgttggtttaaagaatccttttgtccctttccaacgattctttgtgccacactttcatcacttttcgttgaaataatgccaggggtgaaaatgactgatgccgaagtcgcccatctttgagccgaaacgacaacattagtctgcaaatgaactgttgaactgtccagtcttagaaagtccccgcgccttggtcgatgaaggtcgaaagtctggtcgggatattcaatctaaaaaaagagaattggtgctatgtcgttatataaaagccatgaaaaagggcgttatacatttaaaaaaaacccatcaaaacctcgatttattaaaaattttattgactgaaagaaaccttaaacttgttcacattatataaaacaaaaagaaacttttgggtgttttaagtattttcatctttccctttttaacgctaattgtaaaattttgtgttcctcttcagttttttttgtgtgggttttcgtagtggttttttgaatctgattcttgttttacctatgtagtataaccagtctaaatgggaatagcttcgaatattttaagggacctgaattcggaaccgatttaactcctcgtccgttacattgcaaagcaaaattcggataaatatccccgttggtaagccagcaacgaatcgaatagtttcattgtttctaaattctctgctaggctcgagtaccttaagatttaattgttgctaattcacaatgaataggaaatactctagcagttttagcatcattttccttctcaattgttttatcctccggcccaacagccaaaaaagggcataaaaacggcgaggaatcgcattggtgtaacttttcatgatcaaattcctttaaaaaaatatactcgaaaaatatcaagagctcttacgagaattttgggaacaatctcaggccaagaacgacgcaaataacggtaatgtttcagtgcataagagggaataagcgaacagagcactgaccgatgggatgcagcgttaaggacgaggatgagtcgggccaaatcttaagtttatttaataatggcaaaagcaaatggcacggacgagagaaggctgaaatgacaatgtcactccaatgcataaaaattataggaatcgttctttaatttacaatccttacaaaagtcatcgtcgatactttgttcaggggtgtcaaaaatgggatgaacatccaacaaatcattcaccaaaggctgaactaatgaagaatggttctgcccgataccactgagacaacttaaacattttcatttttggcataattagtgcctaccaattaacccaaaaatagaaaatttgtccatgggaaaacgacgcagagaatgcagcaatttcttaagacattgggatacacagttggaatctgccaaattggactttgccaacaaagtgtgaagtgccattcgattgtcagcagttgcatcctaaaaatgcaaaagatgaaaagcaaagggatcttgcaaaaaagaaaaataaattctgttacatcgagaacggtcagaatagtgtccaattgatcgcggtagagaaggccatgggaaacgagcggagtcagtgcgcgaatggcgtcgagacggatctaaattcctttacacgataatttgcaaagaaaaagttattttgatttttgtccaggcttgggttcagggttcaaaccgggcctactaaagtaaaaaaaagtcccagtcgtattattgaacacttaaattctaacattataaaaccgaaaattaaccactcagaaaaaatttcacctgttggatttcatcgttgaacatatcggccaaatgatcgatgcacgcactcgcaaaaacaggtcggttcctagcaagttttcccagtgagtaaacagctgcctgacgaaccgctaaagaacatttggtaggatggacaggtctcttttcagttaaaaatacccataaattcgtcttcgagtgcggtaacgaaggcgccacaagagccggtagggatcaaagattggctttcgtcctccagcttttcgatcggcatgtcctcacccatttttttgccagtgctccatcctccgatataaccaacaccagcagataacgcatttttcgtatttctgacattagtgttcaacatctgtgattggaaaataacaatttataaatgactgtacgttacagtcatattccgcatcaatttcttgtccaatgtttggtcgaggaacgactcagagacgttttcaaaaaaccccaagagattggcagcttgagcgcgaacttttacttccaaatcattcattgcatcgcaaacgattgagaaagcatcgtcatgaagacgaattttgaaacccttcgatgccatgactttcctaaataaatagaaatggatttttttgtttttgtcggtattatgcgactcaaaatattttaattatgatagaaggcataaaatattattcgggcacattataatgacatgaattttttccattctctattacatactcttcagggtagacaagggcaaattttgtcaaaatacgaagcgcaacgacacgaacattctgctcactgtttttgcataagtttgccaaatgagggtaatactccaagctcaagcattccttctccaacattttcattgaagcatcttcgcacatttgctccaacgcgcttatagcaaaagttcgaattcgcctgtcgaaatggcatgtcaaacgaaataactcggactcaagctcaacaaaatttaagttcgaagggttgtaacaattatttgatttaaaatcctttaagtcaaatttataatccaattgcatcattgtaaataatctaaaaaagaatatgtatgtacataataataacaattacccggtactttacggttatctgtgtgcaggttttcaaaaaaatttttttgaaaataaatttgttttaagggttttttggggttgggaaaaccgattctggcatctattttgacccatt

SEQ ID NO: 7048 - DNA, 1281 bp, Heterodera glycines
  unsure (1)..(1281): unsure at all n locations
cctaaataaatagaaatggattttttttttgtcggtattatgtcgactcaaaatattttaattatgatagaaggcataaaatattattcgggcacattataatgacatgaattttttccattctctattacatactcttcagggtagacaagggcaaattttgtcaaaatacgaagcgcaacgacacgaacattctgctcactgtttttgcataagtttgccaaatgagggtaatactccaagctcaagcattccttctccaacattttcattgaagcatcttcgcacatttgctccaacgcgcttatagcaaaagtccgaattcgcctgtcgaaatggcatgtcaaacgaaataactctgactcaagctcaacaaaatttaagttcgaagggttgtaacaattatttgatttaaaatcctttaaatcaaatttataatccatttgcatctttgtaaataatctaaaaaagaatatgtacgtaataataacaatatccttttataatgcctaactttgcctattttggagtttttgtgcctaacttgcgacacccaagccggcgttttacaacccggtatacctaagcaataatgatgaggattgtttaggtcccaagcagataacctcatgctgttttaaacaagaaataaaacgattttaaaatttaattaaactttattcaaaaaaagtttctatcctaattgaatttttttgtgttttattatgctttgggtctgtaatcataataacattttttaagtacctaatgatctcatttgttcgagttcgattgaaaacattcatatttctagtcatttcaacgtggttcttctttatttgcttttatttttacacttatcctattggaaatttggaatataacaaattcaaggaggtatgtttatgtctcgatcaaagtcccaaattaaacattcttggtatcattcgatagtccttaaggttttctattttctatgcaaaattcaagaaatttttttatcatgtttcaaaaaagatggccaaaattgtaaaaacaatttttcatcaacaattttttcaaatatgatcaaattttttgaattttacaaggaaattgagaagcttagggctatcgagtgacacgaagaatgtttaggtaatttgacaagatttatgacgaattttttggcttagtacgaatgcgagattgctttttatcatattatcatttccccattttaaaattttgttaaccgaaaacggatctcacganattatactggctcgtagtggaagaaaa

SEQ ID NO: 7049 - DNA, 1425 bp, Heterodera glycines
gagaaggacgaaaagccaaatgatcgcagaagaagcaaaagaattcggacggagcagcgactgaaagcgaccgaaaggaaagacgacgagggacaaagcgaagcgaacggagcggagacagcgcaagggacgacgggcgcagagggacaaacggtggcgaagccattgagcgaagtgaatctgaacgtgggccaacggaggacgccgaagatggacgaacagcagcagcaagacacccttctgatggcacctcataactgacaaatgcgcacggacaatccggccgcgcactttttgtttttttgttcgttataatttccctttcacattttgtttttttcatatttatttgttttttgttagttataaactcttcgttttgagctccgttccatgatcattttcgtcaactgttttgtttttattttatatctctctctctctgctgcttccttttctctcattttgtcattgtctctctttctcttttcccattcgaaaagcgttaatgaaattcatcgcgctgatttccgtcgcgtgacgcctaacagctctgctgctcatcattttctttcctctttcggcacgattgttcggccgagggcgaattctgtggagataagcgccgctttttgctttcttcagcctagcgctttttcatgctcacccccattcgtccgtgttgcttcctctcttaggtcggctgaatatgggaggaatgaaaagggaaagggccgtcccatcggttggccattccccgccctcgtggaactcaatctcatccaaacaaccttttgatgagcccgggggcgtaagaagtgtcaaatgggaaaagtgatgaaaatgcaagccccctcgtccacttcagtcccaccggcactttgctaattcgtctcatttacttttgcttattaatccacgtcgcttcgttttgattgattgttcctcccgaaaaagcatcattttcgccattggcatttcccatgctggcactttttgctccctaatcgaccccctcccaaatgcgtgtgtttctatttctctgccaactttcgcgcttctcccccttcccttacgttctcttcgtccatttttaatgcctcccaaaattactgctttaacagaaagtggtaatgacctttgccttgcccttttgggcatttgactggctaaatgccattgctcttttaattggtctgccataggaagttgcctgagggcacaactttccgccgatttctctgtgccggccgttgcccccccccctccccgggggatgcctttttctctctttttttaaacaatccctcgggcaaagacgggcgaatttagagaaatgtaaagcaatgaatgaatatgtgcgtgtgcgcgtgaaacattgggcaacataagcagagctctcgccgtgtgggggggggggggggg

SEQ ID NO: 7050 - DNA, 3638 bp, Heterodera glycines
cccctcccgccccctcccctctctatgccccctttttctccccctctgccgctcggttctcaacaccccttcgccccccgccgcttctcacgacggaccgtccacccattcatttggacgctccttccattaatcatccatccatcgtcctaccttcattccttccctccggcccaacctcgcgtcccattccttctcctccctttctcggccaaaatgatcccacggttacgctcccagaaagcctcgcgtcatacccacgcgcaagtccaagcccaacgcctgcatcaattgctgatcagcgtgaacagtcagccgataatgacaggtcaaccagcaacagttgaagaagcattagtagaccaacagcagcagaaggaccgagaggaggagaagaaaacggaggaggaaaagaaagagaaaggcggggacagaaatcagacgaaggttaggtgaggggaaatggaaaaaggaaggaagagtggacaaaagaggaaataaggacgaacaaacaaacaaactaaatgaaggggaagtgcgcttccctgcctgaaactgtgcttttcccaggaccattttccaaacggccacctcagcccgggttcgcctctttccccgacggacatttcgcgtgccttcgatcgtcgaacttcggcgcccgtccaaattcgcatgaatgtcggcggacgaagtgcgcaactgaccctggagaaggtcagcacttcggaccttaaaagaaaggaatgaatggtgccatggctaaagattatccccacaaaacaccgcaaaattcagtcccataaactttttggctttccaaattttaaactctccaattcccatcccaatcaatggtcggatgacctcaaaaagcactttccccacagatccgtcagcgtgccgaccgcagtcgattgtcccaattcgcggaaaaggaccacgcccagcgcgtgttggagtgcgacgcgtttctcaacggcgaatattacttcgagcgttccgccacagttttcgagaatattttggattattacgtgaccggcaaattgcaccggcccatggaagtgaacattttcactttttattcttccgtccggaccattaatcaatctgttcaaaagatatgcccaattcggtggcgtgatgaattggaattttggcgaattccgttgacggcactggcggagtgctgccggtcggatgccttcctgtccaaacggtcgctggcatcgccggcgcttttatctatggacaatgttggtgaacaccaaacgaatggttttgatcagtcagccgattttacccgatcggcttgctgatcagctgctgaacccatccaatgatgtgctgatcagtctgcccatctgatttgtgctgatcaattaccagacgattccgtcctgcttttgctcattcatccctcccccttttgaaggtgtacgtcgagtccacttgccctcccgcagaattcgaggcaattcttcccggcattcgtcctccccccccccctcatcttcatctttcccaatttgccagggcgtcgctttttcccgcgtccgtttaattctgtggactttcctggagaatccgcgctcttccgctgctgcgaaggttctttccgtggtgtccgcttcgttcgtgcttctttcattggccggtctcattctctcttcgatgaaagaatttcaaataaacgatggaatgatgagccctgttttacctcttcaattggccgagatttggtgaatttttatagttttttgatctgatcagtctcctccctttctctcctcttttcatccgatcattttccacttttcgtctgatcacttcccctcttcattgatcactcttccacttttgtttgatcactgtcccaccacgctctcttccctctctcctctttttatcagatcattatcccatttttcgtctgatcaattcccgttcagttgcatgcttttcttcactctcgaataccttctccgcttcgctgttatcccccacaaatggaggttcgttcttcgatcactttggattttctcttttcaatttcttttagtttcgttaaacagcctctgaatataattgaccttctcaccattgtcccttttcttctcgaagcttgccttccccttctcggggttaatgacatcgaattgcgcaactttcgaggctttcttcttttcttctataatttgcttaattaactttttaattgatcatttaggtgctcttattgtcattcgagtgcttaggtgggttaattaactcattgaatgatcaattagcaagcatttaacactaattgccctaaggttggcccgagttgcacgcatattcaagcttgcccggtacagcattggcctgagggcgtttggcgaaacaatgcgaaagtcggttcctttttccctcgtaaaatcaccttaccgtaccaccaaggtcggctgctgagttgtcaatgcttggcatgttcctccttacggtaccttttgtcctactgtcacttttggcatttcccctcagggcataatgcttttctccaccgccatttacttcttcgaacgcgacgaacccaactcaaaattttactctatcccttctgcttggtggtggtgtgttgctacagtaagaaaaggcgaattcgatgagtaatccctccgttccctttcagatgactactgtcgggtcagtcaattttttattcaaaagttttttggccccaatgccattcaattcaaagttacggcgatttggtgccggtgactacgggcgggaaggtcagtcccattgtgccaaaatgtgtttttgggtccgtgccaatgcttttgccattgaaaggtcgtcgctgccattgcctcagtgtgtggcatcatcgttttggcctttcccatttcaatgatcatcgacaaatttgccgagtccacaggccatggccaacgcgtttttgacgaaacggtggcacagggcgaagttccgttggaggccaacaaaagcaatgttttgttggggtcgccgacggggcgaggaatgagcaggaggaggaccaaatcgaggcgatatttgttctaagccggccaaaaggaagaaaggaaaggataaacgggtcgaatgaaaagccaacggacgaaaagccaaagggaagcgaaacgaaaagccaaagggaagcgaaacgaaaagccaaaggaaagccaaaggaaagcgaaaggaaaagccaaaggaaagcgaaaggaaaagccaaaggaaagccaaaggaaaagccaaaggaaagccaaaggaaagcgaaacgaaaagccaaaggaaaacgaacgaaaagccaaaggaaagcgaaacgaaaagccaaaggaaaagccaaaggaaaagcgaaacgaaaagccaaaggaaagcgaaaggaaaaggcaaaggaaagcgaaacgaaaagccaaaggaaagcgaaaggaaaagccaaaggaaagcgaaactaaaagccaaaggaaagcgaaaggaaaagccaaaggaaaagccaaaggaaaagcgaaacgaaaagccaaaggaaagcgaaaggaaagcgaaacgaaaagccaaaggaaagcgaacgaaaagccaaaggaaaagcgaaacgaaaagccaaaggaaagcgaaacgaaaagccaaaggaa

SEQ ID NO: 7051 - DNA, 1850 bp, Heterodera glycines
  unsure (1)..(1850): unsure at all n locations
cccccccccctcccaccctcattatcagtgccgatgtttacccttctcgtgccattctcctcctccccctaatttgattttccctctttaaataaatttctctctgtttcccttaaactttcgcttctctccacttgtccacctcagcccaatccggcaacattttttgcttgtaaatttgcttctttttcttaaaatgtgttgggagcaaaagccgagtaattaaaattaattgctcagtcagtcaaagaatcccttttcaatgcgtttgttcagtgagttgtccgtcacgtgaagaactgttccgtctgaacatcggcggtcgttcgttcagtttccgttgtgacaccgttctcgaggcacgcgagccgaactcatttttggtcagcaaagagaacagcacaaaacatggattaattagcccaaactaattccattcttctttaaggcaagattagtccgattggaccattcgaacagacttttgctgactgatggctttctggcaaaaacaaacgaatattatttggagagaaatgttcgggtcgcggagcatgtggtcgattacttcctcacaggcgagaaaaaggacaaattatgcaaaaattgtgcatttaaagggcaaaggttggatgagtcaccgaattcaaattaattaggaaaattgcataagccaatcgatgtgtgcccccagcgattcagcgaggaattgctcttctggcgactgacccgggtggaggtgaggccattcttctccaaaatgtactttctcccccgttcagttggccccgtgctgctccgttctggcggacagcaaccgactgaagaagggcatcgaagtggagagacagctcgaccaagtcgtggggaaaggtcggaacagcgacacgacgaanccttctcaggtgaagtgctgcccggagatgcgcaaagtgatttggcacatgatggaagcgccgagttcgtccatggtgtccaagctgttcaccattgtctccgtccttttcatcctcgcttccgttgttggacttgtgcttgggtccatgccagagtttcaggcggacaatcgcttctccgaaaattaccatgccttgttgacagctcgcaagggcttcggacaatcacagcgcccgcaggaaaatgaaaatggcacgaaaatgccaagcgaagtgaacggaacggcagtgccaagtcacaaagtgatggggcgggggggatatttgtggaggggtcgactcattctctgatcagtttgtgtatcggcccacggacaatccgcagccgtggctcattctgctcgaatactgctgcatcggctggttcactttcgagttcatcctccggtctttctgcttttgcttttcccattcttctcccttttccttcagttttcttgtcgctccccgccgaatgaatttccttcgccagccgatgaatctgatcgatctcttcacggtccttcccgttttctgtgaagccgctctgtccacgttcggagtgaacgcggaacggcttaaagatttggcaggtcggtcggtggtcaatggcattccgtcccacggcattccttacctaaggggccatgttggtcatccgtgtgctacgagttctgaggtgacagactttccgcgcagtcctccatttgccgccccccctattagaatggcacgcgtgttcaaactcgcccgctactccaccggtcttcaggttcccccttccccccccccccctcctcatccgtcggattttccctcctccctccttttcaaggtgttcggcatgactttgcgcaattcgttgcgcgaactttgcatgctttcgatgttccttttgtgcggcaccggtgttct

SEQ ID NO: 7052 - DNA, 4689 bp, Heterodera glycines
ttaattttaaaattaagatgaagtaatttttttaccaaattttccgtcagaacctatcaatagctgatcctcaaactaattttttcaaaaaataatttgaaaatttaggaaatagtatttttgcttatctatcagcaaccctgttcaaaaatcggcaccactgacccctcatactgtatttttgaaaaaaaaaagttcgaccaaaaccagcacccaaaagtcatattaggtaagtctcgtgtacattcttgaaaaattttgcctcaaaatttccaaaaaatttttcggcggcttttagcagcaacaaacccctcatactctaaaattctcaaaaaaaaaaaaagttttctcaccacttggcctgtaactgtaagattttgctgctgttcgcccagttgcgcaattgtttgattttcctgttaagtaaaataatattattaaaaatatgatagttacaaaaaaaaaaattatttttataaaaattataaaaaagtttttcaaaatttattaaacaaataacaaacttggtcagtaaaattccattcctcgaaacctaaaaaattaaagattaataaattttttaaattaaaaataagatttaaaaaattattttgccccttagaagctttaaacagtaagatatctatttttccacctttttggtgacatttgccaccattttttgaagattttgtcatcattattttaaataccaccatcatgtcacctacatttgtgttttgttattttttagattttttgtaaggagggtgaaaagagaaaatttttgatggcccacagtaaaagtcagtattagctccatctggacccaaaaaccaagacgtaaatagaatcatataacaaaatatctgaagcagaaagaaattttatgaaaaaaatacgcctttaaccaagaattagtaatctaaaaacttctataagctttggtttgaaaccaagaatgtaggtaggcattgaccaagtacgaaaaacgttatagcctaagaaactgaggatagtcattgattggacgcgtaaactgcagtagagccaagaattttgctgtcccgacccaaatcccgccatttttctcctctgaacatcccgggaacagagtgggggcataaaatgcctacaaagtcaaaattcggtaactcaagaccgaaatgaaattcagaaaaacaagggcgctactgtaagtgggcctttttgaaacaaaaaacaagcatacaacatacataccgtcccgcacttcttcccaaatggatgagacaaaaagagagaacccttttattgatcgcattaaataaattagatggaaattaagaattgcggatcaaaaggcctcaagaatgacgaaaacgggtcagaagcgtccgtcgtcttcggagatcggcgtcatcttcttcggttctcaggccgccttcgtgtacacgcgcttggccttcaccgagccggcttccatcgtctggaaaagacgaaatcatcaatggaaaaaaggggtccccaagttgatcacgtacaatgacgagtttgccgctttcatcgatgtagcgctcgtagtagctgtccttctcgtcgtcctgaaaagggggtgaaattagaagatgtgcaatccaaactgtgcacaccaccgccacacccaccttgagcttggactgcttctcggtcagcttgccgttttcgtaggcgaagatggtctgaaaaagggacagaatgtttagccaacagtctcaacaatcaccaccaccacacacaccttcaccgtgcgtccatcggccgtcttcacctcgaactccttgttcaggtcgaactcgcagttccaggtggtgaacgtcgacgtggacgtcatcttccagtgctcgccggcgttggacacttcgaattccagcaccggtttgacacagccggcggccttgcgggtgagaaagttgacgccgacctgtgaaaaagaaaaagtgtgggaaatgaatatgacgaaatttttggggagaatcccggaagccagtcagcacacctccttcatgaagtcgtcaaagttctccgacgactccaaattccatttgccgacaaatttctcggacatgttcaggagagaaatgtcggtgtgaagtttgtgaagttggttgaagttaagaattttggcgaattgagctaaacaaaatgtggaaatgcgtgtgtgagcttacaattagtgcaaaaaattgacaggatgaaatttgatgaaaaacaatcttatggaatgaaatcccggaatgaatggaaaggaagcaattctaatcattccggtgttttaaacaaaaaacagaaatcccacatatttattattagcactcgatggcagctttttctgagatgggaaaggggagtgtaatagggaaaagtgattgattgcaaaaaacaaatataaaacaatttgtgggaagagcggaccacaacagcagaaaagtggagagaatgaaatgaagtggaggggaggaagggggggggacgactgatttgtgaggacagcgaagtaggtatgtgatgaaaaaaggatgtgggaataaataaaatgatgagaacggaggagcggggaagggagagaagggaagctgtttgttgtcggatgaaattgacgaatgaacgaaatgagtggaataagtgcacttaaatggggtccaggcatggctgaggggagggggaaggggcgtgccatatgcaaaacaacacacacaaaaacgaaaacggacggacacggaacagagagagagtgggaatagtgaagagagacagagagagaaacgaggagataatgagagaaagataaggaaaaacagcaggaggaaagagagagagagaataaggaaaagagagtggaaaggagagataaggaaagtgagagagataagaaaaaagagtgagaaataaaatgggagagagaaataagaaaagagaatggaagagagaaataggaaaatagagtggaaaagagagaaagaaagaaagaaaagaaagtggaagagaaagaaataaagaaaagagagtggtagatagagagaaagagagataaggaaatgaaatgataaatgggattaattttttggtgggatgggtgcgtccatttaatgttttatgtcttacctacatataatatgtacgaatgtttgtcacttttggttgattatgtcatttttgagtgattagtgtgtgatgggtggtggacaaaggccaaagaacggcacaaaggtgaagggatgacctaatgaccagctcaaaaaagaagcgaaaaccatttgaaatttgaacgtttctaaccaattttgtgaaattcttcttaaattttggcatttttttctgttcgggctcgtttcggcctccatgggttcgaaattcagcccccactcaatgctgtaacagatagaaaatttcccgcatctccgaagccaagattgggaccaaaactattggtaatactatgtatagaatgtacacccagtcccgcccccatttttcgagattttttttttaattcccaaaagtcattaaaacattttccgagggttttcggggtcgctgatcacgtatcatccatccattttgacaaactccgaactcggtccgaattcgcacagaaagtgaaattttaaaatttcgcatttaaaatggtttaataatttttaattgaaatatttcggagttggtcgaaatggatgctggattcgttatcagcgaccttaaaaacactcggaaatatttttcgacttaaaaaaaaaatttttttcaaaaaaacggggggggggggtatttcaaaaagttatgtgaaataggggggtccggctttttgtatgtttttttttaaattgcgacccacgatgcgaattgaactaccacggattgcaatcgagcaatttgaatttgaatccgcgactttttttgagcgcgcccaaccgcccccaggcaaaattaatcaaaaaaattgcgaaaaaacttttctctagtcgagacttagggccgagactcttgaaaaccaccagcgagaaagagaaattctcaagaaatcccatgaaaaatcccacgcggattgcgcatcgccggttcaaattgtcgcggtcgcggaccacgaattgcgcgcaaaaaaggcgagagtcgagacaggatcttaatcacgccgggattttcccgtgatcccgactaaaaactccgaagcacttttcactggtagtcttcactctaaaagtaaccggtgattagcatttttggccaaaacactgaacactcgactacgacggcaaatttctatcccgggtagttttacagtagcgtaaatttaatttgaacacaaaatctcacaaatatcttttctttcgtcgtcaatttgtctgtcgtagttaatcatttccatgccattttatttggttgtgagcgatgactttttgtgccctcttttcccatcatttcgcatattgtctcttctcatttccaatatttatttagttttaattcagagaaacattttaatgttaaaatttgctaattacttatcgctatttttgaatacattaaagaataatcctaacaaatttggtatcattccaaagctctcaattagctaattgtaagtctaaaaataaagggaataaagccgagccgacgtaacaagtcagaccgagaaggcatcgaatgaattcgtgtgcctaaaatctacaa

SEQ ID NO: 7053 - DNA, 1192 bp, Heterodera glycines
  unsure (1)..(1192): unsure at all n locations
cgtgtgtaaatgaccaaaggtattaattancaaagggacgctttgatcaaaaacaaagggaggaggaagagccgaatgaaaaatcgataattgccagaggtggcaaaagccgaaagccttggtttatgcaaatccagcgaatttttgagccctatgtatacttttgtcgcatactgtatacgcaaatgcatatgcaaaagcattcggtttctttgcgcctctggcaacagttatcgattttttgcattcctccggtggcaattatcgattttttgtcggacctttcccccttccccttcctccctccctttgcctttgatccgacgtctctttgtaactcccttggtcatttacacattaattgctgaattgttgttgcatgaaattcggcacataatttttacatattttaggcacattaatttattcgatgtcatgtcagtctgagttgagaacacactaattatcattaattaattaaaaaactaattatcaagtttgcttgccgtgtagtatgatgatggaccacgtaactgaatcaaattccacccaaatctcaatctccccggcacttgcctatcattagcatcggcgcacctctactttcaattttaaaaatcccccccccaccctccccctaccttcggtgttgaatcacagaaaattggggtggtaaaattaggtaatttgaacataaaatctcccaaatatcttacatattttatcatttccatgccattttatttggttgtgagtattccttttttgtgccctcttttcccatcatttcgcatattctctcttctcatttccaatatttattatatgttgaaatttgtgtcttacaattagtcctcgcaattttatttaatccattaataatttggtttttgccaattttaaagatttctgatccgacatctctgatcgcttaaaagcaaatttttcttctgttgtccctttttgctggtgactgttcacaattcttttcggcgttagcgttcgtactgagactgccaattcattgtaagttggacttggtttcctccgtgaaccccaacctaatttagcagaaaaaaactaaacaaacaatttggttcaatcttttttttctattaaaatccaatgaaaacattttgggttagtattttgatgataattttcaaatccctcttttttctaccttcggaaa

SEQ ID NO: 7054 - DNA, 4637 bp, Heterodera glycines
cttgttcatgtatgatgactaccaaattttttaaaacctttggtagaaaacaaaaccccggtcgtttcggtatcaattcctactcacagtgacggcctttgcttcggcccaagcaacgtaagtgctgctgttgatgtttttgctggtcaccaccaccaccaccgttttgctgacgaatgccgttgttcggcgaaaagacggcacagtaaaagcgtttttcaacggaatagcgcaacaatcggtggagcccgttgaccggtggtaattgcagtttagcgaacagttcaatgagcacaaaatggggctcggtgcgcaaccgatggccatcaatgaaaatcatttgggcgggcgaaaaatggtccaaccatcggtcaatgtgccggccatagagaccaggccacagacaacgtatgaaaattggagtgggttttttttgtttcaagaatttaaataaatttttagttacaaggctttaaaacccgaaaatctgtccattatctcgacagtacttcttcaacttgttgaacgcttcatcaccatcataattgacactggacgcgttggagatgaacaactgttcagcggtgtgttgcaacgcgaccgaattgttatgtgctcgcatgtgctaaatgcgtgtgatcaaaaagtaaatatccttcttcctatgaccattaatggaaaaaaaattagaccggaaaaaaattttaggggcagaaaagcaacaacaaaaaaaaaaaaaaaaatcggaccccctcaattttttttctcgttacaggcctagcttgtttcaccaaaatcacatacacacgcacctgataccatgagtacgcccgctgtgcagggtcatcaagaatgacaattagtcgcgcatttggcaccaacgcgtgcaccgccgcgggcgccctcgggttgtcaaaataatttgcagtcttttcaaacagaacggacatggcggcggtgttgttggcaaactgttctgcgtaccattccatgccaagcgcataatttggaccagcaaaaaattggagttcttcaaatgagtggggaatgggcacattggtgccaatgtttgggtgcaacgacaggaacagaccaagcgcactggtccctgaaatttggaatattattattattagtctcttttgttaaaatggtagggtataaaaaaaatcaagaaacccttacgaaaaatttgtttaaaattatttaaaaaaattgtttttaagtggggactttttgcttaaataaacaagaaaacgaggatgcggagaaaagcatgagaatagtagagagagagttcgatgacagacagagagaaaaaagagaggaaacagaatgagagtgaatgaaaaaaagaagaagcaagaatgaaagatggcaaaagagggaaagtgaatgagaatagagaaaggagatgagtaatacagtgaagtatgagacaaaacacaaaacgaaaacgggacaaaaaacaaacaatagaaaataaaaaaacaactacaaaaaacaaacaatagaaaatttaaacgaaaaaaaacaatagaaattaaaaaaacaacaaaaaacaatagaaaatttaaacgaaaaaacccacccgttttctggggacccaaaatgatcagatttggcaatttgattgcactgcaattgtaattgagtggaagcgtacgcctgtgccgttgatcatcacacgggttctgaatacacacattcattcacccatttttatggataataaaatttgaaaaagttggcaccgtgtaaagcaaagtgcgctcattcggaaaccgtttcatgtacaaatcggccacatttttcggtgccgtccatttcagtcgcaaatttgtccaacaaccaacaaatttggcaatgttcataaaagtgaagccgccaagccgatcatttgcatagttttgctgatgggtcatgaaaacggagaatttgttcatcagaatggagctgaacaggtcaccgccgcccaacacattgtgcagaaaattgtccaccccatcagggtaagcgtgaaagaattgggtgtgcgtgaaaaggccacaggtttgtctggaaatggaaaaaaatttcatggtacccaaactgaacgtttattcgaataggaaaaagaagttatggtcgaagaaattcaaaaaaaaaaacctgggaagcaccgtaatatttccatggacaaatgcacgccttccgcttgctggcttcagatgtgggtattctggaggggataaaattgtataaatgtcgaaaatttttgtacaaaaacaagcactctgatgtgagtctaacccaaaaagggtggcaattttaattttaaaaaatgtagtaaattactaaaataggcctagcaaaaaataaaaacaaattctccaagtgtggtgtcaccaggcctaaaaaaaaattaaaaattttcttgaaaaatttatattctccaagtaaaaattgtggtactgcgccttttaaccaccttcggtagaagtgacttggatcgaccaaattttggaccaggcatcgtacagaggctgatagatcggataaacctggcaaatttagtagaaaaatattgcatttgaaaattccatttttcaacaactaaccccagaatgttgtggcgaaacggcatagctcagattggcagaaatgccaacattctcagcaaacacacgattttgtgtcatcaatgcaagcagataatccgcagaaaattctggcggatggttgtgacgccacatgtgcgggaaccagtggaatttgttcgcattgcctattacagacaaaatgtaaattttcgacaaaaaaaaaacaaatgattttcgtttagaagttgtacaaaaaaaagtgcaaaaaaaataaattcgggtacgaaaatatgtcacgaatcagacaaatcaacctcaaccaatcccggtcactcaaaccaaactctaacaaaaggtcgaaaattagtttttttttttcaaatttagggaaaggattcggaaattggttgcaggtcaaaagggtcaccttgctggcttttaataattttcttaatttacgatttcgaaactagcggcaaaatttggaaaattccaaacaatttcagttttcatggaacatgacaaatgctgaccattggaagttacgattacaatgatttttgtccaattcattcaacaaaacttactgacaaggatttcgtctccttgaatttctgccgggtcaccatgacgaaaaaaattgccagaaaagccaagcgtgaaatgaaagttggcaatgtgttcgcgcagtttgccctgcaaaatggacaaatagtccacgtcatccgcaaccattcgactgccaatggcaccaatgaacacatcgtcaatgtcaatttggacaaatctaaaaggaacaacactatgtacaccgaaaatgtttagttactattatacaaaggcaatttttcggtaatgataaagaattgcgtcttcatttaacttttttaggctcaaaaaccagtttcccagggcttttctaagatactgaccacgaagctaaactcggatttgcccaatgccgaagcccagatcagaactcgatcaaaaattctaatttttataatgtgaattatggtaaaaaaatgagtttctgatttttcgttagaattcgggcccggggttcgtaattagtcgacacggatgcctgatcagtgatcagcgagcgaccccgaaaacctattaatttgtattttaattcgaaatgtgaaaaagatagaactgcaaaagagccaattaacctttccaagtcgtcgtcatgaatggcgggtgcaagaaatgtgacggcgtccaaaagtgcaactctaaccaaccaatgttggtttggtttggcaccaaacataacatgatgttcttccagttgtaaagcgatggaaaaacggtggcccaattcattttccgcttccaaaattggattcatatgacttagtgcatgtttgaacaatgtgaatgcaagtttggcatctccatccttttgcggcaccgaatattccgtgcccgatttggcaacattgtggacaggtgaagtgccggaaaccacaattttggtgaccgattgtcgtccaaatgcagtgaaattggcaaattctgtgcgatgttgctgctcctcatcagatggaagttccaaaaatgagatgacaccaaccgaatgacgcgcacaaaactggctcagcacatccttttcagtcgaagaaagcaaatggaaggagcggtaatcggtgaacaccaccaggccaaagcgtggccggtcaccgagttcaagcagtaagcgttcacccggtaaatgcgcctccactaatactggcactttaaaattgttgaaaaaatccaaaatggttttgtgtgtgtccgtgttcagttggtcaggctgaagcagtaacagaactcgttgtgccgaagttgttgcatcgtgccgttgctgtggctttttgccgttgtttgaatgtgaaatggagcggttcgtcatttgctgatttgggcattgataatcggcaaaaattgtacgctttgccctcggctgtgcccaattgacggatgatgacaaattattgttattccgccataaccaaaggaagaaaatgagcgagtaaatgaacagccaaaacaatatgagga

SEQ ID NO: 7055 - DNA, 2741 bp, Heterodera glycines
aggggtcagcgaaacataaacaccggcgcagataggcgtttgcaacaatttgtgacgggagcaaataacctttcgctgcgaaacaatacacacagtcagaggaatgccataagaacattttcggctgtaaaatcccaaaatttcctcaaacaaaattgcatagtgatacaagaggacaaaccccacgatgcattttgccgaggagtgaaattgacatccgaaatttcgagtttaatcgaaaatgaacttggagattcaactcagactgaaatgtctaaaggaaaggatcgggtcggaaaaattttgatggttaacgtagtgacatacggcacccaatcggaagcaatgttggatgggggaacccacatttcactgattgaagcaggatttctttataaattgatcaagaacgaggcttggacctcaggaaatcggacttcgctcgaacgtcagcagtaattgccgatgtaaatgagcaacaattgaaatgtttcggtgtggtaacaattccgatcacacgaaagggttgcaaccaaataccgatctgcttaaaacggaaattgcgaccgtagagtcccagaaatcattttcgacagtgaaaattcaatttcaggcggaaatttatttgtcaattgcaaaaccgaactcggagaaccgaattgttgacaatgactttaatatcggcaaactctacgaaagtaaaatgtggaattgtcggagctcataagtggacacgccgaaatctttgcttcttctgaagaagaactaagccaaaccgacctagtccagttccccatgggcttcaccgatcgttatcaagccaaaaaggacgggacacttcgtttctgtgtggattacagaaaattaaattctgtaacggttaaagatgcatttccattaccgaacattgacaacacatcttggcattgggaggaaggagagtcttttcaacattggattttgtgtcgggctactggcagatcaaaatggatcatagttccatggaaaaaacagctttttctacggaattcggacgacacgaatttttggtactccctttcggcctttgtaatgccgttgcgacattccagcgatttatgacgcgccttttctccgattgtcttaacaaattcgttttcatctatattgatgacattttgatcgcgtccgaatcatgggaacagcacaccaaacatctgaaagcggtttcaaacggatcgaaaacgctagtttaaaattaaaaatcagcaaatgtcattttgcgtccagtgaactcccatttcttgggcacatcctttcaaatgaaggactgaaaatggatatggccaaagtaaaacccgtcctcgaacttccgaacccggcgacgaaaaagcaacttcaatcgcttctaggctttcttgcctactaccgtaaatttatctacggatttggcgcaatgccgcccctttaaattctctcttaaaaaaggacagcgattttgccctcggcgaggtcgaaaagaaagcgattggtgccttgaaaagcaaaattatcagtgacgtgatgctagagatttttaatattttctattctaatcccctcatttttactaaatattccgccgtaaaaatgaataaaaatggttccgggaccctttctcataaaaccgtggtgtagagattttttatattttctattctaatctcctcatttttactaaatattcagccgttttttcagaacacgtttgaatgttccaattttatatgtattttcaatttattgctataagcaagcttttgtgaaattttaagcatgaaaaatcgaagttgatttttttgcgtcacttttcaaaaaacttttcgtgaacaagggtggtcagcggtacctctggagccggcggcggaaaactaggaattttatcatatttttagcagattttcactgaaaaattcttaattttgtgaattttcggaacaaaaataggcttttttctggtttttatgtctcaaaaaataaacaacagagcaaaaaacaaaaactttgcaaagcaagtgcttgatataggcaacgaatttaaccaaaatggttttattcaacttccatccgaatgcatattaccaaaaaattcaaatttggttaatgaaatttatgatgatattgtttaaatcatacatttagtgaattaaaaaatcgtattattctttccccttataatgatttaactgataaccataacgcaatggctttagaaagctttctgtgtatgtctgcgtatttcagtattgacgaagtagaaaccacgaataatgtcccaattacgcctgaaataattaattcatttaatgatccgggtattcctttacatgtgttatgtctgaccacctatcttgactccctttcccttgttgtctctcacaatttctttttccctgtcgctagtcatcccaatttcccttccttttggccttttcttccacggggcgcccgacccgcccacctgttgccaatataaaaatttgggggagagatcggattgatcagtgtgatcggggactttgatcggcttgttgcgaacttttcctttttgcttttacacatatactcatcgctaaataaaccgattgttgaattaatcggagctttcaattggggaatccgcggctttgggccaatgcccctggcattggcccagggcccaaccgaattcacgcgcgcacccatctaacagctgcctcaaatcccttccccctcctacgacc

SEQ ID NO: 7056 - DNA, 3025 bp, Heterodera glycines
caaaacttttggagaggaaacaacgccgaaggagaaaatcaatctaatttttggaggggcaatcccgaatttcggccaattcgccgagggaatttcacgccaaggggattcacaggataccccaggggactcaacacataccgtggaggatttaatccgcgcggcgctaacgctaatttcacaccacttgggaacaatttccaaaggacaaacaacaatggcaattttcaaccgaacttcaaccaaaaccgaaattggccaagaggacgcggaccaacgggccccaacaatgggcgcggaggaagtgatgctgatcgaggacgaactggctggcgcgtgaacgaagtgaatttttctttcatttgtttgatgaccatcatggcggcgatgctcatacccgctgacggacaataccaactatgcccgtccaagccgacagaagggattaccgttaccatgagctttccggaggaacaaaattgcactcttccggtggaaaagcctccactgacggtgaagtcaaatctttacataccaattcggattccgcgagtgtttcccgcatttaaatgctggaatgtgacaacagtcacatgcaccgagtcttttctccgaatcatgacgttggatcatcctgacaagaaaattgaagccgacgcttcagtcgaggactgtcaggcctcaatacaccattcgccgatgaacagagtaagtgagacaagatgggaaagtttggcgccaattcgaaaagagtacggatggtacggcgtgaattgtttcaacaatgtacagacagtgattgaagaaggaaaagcagggattttggatgggaaaagactgataacttcgtggggagactctttaaaaatcgacaaaagtctgggagaagacggcagctggatacgcctgaaataattaattcatttaatgatccgggtattcctttacatgtgttatgtctgaccacctatcttgactccctttcccttgttgtctctcacaatttctttttccctgtcgctagtcatcccaatttcccttccttttggccttttcttccacggggcgcccgacccgcccacctgttgccaatataaaaatttgggggagagatcggattgatcagtgtgatcggggactttgatcggcttgttgcgaacttttcctttttgcttttacacatatactcatcgctaaataaaccgattgttgaattaatcggagctttcaattggggaatccgcgctttgggccaatgcccctggcattggcccagggcccaacggattcacgcgcgcacccatctaacagctgcctcaaatcccttccccctcctacgaccaggcagggccccatccctggacgtttggagtttttgatcagagctcattaattaattaatcacaggggaaaaagggttggggaaaagaaatttcagctaacaaatgccagtcccgggacaagacaaaaataaacacaaatggcaaatcacgagaaaagactaacaattaacgaaacaaaaatgcgaaaacgaattcgaagaaaaaaatgaggcaacaactgacgggaaacattgcgatcacattggcaagcatcatccaatcaacgacgtccaattgtttcattatttttattacaccaatcgacgaacaattctttaattacttcatcacttaatttcccaatcaacaattactggagttcaacaaatcttttatttttctgagacacttcgacgacataatttctttaaattttaaatttctcgacacaatcaacaaaattctggatttattttctaaattctggtgttaatcagcgaaacatattccgacaattccatcaaaaacggccgacgcgcggagaagatcgaattctttagaggaagaagaacaaaacgaaggacaaaccgaaagggataaaaggctttggctcatccaccaaaaaaggcagctgcgtaatatggatttagacgctctgcggcgtcgaattgtgactctcgagcgagagatgcgtgaaaatggtggaactcgccctgggcttccgatgccgaccacatttgacgggacgactgatttgcaggattatttgaagacctttaatttaatcgcgaccgcccacaattggacacccgcgcgatgtgtgcaagttctcccgctgttcctcagaggatcggcaagggcaatttacgagagcatcgaaccggatattaaagacaattggcgaagtctaattgatgccatggcggataagttgaaacaaatgtctccgagtctgacagcaagacagaaattggcacaacggaaacaactgactggagaatcgctggaagaattcgcgcaggcgattcggaacctcgtcttacgtgcttatcccgacaattctctcgagatggactttggaaatttggtgctcggtgctttggaaaatgatgtgaaacaagcaaacgaagtccgacttcgacaattccgttcggaaattgcgcgagatttttttcgggcaaatatggcaccacgactgaaggaaagagtgatacacatggaagaaccgcaaacgctcgaggaagcagtggcccaggccagacgtgttgaacaagttcaaggaaatttggccgatgacatgtggaaaaatacacaagatgcaaaagccgaagttgctttagctgaagttaatgcagtgcgaaccgaattaaatgagattcgtgaacaacaacaaaggacccgagaaaatcaaggacaaaaccagagagaatggcaaaatcaaaacatttcttggagaggaaataacaccgaaggacagaaccaacaaaacttttggagaggaaacaacgccgaaggagaaaatcaatctaatttttggaggggcaatcccgaatttcggccaattcgccgagggaatttcacgccaaggggattcacaggataccccaggggactcaacacataccgtggaggatttaatccgcgcggcgctaacgctaatttcacaccacttgggaaacaattccaaaggacaaacaacaatg

SEQ ID NO: 7057 - DNA, 977 bp, Heterodera glycines
gtcttccaggcttttcattgattggccaatctgaaagggagtggtggtgccgttatgactccatcttaaaagcaaaagcggaagaagcgatcgcttatgcggaacccaggtccaggtccgtgcctttttcaaaagaccaatcactgtgtgtctctgtaagttttgtgtgccgcacttttatgtaaaagtgaaatttaatttgattgagtttcggggacgggggttcaaattaggcaaaatgaatgtcagattcatgatcaagcgaccaaaaattgtccaaaaaatttaatccaaaaattctttgactaaattaatgaatttctatcaccaattgaccaaatatcgtagcctttttaaaaatatacggccacagttaaagcgctaatggtttctggcatgtgccaaattgccctgcgtattctcaaatggcctaagtcaagcaccgtagcccctcttcgagtacaatgataaattcttcgttcgattcggccacaaattgttggcctaaagaggaaaaagctgtaattgctttttaaaactctaaatgctttaatttgatcaatataattcaaaaaaaaaattctcacattttttgcaaattggcaaattcattcatgacacaaaatcacaaagctgcgattgtggctgataagactttggctagagatggtttttctaaaattaaaattaattttattattttagacaattaaaaattaaaatattaaaaattaattttacccttttttcgacattaaacgcaaagtccaggctcaactttttccataaaaatcacacttctgctggcaaaatgaataccgccaatgaagaaaaaagcatccgaaggtggcgaaacttaataaatttttttaaataaattaacattttaaaaatgtccgcttaaaacaatttttttaattatttgactgtacgaattattaaaaaataatttacgaatgaattgacaaatgaatgaa

SEQ ID NO: 7058 - DNA, 5412 bp, Heterodera glycines
ccggaaaaatttttgaaaaattttatgcaatttgctataagattttgtctaaaaatgactaagattttggagctaatgtttaaaaataattaggaatttttggggcgggcagtgccgataagcgccgccgaggaaaattttttttcaaaattttaacgaattttgttaaaaaatagcaaatttttagcatttcctcttttcccctttgctagcctcccccccccccccgttatgtatgttaataagtagggatgcgatttttaggttttaactaaattttttgctcgattgatttgaagaaaggagctcaaaaaacgcatttctgcgttaaaattttttcatttggacgtcacttttcgtcactagaaatcactattttggcgacttcgtcactaaaatagttaaaaatcactattttggcgttttgtcactattttttcactatttcaacattttttggaaaattccttaacaaaaacgcaataaaaccaaaaaatacacccctaagaatcgacataaaaattttcaaaaatcactcctaagaaatgaaaaatttttcacaaaattcactttctttgcaaaaatttttaattctaaaaattattttttaggaacctattttgtattttttgccctcaaaaatcccagtcctactcatttgcaactgcaaatagtgaataaaaattatttttgctcaatttttggctgaaaatttgtcactattcgtcactatttcggactttttggcactattttctcactattttggcatttttactcactattttagttaactattttgggatttttcgtcactaaaagtcgcatccctattaataatactacaaattaccaagaataagtcagattaaatcgaaatatgggtagccttttaataaaaatagaaaaaaaaattcattttataaaaaataatcttgcaagaaatcgtctcgaaaaataatctaaaaagccagttacggatcaaaattacggaaaaatcccaaaaatccgtaacccgtaatccgtaactccaaaaaggccgtaatttccgtaatccgtaatccgtaattacgtccagccctgatagggtgtctatcttcccagattcccgggaaattttttcaaaattaatttattcttctgcacttacaaattttacgctaaaatcttaataattcttttataatataagaaagtataaaggaaaatatttttagaaaaaaatggtgatcattgaaattgtttttaaattaatttcacttataaaattaactcagggatgcgatctgtcctgatttgtaagatttgtcctgatttggagggtccaaatctgataaatcagggatgcgaaatgtcctgatttatcagatttgtcctgatttggaggtagcgatcaaattttgtcctgatttcttaaataaactcacatttttgaaattttatggcataatgtcactattttattaagaaaataaaagatttgtggcaaaatttggttattttttgacaaaaatctgttaacaaatcgcattaaaatcgcaaaaatttttccccgcggcgcctatcggcaccgccggaccctccgtccatcctccaaaattttttgaaaaacgcgccgcaaaaaaagtgttttaaagcaaaaaagtcgtcgcttgacttaatttaattgaaaaaattggccttttttggtgaaagtctattaacaaatcagaacgaaattacaaaaaaattttccggcggtgcctaatagcaccgcctgaccctctcccctcgcccattcctcagaagttttttggaaaaattacgccgctaaaaaattgcattaaaatttataatttcctccccaaaattgttacaatcgttaatgggaggtgaaaaaatataatatttaatacatttttgattgaataaattgtaaaaataactgttttgaagcaatgaagcaaaatgccctgattttcgaccccaaaatctgattttttgggctcgatgttctgattttgaaaaattttcgatcgcatccctggtataaatacaattgattttttcaattttcgcacatttttgacattttttttttgtttttagcacatatatgtatttcagcattttttaacacatatttcatgatttttagcactaaaaatccgagtttaagtgataatagacccgaaaatttatttaaatgtcaaatcaatcaacttcttctgctgctgctgccggatcgacggcgccgccatcgccttcgaacgaagcttcttctccttcggccgctcaagcgtcaagtcagtcatcgtctgctgctggtgattcgtcagcctctcccaatggaccgcgtcttaagccgcgtaaagtgcccgtcaaccgcttcagggatgttcgtccggcactgcagctgcgactcagtcagttgaagcatccgttaatcaggaaactggagcaggacaccggcattgaccgtgagagggttcgtctccaactccaaacatttccttcccccatcataattcccccatcacccattttcagctcttttacatggctatggcatatttcgtgttcctgctcctgttcactcagtgtaagcttctgctctccactctcattggttggcatttcgacacaaatgccatcctttctctaattcctccccttttatttaaggctcagtctatcccgcctatcagagcattgtgactgtccatactcaggccaaaagtcagtgttattttgtggaattcccaaataaaaggatttgaatttcaggcgaagagattcagtggctcacttattggtgtttgttctctctgttttctctgtgtgacatttccttttccgtcgcccttccgttctatgcccttgtgaagacaatcattttgttgtatttggctcttccccaaacttatggtgcgcacaatttctacgtcatttacgttgacccgctggtggaccaatggatgctgatggtcaacgaaattgctggctgatgcaatgtcatcatttgtactaactaaatgcccagcgaattatgttgtttatttgtcatataatttcatattaaaagatgggtgattaaatcgctttttatatttgtcgtctttggtggtgaattttccaatcccaaaatttgacttctccaatttgtcctgactttcgagaaccaaacgcaattttgtgttcagataggaaatgtcgtcgaaagatgcctccaatccctgcaatttgttcattaaattcccattctcttctggccgaaagaatcctttagtccgttggcgaattgagtcttttcttttgaacaaccaattttgtgctccaattgaggccaaatcagtaccaatgtgcttccgtctcgggaaatccctccaaattataggaattatcattatcttattcacaatttttgttttgccacaattccgtccgatgtgctgagctgatcagtgttttgctttgccattgtctgattaaatggctcaacgcagaaatcaatgcatttggacaacggagaaaggcacgaggggcgggggacaaaatgattttgggaattgtaagcaaatgaacggacgaatggcggggagaaggaaaaaagcgacggaagacgaaaaagcggagcattgaaattcgaagggaaaagagaaatttttgatctaaaatactcaacaaaaaggcttaattaaatcttcccaaacaaattcatatttgttcgtcagagtcgcctcgcgttagctgaaacgaaattggctttttgtgacccgcggcaactaacattggtctaattagccttaatgattattgctccttaacatatgattattgccaattaatcactcattaatcaatgcgaacttcgtacaacacttcgtaatcttcggtctgatcgtccaagtcaatgttgcaaagctgaagcactaaataaaataaaattgcgagtaattttaaacattttcactaattttaattcattccattttatttcgcttttccattgatttgtctctcacttttcacattttccgtgcccaattttctgccttcccatttcgcttcttcctccgcccaccatttgataagcttccgatcactttcactcctcaaatataaaatcgtcgcgtggggcacaaagtgcgactcgttaaacgggttcagcgacggaatgccacgcgattcgaactgattaatggcactttcttaagcatgagaaaaattcaatttaaaattcttaaaatatccttttcaaaatttcttcagaaattattttaaaaagcatcagtttactgtgcagtttgatcaattcttcggcactttgctgctcaattttggcgtacatcgatgcttcgccgttgtgactgatgccgttgaaatgggccttcatttttaaaaaaatctgatcttccttcccattaaaatattattaaatagtttaaattaattaaaaatgaattgattcctcaaaaaccaaataaattaccaccaatggttgagcaaaatgctgcacagtcgcagcgagagcatcacaagcgctgaaaatcacaaaaatggacggattttatgctttttaaaagcattttcaatgtgcaaacaaattttaaagtatgttttggttctacaaaccataatcaatttgttcaaatattttaaaaaagacaatccttcataattaatcatttgctaattttctttaattgggcaagcgcaaattgcataaaaatgtgtaggtttgttgtttattttacaaatttggtaatgctaatttaacatttctccttttgcttctttttttactaaatcatttaggatcattttctactttaattgattaggtttctaattatcgccttaatcggtccatcagattttttcttctcgggaaagtttcttcttctttttttgccactacataatttatttatttatataaattgacttgcttttggaagtttgccttgtccaaatggatgagaagaagtgtgacgtgcagtgattggagtggttgaaaagtgtgcgaaaaatcggagtcaaatcggagcaattcgttttggatggctttgacattggacacgacctttttgggttgggttggcaaatgtttgccattttcattttcaaatggtaattaaccgattgatacaaacccacttcagcatttttcacatgaaaagttacaaaagcagttgcaattttccggtcgtaattactcattaaacatttaattagtattattattttaaaaattaatattttcactataattatcattaattaatatttttgaatgtgcaacatttcttttcttttcttttcttttcttctcatccattcttttctttcgcaatttatttctccgtcgatgagacgtgaaaatcaatgctaatgattttgtgcgcaatgcttcatcacaaactgactaca

SEQ ID NO: 7059 - DNA, 1707 bp, Heterodera glycines
tgacatccattttgactaattacgaaaaccttttacccgcactcgaacaaaacatagaattctaaaccgagttagggttagggatacagaaatagtaaaatattcgaacaattagctatgtaatattgggagaaatttatgaaatgcaaaaaagagactgtgaaaagcatggcctattatttttatttaacaattattttatttgcgtttttttaatgcttaaaagaagagagagaatggatgatcaataatatttattatttattcgattgctggaaataagccctcctattcgtggaaattattagaaattttcttgaattaaatattttacaaattggattgtatttaaattgaaaggtgaagagaactttcgaagcgtccttaaatgttttaaattagttttgtctgtccttggcattcatttgaatttgtctatggaatggcaaggacattctcatatgtccttggacattgttattaagcatcttaacgtgacggatatagaatttttactatgcgaatatggacagtttcactaattgcattgacttttgttccttcaattttaacacacaaaaatttcttgcctcctcccccctccgtaccaaatgtcctttaatttcttaactgcccttgaatttatactctaaaaagttgtcttcatatgcaaaattgaaaatggtacatgtataagtaatttttgtccttgaaaattgaatgggattttttgatgcgtcttacattttatttctatgtctccgaaattaaataatttttttttctaaatcgcttcccctcccgcgaacatccgtcgtcgtctttttgcctttaaatttctgtccttaaaaattgcaagggtcgtccttcctccaccaccacctgttgcttctgctcctgctgtttctgttgttcagcaaaaagttaaaaagttccagcaccaaaagcattcaacataaatcgcaaacaaaaatttgtttttaacttcaaaatatgctctcttaaaatattgaagaaggagcagcaaaattttatttttttcgctcatttggaggcggaaaaagggaagaaaaaaggagccgagggggggggggagggttcaatttcaataacagaaaagcaaaagcattcattccgcccgcccgccccgccccgatcggtcggtcggtggcgatcggcgccgctggcggcggcggtgaaaaggttttgttgtttttgttgtttggtcttccccctctcccccccccccctcggggctcctcacccttaggagctgaaaagtgatcagtcatcattcatccgtcatacacacacatttatacatacatatgtttaagggatgggggggggaggaggagggagggtgaaagaagaagaagatgaatgaatggatgaataaaaaagggaagagaaagaaacaaacggaacggaacgctccaccgccaccgcacgcattggcaccacccgcggcggccattgctgcggctgccatcaaaaagccgcccgcatccgccgacgtgccgccgcctacggttaccggagaagcaccagagatggcggcgttgacggtgccggcactgccaaacggaaaatgttgcgacgcagcggtgccaccaaacgcagacacaacggtgggagacgaagcggaaaaggcaccggcggcggacgaagcggtggccaatgctggagcacggacatcaaatccat

SEQ ID NO: 7060 - DNA, 3955 bp, Heterodera glycines
  unsure (1)..(3955): unsure at all n locations
aatgtgtgtaataattcaaatttgtacgtgatcagatttganggcgctaattagattaaagtaattaggatgaaacatgggatagcgattagcggatgaaatcaccatatgattaatgttacttagttagctgaccataaaatttaggcgattgtaaaaaatttgattttttattaggggtgatgatgattgaaaaaagggaaagtgtttaattagggtaattagtgacaaaatgggtggcagtgattagctgataggatttaagataatattttgatcatattgtttgaattggaacattattatcacactgattgaccagccgggcagattaatttgacagtgccaaaattagtagaagtcgggaccggaattgggaatcaggccaggatagggttactagatttaaatccattttgtcgggatcctgatcaacatttttcagaataaatcgggacaaggatcccgggaaaatcccgaagggctccccgatcccgttcggtctccaaatatcagtaacctatgacaatcctcataaaaacttgatcaaccacccattagcagagctaataggcgtgaagccccggggccacctgttgctgttggtggatgagtgacgcggcagcagctgcaacattagcaaattgctgttgattctgttggttgtgatggttttgttgctgttgcgggtggttgtgcatgcccagcggagacgacatcaaagagagggccgccgccgccgccgggcttgccggactggcagcggccagcagttgtgccgccaccgaagcggcgaccaccgacgaattgtgccgttggaattggctggccagcagtgccgcagcggccagctcactgttcgcttgttgttgttgctgctgatggcattgtgccgcagcagcggccgactgaacaatgataattaattaattagttaatgagaggggctccgcctaaattgggtcatgataaggtaaaatgacatgcttaattggtacccggatccaggcctagatttttctggatgtttggtccaggaaatccagttccaggctaaatacgaaaaacctggatttcctagaccaaaattttgaatttattattacaagtgaccgatgttttattttgaaaattatcaaaaaccgaaggtaatccaggtccaggtctaacatggaatccaggttcaggtccagctttttcaaaataatcgtctctattaattggataaaagtttccaaaacaattgacgcttgaaatcgcagtatcggtttaaattttttttgtaaaacatgacaatccaattcaggatatttgtgagaattatgagcccgagactctcgagcatactaattaaaaaattctttccaaaattttccaaatgtgaatttaaaaaaaaattcgaattccacacaactgttgatcaacaagaaactcaacctgttgctggtgctgctgatgttgctgctgcagttggagcagtgcagcggtcgccgctgccggcgacccgggcccgaacaggctgtccagcttgctcagctgcgactgcacctgttgctgttgttgctggtgctgcatgacgaccgctgccgcggcagccgcagcggctgctgcggacgcgggcgattgcggtggcatagccatcgccgcccgccggtgatgacgcggcggctgcggtcgctgccgcggcaccgatcagttggctgagcgcggccatcgtggtcgctgtggatgccgctgccgttgacgtcgctgaggatggcgacggttgcggtgaaatttggtgcagcggcgaatgttgcagcgagtgggacggcgtcggcggcaacagtcgcgcgaaggcggacacgctgcttccggtgctgctgctatggctgggtgccgcggatgatgttgcagcaatggtagcggacggttgcggcggcgcgcaaccgccgacaagcgaattggtgctgctgctgttgttgtacagggcggccgcagcgctcagctgagcagcttaaatcggaaaagggaaaatcattattgactgatttttaaatcggaaaagagaaaatcattattgactgatttttataatagctatgaatgaaaacaaatcgataattattgattgattagggatctatgaccgaaataggttgaccaatcaaattaaaattcggcaattattgatcgagaaaaatgcattgatcagtcacatttgatttgaaaaactattgattgattgtgctccaagcagaaaatgtaaattttctttgatggactgatcagagaatttttttatcataaataaatttattttcactctgatcagtcatggaaaggctgcaaaaactcgatttttttaaaactgatcgggcagagaaaataaacgaaaaattttagcgactgatcagtccaaaagttttagaatttaaatgctaaataatgggcactatgaaggtaatgcaacattttgaatttgaaggccattacgaactgatcagacatggaaactggagaaataaaatggaaaaatttgcaaatttactcttgaaattagtcaagcaaacaatattttatggtcgagaccatgattatgtgatttgatcagattgcaaaatatatagcaagggttaattcaaatagagaaagtcggtcttaaacgatgaaattaagaaaacaattccgcttgaaagcccccataaatatgcactaattaggaaaataaattaaacggcttgatcaagactaattagtagggttagaaaaaatttagatataaaatcgcgaatattgacataaaattgcaaaaaaattgctataaattttccaaattggtgggttaaatttctgggctttcttcaaattcgctaaatgtaagccaaaaaatatatggatttattcatttttccggaccctgctaattagggataattggcttttttattcagtgatctaatcaaatcatccaaataatttgatcatagattcaaaaggtgcatgaatgagaagagaaaggtgaatgaatagagttattttaaaagtttacaaaaagggaaaaaattcgaaaaactaattagcactaaatagggactacaaaattgtcgcgaccgtccgtccgtccgtctcccgccaccccaaggttatttatttaatggggaatgggggtgggcaaaaaggatcccaattaaatgttgctaaaatgggcacacaaattgagcattttgcgagtgcgtttaaaatttcttttttatgcttcgccaatttgctcaagggcagaaaaaaaatgtgaatttgaatttgcgcagtgaaaaggtgcagaaaattaagggacaaagtttagtttgagtgaaataactgaaaaaagtacttttattatcttttggtaaaaaatggaaatttaaagtgatttttgtaagatttagtaaaaattgattattattattattaatattttcataatattaatattattactaacatctaaataaatttaattgtaaataattaattaaatttcccaaaataataaaatattaataaattaaacaaaaaataaattcaaaaataaaaaaattcgcatatttttaaacaaatactaattaaaataaaaaaacaattcaaattttgtcaaaaagaaaattaaaaattgaaatattaaaaaatgaattaaaataaattagaatgaaggaaaaataattataaatgatacatttaaaaaataaaatgatacattttatttagaatgaaatgcacaattttttgctttatgttttgccgtctcgccacatcatccgggcgccacccgcttttcccccctttattatgggcggcggcgccgataggccgcgcgtcctcccccgcgggccccacaaaaaggnccaaaaatgccatgccctcctcctccccatccccagngctaacatatccggcgcacaaaatgccacatgtgccaccagcaaaaaaaaatatg

SEQ ID NO: 7061 - DNA, 967 bp, Heterodera glycines
  unsure (1)..(967): unsure at all n locations
gaaaaaatctgtaaaaatttttaaaaatcaaaaaatatatgcggcttagggaaagtgtataatcctaccaataaacatatagccgatatatgcatttttaaatctgcattattacaaatggatctaattaaatgcttgaagaaggaaaaataatatatattttaaatacaaatatgtggcatatgcaaatgtctatatctatataatcgtaggcgttattaaaaaaacgtatatgaaaggagagtataatgccattcgaattggcaatctgccaagactcgatacatacgggaatgtgtattcagtttgttatattgggaatttttgggatcagtaatatatatcgatcggtaccggtttaacgacatttgtaggaggccaatcactgtgccaatttccgactttttgtggcatcggaccccggttttggattcctgatcggtttttatgcgtcgggagttcgaaattttaaaaagatttttagtgcaagaatctcggggcttcaatgccattctcgagactctcgacgggtggaaattcagtgaggctgaaaagtgatcaggtgcaccaattgcccctcccccggatcagttcctcctctgatcagtctccccccccccgaaatatttatttaaaaaaattttaaacttagaaatttttcaaaaatcatagaaatttttttataagaaaatttcaagaaataaagtttttaaaaaactattgaaagaaatttttatgaatggtgagaactcacccaaatttggtgggctggccgccaccgcagctgccgcagccaacatttgttggggcgagaacggactcaactgctgctgctggtggtggtggttgtggtggtgcgcgactgttgccggtggtgccaaatggtggtgattttgatggctataaaaaaaaattaataaaataaaatccacccaaattgtttgaaaaantatatttaaaatggtaa

SEQ ID NO: 7062 - DNA, 2342 bp, Heterodera glycines
atttttggattttttttgtttattcagaagaaataaaatgtccaacaaaggggtgaccacttacacgttagttagtaaattagtcaagtccaaggagcgcttttacagacaaaattttttgtttgactcaatccatttactcataccttttttgaaactgtcaacagatggagcatctgttatatctttgttgagtttggaccatattaaggccgttctgttgataaaagaatttgaagttttttagtggattgtgattttaacacaactttacgtctaagattgtaggggattcgaccagaaaattgaggaaatatttccttttaagatgtgtaagaccattaatgattttgaatgcctgaactaaatcaattgtttttctcctttcttctaaagtttgaagtttgaataaatcaagtctttgtttgtaaggtatgtaaggaagtctgcatttaaataaaggaatttttgtaaaatatttttggcatctttttaatttatttatatcttttttgtatgtcggattccaaatttcaggcgcatattctaaaagaggatgaatatatttttataaattttggttcaaatacgtatagagctggattttagaattttggcaatattaagaatccttaaataagcagctttagtaattttagtataatgatagaaagccttaatttattatcaattaagatgcccaaatcactaatggattcacctcattaataattttgttgaataatttatattgttgttttggattatttttgctacgaaataaaataaatgatttatttattcgtaaaaaataaaaaagtcatcagaagggcgaaaaccacttactctgacgactgttcagataatgtgtcgtagagtaagtgataaaattttgcttctttcatcacgtgttttgtaagagacataaaccaagaacagaaccctgtggaacacctgactgaatcggatgttaattagaaaattgattgttaattttaactctataaaatatatcctttaaaaattcagataaccaagttagcagttttcccttaatgccaatgttattaagtttattaattaatatgttgatgggaagagaacaggggtgcgaacgaaaatttaccaaaatcagaacacctggctcaaaaaatcagatttttaacaattttttgcggcgcatttttccaaaaaacttttgggaaatgggcgaggagagagggtccggcgcctgttttgtaattttattctgagttgttaatagtagagaccgagatttccaaaaatgccggacaggacaagggctgatattttagaagcaaccggtttccgggtcggcctcttaaaaaccggtcaaaacggaaaaccggtcaaacgggatttctccaaaaaatcaccggaccggtttgccgggtccggtaaaaaccagtaccgggcccggcttagtcaaaaacattgggaaagtaaaaatgggtcatcctagcagattctgaatttaaaaatttaagattttcgactttgttcgagttctgttctgggattcgaaataggatcaaaatgaatgccagattcgtgttcagcgaccccgcaagccttaagaaacatatttcagtgacttaaaaagttaaaggggtcctaacatcggcagttctgggggaatgggtcatttttgcgccgacctttcggcgccagctcgagttttttgactataacttttcattttcgacaagcccagcaaacttttttttgttaattgtcttatctccaagcaatagcttagatacagcttctaaatatgtaattaatatttttacatgtttatttcattttactcagtacactttttcatctattgctagaataatcggcacaatgaaaaggcagaaattaaattgaataaatattaaaaaaaattaaagtgcaattaaaaaaaaactagaatcgtacgggaccgggaagggatttccggacctccgaagtcccggtcccggattttgaaattttgattttcttttttatactcagttggtttcctatcgacaaattatgattcctcatagttttttttacttagggtggaacataatttttgatacccaaattttttttgttaaaattttttttttaaatttcaacaaaacacaatcatgattcaaaatacccgccattattatcaataatatgttgccattattctggcaagagatcaataccaaaggaaaagtatttagggagttagagttaagtaagtaaaaatggtcattttagaggtaggtatttttgatggctgatttaaagaaaaataaaagagatacagagccagagaaatagtgattaaatag

SEQ ID NO: 7063 - DNA, 4422 bp, Heterodera glycines
ctctaaaatcattgcaggtattccgccactcgcacttttgcctctccaatttcgcgagccgattggaatttctggagggaaaattcggaatattaattccattttgatttttcaataacctcaagtaattcgcatgtttttctgctcggatccaatgggagtcatttggtcgatggtttcaaagaagtgtcagagagtccctattgcaatttatcgaacgcaactgaaaatattcgataacgcaaagcaaaactaaaaaataataatgggaaacgacctgaatactgggcatccaaatgttgcaattccttgcacttccgtctaagctcctcaggaaggtgttcaagcacttaaattcggaaaattatatccacaatatttaaaaaaccttcggtacttttctagtttatgtggcagtatttcacatacctttttctatatccactaattcatacttttttatattgtcaaaactttgtctgcggttttcatggggtacatgtacagtttacaccccatagaattttttttaatgatataaacgtgtttcagggtgtattccgattgctgaaagatatcgataattaaaacaatatccattgtactgcccgaaccatatgagaaaggaatagaatgtggacgctgactgcgccaatatgttgtgttctttggttgtgagaacacaaacaccaatatttattgaacacaataaaataagtcagaagcgaataaatataataataaaatagacagagaaagatgaatggcaaatacggactgaatttggaaatgactgggagacggacaaaaagggaagggaaccgtcgctatttatgcgcctcaggcaagagagagagagtgtggaaaaataagagagaaatgactaaagggaagagagcgagagaaaataataatggctgacaacatcccaacatctccccctttaatttgtcttcccctgtttgacataatcatatttggttttggtcacttccatgtccaactgttgtggggcttttctttggcgcgtggaccgtctcggctcaatcggctgtatctgttcgagcggttcgttctgttcgtcagcgaaccgaactctgcgaggtgatcggtttggtgtctccggttgctgttcgccttgtgcctgattgtcaatgcccaaattttccttgtatggaatgggatcgaatttctggatttggtttgcatgacgggttacaacggcatgcaattgtggcgactaaattcgccaaactacaccttttcctgacacaattgtccctcgcagccacgtttttgaagggccgcgataattgatgaattggacaatgtcaccgatggataagttccgatttcgtgctccatggtgtttgttgaattgtttcgccattttctgttctgctcgtttaacacgggtccctgtttttgtttttgggaatttggtttaattaacgatagaacagttcgaacgggccgccctaagaacaattcggcaggcgtacgaccatttaaacttgcgttcggcgtggtgcggtacgcgagcagtgaattttgtacccaatgtggatcgtcatgggggtctgagtgaaaaattagtgaagaaaattggaatgaaaggaaaaaatttaaaattaatattctttaaaagtaacacttccaattgtgcgcaaaggcctactggctagtctccttgactttcccttctgcttccccatggttcaattcctctacagtaattaaaatatttttatttttttgtataatcatgggttttctatcgacaaaatatgattcttcataatttttaattgtctcatattttgtcattttttaaagaaaactcgtacaaattgagcctagtaatcccaaaaaccagcctttttgttgaaaatctgttaacaaatcacaaaagtgataagaaaagcaaactgaattctaatattattcgatcatttagtccgaaaatgattatttgtttgaaataattgaaatatatttggtttgaaatattgattaaatatattataattaattttgctttaactttggattttaaaaataaaaaaccaaataaaaaattaattatttatattttcgcttgaaataaattaaaaattaaggcttgcgcaaaatttggtaatttttttgacaaaaacctgttaacaaatcgcattaaaaattttcccgggacacccctccccccgtcccccaaaatttcctagaaaaagcacgccggaaaaaaacgtttttaatgcaaaaaaatcaatgcttgtctattaattgcaaaaattggcctttttggtgaaaatctattaacaaaccagaaccaaaataaaaaaatttttccgacggcgccatcggcaacgccggaccccctccccccgcccactcaccaaaacttgtttggaaagatgcgccgcaaaaagaatgttaaaaatcttgttcttctgatcccgaatgcactgaaatttacgatttgctaatttcctccccaaaattattgaattcgataatgagagacgaaaaaatataatatttaatacttttttgatcgaatcattttaaaaataactgatttgaaacaattttgcaaaatattcttataagcagaaactattaccacgtctaaccttaaattagacagttgttgccaggtttccatatttacattttttaattttaagtgcatttgggttttttaaggatggaatcacagctcgtgatttagtatttttttaaaatttttttattatagttcacgatgaataataattggatgattagtgagtgagatgttttgttttccaaaattcatttggttttaaaatttttttaacaaatttcatcaaatcatccacaattttttcttaaacggcaaatttttcaatttttcctttcattccttttcattttttgacaacttttgaaataaaagtgcctatttttggattttaagacttttgaagtcaattttttgcactttccttccgtctgtccaaaacaattaattaattaaattgcatgtaattatttactaaatgagggagtaattcttgtgcttttaattatgtttacgatcattttcgagtttgtgatcacaatacagaaattattattcattattaaacaattaataatggcaaaggcaaaggcttctcccgcatttcttccgccaaagtcaaagtgattcccccgccgcccatcgtttggcaataaaaagggcaaattgaaaagaagcgggagggagggggagaagaagcactaaaacattgttattattattatattattattagaggtgttttaaagagacaaaacatagaaaaaagcagcgaaagcgcagacaaacgccgtcggcacaaaacgcacattttatccgatcaaaatcagtttactgacaataaagttgcatttgaaatataaattttaaccaatgaataagccaatcgatggcacgtcgtttaatggcaaaaaacacagaatttaatttatggcttatagactagggcccagcttcctctctttgaaacctttatttaatcattaaaaaagtagattacatactattttaatttcaaaactttaaatatattttttagtcaaaatttccaatttataattatcacaaatttaaaaatgtaaaaaatgctattaagattattgttaatcgattcttgcttttgtctgccaaatgttcagcaactttttttgcctcgtaatagtggcactcatcggaatggttcagtcaaaatttcaaaaaaaaaacaaacaaataaattttgcttattaagtaggggggggggggggtttccaataattttataatttttcaatttacaaatggccaggctcagcagacattgcccggcaatgccgtgctcgcgttcaccactccgtcgacgcccttggccaatcagacgctgatcaaagtggccatgatgttagcccaaaataacacggactacggcctgccacggaagaatgccgcactgcgcgattcggggggcgcaattccaatggcattggaacagttgtgggcggacgaaatcctaccaaaaagcgtcaatttttcgtcagttaaatattttaaaattaaaaaaaaatgaaattaaatcaaagatttcaatggcattacggcaattgcaacgaggcgtcggcaatgggccgaatttacaaatatgtgaaggaattcggtgccgacgcaatcatcgcaacgccgtgcatggacggtgaaacaaaaaaaacatataaaaataataaacaaatattttaaataattaaaaaacattgttatttgtcacagtgccaccaatgcttgggcatttggcctccaatttcaacttgccaatgatggtttggggacagagcatggcgtcggtgtgagttgataaaaaagcccggctccaaattgggcttagcact

SEQ ID NO: 7064 - DNA, 6247 bp, Heterodera glycines
cggtcaatttgtccgggctaaaacgggcttaaattccgccagcgaaactgcccaaaatttgaaaatttaaataattattttggcgaaatgtcttaattcaaaaatttcaatagaactttggatttttgaaattttgggcaatttcaactgttaaaaagaccccaaaatccatacgaaattgaacaacattttcataactttctttttacaaaaaaaaaatttcaaatttcatgaaaaaccaaaaattttcttaataaatttcattaaaagtcaaagtttttcttcagcgtcgcctagtacaaaaagctaaatttttttctaaaatgtagctcaaaatagcaaggttttgtcattttttcgtgtaaatctgttaacaaaccaaactcaaattttcaaaaatttacccgtcggccctgtcggcactgccggacccccccccccccccaatgtcgtcaaaatctttttgaaaaatacaccttaaaattcttttgaagagtaaaaaaggtcgatttacaatggcttgacatttctaagctaaaataaaggactataaatttttttcgaatttttaatcaaaattccaaaaattttgaaaaaagcccggtcccgtacgggcgcccggtcaaaattttggaccgggcccgggacgcccggtaaaacgggctttttttgaacgggcggcccgccccggtcaattttcgaagcccggtcccggtattttcaatcaaaattccgggctctagtagacaccccaaaccaagcggaaaatgcatttttcgtgcttaattctgtgcgtattaagtgcgcaggaattttaggcatttgcctaaaaatcgcatccctaattattaatattaggtaaatatgagtttgtcatatttgttttcaaaaaatgagaaaagcaaagaatgttgccgggatcgaaaatggatattaattatatagaattgactccttctggatctgtaactaaatctgaaagaattttttcggcaacttccctaaagagttacagaggactaaagtatcgttaaacgcgcaaaaataagttttttgaatcaaaaaatcttaaaaatgctgagaaatgcaaactgaggtggaaattactgagcattttggataagacaccgtacactcgactaacggtggccagttcgtgtcccattacttgctccaccatcgcatactcgccattggcagccggccgctcaacggccccaaaatgaattttaattttttttttttttttttaaatcctaattagggaaatatggtaatgaacagggaacggatttctaggttttcaccttcttttttttgcggatagcatatggtgagataaacgcaaaaaacatattttcttcgaacaattttcgatttagagtgactttagcaactattttcgcttatgaaattttttaacaactaatttgcctttacaactacaaacagtggtttttggtatgttaataaatattttttcatattgaataaatttaattatttgattttttccaccattgtatggaggggcgggggcacattaaatttttcttgtccattttcttcgatgtcattgacaaaacattgggaggagaaatgctgagctaacattaataggatggaatgacaacggatgagagcgctcctatccatcacaatgagcccagacgactgactctcccctgccctatctttcatcttcatttattccactttattttatttttacaaatacagttggtaatagctttgccctcctcccacccctccattttcggaaaaatattggttttcaaaagctgtcaaagcatattcgtcaaaaaatgggctcccagatgtggtgatatcagcattttgactgaacgggtcaaagatgatattagaaaacaaaattggttcattttatatctatttacaatttttgtattatctcgacattaggtattttatttttaaaatgtaagctttggtaatccttcggaattggtgtcccggcagaaaaaaataaataaaattttcttacaaaatcacttatgctagggtaaaaaaggcgctgatcacgaatccgagttcgggttttgcaaaattactgattttgtcaatgatttttcatcataacatttttacagaataatgaccacgggctcggaccgaacacaactccaactgcaattacattttaacgcaaataattcttccgaggcatcccaatcacaaaattcctccgaacaaatgcaaaattgttcaagtatgcatttcctaatctttcataataatctgttgaccattgtttagccaatgaaagagtctctggagaagattcggtgccattcatcgacagagagacttttggagacgcggagagtgacagaggaaggggaccgccgcccgatcggtttcgactggtctatctgatcgtgcttctacatggaatgggcatgttgctgccgtggaacactttcattacgatcgcaggggatgtaagacaaaaaaatttcgaaaaacaaacttcaattaaatgttttaatgggctttaaggcacttttataactgcttttttaagtattatttgcaattcaaattcgcaaatgtgagcaatgaagacaattacaaagtgtactttttcaattatctgacggtttgtgcccaaattcccgtgagtttattcatgtttatctgattgtgagcatttttctgcctttttcctattttagaatttgcttctaagttttctgaatttatttgtcgtcataagaggcggcttttaccgtcgcatttacttcactttggccgtcatttttggcatatgtctcgtcacaattgcgatggtttacgttccaaccgataactgtgccttgccattccttatcttttttatcctttcttttcttagggactttcggctttttcctcttcacaatgctatccgttgtgcttctgaatagcgccagtggtgtttatcaaaacagtatttggggattggtcgctgattttcccggggaattcgccggtgccattattcttggcaacaatttatgcgggattctgatggcggtgctatacatcctcatcattgtgttgggtttgcgattcatccgcttcgcttttgttcggttcgcttttagtcggtgccaatgccgcactcgccgccacagtttacttcggtctcgctctgtttaccgtcgtcctttgcattttttctttccattttcttcaaaaattggttctattctatttattttcaaactttaatctttttaaacataaagaatttctacaattactatgtccaaaaagcggcgaaagcgcgcgcgaacaatggaacgaatattctgcacgaggaggaaacgggcgaagcgaaggccaatagaaaagtgacgcatccgccgctaaaaacatacatcgcaattttctctgaggtaagcaccaattaaagcatgatatgctgtgaaaatatcattttggcaacttataggtccgtcgccagttgctcgatgtttggcttgtcttttttgtcactttggctctgtttccgaccgttttgttgaaagtgtctttaattagtccgttcaacgaccagaaaacttccggtggcattttacacattaattgttttttgacatttctcttaagaatcgctctacaagcagctgacagttttcctcaatttcaatgtttgggccgctgtcggctgttggctgtccggcttttccccgagggttttgtccatcggtgttttatttccctattcccctcccctccctccttcagcctttccccgattatttgtccctgccgatttgcctccgtctgctctttcttccgttgttttggttttgcgattaccaatatgacaatttgactccgcgtcgcttcgtgttcatccacaaccaatgggtgttcactgttctgatcactcttatggcactcagtcacggctattgcagttctttggcgatggtttacgcgccgaagtaacataattcattttaatacttttctcagaaagaaatttatgcagaaaagtcaatgaatccaagtcccaagttgttggcatgatgtccggctttttcctcgttctcggcattgcatctggcattctgttcactttcgttgagcctagccttgtcgatgcggcggaagactttttcggcattttttattaatgggactttaactagtcgatctgttaaattttttaattcgtaacagggaataacattttactctgcatttcacctttttctttttccaatttttgtttgttattatatgaaactattttcttaactcttcgtttgtttcatatctttctatctaacttttcgtcctctccctaacctgtcatttttgtgccattatttttgaaattataaattcattcatttattcttgtaaaagttattgttttcacataactttaataaaaccgattaattttcttagaatttaccagaattcgtttgtttcatgcgataagcataaaaatacaattttacaaactaacaccatacgcaagcactgcatttggtaataatggagctactggtccattccgatcgcaaattcaaaattcgttcattttcgaccatttgttcgaaatcggatccggggttcggaatttaagaaatggatgccagattcatgatcagtagggttcgtattgtatgattttgcatattttttctgcgcatatgctatgaagaaaggggctcaaaatagaatttctacgttaaaattttttggtttggtgaaggttttttagtgcatataaaagcatattaaaaaagcgaaaaatatacccctaaggttagtgcatatttgggcatttttccggtttttagggcatatttgggggatttttagtgcatattttatgcgcatatttggcattttttagtgcatacaacttcgagccctaatgatcagcgaacccgaaaagccctggaagcatgttttcacgacttttacaaataaaaataattggggtcgttttggcagttcgtctgttttgttttcgtctctctttgcccttcttaacatttttccatggcaaccgaatttataaattaacgggtcaaatttttgatcatcttttcattttcaatatttttttctgctgtttatggatcacattttatttttagaatttctttgtggcaatttcagcggttttcgtgtcaccgcaccaaagcatgacgaatgattaattggccactttgcttctcctcgcttgctgctggtttctctcatcccccttctaccgccctctgttttttcccgtccccccctctctctctctctctctcccccactctctctcctctctctctctctatgtatcatctcttttctctctctcacttcctcccgcctctctcctgtttccattgtctccaacggtgacttccttcctttgttttgttacgtgttcaaccacacatctccaatagcagcagcagttggcccccacccgtttcggaaaatcgcatttgtgcctccaatctttgcttaaatttatgcaattaatgtttatatttagttacacttttatattctgtttgtctcttttgtctgtcaaatttccttttgttctttcaaatagcaaaaccgttgctgatcgattccgatcggtcggtgcctttgctttggtttgcgccatttatcgcgcggttataacaataaacgtacaaagtacgcataacctgtttcatttgagcagaactttgctgctgcaattgcgccgatcattagcttaattgcaaattgtaagccttccattcgttaactttctcatccaacgttagaaggaacgaaaaaaacaacagtaatctttcgttgctcttatcgaatttaacagaaaaattaaaataagtaaataaagtcaacttagaaaagttttattttgttgcccattggctttgtttgctcttttggtctttttcttttgtcagctcaattccaaaagatcgcgcgtctcactgattgcttcttaaagtggatccaaagtgtgttgtaaaaaggttaaggaggagcaaagcacctgtggggctgacaaatgaggggagggtgagagacccctctcctcctcctcctcctccgcccccccccttccgactccacccaattaaagtcagcagcagcttcctactaacgagctccaaatttggcgcttgaatttgttcacatacatacgacgagttgtgcgcgagcaacgaattttggagaaaaaggtgagaaagga

SEQ ID NO: 7065 - DNA, 4657 bp, Heterodera glycines
tttttaatttagggattaaaattcaaaaaaaacatgtcatttttttgggaatcaatttcattcaaaagggaaaaaagaaaaacagaccaaaaattgtccggtgaattcttcttcgacgacattaaacccaacattggttttcctgttgtgtgcttcaacataggtgttgaaaaacctaagaaattcactaaggtaaaatatttagtttgattcgaagtctggacatgccaaaaaagatcgaccaaaaaaataactgactgggtgagatgccttactgaccaatattttctttccaaaagttgtttttaaaagtttaggtggttttttgccatgctacggacgcaacccttccgagacaatggtactctcctgagcagtttcagctatgtcatgtttcatacgagcgaataaataccataatgtcaatttcatgcagctgaatctatctttttcataaattttcaactttttgtttgaatccgggttcgaaatagatttcagaaccgagttctcagaccccggtaccctatttcataccaaggacaaggggtaccatacatagtctaagaaattagcttgatcacatttccaaaatgactcacgatttgttggtgtccagatgtaatttcccatttgtgaacttgtttcgggttgtagccatttcgggtttctgtttaaataatacataaattattgtttattcttaatatatataattttgtaaacaaataaaaaggtgaacaaaataaaattgttttttgaaaatattgatacattggacaaatggataggtatgtaattgcaagataataattggatgaataaacaaaattgcgcgtgtctaaaaataatgggggcgaggacaaagatcattatttattacacgttgattttcttttaaaacctaagcctcccgataaaactttgacaaggcgacaaatccagtgaaactaaaacattatttagtgaacaacagagtgtgatctatttctcgaaacatttattgatgaacatattaagacgccttgatacttttagcctgaattatgaataaaacgtgagaaacaaaggagatattccacaaagaagctgatgagttctacgttgtaatccaattaagttccattccttgatggggaagactaaacgaccaacccgtgatgagactcgaagacggtaaaaagaatataaaacgcgaaagaatgagtgtaatacaaaatggaaaacctttttaaaaaagttaaacacaaaaccaaccgttgtaagcagaggtatgttgaattgcgggtgccattcgggggccaggcaccgtttcaatgcggcatggtcctataaatatgaccatttcttgccgaacagttcccactcctatttaccatggtgttgccgccgttgctgaatgggcgggaaatgccgccattctctttgcttccatttgatgatgacgtgccgtggagctgttgcatctgtactttctgctgttgttggaagtacatgaccaactgctctttgaccgtaatttttgagttttttggaggcggcggaagcggaagagcagaacgggtgcactaatagggggaaatgcagttagtttttccatgaaaatatttttcttaattcgaccgtttttccatattttggtccggtaccgacctttcggcctatttcgaacaccgtccggactcgaacaaaaattcgaatattagcaattaatattttgcaataaattcatttaaaatgcacgaaataaacagaaaaatgcttagtaggcacgtgtaaaattgcgaaacaagttttgatggcatatttgtatttaaataggcctttggtacgcaaaagaacaataacttttaagatttttaatattttttgagataacccaaccccatcataacacttaatagagccccacattgggtttgtacagcgccgtcatgtccagcgggcgctcttgcataatggccattgtgacgccaccgccgccggcggttggctgcacgaaacgctgtttctgttgctgaatcgcacccattttggtgtcgttggtggcgctgctgtgcaaaggtatttagtgtaggatagcttaccgtattttctctaattatacatccgtctacaaatatcttccgctttctgaggaggttgaaaaataatatatccgggcatataattagagaaaatatggtaattctattttatgatttgaatttgtggattcattattggtttaaatatattgtcattttccttgagaaattttaccatatttttaatttttgaaatttttttagttaattactttgggtttttttgccacaaaataccatccccatcaattaatcacccattctccgttttcagcaactcggccagcatttgccgttgcgtttgtgtcggctgctgttggcatgggcgacgctgattttgaagcggaagattaacgtttttggaaatgattccagtgccgagagatgataccgttgattggctgaaagggaatgttatcgataaaaagttcagtaaatcgataaaaaccgattcctttaggcttcttaaaaacaactttcaaaatttaaaagttcgccactaaatgccatcccatcaattaattacacattctccgctttcagcaactgtgccaatgtttgtcgctgcatttgcgcctgctgttgttggcgtgggtgaagctgattgttaggcggcagacgtccatttgggatggcggcgatgttggacgattggcagtcgccataatactcacttaaatttccaaatttttaattgtcagggcaaggattatattcataaccataatcaacggtattctttgacttcgaccctcaaatgcccaacccattcttttttgttagtaagttgaaaatagaacttattaattttatgaaaaattataaaattatagcccttggcgccaagactccacttcgccaaaaaaaaaatccccgtccgtggggacagattctgatgtgattgtacgctaattcatcatgaaaatgagttttaaccttttgtccaaacaattatttacattaaaagtgcccaacttaggaattgaatcattcaatgtccaaaaagcataattaacaaaaaaaaatccagaattcgaggccgaaccatcgagtgagatttatgtaaaactatttcttaaagggtttcacgaccaaattaatcccggatcacaatgtaatattttgttcaaaaattatttgatttattaaattagtaaccgaaagaaaccaaatttgttactccgttgaatattttgctttttggaaatttaatgattcatccgagtcccagctatttcgacacttcagtcccgagtgtgtaacaatgcaggatgtctgtcccggtcccctgcttgcaccctcaattacccaatggtatgtatgcgtacaaaccaacacccacgcacaccttttttgaagaccatgctgtcgcggttggtggcgctgcacttgctgggccatcattggctgttgttgtcctccatcgtcgtcacttagcgtaatcacttcgcaatgcttgttggataacataacaattggcataaaagctgtaatactttattatttttgcattattttatttttccatctattccataaaagaattcgaaccccagttagagcttgtgcctcaatgtccacaatctaccaaatataatgtgacattctactggccttatttaataaaaaaagatagaaaaaatcgtttgaattctgcatatcgaaaaaagtgaagaatatttgtacctcagcagatgaccaatgatacatcattcgacacctattagtctctaatgcatgaatccgaaagaatttttggtcaaaaaagaaattaacaacgttacggaagaagtcaacgcgtgatccgcaggcggctgactgattggcggaggccctttgtgcccacgcagtcaacaattatttttttatcacagtcattttcagaggtttttgatggccatagcttatgtcaattttttttgtccaaaaattctttcggattcaagattggtccataactcgaccagaaatgttttccatcaataaattcattcggattcatgcattagatacatagaggcgtcggatgacatatcatttgtcgaatttggtgaggtacaagtattcttcaattttaccctgcttatctgagcgattttttcagaatccgggtatggggttcgaaatgggtgtccaattcgggcagacagagagaatgagagattggtggaaattcttaaacagggagaaatgtgaagtcaggagtaaaaaaatcgaagggaaaatcaattcaatcaattaatgtaaataatttattcctaaatattatattcgttttatgcgtccaatcattttcttcttactttggtcaatgcttacattcttgtaaacaaacgaaagcttgaagtctattaaagttttgagtataagtagattctggggtaataacaatagacaaagattattcttgaatatactcgaaaaagatgaatttcgtattttctcgttgaaatttttcctagtgtcagtatttgctcttttctcgtatatttctgagactttaagctttcatttgataccaagaatgcaggcatttaccaagtaagaaaaaagttatggcctaagaaact

SEQ ID NO: 7066 - DNA, 2115 bp, Heterodera glycines
gcattaagcgcagagaaaagggaggaatcttctagatatcgacccaacattctcaagtgtattgttaactgctaataatatcaattacatagctaatagaacttgtgttattaaaatttcgaaattaacaagatgtctatacggcttatgtataatatatgtacaaatatagacagtatattcatgaaatatgcgcccattcccactactaatcttccgtgggggtgtgcgagcgtattcgcgcgttttaatccacccacacacaaaaaggagcgaaatgctccgcattcaccacacatttcttttctaccgctgctgtcgttgtctcttctccacaaaaatcaataaattgcggaggagggcacacgatgcatagaaaaattttgtgtgcataggcacgagagagaacacacatcctctcttttatatacaatatacacattgaatactaaaaaataattagggagagaaaaaaagaaagagagcatcagacagactgacaaagaaaaatcaatccaaacgtttgctttttaaaaaaggcactcatacatttgtaatttttgcaagttatcgactaaagcacctcctaatcgatgaacgaatggaagaagctgaagcgcctattggatgtttcgcctatcagtgcaatcctcttgattaaccaaaactaaatatctgctgaacaacttaaatggattttgttcacacttttccactagtctcccaaatttttatgaagttgtaaccatctcaaaaacccttaatattccaatgccatcggttcatcatcatccccagctttctagacttccctcatcaagaggctttcgaatgatacaaattcatcattattaatccctcagattgtctccatttttagagtcttgaaccagttcaaaaaccggctctttggcatttccgcacctggagacctatttttccgtgcttagatcctcgagacgaatcgattggtataccatttgtgcatttttcccggggattgactatatagatcaccctgcgactggtatttgcgttgagtctaatgattagatcttgacccccaattaatattttttttatcaacattttatgcgtttattggatttcatactttatcaattggatgagttgaattcatcaaagattattgatcacgcgtctatttgtgatccaaagtattaaaaaaaacaaatacctaactttcaattggatttatgaggccaaagattaagcccacccaaacactgatccctgtcaatctttctcacagaacaaatgacccctaatttgaggaagacaaatgagtaggagcatcaattacgaccgcaattcgcacgtaccaaagcgaaacagaatccgcagctgcccaaacagccgccaaattggtgagaaacgcggacgaacataaagaaaatgaggagacccgtttctcaccgctgctgtgtctgtgcacaatttatgctttttaatctctgtgtgtgtgtgcctttggtgtgtccgacgccgcgggggacggagaatattgatttcccattttccaatgtgaaggaaagagacgaaaaatatgtgtaataattagggctgggaatttaagtcaccaaaaatctcaaaaaactcgactaaagtcattaaaatcgacaaaaagtcacgaaaaaaatacaaaaagtcctgcaaaaaaaagtcaatcaaaaatcatctcaaacagtagaaaaagtcaaataaaaaagcatgttagaagcttcggaaaatatgggaaccggccactttggcgcaagactctatatcattttgatttcacagcaaaattaaataatcttggtatgattttaagtggcttgatagtgcctattaacctgcaaagtttcaaaaaatttagctgagaaacaaaaaagttatggccaaaaaacctcaaaaaattgaattttcctggccattttggcgcagcgcgccatatcttttttaaaacctaatataattttttgaaattttgcaagctaataaagaacatttagacctattgattaatatcaacattattttatttggtcgaattaaaaaaaagttatgaatctttaaacttgcccgcgccaaaatgaccccgacccgaaaata

SEQ ID NO: 7067 - DNA, 4848 bp, Heterodera glycines
taaaagaggctaaattacagatgcttttcaaattttgggtgtatccgaatagaaagaagtggaaaatcagaacttttcacgcctataaaattcgggccgaaaaatattggtgtttgtgactagaaaaatagcagatgcatatcaaatgactacagaaaattacagcctccaagaaaataattgctttgcacaagcaatattttgtagagcccatcaaacacattgtgcttataggaaaggccgaattaaacaataagggcctttttattatgattacaacaaatcagcatggcgtctcgctgatatggtatgtttcagttaaggtttagccgatctacaaatttcggcactgtctattttgtaaaagcgaatcaaattcctttggattccaaagtggaattacagaattgcgacggcaaatcctaaatagacaacgacgctttcattataaagctttaagggaggaaaagtaatacgaatatttcaatttcttacttatccgaatagacaaagataggttacacacgaacatttttatagaaattccggctgaaactaaaatccctcttttggtcttaacttatgatttttggcccattatggatgaattaagtatagaaagcgtcgcagaaatacattcatattttctaaattcgggtttcagaaaattaagatttaaaagaggctaaattacagatgcttttcaaattttgggtgtatccgaatagaaagaagttggaaatcagaacttttcacgcctataaaattcgggccgaaaaatattggtgtttgtgacttgatgaatggacgcacagttcagcaacactgtcgaggaccaccctcaaattgttcaacaccaactcagatgccatttgcaaaaagtgaaaaaatagcaccgaaaaaggagacaatattaaaaaattgcaaacaaagaatgtgattccaaatcgaaactccgaccaaaacaaacaaacaaaaatatattatgaaatattaacaactattctgagggacggcgttacaaacaaaaaaatgacacaaaaaggaaaaattttcatgaaattttttttcgtcattaataataatccatccctgtcctccacaattgactctcttcgggcgcttaaagtcggaccaaattgttgaactcggccaccaattgtggcaccgccgcattgccaaagttgtggctcaactgctgcttggtgagcgtgaacttctgcaacggcgccggcggcggtcgcactccgtcaatggtacacaggggcggattacgcggatgttccttgcctaaaggcttcgaatatacgaacatccggggcctaattttgcaatttgatattatgcaatgtgagacatttccatggataatgccaaaggaagtcttcggggcacttttgccgtttatgcaccccatccaaagggggaacctttttgtggggctttggattggttgaaggaggtgtcacgtgttagcaaccccgaaacctcggtgaacaaggtttaacgacttataacaaaaaaattttaaaaaattttggtggatatacagaacaaaagtgccgacttcagttgtccttggacaatgccaagtccaaggatggcatcttaaatcccccttcacgcactcaccctggtattggtcacggcgccgtttgctgggcccgctggccatgcgaaagccaaaccgacgatgcatttgggcagagccccaatgctttttactgtcaaaaaaaataattaaaattgaaatgaaaagtaacgatgttgaacccactcccagtccacgtgtgacagttttccaacaaccgccatgcattcctttaatgaataagaactttagagctgaaaaacaaatccaaatcaactcaccttgcgcaatacgtctcatatttgtttggcatctgaatctcggaaagcaaattaaaatgtcaaaactttggggggttaaaatgtccaattttgttttgaggaaatctacgaaatttgggaccatccgacagactaaccacgaaaaaaaaatgaattcgtccatgtgtcgagtctggaacagctcttcctggccaagctgaagttcgagcaacgcacggtccatcttgttcatgaacagcacgggtttgatacgctcagcaattgcctgacgcaacaccgtctccgtctgcacacaaacacctaaagattggatgcagaaataagaataaacccaatttaatgtgactgcaatgaaatcggtgtttgcggatttcatcagactaacgaaaagcatagttttcaaaatcaaacctgacacacagtcgaccaccaccaatgcgccgtcagtgacacgcaaagcagcagtaacttcgctggagaagtccacgtggccaggcgagtcgatcagattgatcaagaagccgtttacaaattaaggagaatagacgaacttttgctgtcaacaccgaagcgtaaaaacgatgcgccgtcggaatgatttggccaccgccacggtgactggcatcggcgtgcagcgtaacgtcgtggatgtcgaaacggacaccgcgcatgttctcatcacagagcacaccctccttggtcgctcaacaattgcttgacgcaacaccgtctccgtctgcacacaaacacctaaagattgtatgcaggaataggaattgaaactaaaaagccaaatgaaaatgaaatcgcgtaattgtagacaaattaatgtgacataaatgaaatcgatgttttgtggatttattaaattaacgaaaagcatagttatcaaataaaacctgacacacagtcgaccaccaccaatgcgccgtcagtgacacgcaaagcagcagtaacttcgctggagaagtccacgtggccaggcgagtcgatcagattgatcaagaaaccgttgtatttttggctcttcccatcgacctgctcaatgtcagcttggctttcgcccttgacgaacgccaagtctttgcgctcgagttcaaagaacatcgaaatggcactaaattttaagtgaagcaaaaatattgaactttgcactaacccaccactgctagtatcatcaccataccgttcatcatcattccccacccaaacccaatcactagctttgctgtccgcacccaaactacacttaaaaaggaggaaaccttgacacctgtaaccagcgccatgtacggcgttcggttggggtcacggcgcacttcgatcacgcgctcgtcgtacgttttgtcggcaacggttggatcgcgcgggtgcaagttgagcatgaaatcgccaaaattgacaccgccaacgatgtgtatgcacaactaaatgttgaacatacaatttgtttaagctaatcacgggaaacgacaaaatttgtaaggggcaaattgaattccaaaaccaaaaataagatttttacttaatggcaaaacgtcagattttttccccaactttcaattccgatttcggatttttgaaatggccgatttgtaaggccccgtcctaatttttcaatgccacagtattccattctcagtcctaagcaaacattccatgtcgtaccctttttggtgtataccacttcaatgtaccacctttttattttttatctgctacaacaaaacaaatgaacaatggaaacattgattattcaagactgcgggagcgatgagcaaaacgggttgtgaatcgaaaaaaatcacaacattgtccataaaaactattgctcgtatttattatttgctcgcaactggtcaacatgttcagaatcggctggtgaccgctaaaaagttgaatgattcaaacaaaaaaaaattttcaaactccggatgctcagaaaagttctgaatttgcagaactgcatcggaaatcagatcaccgataacaatggcaacgttactaaaagcttcctggaagcaaaaagaagtcagcacattatataaagaaaaaaactgacgattcgttcacgcggaaaatcagttccatcatcgtgctggagattggtagctgttggcaacaattgctcaaagagagtaacaattggcgggaaaggaggccaagcttaaccaaacattttatgagtaagatgggaaaaaagacattttcaaacagacaactcactgagaataatttttatctcatttaagagaccagaaatgttcggcaaaacaacgggaacgggcacgttcgacaaacgctcgcgcagtgacgccaaatgcaccgcaaaatttctcacaggcatgacaaaaaattcaatgtgctaaacaaattaactctgtacatttgattaacaaaatttgtttgaacatacttcacgggtatgcggtgttatgcgaacgaattgttgtgccatttcaaatgcaaataataggtaaattaattaactaagactaaaaacagttacaaaattaaaatgtcaaattggcagagtttcaatcggaaatgcttagaaaattatgagaaatgaacagaaaggtcagactattttaagaaaacatcacggaaataatgaaagacaaaaggattttttcttgcttattaatagggcccggatttatatagaaaaaaatccaaaatatggattaaatacagataaaaaataggaaaatatggacaaaaaattctgaaaatttgttcgagtcttaatttttttttttttgtaagcgaatgttgctaatgaatttttttgcacaatttttgtttagtgtattgactgatttggccgtttgattgaaaccatcaatgtggctcgtttggatgatgggggagaagccgagaaaagaaaaaaaaaattttgtttaaaaaatcgcaaaattaaacattacataggcacaaaaaatcctcgaaatagcacttaaaataggaaaaaaa

SEQ ID NO: 7068 - DNA, 1931 bp, Heterodera glycines
aaaaaagttcatgatacgtaaaacaacaaatcatactctctttatatccaaaagttcctccgaattatgaaaagacgacatttttaaattaagataggtatataattttgaagagtttttatttccaaatcaattaacaaataataacaattggtgaaataagaaaagaaaaaacaataatacaatcatgttaaatcagttatagccgggatgtatcaaaaggaattcacgatacaaaaagaaaaaagcattactcttcgagctccaaaagttccaccgaacgtgtcaaaatatttacagcaagtgttttggcctcgtcaagcttgggaatgataaagttctaaacgaacagctcagatacattgacaatgaaaaccaaaatcaaaacgtgacgccgagacgcatcaaatccaacgtcaagcgtccatcaattcgagttgacactgcggtgtcagggcgttgttgaatgcaacgagtgtcactcgaagcttaacatacctcttgagcgattgttcgtattccgcaatacgaatgaatcgtgactgaaaaatttattcaatggtacattttacaacgcgaaacaaatggactgacgcgtttcaattcgggcaaatcgtttttgtccggcttgagagttggggtgaccggttccaagctattcaaaaaggaacaattggcgggaatggacgcgctaaaccaaaattatttatgaataaaagatttaaaattcgaataaacactcactcaaaatggttttggtcttgtccaagtgctcggaaacggctgaaggggtgatggcggaatcgagcgaaatccaacatcagcgtcatcaatttcagttgtcactgcggtgtcagggcgtcgtcatgctgattgttgtgacttaaagacaaagctgaacaagacattgatggtggtaattagaaggccgataccgtcgcgtcgaagggcgcggatagaagagaagtttgacgagggaattgagcggcggcaatccatgacgtttattctccaaggaaacggcaaataactgcacgtctttgatggcacattcgatcagctacacatgaaaataaattttaaattttgagcaacaacaaacaaacaaacacaaaaacatactttaaggtcctccagtggaatgtgaagaaaaatgagggcagggtccgacattttgttttttagaagatttttaataagaaagaaattaaagtttagagagagaaaggaatagggaatgaaaagccatattttaagcgaccaaacattttgtgtagaaaaaagcaatgctcagaaaaaaaacaacacatgcctattcatttttcctgtcaaccgtagaacatgtttggtgattgttgtgacttggtcgagtgatgtcacagaaaacttctaaaaaatgcgatacaaatcgtcaaaataaaactaaaatctaaaccagggcatcatgatgacgagtgtcgtagccacagtcgatgaatgcaacgaaaagacaatgctgaacaagaaattgatgatggtaattagaaggccgataccgtcgcgtcgaagggcgcggatagcagagagaatgtcagccccgatattttccaatcgggctcggtgatcctgaagcgacccaacacattggaaagatagatacggctaaataaatttttgactttgatcatgcaaaaagaaaagaattatgtacctcaaaggccaattgcattttggcaaaaacgaaatgatatgctccgttaagaaattataaggtcaaaactttgaagacaggtaactttttttgtagggcaagaaacaaatctagaaaattcatgtaatcaaactttttgtgttgatcaaaaaagtcaattgcaccaaagtgagaaaacccttaaatggcttgaaatcgggaaattttcagaaaaaaaatcggctcttatgcagtttagagg

SEQ ID NO: 7069 - DNA, 4873 bp, Heterodera glycines
  unsure (1)..(4873): unsure at all n locations
cccctcctcccaattctccccttcgtcgtttgccctcctttccctttgctcctccatcctccgtcggattttgttccgcttcagctgatcatcattcttaatgcccttaattatcatttttatttaggtaaatgtcagttttttgctcgtttaactcacttcgtcctcctcccccaatggctcgctgtatattttgtcgacgagatccttgcgcaattcgacttccttctcaaattctttggcaccaaacacgcgtctctgtgaaagaataaatataaatcaaatttctcatcttattcatcaattcgaggcccgattccgtgcaactctaatgccaattgatacaaatgcttgtttttgtactgcatggaaatgaaagtccgaaaaatgctacttgttgtgtcttttgaattcgctaatcaaaatcaagaaatggttattgggtatattgtttttgcctcacctttgtcacgggatcaatgaaattgccatgttggaacacaacctaaaacatttggtatttaatgacggattgttgacagatcctttagacaaagctaaacaacgcatttattaaattcgaaaatgaaaatcagtcggcggcgactaaaaggcaaaaaacaccaaaggatttttgaaaaaaactaatgccatttgttaattgcgtgacgacaaaatgatgaattccttgccttttccacagcgtactggacagtttttgatggtctgtggatctctgagaggcgtctgatcaacacaacgtcgcccaccctaaaagccaaaatcaaaattaaaacaaataatttagtggtcttttccacctgcatttggactcggggtcgagcgaccattcataggcagaactcatgaagaacattcggttgtattcgtagaaactaaatgaatgaaaaaatgaaaatagaaagaagtgagggagaatgaacggagaaaatcaggcacttttgttgacggagccccgaaaggttttggaattttattaaaaaccaaagccagggagtttttggtttacttttttcagaatagtgaaactcgtttacaagttttcaggacgttgatcacgaatatgacataattttaaccaatttcaaatcctaacccaagcttgaacaaaaattgcaactaaaaaaattgaatttaagatttttggcgaaggattggtaaaaatgagtgtaagagcataatcagtgaccacgaaaacccctatgttttattctgtcaaaaaccaataaaattctagtatttttcggggggtggggcaatagcaaaattgctgaaaatcagctacatccctaaaaacacttaaggtgacaacagagaggtcaagcgatgaattgccatgtattcagtttcaattaagagactcataatttgaaccatttgctggccacatttttcaaattgcccgatttacatattccgaaaatcaatgaaaatttgccatgtagtaccccccagaacccacttgtttttggagattttgactttgacacaggtgtccctctgcagtccgatggtggtgatttgcttcactttggccaacagcaactcgcccgaaactttggaaacccaagccgactttttagacaattgttgcattgatatattgattacactaaagctgaggaaaaataaaattaatataaagcggattaggtgaccaattctatgaaaagcattttattttcgagcaatcttttctagcggtcattattgttagttattgtgtgttcaattaagcaatattctgattgtgagcagtttgcacacgacaaatttttcagggaatcgaaaaacattaaaacaaacaaaaaatcattttgattgtgcagcatataaagagcaaaaccggctaagcaattggtagcagtaagcaatgctttaggtaggaatatgatggaaaaaaacctgttatttataacaggttcctgtagtgcggcagagaagcgaaataaaagtaaggcaactgttgcaaaaaatcaatgacagaaacctgtaatcaaaaagcaggaaactgctattaggtattacgcaaaagtccaaaaatttaaattttttgtagctgctccgagtagatagacaatggactatttcctccgactaaccactacgggaaggagtaaatagtgcagtgcctgcttgtctgtctacgcggggcgccgcgggtggaaggggcagatagtaagcagacgcgtgcgtgtggggagggagtgggaaaaaaggagggtaaatggcaacagaaaagaagcgagagtaaggtgtaatagcgcactgtctgtctacgcgggcagcgccgagcggaacgggacaactccgtctcagccatgttttgagcatcataactttttaccttattgaccgaatccaacaatcttgacataattcgaaagctcttcacaggctctattagcctactaaaaattacagagtatataggtagaactgtaaaaaaaaatgagaaattataaacttcaaaaattttggatttttgcggttttcaactgacaatttttttgtgagtgagaaaaacagttatggcttcttaagttgtcagggacggagttgacccgtaccggcgccgattggaaggggaaattttgaattagcggggtttttggcataatgaagacaagtttctgcaattgaatattctgttggtcagacactaaccacaggaacctgttgtaaataacaaatttttccaccttaggtaggaagagaatttgactgtgacaaatccaggccgccaaaactattgcaattttcaaaaaaaaaaagcactgtcaaattataacgaaaaagtaacaatgtaatgcaaaagggcctggatgaaagcgaataaatgcaaagcaaatacaacaacactctctctggtggtggagcgaatattgcgaattccaacggagaattttacattttgtatatgtcattggaagcagggctccatgtatcatcaatttgaccaaaagtgtgcaaagacaaaacgccaaaaatcctcgttaatttaaaaaatttccattgtaaaaacagaagaaccgatctcaagtttctgctacttcttcacatttcttgttttttcgcttcaaaatcatttttttttgtaatggtgcgcacttttaaccaaattgatgatatgtggggctccgaatttttacgttttcaataaaagtaaaatttggagcaccgacaaaacacaaagtggggaagaataatgtgcagacattcaattggtaaatgtcaagggatgggttgtgatgaataattaaaggaggaaacgttgtcgctcatcgcccgccactctgtgccgcttcatcgacattcccacactttgatgctgttgtccacagagccggtgaccacgaagggcaatttggaatggaaatctgaaggaaggtaaagggctgtgattgttttattacaagtagttaaccgtcattaaaaacaaataatttgtttacccaacgcggtgacaaattggggatgtgcctgcagcgttttaatgcaccgccggtgctcaatgctccacacgcgcaacgttttgtcgtcactgacagacacctgcacaaaatagacagtttaacactcaaattgaataaaatgaataacaaaaaagccgtaaaaaactataaatgggttatttcgcctccttttttggtaccatttccaacccccggggttttctcgcaccaaaaatttgccgttaggatgcagtcgaatgtcgcgcacccaattgtcatggccagccaaggtaaacagacaacagccggacaacacctaaagaagggatggaaaatggcggaaataatgaaccaaaaaagccaaactcaaaaaatggttacctcccaaaagcgaatggatcggtcacgcgatgcggagaccaacatggccgttttctgctgttgttgctcaatgtctccgttagtttttcctatggtaatgcaaattccattaaataagttcggcattaaaaatgaaatttgccaccttctcgcgacgactcgccggaaaatgtgagaatttgagcagcgcttttgtccgacacccaaatgatcgactcgatgacatgttcatggccaagcaaagtcattttcggcactttggtggccaaacaccaaataataatggactgaaaatgcaatgaatggtccgaatatatacaagtaaagtggttaaatttttagagttttttctaagtggttttaatcctcatttaaaaagtttacaaattgcgagtaagatctgcttttggagcgaagaaattgcaaaaaaccatatgaaatttcttacggttgggggagtcgaccgcccattcccctcacattttggtctatgatttgtataaaataggagagtgccatcgttgtctttatttctttaattcccatactccgcctcaataaaaaaaatgcaatttgttaccctgtcattgctgcacgaagcaaaacactttccgtcctcgttaaccgccaccattcgaacccaatcggtgtgtttggagaagttctgcacgcaataaccattcgcaatgtcccacagtttaatcagcttgtcccgcgacgcggacaaaataaaatctccggagggaagaaaaacgacggaagaaatattatgttcatggctaaaggaaaaaaggtaaattagcaaaaaaggcgcaaaatgagagattaccctttgagtgttttcaaacattcgtaagtgttcacaaagtcccaaattttgatggtcatatcagcagaacaagaagctggaatagaaaaataacaaaaaggaatcgtgaaaagatttaggtgcaaaaaatccaaaattanattttaatgaactaaccgagcaatttgccagacgcattaaagccgat

SEQ ID NO: 7070 - DNA, 1107 bp, Heterodera glycines
aatcttttttaccgggctctagtgctgagaaaggtttttgactattcgacagtcaaaatccggggttggctttcatggaataatgccctttcgggatacctgctcctgacaaatcggactcctgccatgaagtttcgcattgcaactagtcaaaacttcaacagctcgcaaacaacagtatacgactgtgaaaaacaagaacaatcggaaattcgtggacatcatgtagctattcgagcagttgtacacagccaacgaacgagccctcattgatcatcaaaacaaatagtcgcttaatgaattagaaacctttacccccaaaaaagcactacaattttttttgttcgagttagggtccggggttcggaattgggcaaatccgagttaagattcgtaatcagcaccctcgaaaaccccaaagaactggttttgaacccaaaatttaaaaagaaattaaaaattagggacacccattcttcaggattgccggttttttccttcaaaaaatgcacaaccaagaagccccctgggacagtctctgcttcccacaaaacctacaacgttggcttcctgtcggaaaatggaagcagattgagcatatccatgtgactccagataatcgacaactgccagatttctaaaaagtgatggtataacggttgaattgaaagtttcgttttctcccacatatcatcgcgctgttttgaggacgacatgaccatttctggtacaataatatcaataagtggcgctgctcgctaccgcaaattttacccttaaaaatttaggcatgaatttaaagtctttcattatgtcaattatgcggaaaacaatttaaaaaactcgtgatcaggcagaaagaacaatcctaatcattatcaaaagattatgaatggcgaagcgtgtttcttcattgaatagaaactgttaatttggagacacgaatttttggacaacggcgaccgcaaataaaaaaggaggagaataaaatagtggaaaagagggagagagagaaaaagaaaaagatggggggggggaatttaattaaagagaaacccaaagaaaaaagatgcaaaataaaagaatgggcgtcagaggagggggaag

SEQ ID NO: 7071 - DNA, 6709 bp, Heterodera glycines
  unsure (1)..(6709): unsure at all n locations
ttataaattttacatnntatgcttcatncacttgtttctccatgaaagtctgacaaagactcaagatcactcaatgtcgtctcattctgctcttcaaaatttgtggtgtcttcattgttaactgtaaaatgttattttaaatatttttgaaaaaatccatcatttacttttcccatttgcaaaatcaattaagtcttcttcaataagattccaatttgcttttgaaaacatagattcatcataagcaaaacgcgggtccattagagaacaaatacgaattaacatattctggaccaatttcttcaccctttcatttaatgagtccaccaaactgtcgataaacggttgaataatttctggaaattttccctcttgcaaaaaaacatgaagtcgtttaagagtcggcaaaatcactgacgccgttgacacctcgcgcgacagctgaaattcattagttattggatataattgcttatttgctgagaagcaggtattgtttccatctctgccaggcgaggccgctttgacaagcacaaaagtccggcatttcgttggtcacttctttcgtcttgaaaataatttctgaaaggcactctgtcttcattgcatcactgacaaccaaattgagaaaatgtgcacaacattgaaaactaaagatttcattcatttatcactgatttccttggcatacctctccttttccaactgtctgatggcagattgcatattcttcgcatcatcacgcacacaacacgccattttgttcaatgtcaatccattttgattcaaacatagtgcaattttctccgagatcagttcaccagagtgaacaaaattttccatggaaaaggcagcgagtacggcatcgtggcgagagaaacttttatcaatccaatgaacagtgacactgaaattacaattaaaatgattaaacattattaaaaaataattatcaacctttgtaattgtggtgacagtgtcggcttagaccaaccgtcactcgtaattgcataatgatcagatccaactcccgattgaattaaacaacggatttgatcggacatcctgggaatcacttttcggcgaaaatgttctcgtgcaccaagatccttcaaaaataaattcacaatgtataagatatattatgatgtacaatgttcggatgtgctttttgaaacaaatcctttaagtctgggtcatcgaaaaaatagaatgaattgttttgccggaccattattcgcacgatgcgttcttcagcaatttccgtctcattcttttttgtcaccaaaaaagattgtatttgcttttgtttctaaaaattagtctctattacaataaaaatcacaataaaccttatcctcccccatttgccctaaattttctgtgttttttaacacagaaaattccttttgatgctttgcttccaaatgtttccacattcctgtagtagagccgtcacttcgggtgactttttttgcgcagattttgcaagttgcaccagtcaaatttttgttgtaatgtttccaaatatcagacattttaatcaattaattctaaatgaaaaaaagtagatggaaatcaaaaaatgaaagaaataaatgaggtggacaattgcttgacacacaacccactgactgtaaaatttggcgaaatgttattcaaaatacaaatattttcccatttcccaaccttctctctttcttttgctctcagaactccattcttaccagtgcatatttagtaccggttagtaccggtaccgccgttactcaaaaaccgggaccgagacttgacttttttcaaaaaccgggaccgagaccggtaccggtacctgaaaaaaccggtaattaccggatcggtatcggtaccggtctcgtgctaccctacttgatatcattcgatagttctaaatgctctctctctttagtgcctgaaatattccaaaaaaaaaattttcaaaaaaattatggcgaaaatgttcaaaaaaacaaggttttttagtttctcttacagagtgtgtttaaggccatcaaatggcatcaagaattaaaaatttggttgctttagagcaaaattataaaaaaaatttcgtccaaaattttcattttgaaataacgactccgtcccatcgtgccgactaaatgcctgatccattctaagggcctcaattcattaatctatctatttaccctattggtgcccaatttaccggtccccctcccagacagatgtttataccccaattgcgcaatggttttgatttatttacaaaaaattaacaaattattataattcattttaaatatatgaccaaaatttaaaaaaaaaattagcaataatcaaaaattcaattcgtatttgtaaaaataaaaaaagatcaataattcactttaatatacacgtaaaattataaaaaaatatcaacaaaacaataatcaataattcaccatgcaacatcagaaagtaatttgtataaattaagaaaattcaatggtcctaaaatgactaattttttttttgttgtaatttttatgtaaaagaaatgctctggaacccggcatttacgaccccgagttttccgctccccgtcccccgaccctttttaacatattttttaaaaaccaaaaaaagcctcagggcaagaattttttgcttttaaaaattatttagagcacaatactgagctggctttatttttgggtcggggtcacttcggcgcggaccatttcggcgccgcaaattttgaaatgctataacttttttatttgtcagttagctttagccaatctagcatcatttgaaagctctatgtgtgctctatatttacatgtaaaaatagaaatgaatgattcaaaaataaaaaaagttatgccacgtggcgcctaaaaagccaagaaaaagtcaatttttgaggttttttggccataacttttttggaaactgacgaaatttttttaaattttacaggctaatagagaatctgaagagctatagattgataacaaaaatttttaatttggttgatcaggaaaaaagttgttagcaacggcgccgaaaggccggcgccgaagtgggcggttcccttattttttacacttttgaataaatattgtcacacccctaaatgtgaaactttttagcacctatttttttaggttttttagaacctaaaaactaaattttttggcagtttttagcaactataaatcgtagccatattaagaaaatatattatattaatgaattattttagcatgttcattattaatttctctgttattttatttgttttaatttcccccgttttgtcatcatttgctacaatatgcgtacgaccgaacacttttaattatgtggggcgactgtggtgtacacgcaataacattatgcacatgatttatcaagataagcccaaattgcagatgaagaaagtggaagatattcatgcattgccttctgggtggatttaggcatttgtgatcagaatgacacgaacgcaatgatccaaatcatcaaagcagataccaatgaaacggttggtattgcaaatggatgtgatttatgtaattagtagggctctaatttttagttttttacccattttttcctgctgaactctccgtgtggcctgaaacgcacgaaaaacaattgtttttttggtgtgttgttaagctacttttcgagttattagttcctattttcggtttttatttcttagagcctaaaaagaaatttaaaaacttattttaacctattttggcgttttgcccaaatttattaacaaacaggcaaaataaaaacgaaccccttaagaatcgatctaaaaaatttttcaaagaatatacctatgggaattgacctgaaaaaatttcagaaaatatatttatacgaaatgaaaaattttctcaacaattcatctcaaaaaattatttgtttattttcttgacaagaaatttttgcgttttagtccatattttggtccatatttggcaatttttgaggaaaaacccggggcctattcaaattagcatcgtatcaacgatgcgatgatacgacgatcatatgcgtgttcaaattaaaggttttcatcgtatgatgagcagtcgtttgcagctcatcatacgacgtatcgtacgatgaaccaatcgtacgatcccatcatacgatcgtatggctgttcaaattatttttatggatacgatgtgatggttttatacgacgagtgcatacgatgagcattaaaataactaagttatgccataaataataaaaaataaatccaatggtaaattaaatttcttaaattattctatttcatttatctaacgcgaaaatatgaaaatttacaaattctgactaaaatttaaaataatataaaaattaaattatcagtgaattttaattttcaatcgttgaaaaaaattgatgaattatttttatttttatttaaaataaaaactgaccaaattaattaaaattaaaattgaaaatttttacattaaacctaactaatagagggaaaacgcaaaatgattaaattttacattatctttatgaaaaataaattacttttttaaaaatatttggaatgttttatgtttttaataatttggctgacttttagtggtaagaaaaatttaaaatttatatgacaaaatagctgagactttaatctataagaaatatataaatattatttattctggtgtctcccgaattttttacgaatttttttcctacatacgatgtaggaaaatcgctggttccttccatgtatgtctacatacgattttcatagagggaggctcatcgtatgatgggctcgtcgtatgtagaaatgttttaatttgaacgcacatacgacatatcgtacaaataatcgtctgccgcagacgattttacgtgcgatgtgacgatcgcatcgtagatgcgatgatacgatgaatttgaacgtacatgcgatgacttggtgtgataaatcgtatgcgggagacgattttaatttaaacgggcatcggggctatgataagccatcacatcgtatcatcgcatcgttgatacgatgctaatttgaataggcccctggattttggtctcgaaaatccagacccagccagatccaggttagacacgaaaaaaattccctaggtccaagtctcaggctttccaaaagttgaactcaaatgttcaaaaaatatttttttaaatattaaaaataaataacaaatataaacttattcataatttaattaattttagttaatataaatgacaaacatgttcatcgttttaccaagtatttatatgctttttgcgacccgaattttcattaatttattttcggatgactctttccaattttttttttttggatgattcgttttgcgcaattcgtcgctgacgtcattgaatgcttttacacctagcaatttcctagaatattttttggagtacctaatttgtttttaataaaatttaatatatttttttaaataaaatgcattgatttccttaaatccgaaaattattattttttattgggtttttggaaattaaaatggaaaataaataaatgtttaattatgtttttaatttgattttctcactaataattgatataaataattatttttcttttctttaattttcattaatcagtttatttttttaaagaatttcatatttaacatatattcatgtaaataaagattgaaaacccgaaaaattttgaattttttgtaagaacttttgagaaaaaaatagttgatataagaaaaatgtcttttgttttagcataatgataaaaattttaaaaattctagattgcatatataaatttaaaaaatcaaaatttttttgaagttatctaaaaacgctggtgtttttatgtatttttataacaatttttgcatttttgagggttcaaagctatttttggcagtttttaacgcatattttagtgaatatttgggcgtttttcgtgtttttaggtcatatttgggggatttttagtgcatattttatgcgcatatttggcattttttagtgaatccaacctataactctagtgatgataatagatatttaagcaattcaatattttaaaaaaaattaattttaaaaaatttaaaattaagtttaacatttttacggtcgatcggttactgataattggaattgcaaaaactttgccccattttagcaaattggaattgaccgataaggtaattttcgaacttgtaaattaaagtaaattagaaggtatccaattataaaaaacatgatatgtcgatacattaacgaacgacccacggacaaaggaattaattaaaaaaaaaatattttttttaaataaaataaaaggtaataatcagggttgtcaaatatgcacgaaaaatggccaaaatatgcaccaaatatgcacaaaaaaatcttgaaaaggtgcaaattcattaaaaaattttattccgcataaattttatcggttttctttttttgcaagcaaatcaaaaatttctcaaggttttcggcagtgaagtcactgttgatccactcgcgcatccattcaaatttgaatttaattttaggcataatcaaattttttcctaagggatattcaaatcagaaaatatttgacgaaaaatggcaaaatatgcaaaaaaaaaataagaaaatatgtacaaaaaaacccaaaatatcaaataaaagt

SEQ ID NO: 7072 - DNA, 2344 bp, Heterodera glycines
  unsure (1)..(2344): unsure at all n locations
atttgactaaacaattgatgattgaatgggtggacaaagtgttgtatcccgctcttcgcccacaacaaaaaagtctattggttgttgacagttggacgggatggaataattttaatccaccggacggaattgaattgaaaattaaacaaattcccaaacatggaaccgggatttgccagcccttggatgtttaagtttttaggtttgaaataagggaataaaaaatcacataatattttcagaatttggaaacaatttacaaggaaaattacggaatttgttatggtttatgacataaaaattaatttacacgacagagataatgttgtcaaattacaatcactaattcacaatcagtttcaagctccatgttttaatgattggctagtttttgcttggaaaaaagctgggtactacggtgatgacacattgccaaatttttgtcaccccaacaaatatgcgttcgatgtgccaaaagaaagatatttgcgaaaaatttaattgtgaaaatattattttattgagatgtgcctattgcaaaatgtatttgtgttttaaatattttttgacgattatcacatatgtgaaaatgaataaattttaaatggaatgaaaaaaattttccgctgtgttggaatcgattccttggccattcatttgcataaaaggcaaatataaaatgaggaaaataaaattacataagaggattcgaacctatgggggcaaaaacaaaagtcaggagcacaacctccgcaccaccgaacaacacaaagcagtgcaattgattattcaatttattgggataaaaaaaagtttggcacgtcataactcggcactcgggctcattccgcaaaaaataaaaccacttttcttaagaacccaggggtgctcgatccacccaccaaatttcattcggaaatcccactgacacatggggaccttcctttgtaagaattcaatgagagaggtgacagagactcagaaaataaagagagattaagagggggagggaaagagacagagagaggaaaacagatattatgcggcgacataaaatgaattgtgtgaagacaacattgagagagagagtgaaagagagagaaagtgagagaaatagagagagagacagagaggtggatagagagcgagagagcgagtgagagagacagagagagagagcgggtgagagagagcgcgagagagagagagtgatacaaagatagagttacagaaattagaggaaaggagggagagaattttcactgggtcttcaccattatatcaaaacaatcaatccacagtgtaaattagggttcctccccgacatgtttcggggaattacgaaagtcgtaaattgcacttgaaatgagatggaagaatctttaaatgggtttttaagacttttttgttctggactttttctttttgtgtttttttagactttttatgaaaatttcctccccgacgaaggtgttgctccccgacattttttaaatttctccagccatccccgacaaattctttcggggaatttcctccccgttccccgacattttgctccccgaggctcggggaggagccctagtgtaaatatacgtagtacaatttatgaaacaaaatccgtatattattttaattgttttaattttctgtctaattttttattttagtctaattttatattttctttcatttttagattgcaattaattggcttacattaaaatttactaatttagcaaaaaatcaacctgaacagcgaaattttcgcttttttgtttattttgacataaattaaccaatttttaagaaaatttatatttcatcaatattttcataaaagccgtttaaatttaacaaaacgttaatgattcagtttctataatcatttaaaaagaaaaccaaattaaaatattagatagtttctgtctacgaaaatggccgaagcacatgagcaagtttgtaaataatataaaaatttatattattactagatattatattgaaaaatgaaagaatgtttaataatataaaatttccgcttaaaaataatcaaataaaaaaatttcatacaattttaaagtttaccggctggattctcgttaaaatttatggaattttcggtgaacggaaaaaggcgggaatcccgttcggaaatctaccaagtccttttgattttatgttccctttcccagaatanaatctatatataaacaaaataaaaatccttaatatacaggattttgtaatatgtgtgattccaaattctcaaagtgggccaacaaaaaatttcaataacaaaacatccaaaaaagcagcattgattttacgataacnataaatt

SEQ ID NO: 7073 - DNA, 2965 bp, Heterodera glycines
  unsure (1)..(2965): unsure at all n locations
attacgaaagtcgtaattgcactgaaatgagatgaagaatcttaaatgagttttaagacttnttgttctggactttttcntttgtgtttttnnttagactttttatgaaaatttcctccccgacgaaggtgttgctccccgacattttttaatttctccagccatccccgacaaattctttcggggaatttcgccccgttccccgacattttgctccccgaggctcggggaggagccctagtgtaaatatacgtagtacaatttatgaaacaaaatccgtatattattttaattgttttaattttctgtctaattttttattttagtctaattttatattttctttcatttttagattgcaattaattggcttacattaaaatttactaatttagcaaaaaatcaagctgaacagcgaaatttttattttgacatacataaattaaccaatttttaagaaaatttatatttcatcaatattttcataaaagccgtttaaatttaacaaaacgttaatgattcagtttctataatcatttaaaaagaaaaccaaattaaaatattagatagtttctgtctacgaaaatggccgaagcacatgagcaagtttgtaaataatataaaaatttattaattattactagatattatattgaaaaatgaaagaatgtttaataatataaaatttccgcttaaaaataatcaaataaaaaaatttcatacaattttaaagtttaccggctggattctcgttaaaatttatggaattttcggtgaacggaaaaaggcgggaatcccgttcggaaatctaccaagtccttttgattttatgttccctttcccagaataaaatctatatataaacaaaataaaaatccttaatatacaggattttgtattatgtgtgattcccaaattctcaaagtgggccaacaaaaaattcaaataacaaaacatccaaaaaagcagcattgattttacgataacaataaattttataatccatttaattttataatcttagtttggaccagggatggcacggaattccgatttccgatttacgatttccgaaaaaattttggacgtcggaattccgacttccgatttccgaaatttttgataaaaagtcggaaattttcggaaatttttattgttgcggtcgaaaattttaggatggtgtttgttgtaggggcaatgaatgtgagtttcttttttcttttgaatttagtaattttttttaattttagtcaagcctatttatattttagatataaactcaaattttagatttaaattgaggtatgtgtaaattttacgaagttcttgcgtatacctataattcctgtagagttcctcagttggcaaccaccctcaaagatttattcagtatttaaattatttacagtttttttcatttgattttattggttataaagcttttaaatttatttataaattaactttttttttgttattttaattcaaggttcagttttaatttttataaagctattttaaattcatggaatattttttatttctttaattaagtttaaataataacaacaatttcgacatttatgctcgtttaatcctggaaaatgatttgaaatattaatctttacaatagaatgaactttggcatatggaatattcaaaaggttttgataacaggattaaattgaaaatttttatgttacatatagttatttttttattgaatgctcatagtctaaaataaatttttttaattaatattaatttatcaaataacattccattataaaagtgatggagtcttaaacatcaagaatttttgagctctttggttaggcttattttcgataaattgcccacatgatcattttggggcatattaattttatttggtccattttaatttttttttcaaattttgttaaaattttaatttaattgcatttattaataaaaccaagtcaattgaactaagatttccttattgtttttgtttgtaaaaatttatttttgtaggaattatttcagaataaaaacttttaatatgcttgtgcaaaaaatttttaaattataatttattatgaatattcatcaataatatttttaaagatttttttcttttaattttaaatcaaaacatatagtattatgtgaatttaagtagttagatttatatttacattttgtttgaatttttgtaatgaactcttttgctaacgaattttttaatatcacagcaacattaaatcacttggcttgtaatttgtccgcaattgatgcgggaactttctcgccaatataaacgacagatacccaccctattgtgtaagagctaatttgttcatttgtaatattttatattaaattattttttgtttctacttctagtaagtgttttttcttttcgttaaattatatgaaatgttgtcaattcaataatttcgatttttataaattttcaaattttaagatttttcttttcttgaaatgaattcgtatgtaggtatataggaatatgttcaatgttatttatttttctcaattttaaatcatttcgtcttcttgaaaaagcaaacgtgaataaagcgttcgcctcaatagcgacagaggcacattaattcatgatgtaaatcctctgttctcattaatttaatgataattataaattttaattgtttataattagttaaatataaataagataaagcaatattgaattttgactaaaataagcaaacaacgaccaattggttatttgggaaaggattgccaaaggcaaggaacagcacagactgacccacctcagacatctcgcagcccccgagggggaaattgagtggacttatatactggcacaatggggatgaactttggatgggatgaggggtaatgactagggttccaatttttaggcaaaagcctatttttttcctgagctccccgtggcctgaaacgcacgcaaaac

SEQ ID NO: 7074 - DNA, 1989 bp, Heterodera glycines
tgggctgttgttaagctacttttcgagttattagtgcctattttctaggcttttatttttagcgcctataaagcctaaaaaattttgaaaggacctatttttgcttattttggcgttttgcccaaaattattaacaaaaatgcaataaaaacgaaaaatacacccctaagaatcgacccaaaaatttctaaaaataaaccccctaagaaatgaaaaattttctcaaaaattcatcttcaaaatttatttatttattttcttgacaagaatttgtgatttaaaaattatttatctcaatactgatttggcctatttttttgaatacattttgtcattttacacccctaaatttgaggatttttagtgcctattttccattttttagtgcctattttgggggttttttagagcctaaaaattggaaccctagtattgacggtaaaacacaaaaggaatgagaggatggatggcatatgcaacagaggtgaatgagatagaaatggcacgataacattggaaatgagaggcgtaggattgtattgggatggaatttacagagggacaaatttatgacgggattgggtcggggaaagtagggcaatttacattatgcacaaaatataaattttgattgctgcggatacaacaacttcccattttttagttatatattttctcatattgtaattttaatttatttatttaaacttattttgcaataattttccaaaatatatttattctcttttaaattgaagcttttataaattcgtaatgtatagtcggcttatttttaaatatttactttattttccatcatctcgcttcctagaaagtattacatgtaggccattagttctctttttaatatttaatttatcatgattttaattattattccctaaaaaaacaaaaaaatatatattttccaattttttaatattaaaatttaatgtaattggaaatttttaattatttatttattttttataaaacatttctaacagcgggtattattttatgtcagaattaaagaaatttatttggtatgtaaaataattttgaatttttttttgcaatctaaataaatattttgctgtttaaatattatgccaatgaatagtaggattttcttttaaagaaaaaattaaataacaacaaagttcaaaaaaattgttgaaatgtaatttaaatttctcaaataattatattataaaatttttttctttgaaattcccgctagaatataaagagcttcatcataaattaattttgaaatttggtatttattgcttgatttgcttatattaattgctatatattgtaatttttatttcttgtgtgtaaacttaatttattctttaattcaagcatttttatttcaaatttaaatcataaacatcttaattattatctaaattaaggtttaggctttcaatattttaagtgtttattttaaaaaaataagttggctatgcctttgcttatattttttttatcaatgcttttctattttaggcatcaaattaaaaccaatttgataactttggatcagtgaagaaaaactttcaacagaaatcatttgacgaaatatgttgggagatgggaataaaaagaagcaaaaaaagaaataattgtaaaattataaaataaaaaataaagcaaaaaagaagaaatactcaaaaaagaatgaagtaaaattgaaggaaaattcggcacaaacccaaaagaaaatttatgataggattaaagaatttgggcttaatcaaaacaaattttacaaatcaacaagtaatgacaaaaaattaaagatgtgcaaaaattcaatatgcattaatttggttttaatttattttttatatttttatgaaatactttacaattaactctcaaataaatacaaaaattatggttgagtcgcagattacgaaatgatacaacatttaataaaggcagctttgccaattttgttctttagagttaaatgat

SEQ ID NO: 7075 - DNA, 4445 bp, Heterodera glycines
ccgattttggtaggaatagattctgcaacacgtagcgcacgactggcatgcaaaggctctttgtgccaagcattgcctgcccaaatgtcagtttcgaggtccacagggttttaagccgccccatgaactttcccctgactgactcaagactgtctttgcttacaatcatgaatctctcgtgcattcccaggtacttgtaagtgccgacaagttctggtacacccaagacggctttgccacttttcccgccgtcctggtcgagccacgcagatttcttgtagtggatcgtcagaccgagggcagaagcgctcttctgcacctgctgaataactgctgtcaacacttccctgtctgggcaatagcatttcaggtcgtccatgtaaaacacgtgtccgacactaaagccctgctgaagatggtttgcacaacgaaactgatactgaggaaattggtctagggcgaacgagattggccaaacagataggcagaaaagcaggggcgatagggtgtccccttggaatacgccggttcgcaccgggatggtcttgggcatgacctttccacctatctttaacctcgttacccattgatccatcacagagacaatgacagacaagatgaccggggggagtccgatgactctcaggatccagcgaattaagttgtgcggtactgagtcaaacgctttcttgaagtcgaaccagcagactccaagtgggcgtttagctcttctcgcgtcagccaccgttagcgcatcgatcatcagggacacagaggtgccccaaacgccttttcgcagtgctacttgttgtctaggtaggccaccaagaacatcaacgtaacttgcggttatttgtgcgataacggcagtgaagagtttgtagcatgtatttaggcatgtgattggccggtagttactagggtcggcattgtcactactcttaggcagcaggacagtgagcccattgcagatccagttagctactggttctgcccctcgtattacttggaccacccacgtagccacatacggtgcaattcgccggaacactccccaccacgcggcacggataccatcaggaccgggagctttgcccttcttcattttccgaagggccgcgctgaacatctgaaccaatgagctggttccgacgttcgtcagatccgtgtgtcgcgcagcagaaagctggtttttgaattccctcagttgacagtcatccgtgttagcacggaggctctgcgcccaaaggctatgccagaacgtgtaaacttcattcccgttaaggggtggattgacaggtgcttcagtaacagaacgtaaagaaggtcttagtcggaatctccgcctagggccttcataagacgatctattacctctcccagctattctttgccggaccaggtcagctagttgtttgagtctctcgaccctcacaccaagtatcctgatccgcctgctcatccatggttgttcccgggcacaccggagtttcctttcggctttagctcgccgtctggatacttcggacagagtggcagaatcgttgatgtgcagccgatcagcaagagtttccactctctcccggcggctcagaaccctagcggctgcaaagaccgcgacattcagttcaaggaaccaatcaagtcccctgttgatgtcacgctccacgcgcgccacaatgagttgctcgagtagggctactcgttcgggctctcgtttctgtgggagtggtggacctgcgccacgcttatacatttggtcgggaggcgttcttccgacacgcctcacctcccggttgaactccctcttcagctctacgtccatcacgacattcccgagttccatctcctcggctgcccatcccattgcccggcctaattgcggctttaccagttggacaagtgagagtgggtcaagcatcggttctggttcggattctgtgggtgggtgtgtcaacacatccgtaggtgcaggcctgtccacctctggaaccaaatcttgttccttacgtgaagaggtggatggaaccctgcgtttccgaggtggaaccacatcgcgaacggcgttgcgcagccgcttacgcgtgatcctctctgtcgcccctaagtcgagcggctcgcgttctccaaagggactcgaccgggatacctcagctaaggcagtctcggtctcatcggaatcgattacaccatgaccgtctgtgccacaagggacagtacgttgaggtagctcggccaccgtatcatgggccaacctggctggttggatttttacatctgaaaggtcttgtgagggcccggagccttctttcgaagggcatccaggaccaacatgggtccgccgcagagatgcccacttattggacagcgatggagacgatcgagccatgtacatggtcgggttgagctggcacaatctttgccattcagggagcacacctttggcccaattaatgagcccccggtcgtctgtgtttcgcaccactacatcctttaaagcggactcctccacggctgaccactgctgaaccctctgggtccggactaggccggattgagcgcaggcatttataggaatagttataccgttttgcctttgaatcgctaccgccttaccacggggggccgcgggattggttcggttttggccgcaccctccctctcggacctcatcaggggctggtatcccggcgtgggtcggcgtcttgtcactgcgggctctaaagagagccatttgggttaaggtttctctttccaaatcacaggatatcatttcgctttgatcgcttttcaaatgtattggttagaccgtatacaagtgatcttgcgccaccccagctccaagggtggcgcgccaagctagtaaggccagccccagctcaaagggtcgtaccccaagctagcaaggccggccccagctcaaggtggtaccccaagctagcaaggtaaaaaagagtggtgatcctccactcctgcgatcagcgagggaggagttgcacaggctccatcctgcgcgcagtgcaagactctggcttcaagaatccgcacgtgggagacacacgtgtggtcgcaaggtccttcatagccggagcttttacggccctttctcgtgccctgcttactagcatattactctatgctacctgttagcaagcaggttggtacactcggccatccgaaccccactagctcacagttctgaaaccagcaacgcagccttcgcctacgagggctagggctttcggtgcgtgtgggattacacgagactgtcatgttcctaaccagtgcgagccaacaccagaaaggggcctggacttaggttcaagttacagggtgaggctggagtctccatggccattccccttcgggctcgttatgacagcttcgacgtggtgcagcggggtaacacacggatgcccccgagctcactccgaagtgagtctgtccgtgccattcggcccgaccatttttaggtttcacgaaataccgccctgtaatctttcgccatatccgggaagaactgtcaagctcaacagaaatactggacccgcagctaagaaggcccagacgtttttggccgatgggaaggtaacccagcgccctcggattagcgcaacccgtgcagcacctagggactttcgcgacctgtaggccaactcctaccaggctccccggaggttccgagtatcgccacactcgtgcgcgtcggtagttagccgacgaggcatttggctaccttaagagagtcatagttactcccgccgtttacccgcgcttaatcaagtttccttggcttaacattcagagcactgggcagaaatcagacacggtcaacgtccacaaggaccatccgtctcctctgttttaattagacagtcggattccccgagttcgtgccagttctaaactggtcgttcagcgccaaccgaagtgcataccctgacgagcatacacgcagctgaagcgctccacaagcagctctcaccactagtccacgcaccatccccgaaagaacagcacacagccacgggcaaaagccgcctgtttcacgcaacagcccggctgacccgacctttagagccaattcttttcccgaagttacgaatctaatttgccgacttcccttacctacattattctatcgactagaggctgttcaccttggagacctgctgcggatatcggtacgatcaggcaggagattcaaatagcttccctcgcattttcaagggccgtgtggagcgcacgagacaccacaggaaccgcggtgctttacgggcgcaacatccctatctcaggctgagccacttccaggcacgcacaccctaaaccagaaaagagaactctggctcggactccacaaaacgtctgcgagttcatttgcgttaccgcgcaaaacatagggagagaaccgtcatttccctagcctggcgtgggaatgttaa

SEQ ID NO: 7076 - DNA, 3116 bp, Heterodera glycines
  unsure (1)..(3116): unsure at all n locations
attcaggggaaaagtgttggcaaagtgtgccaatctccgcctcccaaatcactcccacctcatcacaaatcaccaagccaatttccttctcgtgcaaaatgtccgtgtaaagtcggaatgtctcatacgaaatgataatcaccggcgtcggcactctttggcccgtctgactgacaaattgttctgtcaattgaattcgcaattgcttctgccgcccaaaaagtcgtacttaaattgcgtataatgtcctcgcgtttgcccgagtcaattggcaaagaattgactcggccgtggagccatttggcaatttccttgtcccaattcttcaccaaactgctcggacacacgatgatacaacggttaatggccggggcagcttggggactttgacgctgcagaaaaaggggaccaaattaaatccaaacgcattttaacaattcaaatatttgaaaaggccttcgccatacatgcgcaaagggggcagggacggtcccaggatttcggcttggggggtggggtacctccccccgggcgacgacctttttcctcttttttttgttgttggttttcacaccagtttttttttgcggcggtttttccaaaaaactttttgtggaacaggggtccggcggtggggagcagctcgtttcccccccgcatcgtttcccccccgagaaaattttaaaaaaaaaattgctaacttagaaatttttcaagaaaaaaatcttagaaagttttttcataagaaaattctaagaaaaaaattttttcagaaattttcagcaattttttggaaaattttttgaaaaaacttggtaattcaccataaaatttctgaaaaaatattttttttcttagaattttcttatgagaaaactttaagatttttttcttgaaaaatttttaagttagcaaattttttttttttggctttaagaatgtttattaaggattttagaggtccggtatgctgactttgctcaggaagtaaaaggaaatactgattatcatataaatgacattcgatgatgcaattgttagagtggtaaaagacaacgcgaagtgatggacaatcgctgagaagtgacgggacaaattgtcacaaacggcggaaaattctggaggacaatccatggcacaaatattttttccaagcattggccaaatgttgcgcaaaatgaactccaaaaggcggtcactgcccgtaccgatggcaaaattaattggacagacatcgaaaagacgatgaaaacggtggagaaaagcgatgacattttggtcgatgaaactgtgaattgacgttgaagcggatgaacaatattggccatttccttctgatccgttgtccaattgtgcgcgacgaaagcaaatggacaaaatgtgagaaggaagcgattgactggcaattttatgatcaatggaacagaatcgacattccagtttcgtaatgcaaagatcggcccaagtgatcagaagcagtgaattgtttgaatgatcgatcaatttttaattattgatttattgtcgtgtgctcatatactaaagcctaggcctagcctaacagtaggggtcagttccgtctggccagttccgtctcgccagttccgtcttagtactcaaagggccggttccgtctcaaatatttttggactcaaattttttaaaatcaataactaatttagaaaaaaaagtaaaaattcttttactacgcagcctaccgcagcctaaatatacctggttttttaaaagttgtggttaattaaaagtatattcgaaaataaaaattttttgaaataaatttaacattgcaaatgtccagtaattctgctcgggattctcagtcttggtcctcgtgtcgggaaatttagcagccttaatgtgtccagcacttttgcagcgaatccggcacccattttggaccccgaacccgaatataaagattaatttacataaatttcgtctaattttcaaaaatacacccctgagaatgaaaaatttcctcaaaaattttgttattttatacccctaaattgaaactttaacacctattttgaggtttttagaaccgaaaacctaaatattttggcagtttttagtttttaacacccaaaaatattaggcatattaaatatcagggctgccaaaaacatgcaaatgtatttttttcctgccttttccatgctataaataataggaaaaacacgttctttttttgtgtttgcgtagaaaaatcggtatttttatttgcatattttgcatatttcgagatttttgtgcatatgcatattttggctacttttcgtgcatatttttggcagcactgttaattatatctcaactttctgtttacattctgaaatttaaaaaaatttgggtccaaaaatatttgagacggaaccggctcttttactactaagacggaactggcgagacggaactggcagancggaaccgggcccagaccganctgacccggtttgatcgaccccgccaaaatctgttgaaactatctccggctttatttttgagcaaaaaaattcttaaaatttcaatttttatgataaactgcaaaatgatggcgaaataattttaattttgacaaaaatattcagaaaaagaggcagacattttggcatttggccacatgataaagtgcaaaaaaattggccaaatgaattttgtgtatttaaatgcaatatacgattattaatttcacattcgacgacaattatccaatccaattttttcaaatccatccattactgaagaatgaacccctcttttgcaatgcttacgagtgccgttctcctcttcgcatttgccaatgccgtttatggagcaaaagagtgcactttcaaattccaaataaaaagaacgtattttgttaaatacacttttgattattctccggtctatagctttggcgattgtacagattcttttgaaattcaattggatgggcataatagtattcaaattgcatataaaccaaaggatatcaaaggagcaaaattggttgatttttggttgattccgtgttgattgtgagccggacataaaaaatctcaaatttttttttgtaatgatcagggaaaggatttttaggtgctaaaaat

SEQ ID NO: 7077 - DNA, 3086 bp, Heterodera glycines
taataaatttaaattatcaaattgcaatttttgttaactttaggccgctgggcaagatgggaggaggaggactgccctcgctcgtacaaacaatggactggaggcaactcatctgcattttatggtttttaatttactacgggcaaatttttaaaaatatatttagaaaggtctctgtcacaacccggcactctctgacttaatctgtggagtcaatgaaagcatcgacagacaggtggacgctgcccgatctgctcgccatttcattcacaagcgacacaaacgatacatcctccaggatgctgtcattatgagaattttggcggacgcgtcatacaacaacaagggtgaaattcgtgatctgatgacggcgctcggtctacaaattgaaggatatgcagcaaaattgaaagatttcgtgaattttgatgattcgattgttcgtattccgtgatgaattttttattgaatgtttaataaattcattcattttttatatttatatttgggtcctgggttaggaaatgggttaggtaaatgtcatattcgtactcagcgactccaaaaaccctaaattagatccgttttccgggtttttatgtgctttttagacttttggacatttcgtgttttttactcttatggacatttcgaggcttggacatttcgtggcttggacatttcgttggtcagcgcattaaaaattattgaaataaaagtgaacaaaacgccaatgaaaaacagacagcggaattagacactatatgttttatcattgattttaactaaatttctaatacttataacttggtgaagggtaaaccaaacaaaaccattttgtgctcattttgatgggaaaattcttaagaatatttcaaagttaaaaaaattttgaaaaaatagtttattagcaagaaaatgaaccatgtgttatcttatatgttagagacatggaaatagtgcgtcaaaatgagagaaaaagaaaaaactttgcccttggaaaaaattttttcctgtgggtaactttttttgaaattttgcataggcccatattttgaccccctttaacgattccaagtttattttatggaacttaagtttttaactcgagatcggctcttcagtttttacaagggaaaatcttggcaaaatttttaaattagtggagttttttggcgttttgtctgtgcgcacttttggtcaaattgatgatatatgtgttcatgatcgaccggatggccaaattgattggaaaaattggacgaaaatggtggaaaaaagcgatggcatttcggtcgatgaatctgaaaatgaatgggaagtgttaccgaactttttgcataatcgcctattttacaagatgtcgatgcgttcgaatccgacgattttctttggcaacggattttgcggaattggcatcgatttccaatcagaattgacaatttccatttcatttgtgccattctttccaattttgcttccaatttgaatatgtttcagcgtccatttgcgcgttttgaagtgttcgtccacgtaaaagtcaaatcggtggctgatcagcgcaattccaaggccaagttgagaaggtggcagcaaatcgaagacacaaagccaacaatcaccggagatgaagcagaaaaaaggaaaacaaaatttaaaattcaaattgaaaaattgcatttttaattttacattgcttttgccatcttttcctccgcctcttttcggttgtctgacattttgttgtggcaaattattaagcacagtttttgacggatttcaattagcttagcatatttatttttaaaaaaattcaagagaaaaaaaccattaaaatggtcaatttaaatggattagttttcgtttttgtgtatgaagcaacaaaaaaccatttttaattcgttcaaattaaaaaacgaaactaacaaattaaagagcaattggaatttaaagaaatatggagggtatcaaaaacaaagtgactgtgaaacatttgttagacaatatttttgtagaaaaaatattggcaaaatttgaagcaatttcaatcaaaaatcgatgggattggggcgtgctgagtcgatccacaaaaaatctcagtgtgggcgatccacaaaaaatctcagtgaataattaaataattaattttaattatatagaacgtgtcactgaattaattataattaaatttattttataccattatatttcaagataaatttaaaaagaacaaataaaaatttgtcatttttgttctaattttttgcataaatatcttttgtcatttatggcaaaaaatgcaaaaaaaaaaggtaaacaaaaggaatggcatgaaatttcatactaaaattgaaaaaagaatattttgcagttacaggcagcgaaaattatttaatattgagtgttattgatttgacacatgaattttgtgaagcgcataatataatacaaaattattattattcactgagattttttgtggatcgacctagcaccccgcacgactcttcgttctgcacactccgtggtgcatggcactcttgggccttctcgaagtggtaggttcgggtcgattcccgataatcgaatgaatggttggccgctgatcattccggcaatgttgatgagcatgatcaacagtgccatcctcgttcttggttgaattgcgcctcgctttcgtggttcatgacgctccggggaccaaatctcccggtttctccgagtccttgccgatttcttttgttcagctccaggtactgcttgaacttcttggatgtcttttccgtcgtgtttattgggcgttcgttcgagtttattttgatgctgttcgaccgcaggtgcttcgggaaattcgcccctctttcgtccgtttcgcccatttttggcggcgcttcttccagcggcccaattttgttgatcggtcgtccccgaattcgcccgttggcccttccgatcatggcgcttctggcatgcttgctcactcctttggtctcgactatccgtccaatggtccgctgtcgctggtttgggtccatttccccaattggctccgcttgaggcttaatggcttcgttcgtacccgaccg

SEQ ID NO: 7078 - DNA, 1248 bp, Heterodera glycines
  unsure (1)..(1248): unsure at all n locations
cacaaaaactgtccccaaactcacctctttccggggcatatccgatgtccaaatgcgataccgatccgcttcgtagccaagcgttgcggcgtagacgatcagcacctccaaactttcacactccctgaaccgtcgcatcttggcttgaccgtttgggaagcgaagacggattgtaatcacttccggctcgctctcatctggttcggtgggcaacaacttgaccaagcagtccaggtgttctttgcgctccttctcgttctgtgcccggttttccgcttcctctctgtgaagcaggggaggggagaactgttacaacaaacagacctttacaagatgaatgatagcataagacaccgaaaaagtggaattttgcgactttttgttcgagtttcgggtcatgagaatcggaattaaatgaatcggtcagtcatttggctacaagtcgtctcgacaactcaatgaaaatgcgtcatttcgctttgaaattgtacccaattgaggtgagtaaggcctgccataggaaggataaagaatcgatgaatagtgataatttcttacctcaactttcaaaacccaaattaaatctttaacaaaaatcgtctcaaatttttcattattgtcacaattttttcttgtgatcacagattgcttttgttcattttttaaatatggtctccatcgaagaacaataaaattttagactcaattcttaaagttgttgaacgaaggacggtcttaaaagtatccattttactattagtagacgaaacgacttgtagcgaaacgatatgaagccatgagtgcctatcaatgataaactatcatgaaacccctatggcaagtgttttatgtcgaaataaaattttagtaagccaaatatgggacctaaactggactagaaatggttcagctaccatcatttgctactcaactgttccttctgctttccggggcatgtccgatgtccaaatgcgataccgatccgcttcgtagccaagcgttgcggcgtagacgagcagcacctccaaactttcacactccctgaaccgtcgcatcttggcttgaccgtttgggaagcgaagacggattgtgatcacttccggctcgctctcgggcggttcggtgggcaacaacttggtcaatcagtccaggtgttttttgcgctccttctcgttctgtgcccgttttccgctccctatagcaggatttgaaaaactttttgtanaaaaaatttagtagtcagcacca

SEQ ID NO: 7079 - DNA, 1034 bp, Heterodera glycines
  unsure (1)..(1034): unsure at all n locations
aaaaaaaggaaaaccgtttgagcaaagatgtgagccgcaacggcacagtcgtcgtggaggtaaatggccaaaggccgacgatgttcagcgccactcgcgggcgagtcgaacgcctcggcaatggcatcctgcaagatccatggaagaaaggcgcatgctgggctccatatctgtacaaatgatggtgaaagcacaaacgaaaaacttataaatttctcataacgcattttctggacaccaaacgagttaaatgcacgattgaatcccattttgaagtctacaaactaaagccttctcttcggtgattgatgccatataaccaacccaatgacaagccggcccaaaaattttgaacccacaaagaaaaacctcggtcaacattaggattctgcatggcctccggaatggaagtgaattcggtggacaccaacggcagttggttgacatcgtttgacgatgtgctccgctccaactccaagtccgtgtcgcaatagctttcgtcgccgtctccgtccattttttgcacgacaatcaaattttaatagagaattcggaagagaaggaagtaatatttattataaggggcttcaatatgctgaaaaaagcaataaaataagcaatgaaggaaatgtataaaagcagccatttaattgtaaatagaaaattaatttatccgtggataaggcagcacgaagatcggcaataattgttacgcgcgttatacgcaagtaacgcaattccatgggaagacacggaaatcccgtttcccgacttttttgcccggacggattttgtgggaacggaaaaaagacggtgtttcgttttcccgtttccatattggaaaaattgccgaatatggtatcggctcaaaatcgcacaaaaacacttttaggcaatcatggagtttactggtcccgttttttttttctttaaaaatcatggaaaaatttttctagggctattttactgtgctgagcacgaatccgaccttattattgaccgnattctgaaccccgaacccggattcgaacatt

SEQ ID NO: 7080 - DNA, 2693 bp, Heterodera glycines
  unsure (1)..(2693): unsure at all n locations
cctgcggatcacgcgcggacttcttccgtagcccgtagtctcgccccacctactggccgccgtagtcgagtgtgcggcggttttttagcgcaataaccaaaatgacctatttgcaccagtttcactgcattttcgagttttaaaccggttcaaaaaccggtttaaatgcttttccgcgcccaattttaagcttttatatcgttctcagcacctaagaaaacctataaaagtgtttttgtgcgattttgagccgataccgtattcggcaattttaccaataactttgctgctgaatttgaatttgagacaagcaattatgtgccaggaaaacttaaacctatagaaagagacggaaattgtggatttcgtagtcagggatgcgatcgccaaaacccaaaaaccgggcgcgcgagttgaaaaacccggcaaaaattttcaaaaacccggcaaaaaacccggcaattttttaagccaattattcactgtaaaaaaggtcaataacatttaaacaatatatttatcaccacttttcacctgtttgaacaaatttggcattgaaagaatgtaaccatgagcgtttgggcacaaaatatttgaattaaatttgattgaaattaatgagtttaaccagggttgccagattaaaattttcaaaagcctcatttggtcggcaaaaaagcctcattttgggtcaaaaagcctcatttttacaaatttattcaaaacacattaaaaatgttcaaatattatatttttattttccatgatcaatttgagcaattttttgttagaaataagcattttgtgaaattcttagcacgaaaatcgaagttgattttttgcggcgcttttttctaaaaaaaacttggggaaaagggaggccggcggtgccgataggcgccgccgggaaaaattttgtgatttttaatacaatttgttaacagatttgaccacaaaaatgaccaaattttgcgattttgagcaaatttttaagaaaataaaggatccctggagctcaaataaatgaattgaaataggaaacccggcaaaaacccaaaaacccggcaaaaacccggcaacttcaaaaacccggcaaggacccccaaaacccggcaaatgccgggtttaccaggtaaaatcgcacccctgttcgtagtataagctgggcaattacgggatctgaagctaatcatgatgagattcgaaaggatgtaatggaatatcttgaggaaactttgtatcagtactcgttagaacccacagtaaacgactggtggggtaagttagatatagtttgcaggatttgctatttaattatttagaaatgttttttgaaaatgttgtagctgccagaaggcgtgcaaccattaaaaagtttccggctgaaagtgcggcagaagacgataaatggatgaacgaagccgacatgtttatcgcggcaaaaatgtttaaaattaatgtcatattttataagctcagcgacaacccagatcatatttggcaaatttttacgccaggcatgcaaaaaagcgtaagaatttttagaattttgttaattaaacaatttttggacggttttaagcttttaaatccggagcaagaccgtgaagtaccatctatctttatttataatgaaagtggtcgttttgaaatcattcttgaacccgagcgtttgtctcagaaatctatgacgaattaacatttaaaaattagcggaatttattaaaatcgtaaaattttttactgttatttcattatttatggttataaaattataaaaatattttgagtcacattaaatataggtaaataagaaaccatgtgaaggaaactaaatttatttatttaatataattttctgtactgaaatgaccccatccctcttctgaaagtctctcactgatatttttgtcacttcggctcaccacgctattctcatgtctctaaccttcaaagagcattttgaaaagagacacataatatctctttcgctccctttcaatttcctttcaatcatttgttcgttgttctaaaattggccattagaatttttacaaaaaaatttaattgccccctaatttaaatcttaaaattattttctaacaattcattacaagaaataaaaaacaaatataaggtgtgttagtttatgaaggaatttgacatgttggcacacaggcattagtcggaatgccgtttcggatttggggtcggaaaaaagctgctccgtttcgtaactcacgacatcccttttcgagaagcatcatgaattatggcatctgaattcgctcctctctcctgctgctgctctgtccaatccttttttccctaatacagtcatggtcataagtgttgtcccatcatgctttgaaaaaaataattgcgtataaaattgtcattttccaatttcaacagataagtagcataccattggatagcattttttatgggctttccaatgataccatatttgcatttgtgacttgtccagaactttttaaaaacccaatgaatttttttttaattttaaaaataattagagaattcttagggctatcgaatgatttataacttttctcagaagcagttaaattattttttttttttgaattttaactcctctatatatctaataaatattaaaattccataaaatgtcattgggtttcaaaanaagttctgggacaatcaat

SEQ ID NO: 7081 - DNA, 1964 bp, Heterodera glycines
  unsure (1)..(1964): unsure at all n locations
gccggatttttaaaattcactttcttgcggtttaaaaccctttgctgtctaaaaaaataatttgcagaaaaaatattaattttttcgagttacaggaattcagaatacacagaggaaaagctgctgttcatgaaaagggtggaggaaataattttggacaccgcgtcaccgcccaattcgacaaaacggcgacagtttgtggaggaggcggtggaccatctgaggacgcaattgggacacggtcccccacccgcggaccccgaatggacttttctgacatcgatgtaggcacatcgatagccatatggccggtgctaggtcgaaccgaaaatggtctcagtgtgaataaaaatatttaaatttaattatacgattcactaaattcatataattatataaaaaaataatagcgtgtgaatcaataattcctaatacgtataattgaatgaatttgatgcatttgcttgttcaaaattatttaaaataaacattattatttgtacaaaggcactaaaataggcactaaaaaattgaaaaaaaggcacgaaaatcccgaaaaaggcaaaaaaaggcataataaaagtcaacgtagaacctcaaaccaagtggaaaggtgttatttatgcttaatatatcgaaactacttcgcagaaaaaaaaggcatatgcctcaaaatgcgagcctctattcatcagcaacagacggacggacggacgatgtgtgagccgcttgtttttgaagccaaataaatgcttttcaccttactctcattcatatccgatgtctgcctgctgctgctgctttgtctcttccatttttttgggctggtgcgtttcttccgtctcaattttcatttcaattaaaaattttgttcaattttaacgcttgcttttttcaaaatcaatattttcgccgccaccggcgccgtcattttctgtgccaaaaaatgaatgcttaatttttgagggattatttttgtatttggccatacactgatacgatacacattatgtttatgtttagtttatggcttgtaccgctttatggtttgaaaaaaagaaacatatacctaaatgttttcttttttaacgaaatggggcaaaaacagctcttttcctaaatgaaaataattttaaaaacataatttttggcacagaaattttcctttcaaccgccaattcatttaaaacctattaattttactttgaacttttttaaatctatttttattaagatattatccctgatattttttagcgcataattaaaattaagatattttttcttttttgctcatccaaccaaccaatcaacgaactcattaaatcatcatttttttaaattaaattttgaaaaatttaatttgactgccttccacctaataaagaattcacagaattaaacccacgcaaaaatttcttcgtgtctcaataattgttaagcattataatcaaaataggtgggaaattaacggcaaactttgcaaattattatcatgaaaaatacaataattataatttgccatttgttcgcgaaaatgtcaaacgacggcattggcattggcatcggcatgaaaaagaaccgcgccaaattacacatgtacaaacagatacatttcaaaagggtgcctaccacctcttagcaacaaatttttgttgtcatttccgtccagccttaaattttttggtacaatttttcactaaaatatattttataaattgttcatttgtccaatctaaattgtcaattaaattaattaaactaattaattggcaactgttattgtgtgtctgttggcgtcatgaacttttcacgcaaaaaagtttcacgcacggcttttttattttgcacgcatcgaacttaatagatagattttacttagctatgtctcattaatttttaaagacagtttatttaatgaaaaatttaatttttctccttttccanaaagttcatttcattgt

SEQ ID NO: 7082 - DNA, 1707 bp, Heterodera glycines
ttttcccagggatccctcttatgctaattacgcttaatgaactcggcaaatttctttacaaaaccatcaacgagttcattgcaatgctgaacaacagatgcaaaatgttgcacaaattttgtaaacgcttcaagaaaaagcattggaaaaaggaagggaaaagcggagacgaagaaatggacgaggaaatggagaaggacagcaacgaaaagaggaataaaatgcaggaagaactgaaggcggtcagcttcagactgtgggtggccaattagcaataattagcaactttgaattgggcaatttcaataggatattgcccaatgaatgtttgcttatcaacgaatgaatcgcaaatttatttagacttatttttgttaaaaaatttagaaattcgacggaagaacaatcgcagacggaccattcggagaagtcgacaatctctgccggcacttcgcctaaatcggtgcataaaaacagcaacaacaacgcggtttggagcacacaaaatgcgtccgattttggcattttaatggaagaagcgacggaaagtgaagaagaaaatggagaggaagaagaagaagaagaggatgaacacggcattgtgagccgagcaaagggtgagaaatgagagaagaggagggacaaaatgccaaagctaatgagcaaagagcgcgattttaaatgatggggctatcgaataacagtaggtggtgagtgagttaatggagggtattttcggcacttagtccccccgggactcaattgggccgaaatgggaggcttattaagcccggcattgacttaatttaggattttttctggaaatttcacccctttcgcgccaggtgacgcgtcaaaagcgcatcagcaaagcgatgcgccacgaatgcacgtaatggtggccatagtgacaacatttgcttggatctttctctgtgccgcactgttcaaattgtgggaaaatgtgagaggaagcaaaattcagaaacatttaagaaaatgaaatttaaatttggatatatcggcggacggtgccgaagggaccatatgggaattataaaaattcatgttgtttttgacaaatatttttggcgtcaaattttgcccaaattaatgaaaggaatttgaaggaatggacttattggaattcactttacttcatgtttatctctctgttaaccattggtcttggcgatgtgaatgtccatcgacgggatttggtagggattttaattggtcacaattacccatttctgatcactctgatcagatggttttctgtttcattttcgtcatcattggcctttcccttgtctcaatgtgtataaatgtgatacaatcctcgctggaggacttctacagaaaaatgctaatgaaaatacttgcggattaccaagcttcgcttaacaaaggttaaaatatgtatgggcaatttcttggcatcattcaatagccctaagtatcctctattagcctacaaaatttcaaaaaatttcgttaattttcaacaaacttatgaccaaaagtacatcagaaaccgggtttttcagcttttttggccataacttttttgaaccttaacgaaattttgcaggcgaatagagcatgtgaagggctttcgaatgatatcaagaaaattagatttggttgacaatggaaaaagttatagttcaaaaactaggctggcgcgaaaacgaccccgaccca

SEQ ID NO: 7083 - DNA, 3466 bp, Heterodera glycines
agcacaaactacggcgaagacgatgatgctgcccggctggacgctgttgttggtggcatattgcgtgtgtttggcacttggcattgttggcacaatgggggcaagcgcggaactgataccaagcaaaatgttcaatcacaacaacaaccacaacttcaacaacaacaatgaccagaagcaattaggggctaatgattttgcggaaaaccctcagcgacaggcgggcaacaacggaggcgacaacaacaacttgttgctggcccaaccgtcggcattccaacttcaaaaacaaatgatgatgagggcggcaatggcagcagcagccaaagtggcacaacagaaacaacggcagcaccaccaccaccacatgccgcaccataatcatcatcaccaccagcagaacaatgtggatggaagcagcaaatttggggtggtggagcaggaggagaaaagtggtgaggaattttttatgtttaatacagggatgcgatctgttctgatttatcagaaatgttctgatttgaagggtccaaatctgataaaataaaaatgttctgattttggggtagcgaccaaaatttgttctgatttcttaaacaaactcataattttaaaattttatggcctaatgtcactattttacaaaaaaaatataaaatttatggcaaaatttggtcattttttggacaaaaatctgttaacaaatcgtactaaaatcacaaatttttcccggcggcacctatcggcgccgccggatcccctgtcctccaaaatttttgggagaagggccccgcaaaaaaagcgtttttaaaagcgaaaaaaaagtcgtcgcttggtttttaattgcaaaattggcattttttggtgaaaatctgttaacaaatcagaacgaaattacaaaaaattttccggcggcgcctatcggcaccgccggaccctccccctcgcccatttcccaaaagttttttgggaaaatgcgccgcaaaaaattcttaaaaatctgattttttgatcccgagtgcactgaaatttacgatttgttaatttcctcaccaaaatttttaaagatgataattggaggcgaaaaatataatatttaatgatttttgattaaattaattgtaaaaataaaagatttgaagcaattttgcaaaatgttctgatttttgaccccaaaatctgattttttgggcccgatgtcctgattttgaaaaattttcgatcgcatccctgctttatttataaataaataaatgaaaaataaagaaataaaaccccgcaattttgatttggacatcgtttggacacttctgacaatatattcatcgtttcttcgtcaattgagtcgttttcccacttggagagtaatgaacaactaaaaatcgattttatttgaaaccaagaagcattatgtccgtttacctgattggagcatgcgggtacttggaatcaaaaaaaaaatgttaatttggtaattcccattatcgttactttagtgcaggcaaaacaaaaggcccgtttacaggtgcacttgactatgcagggcccgacttcattgactttgataattttcgagcacgtactttgggggcatgattccacaaacggattacgctaaaacagattaatttaatacattgacaatgcctaaacaaccatactttgacaatggttttcagagccaacgccaagaatctcggaacaagtttttttttgttcgcagccaattcagcatattctccaatgtattccacatcattgattttgttaaattcttcaaacgtttgactgatgaattgttcatcaacaaaatgggaacagccaaagcaaggcaaaacgactgactgtttaagatttatctaaaaactttgtaataatttaataacgtgaattttcaatactcgcctctttccaaaaatagcgactccagcatccgacacaaaagaaacacccacatggcgacattttgccaaattgttcaccgtcacacgtttcgcacttttcaccctccgccggcgcctttgggttcccagtggcaatttttttttcttcaaaaatgcctccttatctgctgctcggttatgcctaaatttaggaaataaaataagaataaaaatgaaatattactctgctgtcaatgtcttctcgtcccaattataaatgttcaacatgagttttgtcattgattcagaaattcccaaatctgctgctgtcaattgcgtaagtttctgcatctctttcaaaaattcttctcttgtcaaaatctacaaataaattatttcaataacaatatacccccggacaaatgaccgtgtacggtgccattggctccattcttttgctgagaaaatttattagcagtaatttctgtaactatctgaaaatttttcataaaatttgatatattttaaatctggtttttaaatgtgaccaaaaataggaggcaatttcataaatttgtcaaaaattatactggaactttcaaattcccttgagcgcctatcggcaccgtcagaccctaaaaatgtgccaatttttgtgatatgattagatgaaccatgacattactcagtagggcttcgatttttaggtaaatacctaaaatttttgcgcacttgtaacgttgagataagcataaaaaacgagtttttagcttggtttggagcttctacacccacttttataatacctatttttacctatttcgggatttttctacctattacctaggtacctatttttatacctatttcggcattttggttacctattttaaggattttcaaaaaattcttaacaaaaatgcaataaaatcaaaaaatatacccataagaatcgaccaaaaaaattttcaaaaatacaccctaagaattggaaaaatttctcaaaaatttatcccaaaatttatttattttttctattgacaaaatttttaatttaaaatgtcaatattatctaagaaaatattaatttatttaaattttcgtttacaaagagatatgtagaaccaaaattttccctctttgtttgcttttttccactaaaaaattgttaataaaaatttttatttacctattttggaatttttgtacctattttgagatttttttttaactttttaagtacctattctgcaatttttttttttggcaattgaaccgaggcccaattattgttggggagacggcggtggcggttaaatgggaagacgcaaattgggacgacaaattgaacaatgtctattttgctttatgggctgatcgcacttgtattgggtgagcagcagtaacaaacacagcatttgaactgagaccggacgggatcgggatcccgcatgattaaattcgggatccgtcccgagccttttttaaattcttcgggattgggagaggtccctccgaccccaaataccggtcgctcgggcggtgggaagagaattaaaatttaattttaaccgcattgtcgc

SEQ ID NO: 7084 - DNA, 1165 bp, Heterodera glycines
taaaaataaataaatacaaataaataataaattaaatatcatttataataataaaaagaataaattaaatattttggtaaaattaaaatattgttctgcaatgcgccagacactgatgactttctttctgccgcttttcatcttcttcgcccatctgacagcgagtctcttcggtaagcaatttgagtccacaaatcatcattttaaaattatgtttattttttttatataaattttcaaggcctcaagtgcaaatttggagacgaaatgcggccagcattgatcaaaaaattcatggactccggacagtgccctcctacaacggatggacaggagacgaagcattgtgtggcaaaaatctgtacaacaggtccaccatcacccgctccaaatgggcgctgaccaaatggacgctagctagatcgggaaaatctcgaaaaatttggttaaatttcaaaaaagttacggccaaatgatttttcgaatcttttggtcgtcactttttttaaacttactaatttttttttgagatttcgtaggcagatagagagcaaacacttacggctatcgaatgatatcaaattcattcaattaggacaactaagaaatgagttatactccaaaaagcgagctggcgcccatttgctcggcgcccaagaaaaatgggtcttaaataatattgggattgattgcactcattgtccttgagcagtgccagggatagtccttgaaaagtatacttgtctgcatatttgaacaatacgacttcaatcatgttcttgaacaaaaaacataacactatattttaagtgaaatgtccttgagaattcattttaaatacaattttccaaaattttgtatcatggacttttgagttattgggctgatggtttgaaaaagaactcggccaaaacgaattcaaatcccgagaaaatccggcttcggattcgataaaacaaacgttcggctttggtgtttacgaaaaaaaatattccatcgctaagagaacaacaaaatggcaccaaaatttagatgaggttcccaattttgccttcattagttggatgtgtgctggtgaacagaatgccaaacaatgtgcggatcaaaggaggataatatggtagagaaaatggggctcaaaaacatttcatgcgaatgccattac

SEQ ID NO: 7085 - DNA, 2992 bp, Heterodera glycines
tggttggcatagttccgttttttgattggaataacaaattcctttgttggcagttttccaactccctggcaattagcctttaattagctagagaccgagagaggtcgattaatttaggcttttttggggtttttagcaactatttcagcacttttttagcaactatttagataaaaatttctcgatttttagcacataaaaacccgggccctgcggatgaccaatgggatgttttggtgtggggatgtgctgaaacggacgctggcacttgtgccgttttggaaacaaaattatctcaagtcatgaacaacactgttgcgttctcttgcgaatgccattatggcgccagggatgttgatttggcaaatgagcaactgatgctccgtcatctgttctcgcccattgccgctcctaccgatgccgtttcaattgcagtaatggcattcattatatgaactaaattgaaaatatatatatatatatatattccaaattccgtatatattaaattaaacccccctccccccttaattagaagctccaccccctgaaataaagtccccgtttcgagggggttgaaaaatattgccccgggaggctaattgagtaaatacggtagtagcgggaccgggaatttttttaaagttgttttttacttaaattttgcgcgaaatttaatcggattgccagcctaaaattccttcgaatttttgaagatttatccgaaaattgaagtatttttattcaaaatttcttgataattggaacacaactttacacaaaaaaaaaaattccggtgatcgcccaatggacacccatttaaaatgtttaaattattatttacataaaattatattttatttttctgcgaatttagcaatgtaaaaatgagtgtacaaattttttaaaatatatttaacaaaataaaaaattagtcgaataaatatataatttttattacagccatgactgttggacatcattctttgattgcgagatggagaaataagacgaattttttattaaaaaaaactaaagaaaaatcgaattttacttatttaccgaatatatttccatacatttattatacatatactaaaactatgcgaaacattgctttgctgttctatttattgcattttttatatgaaaatttgccaaaaatagccgaaatatgctctaaaaagcaaaaacgcaaaaatggcaaaatatgcatttattcttgaaaagccccaaaatatgcttttatatgcactaaaacattcaccaaataaaaaactttaacgcagaaatgctatttttgatcccctttcttcatagcaaatgcgcagaaaaaatatgcaaaatcatacaatttataaccctaccctacttatggagcacatatcaaatttttgtggaacgggctcccgcggtattaattctgcaattcatgaacatccaaaaaaggcggggttgcggactgggatctcgcaaatccagcgcgagatatcctcccgctgtccatccctaagtgaaaaagacgaaaaatttattgtccaaattacgtaatgtcgaaacttggtgatatgatgtgaaattagacaaaaagaatgaatatgtgccattgattttttaaaaatatttttattttattaattctaaaaaagtaattttttaaaaatttagacgttgaaacgatccaaaaaaaactcagtgtttgatgagtgttcctaattatatgaatttatgaatagaagtaattaaatttaattatttataaaccactgagttttttgtttgaccgacctagctagccaccattctcgaatgttcattttgatgatttctttttgttgtgtttgcgcatcatttgccgtcctttggctttgcctttgcccccgccaccctctcgagagaaaatccatgtgtccgcttggtacccaactttctggtgtccaatttaccggtcccaccagtcaaaagtcaccccgaagcataacattttgcctcttttaaatatttttaaaaatcattgcctagtgataatttggcatgcaatttgtaactttgtcatgacaataaatgcttgcccaattttattttctcatgaaatttttttaattacaattttaaatagaaaaatgaaaaattttgatacaaaattcatttctcattcatttgaaaagcaaaaaaaatggtagaagcaatattatttgtgaatcataaatttctcaaaaattctattagttttttatgttcgttgtcgttatcagtgggacgatggcttcgggtgttcgatttggtcggccttttcagctgggcctcgacattgcgttgatcacttatcagccacccatcgatatagccgtttaccaaaaagataagatgtagaggccgtactgggtcgggatcccgctgagattttccctggatcccggccctgccatcccgattcccaacacagactttttcaacctccgggccctacaaattgtcaattcctaattggaacctccatcaattccccaaaagccatcaaataacaaaaaagtgatcgtcgtcattttccttaaaatacagtaggaatccgtcattttttgagttgaccaattttgacacccttctactggtaggctgaacattttgccaatttaaaatttgtaaatcgtttccctagtgataatttggcatgcaatttgtaactttgtcgtgacggcaaaagcttaccaacttcaattttctcattaaattttccaaatacaaatcaaacaaaaatgaaaagatacattaaatcacaagacagacgacctcatttagttgtcagccaattcaacgaaaggctttgtcatggtcattaaaggtaaatgtgtatgacattttggcaaataaaaatttaaataatttccaatttcacgaaaattcaacaaaaaatttggccaaattaaacacaaaaatggcagacgataggaaaaaaaaattttgcttaatttgatattctcggaattttata

SEQ ID NO: 7086 - DNA, 1569 bp, Heterodera glycines
ttttggcatttatttcttggcgttttattccttttcgaaattcaaaaaatactttttacagtaacccaacagactaataaactagtattacggtcattgatcatcattttgtccattaatattggcggatatctaatcaacttggtcatgtatcagttgctggatgcatttggctcaattttggggtattttaaattaatttgaattttaaatttttcaaatttacctaagacccccaattcgtgggtggcaatttggttttattgctggcattttgttgaatgcttctgccggatcaaatgcgattgtcctttatttgtgcaggtgttaatttatcaataaaaaatatattttttacttttttcgtttatttattacttaaaatattaaaatttaattaatatatttctttttaattgttaaatattttatcccgcagcgggacccgcaaatttgattttttgtgcgggatctcgagggatccgcgttgcatttttgaaaatttttcaaatacagaatgccaaatatttttgaataaattaaataataaatttaattacctaactcatttttcatcgcaaatttcattcaaaatttgtgaaattttcccggcagcgcctattggcaccgccggatgacctctatcttttattatctctttttaaaaattcaaaattgtaaaattggtcacttttagacaaaatctgttaacaaatcgcattaaattttcaaaaaatttcagggcggtgctgatgggcaccgccggaccccccccccccccagttcctagttttttgaaaaaattgcgccgcaaacaaagcggttttgaaaagcaacaaaatattcacatttatgaaccattaacagattttattcccgttctctttttaccgtctaatccattcgaaatagtcgtctcattagccccttttaatgcatcccgcaagcccctaaaaatttctttttcaaaatatcaggtatttttttgttttttggaaattttttgaaatttaattgtcaactatttaaaaaaaaataataattaatttaattaaagtaacctgtcaactattaaaaaaataataataattaatttaattaaagtagcctatcaacttgaagtgtttcgaatttcaaaatccgcaatcccgcgcgggatcccgcaaattttaaatgcgggatttgtacgattaatcccgcgagatcccatcccgcaaaaaattttaagttccaatcccgcagagggacccgcaaatttgaaatttccggtctctaattattatcgcttttaattattatttttaatttattatatttttattttctttaaatttaaattataattttagcactgaatatcgtcgcgtgttcaaaaaagaatttcaagcgttgaagggctatttttgtaacaaaaatggtattctaataattaatttttaaaaagtacaatataaattttattttagccgtctacacaattggcgcaaaaaaccaagtccaaaatgccaacccaaaaaacaaaatgaacatcatccgattaagccaacagacaaatgtgaaaaatctgat

SEQ ID NO: 7087 - DNA, 7797 bp, Heterodera glycines
  unsure (1)..(7797): unsure at all n locations
cactcgccaaaancggaaatgcaacancgtcggcaacccctttatgggcaacaaacgaccaacttcaagtggatttccctggaccaatcactggactcttcaaagggaagcaaaccagctcagtaacaaattgttttgcgcaaccagcaacactgttcgtcaaatggcacagtctccaactactgtcgccaacccatcgcgcagaccactgcaattacgcttccgagtattgccagctgcaagacaacagttcactcatctggacttcagcatgtccaaacgacaattgtttcatgtgcgatttccaagaagccgaagaaatccacggagaattcacaagctcaacggtcaaataacagcattttggatctcggatgatcgacaaaaggcactgaccttcaccgagacgcatgccgtgcaagcatgcgacgggagacaaatcgtcttatcagagcagaacttcggcattccaaaagagcaattcgacatcatgatgagcaaccacacaagagcgaaacgcaacgtgcaacccgaacaactcgcttcacagcttaccgctgctcaacttgccacaacaatggcactctcacagctttacttaaaggaatgccagcgcaacgtgcgcgtcagcaacccaacgcttcaggcacgaaaactcctcaagcgcgaaaatctgcaagcccgatagatcagcgaaacaacaatcgaagtgtttccctgcgttccaatctccctatccaacatcagctaccgaacaacaaaggactgctacaagttcatccctgtcacaatccatctgccaaacacaacacaagacgcattcctcgacccggagatgcgcatcctcccactcatctcaaagatcgcaagttgctctcaatttcgctaccatcatctgcaagtgcaacaaaaacccaacttgtgggtgcgaatcgactcaaaaaatggaaacgtccaacgattgtcacaaactgcaatccatgagctctacgagacaatcctcaacaaaacggacaacgacttggatctccacccactgatcttccatcagtggcaactcgacaacgacaccgacttcgctacctttccacacatcgacgaatccgaggattcggaagagttcaaaaataagctggaacaacacacgacccaacgagccgaagcactcggagctttacccggcggaatcgaaggatggaccgtcagatggctccaagaacggctacaggaaataatccaatggtggatgcgtctcgcctcggcatattccacattcatactctgccgcgacgttatcctaccctgcttgatcgcctacttcctgaacccaatccgcatcacactcatgaccctgattggatttcgaccaaagaaacaaccaacgcttcaaatccaagcacaacacgaggacatgccattgagggaaatgccaaacacaccaatccggcggaaacgacgtcaattgcccgagcaatcgactccaccaatacgacaggacacgacgacagcaacggcctcattccgaacaagagcaagagcccacagcgcaacggaagacacgcccttcggacgcttgcgaccaatgaaactggcagacgactgaagggcccaaaagaaccaagaagagagaagaaggaaggaagaacggacgagcctttccttgccgcctcgggagtgtcgcgattgccattcgcgaaaatcaaataatttgattttgcaattgtgcacaaattgtgcaaaattgaattggccccaaaaaccaaaaaccaaattaaacaatttttaaatttggggccaatgttcgattgagtgacattccttccccaatccttatcaccggctgtcactccccccagcaattctccgttcctcccgccttatcagcttcaactcgcccattctctccccactttttggccaatataaataagtgctcaacaccacgcttcatcaacacaccaatcatcagcagcacaccaaagtgctgcttcaactctctctctctctctctctctctctctcttcctctcgtcccccacaattgttccacaagcgccccgctccccaatcaatcaccatcacggcgccccccaagccatttccatgcattgattgcgccccctcacacatttccgttgttgtactgctccaactccttgctctcccaatttcccccatttttgaccaatttcaatgcaattttttgtgatgggctaatagggccaaattgttcacatttttcactttgtggcccatttggccgatttttgcccccctcaattgtcctcccccattgctcacccatttcggtttaattacccaagtttgagataaaatttggtggtaattttctgtgctttctttctgtgcggccccaatccgaccgtagtcccgtctcgatcgcccccggcccctttgtgctctccctccaacttgtcaaagtcctgcacccaagtgcaggcaattgtcggactccaccgcgcccacacccgcacacaaactcggagtacgacaagtggcgacctgggcagggacaaccaagcaacgacaaacagcaacaagtgcgcgacaagccgcggcggtgcactcaacggaaaaggtgtggtgaatttggaaaaattcactcggtgttccaagttttcgctctccgtggcaaaacttggacacaacaaggaggggggaagcaaaagtgggagttcggggaaatactgatcggtctccgtgccatcagtatttcctaggtcaaattactgctcggtctccgtgccagcagtattttgtcaattactggtcggtctccgtgccgccagtaatcggtaatattactgatcggtctccgtgccatcagtaataggggcaattactggttggtctccgtgccgccagtaatcaagcaaagtactgctcgctctccgtggcaacagtaccggtccttgccaagcaaaggaaggacagttggcgtgaactgctcgctctccgtggcagcagttactccaacccgacgcggacaagtcaaacggtcggaacaacacaagtgtactgcttgatctccgtgtcagcagtacaaccagagcagccaatcaatcaacaagcaacaagcaagaagcgaaggcaaagcacaacaagcaacaaggcaaagcacagcaagcatcaagcaacaagcaaagcacagcaagcagtcaatagcaacaagcacagctacagcaacagagcaaacaatggccgcaccaattcaacagaaactcagcgctgctctcaaagttctctcccgaagccgaactgcggcggaactgaacatccaagccgaccaagcggcatcaaacctcgaaaacgcattcaatttcgaggctcaactggagaaggtccaaaaagaagcaaaaacaatggacatcttcctcgacgacgtacgagaatcgctcacagcatgggcggatttactgcgcaaactgcctgcaacggaacgcgatccagcagaagcagatttcaacaagttcgagaaaaaggagcgaacaacagacaaagtcgacgaagcagcactgaagctgcgcgacttgcgtgacctcataagcacactcacagttcaatcccgactctaccgcagcaaggcggacaaagaagagcgggacgctcaagcagctcatgcaaacgcaatgcaacacaccgcgcagcaacaaccaaacaagacgccgtccttcactcctccgttctaccaattccagccaatccagctggacaagttcttcggcaacaaacgcaaatggccggagttctacgaatcgttcaaatcagcaatcggcacacacgcactcagcaaagcggagaagttcaatctcctgcgcaacctactcggaggagaagcccgagaactcgtggctggctttcgactggaggacaataattacgacacggccctccaattgctgaaggacacatacggagcaccggacgaacacatcagggcacttcatttcgaattggcaaacctcaagccctgcaaaaacctgcgcgacaccaaagaattcctcctgcaactcgaacgactcacacgcgaactcaacaatacaggagaagacatcgaaggcccaccgaccttcctcatgcttgaaaagaagctcactcccggattcctgcgcacaatcctaaccaaaaagggagaagacccggcacgctggaacacgacaaagttccgagacgtactcaacgaagcggttcgaaaagaatcccaaatccaagaagtcatgggcgagtacggacactcgccacaacaacggccgcaaccacaaaggcccaatttctcggcatcaaaattccgagaccgcgcaccaatcccacagcaacgggaacgcacattcatcacctcagcggtggatgacaatcacaaaaggctgatcaatcgacagcctcaacacaggccacagcaacaaaggcctcgcgcaccacaaccgcaacaaagaaacttgcgcactttcaacaatcaaaggcaatttccaactcaacgtgccaatgcgaccaacaatcaacgacaatttccaactcaacgtaccaatgcgatcaacaatcgaaggcaatttccaactcaacatgccaatgcgacattcaatcaacgcaagccaccaagtccatgcatcttctgtgacaacgatcactggaatgaagaatgccggaaatacagtacaattcaacagcgaagagaagtactacgcacaaaggcattatgcttcaaatgcctcaaaagcaatcatcaagcaagcaactgcccgcaaccgaagaaatgcttcaaatgcaaacaacctcatccaacggcattatgttatgcagacgaaaaaccaccgaaccaaatcacagcagcaatgttggggcaaacacaacaaaatatgtcaatcacaactcaagacggaagcaacgaaccaacggcatcgacatcgcaaatgtgcaatgccgtaaacggaagcgacactcgcgcactcctcatgaccgcaacttcaacggtcttcaatccagcacaaccgcatctcagcatgactgcggcaattttcatcgatccaggcagccacagatcattcatttcagcaaaggcagcacagctactggatcttccggtggtccacaccgaagaatgccacttgaccagtttcggagaacgcgaaccaaaaagatacatcagcgacctggtcaagctcggatttctctgcacgagcggggaaaaactcatcttcaacctcaacgccatgaaattcttggtcaacgacatgccaatgattcaactgtcagagctggacaagacagagttgaggcaacaaaagcacaatcctccgcatgaacaacgacaacctgacatcatgctcggaattgatgtctggcacgaactgcaggttcaaccaatcgaaagttgccaagcggtttcacactgtgccgatccaaaatcggcaaaatcctcagtggatcaggacgcatcgaaatgcatcaaacgccaaacgtgacatttgtcatgtcaatccacggcactgaacaagaagaagccaatcaatcagtcacgttcgaatcaaccaaagaagagacggaagtcttcacaaccgaagatgatttcaaaaaggacgagcagctcaacaacttcttcggattaaatctgattggcatggacgatacatcaacaccaatcgatcaggatcatgtgatgatccacttcaaaaagaacctcacgttcgtcaacaaccgataccaagtcgctttgccctggaacgaccgagttgatgctcttccaagcaacatccatcaagccaaagccaggctcgtctcattgatcaaaagactgcgcagcctcaacctgattgacaaatatcaggcaattttggacgagcaagttcaaaactcagtcatcgaatacatcggtccacccgagtctccatcaagtgcatggcctgtgcattttctaccacacagagcagtcatcagagcggataaagcaacaaccaaaatccgaatcgtcatggatgcgtcagcaaagccaaagaattgcccatcagcaccatccttgaacgactgcttatacacaggaccacaactgctgaaggatctcaccggcatcctcctgcgcttcagacgcatggaacatgtgatcctcgccgacatcgaaaaggcatttctgcaacttggaattcgacatgcggacagagatgcctgcagattcatttggctcaacaatcccgagacatcagagctcaatccaatcagccactccgaattgcgcatctaccgattctgccgtgtcagtttcggtttgacggtgtcaccattcctgctcaatgccacattacgggaacacctcgcgctattcgactccgacctagcaaggcggatcgaaaagaatctgtacgtcgacaacatcatgttcgacgccaagccaacggaaaagcttcaagatttggtgacgcaagcaagacaatcttcgaagcagcgggcatgaaactccgagaattctacggaagcaacatcgaagagctaaaaaagctgcaaccagacgacttggcaaaggacctagaagacaacaaagtgctcggcattcgatggaaaccaaaacataatcggctcatcttcaaattgccaatcttcgaaggaaaaatcacaaaacggacaattctgtcgcaaattgccaaagtctatgacccgctcggactcatgtcacccgtactactgccagccaagctcattcttcaagaagtgcaaaacttgaacccaaaatgggacgacgaattgccagcaaacatcaacaaggactggctcaaattgatggcacagtggctcaacagaggcgaagcaatcacaatcgaatttccacggcacatccaagccatcgactcagtggaattccactgcttctgcgacgccagcaaatacggcatgggaattgccgtgtaccaaaaggccaaaacaataatcagaaaggatgaatgcaacctcatctacgcaaaaagccttgtcaaaccaatcaaagtggcagcgcacgacggcacaattccaaagttggaacttcaagcactgactctcggaataaaagcagtcaaattcatccaagctcaaatcaaattcgccgatcatcaagtcatcatgtggacagacagtcaatgctcagtcgaacgacttcgagaaaacaagcgccaagatcgatttgtggcaaatcgattacaaaaaatccgagaagcgaattttcaagtccgacacgtcagaaccgactcaaacccggcggatatggcatctagaggcgcagatccccaatgccttcgaacatcactgctttggcgctttggcccgatttggctttcaaaagcagacaaatggccagaatccaacgtcatctaccgacccagagatgaactcaaagaagtggaagagccaccaatcatcgaaatgacaacaactgttcaagtcgaggaacagttcgaaccatcaatccaattcgaacgattttcgaattggaacaggctgaaagccaccgcagcacacgccatacgcttcatgagcaaacttcgcgcactcaaaaatggaaaattcaacaacgaagaccacagcaatggaacattgacagtggaacaactgcagcaagcagagaaatggattttgagagaagcgcagcggcttcatccaccatccaacgaccaaatccgagaattgcaactattccaacaagaaggaatttggagatgcggcggacgactcgaggaagcacccggacttacatacgacagcaaacatcccaatctttttgccatcgcaagcatggatcaccaagctcatcatccg

SEQ ID NO: 7088 - DNA, 3151 bp, Heterodera glycines
  unsure (1)..(3151): unsure at all n locations
ttttaagcgaggtaggggttgtagagctcaggaatttnaactaagccaagtgcgaaagtgataacgtaaaacattgaaaatgaataaaaaatggaaaagaaaaacaatttattcacaaaaaatatttgtccaaaatattaattaaaatttggcattttgccaattaataaagtgaagaaatgatcaaacttttcattatgaagatgccattcccacattttccttgtaggcccattcaaaatgtgatcggatacatttggggcagtgaacggcccgacgagtgggtgatgctcggcaaccatttcgacgcgtgggttttcggcgccatcgacccgaacagcgggacggccgtgctggcggaggtggccaagggattggccgaaacggtgcgcaccaccgggtggaggccgaagcggacgattgttttctgcgcttgggacgcggaggagcccggactgatcgggtgggaagcactcactgattatgcataattaacttactgatcacacacattgacaaaactatatctagtatattcgtgtagctttactaagtattcgtttttttaatttgtttcatttttttgccacagatcgaccgaatttgtggaagaatttgcggaaattttgcagcaaaaggccatcgtttatttgaacgtcgatttgatctcctccaaccaatcattgtctgtccgtgttccttttgtgctcatttcctgtggccaatgttctgtttcaggtctgtctccactgtcccttcgcttttccattcggccgtcgcggcggcaaaagtcgtcaaaaacccattggacgaccaattgaccgtcttcgactcgtgggccaaacatttcccatcaaaaacggaatggcttccggacattcctgaaatgagcatccccgggggcggaagtgaccatatgtgagcaaaaactattggggaaattgaaaaaaagagcaaatttacaaaaataaggcaaataaaattaaatgaaaaaaaccaaatccatgcttaggtaattattacctacaatttcaagtacatcatcatcataattaatgtacggtattttagcacttttctgaactttttgggcgtcccggtgatcgactttctttacaaagatgccgaatcccccggatattcctaccccctctatcactcgcgctacgaattgccatttgtcaacgagcaccttttcgacaacaatcagttggcggtccgtttctcaaacattttttttgcatatttcgaactcaattctttaaaattcaggtgcataaagccgtgggcgaatattgggcggaattggcacgtctttttgctgattcgctgcttttgccgatcagtgcgaccactttggcacatcgattattggccgactatttggaggggatcaaaaaagttgctaaattaaattcaatttgaatttcgttattatttattttattcagccaatcttggatttgagcagccaatttccgagtacgtgtggaccggcgaagacccaactggacaatctgatccaaaatgggcaccaatttatggcgcaggcggaagagttcgaacggcacgcccaaggccaaagtgcgagtgccaatttggcccaattagcgtgggcaaatgaccgactgagaaaattggagcaatgttttgtgaacccggcgatgggactcgcgcgggaagaaccgctcaaaaggcacgtgctgttcgcaacatcgaaggacaatttctacgcatcgaacacaatggcaattgtttataaaaaggtgacaaaaacgaatttgtaattaaatttgaagagacaattaagaaagaaaaatgctaattaaactgcattaatttttttaatgaaattaatgctttttatgcttagattggccaatttcgcgacgcaaaaagtgccgaggagcgcacaaaatggtgcaatgaattggccttggaattggccgttgtgcagcaggcgattcactgtgccaccagcacactcagcaaaggcatttgataatgcccacgattaatattaatgccaactaatggatcatcaattaacaatttgttcacaaatattcatgaaaattttttgatcgacaataattaattccggtcactttttctgatcacaattttgtcccgatcgttttgttcgtcgatcatttccaaactttccaatgcttcgatcgcctcctttcgggcactttcttcggctgatttaattaggctaattatttcgttggtcttttcaattgtcccttcccattttgaattttcgcttaatctttgcaccattttcacaattttgtcatttttctcaattccatttttcccaattttgagtacattttcttccattcccaattgataaattcccaatttttccaacatttttttcacattttcctcaattagtttaaaattttcatttatattttctattgccttttttgcatttctttgctcaaattcatctgaactttcatttgcaattctgaacaattcggccattggatttgagaataaatttcgtgaaatgttttgcaacccgtcgaataatgccaagactttttcctcctaattaagaaatttaaaatttaattagtctgaatttttattgttcacttgacatataaattaccaaaattaatttcggatgatcgtgatcattttctttttctgccttttcaatcctaaattttatttgtatattttttcatcttaattttaatttcaaacaaaccaattctttagacggagacaatcatcgccaaagtttttctatgataaaatttgtttgttgtcaaaatggttaattatttattatattgcataatataaattattttactgaacctctttgaggcggtaaattttcaaattgagaagccaaataatgtgcttaaaaaggtggtccaaattcacgggaattgacaattcaaattcggacagctaaagcagccaaaattcgttatttaataaaataaaaaagaaaacattttttgatttcttccgtcggttttccgtcgtcaaattttgtgcagaaatgccattgtttttgttaagcaaaagaggggcacagcccaagaaatattcgttttcgtgttgttcttcctcttttccatttcgttggtgccgttttgcggtggcgagtaaaaat

SEQ ID NO: 7089 - DNA, 1303 bp, Heterodera glycines
tagtcacttttttgcctaaattcaccagtaaccaaaaagtacccgtctcatcggaatcttcgtttcgagaaacacgcgcgatttcaaaaatagttcggtcgggtcaatttggcccaaattgaccgtgtacagcttggaaaagttgggcctgtatagcgtgacataagccatgcggaacatcgtccgaatgtcttccaattctaagttgaattttggatcaaagaaagggccttcgtctgacggattttcgtcatcgatgtcagcttaatgggacgcaattatagcacaaattttgtaaatttgtactatctaactctctatatccttttgcaataacaaacggataattatttaaatgatatttaatgtaaattaaatataaccgagcgctgagatttatatgtttgcatatacttttctgcgtataatcttatcgcattaaagcccaaaaagcgcattttcattcaacaattcacgaattagagcgactttccagcacatagaatcattttttgggctttttgcacatttttttactatgtttatttcagcagattttttggcatttttttttgttttttagaacatataaatcccagaaataattatcttttattaatttgctaaattaataattattataattacctttgtattcgtttttcgttgattttacataaaagaaaaagaaaatgttaaaatttgcggtctcttcgtcaacatttggcaaatgcaaaacgaaagtctgtccattttcggcatttgttctgcacattttgcgcacatttttcgctctgtccaaataccgtacaaaaacgtcaagtcttacggtacggagtgactccgattggccaaaaatgggccgcaattttaagagtttggcatcagaaactgaacatttgttgagaagggtcagcagaaagaagagaaaatgaaatgcaagagacatttaatttaaaatttcgaattttgcaaaatataaaattaaaaatgataaaacgaagaaaaaattaataatatattgaatattttatttaattttatttgaattttatcattcaatcgattttcaataagagaaaagaggaaaaattatggggtgaaaatgaaaaaaaagagaatatatgcaaataaataactgcacattataaaatatccgaacattataaaattgaattatagcaaaaaaaaaaaaaaaattgataatttgtaaaaaactttcattttattattacaatggcaaatcttataatttggtttgaatatttgtaaaaaatttgtttcgtttgatcattttattaat

SEQ ID NO: 7090 - DNA, 2036 bp, Heterodera glycines
attaatgttttttaagaattatacggaattattgtaaaattaaaatttcattttttaaattttttaaaattacttttatgatggtattattattgtttttgttattgctgttttttttatttattctgttcagtaaaactttctgagatcctttttttattccttttcaagtgtttctttttttgttcaaccttttccacttaagtgttttgtttatttaaattcttttttaatttaatttaatttttcatttttatttttattttcctttgtcaattatttccatcaattttctttctctttaccttttctgatggaccaattctttgtacgttcagccaaaaagagtgcttaaaataaaatggagccaattttcttgggaaacattgtcaactttccatttattgtaacaaatgtttttttacgccgatgggttaaattttaaaataaatttaattttttaattcggaattattcagaaatgcgttccaaaaatcatttcggctttttctttgccctttttttcgtcattttaacagcgaatgctgtgaaattggagaggaaaaaagtggtggaaggatacgccgtgaaatcagattggggccaacaacagccaatggcacttccaattccctttggaggcgacggagcaatgggcgacgaattcggcacttgtgccattgaccaaagcgagtccatttccaggggttttctaaattgtctaattgcctcaaatagtgccaactgttgtgcacacaatgttcggaccggtcaaaggcttcaccgacattgacggggccaactcgagtctcgtcgacgttttcctcggaattccgttcgcccaaccgcccgttggccatttgcgatttgaggcaaatgctaacgaattttgacaaactttattaattgcaatttcactgttatgccaaagaaatgaaaaaatctgctcagaagccgcgtcccctcgtgacgcattgggacggcattttggacggcacggagcacagaaaaagctgtgtgccgcacgcacggcccgattggcaaaacgaattgctgggccagtacagcttcagcgaagactgcctctatatgaacatttttgcaccacacggagcagtaaataaaataattaaaatatatttaaattaaatataataattattatttaaaaaaggaaaaaaatgaaaataattaatgacaaaatgccgcagaacaaaggcagtgaggagcagctgctgcccgtgctggtgcttatccacggcggtgccttttccattggcagtgtccgccaatttagcgaccacagagacatcggtgctaaattcgtcagccacggcattgtcgtggtggccatccaataccggcttggggtttttggtaagccgagagaaaatttaaaaaacggcacaaatgaatcggttatttagcaagtctcattaaggtaaataatgatgattaattggatagtctcaatttaccaaaggcttcgcctcctccggtgatccccaaatgccgggaaactttggcctttgggaccaactcgccgcgctgcaattcatccgacagaacatccgacgttttggaggaaacccggaggacattacgctttttggccattcggcgggtgccgcgagtgtcagcgcattgggcatttcgccacacagccgacgtaaaagcaaaggcatcccgaaaagccaatgagaatgtaaattgggagttcagatttgttccaacgagcaattcaaatggccggctccgtgttcagctcctttctgctcggtgcccacgtgcaccgtttgacccttggccttgtcgagactctcgactgcgaagagccgccaaaggaatgcctaaagcgcaaaagtgtggacgaaatccacgccgctgttgaacggatggtgagggaatatttcgagaattaacaatgccaaaattgttgtattgagggccctgccaaagtgcgacttgggccgcgcatcgacggcgactttttcccccgcgacattccctccctcgtggacacatcgcccaaaaag

SEQ ID NO: 7091 - DNA, 2421 bp, Heterodera glycines
cgccccccccccccccccccccagatgcgccgcccataagattttccggtgcacttcctaatggtgcatgcgacgtaccgggcaaaaggcccggttcgtatttgctcggtacactcgctcgtcgctccgcttcgctccgctcctcgctcgcgcacctcgaggggcagggcgcttcgcgcccgccctttgtcatgaccagcatcggttggcgcttgctcggcgtactcgctcgtcgctccgcttcgctccgctcctcgctcacacgcctcgaggggcagggcgcttcgcgcccgcccttttgtcatgcagagcgtggctaccgggcaaaaggcccggttcgtattgactcggtacactcgctcgtcgctccgcttcgctccgctcctcgctcgcgcacctcgaggggcaggccgcttcgcgcccgccccttatcgtgcaaaacagctcatttttatttattttgatttgatttgatttaatttaatttaatttattttattttattttatttaatttaatttaattttattttaatttattttaatttattttattttattttattttaatttattttattttattttattttattttaatttaatttattttattttattttatttaaatttaatttattttattttattttattttaatttattttattttattttattttatttaaatttaatttattttattttattttaatttattttattttattttattttattttattttattttattttaatttattttattttattttatttaaatttaatttatttaaatttattttattttattttaatttattttaatttaatttattttattttattttattttattttattttattttaatttattttattttattttaatttattgaattttatttaattttttattttcagaacaattctgacgtcttccagaattttcagaactgttctggtgtgtttcagaattatcagaactatttggacgcttaccagaattttcagaattattctggtctgtaacagaattatcagaactattctgaagcattccggaacaatcagaattattctggtgtttaaattgtaaaaattgaatgcaaaaacacaaagcaaaacacaaggcaaaaattgtaaaaatactcgaaaacacatggtaacatgttgaaacacacgttaatgtaacgaaaatacacgtaaaatattgaaaacgcatgcaaacgtgttgaaaatacacgtaaatgtgaagaacacacgtgaaaaaccggaactggtttaaagaattcacgtcaaaaacacacgtaaacgtgaagaaatcacgtgaaaaacatcaaattccgtgaaattccggacattccggacgaatttacaattgtaaacggattgtaaaccggaaggcgaaaacacaaaaaaaatcggcttttttcgacctttgccggggtataactttgttcgaatttgtcgtagagctacgaaatttttttctcacccttcctctcgacgagctctacaaattgttcgcttaccgcaaaagcgtagctcttacggttcctgagaaataaggtgaaaacacacattttacaacccatttttgccaattgtaaaaagccgggttttttttctttaaccctattttacaaaaaatttttgctggtgcgaattttttccacacgggccattttgtagagaaaaccgagctctttcgattggtaccggtcccgtggcgatccgttgagcccttaaggagagggaaatcgtttagtgggtagcccccccgttatttttatatatagataactagccgctctgagggcatgcgtggggagcgtgcacttgcttaccctagccggtcgagttgtagccagtaacgggtgcacagtccaggttgactgggcagtagcagctaccgaaagatgcgtgtctggatgttcgtgcagcagcagctaccggcacatgcgcgtggcacccgtgctcagttgaatgggcatgcgtggcacccgtgcagcattggaacccgagggcttggcgaatgggcatgcgtggcacccgtgctcagttgaatgggcatgcgtggcacccgtgcagcattggaacccgagggcttggcgaatgggcatgcgtggcacccgtgagcagttggaatgggcatgcgtggcgcccgtgcagcattggaacccgaggacttggcgaataggcatgcgtggcacccgtgagcagttggaacccgagggcttggcgaatgggcatgcgtggcgcccgtgctcagttgaaatgggcatgcgtggcgcccgtgcagcattagaacccgagggcttggcgaatgggcatgcgtggcacccgtgctcagttggaacccgagggcttggcgaatgggcatgcgtggcgcccgtgctcagttgaaatgggcat

SEQ ID NO: 7092 - DNA, 1304 bp, Heterodera glycines
  unsure (1)..(1304): unsure at all n locations
tgccatttcagtctttcatttgtgctgctttttccatctttaagcccttttatgggatgtgtgtcagcgttaattacagcttgacaatggcaccaatttgccgccatttatctccgtcccggcgccaccactttcgtagtcggcggaagaggaaggcgcggaggcggcggaattggggacaagcggtgggcgtgattcgcgcgggattggcaccaccgccgacgtcaaactgtgatgtgcttcattgccaccaattggtgctgggatggcaccggcgacggcattttgagtgccaagcggtggcggaccaccgagtaacagagtctcgcggatgggcgacgagaagcggccgtcaatgcggacggacacaacagtccgggactccaacggcggggcgccattgtcaacggcacgcaaagtcagctgatgctcgcccaaatgtgcggcattcagcgggccgttcacgcgcagttcgccgttgtcattgatcgagaagagcctgaggtaatcagaaaaaaaaagattagcattgaattatgaaattttcatcagacagcatcttggatgacccctgagttcctacttctacgggaaagtgataaatctcaaacccggaaacaaatttaacgattagtcataggagtgccaaaaatggtccagatgacctaagacgatgattaatcccgcagaaaccaggaaacaatcggaaatcatttggggttgattaagcccataaaccgtaagcaccagggatgttgatcgctttcgtgtttcgtattttcgtgttttaagacttttcgtttgttttcgtattttggcacgaaacgaaacttttatgcactggtaagaaaatgcaaaatctgttaacaaattcactctaattttcaaaatttttcccggcctgccctcctccaaaaaaaaatttaggaaaaatatgcgaattttgtgtgaccaatgaccagaaaacatttggaagctttgttatttctccaatcatccaatcgtatcggctctgctctgatcagtctttggtgatcactgatcattttacctgtccaatggtggcatcacattcaatgtcactttgccattttggccttggtccgcatcattcacttcaattcggcccaatagcatatccatatgcgataacactgctgtgctgttattcaatggagactaaactgataaaatcagagaattatcaataattaaaaataaataaatataagttaaattatttttaatttattatattttacatttaaattttacctcatccaattgcacngtgaaccgaattg

SEQ ID NO: 7093 - DNA, 5865 bp, Heterodera glycines
agtatgggggtgcatcatcacccgtcatgtatggtggtggccagtgatgatgatgcatattctgctgctgcttctaataacgtcacccccccccccccctctcctccgaaatcatttcctccttttaatacagacttctaacacattggatagctgacatcataatgagatgcgtcgtctatgtaatctaactgcttgtacgttaaaattagtatgacataatagctgttggtcaaatgatgacaggacatcagagctctaattgaaggaaaatgggtcattaaaaaaattattaatagttaattgatcaaaaaaatctaaaaaaatatttttgaaaaatttaaatttattgcatattgcgacaaaaaaatgcgctgaataatcagtatttgcctaaaaaattccagccctactcataacacttaatgatcctttgagcacattcagagattatgttataaaatttgaaattattaaaaaattcagaaataaaaattttcgtttaaaaattttattattagaaaagaatttgaaaaaatcttttgtaaagtacttaaaaataagaaaatttcacaaactgatcggttggctgggttttccaattaaatcggaccaaaatttcgacactttttttataaccatattttttgaggggcttttctcctgggacaagaatcccccccccccccccggcattatgctttcccacttcaatgcgcaatttgtattgcgcagtctgctcccggtcgagagtgccttttgtcacaattgtgccctcctgctcgtcctccatgccaaacattgtgccaatgttgccttcttcatccagcagcacaaaatgcacttttcctgcactgaactcgttgcccaatgaagtgaccaatgtgccgaccggcgccgactcggacagctcaacaaacaaagtctgctcctgaaaagggcagatcaaaaattggaactgaaaaaaaataaataatggaaaataaaaatgatactgtatgaaatattatagtattcaaaaacggatatcaattatgtatatagggacacacaaatatatatatatatatatatatatatatatttatatttaaatctaacaagaacaaagggtccttcaaaggcattggcacacgatgcatttttttacagtacgctgcgcattaatgccaacacatttagcatagatttaaagattacgttaagcaatctattccatcacttgtgattacattccggtaaaaagctataaaaaacgaagatacgaggggccaaagcatttacatcatcgcttcatctgttgacatactgtccgaaacatggccaagtttcgaattcaatgcccaaaaattgcagacttttcttgaaccttattcttatcgagagactgtctttttcgatcggtgccaatccgggttaagcccgaatttcactgaacactcaccgtggactgacttggcggcggtggtacggcagttgtggtagttgcgaatggtataagcatcggattcaacttcactgctgctgctggtgttgctaatgttgttgttggatcaactcgccaaaatgggttcggcttttggttggaatttgctttgttgttgccgccgttgctaatcggctgccaatacccaccggccgaggacgcaatcagtgccgatgacatcatctgctgcgaacccgcagctggtggcacattttgagaaagggaggaggacatttgtgccgacggtggtgacgccggtaaagccgggggtatgccgacgccgacggcttttgctaatggtggcacaaatgcggacgatgaaagcggaaatggctgatgatcagcaatgaccggaacttggccactgccgaacagcgaagcgcgagcagcggaagaggagggggaggaaaaagcagcttttgatggcagatggtctgcggccaatgcttggaccaacacaacagcatggccaacaagcccatcggtgtcccgtgcctcgatcaccacctaaaaatgaacaaaattagggtaatagacgaaaaaaaagaaaaattttttaaagtgggaagattcaaaaaagccatttacattttttgaatgaaatgatttgaattaacttggtattaccttataacgatgtcccggatacaatggaccgatcgcgctaattaaagagcgtaaatttaatttatatgacctttaaattaaattggttggcacctgagttcatgctttgtgtggtcgtagcgaaatgagttcacagcgccgtcactcacttccacgatacggtatctgagaatgtacatactgtattcaaagaggggcccttggtttgcaattttttgcaataatagctcatgaaaacttgttctggggggagtttgagttagtgcctaaaactttatacaaaaaaataatttttaagcacttttttttgcaaaattccaactaattctgaagcgaaagcccaatctcccagtacttacaacacggcactgttgctctcgctctcgcgtgccttcacttgcgcgatcactcgccgctcgcccggcccagcggcggccgacacattggccacgtacaccgtctgtggcagtgttggtccaccgccaacggtgccttgtaaatgttgtagttgttgttgttgcacgtgctgctgcggttggtcctgctcctgctccgtctccacgccgtccacctcgtcgttgtccatgtcgtcgtccagcaaatgtatagtcagactgatcggagcactgctgcgctgtggcgttgtgtcgacctctctctatattaatagtgatgctcaaaaccaacattttccgagaatagaggccgagaccaggcccaaaaaaccgagacttttctcgagtcaagactaagacttcttcaaaaatttatctttgtaacttaaaatcgaatcaaaattctgctataaaattcaaaaattattatttttttgtggctaaacgaaattttgccagactgaatttcaccatttaataataaattaatttaatttaatttatatttgaaataccgccataacatgcagaacaaagagcggtgtgccagttgcatcagtgtccaattcatccacgttcagatacaaattgcccagatggtcaaccgcaaagcgttcagcaccgtaaccggttaaaatataactaaaaacgatcgaatttttgcactaaatataagccatataatttattttaattggcatttttattttaaaaaatgtaagaattaaactcactgatacactgctgaaggcattcctggcaactgaatttgaaaatgtgttaaatcaaagttaaaaaaataaattaattgactgtattttaagggatatttaaaataaataataattttaaattggatattttattcaactaaaattacttaccaaatctctgtcctccaccaaaatttgtaggggtggcgcattggcagttggcccaatgcgcacaaaagtgccctggccagctgaagcagacaaatagccatcgttggatttcgtctgaacaaagaacacaattttcaaaaattattgttcgaaaatcggaatttctgcctcgtaaaaaacggaagtttatgaaaaattaaaaaaaaattaataatttattgataaagtttacatcataattctccttgtgatgggtacaaatggaatggattaaaatatcgtaaagtcagcaaatacagaatatatgattctatctttaagtcattactaaaaggtaaaaataactcaataaaagttacagaaccatccatgtaaagatagattgtgataatcatttaatgacttttctctttttttgcaatttgttaaaatattacaagtaaaaagcattgaatgatgccaagttaatttgaattggtcaactaaaaaatggctcatgatccgtaattacgaagtccaaaaacgccgaaataattcctggtaatccttaacacgtaatccgtaattgagcccaaagtttcacaatttttttttaacctttaatgtcggatcaaagcgcgatatccgaactgcttggccagcttgttgctgctgttcttgttgttggtgttccgtttgttgttgttgttccgctcctcctccgttgtacattatctgctgctgctgctgttgttgttgttgttgctgtgccgtggacgctttaaaagatataatcggctgaaaaaattgggcagcccccaggggctgcgccggcggcatttgctgctggacccaatgcgcagttgggacaacaaaaaggcaaagcacgagcaaaagcatggccgagtatggcaatggcaaacacagcaatggacgagcatagcaatagcaacaatttgttgggccaagtgaatggtggcggtggtgtcgatgccaattgttgttgttgttgtgtgacttggccatggacagattgcaaaaaatgctaactggggaagagcaattaaaaaatggacattcaaaaaacagtggggaaagaattggataaaacaaattgatgaaaatacgcatatgcatcagggatgggccaaattgaaaaataaaaagcgaaatgcgaaaagcgaaatttgcgaaactgaaaaatgcgaaatgaaaaaaagcgaaatgcgaaaagccaaaatatgcgaaaatgcgaaatgcgaaaagcgaaatttttttaaaaaaaatgaaggcccggcggtgccgataagcgccgccggaaaattttttagaaattgtaataaaatatggtaggaaaagttgcaaaattttcaaaaaatttaccgttttttcaaaaaaataaatcgcaaaaaaagcaaaaaaaatgcaccaaaaagttcaagataaaagcttcaaaccaagttaaaaactcgttttcgtgcatattaggctatagcaagttagcaaaaaaggcaattattagagttgcacgggaccgggacttaccgggaccagaaaagtcgggaccgggacctcgattttcgtccgagactgggatcaaccgggaattttcccaagtgaaattttttgaaaaaaaaatttgaaaatttgagtgctcattgttacgaaaaattgcctatattcaaaaatgtacccattttttaattctcgtttgtggggagaaattcgaagaatttttccattatgcaattttgagtgtaatatgttaacagaaaataataaactgaagcttcgttttaataattaaattttcaaatatattcatttcttaggggtggaaatttcgcatttcgcgccaaaaagcgaaatgcgaaaagcgaaatgcgaaacgccaaaaaatgcgattaatgcgaaaggcgaatgcgaaaagcgaaacctcggcccatccctgatatgcatagaataaaaaaggcaataattgcagatattcacaagtgataaaatgaataattgttgtgctaattaggcaaaggcactaggctcagatgaaagctaatatacactctcattatctgctaattgaaccgattgacgacagataaaaaatggacacgtttaggaccataaaatatttttggcacacattgacgtgcccgttttgcaggagcttaggtagcagcgcaaatgttacaaatggtagacaaagtggtggcgacgacgtttttgatcggtgaaaaaataaaagtgatgacggggaaagagaagaagcattttgctcggccgaggaattgcggacaacgcaatgggaaattaaggcttatgatcaattggaaatgatggacggggcgaggagtgatcagatcatccgtggccaacacacacactgtgttcgcgcctctcccaatcactccatcacacaaatcctccgccgccgaaggcggacggagccgcagcggtttaccccatttgccgtttggtcttggcctgcttgctg

SEQ ID NO: 7094 - DNA, 1372 bp, Heterodera glycines
aaacaaaaatctaaggaaagaaaagcataatttgatcttatctttggcaaaattattttttaattctccatattttgtctattatatttaaaattaaattcttagacatccgatttatttattaaaataaatttttcttggcttgataaaattttaataatgtatgtgtttttcttcaatactttatattttaaaatatttggtataaaataggcctatttaaattcattataaaacatcctaagaatattttgtttacacattaattcaatctaatatttatatctaagatgtttctttgcaatcatcctacaagttcagcctattgtttcactttgaacctttagcaataccgattttatctgttatttatatatttttttactattattttaaattattagtatcattaattttttctcttaaatcttttttatttcttgcattttgagtagattgcaatgttaatcaattttagaaggtttttatttaaatcttaatttaaatgatcctaaattaaagagttattttgtctgtactgggtcttttatttagttattatttgtatgggtgttatttataatattcttttgatttttgatcagcaaagtaattcagctcacgtatccgctccagtacttcattgagctaatatgaaatttctattaaaaaattaaaatttgctttaataaatttaaaattcttgattatttctttccacgaatatgaaattcagagttataatattctttagatatagtatttttttttacaatacagaatatttttcatttaaatccatagataaaagatatgtgtttttttgtcatgtgtttcttggtaaaatttattaagtagaattgggttaaaaaatataatttcaaaaaataagtaaatgtggaaatctaagaatgaatgagcaataagagaaagcgtagaagcggtcactatgggtcaagcccagtgtcagacaaaattgctcataacgccaaatagcacatttggcgtaattttttgcgcgctaattcaaacacactgatcactgacatttttgattgtttattttgatcagccgtaactttcttcatttccaactaaactaaacaaaattggtatctaaaaaaagttttgaaaaggtgaatctttttctaagcgaatgctaagcaatttaactcgtttcaaaccatcaaatttttcgaaaatgtgaaaaagatgaaagtgaggtgaaaatgtggtcaaaaatctgggtatttgtcattttctttgttgttctcaacgcctcggtcatgcagtgcattcaacatcgtcgtgtgcttcaccagtttctcaacgatcttctcttgtgtgccgagatgagagtagcggtctacct

SEQ ID NO: 7095 - DNA, 1340 bp, Heterodera glycines
ccaaatagcgtaattggcgtaatttttgcgcgttaattcaaaagatatatctgatcactgccttttttgaagaccaattaacattaataaactttattcaattgactaaactctttatttaataatgttatagaaatcggaaaaatgtgttcaacataatattcagatagtgaaaatgtttggaaaaatgaaattttgatcaaaagtttgggtatttgcttccattctcttgattgtttccgacaccttgatcgtgaagggcatttagcagtgtcgcgtgtttcaccaacttctcaacaaccttcattgaccgcctcgcacagctccgccttcagacgcttcatctctctcgtcggtgaccaaacgtcaagtccttggtcggtgaacaaccgcttcagtgcttcacgggccttgaacgagatgccagagtccaaggtgatgagcaggtcgttcgccgcgctcagcttgttgtccccctgctgggtgttggtcacgtcggaaagggccttgcgctggcggcatgctgaagccgaacgctcgaggctcgtcgaacggtcgcgctgtgccttgagctgtttccggaggaaagcgtttgatcggcgctgccgttgcagttcctcctcggtccaaacgtggcgccgtcgcagttcgtcaaacatatggacttaaaaataatgaaaatgaaatgaattaaaaaaacaaaatttttgatggaatttctcactcaccatcgtcaagaccaaaggcaccggcgcactttgaagtcgatggtgtcgccatgaggtcacagcgtgccgtggatgttgacggcacgggctcggcttcttggtcgtcgtcggctggtgttgaagtaattggtacatcggtttccaccatgtccaccgacgggacgtccaattccagtggtgtcaccggtgttggagttgatggtggtcgtccgtcgttgtcccgcgccggtgcctctgatgccggcggctcatcttcggatggttgtggcgtgtcggcatctgggtcggtctggggagcggcttaaatttgggaaaattggagattttatgaaaaatgaattgaaaattaacttttcttcgtccatcgaacttgagcagcgatttgggccttcgccctacgaccttctcgcattcgccaccgcttttgggccgcttttttgctttgcaatttaattagaacttttcttttagccataaatcctattaaaaagaaaaaataatctaattttaatgtaatatctttttaaatgttagcagggttaataataaaatcagcattaaacggtgcagaattttatcgctatagatatgcaaagttgaaaaggattgttt

SEQ ID NO: 7096 - DNA, 3810 bp, Heterodera glycines
  unsure (1)..(3810): unsure at all n locations
tttgtccgagggtgtcgtcgcacgcgnacatccagacagtcgtttccgaacaacgtcccccctctttccacgaggtccgcttccgaacaattggcgtcaataatgcactggccattgcctgaaaatactgaacagtttttttaaaattcgctttcttcaccgtgcaaaagatggaagctcgggggtacaacatccgccaacgcaatgttgactagtggagggccgatgtacgaattttgtggtgggggaggagatgggcgggcatccacaattttgtccgacaattggtcccttcggactgtgcaaagcggataagggaatgtcaccgccgatccttgccccatcagtgtcgatgtgaatttgaggtcggcaaagagaagcctgaaaattaaaattagcattcctgattttatttatttacatttggactgggatgatccgcttcctcccagcaatttcgaatgcaacggtctccagctggttcaattgtgcaaaaatcgagccaaatttgttctccaaattttttcggtcatcatgtccaaaataaattcccaaaatggacaaattttttggggaatttgggtgatcaacgttgacgatcaccagtcccaattttgtcgttgctgccacaccgttgcctcccttgtcacccgtcagcaccaacacaatttaggaaacaaattgctggtggagttgcagactgcctttgttaaataattattcattttcctctcaccactttttgccaacacttgaagtcgcccctcaacaaaggcacggacgtcggtacaggcaagtgctcgagtctgtccttcgcccacccactaaaaatttgccccctccgccagctccctcttcagacgcttcactgcccacatcggtgcccaaacgtcatgtccctggccagcgaacgaccgcttcaacgcttcacgggctttgaactagattcctgcgtccaatgtaatgagcagatcgttcaacgcgctcagcctgttgtcctcctgttggttgttggtaatgtcggaaagggccttccgctggcggcatgctgaagccgatcgctcgaggctcgtcgaacgatcacactgtgccttgagctgttttcggaggaaagcgtttgatcggcgctgccgttgcagttcctcctcggtccaaacgtggcgccgtcgcagttcatcaaacataatgacttaaaaataatgaaaatgtaaaatgaattaaaaaaacaaaatttttgatggaatttctcactcaccatcgtcaagaccaaaggcaccggcgcactttgaagtcgatggtgtcgccatgaggtcacagcgtgccgtggatgttgacggcacgggctcggcttcttggtcgtcgtcggctggtgttgaagtaattggtacatcggtttccaccatgtccaccgacgggacgtccaattccagtggtgtcaccggtgttggagttgatggtggtcgtccgtcgttgtcccgcgccggtgcctctgatgccggcggctcatcttcggatggttgtggcgtgtcggcatcggggtcggtctggggagcggcttaaatttgggaaaattggagattttatgaaaaatgaattgaaaattaacttttcttcgtccatcgaacttgagcagcgatttgggccttcgccctacgaccttctcgcattcgccaccgcttttgggccgcttttttgctttgcaatttaattagaacttttcttttagccataaatcctattaaaaagaaaaaataatctaattttttaaatgttagcataattaataataaaatcagcattaaacggtgcagaatttttttctctatagatatgcaaagtttgaaaaggattgttttggtaattgtctaatcgtgaagcagtagcttagaaaaagcttctaaacatgttaagctttcgaatgtatcaaaaatgttggatttggatgacattgaaaaaagttatagaaagctttcgtggaaaaacatgctggcgcccaacgagcgcgcccaaacgcagtggacccgggcttgccccaaggggacccacgcgtttcggcgcccgcgtttcggcgctcgcgtttcggcgccgcgtttcggcgctcgcgtttcggcgccagctcgtttcggcgcccgcgtttcggcgccaaacaaaaatataaaaattcaaatatttggttaaaatcaacaaaaataaaacttttttagttaatcaatttcatcgaatatggcttcacaaattgaaacaaaaaaacaaaaactgaagcttccccacggtggacatctttacacattcgataaaatgagtaaagatgaaacgacaaaattttggaggtgcgaattcaaggatagcgtcaacaaatgtaaaggccgcatttggacggacctaaacaataacttcattcgtcttgcaacgccacacacttgtcccgcaaattcttcgaatgttgaagctcaacgagttaaaactacaatcaaactccgtgccatcgccaccttggaaccgccatctatcattcgttcagaagcattgcagaacgtgccatcaccagccgcacttttggtgacaaaaaggctcgcgaatgacgtacgagaattttttaacaaatgaaaactaacaaacaacttatttagttaatcaaaagggcgcgccacgaaatcaatgcaccaccagcagtcccgaccaatttgaattttgagatcggccaagcatacaggacctacacatcgacgggtggcgctgaggagctgtttctattgggcgactccggggtgtattttgaaaatggaaacgaaaacctgcaacggtaatttgtgaaaaaatgcaaaaatttttttcgcagagttttattgtttgggcgcgaatcatttggacgctttgcggacagaatgactgagtgtttcggtgacggaactttctcgctcgcgccaacccaattttatcaaatttatacgatcctggcaaagtctgttcgtcttaaatcggttttcaaatttgtaaattaaaatatttagacgtgaaaaatggattttcccagtgtgccatgccctaatgacttccaaatcgcaaacatcgtacgaaagaatgtttacacttttgcgtgctgcgtggccaaattttgctcccatttctttttccgtggcttttgaaatggccatgtcaaatgccgttacgacaatctttcccggatgccagatccggttttgcttttttcattttgtacggaacttacaaaagaaagtgaagcagcaaggcttatggcaggtaattttctcccctttatttaaaaatttttttttcaaaatttaagcgttattgttctgatccggtgtttgctttgaatgttcggatgctcacatcagtcgcattcgttccgctttgtgatgtcaggaatgcagtgacagcacttgacatggaatttggaaatttggcggcttttcgacctctaattgattggtcagaaaataaaattttcaattttagaataagtttttaggcttttggacaatatgttgggcgtcctcgtcccaatggcacatggtcacaaccattgttccgtccggagcagtggaacgtctaccaacggacattggatggagatgcgaggacgaacaacaccgcagaagcggaactaaaaagcgaggcaaatatttggcagctgatagacgaattctgaatatggttcgcaattacattccattgaatgcagtgaatgatcatgattatcttccacccattccccagcccaatcaatttcacactattttggaatttcttcgaggtatttcacaccattatcaaatgaacccttga

SEQ ID NO: 7097 - DNA, 1263 bp, Heterodera glycines
ttagtttattaagaaaaacaaaaacaaaataaagcaaaattcattaatttttacgaaaataaaataaaaaaatcgaaaatttccaatgttttgaaaattttagaaagataatttttttacattaattttctcgctattttaccattacttttttttgaaaaaattttcgtatttatgggtcaaaagagccgatttaatagaggggccaatttttttcgaaaaataccaaaatatgagcaatagccggaaatttacgaaatttccaaaaattttgccggattttttttcaggagagttcaattatgccaactctgttttttaggctcaattcgtcctttgagccgtccaaggcattcccatccgactcgccgttggccagctcaatcagttcgctccgtgaagtgttcgaggagttctttcccatccacggtgagagtgatcaaattgtctgatcagtgatcagagtgagcgatcaatagtgatcattgcttatattcccctcaaattaagtgatcgtcaaccgtcccccaaacatctctgatcatgctcaggtagatgtacttgaaattgaaaatttccaaggataaaaaaaagtcttactacgtccggactgatcagtgatcactccaacaaactcagtcacattttctgatcagttcatatgcttgggatttggttgaatatttgttaaagaaaaagttcttgagtctccaaatttccatcaaaaattgaagaactctctctctctcttccagtcccatcatgagctatagaattctgaaaaaattttcaatattttttcaaaaaaaacttgacatatttattcaaaaaatttgaatccgcgattgccttctattaactaattatcggaccatccaatgaaaacaagcaaattttgggataaaaaagttgacaaatcgcgtcaaatgtttgacttttcatgcggcatctatcagagatgtatcggaatttagaatgccgatttccgattgcttgttgccgaaattttcagtgaaaatatggaaattttggcctaaattcccgacgaaaatggaaaattttggaaatttggttagcattggtatgcttccaagaggtaaaaatttgaaccaaaattaacaatttttactgaaaaccgcaaaaattacgtatttatcaaaacaattttcctttacctaccgtattccattcccacgccccccccactcttctacagtaagccaacatgaacgtaatggccgctcaactggactcactgaccga

SEQ ID NO: 7098 - DNA, 1903 bp, Heterodera glycines
  unsure (1)..(1903): unsure at all n locations
cctatttcttgggccaattccggttttcggagttttttgagcttggtacaacctccgccccacctcctctaccgtatctgcccatttttgccttccgaatttaaattataattatttaaaaaaataaaaataaattttagaaggaaaaatggaattaacaatttttcttttgaaatatttagaatttgaacaaaattttatattttttaacatctttttatttccgtatttttaacatttctttatttttatcaatatttcaacattttcacaaaaaaaaatatatgaaaaaacaccccactaaaggtcaaaaatttcagttactctcttagagatggaaaattctgaaaaagaattcgaaattgtcgaaaattttcttgttaaaatataaacaaattttatttgaaaattacttttttttagtttctaaaaattaatggtttaattttttcaataattgaaattttttttgtccatatttctgaaatttttcggaaattttaaattaatttttgtttttgtccattaccggtgtctccattaatttctaaagaatttttaaaaaattggctcggatcagatgttacaaaatccctcccccccccccccctcgcagtgccatcctgaacatgctgttgaccgtcaaaagtgatctgatcggctccatcgcggtcaccatcgtttgcatggcggtcgtctgttccctgttcatctacagtcgacttggcgtcggtgccattgcgctgtgcatcacctcaatttgcttcagtcagtagtcgtcaatgttttttattttacggcattttatgccattttgtgctttttttctgtcattcatttcaaaaatcactttttcagcgctcgtcggtgtactcagttggtgcggcgctgacttggacccggtgacaatggtaagaagctttaaacgctgatcaaaagttaacggatatgggtttgatcattgatcaatttattgcattgatcaaacaatgcgtcagtcatcgattggattacggctatttgatcaactgactgattatagttttcctgatccttaatgacggatcaatgattcatcatcaaaccatttaatctttttggctaaactgattgattgggctgcttcccctgcatcgttttcaccacgagagaatttttaaataacttttaacgaggacataaaaaaaaaattttgattgaaaataataaaataaaaatatgttttcgattggccatgttttgatcccatcgatttgttcctccgatcattactgatcagaccagttatgattgcttgaattcgtgtgctcgttcaaatgcctttaatgtccccccccccatcaggtggacgtgctgttggccaccggatttagcgtcgattacactgcccatgttgcgcaccaatatcacaccaagaagggcacaagcactgaccgaattgcgcacagtctccatggtaagtaaatgatttgttttcttgacaaaagctttctcaatatgggaaatttttttttgattttttacaaaaaaaattactgtaagaaatttagaaaataaataaaaaggcctgaggtttatatacatatatttttttttgaaaaaagacattttgaaaccctgcatttattatttaactttttttgtaactaggcagtatagtaccttatttaggaaatacgagatacggtaataggacacgatatgaaattttaagcgtgctaattggaatggaaaaaaccgaatttaaaatctttgcacggcgaaagtaatttactccaaaaagacccttagtttgttctctttcttataaatctttaaaaccattttggaaacacagcatcttaatttccaaaagcagaaaaattagttttttcaatattaangtcaacattttaaaaacaaa

SEQ ID NO: 7099 - DNA, 2471 bp, Heterodera glycines
attttcattatatcatgatttagttaattaattaagcccggcacccccctccttattcatgtcctcgggggcaatgttggatttcaattgcgattgaattttctttttatcatgatttagtataattaattaagccccccaccccacccctttattcatgccctcgggggcaatgttggatttcaattgcgattgaattttcattttatcatgatttagtttaattaattaagccccccaccccaccccttattcatgccctcgggggcaatgttggatttcaattgcgactgaattttcattttatcatgatttagtttaattaattaagccccccaccccaccccttattcatgccctcgggggcaatgttggatttcaattgcgattgaattttcattttatcatgatttagtttaattaattaagccccccaccccaccccttattcatgccctcgggggcaatgttggatttcaattgcgattgaattttcattttatcatgatttagtataattaattaagccccccaccacaccccttattcatgccctcgggggcaatgttggatttcaattgcgattgaattttcattttatcatgatttattttaattaattaagccccccaccccaccccttattcatgccctcgggggcaatgttggatttcaattgcgattgaattttcattttatcatgatttattttaattaattaagccccccaccccaccccttattcatgccctcgggggcaatgttggatttcaattgcgattgaattttcattttatcatgatttattttaattaattaagccccccaccacacccctgttttttgttgttgaactgatcattataaccctttgttcttttgcagaaatgtgccctccaatgcttcaagccggttggttggtgtttgtttggttgacacgagtgggagggagtcaagggcgtttttcaaaaaaaaattttgaaaagggtgtagggcagggatggcacggaattccgatttccgatttccgaaaaaattttggacgtcggaaaaatatgcttttaaatagatcaaaaaaaagtttgaaaattttgacgaaatttgttcgggaaatgtctactttttcagggattgtcccattttcataaaaatttgtttaccatttcggcaagtgggattaggggattttcggcggtgccaattataaacctccaaagaaaattttgagcaattttaatgtaatccatgactgaactttggtctttggccccttttcattggccccaaaaatttgtgccaggaatttccaccgctttgtgcatgttgcctttggcatttgtgcccacctatgcaattgtggcatttgccaaaacaatttttgccgtcatttcaattggccttctccacgggcttttcctgctccctgtccttttgtgtgccctgccggcagagaagcggaacaagcgaaagagcaaggaaatggaagagaggaggagagaaagaggaggagggaaacaggaagaggaagagagactgggcgaggaagagagagagtgaaggacgaagagcggggaattgagtaggaggaggaagagaaaaagaggaagaaggtagagattggagaaaaagagagcgattgaagaagaggaaaagaaggagaggaaaaatgaagaagaggaaaagaaggagaggaagaagcgagagagagagagagacgaaagatggacttaaaatgagagccagagagaaaaaggaattgaaaagagttaggacttgagaaggaatgagaaaaagaggagaaaacaatggaaaaacgcataacctcatcaagaaaaaaaaagcgtaatttatgtgtagcagcggcaagggcgtagcaacacaaatccccaaaaaaacttaaaaatgaaatttaattgagaaaaaataattaaaattttttaaattattttcaaatttttttctcacccctggcgctacgtccttggcattagcagtacaaatttgttttgtttttgaattgttttttttcgcgcactcacacgcacaacaaaatgccattatcattcccaattaatcaatgtttgaacgaattaaataaaatttattttcaaaaatgtttattaatagggatgggatttttatgtgctaaaatcctgaaataggtgctaggcgttatataaaaaaccatcaaatggaaattttcaaccaaaaactgcccataacttttgttaaagtcaacaggattaaacagtacacaaggtgccaggttttcagacatttttggccataacttttttgaaacctaacgaaattttttgaaattttgcaggctaatataggacacatagagctatcgaatgatatcacactttcttaattttgttggttctaagaaagttttgatcataatttttgatcatcaaaaaatgcttttttaacgcaaaacaaaacagcacgccacaataacaaaa

SEQ ID NO: 7100 - DNA, 2670 bp, Heterodera glycines
ttactagagaccgacatttccaaatctgccggaccagaccggactggtattttcaaaaagtaccggattctggatccggtctctcataatccggtcaatccggtaatccggtcaatccctatttttcaaattgccggatccgtaaccggattccggattggtaaaaatttcaatgttaatttagggaaaaaacccgcaaaatgtcatcaattatatgtaaaattcggggcaccagaaaatgtcgccatagtaaagacaacgcgccgaaaaaataaaaataaaatttcaagaaaaaattttaaaaaattttattttaaagttttttatttttgaaaacctatgtttaatggaaaaataataataatgcttttttgcggcgtccttattacaaaaaaaactttgggaatggggccggcggtgccgataggcgccaccgggaaaattttttgaaaatttaaggcaatttgttaacagattttcactaaaatgacaattttttgattttttgggctccggtcaatccctattacaactttttaaggaagctgtgatacaacctaaactattaccaaaataagggagggttgcgcgacaaatttcccattgtatcttcctttcctttattttactccattgtcattgactctccctttttcccactccctccctctcgcacacacacgcacgcgacaacagatacgggattcaaattgtttgagtgaatgcatagtataaaagggagttgtttcagcatttccggccattcctttccaaataatattaatttattcctgcatccgtgccatcatcaaacgtatttggcgcaccaccgcggcgacgcatggacaagtgagaaagcggaaatgtttttgaaacatttaaaatttgtttttttcggcactttaaacgaccaaatttggttggacacgttggcatggcttgggcgtggagaggtcggcacgcacatggcgctggtcaacgcccgcttcaccgttctggcgtacacgcagctgcagcaaaggcaatggtggttgaaggagttgcacatctgtcagagggaaccgagagggacaggcgccgaactgatcagcttgaacagcgacggctcccgcttcatgtcgccattgcccaccgcacaattgccggaaaatgtcgtcggcttctccagcacattcaacatctggtcgacttcaacaattcccaattttaatttaaattgttccccatttttgcaggtatttcgacggtgaagtgatcattttcctgcaccgaattcgccgcctcttctccacggacgtctctctgcagttcaacattcggcggacgcaaactcgtggttggaaagcgatggcacgtcacatttggcccctgctgaagaacggactcatcatgctggtcaacgtaaagcggctgcacctcatcaggatgcacaaatacgtgtcgccgaccgtcctcttcgactgcgcagaacttttccaaatcagcggcactgttttgcccgagagtccgacaacttacagcaattcgccggacttgtcgacacgtttactgtacaactggctgcacacgcctcgccccgatggtcgtccagtggtattcaaattgagcaaatggaaatcaggatgggaaaatttcgtcaacgaattgatcacggtgggtgtggggtgggtgtttgatcgacggacggattttacttttcctcgttgctttttaattgttctgatcacatttttccgttttttagtccttcactcgtgcggtcggcccggtcaagtacatggtgctcgcttcgttcgacgtcaactacacccggcgtgaacaaatggtgaacattcggacggaggaaaagctgacgctgtcgagcgatgtgcatcaaaggccggatggtggctttgtgtcatctgtgaagattctacgctgtccagcggtgttcacggaagcgaacgtgatgtcctggttgcgtctgccgcgtgtggccagcgaatggcacccaaatttggtgaccattggcttttcagatgactaaattgggtatggacgagttgaacaaatttaagattcagtgttcttatttccttcgttttcagaccaatgccttcgaacagagaaaccgatcgggctgagaactgagaaggataactgcggatcaacaacagatgagccctaagcacaatggccatcgaatgaaattatctctgatcattattattcatatatatatatattgtatttgtcttggcaaaggaaataaagcgccgaatacttaatgttgtatttggcattgtgtagaattgtggtcccgaccgtctctccccacgattcgtctggtcccacgcgttttggcagtcacgtttcggcgcgctcgtttcggcgccagctcttttccactatacttttttctatggcatccaaatccaacaatcttcgtatcattcgaaagctcttaacatgctctattagccttaccaaaagcgaaaagattttcaaacctggaaaaaatgttattaagaaaaacttcaaaaacttcggcttttcgcaattttcatgtataacttttttttggtaattgtcaaatcgcgaagcaatagcttagaaaaagcttctaaacatgttaatcttttagaatgatatcaaaaatgttcgatttggttgacaaagaaaaaaattata

SEQ ID NO: 7101 - DNA, 816 bp, Heterodera glycines
ctcttaacatgctctattagccttaccaaaagcgaaaagattttgaagtcgggaaaaaaagtttaattaaaaaatttaaaatttccgactttcgcaattttcggtaattgtctaatcgtgaacaatagcttagtaaaagcttctaaacatgttaggtttttgagtgatatcaaaaatgttcgatttgtccacaaagaaaaaaatatataatttcagcagtttttgggcaactttttgctcctcgtctctcaattttaatgcgtttttcaacttaaaatattattactttttgttttttttgattttaaattactttatcggtttcaatcagttagttttccatctcttccgtaaatttcaatgcgtgccatttttcggtaggaaatatttgcgcatttttttcattaaaatttattttgtctttcatttcaataaaaagtgtcaaattttcgttgtttttgtattcttcaaatatcatttggtctgataaaaattttgtttgtattttaaaatccctgaaaatttcctctcttacccaatttttgctgtgcaaatgcttttttcagtaattccaatttttgctcaaaagtgccaacaattttacttttattttcggcatttttctggcttccaaataggctcgaaagtgtcttttccttttgcctttttggcattttggcccaattttttacttttcctccaatgattgctctgccaaattttctgctatgaatttgtttactgatcagctcaatgcctcttctctgatcacttttcatttgctcctttttgtttcccgctaatttatccaaattt

SEQ ID NO: 7102 - DNA, 1349 bp, Heterodera glycines
cttttctggaatttttttaaattctggcagaaacttctctctcatttctattgcgactcatttttaactaatttaagagattttaaaatcaattccatataattcattaattaacctaaaattttaatcacaaaaactttgaatatatttttttcaagaatatatgtaagaatattcgatgaattgaaaatgcttaaaaatggcaacaaaatttttggaaaaaaaacattaatttatgtcaattttgtcgcaaaattagttttgtaaactaatattcatattcaaaaagaaaaattgcatatttctatgaaatctttaggaaaaagcatctctacccataccaaatattagaaattttttccaaatacattaaaagaatgagtgacacgcttattatttaaaaaaattgttaatgcaattttaatgaaaaatttcccaaatttcaaaggcctaaatttcacacctctgtctcatcctaatcggccaagagagttattgcgttatccgtgccaatcaaatttttgccttatgacgcggctggatgggccaattgatggccgagtccaatttcatcccctctggcgatggatcggtttcaaatttctcacccatcaaaaagaaatttcggtttttcaaaagctattgaacttttttgtgggttagtgccccttgttgggcttggagggaagtgaagtgagccgaaagtcccaagaataatctcggcggcggcggcaagggccaattgctctgatcactcactcattgaaccatggtcacccgcccccggggtgcttcctcacaaccaatcaacaccatctgcatcatcatcatcatcagtcggggtcggtctcgctgatttcgaatgaatgggccaaggagctggtggttgggggcgggaaggggcagggccaagtgaagaaaaaggtcgtcgagaatggaatgggaggggagagaatggatcggtctcgaggaggcggaggggggggggggggggtgataaaaaaaaaaaaactttttagtctgtgatttgatgagatatttatgttacaaaattctgattataaaggttaaggatttttgagtaatcgttggacatttgattatctctagttccttctatctgacctatacagattcacagcatatgtatcgtcgagtccagggtttttctcatttcaaagttatattaatcgagattcaatatttatagattgcttaatgcaattagatgtgacagcaattacgtattttattattttatgttcccattatccatatgacaccgccttgatcctcccattactgtatgtcctgtggcaaattagtcaatatgacgattcattggcttg

SEQ ID NO: 7103 - DNA, 1612 bp, Heterodera glycines
ggggaccatggggttccgtcgcgcttctaaaccccaccgcggcgccggaggggaaatgtttcttttgggcccgagacaatgatttattacttacatcctctcttctcccccccccccctctcttggggacacctgtaaatacatcattttagtggatttgggatacggtaataattatggttgggcagcgggacattgtaaaaaaaagcattcactgattttggcattttagacaaatttttcaagaatatattttgccttttttaatttttgtacggcacgtaatttttttacaaatgccaaccacttgcggtaatttatatgcaaaacataaataaataaaaattccggcatttttctaggttttccaaactgcaaatttcgttcgaggtattttttgtctcccatacagccaaaatctaagtgtcattaattttttccctcccaaaggtatcgaggccaagaggacaatcggcacttttaccgtatcccgaaaagaccgcccattctgcgccaggcatggctttgtgccattggaagaagtgaggagacggtggtgagccaggcaagcaaaagcatcccccgtgggagaaggggcgggggacggagaggcaaaacaatttggcactaaattgctttttattgacgggaaatgccgcgggcgttggcgtttttcgcagactttttcgttttatgtgttttgttcgattttaaattttatttataaataaaaaaacattttaaatgtaaatgatgaatggcatttcttcagctccgaatttgttctgcccatttttacggaggtgaaaagcacgaaggcgacatcccggtggcggacccccaggcaaatttttcttaattggttattaattacaattaatggttcaaaaattgcagattgacccacccgaattcatcgaacttccgccaaaagaagtgcgctcttccgaaagaagggcccgcttaaagggtaaagtttaaaaaataaaaataacagattgtcatgatttaataaaattaattgaaaatgtttatttaattaggggggggggggaataatgattggattagcagaaaaaacctgcgctattgtatatctcatttatgatcaaattaccagatttaatattatcaaagtgagctcctctgatttggattcatttcgttcaagaattttttgggtgtcgagaattccattttttaagcattgtcgagaatgagctgcaaaaattcaagtacaatttataatttcatcattttactatgcctttcctttctgacgagcggaattttaatttattgaactaaaaacaaagaatatttttcaattttcttcgcgattattgcatttttcttcttatgacattctgatacgcatttatttcccattttttttgctttcgccgcttaaaaaacaattattattaaaaattcattttctacacttcgggattcaatacatatataatagcagatcaaattcacatattcaaaaaatagattttaaacaattatttccatgtaaaaaaagaagaattaattaacaaataagaaattaaaaattatgcatagaaaaaacaatttatcacttatttaatattttcccattttt

SEQ ID NO: 7104 - DNA, 1933 bp, Heterodera glycines
  unsure (1)..(1933): unsure at all n locations
aagcgcttaaagtgctattttttgcggcagaatttaaattcattttttaattttccatttactaatgctttttttttgtcttacttaattatttacattgggagaacaattttttaaagtgcactaaagggcgaaaatttcaatcaaaaaaaaacttaataagtcaattaaaattagcgctttagcccatttttgtgagcaacagcagtaaaaaaaaatgaaaaatgccaattcggtggctttgcccttctgtccgtccacttcggctgcttctgatggggccaactccgaagcgaaccgtacggacaaaaagcgacgaattcacacgcgaaatgtccgatcagtgatcagcagcatttactgcagacggaaaaatgcgacgatcggcagaccgtcgatcggctgttggttggcactgctgttgccgctctcctcgttggcacttgtgttcaacgatcagttggaccaacagagtccggtgttttacagtgccaagaaaaagctaaaggaacaggtggaaaattcaaaaaaaaaaaaccaaaattactggaaattcacaacttttcaggaaatcattcagaaggtcctccgagattatggtgagattatttattttcatataaatttataaaaaaaagttattttaaagattggcgggttcgtccccgaggcaaaaatgactcttggcaaggtgaggagaagcctaattagtgacgaattgattagacaattaacgataatcattccctgctctgctcagatacgggtggccctgtgattgtttctgtaaatgtctgttaccactgttgttttttgaccccatttatttatgtcgacagatttatctccgctcaatctccaaaattgatgacgtcaacatggaatgtaagcttttgggaagtgattgagacaaaacatcaaattcgttcacagaaaatggacatttgggcatcaaaaaattaaataaaaatgcagtgcattaattacaaaaagattttataactttgccaaaaaaacaaaaaccgactattttaatggagagtctcgggtacagggctggccatgattgaatttccaatcacggaaatccgtgagccgtgatcacgaggctttaaaaaaatccgtgatccgagatcatggcacccaaaaaaccccgtgatttccgtgatccgtgattaaaaaatttttttctaatgatttttttatttaaatttatttagaaaaacggaatttaatcgctggaaaaattcctaaaagatattttaaagaaaccaaaacacaatacgctttttttgctgcgtaccttttccaaaaaatgactaagtttacgattttgagcaaattttttgatgaaaattagagctttttgtagaaatctccaaggaaaaattttattttttaactaagtttattaagaaaatttttcttaaatttaaccaaaaatctatttacatagagaaaaaaatcagaaaaatttcctctaatttgtaggctaacttttgatgctaacaaaaaaatcttttggaccaacatgatcagattactccttcatggcgatctgaacaccccaaaagatacagaaagtggggaaaattttagaaaaattcatagggtgtttggaaaatttttctggaattttgattaagcctttcattataatttaagcaacggagagaaaaaatagagaattttagccgtttttgcgacaaaaatggggttattttttgctattttggggtcaaaatttcaaaaataccggaaaaatgggggcccgtcccggccgatggttgccgacaggcgccaccgggaaaaattttgaaattttgagtgaaattgntaacagattntgtccaaatatgtcaaatcattggttaattattgttctatagacgttgtaaaatagagaaaataattttcatgttaggaaatttct

SEQ ID NO: 7105 - DNA, 3094 bp, Heterodera glycines
taattaagaaattgcgcatcatcgaatggcaacacttcttccctgctcaagttttatccgatggtttgcttttcgtttttctaattcattctgtgaggcgtctaattgggggttttctccctaattatccgtcctaattacggattatttacccccccccccccccccgccttttcccgtcacttttctcttaaggctttggccacttcgtgcgcagtgcgcggctttctctacccgttaaatgttgtcaaagcacggctacaactccagaaacagaacaatgtctattctgggatgaggtgccgatgattctgattgtgagtcctctcacagaatcccactctttgtcagacatgcgtttgtcgacattgttcgaaacgagggaatggtggcactgttcagagtaagtcggagaggatggcacggcacatgcggggggggggggagggtgaatgaggttgggtcggtggttttgaaatgggtttagtggagtgtctgtccatcgtttgaattaattagccatttttgacccctaatagggcttttgggtaacaatgcctcaacttggcgtcagtttcatctactccaccatttacgagaaattccgaaatgttcttcatgttaatgccaatattcaatccgcgcccgttgtctctgctttggccggtgagaacaatcaaatgccattccaaatttgttggtattcaggcggattttctagcattttcactcaaataatattcgtccctaccgacatcataagttatcttcctttttcattttgcaaatccgtcccattcactacggtttccctccgttttagtcagcatatgatgatctacaataatcccgcaaaatttttgggctctgctaaaaatgttgccgttttggacttcgtgcgaacggatggaaagtcgggccgtttgacctttgggcttcgaattgtccgagcggtttatcacatcgatggtttgtaaagggaacaattggaaagaaaaaaacatttggaattcttggggatttgtttttcattaatttatgggaattccttcagtttttaattgagaagggaatttcgccaattgtaactcggaaaatacatacggtttttatcagtggatagagcatgaccaatttgtaatgtgaatttttaatttttttgcctaagaaacttccctgggagttaaaaagcctcgaaattgggttttttagatctgaaggcacatttcatttctgaatgactgccaaccagggctggaatgggggtccgtccgccggtggtgccgacaggcgccgccgggaaaaattttgaaattttgagtgaatttgttaacagattttgtccaaaatatgtcaaatcattggttaatttattggtctatggacgttttaaaaataaagaaaaataattttcaatgttaggaaatttcttattaattaaatttcaattaaaattatcaaaacaaaatataaaaattctcctatcccagtggtgaattgaacccaagggatagacaacgaaagacagaaggcttaaccaccagaccaaatatatatgcgtccttctttaacagaattgaatttatttatttaattttttctaaaaaatttcttttcacacaccaatttcctattttcgtctcagtaaaaattccctatataaaatgcatcacggatcaaaatcacggaaaatttgaaaaaatccgtgacccgtgatccgagatcacggcaccccaaaaaccccgtgattcccgtgatccgtgatcacggccagccctgctcgggtatcacaatgggtttaagcaggttgaattaagctattcaaaaattttaaaaattagacagcgcccaattcacatttcgcgaggaatggtgggaccctcggctggcctatggccgttttgcggacgatgaaactgaagtgccggcttttgttgtgttggccaccagcgaacaggctgatctgactcaacagatttgggcaagtgttgaaacttaatcggcagagatcggcgattgtactgacaaatcaaaatagacaatcaatgctttgatattgattgatcagtcgatttatgattgacgaaaattatcatttcaatcacttttagatgccggacactttcttccaaaatgaaaagtaacaagcaaaaaatctgttcattttgattgtttaaatggccatttagagaggcgagaaggcatttgattgataagccaaatgtgctgatcagaatccatccggacggacaaatcctttacagtgttcggtccgattttgttttggctttctgtcgtgtttaactgtgctgttttcagtctctctctcgtcctttcatgtcccatgtctttggagtactatccgttggaccgacaaacatgcttaatcgacttggccagctgtaagccaaaagaaataaattgaaatgtaaattttaaaaaaaaaactaaaattaccttttgggtaaaattttaatatttccaaaccctcggggaaggaattgtaaaagttaaatgtccaaccccaaatttgttgctttttcatcaatttgaagacgcctacacaacggatgacattaaatatgaatggaaaagggagaagccgattcagcagaaggagggcctccggcagagtttgccttccttcgaactgcaggatgtgctgaccgattactgcaccagcaaaacgaacacaggtaaagcggacattttcattaattgagcaatttggcctgctgagctaacgagagcggcggctacatcaaaggggtcggcattttcggatcgcatgagtatttagtgtaaacccttttgatcatcaagcggactgttcgagagccgcctttgattatttcgtttgtcgagatttggactgattgtgtcggcttctttcctaatttgccttttttgcgggtgtttctcccttcttttgcctaattatgcattttgtcctccccaattccctccctttgctgttcttttaaggcgaatactcttgtctccggacaatgctcattctccgtcgcgagttcagctattatttgttgcaagtttgtccaccattagcacttttattttacttaattataattta

SEQ ID NO: 7106 - DNA, 1370 bp, Heterodera glycines
  unsure (1)..(1370): unsure at all n locations
catacacaaaggtacaaatgnagcatacaattatttgcttaatttgatttttttatttattaattcataattatgtgcaattaaggctgtggacgtttggattggcgtttgtatggcatttgtaagatgttgatcattttgttgcactgaaagttcaattaattttaccaattttaatattttgcagatttttggcgcactgctcgaatttgcgctggtcaattacgcggctcgtaaagacattagcacaacgcaacagcgaatggttgtgcctaatgagataaataattgtcaaaaataaacatttaattatactttgtctattggcacacatttgccgtgtccctttttgaaaagccgcttaagatcaaactgcaccaccagtacagcacggtggtccaccaccaatccgtcgatgcttctgccgccgacgcgaaccaaagtcggccgccgcccggccacacgttccaatcgctgctccatcccaccccaaccaccggtgccaatttcggctctgtccgtcactcgtccacggcatcgcatcgcttcgtgccgcagagtccgtcctccttgccttcccggcgaccgctcggcatttgcttccgcctgtgctgtcggctgttcgttcgacgatacaaagagcgctccaaacgcattgacgtcgtctcgagactggtgagaaagcgcgggatggggccgggaaatgggaccaaattggacggagagaatggcacggagtcccgagagggggcagaagaaaggaagaattagatgcctatttaaaaacatttttttaggtatttcccatcggatatgcatgtttcaatggtatttgaaataaatatttgtaaaagataattgcaaaaattaatttaaattttaattttctaaattatatttttaaataatattatatagattatttgtcatttaattataaacattccctgcaaattcagtgctttattgggccgtctatttgatgtgaattggcaaatgcccgctgattaatccgccgattgtttttcatttttgccgttgttgactctcttctgctgatctcacctcacctctttttcatagcttcttctccattatttgcaatttataatttaattaaattttgtgtaaataaattttctttttgttttggcatttttatttgctttttctttttttttgccaatgctttttctttaaacgattacagtgacaaaaacttttttaaataaattaaattgtgaattttccaggagagtactcatgcgtgcgggttaagcttatgttgcgccgtgaatacaggtcaatattggggacacgattatttgcaaaaaaaattaaatgctaaaaataggaaatgaaactctaat

SEQ ID NO: 7107 - DNA, 2123 bp, Heterodera glycines
  unsure (1)..(2123): unsure at all n locations
ttttataccggtccaatcgtaaaatggcgtccacaatctttttgctaaacattgctggacaattgcaaattcgccgtgcaaatcgcgcggtattccacaaaaaaaattgccgaaattaaatattattaaaattgttttagaataatttgctgacatcagttttaattatcaatgaattatttatctcatttttgccacattttcttccctttatttgtgaaagggtaaatttaattaattatttaaaaatatatttttcttatactaacttaatgaatttaatctcggttattttaactttttgtaatataacaaaaacatataaaataaaactatgctttttttattatcatttgatattaataattgatattaaataattgcaaaactatatttgttatttttgtttaaattatttctttttttaatataattaagtcatgatttacatttattttaaataatttattttatattacctaattttttaatttaaaaataaaaaaatcttttatttcattttaaacgatatttcgcaggtttttggtgccggttcatcgcttggcacaggacctttgtccgagttgatgaactcgttcgaagttttgtttttttcttccatatattcgtacaagttttcggcacggaacaacacatcaatgcatggcacgggaggaacatttaataacaatgccgtacaacaatatcaacaacagtcatactgtatggagatgaattacagtaggcagaatatggaacgaagacgggctgatcgtgtggtaccaatggcaccgggacaacctcagccggcacaaatcctcatccgccaagttacgccagttgagaatgtaaacggcaggcctagaacatcgatggcacgcttttgagaagagtcgagaaattttttgaaataaattacgattcaacgaagtgtgtgatttgtcatttttttctgaatttgtcctaattcggagtgagtcatatcttaattttatttttatttcattgattgtaattatttgaagaagacaaaaacccttgattccaagttttgtctattaaattaatttaaaatctcattacatcattattttaagtgaaataatgaaattttaaaatatttcaaaaatattcattataaattatactcaaaaactcaaaagttagcagattttttaaacgaaatctattttttagttttacaaaattcttgattattgaaatctaatttttgctataatcaaaatttttaatccattagagatgagagattacaattgataaaatatctctttttttgcattggatattttttttgggaaagaaaaaatagcttggaaaatgcccatccaaaaggagccgtagtattggagccaaaatcgtttttgtgctcgggtcaacaaacaaattagggtcgatggcattgaagttgtctttttcgttagattcaagtatctgaaggatttctgagtcaggcagggtctggaaatctagattttttggcttataattggatcagaatttgcattcagtaaaaatccaatgaaaatggttaaattcggaaaatagattccaatgttattcactagattagagtgaaacttttttggtattctgaaccgcctaaaatcagtttgagatcatgatttccagtaattttcatgcaaataaacttaattctaattcgggagacaagaattgaattccatgatacgttattttcaagggatcattctctggatctatactaatctaaacaggatgttgccactttgtacgacttacccgtcctaaatcttgccaagtgcccggccgaccactgctactcactgcccgtccaatcaccgcggtatgagtgagcttttgctgaggattcattaatgtgccgtcaactggcacgcagtagaaaagccaatatcttatccttgccctcgccgtacggccccgaaacgtcgggtgcccanaattcgttgtttcttaccaaccttaacaattcgttcatgatgatttgaatgaagggatttcggattgtgccacttgagtctcgtgttttacaattttaaaatttaatagattaaaatgataacaaaattatagatataaatgagtaattttttctttaa

SEQ ID NO: 7108 - DNA, 1512 bp, Heterodera glycines
tggatcagaatttgcattcagtaaaaatccaatgaaaatggttaaattcggaaaatagattccaatgttattcactagattagagtgaaacttttttggtattctgaaccgcctaaaatcagtttgagatcatgatatccagtaattttcatgcaaataaacttaaatctaattcgggaaacaaaaatttaaatatatctctggactgaattccatgatacgttattttcaagggatcattctctggatctatactaatctaaacaggatgttgccactttgtacgacttacccgtcctaaatcttgccaagtgcccggccgaccactgctactcactgtccgtccaatcaccgcggtatgagtgagcttttgctgaggattcattaatgtgccgtcaactggcacgcagtagaaaagccaatatcttatccttgccctcgccgtacggccccgaaacgtcgggtgcccaaaattcgttgtttcttaccaaccttaacaaattcgttcatgatgatttgaatgaagggatttcggattgtgccaacttgagtctcgtgttttacaaattttaaaaatttaatagattaaaatgaataacaaaaattaatagatataaatgagtaattttttctttaatgccacaaaatttcaatttaacaatgtttaacatttttccatttcttttgtccaaatatattttaggttaaccaggaaggaggctaccaattttccaaaaatattgggttgtaacataaattctgtcatagttgtgaatttatttatttgcatatttttaaaaaatgtctccgttgctccgctggccagctctcatttgcattttgtaaagcaatgtctgcggtttcaaaaaatgacactttttaattttttcatctcatttttgattttttagaaatttttgaatagaaccctcaaaaatcaaaacccgatcacttttattgtacgggtcaaaactttgctttgatcagttggaaatttattaaaagcggtttttgtggccaaatcaagtccggagaatccaaatctggcctcagatttaatctctgaattttctctggcattgtactgctccatgtcgttaacaagaagttgaaaggtcttttcagaacaatgttgtacaaagtgggatgctgaatcttggcacttttgagcacccattttcagacaggacaatttaaaaaataacccgtcggtcttggtgactctttttcagcttgttagatagtcccaactttgctctacaaaatcataatttgttttgtacctttagccttttcttggccaagaaatcagtggttgaatttggccacttttttaagtagaccgatcagtttatttgagtctaactatcttgaatttaatcgatagatcatttttaaaatctcaaaaatgggagaagattgtgaagaataatggggcatattttgattaatattggcagtagttaatttgttacgatttttttaataaaatttttggtcgctatgacagaa

SEQ ID NO: 7109 - DNA, 2128 bp, Heterodera glycines
ttattagccattaaattaaaattctaacacgcgttccccttttttgtctatcgaattgtctaaatatgccttaatttgcccctaaggtgaaaattctgacaatttatttaaaaaatcaacagaaaatcaattagaaaaatttcctaccttcattgtgatgagacttgcctttgtgctgaattcagagatttttaaaatgaatttttatttttcaattggtaaaaaataatttcatttaaggaaaattggcttatatttgtcagatgaatcattaaattttggatttggcactttcggtaaaaaccaatcagaaaatatttttgaattaaatatttccgcgaatttttcaccattattgcttactttatgtttcttggacagcttctgttcaccatcattcatcatcacaaagttcgtggtatttggcggcattggcatttgctgttttcctatgccattcccattttcaaactttggcattagtgatgacaattctatgccatttttaacttcccaatagtgccgttttgggctttttggataattgacctttccaaaaatcggcatgcgtgccgacatttcgatgccactttgcaaatgccatggtgtcccgttttgtgccaatgcaagttctgtgtgccgttcccattttgatttatgccaaatgcgcccgttatcgaggccatcgccccaagtgtaccaaccacggcatttgacaatttacggatgtatccaacatttgtggcaccatcaccattttcatcagcagcttcattatctaggttatttgatgttaaaaactcaaaaaatatccaaattttctaaaaatttgacgaagccgaaatatcaaaattaaattaaattaaaatatattttaatttgaaaaaattcttttttttattaaatagtcagtggaaattctttttgatttttttttaaatttcaaaaaataaacaaaatttcttgattatattgcagataaatgtattaggtaatttgttggtgcacctccacaactcccaccagacaatgtggacataaaaatgaaggcagtagcaacattcgtgagaaaattcatttttacctcgtaacttaatttttaaattaaaaatattttttggtattttttaaagtgtgtttttgtcaaaaatgatgaaattgaatacaggaaaaaaggcattttaatgaaaatcattcaattggcgtttcaatagcggaagtcatccgtttttcttcctctcttcttggccaacacatgcggcacttacatttccggaaaaaatataaataataatatcaattaattcaatgtatttttttttattaatttatgcacctcaaaatatttatttttgtataattattaattttatttcttatcaatatttttcaagtggccaaatgccacagtctcgactccttaaaagtcccgggctttttgggtcttggttttagtcactagagtatcaggaaattttcgatatcgagcatcactaaatattaacccaagctcccttatccccgtcgggaaactcttattggtgagcggggtccgtcagaatgacaagtcggggatggttctatgtcgtttctaaaatccggcattttagcgaattttcgacaaaacatgccataactttgcttaagcgcaatcaaattttcccggcagcgccaatcggcaccgccggacgtgaaattctgttaataaaatgcatttaaattttcaaattttttcactgcggcgcctaccgacatcgccggcccgctgttcccaaaaaagcgtgccgcaaatttttattcattttttttaattggaataaatttttgcaaaattgctgattttggattctaaatgctgatattgaagatttgcactaagtagcactgtttttaattgttttaacaatttaaaacgtcgttttttcaaaaaaaatcgtaattttgggggcaaatcttagttttaacctcgtttgtccctattttgaaaatacatttttggagccctgcgaaataaacttgctggattcgtctggacattcactttatttaaaatcacccaccaaacaacaaaaaaggaggaaggtcggggaaaaccaaaaccaaaaaaaatatgaaagggcacggacaa

SEQ ID NO: 7110 - DNA, 1649 bp, Heterodera glycines
ccccgcccttctgtgacttatttttcttgcttaataaattaaatttaccacatccctagtcataataaatttaagtattttttaaaattttcccattagatttagtcaaatgtcccttgtcctccttcgtccatcatcatcattaccttcgcggttaacatttctgctgttctttttactggtcaatttatactacctagtcaaatctgcaagtaattctctcatcaatgacaagtgcatgacttgcaaatttttgtcgaaaacttttttagaagtaatacttcaaaatttaatctgctttaacacatattaatattttagggactggaaaaaactgagaaacttcattttggtggcggaaatactgactgggaagagcgaaatttgggcagatttaaaactaggtaattctgtcaatcattattacatttaggtaattaatttagtgaaactcgtttcgttgaaatattggactacgtttgcaaaagggattcatctgctgagattggatttagtggaattaaggatttgcaatttaaggtaatggaacgaaatttgtggcaaaaattccattcaaaatattcttttaagtgtcattctctgctggaagcccatgaagaactgcttggacaatggttttttgagcatcaagagaacggaccaactctcgggaaatatctttgcattgagaatcttaaactttgttgtgacgaaggctattttggctcggattgttctccatgtcctggaatgaaactctcgggcaaaccttgtttcgggaatggacaatgccaagtgcttttttccataaaaataattataaaaaagactaaaaattaagggcaacggaacacggaatggcaatgggacgtgttcttgccatgcgggttatgtcggcaaaatgtgcagcaattgcgattcgtcttattttgcagtttcgcaaaattcgtcttacatcgaatgcgaaggtcgaaaattcgcttgacatttttattcgttttctttaattgaatgttaaattaatatatttatctaattttttcgtaccctttcagaatgtttcgacggatgttctagtggttgtggcggtccgagcccaaaagattgtcggtcttgccgaattgggtataaaatggatcccgaaatcggctgtaatggttggtaccgcacggaaacaatgccagttgatattagccttgaaaaatttttggtggttatttttccaattgtgtaattattactgcagtaataatttgcacggtttcattatttaaggggtgggtaatccactattttaacattagacaccaactcggaccctttttattatttctgtttatttaaatgtccatctcttacattatttatccgctaattttgaatttctttccctcagatatcgacgaatgtgcagaggaagggaaatgtgacaagtccaatgaaaaatgtgtcaacactcctgggtaacttttaaaaatcgcatttgtgactgacaatttactcgttccctttgagttccttcgagtgccaatgtgtcgatgggtttaaacgattggactccggcgaatgttccatcgatgtcgaaggtgagcaagcggttgattctctttgtgagtaacgatggacgggctgtaggcgaactgtttaag

SEQ ID NO: 7111 - DNA, 1985 bp, Heterodera glycines
ctttgagtgggcaaagtgattggacggcgacaaatgttttgccttttgccaggccgagaaaaagctgaagtcggtcaaacagtcggagatgaaccgcgtcttctccgaggaagtgattcgctttgcgcaccaaatcagcaaaaaccattcggtggccagttcagtctattggcagcagggcgacccgtcgcggccgtacccaacggaggcaaatttcgccgtgagcaatttgctgttgagcagaacacaaccggtaaaaagcgaacactgcgtccaagagtgatccctttgctcttattttcagaatgttcccctgtcatttgcagcccaagcgactcccggcggaatgctcaaatcggtcttcaatgttcccggaatgccgcaaaaagcgttttcgccaagtcctcgctcggcaatgtttgtctccaatttgggcgcttcttccgcttcaccgagggggcgcccttccggaagcggtaaaacgggcgaagtgtgtcagtttaaatttcacctaaataggcgcgcggatggcttccccagcgactcgtcctaagattctccagcggagttcgtctcagcaaagcccccgctttgctcagatgggctttcttcccggccaacaacagccgtcgttgatccaacagagtccgagcagttctccgatggttcaaccgcctcagtccgtctccaatttcgtgtctccttccggacagatgatggtcaacctgccggccaatctcaaagcattttcccaggcgccatcgctcgacgtacaaaaaatagagcaaatgtcatccgaatcaagctcaagttcgagcagtggggacgaagcgagtccaagcggacaatgaactgactgggaacggaaacggaggggggaatgaaggatagaaccgccatttttactttgttttgttcctttgtcaatctttttctgtttgttcaatttccaatgagtgtaaaaaattgaaaaattttgctataactaatttcgcaagcacattatttaattcgggcctaaaacatgacttgcttcatctttttcccgattgtgtgggaattcctttgtccgcttctccacacctgctgattcccaaacattagtttcaaataatccttacaattagcactaaataatgaataacatacgtaaaaaaatatttattaattttaaatttaaaaaatgcaaaattaattgtttgggtcgtacttttgtcagatgatcagtgtgaaaatgattgtccatccgtaagtgaaagtgaaaagacaaaacaacaaattgttcagtgtcagcgcaatgtccgcgtaatttccctgcggcaaattttcctccgtcaattctttggaacccttcggcaatggcatcagtttgtcgagaatggaggccaaggcgtagacggagcggggcaacggaatgttcgaattcgtttgtgagaaacggcggagcaaaagagtggctacgaaaagggcgccggtggacagcaaattgaaagcggcaaatttcactggccaaatgggcacgtcagtggagaagggcacggctaattgctattaatcaatcgcttacggatggccggtgccgtgcccgtgtaggatggcatccgcgtgttcattagctgcatggccagcagctgggagaacagactgaaagcgagcagcagcgcctggggcagtgccaactgaaagagcaccgcgcagagtgtcagtgccgcggtgacgagggcgggcgcgagcagttcggccagccaatagaccgcgttccgttggagctgcacgcacagctcgcagttggtggattggatgtcgaaagggttctgccgccaatcgcccagcagttggacgacgtatttgctgtcctttttggggagggattcattcgttcgttcatcggcactttcgctgtttggcgtgccacctgaatctccatctgctcgatgtcccatcccgacacgtgtgcttctgcgatggactcgtgccgtttgttc

SEQ ID NO: 7112 - DNA, 3539 bp, Heterodera glycines
ggtagggaacaacgaattggagtctgaaagagtttggcatggcatcgtcggtcgcccatttgtccgctttcttctgtgctcacctgtccacatgtacacttggcccgtgtaatttgctgccaaaactttgccgtttatttgtccgggcgttgtacttgcccttaaattgtgccactttaaacacgtgtaatttttgtgccgaaaactgacgaattgatttgcatcaattgaggcgtccaaatttggacccaatagaagttcagccaggaaacgccccaatgttcgcggtcccaactgactttcgagtcgttccaggacagcaccaaccgcccaaagagacgcgccaattcgcgcgtttcatcctttttcaaatatttggggaatttgttgactgatcaaaataagttatcagtctttacgatttccatgtgtgatatgcgtacggactcaatgcgtacagttcgagtcgcattggtatttgtcgtgttgtcataacttttggccaattgcgtgcgcagttgccaggcacggtcgcccccctggcacgattggcaagaacggcgacagttggacatcatcctgatttgttggttggcaagtaacaaatgctaattgtacgattattttcatggtcagtcgtttttagagtaaattgggtaaaaattgaatttgtcaattttgccacaccaaatcgcattggtttggcattcgccctgactcgcccaaaggctgcacttcgggtccgaatccacgcaattgctttgcactgcgggggaagcggcttcttgcggcggtttcggcggcggcgcttcgcctaagcaaaagggcacaaacgaaaaatggcaatttgccaagaggatatagccattaggcttaagaaaaattgccaaccttttgcaatggaatttgctaattcgaagagcaaagccaaaacgaaactccgacggcttaacattggactgacgtgacaattggaggcgccaaaagaatgaaaggctctccttaataagacatgtgttgggcttgcttttcctgttctcacgattaatgataatctcgtcagtcggctttttttataaattaatctcgaccgatccaccgcttaaccgattggcgaaaagctgtccgaaatcgcccttctgacaccccgccacacttattacccaaaaaaggactctttcttctccaggggggggggcgggggagagagtttgttggtggatttgggtcggaagcattcaggaagggcaagggtcggttttggactggatctgctgaaggattgacggggaatgagcgtgaccgcctcaggggcgatgttgggaaaataattgcatattttgtggaaagagagagagaaacgacgaaaggggggagggaagagatttatttgtgatgggatggatcaaaaaagaatggaaagcgaagaaaacgaaagtttggggaaacgcacggcgaacgaagcgaaccgaacccatccaatcaccgaccatcgaatcaaagtaattgttcgaataacgaaaaaaaaaaactaaaaaattctaattgggaagggggggaggacattgggacaatgaaattggaaaggagaaaaaaccattttcaaaactttttttgttgctttcgttgtagtcatattggagcattttgcaatttattaggaccattctcggcactgactaaaattctaccatccatgtacggtatttgatattttctgcttttttaaattttcttcatttggctttatgtctcctttcttgggtttttcatttgttttgcgtttcaattttgttccagttgctttcactactacagaattgtctaactatggtctttcatttttaattccaatttctttcctttagttgaatattagcattgtcattaattcttaaaatgaacaaaactgacgatcaattagctgaatgtcgcgaaatcttttgctacttcgattccaaaggcgacgagaaaatcaatgtgaaacaggtcgagaaggggcagtgggaaagtttaatgctatcaaatggattgattgttttttccgaatggtcacttttaataatagacttcctctgatgtattttatttaattttaggttctttttaactttaattaacattaattaggcgaaatatctcaatacatttactgttttttgtaatttggtttaggttggcgatgttttgcgggcactcggccaaagtccgacggagtccgaagtgcgaaaatgttgtgagcactggaccgaaccaggtgaaactgcgaggttcagcattttcggggcaaaatgcgccaatcctgaatgggttccctaattttaattattttaaatttggggctcaaacccattttaaggggtttctagggtgttgattacccgtcttaactagggttgccaattctggacgccgggcccgaattcgaacaaaacaatgggattccaaggaatttttctggggtaaactattgcgcccaaaataaaatagttaaattgggctttccttttttcagatacgcgcatttcatttgaggaatttgtgccaattttccaaacggttagcaaatcgcgcgctcagtacacaaaggaccaatttgtggagggattgtctcatttcgaccgcgagggcaatggcacaattgccgttgcggaactcaaacatttgctgaccaatttgggtgagtcggatgggagccgaatgtccaacagttcgaactttaattaccgttgaaaactcaaaaacattttaaagggttttctcttttacgtaacgtgtgaaatctttgtttaacatttccgagagcattaaaataaccattttttaaggtgaacgtctctccgaggaagaggtggagcaactgctcgccggccacgacgtggccaatggttttgtcagcatcgattcgttcattgaaacagtgcttcggtaaatgcttcaaaggccgtctccgaaaagcgttgtcgtggaaaagaaaacaatgaatgaatgggcaattgcaaatgccaaaaatgagagtaaatttcagaggaaaatctattcaaaaaaattttacagacattggaattgcccttccattttttccgttttttgaatttaactcaatttggcaaattttaactattttatgtgtctgggcatatttacaaatttcaatggatcaaatttggtggcaaatgttttgatctttacggaacgtatctttttgaatttttatctgtcatttttctgtcccgaaaagtggcggtttcggattttcttattgcaaaatcaaattacaaacttttaattgaccacgacaacctccatcatttgtcgataaaatgtcacttccccccaaatctttcgatttatttatatttttttcgaattaattataatttttgtcgagttgttctttgccgattctcctcctaattatcacttcaacagttaattgttttctctttttttcttcgttttcggttttcctttgacccctccggacaggggagaaatgcggcggttccgtcgccccccagccaaaagagcgacctgca

SEQ ID NO: 7113 - DNA, 864 bp, Heterodera glycines
  unsure (1)..(864): unsure at all n locations
ttcttctaattaatctggcattaccatcttctgagaatgncttaataaatttacctatttgaatttcgctcgtaaagaggatttagtcttttgtttttcaaagaattaaatcataaattttaaaaattcgggtccttttctgctggcgatgtccgtcaccgttcgttgataaggccattttgttttttgcgtggctttaacatttcgtccatccgacaaactcttcgttgtgttctgtcgtcccattggcattttgtgcccaattcggtgtttccttttttgattgccatggctttttgcctttggccaattgttcgctgtcctccgtttcttttccttttctccttttcccctccaattccgccttttgccttcggatttcttctcttaatctctccaaattatcgtatccgccgccttccgaataaattcgcatttttggctttgacttttgtccgtttgacattgtcgaataaattgtcggaattggcgactgttccctcaaataatcggctgcttcgtaaatttgttcgaacggcgtttgtgcggaattctgaaaaggagaaacggtggttaattaataattgtccttgtgaccctcccctcgcttctttctttctctctccgcatcatctctcctcctttgtctctttgtttcctcctctttctctctcccctctctatccatcactctctccctcccttttcttctctctctctctctctctctctctcttaccctctttcttttccctctatcttggttcatcactctatccctccctctctatttcctcaattctctcatcttctttcacctcaaaagattccctctcctctctcttccccactctctctttttgt

SEQ ID NO: 7114 - DNA, 1978 bp, Heterodera glycines
tatgacggaggaggaaaggcgcaattacttacgaatgaacccaaaaatcatcaccaaccaacagaacaagggcaaatacaaattcctgcagaagtattaccatcgtggtgcctattttctggacaaagaggacgatgtgctgaggcgtaactttgccgaggcaacgggcgaagacgtttttgacaagtcggtgttgccgaaagtgatgcaggtgaggcgagaaggaagagggagtggagggaaatggacgagggatagactaaaaagatgagaaagagagagaggcagtggaagaaaagcggacaaaaaaatgagaaaaagagagagagagggggggggggggtgagagagtggcaagagaaaaaggggaactccgttcagttagaaaatcattgtttgggtgcctttggccctgtccacctctgatccattcgatttttaggtgaaaaatttcggcaaagcgagtcgctccaaatggacccatttgacggcggaggacacaacggaccaccagggagtgtgggcaacgccgaccccactgagtgctaaatttgtggcaaaacacgcggcggggatgaaaaatgtattcgaaaagccatcagcaaaaaaacgaaagattggtggggattgaatgactctgtgcttaattaaatgataaatttggcatttaaacggatggataaaatttgaaaaaaaagtttttttaatcgacaaaatcttttacatgaagctgtaaaaataataagtgcaatttgcgcttgacttcgtttgttcgtttgcttgtcttttgaaaagttcggtcattattttgtttttaaattaaaaacatttttgaatacaaagacgaactccggttaattcaactgtttcgtgcaaattataaaatttcagtgatcttatgaaaagatggccattgattgggccgattggtcagcccggggctgcgacgaggggacccattttgggtgtccccgagcccaacagaccccagaccagggcattgtcaagtgactattcgaaaaatttagatagtttccctctctattggaatagtttaatgagtgtaaattaaattcaacgaaatcccctgctgatttaactgattatgagtcactttccctcccccctccccctccctttccatttgtctcatccgtcgtcgattttttggaccattttactgacaatccttcaaatatttgtgactgttaataaaataatccaaaatttactacaataaaataacggataataaaatgcgttcttttcgccgtttctttgaatttctcatcgttttaaacttttggtcgcacttttcgtatgcgaaagaggtaataaatgcagacaatcagttaacaatggacccgaaattgtacttcgattcggacgatccccaatggctgagttggatcggacaattctcaaaagagatgagtcggtgttcgttgaacacggacgagctgaattctgtgcgttttgtgccgtcattgtcggcttaaaaccattttgaaattgtgccgaaatgttcaggtccgagtttgtaccagggaacagttttacggtccggcgggggtcgaggccatgaaacgcagcggcgaactgtacgcagagcacagaaacggtgcgaaacagtacaaacaaattaaaattgcattccacttttattactgtaattaattcatttaatatacacaaattccctaaaaatattttgctattcttaacaaaaaaaccctaattaatttgtcggacatcgattgtggccgcgtgttggccaatgacagcgcttacattgaggagcgcacacagtccgagccgttgacctttgccaacgccggcaataccttggcggtcgactgcgccaccatccgttcccgttactttaactttggcaacgcggagcaaaagtacaaaaacgagaaagggaagaaaacggactttccgttggcattcatccgattagtgtacaaggtgaacg

SEQ ID NO: 7115 - DNA, 4522 bp, Heterodera glycines
agttggatcggacaattctcaaaagagatgagtcggtctttgttgaacacggacgagctgaattctgtgcgttttgtgccgtcattgtcggcttaaaaccattttgaaattgtgccgaaatgttcaggtccgagtttgtaccagggaacagttttacggcccggcgggggtcgaagcgatgaaacgcagcggcgaattgtacgcagagcacagaaacggtgcgaaacagtcaaattacaaattaaaattgaatttcacttttattactgtaattaattcatttaatatacacaaattccctaaaaatattttgctattcttaacaaaaaaccctaattaattgaccttttgtggctaaatttgcaagaattacaattagttaggttttgtccgtctttttgttacattttcggcctttgccccccccccccttaagacaatgtcctcgtgttggtcagcggtgcgtcgtctgtccctcggggttcaaccaaagtgtaattaacatgcaattggtacaattgcacctgctgaaggttccatgctcacctcgtgctaccaagagtgggaaagtgtgaggtcagtgagagaaggaatgccaacgacggatttaaaacattcgcaattgcccaacaactaaattcccatagttctaagcattttcactctctctttttacttaatttttaaagtgccatcgaattcggacgcccattggctccaccacgccaattccttttatcatcggcgccgttttctcggagcgtcgctgccccgggctgttcagcaaggatgcgcttcgcatggagttcttctcccattatcttttgctcgaaaatgtccaatgcgtttcgtttaaccaaaaacggtacggtaaaaactgtgatactgtacaaaagtacggtgctttacggaggactacgaaaaccgcgcgttggaatatatttttgaaacgccgttggatttgagcaaaacggaccgaaatttgcgaatgacgcaaatttggggagtggtgattagtcggaagatttgatggcattaaatggtttttttcgtctattagccccccgatcgtggccaatccaagtggctcaaactgtcggacatcgattgtggccgcgtgttggccaatgacagcgcttacattgaggagcgcactcagtccgagccgctgacctttgccaacgccggcaataccttggcggtcgactgcgccaccatccgttcccgttactttaactttggcaacgcggagcaaaagtacaaaaacgagaaagggaagaaaacggactttccgttggcattcatccgattagtgtacaaggtgaacgaacggacagcacagacatcacggcattggcatttaccccctcccctccctcttagtaaaacattattggatcggcatttggacttaagaaattagaatacttttcttatgaataacagattgctgattggtcagctttgcctagtgttttctttgacaaggaattggcccgtcagattcgtgatcagcgcactttttagcccagaaaaaatgctttttgaaattttattatctttttccgtcgggaccacaattccacaccattgccgcggcatagcattcagtcataatttgttgctaaacaaaatctgtgccgccaaagaaagttttgtcaattggacaacacacaacaaaatatattcatatgcatcattttataactttttgtgtaaagaatctttggatggcaagacaaaagaatggggcaaaaaagaaagaaagcaaaggacgggcgaacgaattaaaggcatttgcaattagtacacaattcagatggacacgccactttgttcgttgctctccagtcggctgaagttcatatgggcgtaaatcatcacgccaatgtcccggtgttggttttccaccgcaatggaaagtgccatctgattatcctaaaatagtttttggacttgctttcgcttagtccattccgaatgccattcccttccccattttcctcccccggcacttacacagtccgttaatgacgcgtcaacgtttggccgcttcatcaaaatcttctcaatctcccgctgtccatgttctgcggcgcacattaacgctgttgaaccatcgacgtcctgggaattaagtgtaaatgacggcaaaatttggacagtgactgatcagtgatcgatccgtcagtgcattgattcatctgtcagcacctgaatgttcgtgtcggcgccgcagctgacaatgagcagaagagaagtggcctccactcggccatgcgaagcggcgagcatcaaagcagtttgggagtgctgaacagaggggaggggatgatggttaggatatcgatagaaaaaagggggataatggtaattggggatgaaatggctaaaaacagggataggtgagcggaaatgatggcacaaaggggtgggccgggcactcgctcgccttcatcgccttggcattgcccatctgaaacagtcgttgcacaatggcacattccgtttcgttccgcagctcacacaacgcgccgagcaccaacgcactgtaccctgaacagaatgagaattggtggtaaagaacacccaaatggcacgtgcccgctttgttcatttcgtctactcggcaaactttggagtccaaaaggacggaaacgacgtcgaagttttcgttggacacggcgtagtgcagcgcggtgttcccgttctggtccgtcatgttcaccacctgaacagcagcagaacgattcgaacttttccccattcagtgaatgtttggcgtgccttttccatcaatcggttcgaaaatgcctccaatgcgtcgatgaattgctccacgatgtaggcattcgcattttcctttatcgtcagcttcatccactcgtgttgacagtgcttcaatgcaataccgtaataattgtccccttcctttgtatttttcccaaagtttcactttgtacgcccattccatctccgcctgctcctcttttgtgttggcattggcaccgcccgccaaatgggtgtcgattgtctccagcgcatcgcgtaatggggcggacacttcgaactcggccctctcttcgtcactcatttcgtaagtcctaacttttcgccccccgccggccgtcgttggctcagcctcgcgcaatgtgtcgcttttcttaacggttttccgattttcagggtgtatttaccagtggattacgtgtctttcggtgatgtattccaagtcgttggcctttctcttctccgcccggtaggaccgataagaacaagcgtctctttggaacggttgcgcgaagcgttgcggctcctaaaaggcttttaaagggtcaaaaaatgatgccaaatcctccattggaggacgaatatttgtgggtgatagtttccgtaacaaaatgtgatggtccaacttctcaccgtaaacagttttcgcagtgcttccgtgcgcgaggcagcgaatgccgaattcacttcattcaaatgcgaagagacggaagagtctggccacaagtcggtcccttctgtgcaaatcaccgtttgtgcgttcgtttcgacggaaatcctatgacaattggctttgtttttcgtctgcttttccccctttttggcacctgtccaattccatgggttcgcccattttctcctctccgtcttcctccccatcagcaaacatgtcaaagagttgttggcattgttgaggactgtccgactgaaaatggaaccttcttatttattcgtatttggcattttgccatttctcaccgtctgtttttcctccatttttttgtcctcctcaattttctgttcgactttctcttctctttgtcctacttccctttccgttttggcctcttttccgtactcttccttctccaactcttcttccaattcctcaaaagaacatgaatcttccccgcttttttgctgctgagtgcaaaaaaagcaattagcgaaaaaacattataatagaaatgaaaacaatcaaagattaagaaaataaactaattgccgagtttccactcatatcagatcgaaactgaaaagtaaaagcgtgtcgcaaaatagcgttattctcactttgtttttaatttttcccaacgggtccacttttccactagagaagatttgaaagaaaacattattaaaccttatgttgcaatttaattttttttttcgccccagaaacctcattgcgtggcatgatgagccggcggtcctccttcgtcgtcactgtcagagtcaggcacccatcgatgtggggatacgctacggtgggtttgttggcgagcttgttgctaaaagcaagtgtttgtttcaaagttgtttcttttcttattaatcccgttacctgaattcgcaattcgttaaattcagcctccaataattccaactgcggacgaagatgcgccgcacccaaacggatctgatttccccatcgaacgattcgcacggcgatttggaccattcttggcgtgaatataacatttcccatatatttatgtggggaaaaatttgc

SEQ ID NO: 7116 - DNA, 1076 bp, Heterodera glycines
gagattttgaaaattgattttcaaaatatttttagtagagatcgacattttgaaaaaagcctggacctggatttcctgaataaaaatccaggtccaggaaaaatccaggttgccgaaaaatggcctggacctggatccaggaaaaatccatgcctggatccaggtccgtatgcaaagggtgattggtttttatgggtatttttgtttaaaaaatcctattaatcgcaaaaaaaagacaaattaaaaaagacacagtcaacctgtatcgaacttgtgacctaattgtaaggtaatgtaaatgttgatgcactaaccacaacaccaaaacacagcatggacggtaaaaaagaaaaaaaagcgacaataaatctttttatggataattacagaaaaaaattggcgttctgtcacaattaatttttatctttacttatctcaattttatgtactatctcttcattcttaataatgtaaaaaacaacatttatttcgccacatataactttttttctactcatacaatttacaccaaattttgcatatcgatagagaaaaacattctgcatcaattaataggtcaacaagttaatattaaaataggtcgaattagaaagttatggagtgattaaaatttttgcatttcttttcctctcgtgttggcgtactattttcacatctctaacacacaaaaaacatcaaattcgtaaatgctaacaattttggttataaggatacaaaatcactttggaaatttagaattaatagagaaattaatagttttagcatttttggtgaaaacagcagtttaggacttgagttataacgtgataaaaatttgaaagtatcacaacttttttctgagatgtcaaattgcttagcattcacttagaaaaagattctccttttcaaaatctttttttagataccaaatttgttcatttttgttgggaatgaagcgtgttatggctgatcaaaataaaaaatacaaaaaaggcatttaccagtgtaagtgcatatactttgtttttgcgtgtgttggcgttttgttttacgccaattattttttggcaattttt

SEQ ID NO: 7117 - DNA, 2962 bp, Heterodera glycines
  unsure (1)..(2962): unsure at all n locations
ctattttaggggttggggtcaattccctaccgccaattccctaccgccaattccctaccgccaattccctaccagccaattccctaccggccgattccctaccggccgattccctaccgccaattccctactaaggcatttgggccatttccataccaaaaaattttttcgaaatttttcgtcaaaattttaaaaatagaaagggaattttcaacaatttgatgtttctcatgaattataagacaataaattttttgtttaagttatagattagaaaatgcaggcaaccctaacagaaaagagccgtacaaagcttcaacacaacggtcattcatacatttttcacaagccgagtgctgacggtgaagttcgcttttggtcatgtgaacgccatcacgcaaaagacatccgttgcaaagggcgccttcacactaacctcaacaacaacgttttgcgtgaagttggaaaccaccagtgtgaaccaagtgcagctcgaatggaagcgcaacgagtgatcactaaaatcaaacgccgggcggaacaaacaatggaaccaccagcgacaattcgctcattggcactgcagaatgtggccacgccagtccttgcgcaactccctacaaagaatgcgatcaaaaaagttttttctgtttttttttgttatgagattttgtgcttaggtaatcaagcgtgtacgtcatgaaataaacgcaccaccgccaattccaaacacgctcacagacttaatcatcccagacgcatacaaaacgtatgggcgcaccgaagaacaaaccgaacaatttttgttgtccgattcgggagtttaccaagaaaacgggagggaacagcggtagtaccatgcgcactttttaattatttaaaggcaatttagaatactgatatttggacgtgagtcgaatggtcggtgggcgcatgagatgaaagagtgcttcgccgacggcaccttcagcatcacaccgatgcctttccaacaagtgtacgcaattttggcgcggtacgaaataaacacttatcaattttgaacttattatttaagtcggaatcgctgggtcatcccagtgtgctactgcatgctgtcgaacaaaacgcatactacatacgagcgtatgtttcgtatgctcgttgctgtgtggccagacttcaacccggacagcgtgtcgatggacttcgagacagcggcgatcacggcgttgaatttagtcttcccattcactgaagtgcgcggatgtctgttccacctcgtccaaaattttcacaaaaaaatttcagaatttgggcttaaacaggttgaattcatgatcatggttgacagaataatttttttagcgttatcaaagtgacccaacattcgccgaaatggcacgatgtgtcacgtcgatcgcgtttctccccattggagatttgacccccggaatcattgctctggacatggctctccctgacgaacttactcccgtccttgactggtaaattgacaatctcacaaattgtttactatttattgttctttaattgtttaataggttcgtcatgaactacacgggtcgtattaagcatgatggaagccgaacacgcccgcgatttgacccaaacatttggagtgtttacactcgaacactgcaaggcgatgaccggacgaataaccattcagaagccgcgaacagacgcctacaatgcgcatttgcctgttcacatccatcgatttggcatttcattgaccttctgcgaaaggatcaaaagttatcagatgatgacttcgcgaagtgttcaactggacaagaaccaccgcaaaaggcaaagaaatatcgtgaagcagaccgccgaattctcacgatggttcaaaattatttgccacttaacaacgcagacaccaacattttcccaattcatcaccctttcaatcatcattttattattacatttttgatcggaatttctcgaaattatgaaatgagaccgtgatttgaaacaaataaattttttaaaattttcttggatttttaatttcactgtctctttaaacttttggtatggaaatggcccaaatgcattggtagggaattggcggtagggaatcggccggtagggaatcggccggtagggaattggctggtagggaattggcggtagggaattggcggtagggaattggcggtagggaattgggtcgatcccgattctgatgggtgtcgtttttattgaatttttttaataaaagagggcataacgccaaacatgttttataaaatttcattaggcttttagggttctaaaaaaacttagaaaaaaggctccataactcgaaaaatagcttaataaccaccaaaaaacacatttttcgagcgtttccggtcactgggagctcatttgccaggaaaaaataggcaaaaacttattaaaaatataagccttagttatgtatgacgtttgtcaaaaaccatcaaaaaaccattaaaaatttcattgctcaaaagcaacttttttttcatcagcctgcaaaatttctaaaagtttcattaactaactttatttatattttttctcctaaaattctatttaataccatatttagttattcgaagtttttactcaattttacgaattatagaattttcagaaatgcctgtttttcattttttatgcgctattttgtcattttttgaaaaaaatgaaaacaattttaaggaattttagatcattggtcattattatttgaagatggtttaccaccaaaaaaggattttccgcaacacgaaaaaaggaaaatcaaaattcaatgaccggaaaaaacattgtacaaactctaccaacaaaaattgccgatggtaagttgtttttctgttcgtatgtgtacttggctgacatggcaaaacaaaaatgattcaaatcaaataanaaaaaaatttttttttggcattntgattccctttttcttgccgct

SEQ ID NO: 7118 - DNA, 1537 bp, Heterodera glycines
tgatgaatattttttacttacttggtccatttcgtaaattcccgctctgctgtaccattttttgtccattttccgtcaaacatgacgccaccaaatatctattcaatttctcttttcgtcattgcactgacttccggaaattgcatggggccccagataacatatatgtagtctcgagaagaagcggataaagtcatcaagcgatatcctaacaaatttttccatttattttttgttgaatcaaattcagctgataaaagatgtatttaccatatttatggcatttgaaaattttgcaaaaagttttttgaatatgcagaaataccaataaaaaataaattttcgaaatacatcccaaaaatttaacagatcattttttgaaaatttgattcatttgaaattagggttcgagccccgcccccgtcacacccgccgggggcgggacaggttttttggcctcacccccgcccccgcccccgtgactcatttgtcagacccccgcaatcccggcgcccccgcgaccgtcgcccccgcgggggcgcgggggtgaaaatacactcctaagaatggtatattcgtgggataaatggcaaaaaattgatacaattttgaatattttttttaatatcttgacaaatttttataaaatagtgattttgcttttgttttttaattttttttttgttaagtggttagtgcttcttcttcactaactgtacttttttgacgttttcttttgaatttatttttatgattaatagggtgcgcatttctaagtttttccttatgttttctgcggcattaactcgacgagaaatgcatgaaaaacacattttttgttcgaaaattttgcgttttaaagtccttagcaatttgaagaattatatccctaaatttgtaactttttcgaccttattttcgcccttatttcccgttttttttcgcccttatttacggcattattttggactttttcgccattaaaaatccgcaccctaataattaatatacaaaaacacgcataaaaaattgaccatgcttggcataatttgtaaacaaattgaactcaatttttcaaaaaaaaaatttctggtggcgccgttagtccgccgctggatgaaaatttcgttgaaattaaaaaattcaattttccttgagtaaataaggaaatataatttattttaaaggtacacaataaaaaaccgaagaaaaatcaaaaattttcggaaatattatttttttgtgaatatctcttagaaaatagcgcttaaatttcaaaattcgcccgacagccatatcgacaccgccgccccccccccccaaaaaaaaacatttttttcttaaaaaattagccacaaaatccctaaatttggtcattcataagacaaaaactgtgcaatttattccaaaggaattgaatcgaggcgatacaccgactaaagaaatgtggagccaaaaaaatcttcacaaaaattaattttttgtgtgattttttggagcaatttaaaatcaaaacccccgcccccgtccctgggga

SEQ ID NO: 7119 - DNA, 1255 bp, Heterodera glycines
agtttttaaatgaaaaaaactaaatatttacattttgctcatttcctcaccaaaattgttaaaatatttttgaccccaaatttttatttttgaccttcaatgttcttatttcagcaaattctcgatggcaaccctgttttaaccaattttttctttctgcatatcgttcgcaatttatttctttcattgaaaaggtgcagtttttcaacaaatattaacaatatttcgagtttttttttcgtgaaattttttaattttaagaatttatagtaaactgaaaatactaaccgcaacgaggcctgctcgcgtgagatcgctattctcgggccccgtcgcgcaaccaaatatacagttctcacagaaatttttcacgccactattccgagggcgctttaccaatatcttttaaaatgttaggattattaaaaagaattcaatttatcatttttctttatgccgagatttttcctaaattccgcaatcaatgagcctttcccaaatcgaatgaaacaaaattaaattgacaaactcagtctaatttaatattttttggtgccactcgatagcttttaggggcagtcgatgccgccgggaaaattaaaatttaattcatttatgaaaggggctcccatgactagggctgggattcttaggtttttacttaatttttaagcggctttaactcgacgataatgcacgaaaaacactattttagctcagaaattcttcgttttaacgccccctatccgaccctaggaatccctatttggatgttcgcccctaaaaatccctattttaaatgttcgcccctaaaataagtttttacccctattttggcgtttcgcccctattttcgcccttatttcgcgattttttaaatttgcaaacttaaaccggtcaaattcggaccaatttggtatcatttgaaggctcttgacgagctaagtcgaaaaaaacaaggtataaattcgaaccgggtttcatcatctaagcactgggacaactgagtcccagtaaaaatcgacaattcagtaccaagaaataacaaattaattttacttcttttaatgccaaaattttattttctagcattggtggtgggtattgcacgaaaaaccagcgcacactcgactagagaccggcgcgggacgggatcccgctcgggattttgcgggatcccagtccgcaatcctgcattttttggcaaatgcgggatttgtgggattaatcccgcgggatcccgtcccgcaaagaa

SEQ ID NO: 7120 - DNA, 2644 bp, Heterodera glycines
  unsure (1)..(2644): unsure at all n locations
ttcatgtattttttcttttttgtaattttgaaatttaattaaagttttttcaaatttcaaaatcccgcaatcccgcgcgggatcccgcagatcccgcagatataaatgcgggatttggggattaatcccgcgggatcccgtcccgcaaaaaattttggattccaatccttttgctttttcctttttttggttttaattattattttcttccgtcattatttggtactggaatgtcgatttcgttgggttgggactcagttgtcccagtgcttagatggcaccggttcgaatttataccttgtttcttagactgatctcgtcaacagctttcgaatgatatcaaatttgtctgaatttgaccgttttaaaaggttaggagacccctttttccctcaattttttgagttttgtaccggttcaaaaataagtttaaactcatttcctcaacgggagaactattttttcgtgcatagctcttcgagacggaacgattggtatatcatttgtggcattttttctggtgggttgactaaagaacacccaaaatgtgcactcaacccttttggtaccagagctaggccaagctcggaatacaatcccaaattttttttattgattggttcagcttaagcggtttatcattttatttttcattagtacccttttgcggaatttaggaaaaatggcttatattttaaattttttttattaccaattccatgtcccttcgtttggcgacatcgagactcttcaagtcccattcttccgtaatccctcccgtcaagtccgagagggagtcgctaacttttcctccgctaagcacagcataaccgccgtacatcttggcatacgccttctctaataggatggcccaaaatacatttctaaaaataataaaatttaaaatattttattttattttaattactcagtcggaggccgactgtaaagcaattggccattgtcgtttcggcatggaagtcgatcatcgatgatgacttccgtccaccttccataacgccaaaaatggaagtggaaaatgcctgtaatttggtagaaattttgatattaactctctttttgacaaaatgttattataaaatctcctaatattttgtagctaaacaaattcacttcaaactaattgaatttcaagcaagttttcttttttattattatttaatcctaaaaaacacttaaacaattaattaaatttttttattttcccagacatattaatttattttttgcctttaaaattgttaatattttgtttactggattcatattggtaccttaaaaaggtaaaactcagaggcaatcactaactacagtacttcacaattagtgaccgttgttttattaaataatttttgttttgttctttgtttcaatatcctttaaccagcgaaaatgttttttccattttcatatcgaattcatgtgattttaaatatttttaattttaattgagttttataatggcggatgacaaggaaattacatgccctgagacacttttcgatcaaatgaatctcatttgatcgaattgatgagctattagaggccctgaatccaaaagctttctatgttgaaaacgaaaattaatttctccatttattcaatttagattttcaaaaatttactccgcgaaaattcattgaaattttttaaagtttcaatgatttttatgttttccaaaaatcgcaagtcaacaaatttgaatgagtttaataaatttgtaaaattaattttatttaattttattaaaattttaaacatttcccatatcaaccatatttgggtggggttctttcggctgaagctaggaaattctcaattttntagagcgtaggaattccatcaccagttattgacagtcggtaggaaataaatttatgggtgacattttgctgacataatttatcaatttttcactcagtataataaggagaaaaaagagaactaattatgcaacgaaaacagtacaatcatacgtgaacaaggagtgcgccagggcgaggcccatacgacggacgattggcgcagggggctgcgccaggattaattttttgtacgaaggccacacttttctccggttgcggccattttttttttttttgctattcaaaccaccttttttgcggcatgattttttcaaagattatggggaaccagagggggtagcggggtccggcggtgccgataggcgccgccgtgaaaattttttaaaatttttctcccttcgttatggcgcccacgagagtcggcatactccttgttcacgtatgagtaagccatataaaaacaataattgcaaatatttcattttattcaagcatttattttaacatgacaaagaatatttatatattaaaaataaataaaacaatgaattatttttatggctttttatgacataattaagagcattgaaaagaatacattggtaaatgaaacaatattatgacaacttcaattaattgcttgaggtggtggaattccgattttcgagaattttgggcctcggaaattaaccgattttcgagaattttgggcctcgggaattaaatttcccatttaagaaatattttgggtaacttcctcctctgaattccatcactccattcttcactgttgtaag

SEQ ID NO: 7121 - DNA, 1333 bp, Heterodera glycines
  unsure (1)..(1333): unsure at all n locations
tttgtgccagatcagacattgactccgtgaatttctgatatatatctataaatatntattaaatataacttattttttgcgactttaattcaatgaaaaaagcatgaaaaatacatccatattttgagattttcgccttctaaagaggagggcgtccttattttggcatttcgtccctattttgtcatttttgaaaacattttcgcctatatttaacccctaaattggaatttttggaccctaaaaatccgctcccttttcacattacatttgttgaaaagaaaatcaaaaattagggaaaatatcaagaattttccataggttttctcaaaaaattttgatttcaactattttagggttgtataaaataaccatgaatgatagtttggttgaattactgtaattgcctcttttgtttacatcaaaacatgtgaattatttcaattttttctcttagtttaactttgtgaaaaaaattgaaaatgttagagcatttatataacatttgtcatatactgtatttatgtatttataacaagagacgtagaatttgtatgcacgaaaatgccaaaatatggattcaatcgggtctaaccacaaaaaatggtgaatttctaaatccaattgaaattcaatcaattaataaacctgaatgcttttccggatttaatttgactctttgtttaaattttttaaagcgtccaaaaaagaaaaaattgcattgattgatttactaattggaaccaatggactcattcgtgcttacaaattcgtcggtctctaattataaacgaaacgggtaactccacccatggacggtaaaaaagaaaaaaaagcgacaataaatctttttatggataattatgggaaaaaattggcgttctgtcacatttactttttatctttatttctctcacttttacgtactatctcttcattcttaataatgtaaagaacaacatttacttcatcctgtttaacttttttcctacttgttaaatccacaccaaattttgcatatcgatagagaaaaaaaatatgcatttttcaatcgcttttttaaagaaaacaatcgcttttatttaactaatttttattttaaggcaaatttattcttttcctctccttttggcgtactattttcatgtctctaacacattaaaaatcatgaaattcgcaaattctaataattttgggtataagggtacaaaatcactttgaacatttagaatcaatagaaaaaagaataaatttagcattttagttaaaaagagctggctaggactttgagtataacatgataaaagtttgaaattccgacaacttttttctg

SEQ ID NO: 7122 - DNA, 2394 bp, Heterodera glycines
  unsure (1)..(2394): unsure at all n locations
gtcattatcacttttttcattttagaaatgcaaaattgggccataagataacaaattataattttataatttaaaatgtctaccaaattgttgtccgatgaatcctttcaaaaactgttgtttgaccttttctgcgtgtggaacgatgttcaggtgccatttcaaactttgatttgcatttattacgctaatgactttatatttccattttagcgtcattatgacccgcccattacgcactcggaggaagagaaaatggtcaaagtgagtttcataattcaaatgtttttttgacatttgattattggcatcattccccaaaggtcaaacaaatgatctgtcgtctgttgggtgaaattgatggtcgagttaaacgaattcaatcgatgcgacgcatttccacggaggatcaagtggtgggcatttattgaattgaattgaattattttgataataaattggataaccgtttttttgcccagggcttcatcgaggaatggtctttgcttacatggaatgtgttgtgcatcaccagtcgactgcaaaacgatttcaatgcgtctgtgaagtcgcaggaggaccgggtcatcttcaacaagttgaacttggctttggtcgacctcgtcaacaactcggggtacaaccaattcataaataaccaaaattatttgacccccccccccccctcatttcagagaagctctgagtccgcctttgcttcacccggacgccaatttcgacattttgacgaattcgctggctgagaccatgcacattttgcacggtctttaccggacactgaagtcgaacatgcacatgacgcaggaggaggtggaacagttcgccatgaggtgggtttggctttggatcgggtggttcccaaatgattcatgttaatggattcatttggtaagttaattttttggcaataaaatgccattttcttgtttgccattttcctgccattccgtttcttccttttttacaccatctgctccctttttagacttcagtccttctccgaccagaatttgattccgtttgtggagatgtttaaggtgggtgcactttttggccgttcgttcggccttttctccccgaaccctctcgcttcagtccttttgcgttggacaaactgtccgtttgtggcaggacttgcgagatgtccagattgngtggtaatacacttacgcagtcactatgatatacattaattgcaaaacacacagaccccggggcatttttggccatccgtgggccattaccagtaattggaattttgtttacaaaattggcacacatttttctggcaatggattttcccccacttggccaatgcttttggggtcagtgtgcgcgggtgtgcccaaatgttggcaaactgtgcgctttcctttcccattccaatgcgcagcatcgtcaacaagcaaacgctgccggagcagcccgtggtccgattggtcactttttactccttccaaatgcatcgtttggccattttggctgctcggcttcaagtgagtttttccatctgtgttattacttggaacagattccgatttttaaataaattcaaaataaactaaaattaccttcaattaaatttcagggctttcgctatgaactgacggtgaacaatcggcaaatgtttggcgactacgaccccgtccgcccgttgtcggacagtgttttctccgcgttggaactgttgatggccgattgtggtttgtttataaaaatttattaatttttccccaccccctttttaatgtatgattaaattgttaatccaattagtcatttcttcaagttttggccaccgagccgtcgctgaacccaattctggtgaccaacaaccttttctccatcaattgtggtgcgttggctcgtggcgtggtgttcaagcagttcgacgtgcaggtggtcagtgaagaaatggccgaacatattcaggtcattggagtggagaggagaacattgaatcagccatcaattgacacaaaaaaaattcaattgtctttcagtccgaaatgcgtcgccaacgtttgctccagcagccgtctccgattgcccaagtgccggccgccgcactgttggccatgaaacccaccagtgggacgaagcgctccaacagtcaggccatcaccggtcagagggatgggccatcaaaaattgccatcattttggacgagtaaccaaattttcgactgacagatgcttccggcaatgcgcaaacggcgcacaagaaaagcgacataaacagcaaagaggtggtgaccatttacccgatgtacaacaacaaaaaccgttattgggccgcgagttatccgcatttgctgtgcacgacgcggcaaaaggggcgccagtccaacaacaactcgtaccaggtcgcat

SEQ ID NO: 7123 - DNA, 2145 bp, Heterodera glycines
tgcacttttttcaaaaatcttggggaacgggggttgggtcaggcggtgccgataggcgccgccggggaaaatttttgaaatttttattgtgatttgttaacagattttcaccaaaaagtcacgaccccccccctgcccccccccttgcacagctatgccaggtcgagcattaaatatttaaattcagcggattttccttctataatttttcaatttttaggatttgtcccccaacggaatggacatgaaaagtgccggaggtggcagcagcggaaagcggccgatcttctacttttacattcgtgccacgatgttttctccgtccggacggtttgcggatgcgcacacactttcgctgccgttcaccatcgccacacggcgtaaccaggactatcaggtggggaagggggggcgagcagtactttaattgtacaataatattaatggcatctccaaccaacccatgttaaggtgcaacgtatgatgagttcgtacaccgccacctgcttttggctgtacggaaacaacattcaagtaattttaaaattcatttttaatttattttcaaattgaggacggtttgctgttgcaatgggtggagacggcgatgggctgggagaagttcaagtttctgttcatgcagcattttcggatcaacgccgaggtggagcggggtttacaggacaaggacttcgacctgctccaggttgatgaacccttcttttgatatgaacatttttcaaattgttttagtataaaatccaatgcaatgactgttcccctccttcgtccacatttagtggagatcgtgagctttgtttcgcttaaaaattggatattttttgaaatttgataatttaattaaggcaaaatcaccttcaaaaacattctgtgtccccatttgcgttacgaatgtggctcaacgaatgtccgcttcagtgtgtggcgtggactgctcgaactgctccaactctttcaggttcaattggccgccgcgtcacaaataaaatttcattcaatgatttgacaatttaacaaaggacacaaaaacgtgcgtacgcaaattgtgggagaagcagttgatcatgggtttcatggaatttgaccaggcaatgccataaaaacctctaaaacgcgcccctccataaaaagaaaaggttaaggtgtccgacactctctcctcctatccctccgctttgcttatgcgtctgtcctttgtcaccggcggtaccatttgcatcactctcaagtcaaccgtccactcggaggatcgggcgccaagtgtaccaatgcatttggagccgttggacctgaaaaagctccaagccaaaagtctcaccgattatttgcgggacattgccgttgcggagaaggtaaattcaaaaacattaatccaaccaaatttaattgtaaagtaatctttcagatcaaatatctgatcaactcgcagggagagccggtgctgatcagcgacctgttggagcagttcagtgagaggacgggcggtggtattgaggagttggaaaccagccgatgcatttcttccaacgtcacacacagcggcgacattgacgccatgcaacaaataacgtaagtgcaattcgggaatgtttcgatggcgcgtgattattggtcacttttcccgtttttgttcagtttcaccgccatgcgaattgctgtggtgacgtgcaaagtgaagccgcccagtgccgatctgatggaatatgaggaggcggcgttgcttcgcggcgatgtgcagccgaaggtgcactcgccggtcccgtcctccagcaacggttacccgtctccgtctttcaaccccgcttcggtgttccccggcagcgccggcggtggtggcggcggctatcggctgccttcggtcagcgcagcaaatgacgattttgtgcgggaagtgacccaattgtgcaacttctggggcaagtcgaagcaggtcaattcacagttggcaaatttacgcatgtgggtaatcgattaattggttttaattgtttgaaggagctcattgaactgatggagaaggcggctgaggagcaattcgccactttgtctttggtcggcggttgcagcacgggccccccgtcacgttcccaccaaaacattttccaaagggacgggcagcgttgg

SEQ ID NO: 7124 - DNA, 3640 bp, Heterodera glycines
ttcttgacagttaagcaaatgaccgaccaaaaaaaattcgcatttctacgcatttggctcgtcgtatctaactgtcacaaatgcattgttctcataactaaaagttaaaaaaaaatagatacgacgatatcgaataaattttctcactcttttctccctttttcctaatttattatattttctaaaaaaactttttgttgtgttatataatcacagttaaatatacaataatactcattaatgtactgtagaacctcatgttaccaccaactctattattgtttcacgagatgggccgttttagtgcggcgtgtttaattgattatatatacatttatcaaaattttaactaaataattgagtacattggagctttccaaatgatacaaaaagaaattatattgctaaacgctaaaacgaccccacccaaatttaatgcaataaaataggcactaaatttaaatatttattaatttgttttccttttatggaccttaaaaaataaagaattaaattattttaattattatgcttctttaacaaaaattgcacatgtaaaaagcaaagttcgcggggcattaagccagtttcgctgtttttgtgaagctgaccgaaactgtttatagcaaacgaaaagtgagaacaaaacacgaagaattccccctccattgagtcaaaaatggcggggtgaagaggcgcggcgacagcgcaattcacacaattgggctgctgtcaagcgacgctaacgcagcaaagcaaagcgctgaaaacattccattctttccacaccttctcccaactcttttttttacatgaatctgctcaaaacggcacgcataacacattccattaggcacacaaatacggttaataattcgggtgaggccttggcttacaaaaattaaaataaaacaactttggacgcaaaaagatggcagcgcgtgccaaaataacccgtaccctcccatttgtgtgtgccatttgaacaggagggaataaaattgaatataccgtatttgctctaattatcccccaatctccattaatcccccaatctccaattatcccccagtctaggaggggtttgaagaataatccctctatcttaatcccccagtctccaattatcccccagtctacgaggaggttgaaaaataatcccccatgggggataattagagcaaatacggtatgtatagtctctatcggcacctccccctccaaattccacaaaaaaaatatattttttagaagcgcgccgcaaaaaaacatttttgttgatttttaaccatttgtaataaaattttgaaatgctgatttttaagccaaaatcaaaatgctgatcttgaaaattttcagtcgagacccctgtttaaaacctgatttactcaccgaattttttttgccacatgccgacgtcgatttccggacaacgtcaatttgggcttgggaattgcggggaatgcctccgggtaatgttggggtaccttaaaagaatgaaagattagagaaataataataaaatttttaacaaatttcgttttattttatcaaaatttccctcccgatgtgcccagcgctgcccaaaaatttctttatattcaataaaaacccaaaaatatcaaaattatcagtggacaatccgtcactgatcaattgatcagcactgatcaattgataagtggacaatccgtcaacaaaaattaattttgaaaacaaattttatttaaattatattaaaaaattataattatctaatttgataaaaaacttaaaataatatattttgtataatgataaattaattatttttaaaaattaaaaaacctttttaaattcaatatgtaaaattggaaaatccttgttgttttttaaaattttaatttttgccaatggactttccactgatcgattggccagtgatcgattgtttttttcgcattgagcttttgctcttaccgtcagcagcgaccggttgcatcggatgagcttcagcaaacacatcgtccgggcccgatgactcgtcgagctgtaaattgtttaaaaatgaaatgaaatgaaataattaaattaaatttctgaatttaattttaataaaaaaattacgaaaattttagttgagcccgcgacatttgtaaaaattcatttaataattaaacaattaattaaatttcaaaattgtaaaaataaatttgtttttttgggcctaaactgtataagtgccatttttatggcctcaaattttaccgcccaaaacttacattgaccatgcgctgacgaggcggcgtcaacggggcagcgtcagtgccggcactgcgcgtcgtccgcggttccttcgggttctctgaaaaaattcaaaaaataatgatcaatttttaaattttttttatcacattaaaagaaatttattttaataaaaaattagaaaataattttccctcgctttttgacaaaaaatttgcagcgccgcaataaattttggaattttatcaatttttttttcaaaaattcacaatttcttattaaaaattctttcattttttttcttcaataagcacattgtcatttacccaccttttttatgtattctgttgtgtaggctcaaacttctgtgtgaagagaatgtcagtgaacattttgggcaaagaacaacttgctaaaatttgtaaaattatgtaaaaatttgatacataatttccgtttttctgatcaactcaccgtctcaaggcttagcatttgttcgggctgcgttcggcgtggctgggcattgtacatgggcttcgctccacgagatttgctgcgcgactgaaaaacagtttttaagttgaataaaaaaaaatatgttttttggtccttataaaatgcttatgtcagtaaacagtttaaaaatacaattattacctctgcgctaaggtgcccttcccgattatgcgaccttgtgagggtattgagccttgaaaaaatggaaggagttaaaggaaaatagataaagtatttttcaaaaaagcaaaaaatccggcagttttcgcatggcctgaattttttgtctataaccttgttcattgtcgaccaattccaacaatcttggtatcatttgatagttctaagtgccctatattaatctgcaaaatttcgaaaaactttgttaaggttcataaaaacttggccagaagaattcaaaactcgttgttcgaacatgttttgtcataacttttttgaaccgaaacggaaattttggcatgctaataaatagggttgtaaattatatggactaaaaaacgcgaaatatggacattaaatatggactaaaaaggccaaaaatggccaaatatggaccaaaatatggataaaaaatgccaaaatatatgttgtaaacccccaaaaatcccaaaaaggtgtgcatatttaatatttgcttaaataaacctaaaaagtacaataaacaaccaaaaaatggggtttaaaacttaaaaatgcatattttttattgttgttcgttgtatcaaaaacacctccaagtttgccaaatttcgaaaaaattctcattaaaaaaaagaaatgatttattgaaaatgccaaaatgacgacgaaaactcaaatgtttcgtgttttgtggggtgtaatttttaaaaatttccaa

SEQ ID NO: 7125 - DNA, 1908 bp, Heterodera glycines
  unsure (1)..(1908): unsure at all n locations
tgccatttgatctgatcaacgaatttactcatgaacaattgacgcttaaaagaactttcaataacagtcgttttttgttggtccgttgtccaattgcgcgagacgcgagcaaatggacaaaatgggaagaggaagtgattcactggcaaatttataaccaatggaatcgaattgacatttatttatgatgaggacaacattggaaacgggtaagtgaatgttatattcaatttcattcatatttgtttctatttttaggcttctcgacgcaactcccggcccgagtgatcagcagcagaagtgaatgaatgaattgttaagaaatgatcgaccaatttgaattatgaaattattgacgtgttcataaatattgttttatttttgttggattgatcattgatcaacttggatttgtgttatgccattatgataaattcagtgattttgtgggtcagcggagcgaatgcgttgtctttttgcttttctcattaaagccatttttgggtattctctgaatccgaatccgtcaccccgggtaaaaccaaaaagtctcagaaactcctccccttaaaataatagtccgtaaaaacttttctcaagcacaaccaaaataaaatgatcttcgtacatatcatacgacaactcttaaattactctattatcatgaaaattttcagaaaatttcattgcgttttcagaaagttctgagcgtggctattccggaggcataaatgccacaatatgagtctcaaatttactttttttaattgggttgtgggaatggcttttgttatttgtgcggcttcttgatggttgcttttttaaattttgtagtctacgccaaaaacggaaatatcgatcacttctcaacaaatcaaaaccgacgattaaaaagaagaatatttaatgatcagtctaacaaaaaaaaacaacaaccacattataattccataattaaaattgatcgatcatttctcaacaaatcattgattcacttctgctgatcacttgggccgggagttgtgccgagaagcctaaaaaagaaaggcaataaattgaattaaaaaaaaccatttactgacccatcgccgatgtaatcctcactataaatacgaaagtcaatttgattcgactggttataaaattgccagtcaatcgcttccttttcccattttgtccatttgctttcgtctcgcgcaattggacaacggaccaacagaaaacgatggttgtagtcttcagtccttttcaattccaattgtntcccgtgtaaatccattagtcagatcaaagggcacaacggagtaaagcaaaaggaaacgaaatgacgacaatgaaattgacgggagaagaagcattggcaaatgcctaaaacatagggaaaatgattaagaaatattaaatgacaatgaatgaaactttttggttgggcgggtggggacacgaaaacccaaagatggacatttgggtcatttaaataataaaaagccctacagatggagcgtttttgattcgcaatgttttttgggcgaaaaacaatttatttatttttgtaagcgaaccccaaaaagcgtaaaagtaacatcaaaatcaattcgaaatcaccgctttgaaggcttcaacattcgtcgccaaattcccatcataatccatgtccaacgagcattttaacatcttcggcacgttgttttgaagtggagtgaaaagccattttgccaacgcttggccatcggatgccatggcattgtcagcagatgggaattcgatgaagaaatcatcgtcacatgaaatgacaacgcgaagcgatggacaattgttgagaattgacgggacgaaatgtcgcaaacggtagaaacttctggaggacaatcgcaaaacatgaatatttttcccgagcattggccaaat

SEQ ID NO: 7126 - DNA, 2403 bp, Heterodera glycines
cgccgatgatttaataaaatgccaacagatggaatgtttttttgggcgaaagacaatttctttcttcttttttttgtaagcgtttaatcacaaataaaatcaattcgaaatcaccgctttgaaggcttcaacattcgtcaccaaattcccatcataatccatgtccaacgagcattttagcatctttggcacattgtcttgaagtggagtgaaaagccattttgccaacgcttggccatccgacgccatggcattgtcagcagatgggaattcgatgaagaaatcatcggcacatgaaatgacaacgcgaagcgatgaacaattgttgagaattgacggatcgacgaattgacgcaaacggcggaaaattctgacgcgcaattcaatggcataaatgttttttccgatcattggccaaatgttgtgcaaaaggaacaccataattcggtcagtgtaaatgtaatatatatcgatggacaaattgatttgacatttggcgaaaagttgacgaaaacggcggagaaaagcgatggcattttggtcgatgtatctgtgaaaatgaaataattgcatcatttacatttgaaaattgttaattaattcattttactctattgaaatggctttgaatccgacgactctctttggcaacggcttttgcggaattggcaatggtttccaatcgtaatatttgacaattttcatttccttggtgccattttctccaattttgcctcgaattcggataaatttcagtgcccatttgcgggttttgaagtgttcgtccacgtaaatgtcaaaacggtggctgatcattgaaatgccaaggccaagttgtgacggctcaagcaaatcgaagacacaaagccaacagtcggcggagatgaaactgaaaaaaaaaaaaaacaaaatttaaaattgaagttggcattttaattttacattgcttttgccattttttcctccgcttcttttcggctgtctgacattttgtggggcaaattattaagacggttcttggtggattaaattaaattagcaaaactgaaaataaatttgtaaaatcaacagttaagaagggcaaaatggagcctcgacgatgaaagacgacgtaaggtaaacaaataggaaaagtaagtacctaaatgaaaaaaaagagagaaggaagggcttttatagtgattaaaaatttttgaaaaagccggatatgctgctggtcttctggtcccttaaaagcataaaagcgaccccttcataatgattatttgggtccggcgtgctaccagcgcagattagatattgatcgggacgggaaacgggattcccgacaagtgaaactattataattgaaactgttaaaaatttctttgtgtaaaatgatcgagtatatattttttaatttaatggataaaaataaaaaatttctaataaaattgaattttcttaattatttgtttcaaagaagccggataccaatcttttcaacggtaccgcaaaaactggttctgattcagaaatttctgtacatttttttgcggcttagttatggcgagagaagcattattttgacaaaatgccaaaaattttaaacttttataaatgtacatatgtatttacattcatactcaaaaaacacgatttccaagtacaatcttggaaacgattgagctttttttaacaaatttttttcatttcagaaaacgacaaatattcaaatggcataacacaaatccaaattgatcagtccaacgaaaaaaaggacaatttttatgagcactttaataattccataattattaaattgatcgatcacttctcaacaatacatattcattcacttcttctggagaacacatgggccgatcattgcgttgagaagcctaaaaagataaatgcaataattttggattttttgaataatttattcactgacccgtccccaatttgacgctcattatcaattcgaatgttaattttgttccattggccattaaattgccatccaatcgcttccttttcccattttgtccatttgcttacgtttcgcacaattggacaacggtccaacaaaaatcgatggctattgttaatccgtttcaatgccaactgttctcgagtaaattcgttggtcagcacaaatggcacagcaaaagaccacaaaaacgaaatgacaacgatgaaattggcaggagatgaagcattggcaaatgcctaaaatatgaaggaaacaaattaataaattacttagttcacggtaagtaccgctttgaatgcttcaattttcaacggccatttcccatcatctttttccaacgaacatttgagcacttttggcacaccattttcttgaagtggagtgaaaagccatttggccaccgtttgtctgtttttgttgagcattgg

SEQ ID NO: 7127 - DNA, 2573 bp, Heterodera glycines
tggactttctttgtatttgagaatccaaattttccaaaccagaaactttaaaaaattgttatttcgccggaatcggtatccggtctaaattagccgagaacgcgattaagaactaatgggttccccggctccgcctttattccccgctgtttctttaataaggtaagaaataaaaacatacattataattctgtccattgggattggcattggcgagaaccgcagcaacattgaccactaaaatgtgccaaaaatgagcagattggtaaaacgaagggaaatgacaacccaccgttctgttgctgtggcataacagcagcaaagtttggcaagaagcctcctaaatcgaggaattttctgtaagatataaatttaactactttttaaggtataatggatatgggctccataaaaataattttctgttatcgataaagaccaaccccgctgctggggatttcggggcttctgatcacgcactaataacattgatttgaaaatcagtgattttgaaaagcatagatttagggtcaataattaattagatttgtcaaaatttctaaatatatgatataaactatggtaaataaataattgcaaatccgatattcatattcgtgatcagaagccccgacgaccccctggtttaatctttttgtttaattttcaaacaatgaaaacaaagggtgagctgacaatgcgcgcggtttgttcaccattaaactgctaaaattggatatcgtttttaaaaataacctgacaatcgcacaaccacacggaactgagctccgttcaaacgacggaatcgggctctttcagtgtccagacgaacgatagagcgtcgctgacaggcaattgccgaaaacaattcctaaattttgacggttggtgttatgagatattgaatcaaaacccaatttataaatttatttcttcctcaactataacaatcttttagcctaaaaaatcaaatttcattattctcgaacatctctattaggacgaaagcaagaacgaagcggattgaataaaaccagagagtgctcatctggagattctaactctcggatgtacatcactaattaaaataggaatttttttttggtagtgtgtagtaaacatataaaccaacaaaaactttaaaataaaacgccaaataattttaaaattggcgattattgcactcaaaattttttggatccttagttaattatgattagaaaatgcttttaggtcttttttgaatattcttgcgttcgatacgcttcagttttatgctcataaatttttacaaacttcttccactaaaaattcattccggcccatgataacaagctgtgaccaaattccccacaattatatgaaaataaacttacgtcacgagtcaatcgcgcattatttcctgcggccatctgcagaatttcataattaataaaaacatttcagtgctgcaattcaatggtagagggatattggtagaacaaaaaaggaagacaaggcaagtttacaatttcattttcaattggaaaaaagacaattgtgataataattttacgaatcgaaagaggatcgggtcccagaacctaaaggcacttgggggtcaaagtcttatgtgaattcatacccagtaaatgtccaatggcggctgaacgatggtgcaaatgatagtccggccagacaaagccagggcacgcattacgctgatcacactttccgccattgaaaagtcgaggccctaaaaattggatttttttcgaaaattagaccaaaaatcagaccgtggtcggttcatcagcaaaaatgatttgcggattgttcacaagttcggaagcgaacagcaaacgacgcgtctcaccacccaaaatgctcttttcgacctagaaattgcaattgtaaatttttaaaaatgataattactccgctgaatccaacgagctcatggcgacactcttccagaccaaactcgtcaattaccttaaattattcccattttgccactgccactgtccaccccccccccagatcccacctcattgacgcgtctgcgcatcgtccgtttagtgtctccgaccatccaatcctgcgccatcagatgctccttcaccgtcaacatgcccatgaacaagtcgtcctgctgcatgtatagtataaggatgataaaaaaagagggttcgcaaaacgaggccccaaaaacccggggaatttcctagtcaaaagaccgaaccgcaacccttaaatcacaacgactcgccttgatgacgtaagtgatgaaccgacccaaggagtgcgcgttgatcgacactttgccctccacgctaagactcttcaagtttcggttcagcaaagtgttcaacagcgttgttttgcccactccgccatcgcccgtcagtgccacgagttggcccgcgtcggccatgccggacacgtcgtctaaaagtcgaaaaagtatttgagataagggacacaaatcctactggcttaccagtgattttaccaacggtgagaccgtgccaagacaatgccacgggttgtacttcctggacactcttcgtcggcgacatcgctccataatt

SEQ ID NO: 7128 - DNA, 1955 bp, Heterodera glycines
  unsure (1)..(1955): unsure at all n locations
gctttatgttaattgaaaaaggtcaaaaatatttttttattctataggagtggaagagcgaggtttaggggtttaataatggangtggcataagaggtgggaccgcatttcgcattccggcatttttttaatgaaaattccggaaaatgcgtgaatttttattttttcatcaaagcttaaaaatatccttttttacactaaatctgtcaaaaactcaatctaagttcaaagaatttccacggtgaaatttggaaaacctactcagcacatgggtagatggatgcttgttttttaataatttaatatgttatttctttaattttttcatttagttatctcaaccaatgatttttacggaaaatgtggtgccaatttgtttggccaattccacttctgaaaaagttttcaacaataatttgcacattgtcggctggggacatcagaatggtaattaattattaaatgctgtttaattaaaaatgattttttttttgttgattcgctaattaggtataagatcatccaagaattaaacaccaattaacattgaatatggacacacaaaattctttataaaagtgggcatgtattttacagaagccgactatgatgaagagggcaatgaacggtgctaggtcatttcgcgacaagtgcaaaaataaaaatcaataaaattgggcacttcgcgacagtgcaaaaatgggcacttcgcgacagtgcaaaaatggtgtataaatggggcgtttcgcgacgggaccagagcgtttgggcccccgtttttgggcccccgcgtttgggcccccgtttttgggcccccggggtcgtttgggcccccgtttttgggccccggggtcgtttgggccccaacccaaaaatcgaaaaatgtgcttttttaaaaattaagattctaaaaactaagcctgagggatccctcgccacttggcataagttaggtttaattaacattcgctcattttttacaattttacttattccaaatcctattattttttaatagttaaccaatttgatgtacattctgatttggacatttttcagaaatggctaacccaattgcaaccaaaaaacaaaaagtaaaattgtcttacgaaggccacctttacaccttcgctaaaatgagttctgatgggatgacaaaattttggagatgcgagttcaaaaacagcaccgacaaatgcaacggccgaatctggacggacctccacgaccaattcattcgcctcgcaactccgcacacatgtccagcagatgcgtcacgtgttgatgctcaaatggtcacgaccacaatcaaaaggcgcgcaattgccaccttcgaaccgccttctgtcatcagagcagaagcgcttcaaaatgtcccgtctccgtcggcaattttggtgtcaaaacaagcagcaaaagatgtgaaaaactgcaccgattctgtatttgccgagaacgctcgaatgatcacgtctgttgcgttcgtgcccttgtgtgacattagaatggcggtagcggcacttgatacggagttcggaaatttggcggttttccaaccgctgattgactggtgtgtaaactttttttaaatttaaaccccactgaaattacaggctattaatcaattacgttggacagcccaggcccaatggcacatggtctcaaccaacttttcgccctgaacaatggaacgtctacacacgcacgcttaatgccgatgcacggaccaacaaccactccgaggcggagcatcatcgtctacagggcgccttcaattgccgacacccgtcgatttttcacttcattgacgtgctacgtcgtgagcagaagccaacagacgtcaaatacgcgtcattcatggccggagaggaccccccaccaaaagaacgaaagtttttgccgacagatgaacaaattcttaatttggtgctcctctacgtccgcgatgaatgcag

SEQ ID NO: 7129 - DNA, 2746 bp, Heterodera glycines
  unsure (1)..(2746): unsure at all n locations
aaaaatatggatataaaatcgcgaaatatggacataaaatggaaaaaatatgcacataaatttttccaaattgagggtttatgttctcaaaatttctttaaattcgttaaatgtaaagtaaaactgcaatcatgtttctgatccctagtttttttgtaattgaaaatcttggaaaatttttttgcacgcagattctgactctctgactagcgaaatagtacagacgctgcactgaaagcataggagagcagcagaaatgcgatggcaaccctgattttaaatttaatcaattatattaaataataaacaattatttaaaattaatttattatttttatattcttttattattttttaatttgatattttaaattttggcgatttgatatagtcgtaatggtcattgtcgaaacggtcattgtcgaaatgtccagccacctttttgggttaaatttagcaaaaattaatatttattttgacaaaatgccaaaaatttgaaatttttttcataaaatgtatattttttacattcatatgcaaaaatcccgattccaagtacaatcttggaaataagtacagttaaaattttccaagcacaaaagccgaaatctaagtatgtacttggcatcgaagtacgaatccgagccctgtaataattgtttaatgcttttcatttgacttacacttaaaaaattattttgaagcttttttcaagataaatcattttttgacgggatttgctaaaaattacttcacaactttaatatttttacaaaattcaaaaccgatgataaatattctttttagaataatgaaactctccctacaatttcacttattagttgtggcattggcaccttcgttttcttctgacatgctattttttgcgcaagtttttcgtaaaaatgtgattaagaattgttacatggcgtagccgtattagctattttaagattagtttttttaaatgacccaaaatttattttttaaaaataataaaatatgttcagatgaattgtcgcaagtttcattttattcattgaactcttccatatttattcttttttgataatttttcttttgatattttaatgttatggaatattttaaaaagttttatgaatcttatcttttaaaatttatttaatcaaaaatttttaaattaaagtattctctaaatttctttaaatatttttcaatttttcatctttaacccccgacatttgattgtgtacaaaagtctctatctgttgcacattgtgaagctatttcttttgagaaaatctctccccacatttttgggtcatccgttggagaaaaggcgtattttcggggagggactttgggatttgctggggtttgggttgagattttggggtcaaggaaagatttacttaattttcaacaccactttactgacaaggaattagagaataaggcaaattgcaattaggaactcaaataacagtaccaattaagcctttgggcgtttgttgttgctgaatgaaagtccacggggaaaagcaccaaatttttgtagttttattacaataattcaaaagcacaaaatatataaaacttgagagaacacgaagaccgaaaacgaagacaacaatcaaaaggaaaattaaatgaaggatgcaaaaatattttaaattaacgcgaaaaacaatcgttgcaaaaaacaataaaataaggataaatcattatttatcctacgtcccccgccgtttgaagaccagtgtcctcacggtctgatcgccccgcacctcccccggatccagcagaagtcgagcgcctgcgagatggtgtcggtcgaggcggtccagcagtgaaattgtcacaacggaaaaacattctgaaaaaataaaaaagggaatgattgtggggggggggggtgatcaggattgtggcaacggattttggccaattggagaaaaatataaaaagaacaataaaaatgcaataggccatgtatgagaataacattatggtccgaagctgaagaaataataacaaaataagtaaatttaagtcattgcgagccgcttttccacgttttaaactcttataataacgaactgggggcatttgcaaggattggcgnntttctgttcnnnnntgggcgggggnntttnnttgattnttggcttgggaggnggnttttttggcttttncttggttggcgnnnnncctttttgtncttggnnttnncnnnnncccgtcgtcgttcccgtttggtctgtttttgntccnnntcctcctttttntgncggnttgccttnntgncttntttgnttggtgggctcgggttctttttggggnttttttgnngtttgncnnngggggtttgttcggttttgttggnngccttctttgnnttggntgnnnccttttgnntgnnttttntgcgtttgnccggggnnnttgntttnntcccttcgttggnnntgnttctcgnttgtgtggggcgcggtncnntttttngggnggngnttcgncccgngtttggcgntgnnttnttcgnntgttttggnctctcgccgnnnttnnttntttcntttgtnnttncctttccgntgtttnntcccngngntcttnncgcnttttgtccnngtnctnnntcgtnngggnnnggttttttggtggccgcgcgcttttaaagccttgcccntttcctttttccntcggcncnttcagtttaaaggtcactggtactcttccacccgtaaaagattcgacttca

SEQ ID NO: 7130 - DNA, 5128 bp, Heterodera glycines
  unsure (1)..(5128): unsure at all n locations
gggggcatttgcaaggataggcgaatttctgcttttaatgggcgagagaatttaattgataataggcttgggagaagaattttttggctattacttggttggcgaaaaacatttttgtacttggaattaacaaaaacacgtcgtcgttcccgtttggtctgtttttgatccaaatcctcatttttatgacggattgcattaatgactaatttgattggtgggctcgggatctttttggggattttttgaagtttgacaaagggggtttgatcggttttgttggaagcaatctttgaattggatgaaaccttttgaatgaattttatgcgtttgacaggggaaattgatttaatcacttcgttggaaatgattctcgattgtatggggcgcggtacaatttttagggaggagattcgaccagagtttggcaatgaattattcgaatgttttggactctcaccgaaattaattatttcatttgtaattacatttccgatgtaatatccaagagaacttaacgcattttgtccaagaacaaaatcgtaagggaaaggttttttggtgaccacacaattaattttgccttgccaatttcctttttccatcggcacattcagtactccaatcactggtactcttccacccgtaaaagattcgacttcaaaaggaatttctgactttcctttgtttggactaaaaccccaatcaatcaaattcactcccttttccactgcaactttatgtaaaaattccggattggcagcattaatttcggctgctgagtcagttaatgcagttgcttttaatccagcaacgttcaactctaacacaatacattctgaatttgatatttgtgtcgggtttggtgagggaaattcagttgaatgggcgattaatgaattgaaaaatttttcgtaggcgggcggttcgctgtgttcgatgtgactaattttgactgatttcttttcgcatttttcagttccttttcctttcaccttaatcatattcaactccatgttctgcgttgccattggatttgattgttgatttgaatcgaactgggttctatttgcgctgatcgcctcgattttatgatcattgacgtcttgttggtgatcggaattttggttttgaaaatggacaaaacgttgacttggccgggaatttgggttgctctcataaaaaatatcgttttgaaagccgttttgtgggtcggatacccattgatttttcgggccataagtttgataagggaccaaattttggttttgaaaatgatcaaaattcttattggggcaataatttcggttttcctgttggaaggtttggtttttgaaaccactctgtcggtttggcctgaaattattttgcgctcccatcccaaaatttggaaaatttctttcaaaacgttgtccgtaatttgggttttgaaatgggctgtacggtttttgctgtgggccggtttgctgaaactgaacaggaattccaactgattcgtttcgttctcggttttttccgtcctcaataagactcaaacggttggccatcatcaaaagctcatcaaaggtttggtttgctttggtctggcattccaaaaatctggccaaattcacatcatttatgtttgaaatgaagtgcttttttgacacctcatccaactggttttcgtccagaccaatgtatgagcaattaaccaaccgttgaattcgctcaccaaactttataatgtcttcatttggttttcttttaccattctgtgtcaattcggaaaatgcgtttgcttctttgtagtctgtctctctcaaaatggacattatttcggtttttagaatgccaaatgtcgcctcatttccaaatttgttcagcgcaatatgatacgctttcaaagctttccctttcaactttgtctgtagcaactctttttgcttttctggtctccactctccggcacacatttgaacatttaggaagaaatccttaattttgtcccgaccttccgttccgtataggttcggaatttctcggagcgtatttgcgtattggtttgacagagtaactttatgtaattccattacaatatcaggaatttgattttgttggaaattttgctgagggacaaactcgaaattttgaacgttcggaaagtgattgggttgtggtgccaaattttcaaaatttggattcggtcgctgttgataatttggttgattgatattccgaaccggatgaaaattttgaaaattgggtccatttccaaaatctcttgtattctgaattgggtgattcaccccaatttctcgaccataatttggatttggaaagttttggttttgctttgattttcgatcgataatttgatcggtcattgttccctctaaccccccccccccccaaagcccaagcctattggatgatttcgggagaaaaaagtgagagagagagatagcgagagagagagaaagagatagagagagagaagagagagatagaaagagagagaggcgagagagaaagaggagagagagtgagaagtaatagagtgaagcgagagagagagagtagtatggagaatnaaatggaaaaaagagaaagacagattgtgttagagaaatggagaaaaattagtagccataaanaataattaattatgcatatattttttggatcgatgaattataatttttaaatgatttattttacttttcaaattcattttgtataatttataaatgccaaatgaatttaaatttttagggtaataagtattaattattttttggaaaaaaagcgaagcgcaataaaagcgtattttgcncaagcggcgggggcggggacgtgtgcgttgctntacgatttatggtttgcaatatattataattaaattataattacgctaattttctttaaatcattgtcagggtgtttttttgtccacaagtcaaattttgagagaacctgctcgtcggctgttctttttttggatggttcagacttttttgaaggcaatgaatggattcattcacgaattgcttcacgtccaaggttttaaatttgttacaattggaaaaataattttgacacagggggatttttggatttgctttcacgttatgagtccagccgattttttatgagtcaaatttacattttttaaatggtcaatacctatatgcttaggattaaacgagaacttaaggtttatagaagtttttgtataacttttttacctaaatggaatagacaaaaaattattcacgaaaaagttgaatttcttgttttttattcgttatttctttttaataccagctcttttcttgcattataaaatcctgggacttttagctttaatcaccaagaatataggtattaaccaagcaggaaaaaagttatagttctaatcggttttacgcgtccaatggccttttacgcgtcctataaccgtttacacgtcctataacattttacgcgttccaaaacaatttgttttcagaaaggcaactcgtacaataaaaaatttaaaaaataaagcattgcttacgctaaagcttaagcccgggcctaagcaagcctaagtttaggcctaagctatgcttattaaacataaagcctaggcctaactaagccactgtacgacaataccgggcaaaaaaaagtttcctcttagttatttggggcggctaaaataccattgacatataaaaaaaaccataggacgcatataaagtgatgggactcttaaagtgtcatggggcgcgtaaaatgtcatgggacgtataaaaccgactagaaccaaagttatggcctaaaagctgaggatggtcattgacgggacgcaaaaaaaaaaaaaatatatatgggacatataatatgtcatggaacgcatagaaccgaacagctttttttcttgcttggtcaatccatacatctttgggatcaattgaaagcttaaagctaaaagaagttttcttgtgttgaaaaattctgggataacaagactaaaattttcttgaatataggcaaaatgattaatcagtttttttgattgcaattttcttaatacaagtatttgcagcttttctttatttttgaattcctgagacttaaagctttcaatgatgccaaagatgtatggattgaccaagtatgaaaaaaagatatgacctaagaaacggggggatagtctttgattggacgcgtaaaagtcggttggacacgtaaacttaagtagagccagcactgcttccacttttaacaattaaacgttcctttttggtttgtgctaactgtaaatgtaaacaatgctttttgaacaccacagacatcgccttccaaaccatcttatgactgagtcggttgagtcgtgttcatcgaccaatttcgtttccgaaaactcaaattgttcttcagcgacgggagaggaggacgcggagattgattcaacaatgacaaattgtgcaagaattaattgactctaccgtaagagaagcaagtcgtaattgtgcagaaaaggaacagagaaacagcactaattttaagaaaaaatttcgccaaattaataccgaaaacccaaaattaagttgtttaggtcaaatttgttgctgtaaattgccattattatcgcggacaatgcaaacggatgtacaaagtgcactcgttccacgtcattttgcacctttttccttaccaaaatggccatccgattttatacaaccaaattttatcgggttcgaacaaaagacacaagttgaacttggctgcctcgccggatgctgccttgaacacaattcggtactcacgttccttctcaaaaactgcaattcgaatttctcctggcccgtatcgttgatcaatccaatcttgtactttttggacgtcatcaattgtgtacatgtgtttgttgcggggaattgcggcacgtctcaataagttacgtgcctcaggcccgtgggtgtgctggcgatttgcgaaacttttgaatgctgtcggtccgcctccgcctggtgaccgtgaacgccaatcgtgaagacctagcaacacagctctggccaaacagagtcgatcattcggattcttaatgcggatcaacgagcgaacagtgttcaccaatcggtgctcttcctcaaggctg

SEQ ID NO: 7131 - DNA, 1107 bp, Heterodera glycines
  unsure (1)..(1107): unsure at all n locations
taagaggcanttggaaagtgtcagaaggaatttggggggggggaaagaatggcacagcaaaggagcgaatgggacgggaattggggagggggggggcaattttagtgggtttgataatcgaaatttgcaaaattatagcaattttttggacccttttgctggggggtgattgagtaagtttgaatttgatctgatttgtgatttatgcttgtccctccgattgtcctcacttttccgtcccctctttttgttgtgttgttgttttgctccatgcttttccccctcctcccatttattcttcccctgccaattagcttcccctccctccgtttgctccgcgcgactccgtgccggtcattccatctttgcatgccattcccttcccttcttttcccttcatgcatctgcccatttcaacaagtgaccgaaagtaatggaaaatggacacaaaaagcgaagagaacggcacggggaaaggaaaagcaaaggaaggaagagagagagggggagagggggacgagaggaggagagagagggtggaataaagagaatggggaggagagggagaagtgacagggggaagggaagggacagatgcgttcgtcgcccttccgtccgttcatcccccccccccccctcgcgccaccccatcgtttctttcgtttcgtttactttccgccgtccatcacttttcacaatttatggtgcaggtcaacaaataagcatgacaccagtacagcagctgctggttggcacaaacactcaaaaacaggcagagaaaaaaaagtaaaattggggagaagggcgaaagactgctcggggagggaggttcttaattgctaggaaaattcgcatagacatacatttagtttatttttttggatagataacttaaattacaaattatctaaattataatggcactcgttcgcttcttcctcctcctccgcatcttctgcttctttatcacctcctcttttatcttttttcctccttctttccttctctcccttttcctcctccttttccttttcgctttctcttccttttcctcttatttctttcatacttcctttgtttctttaagctattgtccctcttaccatc

SEQ ID NO: 7132 - DNA, 2087 bp, Heterodera glycines
ggggcggggaggacagcagcagaggccattccgttccgttcctttgcttgcccaccctcccaaaaggggtattcatttgccctgtcgctcattcatcgcgcatcgtatcgccgggaactgtcgagagcaaattcccaaaatctcatcactctttcggtcactcgctttgcctttcccacaatttggtgaccctaattattttcttctttcttataaaactaattggccccattaatcagcagcgaactgagaagggccgttcccgacaattcagcagtttttagggaaacaattctcaaattttgcgattcattggttttgaaacaaagtccactcgttcgacttggatttgaccaaatattcgagattgaagggtgattgtcgaaacttctcaggtcccgtcccatcccatccgtttcgttccatcagtcccatccttccatttcttccatccaatctgtttcgtcccttcccttccgtttccgttccatcctccattctttgtgttctcctcttcttccccttcagatgttctcccactcctcctcctcccttctctcctcccttttctcttcgtcccccatttttccctctgtctcccatttcccttcaaattcttccgcttttgtcgttccttcctccgtctcctcttccgccttctccgatgcgcttcacgccctctcgcttcaacttctcctcgatcaacatcgcaattcgctgcttcgctcaattctctcactcacttccaccgtaccattctctgacaccagctacagtaacccattggatttcgcccttaaaattgagtcccttgtgaaagaggaagaagaaaataagaaaggggcagcagaagcagcagcaggtggagaagaggttacggtgaaaggtcaaacgatcatagcagcgttaatttgatttagtggagagaattggaggaaaataaaacggaaacggagagacgaagagggaaaaagaggacgcggaaagagagagcggagacggaagagaaacggaagaaagcggacgaagagaagcgaaagcgcaccgatcagacgaagcggagggttttccgactgcaaaaaggcgaaacggagacggactcaccggtcagcggaatgttcataaaggtaaagccaaccctcggcatggcacttaacaaatgccaaaaggagtcctgtgatgaggaggaactgcgccaagcgacggctgaattggacgaatcagcgctatttgtcaacgtaacggaggaaacgcgggaagcgatcaatgcaattccaaatgtgatcggggaaagcatttgcgcactttgcaaggtaaaggcaaagaaagacaaagggatgacgacagtgacagggaaaaggcaaaggcaaaagcattggttacagattcgttttggcgatgtgtttcgattggcgatgcacaaatgcccacgaattcggcacgaggagtaccggtgcgacgagtgcgagaaggtgatcaaaagggaaaagggcggacgaactgaaaagaacaaaagaaggcgaaacgaattccaaatggaaataccgtatgaatggcaatgtgggaataccgtatggatgggatatcggggaataagccaggggatatagtatgacaactgtacagggaatgccagacggtgccttccctcccccgcgagtgaccttttgctccaatccaattaaaaggatgcttttcttctttctgcacttctcttctcctctctccctccgcctctttcgttgttaatccctttcccctgcacaaacaatgccttcccttctcctctcttcttcccccccccccccccgatttctcagcatgattcactcattttctttgctcccccctccctttgcggcggcatctttcatcggttgccttccagctgggtgtcaagagggagagaagtgaagggcaatcatcgcccaatggtcgagaaagggagggaaagtaaaggattggtgccaaagccaaatgcgcttttgccataaatgtgccgaaatgaacagatatctgtcatttgcttccccccccccccctttaggtcttcggctgtccagcaaatctcgcgtcccaccgccgat

SEQ ID NO: 7133 - DNA, 813 bp, Heterodera glycines
agcaattggttggcgcagaagttgcaaatgctgattaattaatctctaagccttaagcctttgctcgtcatttcgtgccacttttttaatttattttattattttttgttttccataataatcgctgagtcttttctagtcggtccgcaattgagtctccgtttttgtgttcgatgcaaaggaatctcttgcaattcgcccatttatttgttctctctgtcgaataccgtcccttttcatatgcatactgtatctttggtcaataaatattcaaattctgttaatgattgtttttcatattttaaaattaaactctaacaaatcgaaatgaaatgtcattaatctcaacggcggaagaattcttctcatcgtaatcggcccattcctaatcaaaaaagggcttaaaaaatgcgctaaaaacttgccaattcgttgaggtcaatttcatcgaaaattgagcccgattctgtgccaacgcaaatccaaccaatcttaaaaatgcgaaagggcactcatttatcaggggaaatgcgaatttttacccgggggtcgaacgaagtcggctcaattccgcggcattcgaattttaccaatgtttggaaaagccgatttttgtcagcagaataactcgcataggaatcaatgagaatctctgaaaaagcatttacattttatggtctcccgcccaccgagtgaattgattctgccgcaaaaggaacatttggcggaaatgtgacaaatgcctttccctttggtcaaagtgtgcgtttcctacaaaaccgagtaaataatggcctaaataggccacggcat

SEQ ID NO: 7134 - DNA, 2359 bp, Heterodera glycines
gtcgtcgtaatccgacggacgaaggtcagtgacccgatcaaattggcactcatttgaagcgcaaagacaggctaagaaggacagtccaattgcatttcccacttttgtttttaaattttaattcccaatttggaagcaaattaaagaaaaggccacccaaaataaaagaaataaacaaacacaccatgaagcaaacaaagcacttttttactttaaaatcttaaataaatctaatagattagttgaaaaacggagaactaataagataaaagcagaaaagtctcccaaataaccattggcaattttcaaagaagtaaattgaatccattttatacagaatcaacaattacaaactgaaaatatatcaacaggttaaaacgcgtaaaaaaaatttaaaaatccatcccattttgtgtcaggaacatttgtctaaaggtaaaaatctgtaacgggggatgtttattgttagctattttttgtttgttgtaaatgtaaaagaatgcaaatcgccgctgtcggtcattctctgcgcacacaaatgtccccttccgcggtggcgttcactttgaatttctccccggttatccgattttcttctttccgctccaaattcatttcatcgtcgcactcaacgttcagaataaaactttgtttatttgttgaattaacaaaatcctaaaaataaacagaaatttaggcttatatcgataagagaaaagaaacttcgtgcaaagtttcgattaaatccaacgaaagagcggaataatcaaagcctttgagggagagcgcttttgggttggcggagtcatcgcaatgttcatcacaaaggctattcagccaaacactgaaaggatttaatagaatattatataaatcttcagttgtgaaaatatgtaaacaatggaattcgattcatttttcatatttttaaaaattttacaccaaaaaaggaagtgagcttttcctactcgccttatcacttcgctgtcctctgctttggctttgtacccttcgaaatcaatgacaaatgattttggagggagtcgaagaaggtcagaaataagcggacggaactcacaacgacggccgaaagaaaagacggcgccaaggcatttctaaaaaattgacacaaaaattgctgtggtcggtcacttaattcagtttcaaattttgaataaatcaaagagaaaacctgaaaagcactgatagaaaagagtgtgtcaattttatactgcgaaattaattgggaagatgaacgtccttgataatcgaaaacacagtaattgagttgaaagattcgttgccccattccttgaaggtcgcgtaagatttcactggtaaatttgaattcctgaaaatcggataactataaaaaaagaggtggggcgggggaattaaactgacgatgaactcaatacatccgacaaaacaatgccgaagccacaagtgcaaatccgaattggactcaatcgttctcccacggtaaatcaaaagcaatttcatgtcattggaacgagtcgtacgcaatttgcacctgaaaaacagcccaatgagaagtaattcctaagagaagtaccgagcaacggcacggagaggaaaaacatcgaaatatttatcaacaataagacaatgtttatttgtcacaagttgcattgtctgaagaacatcgcggtccaaaaacttcataatagccacccaacattcgttaggaattttcttagataacatctaaataatttttacatcatacatatataggtgggtatcaaaggaagttccgcagaccctcaaaaattgccgaaacgtggcttctcaaaaaccaccattcatttttgagaaaagctaattaaaaaaaaattttttttttgctcaataaattttgagcttgactgtaaatatggcttatatttatttaaaatccaaaatcttaaccaaaaagtaacaaaattaatccaaattaatattgagataaataatttttaaaatccaaaattcttgtcatttaaataaataattttgtaaatttttgagcaattcttcattttatagggggtgtattttcagaaatttttgaggtcgattcttaggggtgtatttttcctttttattgcattttttaaataatttgggcaaaacgccaaaataaataatagttttttgaatttttttaggttttaggtagggtaggccgggtccgggtacccgaccgggtcccagacccggatacccgattttttcactacccggacccggtttttggaaaatccaatacccgatacccgacccggtaggtccgggtccaaaagtacatggtaagaattggggtcaggctcaaaatgttgaccaaagtttgaggaaa

SEQ ID NO: 7135 - DNA, 4048 bp, Heterodera glycines
  unsure (1)..(4048): unsure at all n locations
aaattttggattttttttgaggatttccaaaaatttccgtaaaaaacccacaaattatgtaaaaaaaatcaaaatatgtaagaaaaagtccaaaatatgtaccaaatatgtataaaatcccgaaatatgtaaaatatgtataaaaccccgaaatatgtaaataaaagtcccgatttttttttgcaaacataaaaaagaaagtgtttttcctactatttagagcatggagaatccaggaaaaaaatatgcatttgcataaaattgacatccctaaaaataaggcattaaagttcgtaaaaattgtattaaaatctcgaaaaaatgttgatattaaatttcgttgggagcaaattaactctttttccaatttttaaagatgttaaaatttaaattttagttttctgtttttttccatattaaggaaattagttgaattttggcatccactctttaatttatgtggcttctctggaaaatttaaaaaatgccaaaatataattccaaaagaaatatggatttgattttggttttgaaagcctcagaaaatttggatttattattgaaatccctgaaaatcattacaacccatccaatcaaattaaattttcaaatttacctctcatctaaattttctgatggcatttcaatgctttggtaagcgaatgcgaatgagtttaaatagatttttcaattttatttcatttttccaaaaaaaactaggtttttctttttttctaggaaaaaagaaattcattatgtttttttgaggaaaagttctaagttcaattgaaatgaaaaaaaattgtacgaaatcccattgtaaaaaataccatgacactacggtaattgggaggaattacggtaaacagcagaggtgaggggggagggggcttcatcataaaaaggataaattacggtaaagcgaacaaacattgtgatcagtgtctccaatcgggcaagcaaatgttcgaccactgagcatgccaatgccattgtttgactgcgtttgacatatttcactttttgttggtgccattttcgaagtgtgtcgaacaaaattggcacaaatttttgcacaatgtgcccatctgttgggcataagtgtgggcaactgtaatcatcaattagctcgtttaggcccctaattaggccattcagcaattccttgtcaccatttgcaatttccttgtccaaataactgcttctgctagatgagtgtgtgctttttgaagtaaaaataccaattttacagctcatcgccacttttttgaaaaattttatgctttgcttaattcagggctcgcattggaagcatttcaaaggagatttccaaggacaacaaaacgggaaaattatattcaacgtatctcttttttaactttttaaattcaaggacacttaaaaagtttgtcatatgcaatggacaatattcaaatggtttgcattttcgcctgtcaaatgaatgaatttttgaagcaatttgtgtcaatagattttgtaccaaataatgccaataattaatacaaaatatggtgtaaaattttaaaaaattgtaaaattttgagtgtttttttgaatgcttatttcaaggatattttatattcaaggatattttcaaatgagagaaccaaatttaagggcatccttgtcattcaaggacgaatgcgagccctggtttaattcacatttttttcgtaaaattgaattatttattttttagataccattttttgaaatacatacacatatttttaagttttctcattttttcgaaaatttaaatttaaatttttaggttaatatatttttcacaattaaaaattgaaaaattttgccaaaaaggggatgaaattgcccttggcacattttaccagaaaatttttgctcaaaaatctcagaccaattccaaatttgctcataattttctgtgttctccatttctttcaatgttcttatcacaaagtcgaatttgtttttcactttttgcttaaaattgtcaggattaaatgattgttggcctgagggcaattcaaattgtgcattttggcgtaattcgaccgcaacttggcgtaatgctagaatagaaataaaaaatccgccggcctgactcattgattttcaaaatttttataaaattattcgattaaaaagccagattccggatacctagttaaaaatctcgcctagcccggtctagtttctgtcactaatacatataattaaaattttaattgtgaaaaactttaattggctaattagtcgcggtaattatatttccaatcttggcatttgttggaaatgattctgattgttcgggtataattgctaattgcttcgttgaacaattgtagctcaatcggtgcacttctaataaaaaaagtaaattttttgtattttttcaaactttttcgagtgcccaaaaattgaagcaaaaattcactcgttccggtggtctctccctccgcccagcaattaatcacagtctaatgacgcatattagcggggctaatcacctgaatggcactttgccacattggtaatctcgcctttcatactgaacagttggacattcgccgttggcatttttcagttttgaaaaattttcaaatttcgtatgttccacgttggcacgtttggacaatgcgatgccaaaatggagaagcacacagccgagaacaatgccattatgaggtggtgggcttatgcttaaaccacttctactactgcttaatcgccgccgcttccaattccaaatttgctcataattttctgtgttctccatttctttcaatgttcttatcacaaagtcgaatttgtttttcactttttgcttaaaattgtcaggattaaatgattgttggcctgagggcaattcaaattgtgcattttggcgtaattcgaccgcaacttggcgtaatgctagaatagaaataaaaaatccgccggcctgactcattgattttcaaaatttttataaaattattcgattaaaaagccagattccggatacctagttaaaaatctcgcctagcccggtctagtttctgtcactaatacatataattaaaattttaattgtgaaaactttaattggctaattagtcgcggtaattatatttccagtgaatgagaaggacggaatgccaaattggcgatattttttgtaggatagactcagcaaattcaggcacagacagacaaacagagagtaatgaacatgaattgtactgatcagtgcactttttactgatcagaaagtgccgccggcgggtggcggaggaggcggcccctgctgctgattctgtccggaagtgccctgctgatgctgcccgaaaatggaattccaatcaagaaaagcgtaaaaagcctcgtactcactttgcaggactgaaattcatataattaaatttgattttaaatttaaatttcacaaataaaaattggaatgcttacctctagtcaaactaatgactctcctttggacattcaaatcgaaggtcgccaacattgccacaaattgaacttgaaactgatcgccggtcaactgatcagcaataagctcatttggttgaaagccaattcctttttgagaatcaaaagcattggccaaatctgagaaatggcttattttaaaataaataaaaacatattattattttacggtttctcaannaaatccnataatatncctccaaaacatattcaattnatatcanataatcacncactttttcaaactnatncatctnacataaatcaaaaattactatcaaaaacataaattaattttaacacattttatttaacaatccttttccttaccattttaatccaataaccatttttaacactaaaaattctaaattcnttaaaatctccnctttctattttagttcttcttctcccttttcttcttcctccncttctttcctctctttctttttcncnnccccnttccccccataaagcgttttttctccctntncttttncccatgncncactttgatgaaaaaatcatagattagatgatgtcatatgacaattat

SEQ ID NO: 7136 - DNA, 1543 bp, Heterodera glycines
caagaaaagcgtaaaaagcctcatactcactttgcaggactgaaattcatataattaaatttgattttaaatttcacaaataaaaattggaatgcttacctctagtcaaactaatgactttcccttggacattcaaatcgaaggtcgccaacattgccacaaattgaacttgaaactgatcgccggtcaactgatcagcaataagctcatttggttgaaagccaattccttttgagcaatcaaaagcattggccaaatctgagaaatggcttattttaaaataaataaaaaacatattattattttacggtttcgcaaggaaatccgataatgtggctccaaaacatatgcaagtgagatcagataatcacgggctttttgaaactgatgcatctgagataaagcaaaaattactatcaaaaacataaattaattttaacacattttgtttagcaatcctttgccgggccattttaatccaataagcatttttaagacgaaaaattcgaaattcgttaaaatgtgaactttcgatttttgttcaacttcagcgtttaggaattggtcgaaatggatgaaatatttgtgattagcgaccccgataaccccatgaaacattttttatgactataattttaaaaatgaaaaaagcttgatgaaaaatcatagattagatgatgtcatatgacaattatgatttcatattcgtgatcagcggccccgataacccccgagaagaaagaataaccgtaaataaacagcctttttattccttttttatgggaccagcagtaaaagtcagtattatccaaaactttgataattaaaaaattttttgggtattattttttccttatacaaaactttaaccttttttaaataggcaatttcccaaataagactcattttcataaattataaagaaaaacggctcccggacatttcgacaatgaccgaccgtatcgacaataaaattaaatacatattttttaaataaaattcaaatttctgctacactggtggaaaaaagtctctactcaagcaatcaaatttgaaaaaattaaaatttcgactagaaaatttaattgttattttttgtttatgtgtttttatttacccctatttatgtgctttttatgcaccacataaatcactctttcatggtgaccaggaaagtcaaaaatggcttgaaattggggaaattttagaaaattcctagggggttaggaaatttttttggaaattttgaataggtcattggatatagcacaaaattcactacagaattgccttatggatggttagaaaaaccatcaaatggaaattttcaacaaaaaactggccataacttttgacaaagtcaactaaattagacatacatggtaacatttgatagccctatgtgtcctctattagcctgcaaaatttcaaaaaatttagtcaggtttcaaaaaaagttatggccaaaaatattcgaaaacctggccacacgtgtacttttggccataactttgctcaaacttgaccaaattttttgaaatta

SEQ ID NO: 7137 - DNA, 2180 bp, Heterodera glycines
  unsure (1)..(2180): unsure at all n locations
aatatctgtcccagcactaataattatttttcgcactgtnnggaaggatctgaaatcacaaaaaanaattctnttaacatgattgacgtcacaattaataaattttaactttaattggaaaaattttgtgcaattcacttgaataattcgcaatttctgatgcataccagggttattgcgaatcgaaaaaaatgcaaaatacgaaaaaacgaaattaaaacaaaatacgaaatgcgaaacacgaaaaggaaacgccataaaatcacgaatttacgaaaatatgaaatgcgaaacacgagatttgtttcatatggattctaatctgatttttttttcgaaaaatgtttaatttaatactaaaacatatttatcaatgtatttccaataaaaaaaacaaaacattgaaaaatcattatgggcacatttcataaattcgagataatgtaccaacgagaaaatcgctgatgatattgggattaacattgacattggcatgcccgtaagagtcttctcgcatcggcgatatcaccacctcgaagtccaacgaaaagtttcaggcgaaaaatcggccatctttgacaatcagttgaggcatacgtgttcaacgcttcacacttgaagtgagaaggcagtacgtaatcaaaatccaattaattcgccttaaaaaccaaaataaatatgaaagaaattaggcttttactttgcgaggacgataaatttacctcaaaaaggtggcgccgactgaaagtgccgtctgcgtacacgtttttcataatacaggtccattgtgaagtcgaagatcgagcaaacaccaaaagccttaatacagaatttagtggaattttaggattttcattttttcacctttgtggacagcgtccaaactgagttgtacagcaggtggcacatattcgtcacggcgaacacgttttataacctaaaataaatgaacaaatcaaattttggcataacaattaggaaaagttgaccttttgtcgcagctttgttcggaaaagcagctaacattggtgttgttgtgttctgcaagacttgcgcacgaattgtagccggcgctttccacgtctcaactgcacgccgttttagctgggtcacacgtcgctgacactccactgttcggcgctcatgtcgcatgtgtggcttccaataattttgaggacattagcattaatgtcaatgtgtaggctgaatttaaaaaatattctttcttttatttttgcatacacctttgcatttgttattaggtccgaaaaactcgcaacgcaaacacttctttgtaggtgaacagaaattttaaagttatagttatatgtatgtatatgctcgacaaaaaatgatattttataaaaagtaattaatttgtgggtgaaaacagctaaccagactaaaccgaccctctgactaaaacggccagactaaacctgccagactaaactgacccggtccgtcgaaacggtcattgtcgaaaaggtattggcgaaacggtcattgttgaaatgtccagccaccgaacaaattttggtcatatcataacccgataaaaaccggtcaaaaaatgccgggttccgggccggattgcattttcaaaaacgccgggttccgggcccggcctctcaaaacccggtcaacccggattttccctaaaatcgccgggcccggtaaaacgcggtagggcttggcgcggctcggtcttagaaaaaacccgtttttaggggtaaatttaaaaaaaatatatataaaatttttcggcgcccccacaaattgtccaagccacgaattgtccaagccacgaattgtccaagccacgaattgtccaagccacgaattgtccaagccacgttttgtccaagccacgaattgtccaaaagagtaaaaacccacgaattgtccaaaagtctaaaaagctcataaaaagccggaaaacgggtctgttttaggcttttcggggtcgctgaatacgaatacgacatttatatagccccttgcctaaccctagatccactcggataagaaaaaatctcatttgtataaaatatgtgctctttttttacttcagatttttcttttcattaattgaacaaatgattcgtaataaacttgaaagtctacaaaaaagtcggaagaagcgttatttgtcagacatttcatacgcaactgaggag

SEQ ID NO: 7138 - DNA, 2786 bp, Heterodera glycines
  unsure (1)..(2786): unsure at all n locations
aatttaaaatctaaaaagcttattaattactacaatgaatgaatgaatcccacaaataagataagcgcaaatgctaaaacaagttccgtaaaattaatcttaagctaaaataaaatttactcacttcaagaaactttctcttatcaaatgggtacattttgcatttgaataaaattattatttttggaaatgcgaatttaaaaattgtttgaaacgaaattgatattatgtttatgcatttataaatagaaattataatgcatattaattctccggaagttatctttttgaacttttgttcattattcgcagttatccccccgtcctccgcttttttcccaacgaagcgccaaatccgatggattaaatgggtgtccagcggagagagcagcaaacccccgccagttacataaattataaacgataaaagttgatgaaattttggccatggccttccaaaaaggaacgaaattatctaatttattgaggaaatttttgcttacagatgcgcgttttcgcatatcttttaaacttacctttttaatgctataaacattttttattatttttaatggcaattattgttttactcaaaaaatttctacagttttatttttacataattcacaatttttcttctattatctttcttttgaatggcgttttacttttgtttcaaacggactttttcttgcattttccttcacctttgcgtgattgactttcctttttttcaatgaaacattctcaaattcacaattttcttatcttttattgtctaattttttcttagttgacaattaataaagcaacaattaaaatttacattttaaattataaaatcttttaatatattgtttaaaaagaagcttcttctctaacaaaacccatgccaaaaaaagacaccggcagtcgcataaattgggcaaaaggcaggcctaaggcacggtgactcactaatgggaaatggaaggggggggggaggaaagaatggcattgggagcgaaagagacctttgaccacgcgggggcacgggatggatgggctgggggacttgcttattccatcaccacaccatatcactaatggggaattatgattaagaaaggaagtaaatgagggtaaatgggcgtaatgggatggatgagtgagccaatggggggcaagcaaaagcggggcggacgacggcggaagtgccggagggacagtgccgtgcggtgcatgcggtggcggtgcttcctccccctccccggcccgtcgtcctttgccattgtcccaaattccctccaaaactccgcctggggctgttttgcctttggtttccgctcgcctttcccttggccaaagtttgagaaatgctcaatttcattgtcaaatgagcaaatttggttccaagagagcttcaattccctgtaaaaacaaagatttttgtataaattctactaaattttattcaaaaaatagtcggtcggcagttggcaattatcttcgaggccctcgaaggcataaatccgaatttttcttacataatattcctctttttttctaggcgaacagttttgcctgtagaaaatgacatgagaattgtgtttgaacagaaaaaaagtttcgatttctaattttaatcaaatttcttttttgtcttcgactttgtttgtgcccaatttgaacgttttatcaaattaggaaatgcttttccattttgacaaactctaaaaattaaaatatttcacttttaaattaacccttcggctttttaatttctcattttttgaattttgtttttgtttccgccccgattgcttcgttttctgttgaaattgtcttttttcaaaaagtgcatttttatgcttttgcttccgcagaaaaaaaaacaaattaaattggaacggcgttgtaaaatgagccgcaaaagcaaatagcagcagcaaatgatgtgtggcggcaccaccgaaaacggcgttccctccccccccccccccgcggggatgaaaaaagagagccgccacagtccaaaacgcattagcaaatcgccagtggcgccaaattccaaaacgtatcctcgcggcggcgccattaacaaagcgaagcgaacaaaatgccaaatttggttgaagacggtgaatgtgatgatgcacacaaagattgccgtccctattccgatacatttattgaaaaaactgatgaaattgatcccctcgtggaataaaaaattccttgaaattttgttccaaaaaaaaattttctttcggagcattttctccatggtttgtctcaattaacaaattaatttcttcgattcgttctccgttaacttttggggatttgcgtagacattttttttgccaagcgttgatccgctgatattaaaaacgcaggggcgtaagcattgaaaaggcttctgagaatgatgagattggccaatttcccttggcatttaaaatattataaaatgaattttatggaaaagaattatttcttcttcattttttgcattgcgaggtccccaaagtcctgcacaaacacaatgccaatgtctatttatttactttttttctgctcgcttcgcaacaaaaacaaaccaaaaatccattcccaagcccaatttgggtgcctttatgcattttgtcacccaaaaagtgaaaatgaaaggcttaaaaggtcattctgtgccacaacgaccaaattgaaaaaaaataaataaaaagctgcctttgttttgttagttttcgtaaaagccgatttatttctcanattttattattttatcccattgggactctaga

SEQ ID NO: 7139 - DNA, 2798 bp, Heterodera glycines
  unsure (1)..(2798): unsure at all n locations
tttctagaaaaaaaataattaaaatttttcaaaaaaccgtagaggggnaccatagacagnattacgaaatggtcgcatctgggttcggggttcgaggctgagacaaaataaggccggattcgtgctcggtgcctaaaattagccccaaaaataattttctcaatttttattaaaaaaattttagggaccaataatctatacctttgcccccatcactttgcttttttgtgctaatgtgcctctattattatgtgccaaatggcgcacccaattcactctaatggtaccaattgagcgttgttttgctttgcttttttcatttgtaaattttaatgccaaacaagccttgacattatgtatgatgaatattcataattgcgaagagaaatttgtaaatgaagatcaatttatgcaattaatttcctgccacagggaaaataacttttgatctttttcatactctgtcaatagtttcgctaagaaatggacatttttggattttaaattattcaaaaaactacattttatttttcaataaattcattcgccgtttcatttactttcggcaaaaaaaatgttggacagttacccgccgtatggtgccgataccgccgcggcatataggcgccggccgagcagtgccaaccattgcagtccaaagatgagcgaagtggtggaggcagtgattacagaaaagtaacacaatttaaagttttaagtgaatttaattcatttaattaacccttcctttttaagagtcagcacaagtcaaagtgccaaaaatgcgcgacgaaattcggcacagccgcgccgttgcaactcacagcggatgcttctgtccactgatcaccgcaaatcattgtgcgcggtgataggaggagcagcaattgcgcaacaattgtcagcaaaaagtgacactgatgaaaatggcaacgacagcgaaaaggacagtgagccgagaaatgccacccaaattggggagccgaacaggtgacagtgccaaaattgaactcagaaatggcaaaatgccttttttaattagtgatgccattaaaaatgcccttttggtagtacctaatttttactcgaaaatggcttaaagccttttgattgttcaaaatattttcttttaaaaatcatataaattgcatttttcaaaattaacaattatcatttgtttaattttcttatcaatacatttcttatcattcagcgtaattacataataggcacaagagaaggagcttcttttaacccctaatgatcccgtgcctttctttcctaattatagcatttatcttaaactctaattttatttctgtttttattcatatggcaaatatcatttttttgtttaattattaatatgaaattttctctcaaattttcctttgttgactttgtgatgccaaattcgccacttcatcatttgaattaatttgtcgggtgggtgacgaaaggacggggggggggcggtgccgaaaaactaattgaattattagttagtgccaaaatatgctgccaaaatatgccagcaaacaggcgatgatgatgatgatgctgctgacattcttcctccccttgttatagacccacggtggaacgaagtcagtcccaactgagtcagccgagtggcacgcgcgcgttggaacaccaattgcacgaaacggcaccccatcgacggtcgaggtgagaaaaacaaatgtctaattaatgcactaatgagccacagatttttaaataaattaattaattcatcctaaaaatggctgtatttttaggcgttcttatgacgttaatgctcagcgacgttccccgccaatgaatggcgtcgcaatgggcggcacggccggcagcaccgacccaacggcacatccgcagactcagctgaccttggtgctgatgggagcacctcgggtcagtcaagttattataaaatgcaataaaattcaattaaagactggaaattctttgaaaagtgacattttggtaaagcggggacggtccaagaagcatttctgcttggaatgggtgccatccccggacgacaatttttttttgctcttcagagcagccaaaaattttttgctctattttccatcaaattttgaggaagagggggtcccgcagtgccaataggctgcagtgagagaattttttgaaaatttggtgttgcgttttgttaaaaaaattttcaaaaatcaatttttcataaaattaattaaagtgtgtcttgaaggggctaccatcatgaaaaaggcaaaattttcaatacgaatgccttttttcattaaataaatttttattttatgcggtgtctaagcaaaagaaaatgaaattttgtataacttttattatcattattttgatttacttattttcattttcttatctgatcaggttggaaagtctgcacttgtcaaccaatttctgtgggagggctttctgcacgactaccgtcctacggtggaggagttcaactgggtggagtacggtagcgacgagccgaacagtccgcaactgttacttcaactgatcgattcgtcagggagccgcgactttttggccatgcgccacctctattaccgtataggcgatgcgtttatggtaatttgttgattaaataggtatttggttaatggatttaaataatttcatttttaggtcgtttattcggtcaatgacccgaacagttttgccgaggcacagataatgcttcgcgaaattgagcaattaaattccaaaaaagtgggatcaattttgttaattaattaattatttttgcaaaanttaattat

SEQ ID NO: 7140 - DNA, 2786 bp, Heterodera glycines
  unsure (1)..(2786): unsure at all n locations
gggggggggggggggggggagggacaacncgatatcctggtccaatggtcgccaaagtgccgatgaaaaagataagtgccaatgccaacaacggacaatttgtgtttttcccttttttttcgccgcccgtctctgtcgatgataggggtcaccagtaaaacggcaacaacagaagtgagtccactgccccacagctcacacccattcgccaatccgatccctcccaaaaataatcgtcgaatgttcggatgaatcatcgtccgacggcgggcggcgggtcaccggtccaatgaatgggttcactcactcaaatattcgccattttatacgttacattacccccattcccacaccctttctatccgagcaaatgagtggggcgggggagaggggagggaggggtctcccatatgtgaaaagaaaaaagatccccctccccggacccgcataatcattatctctttggcatgaacagtgccgggtcaatgattgctccctccattcaaatattgcacgcgaacgcctccaatttatcatttacggcaaaacgataaaactatgccgataattaaaagtgagaattgtcagtatatcaaatttctttttgatttttccagcgtattgagagaataaagtgcatagttatcaataaaatattaattaccccctcgccccttctttacaagcgacgtccgattataaaatttaaatagattttgggtgagaaaaaaacctttcatggcttaatactagcatatttttatttccatatattttcaaaaaatgaataaagaataacaaaaatttttatttttaaaatgagtgaactcataagggaattttatggctattaaaattaaccaattaaaataataattggtatttacttagggtgtaacataagtttccgcacaactttttttaaagaatttttttatgaatataaatttaaaaaaccacaatcatgatccgaaatatctgacattattattgagaatgagtttgctatttatcgggcaagggataaatcccattagaaaagtatttaaggagttagagttgataatgtaaaaatggtcattttcgaggtatgtatttttgatggctgatttaaagaaaatgaaaagagatacagaggcagagaaaacgtgagtaaatagagcaaagttaggactataaaaaattataagaaaaaaattttattacttcaaaaatgaattattggagggccgagtctaaaaatggtctccaaaaaacggcatttttcaagaccatcaaataacaaaatgttttaaaagtggttttggaaattccgaatttaccacgctgagtccgaatatggctttagatttggtctctgggttctcaacaaacctgtacagctccaacttcatgcatggagttggagcagtacaagctcagggttaaaagataggtcagatttaaggccatattcggattctactggtctaatttgtacagaaaaccttctttttttgttatatcaggttacttttttgaccataaaaaaatcgagaaaaattagtgggccaattttcaatttttgcatggtcgggaaaaaatactaaaaaattgaataagcaaataaaaaatgaaacaatggcatgaaatgaaagaagactttctgacgaacaaaattaaaaaagaattattaaaataactgcagaaattacggagttatgaatttttgaatttgtcaaaaaaaattgtgcggaaacttatgttacaccctaagtaattgaattcctttatgagattggaatttaagcccgagggcagaaatgaaagaacgaataaatttcacacacatttgctgatgaagtattttgaacagcccgcactggccataatttggtaaattaaaaaaaaatatttgactgttttcattttaaaaaaataaaaggtatttcctccatgatctttttttttgattgatcagtgcaaaggctgttcaaaagttcaaaaatgtgaaaaagtgataaaaagagacaaagttgatgatcaattattaattatgaagagatgtacaataaataatccaataattctgattagagaagtgacccgtgtttattttgacaagaaaaagaagaaaggtacggtatacttgcagcaatggtatgctgagtacggtagtacaactgcaactgcccaaagtctacaacaaaaagaggctgtccaacaattgaaagtattaagagcaaatttggaagaatgttcccaatttgggcgtatccaaatttggcagttttccaagaagtccaacacttcatctttccaagtacatattgctccgatttgtcgttctctttttattctccgagtactgctccaactcgtcgtcattcagtctctttccctttccgtcatacgtcgtgcattttggccccctctttgtgaaccatgaaattgtcccacaatttcttggccaaatcgtagcaggccaattcgcccgcgtgcgtggccaccattcgcagcagaaaaacgccgtcctgacgaagaaaatggaaaacaaagcgccgcagagactgcgagtcgaccattttgtacccttcgatgcccgtcaaatatttgccgacaaaattaagttgccttaacaaaaatggaaaatgaaaatggcataattttgatggaattttggtattaaattgaaattgtttttgattnttattcaaaattctcaactgactgaccggcttggcataacggagatgaaaatcaatagaaaagtgagcaaaccgtggcagcggcaagcaaaagtacca

SEQ ID NO: 7141 - DNA, 473 bp, Heterodera glycines
tcataactttttgtagaagcatccaaattaaacaatcttaggcagcctaagtttcctctattttcctataaaatttcaaaaaatttggttgtgtttcaaaaaagttgtggcttgtaaatttcataaattgatttggtaaacctttttgaccacaacttctttgaaactaaacgaaattttttgaaattttacaggcaaatagaggctacttaggactatcaaatgataccaagattgtttaatttggatgcttctacaaaaagttatggtgaatgaaatttatcaaaatattacatggtagtgtctttttttgtggtcgtgtaagctgaaacagaacccaatatagttattattattattagtttattattcaattataaatttaaataattaattaatcattagaataactcttccgtactgaaatgaccccatccctctgaaagtaaaacactgatatttttgtcagttcg

SEQ ID NO: 7142 - DNA, 1686 bp, Heterodera glycines
tcattcagaggcagaaaataggtgctctgaattccatttaaatagccatcttatgctattcaattatttgctacctgtacaaaacagtaattctccgtgtactgctccatcggctcggtgaaagtggcgggcacccaacattgaatggggttgcctaatgagggcaattacaaaaaatcattaaaagcgaagagtaaccaaccaaccgaggtattctttggaggagacgagaatggcgaaaactgaaaatgaacccaataataatttaacaattacaaaataggcgatgcttttaatgtcttcccattttatatttattttcctattaattaccctctaatatttcatttttttctccatttcccttttcaacgcaataaaacactttctccatttccctcagttttctgctaatgacgagttcgtgtgatcttttcagcaaaagcttttatttgtattgcccgggcgatgcttttgctcatttcctatggccaacaaataagttgcttcatccctctgcttcatccccccccaattcattagccttccgtccgtcggttgtcgccctactcaaacattctcctctccctcaccattcattcacaatgctcttttccatgcctatgatgggacacgctccttaagggcttcagttggtgtgacccacccaattccgttgggaatgaatccgaattaattagcgggggggggggaaacgatggcatgaattgggtagctgaaaatggcacatcaatgtgttatgacaaaaattatataatgtaaaataacattactgacttatagggtgtattcaccggtaaaatggtaattaagcgcttattgtgccttttggcaatttgacactttttgacaatgattttgtgctaattttcccctcaaaagtccattttacgctctttttacccctcccgcgcacaattaccaattataattgccgttgtgtaataataattcaatttgtcgattatgtcgtcgtccacatggaattggatggactttaccgcactggcgaaatagtacaacaacatgttggggctgcccttcttcgccagctttgcactgtcgatgcacgacgacggactccgacggtgcggcgaggcctaagccgtggggacaatgtgacggagggggggggaaggcacggcacaatgcaaacgaagccgaaatggaagcggaggagcaatcaaaatcaccagcggacgacgaaagggcaaacggaaattagggaaaagggggatcaattaaaggcatcttcaaattagaaattcaattattaaattaagcataatcaattggaaatatttctatttaaaacaattgtgataatttaaaaataaaaaacaaattgacataaatacaaataaataacaaaagaccaaaattgcgctaaatgaaaatggctgagctgctaaatccccacgtcccttaaaaatggaaaagcatttaatcaatttagaaatggttaaatgataagcgattactttccccacccaatgatttttaaatggcaaatgccttttgtgcggtgtctgtcgccagctgcgaccgaaatttcaaagaatttcaataaaaaagacctttgtagtttcccggaaatcacctcaaatgaatgctttgctttgtaccgttccaattcctcagcttctcttttttttgtccgtttgt

SEQ ID NO: 7143 - DNA, 800 bp, Heterodera glycines
ggaaggttgtgtagggtggggtgcggttgttttgtgatattgcgtgttaataattaattatagtgagaaaaatggcaagcttttaaatgatgtaagaattgttgggtagggaagccgaagagaacaaaaagaggcgatcgacccaaaggcaattaaaaaaggcattggcattttgaaaaaaaatatatttccacttttttagggcctaaagttcgttaggcaaacccatactaaaaaagtgatgacaatgtgtagttttgctcagatttccgcctcagttccaccggcaaaataacgtgtgttaatgtattattcggtgtatgcccccggggaaaagacaaattggcactttgtttggtttgcccgccaccttcgccggcattggcattgtgccgttgtcggcggtgggcgctgaccgtcgccttggcacacaaaatgcaaccaaagcaaaagcactttgaaggtgttgggccaagcaaattgtgaagccgtggaaaagttgcgaaattgtatttttatattttcaatggaaaaagtaaaaattaatactaatcattgggcaattaatacccaaaaaataatttaatgagtgttttcattgatttaaatttgagttcttactttttggtcgagtaagctgagatgagacttaaaagaaaggccaaaattgcaattcaacaaatgccaaaaacttaaatgagtgagtgaatgagtgactctgactttgtgttttgtgccgacggaaaaagtcggcggttcagcggatggcatccgttgcattttatttgttcggtttgtct

SEQ ID NO: 7144 - DNA, 741 bp, Heterodera glycines
acagtcgtaatattcggtatttaccttatcctccaggccttgttttctgcgctcgtcaaaaatgtcgtagtaaactttccctggaaaaaaacatttgcgtaataacacgccaaaaagttttatattaataacaattttactcttgattgatcaatcaacgctttcttaccggaacagaagacgagtcgctccacggccgccgggttgttgctggcactgccctcctcggggatggcacggcgaaacgatgtgccgggcaaaaagtcgtccaccggcgatttggccaacggatggcggagcagagactggaaattttaattaatcaatttcaaaaaagcgttagaaataacaaaaatcactcaaataaatggattttaattaaacaaaaaatgtttttttttaaatttctttttatgcacacgcactttgggcgtgaacacaatcaacggcttgcggaatggcgaatgaatttgccgacgcaacagatggaagaagttggccggtgttgtgcagttggccacaatccaattggtctcgttcagctgacgggccacaaatgcctcgtccaaagcgacactctgaatttttttttaaacttttcgttaaattccatttttcacaccttcaagtcgatgccatcgtcttcgttgcacatttgcaggaaacgctctgaaatgtttttttaattggaggaaatttgtggacaatgtttttgtattccttaaaacagtgctaattgtg

SEQ ID NO: 7145 - DNA, 2946 bp, Heterodera glycines
aggtacagaaatggactgaccaatggagttgttggttgaccacggagtagccatactcgaagcctagcacagcgtacttagtcaacggcgaattgcacaccgtgtactccgcttgggtctggcatagaaaaaagtttaatgagaaaacaatgtccggaaccaacctcggaaaggtcgttgagagggttgtacgttttttggtcaatcagctgatcatggagcgcatgatggcgatgggagaaggcgccacgctcaacatcctgaccagacaaccgcacgtgaattcctggcacaatttaagtcggaatttaccccaaaaagaacccaataaaaacacaccttccatcaacaacgacccgaacgccaacgactcgccaatggaccagtccaaattgttttcgctcagcatttcttttcggcctacaaaaaaaaatgctgaatttgagcccaccaacatacctttgagcagtcggagcagtctcgggtacaggttgaacccgtcgggcacttgcgagattttgttcacaatgtgctccagcgagtcgcgctcaatgccggtgggcaacaattgggatgggattttgccgtcgtacaacggcgtgtccgaccagttccggttgcacagctcggtcacctgcttggcactctcgtgcgctttctccagaatggcgccgtagttcttcaattctttgtccacatattcctggggcaatatgaattttttgattcaaatatatgggaaccctcacaatcaaagagttatgtaccaggattttgggttggagttttagggggagttaaaaaaaatttacgagttggccaacgggtttcaccctcccctcgtgaggagtccaagggggtataattaggaatcacaaatttttaaactaaatttataaaagacaagtatgtcaaactgggcattttcgagtgtgaaaaggccaccaaacccggaaaagtgtccaatccaatttggccctgataaaaatcgaattttccctaagaaaaattaaaaacacagtgaaatgccaataatgtgcctggtcagcgatgccttccgccaaaatcttctcctggtactggtccaacaacggctttgtctgtcgaatgcgctggtacatcaacggctgcatgaacatcggcatgtccaattcgttgtgcccgtgacgaaggtagcacaccaagtcaatgatcacgtccttcttgaactcctttgcgccactgggccgcaacatcgcacacctacggaatttttttaaggatacaaatcaactcgaaaatttaataaagcaaaaacatttgaaatagatcgcaaagaaattcagtgaaaaatttttaaaaaatttcaaaaaatgagatttgtggtttgtggagccataaaagggaggctcttaagcagttcacttctcataattgtttattagtgtaataatcccaaaaatattattttctgaaatgcttcttacacgcatcaccgcctccgggtcgtccgcattgacatggaagatcggaatgcgcatgactcggccgacatccgtgcagtagggcgaagagcgcgaggcgcgcgggtccgtggcgaagccgatttggttgttgaccacaatgtgaatggtgccgtcgatggaatagtggggcaggtctttgaggttgaacgtctccatcaccaggttctggccggagaaggaggcgtcaccgtgaagcaccagcgccttttttggggaagggaggggaaattggcgatggcgacaatgaatttaaaggatttcaatataaaaaattcaaatcaatacgaaactaaaaatgattttaaaagttaataacgatttttttaaaacttacaatttttccgaaaatgtttaagatattcaatacggtcagatttctataacctattggatttgctaatgaacagtccaaattttatcagtctaaattcataatcaaagaaaaattggcgaaaattcaaaaaattcgcatttttgttgaagaaattttctacacaaaagacaattgctaatcaaactcaccatgtgacggtcacagtgcaaatcgttgctgtaaaatgcctcagcacggactttgccctgaacaaccgggtcgacagctaaacaatttataaattttcgtcgaaaatccaaattttcaatgcctaaccctccaaatatgacgaatttgcaaccaacgcaattttgatcatgcgctgcgattggcgattcagccgttcaatgcacacgcccaaatggtatttgacatcgcgggagccctcgtccattagcttcaacgtgttgaacagggccaaaacggtgctcaacggttgctggcacacattggcgagcacattcagacgaccacgatgcggcatgccaaggctggaagggatttttgttttatatgaataatttttggaaaattatttgttttatagttaattgaatctttatagtcaattaaatcacgacaaataaatgcttgatattttataaaaaaatttttaccgaattttagacaaaatgtgttttttgttcttaatttaagggaaaaaagacagaaaagaggtggagggggggggggggggtcgccggcgaagggaaaaagagaggcaattttcttaacaaaatatccctcccaaaaaactcacacaatgttgttaacaccgagctcgtgcgagcagtcgatgacctgttcgatggccggcaccaacacttcgcaaccctcgagaccgaaacgcttttcgctgggccatttcttggccaaaaagtcctcaaactttgtggagcggatcagccgttcgaaaagcacctaaaatgggggaccaatttttaaattattccattttttcacccacttttttctgctcccgtggtaattctgtgacttcgggcgcctcaaaatggtttcggatccaatcctgctgctcgtcgtttgtcaaatgcatgtactcaacgc

SEQ ID NO: 7146 - DNA, 2509 bp, Heterodera glycines
ttgctaatgaaaaaaagagggtatattaggatgacaaatatatatatatatatgtttcagtatgttatacaattcaatacacaaatatgcatacgatcaaatattaaagttcatcggcaaatttacaatgaatatatttcatccacaatatattttcatcttccgcttggattgcgcatgacttccttctcatccctcctcattcgttttgccatcagttcggcgagcagtgcgggtcaaaaaattgttgaaaattaaaatttcaataaaaaaacgaaaaatcctcaaaaactctacccaatgtcgctgtcctggatgttgatgcacagcatagtgtccaaagtatggtttgcgtcccactcccacttcgccactgtgcgccgatccgtgccgctccgctggcgtacaaccacagcctccacgggcacacgccaacgcagcgtcagccactcgcccgttcgttcattctcccgctcaacgacctcgatgttgcgacgcgatgcccgatgacaaacgacgacgtagttgaccgcaatggcactcggcgcttcgaaatactggaaaaattgaaaaaattacaacaaaaaaaaaattggaatcggaaaaacgcaaaaaaaaaaaaaaatttccgaccgaccgttcgcaggctcgacgtgagcgtagaccaatgcgcgcgtcgccacttgcgaatagtcaaaattttcggactgccatctgggagtggtgtgtgcagccatcgtaacagttgatgcttcggcttctcattgaaagtaacttccaggtcgacgcacctgtgcgaaaaatgggggaaatttttgaaaatttgcaaaaaaatttcgccacgaccaaatgtagatggcacggaagccaatcacgccgtttggtgcagaacacttggcaagcggcagtggcttcatcaacgggtggtcgtccataacggtgacagtcgccgtgccgccccagtcccatccgcttggtgcccgatgaatacccagctcgcccagcttccatttgcgcagtttgaaatgcgtggccaccagcctgccgaagcgcgcgtcgatcagtgcaaaacttcgtgcccacctcagtgcggtcaatccaaaacagagtgtccagccaaacgtcgtttgccatgcggctactgaaaatagaaaatccgaactgttgatgcatagcagtgtccaatattcgatttgcctcccacttccacttcgccactgtgcgctgatcagtgccgttccgctggcgtacaatcacggcatgtgcagtgacttgcgcattcggcgtcagccgctcgtccgtctcttcattctcccgttccatcttctggaagttggtattgcatgcaatgtgacaaatgacgaggaagttgacagggacggcactcggagcgatgaaaaactgaaaattgattgaaattcaaaaaaaaatggaatcaaaaaatgcaaatatacggttttacgcgtcccatgaatgactatcatcctcagtttctttgggcatatcttttttcatacttggtcaatgcctatattcttggtatcaaacgaaagcttaaagtctacagaagcttttgtataactaaattctcggctaaaagcaatagacaaaaaattattcttgaaaatactcgaaaaaccttgaatttcatgttttctcattgtaatttattttctaatgcaagtaattgctgttttcttggatttataagatcccgagagttcaagcttttgattggtaccaagaatataagcattgaccaattaagaaaaaagttatggcctaagaaactgtggatggcatgggacgcgtaaaatcgattagaaaaatgaaaaaaatggaagcaaaaaatgccgtaaaatctttcggaccgtgatcaagcttggcatgaacgaagcccattgcggtttgcgccacttgcgaatggtcacaattttcggacggccatccttgcgcggtgtgtgcagccagcggaacaggttgtgcttcggcttctcatcgaactcgtccggcgggttgagcagggcattgatgtgcacagcgctgggcggcggtcggatggggaacatgtgcgtattggtgatggcacgaaggttagcacagtcgaacagcacattgggcgacacatggcgaggcaacgtgcagcgtggtgccggcgtgcgcgatcagtggccaattgcgttgggacatcagtgcccagcagcggacatccttcgaatggatggtgaactgcaaagcggtgccgaggttgatgacacgttgcaggcactgcagaaatgcgatcatttccagggcgacgtaactgtgtgaaaattgggggaaattttaaaatttgcaaatttattcgccaagaccaaaagtgtagatggcacggaagccaatcagacaagtggcaagcagaagtcgattcatcaacgggtggtcccataacggtgacagccgccgttccgcccctgtcccatccgcttggtgcacgatgaacgcccaactcgcccagcctccacttgcg

SEQ ID NO: 7147 - DNA, 2334 bp, Heterodera glycines
  unsure (1)..(2334): unsure at all n locations
ccttcccttggatgatatggcacattatcagagccatacagctcgttaatgtgccataaaatgcgctttttttcataattgatggataaatcaggcagaacaaatgtgcgattgttcataagccatgactcagcatacaggcacacgaagtacccacaactattaccatcgtgttggaccgtcagattttcgacatcaacaatccctgtcaacactgctgacggcaaaatatccgaaatgatatttttaattttatccgtcagttgcggatccaacctgccatatgtggtaggcaaagaatcggcaaaatgagtgccaaattgcacatcatggacaatgagagtccaatgtccagggaaatgtactggcaaaagtataacttctgccggaacattagggtcgtacccaaatgtcatatttttgtaaggcatgactctgtccaggccattgctccataccattgggtcaacaacgaccacttttcgttgtgatatggttgccaagtatgccaagtatgtggcagcaaagccgtcattgagaaactgggtcatatcattccaacaggtctcaatgtatcttgggccagatcttggggcaatcggtgtttcgccatcacgttcgtaaaggccgattgctgcccatttccaaattttacaggcaaaatttcgcgatgtggcgaaattaatttgcacagagctgaaatcaattttttcaaacacaatgtgcgagggtgccggacttagagcgttttccacactttggtccatttcagagcatttgctcatagactcgttggttttgcctcttcctttaccggcatgccctcccagttgcttaactggtcgccctccacgactttgagtcgaaacaggcgttgaagcaatagcttcatttgcaaacgtgggtttgtcacactcagtgacctttcccctttttttgcacggcgaaccttggtcactttgggtgacagcagttcgaggtgtgccaattgaggacacagtttcttgcgttgccaaaattggcttcgctcctgctttcaagggtcttcccctttttttacttccaatggaagaagcaggcgtgcttatttgcaaagcacttaaacttggggtggtggtgccccggagagatgctgatgcctcaccattcccatctgcactcccgactgagacgggtgaggtatcccgactgacagatttctccgtccgccgctgataacgctcttgctcattttttcgcaaatttcgttgcttagaaggcatctgaaacaacaaatcagaaaagtttgcaaatgtggcaaaaatatgaggtaattaaccaataaatgcacacagacgttaaaactttattaacaaaaatgcacaaataaagatcaaagacatcattcttcgccgtgaagtgtagtcgtcctgtgctgaaatccatcagccagggctcacacatcccattaagaatgcagatccaaaagttggtgcgacacgttccacgaagggatgtcagcgaaccgcttaggtgcgactcatgccagtctgcgaaccacattggtgcgacaatgctccgaagggcctgtctgcgaaccacattggtgcgacaatgcccgtagggcctgtctgcgaaccacattggtgcgacaatgccccgaagggtctgtctgcgaaccacattggtgcgacaatgccccgaagggcctgtctgcgaaccacattggtgcgactatgccccgaagggcctgtctgcgaaccacattggtgcgactatggcccgaagggcctgtctgcgaaccacattggtgcgacaatgccccgaagggcctgtctgcgaaccgctttggtgcgacacatgccccgaagagccagtcagcgaaccgctttggtgcgacacatgccccgaagggccagtcagcgaaccgctttggtgcgacaaatgccccgaagggcatgtcagcgaaccgctttggtgcgacacatgccccgaagggccagtcagcgaaccgctttggtgcgacaaatgccccgaagggcatgtcagcgaaccacatatattgtcctttgtttgttccattctctgaatagccaggggcagggaactcctaacgacagacgctttgctgttgatcggaggacaatcccaccgtagccaacctcctgtttacaaaatgggaccttcgaacaattagcattgctaagtaatcaaagaacaatcctttttgcaaacattcagctgggatacaaggccagaaaaaggcgcttccattgggcagcccagccacatgcatcgcaaaggcgagtgcaagtctgagcttgatttccatacagtcttnagcagattgtatgt

SEQ ID NO: 7148 - DNA, 3368 bp, Heterodera glycines
ccttgaaaaaattcaatttttgaattttttttaatttttgttgcgagattttgtcccggcgagatttcggcggcgaattttggggtttacccatattatggaattatttcaattttctgtaatttatacgtaaaaattatgtaacagtaaaacactaaaaaacctgacactaacaaaaataaataaataaattatgaattcggaaaaaattttaattcgcgcaatttttggaatctataaaaattatgtgcatataaactccttaaaaatgagtctaatttgaacttaaaaacccatcacatgcttaatgatcaccatttttgttgttttgtccgtcactcattgtcagaagacggcccatttgtgatgctttgttccgcttcttgttcttctgttggtggtggcggagaaaatggccttaattaatcgcaatttaattatttcagtaaaaccaaatccctttttatgttttctttgctttggcaagtgtcagcttttcctttgtctattcgttcacaaatcaattggaactatttgcattgacggcgcatgtacagaaaaataattttgtaactgacgaaagaaatggtggtggcaccaaaccccccaccattagagtttttacacatttttgaaaatagttaaatttctaaacaatttaaacaaaaaaaatcagtaatttgccgaaaatatgggccacctcttgaaactgttgacccaatcagggttcctttgttcgttcaaaaacgcaattgcttgggttggccatctttgatcgatgagaattgacggtgaaatgagacgacgcaaatagtccaacgaccaccatcgacaaagcccaagtggcgaatgtttgacacaaaaattggctatatttcacgagcaaaaatgtcccaaatcggctggcgaatccacaaatgtaattcagtgcctcttttgtcgaaaatttggtgatttgaacgaagaaagccatgacagagtgatcaatgtacctaaaatggatggaatgcttttattcccatataaaagtttctttggctcttgtggagtttaggcccaatactgtaaatttagttgaaaacgaaatttgatttttaccaaatttgagtttggggttcgaaatgagtcgaaacggaaattcagagcgaattttgttggacaacggatggtcgggcaatggaaatggcacagaattgacagcgccgataatcacaaataattccgataatcacaaataattgtggtgccgttgttctgacactgaccttgcgacgaatttcgattgctctccaaattgtcaattcgctctcgtcatcaacatgtttgtccacaaacgcattgaaacgtggcgaaagcaatgccaatttgaggccgagttgaagacggtcaaaaaaggaaatgttcatcaaatgtcgttgcacaacgcgcatctgaaattgtgaaaaaataaaaaattgttgaaaaatttcaaagaaaaatgttcacgttttttggtctaaaaatgatttaaattatcgtttaattaagcactgatggatgctttcagttcgttactatgatttaaacaaaattaacaaatatgtgaaaaccgaaaaattttaatttcttttcttttttgcccataataacttttccactgacaaaaaagttgagttaatcaataacgcacaccatttcaaacatgaaaatgtgaataaacagatggagtataaaaaaaatacaaattatggacaaaaaatttatcgaaaggataaaaacatatttaaataagagtttaaacattaaaaatttattgacaattttcatatttaaatgattaatttaaaattaataagatgaaataaataatccaaaaatacatagaaaataaataatatacatcgtccggatttgaactttacaacagtgattagaataggtataaaagtgattagatgaggtataacagtgattaatttgaaatgtacatgaattatatatacatttaattgaaattaattttttgacaaattctaattaaaaaacaaatgaattctttaatttaaaaagaaataaataatcaattttaaatgtcaaacatttattcatcacaaaaaaaaaattttaattcaaaatttaaaaatttttgtattattaataaaacaaaaaactattttcaattaaataaaagcatttaactactcacttttacaaaaaaaaagtcaaaaaaacttgccgaaattggaattgtcatcaaaatgtttgtccaccagagctcattgaaacgttgcaaaagcagtgccaatttgaggccgagttgagaacattcaaaaaaggggaaaatgtccaaccaaacattgttgcgcgattgctgaaaatgttacgaaaaatcttctaattgcaaaaaacaaaaaaaaagcaaaaaaactaaaaatgggcactttacaacaaaaaaataaatttgaaaaaattttattttcaggggttttgcagtgattactgatcaaacacgtaaccaaaaaataagggtcttgaatttgccgagttttattaagtttattttagtgattaaaagaggtacaaaaatgatttgaagaggtacaatattgattagaagaggtacaataaatggtagaagaggtaaaatagtgattagaagaggtacaatttgtaaattcattaaattaaaatgaaaatattttttaacaaatttaattaaaaaatacatgaaattctatcaattaaaaaataattaatttaaacttataaaatgtattcatcaaaaaaaaaattaatttaaatataattttttatttattaactcaacaaaatattttaaattaattaaaatcattgaaaataacgtaaaaatgcacagaaaaataatgttacaccgtccggactcgaactttgcccccccccaaaaatgatgcctcagaatccccaatcacacagggattctgaggtcttgactatgtcaaaagtaaaatctgatcacgtattcgtgatcagcggcccaaataacccctaaagacatgtttttggaagatttttggtgaaaaaatttttcaactcaaaaatcctatgctcacccctttggtcccgaatctcaaactcacttttatttttataaaaattcttaaaaaagtgataaaaatgccaaataaaatttatataatagagcaaaaaactgcggatttttgtagtattttatttttccagaatatcttttcagaaccgagttatgaatttttttctgaaaattcgaatttttccagaaattctggaataacttttttccttttttagatagaaattccaaataaagtcaataaaattctcctgatttttctctatttttaaggctttattcgagtaaaattgatcaa

SEQ ID NO: 7149 - DNA, 1408 bp, Heterodera glycines
atttcgcatccctttttcaggtacattgatcactcagttatctcatttctccgctccaataaacatatttgggacgggggcattaaaatggacgtgcgcatgtgcgcggacggggcctttgggatgtttttgcccgtgaaatttggcccatttttgcgtcaaatattcgccatttgcaatttcccgatggttatcatttcgtcagattgtgtcgtcgcatttcgcctacaattttcaccggtctcaacattagtacaatcaattccggtcgcttggcactcgacatttttggtgaaaatgggccaattgcaactgctgaaaaagtgttgtccaaatggttgcacactccgaccaccgacgggcagccgaagcgattgttttgggaagattatactgctggatggagaacaaaagattgggaatcaaagttgaggaaggtcggcacatttatttttaaaaaatttctgggaatataagttgagaaaggtcggcactagggattagagctcggcattttgaaaaaagcctgacccggatttcctggacaaaaatccaggtccaggaaaaattcaggcctggagccaggtcgagctctactagggatgatattttaagctctataaaacaccaaaataggtaggctttaggctctaaaaaaccccaaaactaggctccaaagaatggaaaataggcggggtgtgtaaaatgacaaaatttattcaaaaaagttaaaaaattagggaaaacagtattgagctaaaaaaattttaaaatcaaaattcttgtcaagaaatttttgagaaaatcttaattagttcagttgattcttaggggtgtatttttcgtttttattgcattttttaacaaattttggacaaaacgccaaaataggaaaaaataggctctttcaaatttttttaggctttttacgttctaaaaaaaagcctagaaaataggcattaatacctaactagaaaagtagcaacagcccaaaaaaacatgtttttcgtgcgtttcaggccagggggagctcaggaaaaaataggcttttgcctaaaaaatatcatccctattcgtcggtacatttattttgaaaaatatttcccattgtaaatcactgcttgccaattttgcaaagatccgatggtgatcggaagagtttcggatgtccaatttgcaagagctagccatgtttagaaaacagataggcaagccaaataatacctaactcgagaaaaagttataagccgggtccgttagtcaccgcttttcaaactaatgctagcggaccaggcatatcaagcaaattgcgtttggttgacgatgaaaaaattaacgtgggggggggggggggggtggtccgaaaatttacctccttaaagctccaagagctcgactgagtttttcc

SEQ ID NO: 7150 - DNA, 1637 bp, Heterodera glycines
aattagtgaaaaggcggcgaatcaatgggaagacgaaaatttggacgatttgaatgccgtgagcattgatttgaatgatcacaatttcattgggtgagcaacgacggcatttgctgcgacttttgtcaaatccaataaaaattgtggcactcaatttaggccattatcaccaccaccagcagcagaagaagaagaagcgggtcaaagcaactgaaaggtcggcgggagacaacggccaacccgaaagatatacatacgactccttaagaattctctagtagcctgctacaaaatttcaaaaaatgtagttattaaatttcaaaaatgatgtccaaaaaggttcgaaaaatagaaaaatttacttaacgctattgaatgcaaaatttgcttctttttgagttatgtagctaatgaatatttttaattgttaaaaccgccgaaaacaaattttatatgttattaaaatatattaaaacatcaagccgcttaaactgttgattttccaaaattcccttaggtagtcaaagttacggatcgccaattgatcattggaaaagaaatgaatgaattatttgagaaatgtccgatcgatttaaatgattatttgtcgattttctcctttgatttgacggattttcattcgaaattcatcataaatttctaaaaatattcttatttgttcggataaacagaaatttgcatctgttgtatattttgacattttttgtcgatttttttcttaaatttatcgaaatttttaagcgaaatttggcataaatttcaaaacaaaaaaaaatatgcaattaaatagtaattttggtacttttccgttttgggcctacacctcaaaatttaaaaaaatgtgctgaaggacagctgaagggatactttttgtaccattctcatagcataaattagtgtagcgaacaaggattacatgacattgcgccgcggacattttgtattgttttgttgcattttttaaaatttttaggtgtaggcccaaaacggaaaattactgtaattttctcttgctcaattggcacaaaatgaattgccgatggtaataaaaatttcaaatttttcatttaccctaaattcattttcctcgcatttgagttggatttgcaacgacgtttggatggacattctcccatcttttgaccatgctcaactcggactcaaaatggcactgctttctccacgttttgatgcgttggtggacaaacatttcgatggcaaaagcgaattgacaatttggagaccaatcacaatttgcaaagatgctgttgcagcagtgccgaacttagctgtgcttatcgaccaaggcaattcagacaatttcgtgccatttccattgcccaaccattcgctgcccaacaaaattcgctttaacaacctttggattgagtaatacaaacacaaataaaaagcaattaatttgtcactcacttttcaggtacattgaccattctgtgatcgcttttcttcgtgccaatcaacaaattttcgacaaaggcactcatttgggtttatatgttcgttctgtaaacatctttaatacccagtcaatttgggatgttttggtccgacaaatttggcccatttttgcgccaaacattcgtcatttgggcttt

SEQ ID NO: 7151 - DNA, 3122 bp, Heterodera glycines
attgaggcacatacctggtttgtatccccctttttggtcaaatttttcaaaagcgtaaccagacagtcagacagtgcactatttccttcttttcttccgcatagccactggagaaaggaagaaatagtgcactcccaattagtaccaagttaagtataaaaaacatcgagtgcaactacaacaaaaacttgagcgcttacaatagtccaatttctttgcagcttcaacagcgtgcttctcagttgtcatttgtccaacagtcaattgatcaagtgctgcttcaaggccaattgcccgctcgttctgttgcgattgattacgctttgaagcggtatgaaatgaaaacaaactgattggaacagacattcttaccgatccatggaattatagggtcgaatttaatcaaattatgggtttaaatgttggtgtatatttgttcaaaaattaataatgattgaattaccaaatttcagcgccagcgaactgctgctctctttgcaggcggttgaattagtgatcatttggacaatttgcttcgtctcaatccgtgccatcacttccaccagctacgaaattcaatttcttgatcaagcatcaacattaattgtgccatttgaattgatgaacggacgaaccaacgaaaagctgacactgatcaaagcaaacgaaaataaaccggacaaccggtggataatgaaacggtgccaaattggggagacgaaggcggttcagtgggaggaagaaaattgggaccatttgaacaacatcatcattaatttgttggatgtcttctgcagtgggtgagcaacaacaaaacaaaaagcatttttgttttgtttaaaaaatcaaattgcgcttaatttaggccattgtctccgccagaacaacaacagtgatcactgatgatcagcagaggaaatgaatgaatgaattaattaattgagaaatgatcgatcataattcagcagtgctaataatgtattttataaagaaaagtcgtaaatatgtgtatgttaatgaattggagatataaaaaatggcaaaaaatgatagagataatttttttagttctaaaagttccgcgagatccgcaattttatccccgggaaaatcctcattataaaaaaaatctgcgcaaccccgatcccgctcagctctaggagaaaggtccgcctgttcccaaatcgccagataaattcggatatttcacacagaaatgtcagttattcttacaataaaatctgattttagacgaaaattatttcataacatcatttgtaagacagcaaaatgttcgactggaaaagaaaatgaataatcgaattttgaggaaaatgtaattaattattgattaaaaatttatgaatttaattgtaaaggctctcaaaatatttttcgccgaatttcagttggatttgcagcgatgttttgatggacattctgcccttttttgaccatgcccaactcggcctcaaattggcactgatttcgccacgtttcaacgttttagtggacacgcatttcaatggcaaaagcgaattgaaaattaggaaaccaatgaaaattgaaaacgagaacatagaacaatggtggagaccaacccaaattcacgagaaggacatgggaccaaagcctagactactttccaattggaaaactgttgcatttccatcgtccgaccgtccgctgccgaacaaaattagctttaagtgtcttcaagtcgagtaattaaaaataacagctttatatggcaataaacacatcatcccatccccgtttcagttacattgactagagtagagcgggaccgggaccgggccgggaattcccggtcctccgaggtcccggttcccggtcccgggttttgaaaagctcaggtcccggtcccggtagggcaaccgggaaccgggaaaaacaagcactggtaagaatgggggtctgagtgaaaaattagtgaagaaaattggagtcaaagggaaaaataaaaaataataattaatatattctttaaaagtaacactcaccaagtgtgcaaatggcctaatggctagtctccttgactttcctttcttctttcccatggttcaatccctctacagaaattagattattttcaattttttttgtatactcgtgggtttcctataaagaaaatatgattcctcatagttttttttaaattgatacatattttatcattttttaaatgaaaatcctaccaattgagcttaataatcgcaaaaaccaaccttttttttgttgaaaatctgttaacaaattgcacccaaatttttaaaattcccccccggcggcgcctatcggcaccgccggaccccttctttcccaaaagttttttgaaaaagcgctccgaaaaaaagtgatgtgaaaatcaaatctgaatttctattaatattcgatgatttagtccaaaaatgattaattgtttgaaataattgaagaaaatttgtttgaaaattttcattaatttaatttattaaataaaaaaccaaataattttgtattaatttcacttgatataaattaaaatttgaatttttttttaaatttttaaaatttttttgaatttttaaaatttcccggttggtcccggtttttcttgcggtcccggtcccggtcccgaaaaaaaatcgaggtcacggtcccggcttctcaggtcccggcaagtcccggtcccggttttggcaaaaattaccggtcccgtggcactctagggataaccaattggaaaatgcgccaaaacttgtgatttttgacaggcgttgttccaaaataaagtaaatgttgttgtttgttcgagttcagctgggccttcgtttaagcagtggtttttcaaaaaaggcaattccgattaaagtggggaagggacgaaccgggaaaagcattggaatgaatgggagtgaatccaattgttgcttccacgaaatatgtcaaaaatgccatttaaattttattatttttctcggtggctcgcctattaaaaccatcggattttccttcgcttttgaaattttaaaatgttcaaattctcttttacctgatgaatttaaggtaacaattttgtttattatagtcaatgttttatattttagttttatatgtat

SEQ ID NO: 7152 - DNA, 2886 bp, Heterodera glycines
caccaatatcaaaagcccacttaagcatcccaacgctttctcacacagcgttgcgatgaatctcctaaacggaatgccaagcccttggaaatttcacttagaagcgaaatggacgacaatgtgagggaaaataagtgggtaaagcaattgccaatgaatgctttcttttcagagaaccgtccgattgtcagctgatggacgacccaatggttgaagacaaaagagcgccctttctcgggaggattttgcagttttgcgaagtaagttaattcacaaatgaattcacgcgttttccttcccgggattaaatttttaattataggaaaataagcggaagtactgctccacgacactttgttccacactctgtgactttgtattgtcagctgccaaacaataattctttttttgttgacaaatttactttttaattattaaaaataaatgctgtgtaataatatagtaattgctaggctagatgaaaaagccgaaagtgcgaacaaagtttttttttgaaaaacaaatcgaacatagtcaactcgtatcagaaaatcacagtttttattagaaaagggcacttgcacaaatttcttaagccacggcgatttgatgattagggagggagtgagtatttgtgttggataacatcgccaattgtgtcgactgggaatgacttgcagtcgggcaatgcacggacattctcgatgtaataagcaaagtcttgaccagccattccataggcaatcgaatcgtggggtgaaatgcctcgggagttcagatgctgtctgagatacagcttgaaattctcgtggatttttagcaagatatcctgaaaatatgtcgcctcatacagtagtattctttagaagataccgtcgtcagttcggctggcataacggcggagtaactgctgtaaaatttgccaatttgcatgacaatttgttgaaatgccgccgtgggcactttgccttccaatttccactgaaacattgtaattgtttctgttttttttctcgaaaataacctcctccaatgcccctatcagttctctgtccatcagtcccaacattttgccctttatttcgccctcgtggtcttcaaaatcgcgttgtgtttggtcaaagtatcgtaggagtgtgtgtctgtcggatggcaattgattcagaaatgtttggcgaagtgctgggatgaattgggcgatgaattgcagcgaacgcaatgccaatgcttcggatgttccattttgagcgtaagaccgatttctcccaattcactcacccaaatgcttcacactgatcattttcagtccgaccaattgacgcgcacccgcgcccaaaatcaattggcaagtgcgactgttaaacgccttcaaaatttggacaatgtccatagtcagttccatggaacattgggggaacagaaaaagcaagtcgctgtactgggccaacacgcggagaagcgaagtcgcagagcttaaaagggggggggggaaagtgatggcacgagaaaatggacacaaaaaagacaacagatcgacaagggtgggattaaaacggacccgacaacgatgaagcgtttgctgccgccaaggaccaaatagtcgcggttcccttctctctcgtcatcatcgtcctcgtgctcatcctccacattttcctccacgtcactcaatgcaccgcttagtcggaatttgtcgacaattctctggtaaacgtagggaattcgattcggctgccacggctcagtgtcaattcgttcacttaacggtgcaaaaaaggttggattgattaaaaatgtgtgtgcgaagtcacttgaagaaacgccgttttgcctctgagaatttgctgatgaatttggccgtctgaatggaccgaatgcgtcgcttcgtatcattgagcctttccccgtccctcacttgttgatgaatagtcgcaaaaacgggcgatcggtgagtgccgttaccgtccgccgagaatgacccaccatctttgccttcggctgcaattttattccaacgctctacggcatcggtggccaattggcatattttgtggaaatgcttgggtcggcaatgtttcaacacggtgtcctttgaaagcggaagaataacaggaatatttgggtttattttcagcccactttgtatcgtgccgaaatgagttttgccactctttcttcgctgatctgaatggcatgactgatcagaagagggattgcgattcgcagctgggaaatgtcacggcacggcagcgccaaaccccccaaagttggacacttttgtcgtgttcgatcactttgaacgctttgctggcgatctgttgtcaaaatcagaatccgtcggtcagcccctctttaccctttgcgtcgtccgctgctctttgccctcctatctgttcggtgttgccctccttttgctcacattgcgtgatccaatgggtttcttcagtctggtcgatttggttgggtgcacttgtcgaagtacaaatggaatcacggcgacgtatgaccctctgtctgtaatgatttataaaaagcatttggggggagaggcaactaacggattcagaacttcggtggacgaccgaacacgcggcagggcttttttagcagaagcggtggaaccaccgtcatcaaattggtcagcagccaaagctaccaaattctgaattgtctaaacaaaaaaaatggtcaacggaaggtaatgggactttttgacccccccccccccccgaaattggaaatggcccacccaaaacactgtgacacaaaatggtcagagaatgaaggacagcgagcaaagtcagttcccaatgctcatctgagaggagttcaatttgctcggaaaaggacgacggaccaatgccaatgccaacggcggaattattg

SEQ ID NO: 7153 - DNA, 3093 bp, Heterodera glycines
ataaagatatttttattaattaaatttacaattcttttcattttttttaaaaatattatttattcgttttaaggagcttagcatggaatacgaaagagagggaacaacacccgtttaagaaagcgatgtgtgggaaaggaaatccgcgaatgggccttttggtttatcgtcacttttttggcatgtctcactattaaagatgtggtgaatttggtaaaagattatggcaaaataaagcattgttttcaagaaaattttagatcagagaatacggagaaaaccccaaaaaatcggatatgaatggtaaggacaaaagttgccaacccagaaaactcaatttcccgaataattggctacagaaattaatagaattagtgaatcagttgctactctccattaaaatggtaaaaagaaagaaacatttttagtgcgtttcaacgacacaatgaaagtgccaaatatgacattttgtatgagtcgtgcgcaggcgtggagccatttcaaagtgaatgcgtcagaaggcgaaaaaaagtgggacaaaaaagtgaaagtaagcaaaagaatggagtaaaatgtataaatgccaatcctggcaaggaacaactcggaaaaatgatcggacgcgaagggtttttggcattgccatgggaattggaaatgacgatggagacgtacaatttggtgatggtaaaaaagacaatgcaaattaacaacaattgtcaaagatagccattctgacgagcatggaaagagagacaacagcgaatggcattgccaattcaattcacaaatttcgaaccgaacaaaggctggatgaaatcagaaaactgtcaaaggtaacgcaaagagcaaacagtccgaaattaaataggtaactcagtcaaataactttgtcagttttggtttgccgaaattgggcagagaaacgttacattcgatgactttatgcagaaagttggaaaagagacattggttgttctttcaacaattacagctttattttctgagttttgtagcgaaattccatgcaacgcttccagaggacgagttacgacgaagaagaagtgatcaaaacccaaacaatgatcacttggctttcgcaaatgcaactttggtcagtatcaaagcaaaaaggaaaacaaacaaaaaaaaatcagattattaaacaattaatgacactgccttccaaacttcagtttccagcctgtttttgacatggataattccaaaccgataactgaccaaggtcagttcttcatgttggttttgaaacataatgctgacaaactgaatggacaacaagttgattgcatgagtggtaatgtgtaagaggatgcaatagaaataaacaaatggtttttgagtggatttccacggaaggccaagttcaacgacacggtttatgggaagtaagggaataaccaaagacgggtttacggatgaggttgttactgtcgatgggaattcaaaaagtaaatgtaaactcaaaaaagctatgcattggcatgatgcacgaaataactgtcgaagtgaaggccctttacaaaatgttgccgaacgatgaggaaggaactgcgtgccgtgaattaaccgcgagtgtggacaatcagtgggagggccggaacatcttcaaacagtttctgcaaaatctcagatacgactgtcaccttcgatgtcgaatggaatttattcgtaatttatgtcactgtacgggtccaacactgagttatctgatcaaagacgaagacgaattggccaagtggccgctttgtgattattcaaaatgcgaaactgagtaaactaagaaagcatttgcttaactaacgcattacttccgcagaatctccggacgcaattacagcgatgaagaatgcagcaaaaactgtttcagagattgcgaacagatacgcttcagcgtaacacatgaaaagaagggcaaaagcttacgaccagggaactttcttaacactcactcattacggtgtttttattgactaaacaatttcagaactgacaaccgttgtcctaaactggggctcttttgagtatctgacattggaacaggattgggtttggtctgtgaccacattcatttcggcaatcgggggaagcatcggaatgtggctcggactgtccattttgagtttgatccaggcaattttggattgtcattgctaaacacaagatgaagccgttcaggggagcacttatatgtacggctacgtaacggacaatgtcatgaataagaaacggcatttgtcaatccaacacaacacacgcaaaatgagcagccaaagcgaggagcatgagaacaaactgtcggtgaaccctttggccagtccgttcaaaaaggcatattcggataaaaaacacaataatggcacagtttccagtcaattcagaacagcgcaacagcagaatgaaatgcagacgaacgaaacattcgaaaggcattccccacctgttaattgtgaaggaagaacaccccgaagaagaagccacggaaggagtgagcaaagacatggccaataccaaacaaattgtaagaaaaccaaaaaaaaaataaaacaaataaatgcgaaaatatggaagaaagccgaaatgaaacaaaagattaaacaaaatagtttattgaaattcctttatcattgaaagctgacagaaaagcaatgccggaaatatcaacccacttatttttaactaattttaacagataaaaaaagagattcagatcaaaatcaattgttaaagttaaagtgacaatgccacacgcttttgaatggtccttttaattgtgcaattctttttcctctttgagtgccggtgaataaataatgtatcttccgttctctttgtcaccaacataatttatggccatttgtatgccaatttcgttcggatcgctaaacgcaacgcgagtccgaggcatttcggtgttgccattgagagagaaaagccgacgggacgaatccaacaaaaaattcgcaattcctttgcggcgaagccgcgaatggacccaaatgcgatcgatgccaagaaaagagcctttgaaacgctgaaaaaattcgtagaggcaaaggaaaggacagaaaa

SEQ ID NO: 7154 - DNA, 2517 bp, Heterodera glycines
ttctcccggtgggccgaaaatgcgtggtgccagcaatctcccaacggccgccgcgctggcggtcttgcacattttcggcgtgcggtggacaactgacggtgcaacaacaaatggcgacgcaaagtgaaagtgtcgctgggaaatgggtcggcttccaagaagtccaagctgcacgtgaaaagttcaaaggcgggagggaaagaatgagaaaaaacttttttttgctaaaaacatttcgtcgattttactacgcttttgtttgtattgtatttacataatgaaatgaacgtttaacaagttttgaccatttatcaaaaaggcttgtaaattgatgtttttaagcagtaaaaatttgtcaacaaaatgcaattaaaaagaattgcatacactcttaacagtatttctccccatcttcatcaactcccgtatcatcattcttggccttctttggagggggctcgttttgtccaatcggcgtttcctgttcaacaattggcgccgcgttcgatgtcccaggcgtcagttctgtccaatgactacgtccatcttcaactctttaacagttttacagcgagggattggtcttcgccacgcctgaggtagtgtcaatgattagtgattaaaaggagacaaacttaccgctccggtgcaatcaccgttcattctcagatatgtcggaacataggcaccgctcgctcgcgcaatggcggagtgagaagcttcacgcgtcgctaaatttaatgcatcataacttttatagaagcttcaaattaaaaaattggtataaatctatagctccaaagtcctctattagtgtatattggagttgacaaagccaccaaaattcaccaaattatggtcaaaatgatcagaagtgttttgaagttttctggtcacaacttttttgaaacaagttaattctttggaataaacaagtttgattcacttacacagaagcttacgatccgctggtgacatctcctttttgtactgatccactgcttttttccgggcctcatcttctcttttttcgccctcttcattctcggtgacagtttttccgatgtttgtctaaaatgaatcaaattgtttagttcagaaaatgcactattactttcgcaatttcacgcgccggttccatttttaaattcaaagatttcctaaagacaaatttattaagaaaacccgagaaaaatgttaaaaaaaattgaaccgataaaaacatttcccaaattgaatctcgttctcaagattcagtcctcaaaattttgcgcataaacattctaggtaaatatttttgatatcgaaatgaatcaaagtcgaaaacactggcgcatcttcatattttggcaaaaagtcttgtattaattcaagtttggccagttcggcacggacatttcggcaacacatacctatcttggctttttttttgcaccgtgtgccataacttttttatttttaaatcagtcatttctattttgaaatgtaaatgtaaatatagagcacacatagagctttcaaatgacgccagtgcagtgattccgacataattggaaacataaatcgtggccaaacaattatctaattttccaaaagaaaacgaaatagtaattactttcttcatctccatttttgtgggttttcctcggaatatttccagaattccttgcagtgattccgacataattggaaacataaatcgtggccaaataatgagctaattttccgaaagaaaactaaattagtaattactttcttcttctccatttttgtgggttttcctcggaatatttccagaattccttgcagtgattccgacataattggaaacataaatcgtggccaaacaattatctaaaatttataatcgctttctttatgatgccagatttgctgtttaactgacaaagaaaaacgttgtcactagggatgatatttataggtgctaaaaactgccaaaataggtaagttttaggttctaaaaaacccccaaaataggtgccaaaaagttccgaatttaggggtgtaaaagacaaaatttattcaaaaaagtaaaaaaattaggtcaaatcagtattgagctaaaaaaattttaaaataaattcttgtcaagaaataaataaataaattttggagataaatttttcatttcttaggatttgtttttccaattatgtcggaatcactgcaaggaattgggagtcataaaaacaacactttgggccaaaatataatcgaatggatccgcatggcgtgcgctttttgttgacgtttttaaatttaaatagatgtgggaaagaaccaagccttttcgcgcttaaaaatccgagttatatagtcatgatccgcggattcaatttgccgcggtgcggatcgcgcaaaaaaattgccgcgaattgcgatcgcgcattaccaaaattttccaattttttagtttttttttacttttcttacataaaaattaattaaaagcccgatgtatactaaatttgagacgggactgaagggggggggggg

SEQ ID NO: 7155 - DNA, 5024 bp, Heterodera glycines
  unsure (1)..(5024): unsure at all n locations
aaacaaaaattatttatttaaaattatgggtcgcttaatttaaaaaaaaacaatagaatggtaggggtaatgccacctaaaaaattttggaatttctggccgatttaatgttttccccatttttagtattactatatgtgtccgctttactattcgaatttcaggcaaatactacttcattggacaaccgaacatgcacaacagtcatttacagtaatattacattgtttttccaattggggcatgtgatggacttttagctgaatacgggcattttttttcttaatttgaaaacaatttaagacagttatcggatcagttacgcacagaaaatgaacagcgcactgagtgaaagcatatgggaagcatcaaattgtcatggtaaaatttgagtttaagtgaaagaaatcttgggatttaacatttatggcccaaatcataaattagaaagtgtctcatataataaatctgatgattttaatggattcgtggccagccacccagcaaaaaccttgggttctgattactagataaaaaatgaaattcatgacctaaattctgttccattgtctacggacggatttcaatgaaaacccttaaatattactctaaatgtttatccaattttgcatttattttctttttcggattgccttcgcatcgattggaattttgaacatggtaattccacctttgagttcgacaataaaacggtctttttttgcattttctgcattcttttgcactaattggattcctttttttcagttgcaattcaaaaattacttgtggcaatggcgaaattgtgttgtccaacagaatgaaagttcgatttgtcagggctgccaaaaacaatacgacacacttttcgtattttattggaaaatattttccgatcccaacacttttttctgtattgacgtggacagcgaggtttttctttttgaaatgaaaattattttagagactaattaagccataattattgttcattcagatgaatgacacgatgaaattgtggcaaatcgttttgggctgttccgacattccgatcgaccgaacccaagacacaaccgtaactctgtcattatttcccttttgaccccccccccccccccctcttttgccaggtcctcattttctccgtcactgtgttggccatcgttttgggccttttctacgccggcagttacattcagtcggagcaaatccaagcgaatttgattcattgtgagaccaatggaattttaaaaaacgaattaaaagccctttctcgactgctgaaacttggtcagccatttccattttagattctcgaatgcgagaagcacagccaatcgccgctcggtcgcgtattctctcttcgtccacgttggactcctcaaatttgcactcgaccccaacatcatcactacatttatgagcgaaatggttgatcaatttcctttttgtacattattacttcgtttcttttaacctttttttacaattttttgtatttccctgtactacaaatttaattttttttattttttgaataaattgtttatttttctttcatatccaccaaactaatggagtattttataccaaatgagttcggtttcctttactaattcatctgttttgaaaagaatttccttttaaaatgcccgcccctttggctgttcaacaccaaatgataagcgaagacgggtcggacgcaaacattccccaggtaatccctccattcattcatttaatgcgtaataaatgcaattgggtcaccgaattccgttgcattctgctgaattgcgttctttttaataagaattcattttcctggggccttccgtctctggcatggcataatttcacggcataatcacttaaatgttcgctttctcttctttcagcaacacttttccgccaatggcaccccccagcaaccgccgtccgccactgtccctcccgccgccgcggctgcgcaccttttgaagaattcgctgtccgcccctctgctggccaatttgccgcccgtccctccccaatgcggccccccaaccgtttctttggcattgctcatcgatttcgccatccattggaactaccgacagttcgaaattttgtccgaactgaacagcaaaaagaaggagacggaccggaagatcagcgtggtcgaggcatgttaaaagaaagagaaaaataatagccaaacgcttattaggccaaaaaatacgcaaaaaagggccattggataacgaatgtgtctcgttttctttcacagttcgctcacaacactcgtctgattttcgtgcgtcttctcgccattgtccgttggctgaaaagtgccaaaaaattcgagccgctcgcctccattcgccacttgctcgacgaacaggcgacccgttacgtggagaccgccgatcggttggtggaaattgcgcggaacgaattgccaaatgcgaggtaaagcaaatcattgtcgagaaagggcttataattaatggaattaacgaacgaattcgtaaggttacccgccttccaagtggcacaagcggtcgatgtgctcacgttgggctcctacccgcggctgccacaaaatatcaaagtgagagaagacttactgttcaaatgaactttaaaatgactcacagagctactgaaagtgtgaatttagtcaaagaaaaattcttccgccaaagttctttttaagagaaaaagaatggtcaccttttccaactcttccgattttcagaaactgaatatttaagtttactcaatgctcaattggttcattggttacttaaaatgaggctttgaacatgatttgttcgactttgactatctttcccccacccaaaaaaggaccgttttattccgccacttccgttgggtgcggccgaacggcgcctgacattgcgccaactgaataagttgattgagttccatttggcacaacaagcggcgcaactgtcaccacgaattcgacacattactgtacaaaacggaatggtaatttgcattaattacaatttctgaatttcctaaaaagtgttgccttcttcaataaggcatgtctggtggtccccggagaatttgaaatggagctgactcggctgggcgatgagccgaccacccggtggacccttctgaacatccgaattctcgtggaaagtgccgaagtcggagagggacagcaaatggtccatccgctgcaagtaaagaaagcagcgagaaaataaggcaatttacaacattttaaagatcaatttcctccatcaaatggtgcaggaaaaactcgacacagcaaacgaagtaaattatgggccaatatgtaattaattagacctaattaaagtgggtgtttggatttggcaatgcattcattcattctttcccacaatcattccattcttctagcccattatggcggcttacattgttttgcattggttctgtcgctctctccatttggacattcttttttgtcaggtcgtgttttttcaaatttccataattttttccgttttaggctctccaaattgcgaaaataaaccgaagcggcaaagggagtgagggctcctcgcagcaatacatccgagtggacgagtacaatgagaaggagtgccgtttggcgatcagttattggctgaggagagaggacggcaccattcacggaaggtcggagagtgaatttggtttataaaaacgaacatttaggcattaattggggtgagttgtcgggggggggggggatgcccaaaaaagatatgggctggaaaatgccaaaggatcgaggcaaagtcaaaatgcttaactttttagttggagaggattcatccccaattaaatttctaaaaaattccaggctgtcgtctcattaccgaatgctcatttttggagacaaaaacaattcccatgtcggactgaaaattcgtcaccatccgcccagcacggaattgcccacaattgaccatgaacagaggtgttttctccctcgtttatccattcctcctccccacccttcttcaaattgtttgtttcagtccctccctccaacgattgctcaacgaaactgtccttttccggtgccgagaacgtctcctggcggtcaaacaactgcttgaagcagcttttaggttaattttaagttaataccacagaaatccgttccgttttgtttgaattttcgtttcatttttccatttttatctctcagaactctctcctcccaacccaacacaaaatgtccgtcgtccgcctcgccttcgtccaccaattcggaggacacagcccaacagtttgtccaccaatctggtcactctctgctcacattgagctgtcccctcgtgctaatcggcgactgccatcccgacgaatgtctcaccgtggcagtgaacactttcagcggtgcggtcattgcccgggtggaagtgctcggtcagttggtcacttccttgggacggcctttcctttttctatccctgcctttttcataaacttcaggtcaacgagaggagatccacaagttggagcatcagctgaacacgtgcccaactgtgctcctccactcctccgcctcgtctctgtcggccttttctgtcagttcgattggccgtctgctggcacggctccgcgttctcgtcattggcgaaagactgaacagggcgttggtcggaatgcaggcaacaaaagcactttcaactgactgaatacattcttccgtctgttaattttcaggtgaattcgttgaatgaggcgcaggcacttccgctgatggccaagttgaactctttgccgacagaacgtcgcattttccaatttatccgcgacgaccaattttatttggtgcatcatttaataaaagccatttttttccttcaacattttctcttaggttgtcacttttgcgcctgacgaccaaacgggagtccgtataaattttcaccttttctccgccaacgaaaaccgactgactttgctcgatttggatgcggaacatgttggactgctccccctnaatttgtattttgaacattcat

SEQ ID NO: 7156 - DNA, 4277 bp, Heterodera glycines
  unsure (1)..(4277): unsure at all n locations
aaaaataaaatgtacatagaaaggaaggcacagagaaggagagagagagagagagagagagacagagtctcagttttattatgtttggtgttcatttgtcagctaaaaaatttaaaaaattaaataaaattatataaatttgatgtcgggcctcgacggataaaaggaaaacgctctctccaaaatttagggtgccattgattgagagtggatgaatatttatcccgaattcgccttgcccattttaaatatttattcgtcagctccgagactctttccaacataaataaatgtcacaacatcctcatcaaggtgatttgtggattaaaaagggtatttggaaatttgaaaatccaaaattggactcattgtcagtttatggcacaagtgccggtgccggtggttatccaccgcaacaacaacaacaacaaccacagcagcaacaggcggttgaccaacaacagcagcaatttcttggcgccgcttcagtcgctgctgcagctgcggcccaacaaatgagcaatgtgtgcgagggggggggggaattaaaattaaaattggaaatttaaaattaaattaatttaaatttggctaaagtttacgccgcaacaacagtatgaggtgtggcaacagtattattcccaaattggtgtccaacaccagcagcaacagcagcagcaaacactttcgccattcttgagccattccatccaggttttgacgagaaaagtggggacgggcaaaatggcacaaattaaatggatgttgcaaaaaaaattataatggtgccaaaattgggaggaattcgaattcccggcgagggaggaacactgtttgaaaagtttcgaaatagtcaattgtccgaaaaaaatcaaaaattgatcaaaataaattttttattttgatcctatttgattaaagggaaccagagggagtaattaatcttgtctgattgggaacaatgcaatttttaaaatcatcaaaaataaacaataaagattaaatttgtccaaaagttttattttttataatggtggaaattacctggattatggatttagggataaaatataattagccctaaattgcacattattatcttctccatttactgctagatgaacatatgtgccttgtttcctgcctaatttctttatctttgaccattaaattagaaaattaataggtcattaacaaattatttggcacaaattggtcaaaaacattcttccccatcattagtcgatggccgcccagccgtccacgtcgcttgccatgctgcagcagcaccagcagccggcgcagcaccaaatgctggcacaacagcagcagcagatggcacaacactacggcacttcgcccatggcacctgtggtggtcagcccgagcggaagcggcgcaggcagcagcggaagtgccgggttggcagccgcctcgttggtggtgcagcagcatcagcagtatctgcaacaggctgcactgcttgctcatgttagcacgagttgacttgctgtcgggtggtataagaaagactttaaaattttggaaaaaaatccacgaggggcactcgggattcggagcggtttttccgtaaacttttgggcggattcgggacaataaaaatgtcgggattagagtggaaaccctgcaccctagggaatgggtggaggcgtgggttcaatgcccatccgaggggccgcataatattatttttgcctgtttcagcagcagaatcagcagtaccaccaccaacagcagcagcaacatattcagcagccaagacaagttgcggtcgttcaaccgcaacaacagcaacaacaacaacatcagcagttgcagcaattgcatcagcggacgattggcggtgccaccggcgttggcacttcgactgttgccattggcggcagcccattcatggcatcggcggtccaacaaaatgtaaatatatatggcattttccatgtgaaactaggtcggacatcaccacaagattaagccatggtatcgcacttaacttgggaaaggctcagatttttttggggtgtcgaatcccggatatttctatctcgagaatcacaaataaaaatttttgaacatggattttattttgggcctggacttgaattttttgccaatccatgtccaggaacttcgatgttgctaattgagcaatttgataattaaataaaaggtcgtccatcaatcggcgtttggagttgcccagcaacatccacaacaacaacaacaacagccgcagcaacacgttaagcaggtgcaccagcagcagcagctgatcagccaatcgcatgttcagctgcaacagagtccacaaaagcagcatgaaaagtgggatccgctcaaggagtttggactgcacaaagacgaagttgcgttgaagtcgccgcccagcaatgtttgttctgttgtgccaattgctaattcatgaattggggaacccataaaatttgattaaattgaacgaaaaatcgtcgattaggcgtgtatttatgggctaaaaagccatggaaaatatttaagtgataaagccatttaaatcggaattacatttaagattagtccctgatgactgacaaggatagttgtgaaattaaaaaaaaacacaaaaaaatttaaataatttatgaaataaatgacgaaaaattatttaaaattttaaattgtgaattaatattttagaacaacttattttttgaattactttttgaaaagccattatatttttttaatttatctgaatatttttccatcatttttatggaaattaaaatttaataaattaaaatttttaataagcattgctatatatgatttttggcttttgaccgaatgacccggcccattaattggtttgggcacaattctcagggtttcgtgcaattgtgcgttttatttatgatcctggattctcaataattcgatttatgtcgagagtcaactttccaaatttatcgccccaattcccgcgcagaccgtcgcggagaacacgcggctgatgaagcagcgcgaggaggaggctgcagctgaacgcaaggcgtacgaggcgaacgaaagccaacgcgtgcaggaagcgttggagcagcagcgcgcgagtgccaaaagcgcggcccacgcgctgcaacagcgcctcaacgctttcccggaaccaatccatttggccgggtgccacacactgtccaaaggtcggcacggcaccgtggcgcgaaaggcttgctcaaatcgagctgatttctatcgcaagatttttcgagaattaacttatcatatttggactggcgatgcgatctcgaaactttaaagaaggaagggcgggagacatggattttctaacaaaattgctaatttttggatcaactattctgggagcaaatgcatcaaaagggacaaagtagccaccctgatagtgctgctcaagaccgaagattttccgagaccggtccaaaaaaccctagttttttcgagtctcgagtcgagactgagactttttatcagcactaatatcagggatcatggaagagagtaagacgaaaaacgcgccaatagaaattggcactgaaacagttgggggagtgcaggatgccgattttgcatttaattcgtgcctttagtcatcattttgagagtacggcacaattatttaaaaattctcactgttttggacttttgagatcggcacccttacattggctccatttgcatcatttaatgatttaattcatccaattcaatatggcctgatcagtgatttctgatcagttttttgtccccgctgttcagtgagcacttttttgcccttccccaccgaattgtcctccaattcggcccaattgccctgcttcgacatgcagcaggccaaccaagtgttggcaaacactgacgaaagtttggccgactatttgtccactttgctgtccgacaccacggacgaactgcgaaaaatgtaaaaattaattaaatttattttctaaaattttggcggcaaaaatttagattttttcataaaattttttacagtaatgttcttttttgtgcttcttctaatattaaatcttaaatatttttaggtctattttgaataagaagaaatgccgatattgaggggcccaacaataatttattaataaaattgataaatttctcacgaatttgttcaatgcccgagaaataattttgtcggcttctccaaataaggacaaatctgtagaaggacactcgaaaaccattttccaaaaantgtaattttattagagaattgaaat

SEQ ID NO: 7157 - DNA, 1955 bp, Heterodera glycines
acttttggcgatcgtctgttaatcaaggccttgcttataattcatccccagagcgaagaatttcatcttttccaactgagtggagaggtaagtagcaatttttataggttttaatggtagtaatacaataattattaatattttacttaaattattttaattatttatttgtttcctaaaatacatctacctaataatttttccatatttttgtcattcgtgtttcacaaagcactcctcagaggagaatcgcagtatagcaatcatcctaatgtcatttgtattttgatgagcccaattgtttttcatggaaaatattttctaaccccaataaatttttctttcgaactaccccgatttttcagattttttatcgacaaaaactggggatgtaatgcattttggaaaactcaactatcactgcctaaaatccaggtttctgttgtggccgtgatctctgtcctctgagtccaattgagtatcaaggtcccggttttgcccagttttgatccgggaccgggaaattcccggtttttttcccggttttcccagccaaaaagtcccggtcctggtcttgcccaaatttcccggtcccgctgcactctagtttgtacgtatgtgtgttttttttaattttagtttttttaagtttttgattttcaaaattttaaaatttacactttttcaaaataacatgtcttaataatttcgaattttttattttttatttagcttttggatagaaatgaataacgaaaatgatttgtcgattcataaccctcaaaaaggggaatgagaagtgctttatgtaaatatccgatttttgcttttttgggtggcaaacaacaacagtttctgcgaccacaaatgaatgtccaatcatacgcattaaatgaaattagcatatttagtgagtggctggtatttgtctgaaatcatttttattacccattcccaattcattgcaatgccattttaagcaataaaatcaatcccctctcaaatgggattgatccattctctgttaagctactcatcataaacaatttttgcaaagtgcattttatttcgtattattatttttttgtgattttttttgtattaaaatttaggataaataatttttaattaaatttattaaattacaaagtttcaaaatgggaacgaaagcaaaaaaatatttgaatttgactgactctcttctgcagaccgctgcaaacattgagaagagtcggaagagagcgcggacaagcgacggggacaaaacggaggcaaaagcggccaaactgaacgcaaacagaccgccaacaccgacggaagtttggctggtcccaacaaacggaccatttgctccaacaattttcgcgcattttggcgagtgtttggcgatctgtcgccgcaaaatttattaaggatgagataaacagaaggggagcacctggacatgagcaagtggtccaggaacaacacaagcccatgtaaatgatggcccgacatttcaggtggaagccattcgagcagtttaacgatggacagagtgagcggagcacgcaacagtttctgttcttcctcgtcccagtggttctgtaaaaattgtatgaattatagccacttgtgaacatttccaacccccggcttattgacgccgttccaacggtgcaaacactcgcgcagacgcggcaaaagccttccccgaacgacttccaatatccgccgcttctcctcctcctttttgtctcttgccatgtcctccgtttccttttgtgcgtccactggtgtttctgacccttctccaaattcgttaccctcgtcttcctctgttttcccttcttttttttcgtcacagtttcccttttcattcgaatgcgttccctttatttttaggtgccgcaaatcgaagtgaaaagcattcaaaacagcgccgatcactcggatggcaccttttgtgctctctt

SEQ ID NO: 7158 - DNA, 3617 bp, Heterodera glycines
  unsure (1)..(3617): unsure at all n locations
gagctaaaattgttttgacaacagctttcggcacttgttctgctcncaaatcgtttattgtcaagtggtcttggtctgggtgacttctttactcctggtaaatggaagccgacaacagatttgccatcctggcttcaaacgtcacggagatgacaaaggagaggaaactttggatcaatacaaattcctcaattttggcggtccaagcgaccgtaattgacatcaaaagtaaatatctaagtctaagattctgaaaatttatatatattttaccatagaaatgtggcaatctgaacaaatcaccgagattggcacaattgtcgaaatcaatgaacgctttacaccaaccgaggtcattccaaaatatgtgatgactacttcgggatcagcgtcttgcccaacaaaggtcatacgacgtcaagcaaattttccgcttgaacacttcagaagagatcatcaagtcaatgttgttctcaaaagtgttcagctctcatctggaattaaaattcacccatcctttattttgcccggaaattcacctttccgatggcaccctgacatcattcgtcccaatggttcatttgttatttctcgcatttatatttgatattttaaaataagctctgcggagctactctacatatatattcacacaaatttgtctaagctctgcggagctgatttaattaaataaacacaaaaaacaaaaacacaacaagtgagaaatgataattaaagggaaaagttcaatacataaattttaaaaaataataataataataatattaaaataaaataaatgaatggagtattggtatatgaatcccgtgggatttaagttcttggatcagggacgatccttagatatgaaggggaggtatagtcatacagtcacaccgggctatatcaaaaatctaaattttagtcgattggaaataaaataaaataattattaaatttatataattttaaaagttaaaaatttcgtcagattttctcttggcttataatttgaaaagcaatgccaatttaattcaaatccaattgaatcagaatttcaaaaaaaaattaatttaaaaaaaaaaaaaaacgcggatttattttggtagttcattggcagagcttctgtggattggttgaaggaatgagttcattcccatcgaggctcggaattttccatttttattttgagtaattaaataaatatttaaattattttattttcagttttggcttaaaatcaaaacaaatttctcatcgtaaaacaaatgaaaagaaagaaaaagtctgaggacttcattcaaattttggaaattatttaaattttaacgaccagggacggtcttttggagggccggaggtgtaaggccgggaccggaaatggcctttacccttcccccccccccattttatctctccgatagggctcctcccatcccgaggggcgcttaaaaggcaacggataaccagccaaaggggacagtcggatcagtcgggagccatcagtggaacggccaatcgatccccacctgggaggtacccccaggcatccatcaacatcccttcccttccaagccctgcggggcctaattacggacgcgtaagagggctcctctggactatttccctcataagcactgggtatgggacttcacggctttactattagttaaaataatttgtccgtaacttcgtttttcataaaaaataataatgtatgaaaaaataagggtacaatccgaaattcctgaaattctggtttaaattatttaaaaaatttttgattttgccagacgactaattttctaattttagcattttacaaaatcgtgccaacaatttgaagatgtccggtgacaattcggcacttattgcagcggagcaagcggcgtatggccctttttttggctcgcttggcgttactgcggcgatgattttcaccgctgctgggtcggcctacggcacggcaaaatccggcaagtttgttttgttttgaggggtcttggaattttgaaaatttgggaacgtttgaagcaggccttataacctgaaaaaatctgggatttttctccgaaattttcccttcgaaaaaggggttgttttcagaggatttttgttgaacaaattgaatttatgaaatttttgttaggccgctgatttatgcgctttagcgaaaatttacccagccctctcaaaatttaaatgtatcatgaaatttaggatttacgaaatttcattccaaaatgcctaattttgagcctttcctttttttcaggtactggcattgcctgtatggctgtagcaaggcctgacctcgtgatgaaggcgatcattcctggtactctatgcaatttttttatactaataagaggccgaacgagaggatcggtcgaagggtttcggttaaaacccaaaaaaaaaaccaaacctaaaaaaatttctcggtcagtttttttcggtcaaaacccgaaaaaaaccgaccggtctgactctactaaaaatggcaatttaaattaatcttttgcctttttttaaactttctgggttttttttgtgcgttatgacaccggaagagtgaattcgttttttacattttccaagtgaaattcaaaaaaaaattgctattttgaaatttgttaaacaccaaccgaggaaccctatcgttttttcgaatccttaactcaaacaacaaaatataatttcgactttttggttcatgttttagaattagcgcttttttatcattttttaaaattaattttttccattttccaccccctccctaaaaaaaccgaaaattcagtggtcatggccggcattgtggccatctacgggctggtggtggcggtgatcatttccggccggttggaagcggctgggcccggctacaccatcgaccgcgggttcagccagttcgctgccggcctcgtgtgcggtctgtgtggactggtgccgttaggcgccgccgtgaaaattttttgcattttttaatgcgttttattaacgagttttgcccaaaaaagtgacaattttgcgcatttgagccattttttagcagattttcatcaaaaattgtcggttttttgaaaatctagcgaaattttttggaaaatttggatgagggctaggtctggggggtaccaccaaggaaaatctaaaattctcagcaaaaatacaaaaagtcatattttaatgtcatccgatagccttaaaatttcaacataacaaaaaaaaactatgtttccaccaaagttgggtccaaaaatgttcggtaaacgggttttcattttatcataatatcttttttgaaacttaacgaaatttttcaaattttgcaagcaaattaggattattagagctgtcgaaagttatctttaagtcttaaagaagtgtatttttctcactaaccgttttgtttacatagcaaaatgtcatgcgccgcggcgttcgttaattataatctgggagagatgaggataatttcgcttcctgatggcctttccttaatggcttttcaggggatgcaagacccatttagcagcttctacttttcgccatttgtttatgagggagacagtaacggctgtgtggagcaggcattgtaagaagaaagttcg

SEQ ID NO: 7159 - DNA, 923 bp, Heterodera glycines
  unsure (1)..(923): unsure at all n locations
ttcgaatccttaactcaaacaacaaaatataatttcgactttttggttcaagttttagaattagcgcttttttatcattttttaaaattaattttttccattttccaccccctccctaaaaaaaccgaaaattcagtggtcatggccggcattgtggccatctacgggctggtggtggcggtgataatttccggccggctggaggcggccgggcccggctacaccatcgaccgcgggttcagccagttcgctgccggcctcgtgtgcggtctgtgtggactgggcgccggctacgccatcggcgtggtgggcgacgcgggcgtgcgcggcctgtcgcagcagccgcgcttgtttgtcggcatgattctgatgctgatattctcggaggtgcggcgcagggacggtcccaggattttggcttggggggggggagtacctccgcccgggcgacgaccttttttgcggcagttttcccaataaactttgggaagaaggaagtccggcggtgccgttaggcgccgccgtgaaaattttttgcattttttaatgcgttttattaacgagttttgcccaaaaaagtgacaattttgcgcatttgagccattttttagcagattttcatcaaaaattgtcggttttttgaaaatctagcgaaattttttggaaaatttggatgagggctaggtctggggggtaccaccaaggaaaatctaaaattctcagcaaaaatacaaaaagtcatattttaatgtcatccgatagccttaaaatttcaacataacaaaaaaaactatgtttccaccaaagttgggtccaaaaatgttcggntaaacgggttttcattttatcataatatcttttttgaaacttaacgaaattttttaattttgcaagcaaattaggattattagagctgtcgaaag

SEQ ID NO: 7160 - DNA, 1177 bp, Heterodera glycines
gtccctgtttttcgactataacttctttcataattgtccgaattgaatgtatttgatatcatccgataggcctaaaaatctttataaaccttgctaaagtttaaattgaaaaaatttccgtttttaaaaaagttgtgttcaaaaaatgtttggaaaaacaaatcctaagtcttttggcaataacttttttgaaattaaactaaatttttcaaaaatttacaaggaaattgagaactcttagggctatcgaatgatttcaaattcattcaattcgaacaggtatgaatggggttatacccaaaaaccggctggctggcgtggcctcagtcggtcggtgctcagtcgtcccaattcgtttcgaaactgttgggtaaatttatttgaattttctttttgctctgttcaggtgctcggtctttacggaatgattgtctcactgctgctaagttcttcctgaacaatggaaggaagaaagaaggaaagaatggcacatctgctgaacattgtgccgaccgtcgtgttttgatgatcaaaatgaccagccaccgtatataatagataaataccgtattttccatccattttttactgtgtacctttttctcttttttttaacaattttatattattcaaaaaaaatgtggaaataataagtgcggtgattaggacgccattaaggcttgggttactgtacgtattttgctgaaaatctatatgtaatacttagggctgtgtttttaggcaaatgcctaaaatttttgcgcacaatgcactcagataagcacgaaaaacgcattttgaaaaaaatttaaaaaattctgagtaatggctagaaaaattagttaattataaagaattttctcacagtaagatttttgaaaaatttattggggaatcttttttaataaaaaaaattttatttacatattttcgtacacattttgggtttttatacatattgcttacatattgaagaaatttttaatctttatttccttcaataattttacagaaattctttaatgtaataaatacagcacttttttcggcacgccttgtgggttttgtgtcaacaaaaaaatttgtttgttaaatttatttgaaatttataaaaagttgtttctataggttatcggtgtcgtagaatccgaatctgatatccatttcgaaccccgaa

SEQ ID NO: 7161 - DNA, 4383 bp, Heterodera glycines
cataaaagaataggaaatcattcattcgtcgctcccccggggggggggggagagattggtgcagcgggcggctcctttatcaatggggcagcaaaaggaggaagggacagagacagaccatcgccggcgggggatgggagcatggcgcggaaaagtggtcccatatcgaccgcgaaatgtttgtattgataaaatgataattgatattagtgatattaatgataattgacaatgataatgataatggacagcaaattcggacggaggacaagtgcaggtggtggtgaaatattgtgtacaaagtccggggtttataagtaatttggcgattgaaaggtgaaaaacaaaaaacggaggggccgaaagaaagcgaaatatttacaaaaacagaaaaagcgaaacacaacgaaaagttaattacggttgcataattatcaattttaaatgtattgcaatgcattattaattatgattgggatggtgacactttaatagaaacacaacaacggtaattatgtctgattaatttgccatggtaaaaattgcaatgttaccagagccatttcaaactacaaaaaatggaatgaatacaaatgtgaacttaaaaacgattaaatcttcttaatttcaatttttgagaatttttctatggatttttgctttttctaatttcgattcttcaatttttacatattttcatcagaccaaccgttaaaaaaaattttttttttttgcttgttacttacttcataaattgaattttattttacttatttttctaaaaatggaagagtgagagatacgccgccaggaaaaaaatggaaatttttgccagttttattaacggatgaaaattatgctttaaattaaaaacgaaattattaaatgcttttgcgccgtgaaaagacaaagaccagcagcatatagatggatgatacatttgatgggtgctaagtcatttcctaaaaactgtcacaaattcatattaattttagctttcgaatcaccatcaaagagaatcaactcacattttatactttacgacggtcactacgaactaataagaaaaacattaaagaaaaataaattaatttattatattttatgataagctacgtattataaccaaggttttgcaactttaaaaggatttctattttttaaatgtaagtttgtttttagaatttgttatgcttgtcagttcatattttggagtgtttaggagacgaccatcacccacttgaagaattcatttaaatatatttaaaatataagacacttattttatgtatttatgaatctaccgattaatattttttcattattaatacataaataaaaaattttcataaattatcccaaatatccatggtgaatcatcagcagcggatatgaagttggagctggtccatcatagtttttcgttttcttcgcccgccgtttatttgctgcgcccacccaatgaatgctttttcagctgaatcaatgacacttttaagcaacccattttccgctcgctattctcatactattagtgattttaaaagcaatttttcacaaaaattttaatataatttataaaaagctgaaaaaccaaaatgaaaacatttaaattgcaaacaaatagttattttgacattttataaaggaaaattttcactgacttattccgtaatttgctgaacaaaagtgtgaatgaattaggtcaattgacaataatgccgagagcgggggagagaagaggcgagagagggctggagagagaaatagagagagagagggagaggagagagagaggaggggagagagaggaggggagagaggggaagggagggagagagggggagagggagagaggaggggagagaggggtgagagagaaaggcggagagagcggtagacagagtccgaagagtacagagagatagagaggagggggagaacgggagagaaggatggagagagaagagagagagaggggagagagagagggtggggcggagagagagggatgagagagaaagagaggagagagggggagacagagtccgctgttttgagtaaacataaacaaaaaatagattaaaaacaaaaacatagcgtctatatttgctatgagttttgtgcactcattttacccatttttgtttctcttcttcactataatttttctccaacaaaagtggacaatgggcgccgagaaattgaggtaattaattagtgatgcatcataattaatattaaatattactcttatttatagggctgcaaaaaatatggatataaaatctcaaaatatggacataaaattgtaaaaatatggacatagatttttccaaagtgggtatactttctcaaaatttcttgaaattcactaaatgtaaaataaaacttcataaatggttaaaatatggcattaaaaatcattttagaagagaaaacacatgataaagctaaaattcactcattttaacgaaaaatcaacctgaatagcgattttttcgcttttttgcttatttttgattaaccatttttcatgaaaattttgctaaaaaattattttttggaaagttttctggtctttagaggctcaaacggcaaattagctgatgggggccgttctaataggggtttttttggaaaaaagcccaaaatattgataaatatggaaatattgatatataaatccatcctagaagcttcaaaccaagctaaaaacatgtttttcgtgcgtttaggaccaccacagtccagaataaaaatactgatttccatataatttgacagaactacttatttgttagttgataattttgaataaatcaattaattttatattttccatggccgcttaagtatttcgaaggccttcgcggccgataacattgtgccggacgttgtgtcccaagcgccggaaaggctcgtgaccgtggaatacgatggcggagtgtacgcggagctcggcaacgaattggcacccaaaaagttggccaaggcgccgaacctttcatgggacgcggaggagtgcaaaaagtacacagtggccatggtcgacccggacgcgccttcgcgggagcacccgaaaaatcggtggcattttattaagggcacatcagaggcaggagcgttttcccccccccccccccccctccatccatgcaccaaaatccaaactgattggctttctccagattagtttaatttattaggattgaataagcggacggttaaaatgctgaaaacgggggcataaaaagacccataaaggggggggggggggggtggcctgctggtaataatagcgataagccgatcgctggcaccggaggtcgtgggttcgattccctcccaggtctataatttttccaaacctttattaaattgaaattcatattatgccaaataaaatttctattagaaaatgttggcttacacaattttttgccattaatgatacttttcctaattaagttttccaatacaaattaaaccgacggcggattgcccactgactgatcaaatgaattttttgttttgttttggtgactaaaagattagttaatgacaatgtcctggattcaaccaaagtattatattaaattaaaaataaaataaattatttttgatttgagagagtggctccattggttggttgtcaatgtgccgggcactgatgtcgcgcagggagagcaactcatcgattatatggggccggcaccgcccaaagggacgggttggcacaaacaatgaataatgagtgtcataatcaatttgtttgcctattgaaaaaataaaaaagaattttgaggtctccaccgctatgtgttccttgtctatgcgcagaaagaggaggcggtggttaatgccattaaaaagccaggtaatcaatcagtgttgggagactgaaaaatgcttttgaaccctatccatggaatttaaagggtgtaggggcaaggtcaatttgttaaacggtttcctaattaatatttggcgtaaccggggcataaattgccccaaggctgggccttgtccattcgaatcacaacacaaatcgcgaactcagttttgtctaaaaattgctcatttaggaatataattagataattagcaccacattttccagggcgttcgcacttcaacatcagagaatttgccaaggaaatttacgtcgggccgcctctggcagggaatttcttcaacgcgaaataccacggctgaatcagacccaatttgagtgggaatgaaagaaccatgattcctgttgcagaattatatttattttcttttttgatcatacagtaaattattttatgaattatatctaaggttgcgattttcggggcgaaaatggctaatatggacaaaaatattcacgaaaaatgt

SEQ ID NO: 7162 - DNA, 1030 bp, Heterodera glycines
tttcgttctgatttattaacagactttcaccaaaaaagaccaattttttcaattaaattaaaagtcaagcgacgacttttttgctttaaaaaaacactttttgcggcgcatttttcgaaaaattttggaggatggacggaggatccggcggtgccgataggcgccgccgggaaaaatttttgcgatttttaatcaacttgttaacagatttttgtcaaaaataactaaattttgccacaaatcttattttcttgataaaatagtgacattatgccataaaatttcaaaaatgtgagtttatttaagaaatcaagacaaattttggtcgctatctccaaatcaggacaaatctgacaaatcaggacagatcgcacccctgatggatgtcagtttgttttcgtgtatttaaaccgattttgaagaaaaactctaatttcgaaaattttgactttgactttttgttcgaattcgggttcggggttcgaaattcagaacgataattataaaattatacttcttattacaataccaatactacataacttaatattaaaatatttgtatcactaacgcattttttccactgacgcattttccggtcacgaattaattatgagttaattaagtgttaatccgttctttaccctgctgctggtcagcttgagtttccgttccgttgtcaacgtttttttgattgggaatttgatgaaatggcattttcagtttttttttgtgagaaagtgctttcaaaaattttgtattaaaaagtgattaacagaaaaattactgcaagcctaatggggacggagtgaatgacaacgacgaagcgaagcaaagcaatggaaaagcaaatgattggacgggggggggggaatatcccaatgaaaattatgctatgaatgatggaaatgaataaatgcataaacaattaaacatatcgacagattggccaaagagatagcaatggtcggagaaaggcacaaatgtggagaaattcaaagtatcctctactacttacatatgtaatttt

SEQ ID NO: 7163 - DNA, 4286 bp, Heterodera glycines
cttcatttcttaaaggcattgccaacttcgaaaggcattgaaaatggccattaatgggcaattctaaattcaaattatcaattccaatttaaacacaatcgtgtaagttttaaggttgaacatagataaaaatatggttcactaatggccgttttccattggtcggctaattaccacccaacacggccaaattaagttaaaaattcacaaagcaaagcaaatcataattataataataaaatttgtgccaatcgtggttattaaatgtcatttgaaaagtgccgggaaaagaaaaaatggcatacaaagccaaaaaaggaattacaaattaacccattttaaagttgaatctgctcagaatggaatcattcgaccaaaaagccacaacggtaagcgaaaaaaaggggaaagtgatcagtcaaaaagtgatcaaaggcaaaccaaccagccaaatgggggtgatcgggagcagggatgggcaagtcacaaagaatcactcaagcgaaactcgaaatccgattgggaagggccgtgccgtggcatcggttgtcactcacttcggtccgatcatcccaaaatccgttgtccaattgccccaatggctgttttgctaacaatgcttcttctcacttttccctgttcagttcttcttggcctataaggacatcagtccgtgttggcccatcatttgctgtgcccttttaatggcttcgatttccgtcgtcggagtgtttctcaacttttctctcattttggtcactgctctcacaaagtcatctctgaagagaggaggggatattaatgatattaattatgttaattgggcaaaatgcctttttctgctgactcgggatggattaaaatgcacgaaaatgcattttcagttttattttagtctttttgaacatattttggcatgcccttttgtaccttttgtattatttttgcaccaatttgcctgtcctacaaatgatttttccgtttcgttttcgtcccattttcattttcaatgccttttcaggtccctccacggcacttccaacattttcttggcattttgttcctttttcgaggttctgcatgagttgggccactttttctttctgtccaccgctttgtctggccactgttttgtgccttaccaaaatgcctttcgcattttggcactttctctgttcggtttgtccgcttcgactctttcgatgcttttcattggcttcgatcgcctcttttgtgtgattttccccataaagttggcaattttaccatttcaaaagccaacaacggtaagcatatgttcccctttcagatacaatcagttaaatctttggccttatgttcccattaccgtactcttttgtaccgttccaagtgtcggtttggtctttttgtattggcggcgaagcgaagaaatcccttcgatggaaatcactgggaacattggcgaattactcacaaaagtgccaaaatcacaaaaaaaaaaaattatttatgattaattcccagggtggatatgcttattctgtgtacgctgattcgaaattcgtctgtaatttggccacaatttttgtttacgtcgctgtcgcctttttgctccgctttaagcaaagtcagtccgctgatttttctgacagtgacaactttttactttatttcctttcaattaaaaattgccaagcttttcctctttttagagccggcactttttcccggcctttcctcttttgtcccggcttttcctcctcttcgtccaactttttcccggcttttttcttcttttttatcccactttttcccggcttttcctccttttggtcccactttttcccgttcccttttttagggtccgctccgtcgtccgccgccgtttcccaccaacggcacattttcttctccctccttctcatcgttttgtttaacgtcggcggatactttctgatctccgtcttttatctgtttttgccctcttctgctgatagccaaccgatcactttttggtttctccgaattcttttctctgtgcctgccaatttaagcggcgcatcaaacgccccaattcttttcgtgtcgaggcgagcgaataattaattttaattgagccaaattaatttggaaatttcagttttgaatatcgaagggcttttaaaaagcaattgaaaaacattcattcgcttttcttttcgaccaatcaaagctccgttcatccgacactttttgcgctgcaactcgcgaataatcagccgatggacgtgcaaaatgtgttgacaaaacgtcgcggcacgtttatggcggaaagtgccaataaatgaaggaaatccagccgaggatggcgaaaaagcggagacgaaacaaacgaaaagcgggcaaaaaaaaagaaacttttcgatttgacatgacatttgacagatgaaagtcaggagtcgatgaatttcacaaattaacccttttaaattcattacccaattaatttttattgtttccaaattattaaaatttgtttttgccattgccatgacaaccaatgaataaatgtgttaagcatttgccaagcctaagaatatttgggcttttcgaatagccttttttattcttttaaattttggccaatgtccaatcgccgcgaaagtgcggcggcgatgggcggcggaggggccgcggggaacgacccgcggaaagggtaccttctcaaggtttttgagttttgagggtggcaaaaagcggaagaattgggcaattgcaaaggtcgcctcgcacattctttcgctgaatctcacggaagaaagactgcccaatgggacggcactgaacgcattttgcgactcggaagtgccaattttggtcatctcacgaagggacaacgtaagcaaaaagaggggacaaaacgaacaatggcacggcacggaaagacggcaaaattaagggaaagagagagaaaattggggaaaagtgattaataattcagaaaggccatgtggacgtgagcaacgaagtaattgacaattgcggatgattaatcactactcactaattaattcacattaaaaaataacaattaattaaaatttaattttctccgtttttttcgattgacgcgaaaagggcggcacttttgcgagttgtgttttacaagcgtacaaacaatgcgttggcattggacgactacaaacagaatgtgactgtgctgagtatgcacgaaaatgcgggccaaactctgctcggcacattgaaacaggcaaaaaccaaaagaattaaaacaataaaatagaataattatttaaattaaatttaaatatttaaatttaatgattcgctttttaaggttttttcccccattttggccgacaatctatcggaaaattcgggcgaaaactcttcccaattggcatcgcttgtcaacgaattggaggaaacactgcaggaaaattttggggaaaatgaagcgacggaatcggccagaaaaggcggtaattaaacaaaactaattaagcaaatggaatgccactgcgaattcggcttttaaaggcgtacagtccgtgcgcagcgaaatcgaattgtggcacaaaaaggcacagaaagggacggagccggcacaaagttacagcgaggcattggagccattggcggacaaattggcactaatggaggcaaaattgaaattaaagaaatgaaattgaaaaataattaaggggggagggccattggacgaattgtacgaagtgtgcgaagcggcggaagagagtgtggaggcactttgggaagtgctggacgagccgtacccacaacggcgaatgcggcaactgatcatttgcatcggttggcattggcattcaaatgcttttgaattaattctttggcatttttcgacccttttgccaattccctcaaaatgttcagctgcctcactccaaaaggccatttcccatcgagcaacttcaaacatttcgccgtcagagctgtttcgatcgtcggagacacttcgcctgtcgctgaatttggccacacaatggagcgaatcggtcgcattgttaacgggacgaagttggcaacagaacgcacttcaccagtgggaaggcgaggcgatcggaatggaaacatttgaacagtttagaaaaagagtggacgaagtacggcgagggattggcggagggaagggagagaggggggaggaaagaggagggagggaggaggggatattgagggataaggaggggcggggcaaagggaagtgagaaggaggggacagaggagggggagagggagaaaggagagaagggagtagggggaga

SEQ ID NO: 7164 - DNA, 2822 bp, Heterodera glycines
  unsure (1)..(2822): unsure at all n locations
gaggataaagagagaggcgggaggggtgggaaagggagaaacgagaggagggagtagggcaaatgccggaggggagggagtcgggaagaagcatgagactgtgatttatccccccccccctcggattttctatttttttgaggtttttgtgccatttttgtcggtttcatttcctccccatttgttctttcttttaggcccactctctatgcactttggccgaacaaattgtccaattgttaggccgtcgaggtgattctgatcagctgcgcgagagtgttttctccgccattgacgcggcgcttcgcaatgcgatgccttttggggggacgggggaacaatgggcggaacggcacggggcggccgaacgcgcgttggaccctttcattgaggagattatgccgacactgagggcgcgacttcagtttcagccgaatgtgagccgagaattggtaagcaatgatcagagatgaccagacaggaccagaagcaaagtgatctgaccaaacattggccaagattattttggatgattggagtgatcagaataagttgtaacatttgggtgccaatgtgacaatccacttcagttgctggacgaattgcaccgttaccgccactttttggcccggaagcaagtgaaggaaaagcttcaaagcgaacggtaaaaccatcaaaatttgcataaactatcgattaattggctagtgaggtgctgatcactcatttggccgaacaaattcgtgctcaaaggcgtgaaatcgaacgaatgtccgcgatggctgtgcccacggggaaatttctgacagaaattgcagcgaaaattgcatggattcgaagtaacagtactcaggtaaatggaaaatgcatttggtacggtaattagccgtttaatcgccaattgttgagattgacaaactcagcaaagcttccgcaaagtttttcgacgatttgccaatgttttcgtccttttcgcaatcattgcgcactttggccgaagaattaaaggcagctgagcaggaacaattcgacgcatggttagctaattgctaattaccaacaacggtaattagggagggaaaacggttggaaagcaaaacgaaaaccgatgaaattcgactggcttcaatcctttcttatggaatttttgcacaataatttcggtcttttttatgtgtcgtgatatgttggcccacgtggacgaccccggcggcgattccatctctctgcagacgaccggccgtctgatggttctggagagggaccggggcgtgctgaacgtcagctacagtgatcggctggcgcgactgttgcgcgaggtggcgcagctgcaggccatgggactgcgaattccgacaaaaatctctcagtgcgtccgccagggcgagaagttctatcagtacggggttctgctcaaacaggtggggacacattctgctgctgaactgaactatgagaacataggtggcccacttttacaacacaattgagcagcaaatgctgccgtgtcagcaagcgatgcttttggacgaggcgttgaccttcgaaaggctcgttttgccggcggggggccaaagggaggggcggggcgccgcggcggtgagcataacgtgggagaacccggagaagttgaagcagtacatcgacaaactgcgcgaggccgccttcaatttgacgagtcacaacagaagactcagaaaagtgggacagaacacaaagaaacaccgccccaattaattaactaattgattgattaaaggcacatgccgaaataggacaaatagtggccgaattggccgacacggatttgttgcgggaggaggaaaaatggacagccaaattaatggaagtgagacaaatatttgtggaggaggaggcatttgtggcggtgaagacgaacatgcaaccatgggcaaaccattggaacagacagctgtacaaagtgttgcaattgcaattccgatgggcaatggaaaatgtggacaatcaaatgccaacattaaatgcacaattggtaaagaaagaatgaatggggaggaaggggagagtgggagagaaaagaaagggaaagggagagaaaatgtggaaaaagagagaggagactgagagagagagtgaggtagagaagggaggaagagagagagagcgagcgagggagatagagaaaggaggaaaggaggggaaagagagaaaggagagaaagaaggggaaatgaaagaaagtgtaggaaaaagagagaggggaagaaataagaaataggaaaaacaaatgagcgaaaatgccagaattgagcggtgccctttgaggtgttccgcgaccagcgactgcaactgcgccccccgctggaggagttgcgtctccaatattaccgcgcactgcgcaaattgctgtccacgccacaacggttgcgtggggtacagaacaacgcgcgcgagacggaactgttcggacgcattgtggcgagaaatacgcgccattttcaaaaattgtacgaacggtccgaggaaatgttcgaacggctgagaacggcggacagagaatttgacgaatgggtggcattggcacaggtgaaaaatggggacaaaaatggaaaaataaaaagcaatggcacgggcattggcaaaaacggaaaattaaaaaaaagaaacaaataaatgaataaatgaatttgcaattaggtaaatttggaagatttgctggagcaaaagctgcgcaatgcttcggattgngagcatcagctgaatttgctgaaacagaaacagcgatcagtggacaaaattcccaacgaaattcgaatcgaatgcgtccgtttgtccaccgcc

SEQ ID NO: 7165 - DNA, 1845 bp, Heterodera glycines
  unsure (1)..(1845): unsure at all n locations
attgtcgctcattcacatntggccaaagtccgttcaattcaatggacacacaatcagatgaacaatgcggagggtgcgggaaaagaaatttaaattttgaaaaataattaaataattaatttaagaagcagttcaacggacgcaattcttgaatacaaaaagtcattggaaccgccgagaattgaaataaacggaacaattgaaaattatgcggtgataaaacccccaaattcattattttgtttttagaaataaaatatatgggtaattaagggttcaactgacaatttttctcgtttaaatgctcaaaattcggtgataaatgaccaacgccgtggcagcagtacgtcaatcggatttagtaaagtaataaatgattttattcttaatgtgcaaatgtaaaaacatattatttaaatatttaattgcaaaattttattcttaccatattatagcataaagcacataaagtggattcgcgcaaaatcactcacaaaaaacggttggaaagagggcaggtaattaacacattaatcactttaatacttttaaaataattttgaacgatatttgatcactccaaccatacaaaaaaatctcggtacaattttcatttttcagaccacaacaacagtctctgaagacaaagcactaattgctgaacgagcgccggcattaaaattttttcagcgtgccaacgggtcaaagtttgcgcattccttggaccgatacaacacggtaaagaaaaaggggaatttgatcagtgatcaatcattaaaaaatgccatcgaacaaatattaaccaacgctataatgttgaacatttatcaatggaagtgattagaaatctcgaacattcttggacatgatttcttgaaatttgatatattttttttctaacaattttttttgaactttaaatattcaaagaatcaaatcctcttagtctaaaaatttttttaaataaaaataataaatttacaatattctaagcacaatttattttatttttttgatattcgtattaagattttagttttatttatccaaactttggaattttagtacatatttcaaatatatttgggcatttttgtaatgaaatttcatccttaatgattaatgcgttaattatttcaatttgcattttgggatttcaaaattttacaggatgtttgtgccgaaatgcgtccgctgtcattgcgcagtgccgccgcgcgttccatgtcgccgctgctgcaccagcaacggcgcctgttcagcatcggcggcggcgcgagcggtggcacacatcgctcatgcggaagtgccagcggcatggccggcattggggaagaggacgtactcagctgggaggtgatcactagggacgtgaattttaggttttaactattttttttgctcaattgatttgaagaaaggagctcaaaaaacgcatttccgcataaaaatttttcgattctgatgtcattatcggtcactagaaatcactattttgggattttgtcactaaaatagtgaaaattcactattttggagttttgtcactattttttcactatttcgacattttttggaaaattctttaacaaaaatgcaataaaaccaaaaaatacacccctaagaatcgacaaaaaaaatttcaaaaagcgctcctaagaaatgaaaaaatttttctcaaaaaggtattttcgtggcaagaattttaattttaaaaattatttttttatgtacctattttgtttttttgcccttaaaaatcccagccctactcatttgcaatgcaatcagtgaataaaaattatttttgcttaatttttggctgaaaattatgtcactatttct

SEQ ID NO: 7166 - DNA, 2890 bp, Heterodera glycines
ggattttttgaaatttattttaaaaatcaaaaatatgtttgaaaaaatttattatttgcttagaagcatctaaaaatatctaattaataataataatgtgtttttaattttatttaatctgtttttgaaaacttgaaaaaacatcggtcacttgaaaaaataaattctaaaattttgtccaggaaaatccagggtttttcctgttttgcctggacctggattttttttcacatttgacctggaccttgatttcctggacaaaaatccaggttgccgaaaaatggcctggacctggacccaggaaaaatccaggcctggatccaggtccaggtcgatctctaaacttaatgttgagagagaaaagaaaaactgttcattcattaaggggggggggggggtcgaccaaaatttttgcgaagggtcttaggtcgaattcgactctttctttttttttttgcttctcaaatagcttttttcgcggtgcgcttttttcaaaaaaatgcgagaacaaaaggggccggcggtgccgataggcgccgtcgggaaaatttgatggattttgttaacggactttcacaaaaattgacaaaaatttgcaatttttgagaattgaaaatgaagaagcccgtcctcctccacccccgagaattcttgaaaaaaattctgtttgtaaattaacaaacttagaaatttttcaaggaaaaaaaaattataaaaaattttctgatgaatacaaagattttcaaaatctgaaaaatttttcgtattttttcttccaattttcttttaaaaaaatttctaaaattttttcgaaaaattctgttagataatttttattttaacacgcctccaaaatacaagcaaaaagaattaataaacttactgaaacagaaatgcggaatgtcaccctgctcaggaaacacagacatagacgggtgttctgtgattgcgtatcgtatcaaactctcctcccaatcgcgtttgttttgcgcatccaaccgacggaaaatttcataatttgtatcaataccatcacggatctaattaaaaaacaaaaaaaaaatgaggaattttttttttttacctccgaccgaacgtaagtatgaggttctgggaaaggcggtaaaaaatttggataatatgacggaagcggaaaagggtcagaaatgcggagaacgggcgacgcttttgtcggcgattggggcagcactgaaaagacagtgttcgaattatacaactttcaccgtacacagtaaaggggggggggggggacgtaaaaggacaattgggcacctccgactgtgcaccatagggcctaaacctgggccaaaaagcgaagagggaccagtatgttttagaatttctaataattttatttaaaaagttctaaatttcaattttttctctccctggaccactccccccccccaaagcaaattatcccgactcattagttaataatgaatgaattcattgaatgccaatgtgttgcactcacatgaaaatgtgtgcggtttgctttggtgaatcgtgtccaaaaatgtgtcaaagtcggccaattccgggcgcccctcattcaccaaggccatcaaaacatcgccggcattgaccagcgaacgacccgtatgttcacacaatttcctcgaggattggcaagttttggagaaaactgaaaacattttttgatcatatttaatgagggataacaatgctaaaaagtggtggtacattggtgaaataaaaaggataaagcctccaaagagcccttctgagcagagtcaaaaccaatggaatggcaaatggaagcggcacattggcgaagaacccgtctaaatatttaaaacaaatttttcaaaaatatatgaaacaaatccaggaaaggccttgaaaagatgggtttttttttactggatttttgtccagaaaatcgtcgttacggacacggctttttcaaaaggttagtcaagctctaccgtatttaattttgaatgggaaaaaacgccccacatccagcaagcattacctgtaaaacttgataggacaaaaacagaattgaaaattcgattggcaccccgactccaccaaatttgtaggcaatggcatcactattatgaaacaaaaaatatatataatggcatttatattttacaagttagcacaaaaaataaatatttgtaacaagtgatgaaaaataaactttcaagaaaaacgaagttaaaaaataggcactattttatttacaaatccaattaaaaaaaaaacaaattttcccataaaatggatcgtctcaataaatcattgtgctgctggtccgtcgaagggtaaagcgcttgcacagcttttcatcaaaaggcaaatcgttgtgttccgcaaagtccatcagtctgtcccatgctttggcatcgcctttttttgcttaattttcaccattattattaaatctgtgccttcccccgaatgccattcacttgttatttctgcccacgatttgaccaacatttgtccaaattgtgccatgtctttggcgttcatgcgatggatttgtcggctgctgtttcgctgctttcgcatcggcggtcgccatgcgaaggcgccgttccgttgggccaaacagcgggtcacacggttgggcatccaaagccacaacagtgactgatagcgactgctggcgatcagctataaaagtgcgcggaaataattgttttaaatttggtgacgattccggtgcagaggggaaaacaccgtcagattatcatcattatttttgggacaacaaataattggtataccttgaacctattaggctgacaaaatgcacaactttacccgaacatttttatttaattagttttctaaaaaattttctgttaattttatttccggcagggac

SEQ ID NO: 7167 - DNA, 2136 bp, Heterodera glycines
  unsure (1)..(2136): unsure at all n locations
atcaaaatagcattcctggacaatggcggaaagttgttcaatgacgcgttgggcttggctcagctgaagagcgaaaatcttaattcaaacatcgtcaatttagagaaaatttttgcaagatcgccttttagtttgaaaacaatttttggataattttttgctggctcattttggaacacgtcagttggccccccccccccccacacgtttgggccccagcatgtttttttggctataacttttttctttgtcaacaaaacccaacattgttaggtatcattagaaagctctttacatgctttattagccttattacaaaaatcgaaaaaatttttagcctattaaaaatttattaagaaaaaaattcaaaaatttcgactttttgaaatttttaaaataacttttttggtggtaatcgtataatcgcgaagcaatggcttggaaacagtttcaaaaacatgttaagctttcgaatgataccaaaaatgttgcatttggttaacatagaaaaaagttatagtccaaaaacttgctgctcatttcgattatttttttcaccagcagagtttgtgcgctattttcgtccatgttttgtcgcaaattgtccgccaaattttcactcgctgatgctcgccataccaacagacgcaaaggctgtgcgaatgaagaaccgcgaattgacaactgaaagaaagctgagaaaattttttagaatggtaaaattcatttcctgaacttttcaggattgttggacaaattaaatttttattaagtacatatatgatacacgaaaaaacattgagggatccctttgaattttagaccaaaaatttgttgtttaaaaatctatgcacataatcctggaattttcggtgtcagggcaactcgtacaatttttaatgtgtgtagtcataactttttttaaagtcaaccaaattcttcaaacttgatatcatttgaatgctctccaagtttacaagtgatcattaagcatttcacaaaaatgttataatttataaattgccaaaaagcctgcttttgtggatttttaatattcttgaaattataactttttcgtgaaatgcttaatctcttagcttctgcttaatgatcgcttgtaaacttggagagcattccaatgatatcaagtttgaagaatttggttgattttaaaaaaagttatggacacacccattaaaaattgtacgagttgccatggatccaaaccccacaatatgagatggaaaaattaaaaaaaaacatttttaaaaacatacaattttgtcccttcgctgaatgcatgcgatcagtgttgtttccaattcagtacgttccttttgacaacgtccatccctgaacaaacaaattaatcattttctgattaaatttattctctttcgacgaccttttcaatttgccaatcacagcttccatatgctcaatcagtttgcccaagtgttgaatgtcatgtccgtattgtgcctttatttgcttgtccaccaaacatttgaagcctctcaatacgtttgccatcatttcacggatcattgaatcgcccaaaatttctctgttaaaaaaggagaatattatgctgtagtatgtattgtctcgaaatttgttgtttctaataaaaaatattaatttttaaagattttacatgaaaattttaggatttatttcttttaaaaatcttgggttagaaaagctagaaaattgtcagagggatcattcatatgtatgccccctaattagccgtggtaaaattatacgaaaacaacatttattaattattattattcgtgtaaaataccgcgatgatgaggacggtttgtaggcggtcaacgcgacaaccaaatccttcaaacggccaatgttgccacatttgtaacttgccttcgcagccaaattgacaattttgcacaaatggtaggggaaggagccattccgttcaaaatcggtccgttttatttcaacaatattctgtaatgagaaaagatattgttttttgacgatttatttttagctgacatttaagggaattttcgggtaaattgtcttttacacgccggattttttttgaaatccaccgagaaaaatttttaatgaaatttttttnaagatttccatttttttttt

SEQ ID NO: 7168 - DNA, 4852 bp, Heterodera glycines
attgctgccagtttgattcagttagtcacatgtttgagttgatttaagcctcataggccttgatttctccggaaaacttggaaaattcaatacaactctacctaaaaagcagatttcggtctgcaaaacaaacaaaaatatgaacaaatatttgttgtttattatttagcttgttttatctgtttctttttgttagttgttaagattttgttcgtttttaacaagtgtctttatattaatgttacacccctttttcggaaaaaaatcgtaaattttttttcaatcgtcatttcgccttctcgcttttcgaatcttaattttcagaattgctacttacgtaaaatttcagctacgatcggttcatgggaagtggtcaaactcataaaaaatagggtgtatttatattaatgttacacagtgtatacgcgcgttttttctctttttaaaatttgaaggtgcggccgcataaccgaaaagtaccaaagagcttaaaagcttatgtttattttgaattcttttactgtttttagctgcgatttttcaaatgaattatgatcttttcactttttgtccaatgtattttatgtcttatgtaacttttgctaattgtattgatacccaatgatttacgaaaaaaacattcagttatcatccattgctgaacagaaaagccaaggcgtcattagcgatcattaaaaaatttgtgacaaattcgtccgccgtttcgccacacgaaggaatggcacaaccattggacaacgacggaaggccattcagtgaacgaattcggcaagaaaagcaggacaaagaagcgtactttaaacaattggcctcagcttggggtgacaaagcatgaaaaacaaattcgattatgtaaagaaaatccgagaaaaaaaaataccgaaaattaaacaaaaaatctcgctcgaataaaattgttttttttattcgcatcgcattcttttcctccaaattttgtttcattttttgttacccgttttggtccggtttctgtagttgcccgtaattcaaggtttttgaatttatttcgcttttcaatctcgcgcacaaaagttttggcaaaatgtctattgtatatatgtgtgtcattcatttattttttgaattttttggtggttaatttggaaaatgagaatttgatggggttttcttttcttttgacaaatttaccgtattttctctaattatatgcccgggtatattattttttaacccaatcagaaagggggagataattagagacgggcagattaatggagacatggagattatttttcaacagatttatttagtggaaaatttttgaaatttattttgaatatttatctaaaaaatcgtcataacttttgtaaacgttgaccaaatttaacattcttggtttcattcgatagcctttaatgttctctatctatttgctgaatgcaagaaaatttcattgcttttcaaaaaagttgaccaaaaatcgtaatttttttttgtcgctttattcttgttttattttatgatttattttcccttttacatattccttttatataatttagccctttttgttttataaacatttttcctcaaaagtcggtcctcaaatgtcaaatcatcaaatgtcgagtagccgttaataatcatcagggctgtaaaaatatgcacaaaaatggccaaaataataaaactaccgtacaccagtaagaaataacggaacgcattcacaaaaacgcacagtgctgtaggggcaaattggccataaactaccgaaaaaatttgcacaaatgcattcagaaatgcataaatggactgggcgataagtagggctgggatttttagttttttaactattttttctgcggcaagttggccactaaaataattttttgccactattttggcgtttcgtcattatttttgccactatttcgcgatttttcaaattttgtaaaggaaaattcactaattttcttcaaatataccaaataataccatatttttaaaggaaatatcgaaccaaaatgcccgcccaattcaatctaaatctgcatttattcgtgactggatcaaaaaaattgacggcgaagaaatttattccattaatggaaaaataatcttttgtcaagtttgcgaacagcaactaaagacaacgacgacttgaaagaaacaacagcagcaacatgataattttccacagattccatgctctttttgccactattttggcatttttggaaaacttcccaaaattgcaataaaacgaaaaatacacccctaagaatcgacctaaaaaatttttttctaaaagctcttccaagaagcatctcgtaaataactctaattgttaaggaacaaaatgacggacgggaaaatcgccaaaatccgtaatccgtaattacggggtccaataattccgtaatccttaattgcttgaagccctgcttattaccgtattattccaaaattatgttttttttattctctcctacataatataattcaaaatttggttaaatcgaataataaatgccggtatatttcaattttttcgtttttttaaatttcctatttatttggctatttccatctgaaatttcttaatcattcgtaccaaggatgttgattgtttcaagtttcgaatttcgtatgttgttggcacgaaatacgaaattattaagcactggtaagaatgtgggaaggggttgagagaaaatattttttgaaaattggtagaaaaggaaaatttttttgaaaagaaattataatttgatcagttcttttacacgtaaagaacaagaaaaatatatagcctgggcccgtaccaaaagaacgaggtaagggttaacctaccctcagaaccaggggtggggcgcggagagaaaatcacgcggtcgcggatcgcgcggaaaattggaaaattattaggcgcaaatcgaaatttaatatacaaatggaaaaaagaattaaatttaaataaaatgaatttttatgagcaaaaaaagagggaattcattaaacgatttgatgaatgtaaaagtttatatggccaactcaaacagaaagaatttgtgaaggaattgggcatttctgaatttacatttataaaatggaaaatgaattattgccaaattacaataaacgtaataatgtttttttaattaattaatattcatttaatttttatatttatttgtttaaggcaaattgaaaattcatacctatgctgagaaattgaaatatgtgaaaagaagtgaggaaatgaaactaagaaaatctaacgatgagtgataagaaaattgccgaaaatttgggtgtcaaacgaaccagcttaatcggatggaagaagaagttcggcaccaaaacgtgaaataaaagaatttttcataaaaataatttattagagcccggtagaatgattctggatcaaactgtaaattttcattgaaataatattttgaaattttacaggacccgtacgctttattctttgtaatttttagaccgtttttttattctaccaaaattgccttaataacgcaaaaattggataaagctttcacaaatgattaaagtgtttaacgcaaataaatcagaaaaataaaaaattctgaaagaaggaagtccgtcgatgctgacagagcaaatttttgccatatttattcattttttattgcaaatattcaattggaattatgttttttggaattcaattggatcctgaagaaaattaaatttcctgaacctgtaatagaatctgaactaggttcctgaacgtattttcagtaatttattgccattgatggatttttacgggataataaataaatgaccaactaactataaaaaaataaatttcttttttgccttcgtcgatacttttttcaaggttttcatttttcccatctctcagcatttaaaaaaatttcgtaattctccatatttatctgagtcggtaaacaatcttttgctcccatttgtcagctgggagaagcaccctttgctcagttactttttaatttcttttttctttttgtttgcttttgcttctcctaaagtctagaatgaatttcaaagaacactttgggctgtaggtacataagttgattgatttttcttctttttaaaatctcaaagcctttttaaatcgcagagactgcgtaatttgccatccataaatcacttaatatttggtttttacttaaaaaccataaaatggtttttacttaaaaaccataaaatggaaaaattttgacgaaaatttgcgttgctcaagagtaacaaaatttttaatgcttcttatcatatagcctaaatgttctctttaaccttcaaaatttcaaaaaatttttctgactttgaaacaagtcatggccagaagaattctaaacccagatttttcgtatgggtttcgtcgacgaatttttttggttttcgccgggactggggttaattattcaatggtggcgttaaggattgcagtcgggattagatttttgtatatactttaattaacaaatcttgaatcttgtcccttaatttatgacggcaaagaattaccacgatccaattaaatgctattgtgttttagataattcaaatggattttgcaacggggccaacgaagaaattctgcgaggtctgtcggagctggattgacttatttgaggataaaattcaagtggaaaagttgatgagtaagccggagtgttttgaattaaaataattaattaatttttttaaataaaaatgtcaactaaaagcattgtaaaaaaataaaaataagtttatgagcattggaatattattttccattttttaaaccttagatattaaatatttgtataaa

SEQ ID NO: 7169 - DNA, 971 bp, Heterodera glycines
gagcaaatatttttaaaatttcaaatatgcttttataagtcatcaaaaataatgatcaaataaaaatcgttgatcaagtggttagcaaaatgtttcttccaccttttcagagttccgtatcccactgcgcaatttcttgccaattattttatcgataatttctttgtttctttcttttactgtaaaatattgcttcatcttatctaatttgtcctcattggtataatgctcttaaataaaattacatttaacttcattagaaaacattaatcatattttcacatgcattatatttaaatcgcgcttttcctgctcaattattttcattttaggatttttttgactctaaaagataaaaattagtgttacgattattttcttcatattttttaccggaataaacgaaattgatgaatattttaaaacacattgataaaggattaatcactttaatgaaaattcgaatagataaattttataaagaattattaacagggtccaaattaattcccgctaataaataaatggtcgatacgaagatttttaattggtagcacttacgcaaaggctttggttcaaccctttgaactcatattttttctttggaaagagaataaaattaaaaaattgattaaaaaaattattcacacatttcttatctcaagaaaaaacccattttatttgaaataactaaataagtgatttgcactgattttaattaatataagcctcattaatcattttttgcgcttcaggtcattgccaaccaatatttttgtgtattttaaataagtagccaaaaaatcaattgggatttaaaaaaaaattcattattttcgcctatttaatttaaataaaatgaaaataatcaaaaaaagttttatgaaatgaaaaagaaagaattcattaaacgaattgaggaatttaaaaatgtatatggtcaaggcaaaaagaaagaatttgtgaaggaa

SEQ ID NO: 7170 - DNA, 5057 bp, Heterodera glycines
tgttatcagtctctttccgttaaagtacatagacgacaacggtggccctctcgcggacattgaaacgggcgaaatcttttctgacattcagcacaaagggattcacaattttacgattggaaaacgccttcggagggacaactgcagtgggtccatgaacgcattgttgccgcatggggacgcactttatgttgcggacattgaccctttaagtcggacggtatttttggtgagtttttcgaagccaactgaaagcctttgattcactttgtgtaatttagtgctcggggaatacccatcccaaactttttgctaaaagagtgtgtgagtgattggattgtgcttttctcatttttgccggaacacttcccccccccccttcagtagtttcgtctccgtcttggttaagtgatgaccctccagcggaacacctcgttcggaatgctctttcatgcgttttccaacgcataatatcaccaattccatgcactttacaaactcacggaaatgatgaccgttttttcgaagttcgattcggctcgccgtttcgggcgactgccacgggacaggcatttgttcgttttattcactttgacaaccctttgtttattcagttatgcgttttttacgacaacattgagtgcctgggctctgctcaaatcgaaagtgttcttgagacgttgtgaataaattttaatgcgaaattgcaaataaattattttaaatgcatttttttacgaatgtcgcatttccatagtttatctgtccaaaatacaaacaaaacatttaaagttcaatcagaaaaagaattcaatgaaatgagtgagcagaattcggctgagcaattaatccgtttgctggaagcgacgcttctccccgattcggtgaagggggcgcaggatgagcttcttaagttgaccgccttccccggtgcttttgtttgacgcatttttttttatcgttgcgccgtttaggctttgcccggacgatgcttcgtatcatttgtgactccaatttacctgctcacattcgcaacgcggcgtccatttcgttgaagaatttcgtgcgtatcaattggtttggcgagggcgaagctccgttggccgacgacgaacgagaacaaatccgaagtgccctcctggagacaatatttcaggtgggcggttgggccatttttcatcaaaattgggtctctcactttcagttgccttcgtatgttcgcccacaaatgattgaaattgtttgccaaatcagcaaagttgacttcccagatcgatggccacaagttatccagcttatcgcgcatcatcttcaagcagctaccgattttgaccagttgtccgtgtccttggccactttggacaactgatcaatcggtaccgacacgaaatgcgatcgaataaactgtggactgaaattattcttgtcgtgaatactgtaagtcgtcatgtttgtcatcgcttgactttgctctctaaggtggctgaaccgttgacgcagctttacgcgcgtatgctccagtttctgcccgacccggccaaccaaaacacgcaacttggaccttctgatcggctgtcttggctgcaaattgtgttggaactcacacgcatttatcactcactgatttcgcaagatctgcccgagtatttcgaagtaagttcgcctgagtattactccgtatttatagcattttaaggacaatcttacaccttggatggagggctttttgcaattgttggagttaaaactgcccgagcttgaggcgaagtcggtcgacttggaacctaatgagcatgacaaacttcgctgtgaaatttgcgagatcgccactcttttctcgcagcgttttgaagagtgctttattccctataccgagcgattcattgcctcggtttggaatctccttgtcatgacggacagccgaattcggtagtgcagcaaattacttcgttttctgtcgtataaaattgggaaaattaagaaaattgccccctccccattttcgtaaatctctccatttcatacttcgatttattctgtccctttttcaaagtttcgattcgttggtcagtgctgcgctcagttttctcgccgccatttgtcagcgtcctcattatgcgtcgcatttccgaagtgaaggcgttttgaaggcaatttgcgaaaatgtcgtcgtgaaaaatttgatgttgcgttctgaagatgtggaaatttacgagaacgaaccgttcgagtttctcaagcgggacattgaaggtggttacgaattcgttttactttattcggttcgtctcattaaggctccgacctcgaaacgcgccgtcgtggcgccgccgattttgtgcgggccctttgcaagcagttcgagtcggaagtgtgtgctctcctttcctcggcaattcagagctttctttcggaataccacaaaaatcccgccctgaatttcgccaaaaaggacgtcgtctattacttggtcagtgctctcgcttcgaagagcacaaccgcccgacacggaaccaccgacgccagccaactggtgagacctgtaaaaagaatgctcttactgcttttcagataaatgtcgccgatttctaccaagaacacgtccgttcggatttactcttgggtcccgtcaatgatttgcccattttgagaggcgacgcattgaaatttttggtgcttttccgtaaacaattgaagcccgaacagctgattgagtgtctccgcggccaaaatggtttattggagtgctcaatcatccgctttttgtcctctgcccatgttctgattcaccattacgttgcttacgctgtggaacgcttattcttgatgaaaaatccaactaatcctcaggtaatcgtcgtctcattttgggtaccaattttgatttctgttcaggaaactcttttcaatgcatccaatgtgccaattgaccttttaatcgatgctctttttgattgttttcaagtcccccaggcgtgtgaaacgcattatgtgatgaaggcgctgatgcgggcattttcattaattgacgtacccaattatcaattaattaatcgcaatatttattttatttcgatttctatttcttaggatcgcatggcagcaaattcccatcactatgtgaacaaacttttccagatgatcacagaagcagtccgcgtgccgaaaaatcctctttttgtgcattatatttttgagtcgctttgcgttttgatcagaagggttcgtttgagtattccccatctatttttgttttattctcctcctttaggcttattccaaagtttctggtggtttggatcagcatgttattccgatcatcgaactgattttgggaaacgacctttctgattttgtcccctatgttttgcagattatcggttgagttgcatggcaatttctctctgatttcttcgtttttagctttgatgttggaccaaagtcaatcggagaagcaacgcggcatcgaaatgtctcaagaggcttacgtccgcttcttccccactttgttacggcccgactattggttgcgttctgccaatgttcccgctttggtcctcgtcttcgagtcgtttattcgctgcgttccccaattggtcttcagtgcacaatattctgatcaaatcctcggaatttttcaacgtctgattgggtccaaagcctacgaccagcatgggttccgtttggccaacactttcatctctcatttggatttaaatgttcatttgtggcctttttggtttgactttacatcgctttaaaggcttacgaacgcccactgaacagcaatgttgttttgctaacgatgctcaacagaatgcagcaaaataaaacttccaaattttcacgacaattcacaatttttgtgtttcgctatgcggcgatcaaaggcggcgcgactttagccaatgtgagaagagagaggggagaaccaatcgaattcacttcatttcccttccgccccccgggggtcatttccccgagaaatttttaaaaaatgttcacaatgtaagatataaaaatatctgacttcgaaatattaagtcactggaggcgatccaatccgggatttacgggatgatgttggacaaaattctgcttaacgaaatgcaagcgatgccccaaacgacgacttacgaagagaaacgaatcgtcacaattggggcggcaaaactcataacggaaacgaccgcttttctcgggttgtctcttttttcgttgtgcgatttgacttttaacttgcaatttagcccccgttacgctcaaatcattgaattggcagtgaatattttggaagcattcgaacacaaaacttccgccgtggtggacactgccgttcaggaaagagaggaaaccgccgaagtgagcgaactcgaatacagcgacccgtactgcaaactgtcctatgctcaacaccccgaaccatttgcgcccgaaatcggaaacataaaaagtgggtgccaattggactattaatttcgcatttttcgtttttagtgcactttgcccaagccgttcttttcactgtccgtgaaactaaccctgaaaatttcgattgtctgaatgcgagggttcagaattgtctaagggcttattcttcaacaatctgaacaacgttatttttaatatttccatatcttgagttcaatctatttattcatcttcatattttttgtcgttcgttaacatctctcgttaaactttggcataaatttagttcaattcgtacgaattggttaaatccatctcttccctttcgctttcatacgatttgaggtcatcaaattaatggtgcgaaggctaagaaacgaaaaggaatgatttgtggggtgacccgtttctttgaggggcgttgggtttcgcgtatccctccgtctcctcggcggtcaacggatgttcgaaggcggcgccgggggatgctccgcccctttcgtcttccattgcttactcccgcattcgttcatccgagaagctccttcgctgagttgtcgcctttcgaggatcgattgatgttgttgaataatgaatttgtcgcgccattcgtcgagtggtcacac

SEQ ID NO: 7171 - DNA, 2323 bp, Heterodera glycines
tccgtcgcttatttcgtgtgcccatcgatctgagaaggtgcattcgttctgttccgatctccgtcttcgcaaatgctttcgtccgcttctgctctgagccgtcgtctgtcactaaatgcaaaatccgcccatttggggctgggcgaccgcctcggcaatctgacggccgaagcattccgtgcttatggcgcattcgttggccgaaaccccggcaaagttttggtaggcaaaaggggggcaaatgaaaaagcgaaggcattgaccgatcaatgaatggcttttgcgttgcgattgatctccgatcggtccgtttgaggtgtttatggccattttcacgttggccactcttcccggactgttcttcctcaaaatcaatttggacctttacaaagtttgccctttcctttcctttttccctttgcttccccctttttcagcttttcgtccctttggatgcgcccgttcggttcgaatttgaaagccaaaaattgtacaaccaaatcccccctggcaaattggactttcccctcgggccgcccccttcgctgatcgccaccgaccctccgcccgcttcttctcaaatgaatgaagcgccccccgccgaatcggccgccaacgaacttaaagacattccgaagaagaggaactcgcgaaacccaaccaaaaaagtgcacgaaggtaaaaaagaacagtggaaagagaaagtcgaaatttgaagggaaactgttaggcctcgggtgggcattgaacccacgccccgcccccattccgtggaaagttcgaccattgaacgaccgcggcaaatgtttacttgctttttaatgaacctttccaatcccactcttcttcttcttctttccctctctctctacagacccctccgtcccccaacacaatgatattttgcgattttacgttgtccatcgtgattatgaggtaaaaagagaaattgtgaaaatgcaatttcgaatttctaagaatttgctgcacagcgacactcttggcaaattgtttatgtacaccaacgaaatgatgaaagtggcgatggaatatgacggggaaacggtcagaggaaaagccattccaaagagcaaaaacaaaacagaaatgaccaatcaattgcttttcagtgggtttttgaggacttttgcaagcgggggccagcacaggagcagtgcagcaatgagtgagtaggggagaggggaaaaagggaaatgagggagaaggggagacggagaaagcgtaagacagagagagagagagagagagagagacatgcgttaagtgccgggccatcccaactttgataattttgcagactgaacatttggctaaaacacgcggagaatcttttccggagcaatggcacccgtcacaacccaaacttgcaactttcttaccccgtcatgtatttgttcaaccgaccaaaagtgaaacagcttttgccttctcatttcattcgctttcttaggacattggcaacataatttatggagtcaatgtgacgggtcaaaagcacgaaattgtgggggcgcgagttttgacgattcattgggtgaggggggggggggcatttggtcatgaccaaatgaattgcaatttaatttatcgctaattgacagttcgtcgcctttccgctggcaggcaacaatttggccgcctttttaaagtaccgcgaaggactcaaccgattttgggatgagaaaactgccgagtcgcagatcaatttcattcctcataagtcggtgaaagtgaacggaattggcatgcttttcctgtcaaaacggcatttgttcagtgacaaggcaatggacgacgaacttcggttgattatcgaaacggccgttcccttcgccgtgcccgccaccctccaactgatgctgtcctgtcaatctttttgcttctcccccccccccctcacttccctttttgttcagcttcgtctatctcaccaatttggccagcgacgtgcgcaagtgatttcatcccgattttataaaacgataattagtccatatcaaaaggtcaaagccaattgaggccttttttggtgtgatcagcgtttgtctgagtttggtcgctactttcgggtgagtttgacttcctcgccatatttctctgaatttgattgggtgatttctccacccgatcactttcccctttcttctgatcattccgatcactttctttcatctgttcgtccccatcctttggtcacttttctactctttcctaggatcactttctttgctggccttcatttcagccccgtgtgcagcacgatgcttttcttaattctcgccgtccggagttgacgatgcct

SEQ ID NO: 7172 - DNA, 1492 bp, Heterodera glycines
  unsure (1)..(1492): unsure at all n locations
cggtagggcaaccntgggaaccgggaaaaacaagcactggcatttatggggtctgagtgaaaaattagtgaagaaaattggagtcaaagggaaaaataaaaaataataattaatatattctttaaaagtaacattgcccaagtgtgcaaatggcctaatggctagtctccttgactttcccttcttctttcccctggttcaatccctctacagaaattagattattttcaattttttgttttgtatactcgtggctttcctataaagaaaatatgattcctcatagtttttttaaattgatacatattttatcattttttaaatgaaaatcctaccaattgagcttaataatcgcaaaaaccaacctttttttgttgaaaatctgttaacaaattgcacccaaatttttaaaatttcccccggcggcgcctatcggcaccgccgtacccccttctttcccaaaagttttttgaaaaagcgctccgaaaaaaagtgatgtgaaaatcaaatctgaatttctattaatattcgatgatttagtccaaaaatgattaattgtttgaaataattgaagaaaatttgtttgaaaattttcattaatttaatttattataaaaaaccaaataattttgtattattttcacttgatataaattaaaatttgaatttttttttaaatttttaaaatttttttgaatttttaaaatttcccggttggtcccggttcccggtttttcttgcggtcccggtcccgaaaaaaaatcgaggtcccggtcccggtcccggcttctcaggtcccggcaagtcccggttttggcaaaaattcccggtcccgtggcactctatttttaaaccataaacaatttgtcgctgcattggttgtttttgtccgggtgaacgacacggacaaacttccggtagttttcgttgatctcctcgggtgtggcattttcacgcacgcaaagccactcgtgaggacgcaactaaaagtgaattaattatataaacaatagaaaattaattatgtttaaataattatggattacatacatttaaatgatttccagtgcaatcataaaagtgaattttgaaaattttgaattttcgactttttgttcgaattcgggtccgggattcgaaattggtcaaaatgaatgtccgattcgtgatcagagaccttaaaaaccccataaaacgtgttttcacgactttttagaacagaaaaaattttttccaaaaaatgggggggggataaacttcagtattaccgtttaatgtatcaattttaagccaatttattcacaaaatacattttttttttgttgccaaaatgagcacggaacgctattccttctctctcaccaccttcaggttttgtttaatgttttgaaaaatgcataatcaattctattggtcagatacctgggccaacggcaacaagttggacactttcgccctggatttgctggcttataattagagaccggcgcgg

SEQ ID NO: 7173 - DNA, 3446 bp, Heterodera glycines
ataaatatgtgcacaattacttttgtttaatatttttctaagtgcattaaacaaattaaaataaatttttagttaaaattaaaatgtcatcattaaacacttggaaatggcctaaaattatttgaacacttgaaactatagcattttatagaagcaccagccaaattaacattctttgtatcatttttagctccaagagtccttttattctgtaaaatttcataaaatttgttttgttcaaaaaaagtaatggccaaaaatatttagaaaataactttttttaaatagagccaaaaattattatttttaaattttatttcataaattttattttgaggaatgaatgatgatcagttcagtctggaggaagaagaaggaaaagaacagcaagaagacaggaaaactccgacaaaagatggtaatatacaaatattagaagacattttcagatataatttggtaacttaacgacaattttaaaaaattaattgaaaattgcttcaaatttcagtttcggacggtcatttgaaagcaattttggagagaattggtgaattggagaagcagcaacaacagcagacaaaaggcgagggcaatttaacgaaaatgaaatttttgggcttttctttggtaactgcgcaattgaacatttttcgaatcatttaattattgagaacattttgactggcaacagcagaattaatacaatcagaaaaatcttaaaactcgaccgattctgcgaaaaaatgctaaaagcataggaataattattaaatttattttattttcatttaaataaataaataattaattgttttctattttaagctgctgaggaacggttcttacaatcgcaaaatgatcagaagaaaattttggaaagaatcttcagtgaattggagaagcagcaacaacagcagacaaaaggcgaggacaaattaacgaaaatgaaaaaatatttaatcgaattaaatgtttccattttaaatttaaaaattaatccgatttttaagctactgcggggcaattgtcaaagattttggaaaaaattggtgaaatggaaaaacagaacgaaaacacggacaaaggcgagggaattttagcgaagaataaattatcacttattaaaaattcttttttttgaataagtttcttatgaattaagaatttcatttaaataaattataacatttttaatttttgaaaattaattttaggaactttggagcaattttcaaagatggaaaatgatcagaagaacattttggaaaaaatcagtgaaatggagaagcagacaaagaaaaaggtgaatgaatgaatggaagagaaaaataaaataaaaatattttacggtaaaaataatttttaatttatctaataaattattatataatattattaaaaaatatcgaattatttactttcaggggtttttaaaattccaagaaaattgttgggatgccttcgcttctcacgaggacatcgaaatcagtggtgacaaaagtctcattgtctatgtctatccttcgagaaaagatcatagtatttttaaaatttacatcaaaattcaatttctactaacaagacgcgtggcatgccgtcttcgcaaaatatccgattgtgctgaacaagtctttgtctgactttttttactacgaaatttcagttattaaaaaaaaacgaatttaagtaagcgaattttggtataaaaagtgaaatattttattatttatttcttctttattcagttgggtcatcaagatcggattcgctgttaaacagcagacaaaattggatgaaacaattcaacttgaaaagggcacttttgcatatgaaagcgatggcgatatttggattaacggagaaggaaagggaacaaatgcccaatattcctacggtgttggcgataccgttggaattggcgtcaattcggccactcgacagatcattttcaccaaaaatggacttcgtttgggttagcaaataataaataatataattttacgattttaaattacaatttggttatttgtctattttatgctaatttattttatgtttaaaataatcaaaaatcccttaactttttcacagatacttctgatttggttgatccatcttttgctgatggttcattttatccattcgttactttggtcacttctggtgaccaaattgaggcgaattttgggcccaatttcaaattcgatttggcgactctctgaaggaaggattaattattcactaatgttttgatctatttgctctttttaatcatttttatgtttttcttcttcaattaaaatttggttttctgtaataatcggaaaattttgtcgtttcccgggtatttaataatactttcaaagtactcattgaaataattttttctctatcttctttatttaaaacatatttttgccattttatgtccatatttcgcgattttatatccatatttttgggaaaatatgaaaatcagaaattactttttcatttaaatcacaaaataattttatattttcctttcctcgacccattaattatgtttttacaatttctgtcaataaattgcactgaaattttcaaaaatttcccggcggcgcctatcggcaccgctggacccttttcttcccaaaaagtttttgaaaaaagcgcgccgttaaaaacgtgtaaatagtcactccttttcccaaaaattttctaaaataatgaaaaatgacataaaaaaattttaaataaaaccatcgaatacttttcaagaaaaatattcaaaaaaccaaaaacatttttgaaatcacctaattaaaaaatttagcctattaaaatatttagaaatttttttatgatattttatattttttgaaaaatttccgatttccgtcttccgatgtttttggggtcggaattccgattttcgacttccgaaaatgtttgaggcctcggaatgccatccgtgtttcccacccaccctttcgcgacggtcatttgcacttccttttttgtctttccctttttctcatcctttgctacactctctcgtttctccccgttaaatgttgccatcacctttatcttattttttcatccataatattctactattttgtttttctcatacgttttctctctcatttcatcatttcctttgcctactattttctctacaatttttctcccattcttctgcatttattcctattgtaattgcttatccccgcccattgccttcagcgatgacttcccctttcattggcctttattccttccttttcatccgtgctgacaaatgagtcgatccacaaaaaaaactcaacaataataattaaaccggaccttaaaaatccttaattttcttgaagattgcccaaaatcgctaaaaaaaatagcgcaacaaaaaggtgtaattgtcaattatttgttttaaaattaattcttaatgtttt

SEQ ID NO: 7174 - DNA, 1600 bp, Heterodera glycines
  unsure (1)..(1600): unsure at all n locations
ccctaaaaaatcccctatttttcttgcaaaatttgctcaaatcgcaaaattttgtaattttttggacaaaatctgttaaaattttcccggcggcgcctatcggcaccgccgtacccctcctccaagttcccaaaaagtttttgaaaaaatcgcgctgtataaaacgtgtaaaaatagtcactccttttcccaaaaatgttctagaaaaatgaaaaatgacaaaaaaaaatttgataaaataattgaataattttttcaagcgaatatactaaaaacatttgtgaaataccttttacttggttaagaattaaagaatttagcctattaaaatatttagaaatttttttattatattgtatattttttgaaaaatttccgatttcttgcaccgcaaaaaagtggttttgaaaagaaaaaatagtcaaatttatgaaccgttaataatttgatttccgatcaactttttaccgtcggatccaatcgaaaaatcttagtcgacccatcagccccttttaatgcatcatcccgccagcccctaaaaatttatttttcagcattttttgatttttggaaattttttgaatttaattgaaattttttcgaattttctaaaatcccgcaatcccgcacgggatcccgcaaattttaaatgcgggatttgcgggattaatcccgcgggatcccgtcccgcaaaaaattttgagttccagtcccgcagcgggatccgcaaatttgaaatttccggtctctacttataatgtatgttaatagttaccgaaattcctttttacatccattacatccatgtttatcatttagagctattgtggtgattattattgctgtgattattgtcgtggtcattaggacaaatgtttcaacgaaaaaagcactagcaagacaatttgtagcattgcataacgaaggatttcgtgtttccaccgtcggcgataacgtaatttttctgagaatttgtgatattaactttacgcatctatttctcttttcaagctttacaaatggtcataccttttaaacggtccaacaaatattccgcaaaatccgccgaacattatctttcttgatgataatccatccaaacagtatgttaaaaaactaattaatagggttgtaaattatatggactaaaaaacgcgaaatatggacattaaatatggactaaaaaagcccgaaatatggactaaaaaggccaaaaatggccaaatatggaccaaaatatggataaaaaatgccaaaatatatgttgtaaacccccaaaaatcccaaaaaaggtgtgcatatttaatatttgcttaaataaacctaaaaagtacaataaacaaccaaaaaatggggtttaaaacttaaaaatgcatattttttattgttgttcgttgtatcaaaaacacctccaagtttgccaaatttcgaaaaaattctcattanaaaaaaagaaatgttcgcaaaaaaatgacgaaaatatttattgaaaatgccaaaatgacgacgaaaactcaaatttttcgtgttttgtggggtgtaatttttaaaaatttccaaaaagttgatctttagggggtgtattttttcgttttttttt

SEQ ID NO: 7175 - DNA, 2661 bp, Heterodera glycines
aattgtcgattggatgactgactaaccatggggcaattgtaaaataatagaataatttcaaattattaattttcaaattaaaatttagtgaagtgaagtcggttctaattaaaacaaaaaaaatcaggcttctatcatgtgattcttttaaaatcgctgcatatatagacattttcattctattttacggctatggagaactttttttttttaatttgttgctctaaactaatatttaaattaaaaaatcccaaaacacaattttctttttaaatataaatattttggaagctgtcatgaatttcttaatcatttcttcttttaatttttgctggcttaatcagatagtagttactatccagtcattgtcgcggtggtgattgatggcttttggtctttgatgtttgccgcgtgattaattacctatggggggtgattaattagtgcgcgagcctaagcctatgggggggggggtgattaattagtggggagcgagcctatggggggggtacttaattaatgcctatggggcgaagtttttgcgtgaaattttcgcgcatttttttgattttaaatttcggaagggggggggggggtgaagcctaatttcggcgggaaattttcgcgcattttgatgaaacttttttaaaagttttggggtgtcaaattttgtttttttgttttttggtgatcattggtgggggggactatgcagcagcgctgtggtgttggtgatggatgagagagataaagtgagagagagagagagaagaagcaacgagagaaaagagacgggatgtgagataagagtgccggggggggggggatttgagagtatgcgatgccaaagtggcgtcctttcgttgaatgacgcgcggtgagggagggatggcgcaattgtttggcgtccgtaaaaacggagtgacctcaatggttggggggtccactcgcttttggcgaatagagtgacctaacaggggggggggattgattctggtgagtatgagttccccactttcattattttctcctttttttttgcatcatacgaacatttggcttccccttcccccattaagtttctttttttagaatgaaaaaaattgacgaaattgcaaataatttgagattacggacaaaaagggcagctttccaggtggcctgtcacagtatttctgcccaaaatgctgtaatttttttttaaatctttaagtttatcatttttttttcattttcagtctccaaagccccgttcagcagacaggaaagttcgccgtcagtcggtccgtcgcccgcccacaaatgtacggcgccagcgcgcagccaacatcagttcaaaactggtaaatttccacaaaatgatttttcataaaatttaaattttttaaattttttttgttttttcttagtttgatgcttccgacatggaagacgaaaattttaacaaaaaggtgggggtgaaaatacgggtaaattagggtcaaaaaagctacttttttcagcaacaacagaacgatccgataacaacagcaggagtcagtccgataatgattttttaataaaaaattaaagggtttttttttgggtggtatgaactgaaattttagattttaattctccctccctaatttaggaagaacgaagtgagcttgaccaattgtttttggaagtgcaacggacagttttcggcattggagcaaaatccaacttcaaagaggacgcggtggtgcgacgagccgacaacacattggtcaatgattgggaaaaacacgaggggggggggtctgaaaaagatattttttcgtgtgcttttccaaagacaaataaaagttttttgttgtttttagcaacgtcctctcccgccgcttttccacaatgatgatgaagcccaaaaggctgtggtcggcaagcgattggtcactgacaatgcggccaaaagcggcacctcggccgcgaaccccaaaagggtcaaaacgacgttggacgaccttttgatggatgtggaaatgagagcagagcaggacggaacgcaaacgacgcagcaaattgcgagcgaccaaactgaccaacagcagcaaaattacacggtaagtaattggttcgcctcaaaaaatgaggggttttaaactcaagggggagggggtcacaaaaatattatggtattataattttgcgattgttaagagaatttttttgagggagtgaatgatcttaaaattaagtgtttttttttcagttggtcaatgtgtgttcaacatcaacaacaaaactgtgtgaagtgcaggacggagtgcaaacgacgcaacaaattgtgggcgacaaaacggatcaacagcagcaacagcagcaaaataacatggtgatcgaaaagccggtgagtaatttattcacgcaaaaaaggaggggtgtctaatgaccaagagtctcaatggagggggaggggggttagaaaaaattcattataattttaaatttttgtgattgttcaggtggtgcatgcggtcattgatggcgacgacgaagattctgaaaatgtgccgagcttaatctcaattggcactcaaacctggccaaaaaaaaagataagttgcagtttttgaaaaggggtctaagggattccaaagtccgtctcatggtgagggcctgtcactcccatgcaga

SEQ ID NO: 7176 - DNA, 2200 bp, Heterodera glycines
cacgtacaatttctgcactgatatggggataaatattagaaagggtaaaaaaaaaaaataatttaaaaaaatgagaaggcaaaatcaattgtattggcggtcgagagtgcctgcactcaatcgtcccctccccccccccaaaaaaaaatttttgatcgaatggtaggggacgattgagtgcaggcactctcgactgccaatacaattgattttgccttctcatttttttaaattattttttttttttttaccttttctaatatttattcccatttcagtgcagaaatcgtacgtggcaacaaaagcgggacagtaaacaaagaaaagaggaaagattgaaagcagcacgtgcgcaaatcgatgctgatgtttataatggaaaatttttttttcgcagataacttttttgattttttcgcattattgatcaatttaaaaaataaattcattttaaattatgagttggataataaaattatttttttttcaaaaaaattaattcttttaatttaggagttggataataaatttaattaaaaaaaaataaattgctattattatcaaacagaaattattgtatatttttattatcaaacaatattagaggccaagtttaaatatgaaaaaaattcgtagaataggatcaaataaattataacaaaatgtcaggagaattaaatgaaatattatgagtataaataaattacagtactattatcaatcagaacttactgtattcttattatcaaacagtgtcagagtcaaagtttaaatatgcaaaatttgtattaaattgcaacaaaaatgtaagagacattaaatgcaaaggcaaaagagtagaaaaagcgaaaaaatgatcgtaaattcttttctttttgatccaatttctactctttcaatttttcatatattccaattcggaaatattttgaaaacaaatcaagcacttgggttcatcgcttgcaatgattgggatagagcactttggacaagaaaaaacatgtaaacactccttagccccaaatgtcaccatattttcattccctaaacaccacagacaccgttcactgacgatcagctttttccccttttgattgttttccttcccttctttttcaccattttcaagcaaattaccgatcacctcggaagcctgtgtggcgatctgttgcgtcttctcacgctccttcaacagcaaaacgctccatttttcatcaaggcgttgttcacgttccatcatttcttgtcgaaggttttgctccatttctcggcgcattttgtcgacttgcacttccatcctttcagctccaccatcctccagcttttggacacggctttgcaaaatttgacatttttctgcaatgtgattttgcagatgtgtaaaggcggccatcgccaaagaagccgcttctataaaggcaaaattatcttttactcaaaaaaatgattagtaacattaccattttgctcctccgacatcaatcttctcctttttactgatgatgatgatgatgatgtctgatcagtattcagcgatggtgtcattgctcgtttcaatgacgatagtgccacttgtacaacagcaagttcggtgttgcctttctcaaggactctgttcgccagttgttcatgttgcctggactgttgctgaataatctccagtgtttcgtgcagaactgccggcgacactggagaatgcgtatttgatggataaggcgaatattgctaaaattatagatttttaaattaaattataatgataattaaataactattatttaaattctcacttcatttcctgcccatttttccaacaattctaggcgtgcagaatagtttaatgacagatttttcaaatcgctaacatgggagcgaagaaatctgcacatttgtgcctgttgttgcactttcgaagatagctcgctgtccataattcacaagcaaaatatttaataagaatgaggaagaaaacggaaatgagcccagattggcttctcaatgccaatctccaccaccccaccgagcagtcaaatacggcgcgcccattaatcatcaatccaatgaccccccccccccccgtctcgccactgtccaatcactgtcatattcaaataggatgtgatgctatttaatcattgacacctggaaaatgactcgctaaaaggcacagagtagagggacattgtcaaaataattacaa

SEQ ID NO: 7177 - DNA, 1943 bp, Heterodera glycines
  unsure (1)..(1943): unsure at all n locations
tggtaatagtttacatgnnnatggttggtaaccnctccccctttttttgaaaaagaaaaatttcaaaaaaatctttagaaaaacttgtttttttttcgacaaaattcaaaatatcaaacaaaaccgattcaaatgtagggagcaaaaattgtgtcagggtttgccgggtcctggtccaagatttcgaaccgggtcagggtatcgggttctgaaaaaaataattatttttttcaaatttttttcatgaaaaaattcagatttgagattttactcaaaaaatgaccaaatttattggtttgagccaatgtgattttacagattcgtaccaaaaatgttcaaatttgcaaggaatgtaatcttcaaaatttctaatggggataatgtttaaaaaaaagaaataaaaagaataccaccaatattgaagttgcatataaattacatatctttcgatccatctcgatgagacaagtcgattggtgtaagtattgagtttaattaaattggaccgaaagactttttattatttttgtggacacaataaaacaaagaacgagtaaataaataaaatccagccatcaatcaaatagtgtaaatttagaaatattatcattgatgtaacaacagatgaatgttttttgccgttcctcagctgacaatgtttgcgatcatttgactgactgtttcgtccattgatctgaacatgaaaaaatgattattttttgattacaaaataaattcccataatttatatttcctaaaaacaatttttggtaaaaatttaattgcccttccttttcaaaatgttttttcaaatttcctacatttttaacaacaacaaaaaaaattcttaaaaatcgtctggcccattagggaaggaggatatgaattatggcttaatttctacctgacaaccatgttcatggacaccgtctggtcggatgggtccatgaccaggcggacacggcacagcacatcgatgccgccacggaaaatgccgcacagcaacagctggtgggacgacttgccctccggcacccgattcgaatgctcacaagggaaaagggcggtgcatttgagcagtttggagacggcatcttgggagggggaggggattggattaaaaaatgccataatggaaaaaatgccatactaaattagaaaatagcatactagcataaatgccattaaaaatgccatactaattgaaaaactaacttaaaatgccatactaattgaaaaactaacttaaaatgccatactggattaaaaaatggcaataatttttgtttgcacaccttccaatgtgtgcacattggacagcgcgtacgactcctccgtctcgtgcccctcctccttgagcgcgtcccacgcggtggtaaatgaagcgcccttcggcgcggtggccaacagaaagtcggcaaggccaacttcgatgggctccaactgtcgaagagaaaaaaaatatagccaatttttccggattttatttatttttgtgatttttccgcaaattttgtatttttagtaaaatacgaaaattgaattttccttaacggtgggcatggttttgaagaaggtattacacaatgaatctttcggagaaagagtacgtaacgcgcaagcgtaagccacccaccccgcttttcaaaaaaaaaaaattcatgtatgacaaccggacacatctttgtataaaaaacaaagactcaaccgaccgtgtacacttcgtcgtacaaatcgttgctttcccgctcgccggttgcggggtcgacgtcgcaaatcttgaaaaaacggggagataaattaaatgaagcaataaacccagcgagatcaataaggaatgaaatggntttgtggcttcgaaaatggaaaagcataaaacaaccacacgcactttgaacttcagttgggcgccgaatgtgccggaaatgcgtccgtcctccggc

SEQ ID NO: 7178 - DNA, 1888 bp, Heterodera glycines
  unsure (1)..(1888): unsure at all n locations
cagctgcgccacactccgcgccgaatttggccagcgcagtgacagcggcggcacggaccttttttatggggttaataaaataaagacgtttgaaaatttgaggaaaatttcaaaattgggactgttttcctagtgttggttggtctcagaattttttttgttgcttctcaatataatttatcgtcaaagaatcgaacaattttaaaaaaaatgctgtctttcagcggccttttaatttcatcattgaccaagaaaaaacgcgattgaacctcaaacgattaaatcccaaaaatgactatatcctgacggtacttaatttttgaattgcataaatttgaaagcattcgacaatcatttaatgttgctattagcctatagaatttcaaaggttgagtttcaaaaaatgccaaaactttacggaacctaagttttatttattttttttggatacctttttaaagatgaattttaaaaaaattgcaggcaaactcttatgatataacatcaaattccgtctctgaattaggactttttttatttgctaacaataaaacgaattgtcacgccgtatcgaatagccagatttttctaggtgttagagcctcacctgagtgctctccaaaatgacgcggttgtagatgaaccgaatgtagcgggacgggttcgccgtggtcggtccttcacggccgagcaaatgcagcacacgggtggccaatgcggcgtgttcacagtcctcaataaactcgcaactgaaagggcagaaaaagcaattacttagtaaatcaaaccggaaaataccaaaaaaaaaaaaaaaaaatcagaaattttttggctttgtcgacaaaaatataacattccaatgccaaataaaatataatttgggaaacaggtggatgaaactactcaaaaatatcagtaatattaggggaatcaatgcccatgaaaagtgctcacagatgggacaggcccaagtccttggcactggggttgtcctccacgatggtgatgatggtgtccacaatggcctttttgtagtcgaaaccgccctcgtcgcgcagcattgaggccaaaaagttcatcagtgtggcgtgtttgcgcgggtagcgatggcacagcgaacggatagcctcgatgacgacaatctgacaaagatttgggatattaaaaaaaatatataagattttaagaacagatttggcatgggttaattaatatttgaggataggtcctttcccccgcatcgttttccctcgaaaaattagaagaaaaaattggtttttcgcgatttttcaatgtttttatagggataaattatgcgaagcagggcgctccacccacgaagttttcttcgattttttagaaaattttaaaaaatgatagaaaaaatttagaaaaactctagaaaaaaattcctaatttttttcttaaaaataggaatttatagctgtttatcaccaaaaatgaataattatgctattttgagatcaagtttcaaaaatatggttaatcgggttttagaaattttaatgcttatttagaaaagtgcatattgttagaattaaaaagaattatgccctttttcttttgaaaaattttacaccttgaattcgtcgctgatctcgctgacaaaagtgccaatctgcttcatcagccgttccacgctcgcctcggcacccgtcttcaacagcgtggtgatggccaaagtggcaatggaacctgtcaaaatattttatgcaaaaatcgacaaaaaaaaagttgattgagtgcgccatacgattgctatccgtgatcaactgctccaggtccacgttgcacgaaatcacncgcctgagggtagtccatggaaattncngtnntcacgttcggacggccgcaaaacgcagcgtcg

SEQ ID NO: 7179 - DNA, 1716 bp, Heterodera glycines
  unsure (1)..(1716): unsure at all n locations
ggaaaagcaataatttttaaaaaaatatcataaaacttcaaaaaatttccgtcggtgtattagaaaacaaaaccaaaattaaaaatttagacgaaatttgtttaaaaaattctggggagggtatcactaaaatgacagagagcaaaaaacagggatttacagccgttttaaacgacctgctaggttccccgctacccaaatttcatacatacaattagttagaccgaacacataaaaagtgccatcccctttcctcccccacctgctaatgcgcggcaaccgcacaatggcagaggcggcctcgtagacgaccatctcgtgtttgttgcgcaggcaactctcgatgaaggtgaaggcggagcgcgactcggcgctgccgccgccgtccacgcccagcgcgtgctcctccgcctcggccgcgatgaggcgggccgccacacggacaagttggcacaacgccagcggggagcgcagtccggacttgctggcaaaggacacaaaatatatatatatatataatttaaattcgaatagatcaaagatttcggggggggggctgaagccaaaattcgatttttagggatgtatttttggttttttgaatcccgaattagggggttgtgttttgcaaaatttttagccgttttcgccaaaaattactattttccccacatttgcgcctatgtccaaaatcggacccaaactacccggacacgacttttacctgaacttttggaccatcttcagaatggccagtcggtcgttggcacggatttgaacgagcaaagaaagggcgtggaattggaccatgtgattttcggcggacaccgcctcctgcacttcgttggcccaacggcggacgaccgaaaaaagggggaaaagccatgaaaaaataaagatgaaaaataaagacaaataaaatctcaaaaaaaaaaaaaaaatcaattttcacggcacttttcatggtgtaaaaaataggagcagctcgtttccccagagaattttttttttaaatttactaacttagaaacttctcaagaaaaaatcttagaaagtttttttataagaaaattctaagaatttttttttaaatatattttatggtgaattcgtaagatctttcaaaaaatttttccaaaaaatcgctgaaaatttctcgaaaagatttattaaaaaattttttattatgaaaaaaattctatgatttctttcttgaaaaatttctaagttagtaattttttttaatttcttgggggggagataatgcaaaataaaaaaatttcaataaaaaagtaagaaaatataggtagatgaaatttgcaaacataataagaaatgtttaatgaatgtgcgcaaacctcggggcttttgcgcatcaaatggagcgatgagaccaaagcggcggaggacaccgaagccgttttgtccacaatcgcctgcttcatgtagcgctcgatagcctggcacaaaatttttttgtaattgccgttttttgccatgaaaaattaaaatgacgcacgatcaaccaaaagttagttatgcatgaaaaggaaaacgatgacagtaagaaattttcaaaaattcaaagaaaatttttttgaagaattttctgcccttcccgttggtttcctganacaagtttttgatgaacacccattatatatgttaaccatggcatgcatgcacaaatccaataccaccacgagttgaacaccc

SEQ ID NO: 7180 - DNA, 2784 bp, Heterodera glycines
atacggcaaagcgcgcggattgcgggcgctcggtacacgtcctcacggccggtcatgtccagagtcagtctaaaggggaaagggggtcatcttcggctatcccccatttgcgtacgggacatttgcgcgtattttttaaatcccaaatatcctatcggcattaaaatctcgtcttatggtttatagtagcattaattttgtttgtttgaataattgacgattttttcaaaaattttattattatcaaattattggatacaatcaatttctatcatttatataatgctgtttaggcgatcaggaatagaaaaaactcagatttgaacctgatttttgacaaaagcgcaaataggtatctggacacggtcatcatcaaattcaattgtaaactttacggaaaaatgttccgttttggcataactttcacatccaataatttatgcaccaaaccgaaaaaggaggtcctttatcgctacgctaattaatgcaatagggatggtataaaaattgtcacttcagccgccctttgttaagaatttttgaaattttgaggtataggcccaaaacggaaaagtaccaagctgttgaaattttgtaaatcaaaagcccgcccggagttttgaaaaatttgtaaaaaaaatgtcaatttttcagaaagatttgttgtgtaaatgaaaagaaataaaatattgaaacaatgaacaggaaacctgctggtcacaatgatcacatcgctggacatttggcacaactctttgatggacaagtagaccaacatgcgcagcgtcatgtccttggcctgccacagtttggtgatggcaaaaaatgtgtcggtggcctccgtcttgccaatggtctccccgtgctgcagcaagtacagcaatttgcacagaatgggccgacatttgcgtgcattcaccggcgtctcgttgaaggcacgcgtctgaaaatgggggcattttctgtattgtcgtcgtcaaatgagggaatttgcatatttttttgccacacattttgcatgataattaacaagttaggaattttccgtgaaccagggactaacaaataagcaggattcggcttaaggatggagtggcgaaccataaccataaaatccagtaaaagttttaacattcagactcgttaactgataaatttggcaaaagtttgagaaattttagtccattttcaacgcccccaacaaattgtgttcaaacattcgaactccgtgcatttgcgcttgcatatgcctaaaaaaaattcgttgcaaattcacgcttttaaatcacaataggcatggcttaatcagcaaaaagagccggacttttcgtgatcggctatgccgaaaacctattaaaaaacgtgtttttgacttaaaatctaaaaaaaattcaaaaaatggggggacaaattgaactattaccaaaatatgttttccttgtaatttatgatttgagtttttgttcgaattctggtttggagctcggaattttacaaaacaaatgtcatattcgtgaccagcgccagaaataatcttagaaatgacgttttatttgaaaatttcaaggggcgtctcaaaacagaaaattaccaaagacccttggacccatttgccgatggtctccaaaaagtatgtcgtcatttacacggtcttgaccaattataagcgcaaatatttgggtaaaacaaaacctcttggacaacagtggccttgtccaagtggtcgtaagggttcccggcggccgattcatcgtcttttttgtcacgacgcatttgaagcacaaaacagcgagtttattatgtatggtatttgaggtgctaaaaatatcgaagattatacagcatatagaaaacgaattgcaatccatctttaatgacctctaattagtgaacgacaaaacgacgtttaaaaaatacaaacgatgtaacaacatcgttttgttaattttaacgatgtacataacgccaacgatgttttttttaaatatacgaattatagaatcggaaaagatgtaaatgaaatgcagttgttttttatgtagattgatgcaaagtgtgtgttgaacgaggcagggcggtgggatgggtgggtggaacgaccttttcttcacccgagcgaccagccaacgccaacgaaccaccactgattcatctcatagtagtatttgttgtccaccaatagaaccaaaaacattttgtccttttcctcggaattaaatggcttcttcatcacatttatcttcgcaactacaaaattgtggattttctggccaagactttaaatgtttaagaatattaagatatgtgatgtaattgtcaatgctgctaaagagcgccgtaaagaagaaatttaaattaacacacaacataaggaggactcgaacctgagaccccccttttggtgactaacgcacagaccactaagacgaaaaaaccaactcaattgtacaagaagtccaaaattgaatcgccgtgtagaagatcaaaatacctataactagggcttcgatttttaggtttttacatatttttttcctgagctccccgtggcctgaaacgcacgaaaaacatgtttttttgggctgttgttaagctacttttcgagttattagcacctattttctaggtttttatttttagcacctaaaaaacctaaaaaaattttaaaaaacttattttcacctattttggcattttgcccaaaatttgttaacaaaaatgcaataaaaaggaaaaacagacccctaagaatcgaccgaaatttttttcaaaaaatatacccct

SEQ ID NO: 7181 - DNA, 4253 bp, Heterodera glycines
ttgccggagccataaaaattgacgacgatccgcactttggtaaatgatggtaaacaaatttagcatttgaaatattccaattcagttctgaaacaaatttcgtcaattatcatacagaaaatgaaacaagattcggacttaaattatgcagaagtgaattgtgaaattatggtcgaatgggaattggtggagttttatctgatcaaaacggagcagggagaaaaatgggaacaaattgatcagttgcgaagcgaatggagcaaatcacattggctgggcaaaaaacaaacatcgcagaagacggtcgatgaactgatcaaagtgttgcgcggcattcgctgataaaagacggacgaattcgaattgttgcactgatttccttatccaacaatcttggtatcattcgagagctcttcagatgctttaatagcctgcaaaattccaaaaaattttgttaattttgaaccaatttatggccaaaaaagttggaaaatttggttttttgaattcttctggccataacttttttgaacctaaattttttaaaattttgcaggctaataggggacacttagagctttccaatgatatcaacaatgttggatttggttgacaaagaaaaaagttatacctaaaaacgtgccggcgcccaactgagcggttccggttttttgtttaccattttcctcatttatttttttgggataaatcgttgcatttatctcagtattcgagaaaatttaaaattaatgccaaaggacaaaaatgtaaatttagtgcaacagaaaatctataaaaaaataaaataaaattttaaaagccaatttattttttcaaagatttacaaaaaaatgtcagggcttcttggatcaaaaatttaatacattgaactaattggttggaaaattttttgcgccgcgcccgatctttagcagaaaaaactgatgttttcgaagcaaaagtttcgcacgtccctagcggcatgctgaaaacgcgaagcgattctgaacgaacgtttaacatatttgtgtaataaaaatatatttagctgttagtaattcttggcatttttctctttttttcaaaataaggaaattgattatgtgttgtggtggcgatgaacaaagtgcgaaggaatgaatgaattggatgatggaaaacacaggcacaaaagggctgattctcaacagaacaatgctgacaaaaatgaatggaaaaaggccacaattattcaattgatggggaaaaaacaataatagtaatgataatgacaggtgtcaacgttcacaaataatgaggacagagtcaacgttcacaaagaatgcgctttaacttatcgataactatatagtatatgtataaggcatatgcgaatttaagtgagcagatttacgaaaagttcggaaatcaaatgcatatttaattaacccattattattaaattaaaaaatccccttttgtgggaaagacggattgatcacttaaacactggcaaattacaacgaaaaagatgcatgcatttgtatgtagcttgtttacaatagcttatatagtgtgtgtgcttttcactgtttctgaacaatcatttttgggctaaaattgatgcgaaaatgtgacacaaaacaaatggaaacaaaggaaggaatgatgcgtcaaaataatgtgataataaaaataataaggcaataatttctgcaggaatttttttctttttttgccatcattaatccatcaaaagtgccgttgatgactgtctccgctaagggaaaactgctgatgttgcggcacggccgggggacaaatgccgccaccgccgttggacgacgacgaagtggaggtagatgaactcattgctgccgcagccgctgtcgtgccgccgtccgcgccgtagaagcgctcctgggtggccaattcgtccgcaaattttgtctcaagtgtctgaaattggcgtcaaacaaattttactagttccattttcaatcattgaatatatgatgaatgtttggtgcctggaaaaaatagctaaaaactttcaattttttcttggtattttcttattaaaaaagtgaggggggggggggtgcgcattttcgtacgatcggcctaaataaaggcaaaattggcctgtccctcaccgcttttcgtgcgggtagcgacgccttccactcggccaacaactgctggtattcctgctcatactcggccagtttggtccgctcgttctccaacagcatgttccgcttctcgttctgtacgacaaaaaggaaacattggcaattttttgtggcatttttaaatgcttttccaacatggatttcctccaactcgcgcatcacttcttggtttcgctccaccagctgtgccaatttccgcttgcacttctggtcgtactcctccattttcaggcgcatccgttgcttctcccgctcctcaaacatgcgcacttttgctgtccatgtgtcactttcgccctgaaaaatattgcattgaagtcctcgtcttgccaatcaaatgccgaattaaaattttttttcgattttttcccatttttttgtttgtttgacaaatggaggaacccggcggggaaatttattgagtttaggtgtttgcgataaaatgttaaatcccggagtaaggaaatttttaattctctcaaaaaaatatgacaccactctctgttaaaatgcactcaaaattaatatttttcgtatgtgcataaaatattaattttaaatctgaattattatgaaaaattgtgttgagatctgatggaactgtgcaccaatcacttacgggcaaatccacctccaaactcttgcggaacatcatcgtccgcgtcttcgcctcgttgcgcaacactttgggcaacgccttgcggtcggcggtgagcgcgcgcaacagctgttcctccttggactggttgatgcggcgcacgtgctcctgttccttggcatgccgggccaacatgtgcgtccgctgtaagtggaacacgtcctgcggggagaaatgatttttaaaaatgaaaagttggagaaattttttgataaaatccaaaaaaaaacataaattcatgtaaccgcatttcttgtatttataatctgctgtagttattgttattataaattttttgtttttaaaaactgaaaaattttcctagcggccggcgcctgttggcagcgccggccttaaaattcttatttctattaaaaaaaattggctcaaaatcgcaaaatttgattaatttttggtgaatctgctaaaaatagtaaaaaatttcaaatttttcccagcggcgcctgttccaaaaggaaaaaggatcttttgaaaagaagccgagtgagtacctgataaaaaacaaattgacaccattcgcataatttgacccatcgcctcttttttcatgtaagaggggactgttcccgatgcttgtctcgttgtctccttgttgaacaactcttggtatctgcttgactcaactcactcgaaactgttgggtgagcagcgcgtgtttctccgccaattgcgcctcctccaactcccacagcgccgtctccatgctgcgctccagctggtgcttctgctccaggaactgcttctccagcaggcacagcttctcccggtgccggtcccgcgcccgaagcagaaacacttcctgagagcgcatctgttgctcaacaaagtcggattcctggggaacaaagtgaaataatggacgaacggacggaaaaaaatacaaaatgttagccatgtttttcaaaaaaacaattttttaaaattcactttttcgcagtggcgcctctccaactgatccttgcgctgcctgaacacggttttgcgctgcgcctttggcaacatgtccacttcctgcttcataattttctgctcttggcgtaaccgttcgcggaaaacgcccaagtcacgctcctgggcaaaaatgcattagaaacaatggggcaaaatgcaggagaaaaaaggggacttaaattttataaaaaccataaccatatcttccctgatgagaaatttcttagaaaatattttaatgtttttagggaaatttttgtcaaaattatccaattttccctggtggtgccagcagagagcgaacggcacagggccggatcctgtacagaattttacaggaacagtacctttgtaggcttttttcactaaaaatgacaaattttgcgtcatgggtcaacttttccaaggcgatgccgttaggcgccgccggaaaattttggtattttaat

SEQ ID NO: 7182 - DNA, 1542 bp, Heterodera glycines
  unsure (1)..(1542): unsure at all n locations
cgccgaacccccctgccccccaaaagtttttggaaaaaccacgccgcaaaaacgttttttaaaaaaaaaaagtcgtcgacttgcaaaaaaatcgcaaaatttggcagtttttgggccaaaatctgttaacaaactgcactcaaattttcaaaattcccgacggcgcctaccggcaccgtcggcccccccggttcaccaaaaatttttggaaaaagcgcgccgcaaaaaaagtgcttttgaaaagcaaaaaaaaaggtcgtcgatttacatggccgggaccatttcgcaaaaatgttggctgacccccccccctttataatgtatgttgtccattttgaaacattgtgttggttcatcacctgttcgacacggatgcgtttggccaatgcgcgcatctcctcctcctggtgccgttccgtctcctccattttcttcttttgcgtgcgcgacaccgcctcaatctccgcctcgtacgtgcgctggacggcctgcttctcgaacacgaacttgcgttcctggtgctcgcgcacctgctccgaacggctgtgcaaaacaaaccatggggagttaatgaaaatttcaatcaatggctcattaatttgacatgcgtttgcccaataaccacctgttcaattcctgctgctggcgcgcctcttcacgctgcatgcgtttcaagtcgcgcagctcccgcttcctgagatgaccaaaatagttatcccgtccagactcgttttcatcggcgcgctgtcatttcgtcccgcgtcgtttcgtcncgcgtcgttcgtcccgcatcgtttcgtcctgcgtcgtttcgtccccaagcctttgtaaatttaaatttaaatggctgtttttgcattttataatttacatcagttcttcaaagtcgcttttgaactcctttttcagcatggcaatcagatcagtgccgaattgttttttgaactccaaagccaatgcttgacgcttaatttatgaattttaaattaaaatgttaaatttgaaatttgaattttgtctgtcacctgttcgttgctaatggagcaaatgacttgcgtaacttcggccttaattatttcgaaatgaattttcactcaaaattcccccctcgcccaattgctcgccttgtgcttcttcgcaatggcatcatgcaaatgatgcgcagtttgtacggttttaaaatgaggattatgtttgatggttgggccaagcttggccaaggaatgaccgatcacaacactgatcagaagcagaatggtaaggccgttttggagcattttatgagtgagtgagatgaatggaaaattgggattggaatgtttgaaaaatgccgacttaaataacccaatttggataatatggcatcattaaatttggcaataaaaacataagagtgacatgaatgccaaattaacgtggacaaagtgccaaaacggcacaaaaacatttccgcccctttccttaccttatggacagaagaattgtcaaaaataggtgatatcataattggaaaatatttatgtgaaaaggaaaataaaaaaa

SEQ ID NO: 7183 - DNA, 1251 bp, Heterodera glycines
atttagcggtcaattatgcgcacttatcgattggcaaacggtccattggggtaacccttgtgaatacattggccgtctgcttgcgctgaacacgacaaatgaagtggccgaatttatgggcggaaaggcaccatttacattgtgtagttgtacattcagtattcactttgatgcagatttgttgacacattattagtatttaagccatgttttgtagttttaaaagcagtcaacagagaaaagctcaaaccgtgaaaacttccgttgacccacaatttattaacgcattgccatttacaaattaaccctgccatttcatacgcagttggtgtttggtccaatttttaagagacaaattcactgttttaatcgtcaaaactttgaataggtatgtatacgtacgaattcccaatatttattgaattatgttttagtttcgcttttgtatggttggtccctttcttttagtcttgtgttcgttttcgaaagtcccattttgtcttatgtttcgttctttaacctcccccgccccctcctccccgccggtcctcctcacttttccttctcactttcctttgtcgtcatcattcgcgtgatgtcttctcctttttgtcaccacgtgcttttttaatttattttctttacagctgcttattctaggcaacgaattgttaaaccaaacaaacggctgaaatgctaattgcttatatccccaaacgaattcatctcaatttgaatgtggtcggtgctgcacttcgtcagcgtatgccgttttctgcggctgtgcttgaccctcacgatcagctgaaagattcagacaagccgatgtcggagcagatgaacccttcattctttaaggtattcattttggctatgaccatgcttttattattcggttcctaaaaagatggtcgattactacttcgacaaaggcgctgctgtcattgagccgaaattggttgagaacttcaaagcttcgcatgggaaatcgaaagaagagagggtcagctctgtcaaagggattcttgcggcgattaaacccgttaacaaggtttaaacttgcggttgctctatattaaatttttaatttaaaggttctttacgtgaccttcccgcttcgacgcgatgacggatcttatggtctcaatttatgattaataaaagcaacaatctccttattttcagagatgattgaagcatggagggctatgcactcaggtaatatattaagtgaaagttttcaaatataag

SEQ ID NO: 7184 - DNA, 4673 bp, Heterodera glycines
  unsure (1)..(4673): unsure at all n locations
gcaaatggttcaattcgcggctttcctggagccaaggctttcgagccattcaccgacttgattttcgagaagtgcgacatccttgtnccggccgcttgcgagaaagctattcacttggggaatgcacatcgtattcaagcaaaggtttgtcgatccgatttggaattttatttttaaagcccttgtctcaggtcattgctgaggcggccaacggaccgacaactccggctgctgatgcagttttgatgaacagaggcgactgtcttattgtgcccgacatgtttatcaacagcggaggtgttactgtgtcgtacttcgagtggcttaagaatctcaaccatgtctcttttgggcgtctgacttttaaatatgagcgtgactccaactaccatcttttgggttggttgctcaaaatacattttgtactagtagtttatttgttgtctgctgtttaagagtcggtgcagaagtcactcgagcgcaccttcgaccgtgccgttccggtggatcccagcgaggagttccaattgcgcattgccggtgccagcgagaaggacattgtccattctgtaggagaatgatggcttcattcgctaattcaatcaacctaaactaatttcagggccttgagtacacgatgaaccgttcggccaagcaaatcattgccaccacgaacaaatacaacttgggcttagacttgcgtactgctgcctatgccaacgccatcgaaaagatttaccaaacctatgagacgtctggctttaccttcgcttaatcgatttttcgacgcattcgtaatgtagttaattctcgggtttttgaacgcgtatcatttagtgtttgtcagatcacagttctattgtattcgattttatccgacaaacctcattcccgtaatttttttgtcttaatcatcgttaattttttcgatttgtctcccgtttttgtctgtgaaccttttccccatctacgagtacaaatagtgataaaaaattaaaaccaaaatgagagatgaaccaattggtgtagatattaataacttcgtgatcgaaaaagggggaacaaagcacagtatgccacttttaccccaaagaatccattctttaaaaaaaattcaatttttttttcgaattagggtccgggtttcagaatttggcaaacccaagttcagatccatcataatcagtatcttcgaaaacccctaaaaactgattttgagcacaaaataaaaaaaaaattaaattagaaacactcattcttcaggattgccggtttctccaaaaaaaacttactagaaaatcagcaataaaattacttattttctgtccattttattttttagacgaaatttaatatattaatgtcgtggagcgggctcgaatctcaagccctctactatcttacaaaaaccaatatgccaaagcccaaaattaagtcgatgtgtattataattgactataagggggaggtgagaagacagtgagacgcttgaaaatttatccttaattacatctgtgcaaatttcgtccgccgggattaaatagaactgtgccttctccaatatgaatcactagaaaggaaaggtcacaaataatataaaagtgcacaggtgagggaaaggctcctccactcggtttatcacaatccgtttatttctgctcttcctcggccttcttaacttctgtgtccggattaaacacctccaaaatggctcggccttcaacctcggacatgctcaattgcttcaacaccttaaaacttcatttatttagggggcgtttaatccattcagcgacttgtgatgcctggtccaccggataaacgcgataattgggggcattgagctgtccctctgaaagcaatgtgaccaggttcttcagttgctcaatggaaccacgcgtaacgcccataatggccaaacggtttttggccactaatttgattggcagctgaacgtccaaacccggaataccgccaacgaaaaggacaccacccttaagcaaacggaccaaattaaatttacgttcttaacaatcatttttgtttgccatacaaacttcagaaaggcacttgagtgaacgggcgactgtacgaggggaagtgacgaaatcgaacacaatgtgaaggccattggtagcgacgtctttggtccgcatgattaaatattcctcaaactctgaaacaatgtccaaatttgtaacgcattattttgacaaaatgaaatagcacggaccacactttagtagtaattttttaagctaattattcttaaaaagcacagaaaattattaatggggttaaagaaaccaatccggttgcattaggggaattgttgcatggaaaacccaaagttaaaagttaatggtattttgagatttaacctaagtggtaaaacggcccgaagttgacctgaatcgtcccaatgcaccacaaagtctgctccattacgttctgccaggcaaagtctctcctccttagagtcagcaacaatcagtttgattcggttctcctgacccgcggtaagaaaatgtttggccaatgtcagaatccaaagtccaagtccaccagcgccaacaattaaaatgttgcaacatccttttgtgctggcgatggcctcaacgacaggacgggcctaaaagggggaggacactgaaagaaagtcggagggaatcaaaggcacatggacaatcgcagagagtgcccaagttgcgccggccggaagaatcgacgcgacatgcattgacaaagtgtcgggaatcttgacaagaagcgacaaatttggcactgccacaaagtcagcatagccattttggcacatctgaatgagcaacgattgttgatgaataaatttgcacttgagagaagtacctcttcagtgggccatacaatgactttgtcgccgactttcaaattgtactcaaccggagttgcattgggcccaaactcatcgatcactccggaaacttcgtagcctgcatttaaagacgaataattaatatgaatgggcacaatactcaattaaattaacctggaaaaagactggtgtccttaacgccgtgagttatacgtgccttaaaattttctgattgtttaaattccctcacgacaaaaacttttctttttaatttacaactacaaatcacttgtttcgtgttactgatttctttgtcagttagacaaactccggcatagcaaacctaaaatcaagtggataaaccaataaataattcttaaaatgaaattactttgactcttgcaccatttaacggcacatcggggacttcatcttcctcaaaaaagtgcacttccttcaggtccttaggcgaaccaagtgaaatccgacggtttttgacaccaccattctgtgactgagccattgaataagacgaaaatttatttatttctgttaaaaaagaacctaaattacttttaatgtccacgccggagaataaaaattatatgtaattcattagtacagggttaccctttgtccttatttgtaagatttgtccttattttgagggtccaaatcttacaaattttaaatgtctttatttgtaagatttgtccttatttaagctctttgtccttattttcgtcttattttttggattcagggagaaatttagatttttaatgataatttttgaaagaaatgttttttgaagcgaattaatatgcaaaatcttaacaagattcagttaaatattcaaatttttcttcggcggtttcttattctctttaaaaaattggctcaaaatcgtaattttgtcatttttgaacaaaatcgttaagaaatcgcattaaaaattacaaaaatttttccggcggcgcctattagagcaggggtgtatttgttcttattttctaagaaatgttctgatttggggtagtgccttattttcatttaaaagaggaaatttctgaaaaatttggctaattcctaacaaaattcattaaaattcttaaaattttcccccagcggcgcctatcggcaccgccggccccccaaaactcctatttttttttcttaaaattagcccaagatcgcaaattttggtcattttttggacagaacttgttaaaaaattgcattaaattttcaaaaaatttccccgcggcgcctatcgacaccgccgaactctcttccctcacctatacccaaaaaatttaaaaaattaaaattgattttcggaaatgtataaatttctcatttctaagccggaattgcgcagaaaaatagttggcggtgagtaatagtattagattgctcaaatgttgggaaaccatttctggccagtggccacaattcgaaaatttgacaagcaagcggtgcagaaaaagaagcgatgaaataacaacgaacgaagtgaaaaacaaaatcagtaatatgtaaaaggaatgggggggggggggactgcaaaaaagaaatgggattattgtcggacgcgatgaatccccatacctttcaattaaacggataattattgatgaaaatttctgttctgttgaatatagttatcagttatcactttcatattaagtaaagtcatcaactgattgcactgcattaattaggtaggcggtttatttagtattagtcatttcattggaactatttttaatgacaatatgaatagcgacaataaataagaaatacatacctaatctaa

SEQ ID NO: 7185 - DNA, 3277 bp, Heterodera glycines
  unsure (1)..(3277): unsure at all n locations
aaaaaattaaaanttagattttcggaaatgtataaatttctcatttctaagccggaattgcgcagaaaaatagttggcggtgagtaatagtattagattgctcaaatgttgggaaaccatttctggccagtggccacaattcgaaaatttgacaagcaagcggtgcagaaaaagaagcgatgaaataacaacgaacgaagtgaaaaacaaaatcagtaatatgtaaaaggaatggggggggctgcaaaaaagaaatgggattattgtcggacgcgatgaatccccatacctttcaattaaacggataatcattgatgaaaatttctgttctgttgaatatagttatcagttatcactttcatattaagtaaagtcatcaactgattgcactgcattaattaggtaggcggtttatttagtattagtcatttcattggaactgtttttaatgacaatatgaatagcgacaataaataagaaatacatacctaatctaaacaaatttcagcattgaccgacaatttgtaaattttttcctcgaacccactttaagagaacggcaatgagaccaccgaatgtgagttgactaaatggtaatacctagtacgatatccccccatttttagacaaataaatgaaaccgattaaattttcgactctgttcgagttcgggtctgggtttcggaatggatatctttcgtgatcaaagaccctgtggaaacatttttcatgaaacttgaaaactaaaatattttcaagaaaaggggtagcaaaccttagtattgccgataaacaaataatactttattaataaaaagttttcagtttgatcatgacctcacttctttgattagacgtgcaaaaatgaaatttgagtctcgcgcgaaagaggacttactgaatgcactgaacaatttcactgatcttcaaccggacgttgtgaattttacttttccagacggagtgcccagatggtgcctttctttttcgggcactattcccattcaatacaaggtaaagtgttccaattaattttctctcatggaatgacaccctaagggcgctcgatacaacattcccgtggcactttactttttggaaagccatccaaacgtgggcccgttctgttacgtgaagcccacttcatgtatgcgaattcggccatctaaagttgtggacgattctggtcgtatttatttgccatatcttacggaatggcgatatccaaaccatgacactaccggattgcttcaggtttcaatgtttctcaagttcaatcgtttgaattccccttttcaggttattacgattgaattccaagagaaatgtccggtatattctgtgagcaacaattctaaaaacacgggtcattcaaacaatccatatccacactcgggatccatgacgaacttgccctacccaaactcggcccttccctacccaaccgccgatccgccctcgcacataatgccacagccatcctcctacactccgatgccgcaaccgggtgttttaagagttaaccagcagatggatatctttgttttcattgtatcggtacaggaaattatcaggctccatattcaaattcatacccatcggaccccatttcttacccaactcctgccacaaatgtgacggcacaatccgatggagtgtatccctatggaaccgggactatccaaccaacccacattcatgccagtttgcttagtgcggtcgaggatcgaattcgacaacgacttcgagacaaaattggtcagttttgtctataaatttgtatttggactgtcttatcccctattttaggcactccgtttgctgagttgcaatccatcgatgtgaacctgcaagaattgcgtgtagggaaacaaaacttgcgcgatatgctcgacaacattgccagagaccaacgcgaattggagcgggttttagacatttatacggtgcatttaaattagttttttttatttgttgtcgttgtttcaggataaaaaggaagagctcgaaagtgcgttgaaagtggtcgattcaaatggcactacggacaacggagttgcatttaacgaggaacaggcgatcgatgcacaaacgcccgtccatcgacaaatactcaaatgccatgtgcaagacagtgccattgacgacaccatttaccacttgggccaggctttgcaccaaggggccgtcaatttgcagacctatctgaaatatgttcgccagctgtccaaacaacagttccaacatcgtctgttgatgtacaaatgccgggacagatcgcgtttgactatttagtggaaatacaaaaaaatgtgcacactcctcacttgaccatcattgcttaacgcaaatatgcaaattgaacgcattctttttctgtttattcggtagagggaaaataacgaaactcattttaagctgtaaatattgatgggttattcggattaatattatttgagtatgaaaatgttaaatacggtaatggttagagcccggacataaactgaactttctttcgtcctaaggttcttgtttttgcccgggcttacatttatttcttagccattattttagaggaattcgttcgtttaattaaaattttaaacccctttgatgaaacttcgtccttttcattgggtttgcttgatcaataaaatgaaatttgctatataaatgcacatttaatttgcttttatctcgcgtttatttttcgctcaattcctttattggatttgtatatttacgtctttcaaattcaatatttttaaggctaattggccatttgttgtattttggacagttttttgatttttacttcagaaaagtgctgaatcatatcacttgaagctcataccgaatttttgctcacaaatgcaggcgatcaaatgcgttgtcgttggcgatggcgcagtgggaaaaacttgtcttctcatcaggtaactaactaattgattatgtttcaaatgggaatgtcatgcaatttcttcctccagttacacaaccaatgcctttccgggtgaatacattccgacagtgttcgacaattattcggcaaatgtaagtgtcaatatgcatattttacttacgattaagcgccttcaaattctgcgtctgttttttgtagtagattaaaggtaatcctgtgttttattggtcccatattttgtgcaatacggagtagtacccgggggttttcgggggcgctgatcacgaatatgacatcaatttcgacctattccgaaccccggacccgaattcgaacaaaagtcgaaattaa

SEQ ID NO: 7186 - DNA, 5396 bp, Heterodera glycines
attttgatcgtatttttaggcacttacctaatttatcttaagggacctgagataggcataaaaaagagattcttccacaattaagaaaaaattcatccaggtttcattgcctttttatcgatcgaaatgggtcggggtcacttcggcgcggaccatttcggcgccgcaaattttgaaatgctataacttttttatttgtcagttagctttagccaatctggcatcatttgaaagctctatgtgtgctctatatttacatgtaaaaatagaaatgaatgattcaaaaataaaaaagttatgccacgcggcgccgaaaaagccaagaaaaagttaatttttgaggttttttggccataacttttttgtaaactgacgaaattttttgaaattttacaggctaatagagaatctgaagagctatcgaatgataacaaaaatttttaacttggttgatcaggaaaaaagttgttagcaacggcgccgaaaaggccggcgccgaagtgggcggttcccatcgaaatgcctggacctggattccatgatgaaataccgtaggccaatttggcatactgccaagtacacgcatatccaaaatgaaactttcgtccaacagtttgtcagcttcgtcaagaacgaacaccttcaaaaggtcgaacatgagctaaaaggaaggagtagacgaattatttcgaagaaacaagcaattttctgacatttttggactggaaaaaatcgcaagtacggcccggcgtgccgacgagaatatcgcagccatcgatggaaatgttgcgaatgttttcgtgtctcactgtttcaccgtaagccaatgaaatagatacatcgcaacctaaacagaaaaaaccgattaaaggcatcgaacggaacgacggtgcccaccattgcacaatttccgcccttgttcgtacacttggattgccagctcacgggtcggcgacaaaatgagggcgtacggacagtcccgtctcgacttgaaagtgccttcctttttcagtttcataattttgtcgatgattggcaggaaaaatgcggcacttttcccgctgctcgtctccgcgtgtgccttcacgtcgaagcctaaacaaagtttttaaaatagcgtaaaaacattggcgaaatgtgtcgcaccgtctcttatcagcggaaaagtgtacgattggatcttgcgaggtaccacgtatttgcaccgatttatgttgtcgagtagctttggctccagatcaaagtccttccaagtccttaatacagaggaaattcaacttccattatcggatgaatcgcttactcatacgctgtgaacttttcaacattgtctccactgacaactaagtcttcgtcttcgtcacggatgtccacgtagcgttcactgacgagacagtcctcttcgtaaaggcattcgatcggtcttttcttgtaaatgtgtcttggccgactcgaccttggctctaaattttgctttttagctcgtcataaatgctttcactccgttcgttaccatcccgtggaaagcgttcgtctccgccatttgttgcggatggtcctcgctgactgtgattcgacggtctttcgccaaattcgggtcgtcctcttccgcctctgccgcgcccgaaacgttctccgccgtctccttcgcttccgcgaccaccgcccctacggtcaccgtaattctctcttccgcgtccgttgttttcggcatttggccgggcattgcccaaaccaccattttgacctcgaaattaggataaataatacaaaagaacgggggaaaaaccttcggagttcatgccacgaccacggccccgtccaccaccacgcaaaatagtgccaatgctcggcggatcattcgaagaattgagttctattagaataaaaatgaccacaattactctcaaatttacgggaatgacagaccaactgcatgggcaccatgtccaaaaccgcgacggtctcctggtccgagttctgtgggatgaaattgaaaaaaatccaaataaccacacttaaataaccgaccaactgcattggcccctcttccaaaaccacgactcgtcgttcctccgcctcctctcgccctgctaccgttgaaaacggtcgtcgagtcgaaggtgaccgatttgggtggcgaaatctccgcattcactggtggacgactgatgttgttgttttgtgctggtgctaaccaccaaattatgagtgtttagcactgaaaacgaaccccctcttcccaatccgccgcgcactcctcgcgtccctcgcccagtgacggaagcgacacgcggcacagaagcgcctccaaatggcacagactgatcggcgatgggaagctgatgttcgccttcattggtggcagttccatttgctttctgcacatccgatgctgcgtcaatgccgttgcaattacgcaaaattcccctcgtcggcacgttgacaatgggcggctgctgaaatggctgagagtcggaaaaatcgatgatagttccttctaaaaaagcagaaattagaacatgtaataaactatgtataccgttcggattagcctctgaatatgctccaacaattctgtcattcggaagatgagtcgtcccattctcagtttggcttggggcaattcctctgccccctctgcctcgtcctacaaaacttgacttaacgtggcaaattgtacacacaaaacctcgagatgcagcaaatgacatcacttcgaatttatttttgacgatttttcatgcaattttaagaaaaaattggctaaaaattgcaaattttatgaaaattgaaacacctatgtaatttttttacggtacacattcggacacgaacaggaacaaaacattacgccaatttatcagaataaaataccaaatttaaaattaaaacaaagggagtcaaattcgcaagaaaatatgtatacctgtcattttaacatgtcccaaaaaggggaggggtagttgttatgaacgaatgaaggatgaatcttaatttttttaaacattcgttgaattcatacaaataaatccaatttttgtgtataattgtctatatttcgtgtcaagttaaaagaattccaaagatggatccacctccctcacacccaaaaaatcagcaaacccagtccgccaacgctttctccgcaaatgcaccggctccaccgctgacgtatgggagaggcatttttgtgtattttttgtgtgtaaaattggatttgcatccaatttcagcacatcgtccgcctctggtgtccaaccgctgcttttgccgtcctcttcagccggcgccggtgttccttatcaccagtgcgtccgccacggctttgacagttatccttcgtctacgaacgaaacggtggcaatgtacgggcagccaggggccggtgcagcggtgtattcgtcgtttcagcaacaggtcggagcccacaaaattccgctgtcgaaactccgccggacgaaactgaatcaaagtattcaaaaatttttcaaaaaaattcgttggtggaaaactgaatttttttcaaaagttttctaaggttttttcttggaaataagtgaaaattttttgtctcggtggagtttcgtcggcggagtgcgttttgggggtaccggcaacaggtgtatggagaatggtagaacgatgctgaccccttaccgaaaaatttatctgtttttttgtccacaatgtgttaggcatattgtctaccacatttttttccctaatgtgtcaattttcatcggttggttttcagcacgccgaagttgtcgatcagcagtgctaccaacaacagtccgctgcttctgtgggttacggtccgtcgatgccgggcgcctccgcgtcagtccctcttgaacaacagcagcaggcatcacaaaagggtgccgtcacttcgtcggcggcaaaaccgctgccccaacaacactttgtgcccccgccgccctccttttacacggccggcaaccgttcgtccaacgccgccgccgccgcactgcttggcgttgtgccatcgcctccgatgcttccgccgtcggtcggcggctcggcggtggttggcccaccgccgcccaccgcttacgcgacacagcagcaacagtcgatcaatgccgtcacttcgtcatcggcaaaactgctgccccagcagcccccgcagcctttttacgcggccggcaactattcgtccaaagccgccgccgcttcaatgtttggcgttatgccacgacctccgatgctttgcccgtggggcggcggctcagcggtgattggcccaccgttgcccgctgcttacgcggcacaacagcaacagccgatcgaccccatgccgtcatcgtcgtcatggaattttggccaacagcagcaataccaatttgcggcagatctatcacaccaacaccacaaagtaaaaaacttcggtttgagagaggaggtggtggatgggtagccccaatcaaagaatattttagatgtcgtccacttcatcaacggcagatttgcaccaaaagctgttcgttccgactgccgaagatctttctgacagcatgatatacccatttgatgtgacgcatttgttctgcagagaaaaaacttcggagattttggacccccaggttagcaaatacctaatcattaagagaggagggggtatatgggtagcaccactcaaggaatattaatattttagatggcgggccccacttcatcaacggcagatttgaacccaacgttgttcgttccgactgccaaagttttggaccccgaattggttagcaaataatcattaatttgaattagggaagttacttagacacaggagggcattagttttgcatattcaaaaatgaagcctcttaatttttgtgagtgaaattatggatgacttataaaactgtatcaaaattaaatggttgtggtactcatttgggtggtgcagaagatgacccatattgattttgttcaacaaaagtaatggtcattttcgatttgcatctctttatatcatggaaatgttttctctaaattcgcttttttccttcccaatctccgctcttttcggttttagaatgtattaccctaaaatgattaggcttccgtctgaacttatttccgaattggcgagtgctcttccccttgacccccgctgggccgtcatccgtgtgtcctcggcctttgattttttcgtttatacaaaacagataatttataggaaaataaatagccagaaatttaaatttgtcttacattattttaattgttcccacttttaggtggatgaagggcttaaaaaagcaaagcaacaagtttcgtccattgccaattcccaatcaagtgacgaacaacgacgaaaactgctcacaagtggaaccatcgatgttattttgtatagccataataga

SEQ ID NO: 7187 - DNA, 3794 bp, Heterodera glycines
accgtccgaaaaaacgagatgtgtaccaataaatagagagtgccagagaaaaacattatctttttttctctaatttttgtctccttttggcgtactatctaatagtttcattattaggaaaaacaacatttacttcgctacgtttcattatttttctctacgttaaatcaacaccaaattttgcatatcgatagagaaaaaaattctgcatcgatttctatgtttattatcatcgcttaaatgttgtcttaaaaagttataagaaaaaaaagttaaattattattctttttaaagatttaatggctaaaagaactttattacggaagcgacagaccaaaaatgcacgccatacgcgtgagaacaagcgggaggagagaaaagcgcagacggccaaggcgatgaaagcccggtgggctaagaaaagtgagttttttcaccaaattttattttaaaaaatatctttttttaatttcagcctctccagagccgaatcccaatgccggaacgccacagcaggacgaagcagggccgtcgacatctgctgtaccggccgaagaactaatggagccgccgccaccagcaccagtgccaacgccggagatggacaaggaaattttggaatttggcttttcgctgccatcgacatctgtcacaccaatcggtgatttggtgccgttttcgacaacaccaactgcgccaatggacaccggagagacaaccccgccaccgctggccattgacgagcgatcagagcgcatcgaacaacttgagaagcagctcaaggaccgggacgacaccatcaaatttctgcgcgagcaggtgcgcaatcgagaagcgctgatcagtgatctgcgtcggcagctggacgagcacatggtaccaccgatggcaccaccaacgaccagcaaaagtgagtgaaatttttcttttttaatttcataaaatctgatcattttttcaattttagcatcaccaaacagaggaagatcgaagaaaagactggatgaactgcagcgcagcgccaggcgcgacatcgtcgaccaaattgtgggcgtcatcgatcgtgatcgctcgcgttccgcgagccgcgcatctctggaccggatccaccgagatatccggcacaaatcgcgcactacacgccaaagaagggcaaggagcggaaggaggggatggacgctgaggatgggcttttgctgctcgcccaacttggaacacagaaggcgtacaagcggatgaaggcgattttacggctaattggccgtaatttcaacgttttgccgccgttggaaaaggtgcatttttcagtgaatttttcgtttgatcaatgttttttgggtcatcgcaataaaatgaagaatttgcgcagggttggaatatgatgaaattccaatgccaagcgggcccggatcgaattaaagctggtgagttgatggaaggggctttaaaatcttatccaactaattaagagggaggaggaacaatgggagcaagcggaggaagacaaaacgaatgaagaaagtgatcaagaagctgacgtcgatgtcgttgactgatcgaggattaatggaaattattttgtgatttaatggcaaaattaaagcgaaatataaaaagaggcggtgaaacagcggtggaaaaagaaagaggagcgaagaaccaaaatggcaaaggcgacgaaagcccgatgggccaagaagagtgagttttttcacacgcaattttgggattcaatttggaaggtgctaatttttcaggagatgaagcgttgcattccgtgtggcggcgacttgagcagctttggaagacgatgccggacgctgaacaaatgcgccaatagctggagcagcatttcgtctcaaattggttgatggacaccggcagactcgacaaattgaagctggtgagttgatggaaggggctttaaaatcttatccaactaattaagagggaggaggaacaacgggagcaagcggaggaagacaaaacgaatgaagaaagtgatcaagaagctgacgtcgatgtcgttgactgatcgaggattaatggttttttttcattacacatgacaaagaaaaatgtttaaaaatttgtaaacaattttaaaatcattttggtcacttttccttttatttattcattaaaataattgaaatacatcaatagtatgcactgggaatcgaacctgggaccccccctttggtgaccttctcacagaccacttcgccacacatacaaatcttttttggtacagcagctcagtttccggacgccgtgtataggaaataaatatttaattaccacacaaaaatgaacattggcaaaaataactcattaattgcctaagggaaaagccataaatcccattcattttgtgcgcttaataattcgctaggataatgcaaattgatttttccactgtcctcctttttcactgacccacgaaaggagtgaccattcattcactcattcattcgttacatttgcatataaaaaaccaaattaataataattctttttaatggactgtccccgaaaaatcaaactccccaacgagcttctctcggaatttatcctttgccttccgtttaattttggctacccaaccatccgagtttcggcagtctttgatttttttctcgccaaaaagcaacaaaactttcatagagtacgagtattaaaatttaaaatagtattaaatgagttgacaaaatttataatatttccagagaaatgaagattctatcacacgtcagcgggagattgttgcccaattgggtagtgtctttagaaatgccgtaaaacagttaatagagttgtgccagtttgaggtgattctcaattaaaatatttaacccacatatctactggagtttgtttagggaattttttaaaattttattaaaaatttaataatttttgttcccttttttactgcaatgggtctcacaaataaaaaatcaacaaaatttgtcaaaactgcccaatcaaaatgtgatattatttaagaatgtccaagcgattgaacatcagcaaaaaattgccattgatgcggcccatagcttcaacgaggcgaccaaacatcgtatacagctggttaagctcatggtgactttgaattcaaaaattatggttctccttatctgattgccggagtcgctcagttgggccgtcacgtttaggccggaacaaaatgggggcgaaatttttttttctggggtattttgaggtgctgagcacgaatatgatgtttgttttacgtttcagaatttttggaattttttaaaaattcgaaaatatttttaatttttttggccctcaggattttgggttaaaatttgaaaattcattgctcagtgaaggtttggtcaatttaagtgaattaaagctctaaaaatagagaaaaatcaggagaattttatgggatttaaatgaaatttatatcttcaaaataaaaaaagttattcaagaatttctggaaattttcgatttttcagaaaaaaattcataactcggttctgaaaagacattctggtaaaataaaatactacaaaaatccgcagttttttgctctattatataaattttatttggcatttttatcacttttttgcgaattgttataaaaataaaagtgattttgggattcgggaccaaaggggggtgaccaggatttttgggtggaaaattatttcaccaaaaatcttccagaaacatgtcattagggctattttatgacgctgatcacgaatacgtgatcagattttacttttgacatcgtcaagacctcaga

SEQ ID NO: 7188 - DNA, 3006 bp, Heterodera glycines
  unsure (1)..(3006): unsure at all n locations
tcccaaaaatttcagagaaaataaacccctaaaaacttcccctcccgccccgctctagaccaaatttgagagcacggcggaaacggtgacagaaccgttggaaaactaggacggcacggggacgatggagaagcaaccattagcgaagaagggttcattcaaaattgaggatctgataaaagctgaagaaccgcaaacgaataagtaaatgtgtgagaaatggcaatttgttgcttattattgtgtctacatcatcagtggcataacgaaaatgttgttgttgcttctcattgtaaaaataaaaccgaccaaataattttaaattgcgcaaaattttgcattaaaatggcattgctgcaaatttaggcaaatttgaattccttgtaaaataaaaatttgtagattatgatatggtttttttacatacttaatctgtaaattgtccaatttcatccatttgtgtattgtctaattgacccctttctcttcaaaattggtcaccgattcctcttcaaattctcgaatattcccatgtccgcccttatccgactaatgatcagtgctcgcccctcaggggcgggatgagttcactttgtgcgccaaatctctcgcgcctcatccactccgtccgtctcttacacaatttaatcaatttacgcctctgggaagcagtgaacagttagttaattgatcgctatggcttggtccgtcgcagcgttggacttggacttgctgacctattggatgctaagtgggaagagttcaacgatgaaaacttgaaaatttaagagattttcgagattttttgtatccctccccccggcacagatgtttcttccgcctttatgcggtcggcagcgaataatgttctgttttttgtggtgagaaataaatttaaaaaatacaaattaattttaaatcaataatttcactgattaatttaatctgttttttaaatttttattctattttgcctagtaattttaaaattttgtaaatgagatttttttataacacattggacgaaaccgtaattttttcatgtccagaggggttagcgatgtaaaggggtaggtagatacataaattcagtaaaaccaaaaagaggccgctcaaaatttttttcttaatgtggcaccatccacatatctaagtcaaaatccataagaacgccccaattgttggcttttttggtcattttcaagtcacacgtttttgatcacttggactctgtccaggactcaattggccggcccctccaatggcacttgaccaatcatgatgatcagtattattaattataaatcatttttcagttggactggcgcatgccggtgctgcactttctgcacaacgcggtgcccgccctgtttctgctcgtccgacttgcgctgtcgccagaacggcgtccgctggtgccgcgactgctctgtgccattgtgcgcgcaccgctccgctcgctgctttggcgacccgtcgcggcacaactgttggtcagcgcgttgtccgctcgcgtttacgtgcacaaccgggccggggcactgtatttgtgcaggtgataatgatgacacgacattaaaactacaattggaaggaagagaagcggttctactctgtatttcaagattttttggcctcgagtccagggatttgacataattttaatttaatattatcaacaattaatggtttttaaatgtcgttacttagttggatattcgtgccaatgttgataatattaaagtaattacataattagtctcggcaaagttcgaaaatttgctgcaactctcggggccactctcagacgaagccaaaaaaggccctcttttttcaaggatattcgacttcctcggcacttttctgatcattcgatttggcgcaaactttttgaacagcgcaaacactgccgggggcaacaaagaggagacgcagcgccggaggggccgcgcggccatttgggcccttttggtaacaacaaatgcacaaatgtattggcatttaacatttaattctgctcctggggcaagcttgtgcctcgagactgagtttggtggcatggcccggccctttcagaggggcacggccaggccattaatccaagaaaattcgaaaacaaattctacaaatgaacagaattaaaaatttttatgttcatttaaaaaaaaaattaaatttctttacaattattgttcactcgcctccgagaaaacaccgaaattcgtaactttaaagctttcaatgctatgttagcaagtttttgttcaaaaaatgctcgatatgattcgttgttattttttctttcattaattcaaattaataacaaaaaagagaaaaataaattattttatcaattttctctgttaactgattttttcacatattttccttcaaaaaatcgaaaaataacccgaaatatccctttgagaatttgtttttctttcaattcttgttcttcattaaattatgcctttattcatatttacaggggccacttgcgttctccgcgtcgctttcatggtgtgatttctttaaaatttcaaaactaaaaataaaattccatttcaaaggctcgaatttggcaacatcgagtgggacccgtgggctctgtttttggccccgctgctcgcacttgcccaagctgttcacattctgttgctgaagcaggcgcagttggcatttttcgctgccctcggcatgcccaacggcaacaatgtgccaattctatgggccaataactaacttggcttanataagtccagacttatccatgtcaaggacgtccttggaaatggacccacttttctgaaaataaaatttctggccaaaaattacggcttttattcttttacatcctgggaatgcattncagaataacatgttttggtacacttgccccaaggacttttttaggcgtggtcgacctctaagggcagtccttgaaatcnngacattatcgctaatataccgcttttgtagacatacttttctgacaaaatagcgtcc

SEQ ID NO: 7189 - DNA, 1257 bp, Heterodera glycines
aagaaaacacatcagtagaatagctcataagctccctcgcaatacggcgcccacgaaatcgaaaaacggacgaataattcggacttaacagcagtcagcaaaacggtttcgaataaatcatcaatagtgtgtgaacgtatcacacgaaagaaatttaccgtcggcaagtgtactcgccagatttagaaacatcggttagaaatagttcgaatatgcaaattcatataatttttagctttcgaacctccaccaaaaggaatctactgcatcaatatttttgtactttcatgacggtcattatgaactaataagaaaaccacaaaagataaattaattatttaaattttttactgataagcttattataattaaaatttccctttgaaagttgcaaagaaatattgtagcacttattgtggcacttcattttttgactcatgctttatagcaccagtaatatggttttgcaactttaaaaaaggtttaaaaaaatttaaatttattataaatttttaaatgatatagtcgatgattgctgttattaccatgatttatgctatataaacaaatctagaaaacgctacgattgcgacaaaagcttttgcaaatgtttgtatgaaagtgctgaatgttcattaacaaaagtctgtatttattagtattttaaatagtttattttttagaatttgttatgcttgtcagttcatgtttttgatgaacattttaaagaataagaaaatttaaaaaagaaatactggaatatatatattaatttacaaactttatatcaataaaatttagataaaatatttctatatagttgttttaatttgtagtttaattctcgcccaaggtggcagtttttaagaaacgcccacttggcagtttttaagaaacgcccacttggcagtttttaagaaacgacccagcacgaaaaataccataccatattttactgttctgtgatcacttaactaattttaagaattttgattttcacacgaatcctttctgaaaaaatgacttttgaaaatcttactaagaaataataagttttgagaattaacttgtaaaaagaaagtaaattaaaggaaaacgaattttaataaagataataaaattttaaatcttaaaaagagcaaaacattccttgtacctattttcactacattttactataaaacttctctcaaccaaatgcattttgaaagaacaggaaaggccccatttgcgcatatttttttgggtctttcttta

SEQ ID NO: 7190 - DNA, 2492 bp, Heterodera glycines
ttaagatctcacttttgtgttggattcgttgccttctgatccgccgttattccctttcgtttctttgggtgattccggcgacaaaattgaggcaaactttgggccgaacttcaaattcgacctcgccacccttctctatctgacgaaggaagaaatttgttggaagatggcgtattttgtgtttttaattgacaatttataaatattcatttttctttattccctttttttaatcggatatgggttcggggttcgaatttggttgaaatggatgtcagattcatgaccagcaactccgaaaacgccctagaaattttttaaatgattaaaaaacaattttattttttatggtctgtaaagtgcataccgtaaaccctctatttgaaggcccgggccttctattgttcaacccctcaaatctcggaaatttttttctgggtcaaaaaggggtgaaattttcgaaaattaaaatactcaaaaaattttagggtgttgtaacaaatctgtaattcgctttcggcatagttaaagccccagaaataacgagataacaagaaaaaaaagttataattacaatcataaaattaaaactgttgtcaatttccattggcaattttaaagccaaaaccgtttgagttttcgatttgatttaaagatttagacttcatttcatccttttcatttaattgcctttttcccctttttgcgcattatattatttttgcttgaatttgcatttcccctcaataacaatcatcattttccctttttgccctttccctttcgttcctgtttcttttcccaccaacgatcggccaaagttgccatttctcatccgttacaatatgctcatttctcactcactttctcacacgtggtgcgacttttgggggatccgacacttagggaacccgacatttggggattttaataaaacaaaaaatataaaaaaatttaatttttgtccaaaactagacaaatttagtctgctttagtcagagttaattccattgcattgcaagaaaaacaaaataatattttttaaaataactctgtttccggactgagatttgctttgcaagtgagtcaaaaaaaaataatttgttaaaaaatgaatttaaagcaccgcacaaagtcacgcgaaagataagaaacagaaaagatagtctcggcattaaacagcaaagccatctgaaatgtccttgacgagtgtctgttaccattggcccttgggaaaggcgttttaaaaaaaatttgtccaattttggacataaaattaaattttttaatattttttgttttattaaaatccccaaatgtcgggttccctaagtgtcggatccccaaatgacgttcgatccgcaaatgtcgggtccctaaaagtcgggtccccaaatgtcgggatccccaaagtcgggtccccaaatgtcgggttcccaagttgcaaatccccaaaagtcgggtagccgacaagtctcacaatccattagccattttatgtgagtgtaatatttatcccgcccccatcgcacctttaggctgatcgcgcatcaggatttggatccaaattaacacattaaataaagactgttcattccggcataattacgcgcaaaaatttcaaatttaacaactttttaatttactaaatatacaaacaaaatataagtgtgcaattaaaaaataataatttcacagtttttaaatcacaatgtcaatcgaaacaattattggcagacttcaaactgctgaacatgttatttctgaatatttgaatgatgttttgcccgaaaaacctgaggcaccaaaaatgcaaaagaaaaacgtgctttgatacttttggtaaaaaatataaaagagtcttctgacgaattattagcgcaattagaagaaattcgaggggcacgttcagctcaagtcgatctgatcagagttttaacagctcaagagcgattagatgctgaaagaagaaataaatttgacagatttaaattctctcacaaggaaaggaaatacactacttaagaaattaagggaattgaaacaacaaatcgaacagtttttagactgtactaatggcaatgggaatgcaagatcaaactttgttttaccaaaatcacaattaaaaaactttgatggtaaagggtggctcgaaatctggacacttttcgaatcatcagtacatttggatggttcttataccggaattcaaaaaatgagttatttagatagtcttttagtgggcgaagccaaaagggttattgaaaagattacttccattttcagatgacaattatgatttagcaatagatcttttgaaagaaaaatatgggaaagaagaaggtcttatcagagacttacataatcaattagccaatttaaaggtatcaaaaacggtggaagaagactgatcttcaaattgaggttgaacggctttgtcgtcaattggaacattttaaccaagatttatcaagtccacaaatttacttaag

SEQ ID NO: 7191 - DNA, 2015 bp, Heterodera glycines
ggaaaatgcatataagctatataccatgggatagagcagggtcgacttctattgtgatttttaattttagcggtgcattttgcctgctaaaaaagttacagggcctcaaaaatcgagattttggctgtgttttcactaaaaattggtggctcagttggttaaattcccaaattttgggggtccgggttcgaatccaacgtaaaaataaattaattaattaaatttttaacaaattaaagattaaaaaaatacatttttaattatgattgaattgtgtccaagattcgttgcctatctttgtgatctattttaactcggcaatcgcttttaattccgctgcgccaattttaaaaggagtgtcctttttcaaaagattaaacagtggagaagcaatcgaaccgaaagaataaatgaattttcggtaataggtcataaaacctaaggaagaatgaagctcttttttggtttttggaaccggaaactctaaaattggctttgttttatcggcgtccaacttaattccttttctcgtgaggacatggcccaaaaattggagttcttctgtaccaaaatggcatttggaaatttttaatttgagtcctgactcgcggatttgttcaaaaactaatttcaaatgcttcaaatgctgctcaaacgactctgaggccaccagcacatcatcaatgtagacaaacacaaaatcattcatcatttgtccaaataactgagacataaaccgttggaaagtcgcaactgcgttgcataagccaaatggcattacggtaaattcatggagcccaaattcggtgacaaaagcagttttttcgaccgattcctccggcatttttatttgccatagcctgagagaaaatccaaagttgagaaatattttcgtccacccaacatgagaagggttctttcaatgttcggcaatggaaagcagtcctttctggttaccgaatttaagcctcggtaatcgacacaaaacctcaaagttccatcctttttcggtacaataacaattgggctagcccatggtgataaagatggacgaataataccacggcccaaataatcttggatcatggccgcaaccttttctcggtatgcatatggcacaggtcgcatacgatttttgatggggaatgaacggtcagtgtcaatatggtgtttgacaacttcgatttgggttagatcgctgtcattaaaagcggaaatatttgcaaaaacatgcaaaagtgatccgagtttattatgtttgtcctcatccaattggccaatttcggctttgaactcatcctcaaaaagacacttttccatctccaccgaatgataaagccatgcatcttcaagacaatcatcagctttggcaatttccttcacctcttcaactgcagcaatttcttcattttgttttaaaattactgctttatgtgaaaaatttgtgattgcggtgatgaaattgaaagttcaacaaattttgttgaatatggttcaaccaaagtactgtaaatcacacgcacagaatcagacttgttgtccacacactcaaattccactaattcgccgttgggagcatcaaaaattttgaacccaaggagcccaagtgcatttgttccaaacaaaattggatgtccaacaggcgcatccgtaatgtggaacataatttcaactgcttcacaacctcttcttacaactggcaacacaataattccataacactctacacgctttccattaatgtcaacgacattccgggttttcggccaaattttgagatttgtgccttccaatttctgactttccaaaatatttttaagaaactccgccttaataagtgaaacttgtgcaccgccatccatcattgaaatagcgggctgatcaaaaattttaacattcgttgtcattatttttccaattgggcacagttccttattgtcagcagcttcaaaattgttttcgtactcctcccagaaaatggttgaaaaattccttcatttcgggttcatgttcag

SEQ ID NO: 7192 - DNA, 5388 bp, Heterodera glycines
  unsure (1)..(5388): unsure at all n locations
tttttttagcaaaattaaaaataatttatttaaatttttaaaatttataaaacattttacagttctcgaattttttttagcaaaattaaaaatgttcaaaacattttataagaattctcaaaaatcatttgtctgggaattgaagcaaatccttttcaagctattgaatatccccctaattttaatgtattttgccactaattctttttccaaatccaaaatattctttcacaaatgccaattccttcacaatttaattttttcctttgccataaaatattgtattcataaaccgtttaatgaatgcgtaatttttctgctcataaataaattaatttcatgtttgattttcttttcatttatttgattaatattgaattaatgattaataataacaaattaatatttggagaatgataatttgaattgagaaaaagatagatggtaaatagtataattttgtaaagaaaatataaattatattgaaggtttttattacaattcctttcccccacccccggttttctgcccatgaattcggcataatcttgccatttacttcaataatcaattaattactcccaaccaaagaattattaacaattttttgttcgtccttcatcagcagcaaagctagctattcatccagcagctctctttctgcacagcgcagcgcgcagagattaatcaatctctgtcttcttgccgcgcaaaactgctcgattatatgtcaattggttcattatagttaaatatcgctcgcaactataacatggaattaataattttacttttacataattttcgctcaaatttggtcagcaatactacagaggaattgtcatccttaattctaatcattgctgataacaattttaatagttgataagaaaggtaccatttaaatttgatcataaatattaaatgatcatgactagggctgggaatttatgtcaatacatatttttttcctggcttctctatgctctgaatagtaggaaaacactttcttttttgcgtttgcgaacaaaagttgggacttttatttacatatttttacatagagggtttttgagaatttatagaattttttgtgaaaaaaaaatttttttttgaaaagtacccaaaaaatcgtttttttcaaaagtgagatactaaaaattaacttttaaaatagtaaatgtgtttttaaacctttaggtcatttttatggcattttatgcctatttcaccctttatgagaatttatttccaaaaaataaccatttacaaaattttatttacatattttggtacatattttagcattttttgttacatgttttatttacctatttcgggatttttcttacataaaattcccatccataatcatgatcatacagtcttgccctaaagacattattggcttaaaagttaatattattttttaaaataaccaatcccacattcttttttcccttatttctcaagataacaagctggtgtagctcccgatttttcgacagcaacgggcttttcgatagtgaaggacttttcgacaataaacaaaaaataatggacttttcgacagtaaacataaaaataaattatggtttgtcagttttattaaatttcttttaaattagcattaatttgtatttctaaataaatattaggaatacgtttttttggttttaccttttttcctgagctttaagtggcccgaaagtacgcttgttaagctactcttcgattatagcaactattttctagttttttataaagtttaaaaatacatattttgatcaaatttatttatatattttcttaaaaatttttgtttgaaatatttgtatctcaatactaatttggcttaattttgtttctttttgtataaaactttacattaaccccctaaattgaaacatgattgcttttacttttgaaaaatctattgtcgaaaagtcacctcataaaatttataatatttctggaaaatgtcctttgttgtaaaaattccttctgtcgaaaagtccggcgcccgctggtgttcgaactttttaaataaagtaccggttttaaataaaaatactctaattttataataaatcaataaaattatcggctttaagaaattgcaaatatgcttgtattttttattttttattttgttgcatttgcttatccttttcggcacaatttcgtttctgatcgcactgacgaatctaatgagggattaaaaggaagcggaccagctttgcgacttcgttgcggcgaaaaaatgccagataatagggtaaaacttggtccaacatagaattaatttttgtctaacgaatattaggtaattttttttattttaataatttttctgaaaaggtaatacattattaaattttaataattccaggtcgaatttggacaactttcgccgccttcggactggccatgggcaatttcggtccgttccgaatgtttgaataagcgttcaaaccgcaccgaagtactctcgacttgttccggagttctaattggttcaaaacatgtgctaacagctgctcattgtcttttaacgacaattaattcctatttgcgatgcaaaggaaatgaagtagccggggaatttgaattccctgggaccacgtgagttttacaaatttattttgcatattaatattttgctaaaacttagaaaatttaatccaaattaaatcgaatctataatcacttttgcgccgtgctttttaaaaaaattgaggaacagatgggggtacagttctagtgttaataaggtggaggctactccagcggtctaaaggcactgacgggaaaattttcacaaatttcgattaattttgataagaattggtttaaatttaattaaacttattgtatgttattagaaaatatttgacatcctgtctttaaaattttcaaaaatgcaatgcggatcccacggattcccgcacaaaaaaatctgcggatcgcgctggggatgggaatcaaaaattttttgtgggaggcggattccgcggaagtaatcacgcaaatcccatattaccataaatgcgagtttaacgctgggattgcaaaattcgcgcgtaatcccgccccgtgcaggtctttcatttattacaccgaataaaaactaaaaatggttctaaatgtggctcatcatcacaggattctttttgccaaatagggattaaattcattcagcaaattgcctattaaattaatttttcccattagggtgtatgtggctgcaaaattcataaaactgacaattggagggaaaaattggaaccaaacgagttcgttgagcatcaaaaaatacaccaaatttgacagattcatgtcacaacactacgacaatgacattgcaatacttgaggcaattattaatttaatatgcatctttttatgattcctatttttatattgtttggcattttctttttgaccaaaattgaagttgcatggaacttggaattttaggcaaaaaccgtgacagtgaattgacgggaccaaaaaattagaaccgggactatgttttaaaccggaaaccggatccaacttgtgaattgcaagaaaaaatcaaaagttttatttcttgcgtaaatttattcagctcactcatcctgttgtttatgacatgaaaataaatagaatttgtctcccttctatttatactgcaagaaatgggcatttggcgtattttttggggtatggactgaccaaaggcggtatgtcatttaaatatttatttggaaaaattttcgagcaaatataatcatttttaatttcgccgttaattataaacgggaattcaaatatgtgcttattcgacatataattttttgttcttaagctctcgagcttgctgggacaaaccgaacaaagtcaaccaaattacgcgaagactttgtacaattgagggttggcccgccatgcccagttaactttttatgtaccaattcccaaacacacccaacacgtcacacgacacccgtattatcttaatgattgtcaataatacatttttatggcaattaagggggactccggaggaccgcttatgcgcgaataccgaggaaaatggtacgtcattggtttggttattggcaaacccgacgtgtgtgaccataaatgtaagacattaaaaaataaaagcaacttaattggattaatttgttaatagcgtgtttcttgcgcccaacctcttattgtacttggattaaccgagcgaccagagggcgcgtcatctgccaacgaattatttattaataacgaagacgaatggttggaaattttggattattttatgcaattatattaattaattattatttttaatttaaagaatttttgccttaaaatatagattgaaaaatttggacttgtgtttgaaaatgttatttattgtgatggctatttcaatgttttttaaattttttattaataaatatttgtgtacaaaaaatttaaattcattgagagttcccatatttattttattttcgaaagtattaatagtaaaatagttattgctatttgcgagttttactttaaattaattgatttgatatttttttaatattagtttaatgttttgtaattttctttcataaaacataatatctaataaaatgggaacaatttaaagattgtataatttaattaataaaaaaatatattaaaacattaaaaattcatttttacgattcggaacatttatgattaggtaattgacctcaaaaaaactaattataagaagatttatcattatacaaaaaaaatgtggaaatgttatacaaaacaccggcggaataacaacagagagagagataaaatatgaaaatggcgtgaaattggaacatttaaatattgcacaaattaattaattaattaaaaacaatgtgaaattgggtatatctgccgatttgtttttatttgttgtgataaattgcgtaaattcgttaacaattagaaattctcaaaaattgttttttaacgagagaatgaagtgaatgcaaaatgcttatgtgccttcaaattattatttttatttaaatttcaaatctttttagaaattcgagaattataattttaatttttaatttaaccaaaagaagtcattaaaatgataattaaattttagcacataaatgtttcttttaagtgagagacaattatagaattaaagctcattaatgaaacttataaataataaatgaaatgtaaaaaacaattttagtaaaaagtcatttaaaaatataaaattaacttgngcacataagtgttgtttaagtgatagacaattataaaaataaagctcattaatgacacataaataatgaacgaaatgtaaaaaaccattcttttcataaataacatttatttttg

SEQ ID NO: 7193 - DNA, 1556 bp, Heterodera glycines
atagtcatagttggctataaaaattttagaatttattctttaaatttctttaaaatatattttatttttttattatattgaataattttaatatatttgctaaataatattcgaatgaaaatttttaataattatattaaagctaattataaataatttatttcaattagtcatataattaccgttttcaggtgatgtttgttcattgtttttcggattggttgatgacgcaccgctgttcatccgtttgtgttcatggtaaagttggagcagtgcagctggcggtggcggtggttgattctgttggccaagcaacgcggtatcaccagaggaagaagccttgaaaatgcacaaatttatttaaattaacatatttcaaatatttagtgttctacgaaacccaaaattccataataataaattaaatttcttttagtcaaaactaattaataaacctttttcgaaaaaaaaacatagtctaaaaataaaaataaaatagtattttcagagtgtagcatcctcaagctaacaaaatttaaaattttttcttgggctttaatttatctgaaaaaaaatatttttccattttgtgcattcatcaaaattttttaaaaaatctgtcaacaaaaaaggctaataacaaaatgcagcaaaatgaaaaatacactctctaagaattgaattttcaaaaatcggttgaatttattcaatattgttactttaaatttctcacttttggtcatattttcataaaatattttgtaattttacgtaaatatttatttaaatattttggaaatttttcataaatataaatcccagccttaattataattatttatattaaaaaaacgctaacaggcaattcggtggttgaaacttctgaacaagcagaagttgtgccaccatttcggccacttgatgaggacgaatttgcggacgaatttggcccacaaccgttcacattttccaacagaacagcaccggaaggtgaaaaggcaaatttgagttgaggaaactcggcaccaatgccattctgagaattctttttgagaatgaatgtgccacagcagcaaattttgtcaatgattgccgtgaaaaacgcggaaattgggccaaagccagcgccatcaaggcgccaacggcgataatgtgcgcgagtcttaacaaaaaatttgaaaagcttttaattttagtgtgacggtatgccaaagtatggatttttgctggtttcgaatcttcaacaaaaattataatgatggtggttttgctgaataagatgtctagttagtgttgtaattctaaatttaatgtaaaatttattaaaattcatccactctatcgtatgtaatttgtctaaatacatccgagtgatcaccacataaattatgttactgtaattcatctttatccatactcttcctgtaatatcccgttcgaaaaaaacccacgcactattttatccacaacaatttcggctaacagctgcacgcccagtgccatgttcagcaacgacactgcaagtgccgaattcagcacaaatgccgaagtcgcgg

SEQ ID NO: 7194 - DNA, 1182 bp, Heterodera glycines
gtacgcgttgccgtagatgacacggtgacggcgctgctcacgtgtttgtgctgcatttgatcccatttgttgtgttgcggcataaggataggcatcggatgagcacgatttctgtggtttttggatatcaaaaatgaatccaccaatctaattttttgtataaattagggaatgttattgttatattgggtgttaattgtctctcatagtagcgtcagagaagttgttgaaattaagaggacagacaattaaagggtgaccgaaaatttggttaacaccccatgccaattactgagcttaccaataaatttaattcacggaatattaaaaattgcaaacaaaattaataataatacagaggacaatgtgacaatgtttacagtaagcggtgcaataaatcatttaatagtcctaccgtattccgtgacgaattcattgcaaaaaatgtgtgtgccaagcaaaaaatggtggccgacaaaagcaacgaaacagggccaacaaaagtgtaaatgccgaagaggtccaaattgagccagcaaaaatccgacaaaggctggggctgggatggcacaattttatgcaaattttgcataaaaatggtaacgacaataagcagcagagggaaccctgtgggaattttaaaaaaattaatttaatttaaattaatttaaaaaatctattaatgtccttgcttaaggacttttaaaaattaaaaaggaatattatttgtttaaatttatttcataaagtttgtagcgacagcattaaaaaaatatatttaaattaataaaaatttaaagttttattttctaaataattataaattaaaaatatatttgtgtatgtttaaaatgattgttttaaattcattatgaataacataaaattaataatttacaaatttatgccagaataaaaatattaaagcagaattataatattgtataattaccgtatccaaagaggtacagactgatgtgtttgagcaatgagtttgatgagatcgtatcaattgtgttatcatgcaagtgaagtgccgtattacgtaattgccaagcgtccaatagagtccagcaaagtgaggacagcacaaaatattggagcaacaaagcaatggaagtgcagaagaactaaaattgcaatgagaattaaattttaaaaaaattattaaaattttactgt

SEQ ID NO: 7195 - DNA, 2412 bp, Heterodera glycines
tgactttggcgaaataaaggacatttgtgtttttcctcagttcattttctttaaaatatgcataggccatattttgatcacacataggagaataagacaatttaaaaagcgaatggggaggaaaaacggagcaaattcaaatcgaaatgggcaataaaatatcaatgattgcacaaaacgccgaataaaatgccgaaaagaatgatcccttttggttaccccccctcccctttcattttatctgtcacatggacacccaaagggggtccactgcgttttccgatccgatcacttccaccccccccccccgccatccctcgtcattcttccgtcgtccatccctcccctccttcggattttgtatttttagtgttgaatagcttaatcaatgtactatcagattcgaaataatttttttgttcgaattcggaaccggggttcggaattgggtaaatccgagttaagattcgtaatcagcaccctcgaaaaccccataaaattgatttcgagcccaaataaaaaataaattaaggaccacaattctttaccagtgctgcttttttggcaaccaaatttatcagtgagcacagatttaaaatctctgtacttgaaaaaagtacacatttatttaattattgtattttatgccaattcaaaaatttatttttttgatttcactacaagcactttttcttttcttttcgttatttcttagattggtttgcttcgttttgaaatcacattaagccatactttgtaattgttcattttcgtgtttatagagagaaaccgaccatacatacaataattaataaccattgtaccccgatgaatgcaggcagcatcgacaatgatcatgatcattaccataattccatcaaaaattcttccccgaaattatcatatgactccgtgaattgttggagtatggaaagcgaagggagctctgtcaacaacgatgagaatgtgagattcatcttactttaagtttaaaaaagaacaggaattacaattgtccttttcaaaatcactcgaattcaaggactgataaggacaaaaacaataattgtctaatttgatgatccattggacaaaaaaccaatgcattttcttaattgcacttaatttagccgaatccggaaatggatgatgaaatgatggaagaagaggcagcgcatcatgaggacgatcaggttgcgaatattttggatctcaaaacgactataatttcctttaatcccatcgcagctggtgttaggcagtgatgaggacgaacaggaggtacggatttgttgacactttaccaatgtaatatttcctattaaggaccccaaggactacagaaaaggtggctaccaccctgtgcagatcggcgatgtgttcaaaaatggccgataccacgtcatccgcaaattgggatggggtcatttctccaccgtttggcttaggtttgttttgcttgggttttataatttttgatatttttctaatctgattttatgtaattgagaatctagaaccctaccattttatttcagtgtgtaaaaacaagtcgctaatttgctagcgttccttcaaacattttcttatattttagttgggacatcgaaataaagcgattcgtggcaatgaaaatagtcaaatcggctgagcattacacagaagcggcattggacgaaataaaagtgctctaatttgatctttcatttttttattcattttcagctgctcgaatgtgtgcgggactcggacccaaccgacgaatcacttcaggtttcgacttgcaaataataaaatggcattccatacacttaccagagagtggtccaacttctcgacagttttaccatcagtggggtcaatggagtccatgtatgtatggtttttgaggtaattatttatttgcatttcgcgacttgcattcgtttctttaggttctcggatgtaatctgttgaagcttatcattcgaagcagttacgctggtttgccgataatgctggtcaaaaggatcgtaaaacaggtcactcttatccatctgttttaacccatcataaattggttttaggttctcgaaggccttcgttatttgcacgataaatgccatataattcacacagacattaagccgtattttcttttctgttaacaattttcattttgaaattttagcgaaaatgttttgattacgatgagccacgaagaaatcaaaaaattggccgaagatgcaattttagcagggaagacgggacgggacatgtccggctcagcggtgtgcagttcaaaaaaggcgttgaagaaggcaaatacattcgtaaataaaatggcaattaattcccattaattacagatggacgaaacgctcacaaagaacaaaaagaagaagttaaagaagaaacggaaacgccatcgcg

SEQ ID NO: 7196 - DNA, 2076 bp, Heterodera glycines
aggctacatgacatttcgccaactgacatttcgccaactcagccaaaaacattcatttcgccaactcagccaaaatcagacattttgccaactgacatctcaccaactttacatctcgccaactgacatctcgccaacctgacgtttcgccaactcagccaaaatctgacgtttcgccaactaatttcgccaactagtcgaaaattgaattttaactatataatgatattaaatttattataaaagtgcttcaaagcaaagaaatcttcataaaatatataaaatatcaaaaaaaacaataaaatatgaaaatgtttaaaatcaattttcatcggcctcagtttcttcaccactctctgaatttccacggacgtgaagtccctccgcaaagccttgcatcacgagcccgagcaggtgcaaagaatttgtcaatccttcttccgattcaaagtcggcctcgtcaaggattcgcaccacattttgttctttgataatgtaccgttgcggtcgttttctacttttctggagctgttctgcgcgtccgatgtccagttgtttgtcgatgtccttgatgaatgctgctatgaaatcactcagtgacggatgatgattgagttcacgctaaattaacaaaaaataagtgtcttccaacggacaaatttttactgcaaattgtccatgcgcggcttccatgccgttgttcgttcgctcaattgccatttgagctctggtgtacacattccaaaacgagattgggaagcgtggaggacagacgatgtcttgttcccagcgtggaataagctgcaagctgctttcttctgacaatggaatggttggagttgaaggttgtggcgaatgcagtccgaattgtattggtccactgcctgtcattatggatgcctgggaaatactgaacgctaaaattgaaaaatttcataaatttcatgacagaataggtgcatttacgagttgtgcttcgagtgcgacgcagaagaaagtgtccgacatcagcatgcggttcaaatgcctccgccccgcgatcaatctcgaattgagtggtgccaatgtaggttttggcaaaatacgccagccatccttgaactccaagcggtgccgcgctgacaatagttgaaaaagcgcgccgaacgtaaagtggcggaatgagtgccaaagagagaacagatctgattttgaaaaaacaaataaatacacataagctaatgaaagacacctgaatgttttgtgaacggatttcctttgaaccggtgcttcgttgtcatcttcgttcaacaaattaaaaatgcccatgcttctggcttttcggaacaccgcttgcgccatgtggaagctgcagcccgagcgttcgcatgacgggaagacatgacgcatcgctttcagcattccaatctcgaagtcgctcatcacttaaaataattattaatgaagataatctgctgtttttttttgcctttatgggaaggatgggttcaacggcacgcttcaactgttgaaggacttctgtgtaatacttcgaggctttaccaggtagcaaggcttgcgctgtgacgaccatccgattgtttacgtaacagccgatgacgaacacttgcgtccaaggctttggtgcactgcggaaagtgccgtcaaggctccaccgacgattttgtttgagcattgataacagctgaaattaaaaagatttaaaaaataaaataagtaagtcacgccttgctatggctgaaaatcagtacgacatccgactgtcctaccctcacttcgcggctgtcataaatgaggacggattcatcgtcttttttcagaagaccagccggaatttggatttgcagtgggtcgccgcagttaactttgccaacaaatttgttcttggccctagtaaatgttgtatcattattcgactgaattgttttctacctgttcgtcatttggtcgagtgcttcattggtgccaagcagctcaaagacttcgtcgttgacgttggtccgaatctgtgcgcgcagttgagatggttgttgctttgggttctccgtgatcagttgcttcatctgatttcgtttt

SEQ ID NO: 7197 - DNA, 1446 bp, Heterodera glycines
gatccgcaccacattttgttctttgatgacgtgccgttgtcgtcgtttagtgcttttctggagctgttctgcgcgtccgatgtccaactgtttgttgatgtccttcgtgaatgcagcaatgaaatcactcaatgatggatgatggttgagctcacgctgaaaataccaaaaaataatgttttccgatgaatttttttactgcaaattgcggcttccatgccgttgttcgttcgctcaattgccatttgagccctggtgtatacattccaaaacgatatggggaagcggggaggacggacaatgacgtgttcccaacgtcgaataagctgcaagctgctttcttcggacaatgggattgtcggagttgatggttgtggcgaatgcagtccgaattgtattggtccactgcctgctattgtggacgtctgtgatacactgaacgctaaatcatttaaaattatgttaattatcatgaaacagtatatgcatttacgagttttgctttgagtgcgacgtagaaagaagcgtccgacatcagcattgggttcaaatgcctccgctccacggtcaatctcgaattgagtggtgccaatgtaggttttgccaaaagacgccagccatccttgaactccaagcggtgccgcgctgacaatagttgaaaaagctcgccgaacgtaaagtggcggaatgagtgccaaagagagaactgatctgatttggaaaaacaaataaatacacatgagctaatgaaagacacctgaatgttttgtgaacagccttcctttgaaccggtgcttcgtcgtcatctccgtccaataaattaaaaatgcccatgcttctggcttttcggaacaccgcttgcgccatgtggaagctgcagcccgagcgttcgcatgacgggaagacatgccgcattgctttcagcattccaatctcgaagtcgctcatcacttaaaataattattaatgaagataatctgctgtttttttgccttttatgggaaggatgggttcaacagcacgcttcaactgttgaaggacttctgtgtaatacttcgaggctttgccaggtagcaaggcttgcgctgcaaccaccattcggttgttaacatagcagcccatgacgaacacctgcatccacggctttggcgcacttcggaatgtgccgtcgtggctccaccgacgattctgtttgagcactgacaacagctgaaattaagctgatttaaaaaaaagatataggtagacttgccttgctatggctgaaaatcaggacgacatcagattgtccagtcctcacattacggctgtcataaatgaggacggactcatcattcttcattaaaagacctgacggaatttgtatgttcagtgggtcggcacagttgacaccaccaacgaatttgttctttgttctaaatattgtatcattattttctctgaatt

SEQ ID NO: 7198 - DNA, 4574 bp, Heterodera glycines
agtctcaattttaaagcgcagataagttttgatgctgatcaaaaggtcttacattaaccagatttgttgtccacatcctcacttaattgacgatcaccacaaatttttaaaataaaatttcgaaattaagctcatttggattcgtaatttaaatatttattttcaaaatacaaatcagttaatataaatttattaataaaaattaacaattaaaatgtgaaagaaagaaaaaatttcaaatataaaactaattagcaccgcactggtttggcacccccccaaaccccaaaatttacataacaatgtgagaggaagagagaaagagaggaaaatcaggaatttaaaacagaaaattaattgacattatttgaggcattatttgaaagactgatgatttgttcaataagagtggtaaggtcaccagtgtcaaaacaattataataagcagtacggtaacgctcatggaggaggacggtgttccagccttttctttttaaaacgatgttcaggaggagacggcaagtgcgtccgtttccatccaaaaatgggtgaattttggcttaaatacttttcttgcatgttatttaagcgagaattatctttattaaagtaaaataaacgaaatattacaaaaaactggctaaaaacgaatattattaaagtggatcgttttatgaaagctaccccgacatcacattggcatggagagttttgattgtctcaaaaattacaccgattagaacaatgacgagaagcggaattaataattttttacggacaaattcatacatatacaaacatcaaaatgcgtaagagatctgtgcattgaataatttcttaatcattttcatttttgaaatgttcaaaaaataaaaatttaccaaattaaaaaaatttgaaaatttccaaaatccattaaaaacgaatataatataattggattattgtaagtttatgaccattcacaatcagcttaaatttaaagtcagcaataatccattttccgtccgttttactcaactattcacagcatacaaccatcaaaacaatttaattctttgaaagttttatccccttttcttttgcagcagaaatattctacctgctcagaaattatctttggattcatcccttcggtttccaaggagtacaagaagttcttgtcgtcatcaaacgacgctaatttaataaatttcaaaaatccataaaatcaaacaatgtatttggaaacgaatttatttctcttgcaaagttttaccgcacccccccccctttcttttacagcaaaaagattctacctgctcagaaattcgttttgggttcatcctttcagtgtccaagatgtacaagaaattcgagtcgtcttcaaacgacacggacacatcgcgccgcatgtctctggcagtgtccccgtcccgctgctctcgcccttcgcatggccattgcttcttggtgctcctcagggctatcaaaatagtcctctggtggcgttggtgcatcttcgctgctctcctcttgtggcatgtttagcatttttagcacataaacccgggccaagtttatggagagaaagacatggaagaaaataagaaaattgatacttcatgtcaagatctcaaccgatttcatccaaaatatagttacaaaaagtcgaaaattcaaaattttcagaattcacttttgttcctaaattgactaaaaaagctaattagtcaaaaaccattgcaacatcaaaaaatggttattctgtacaagtacgaacataaaagtgaattttgagaattttaaactttcggcttttttcgaattcgggtccgggattcgaaatgggccgaaatgaatgtcagattcgtgatcagagaccctgaaaactcccccacccacccataatctgtttccacgactttttagaacaaaaaaaaaatttttccaaaaagggggggacaccatcgatagtagtaccattttaatcgtttcccgcaaaaaggattaatttttgcctttttggggtcaaattttaaaaaaataaaggtccatcggtgtctttaggcgttaaaaatgctcaaatttttttctgacgaccttatttttttgcctttcaacccacttttttgatggttcaaattcaaattcaaatttattcaaataaaagaatccaaatgaaggacaaaagccgcttacacatatggaaatgtcctagatctccaacagttttttaagtttggtcctgtaactttgaattgagtttattgatgaaaggtcgattgttttgcttaattcttgtaaattttttgtggtacgattggtaaaagaatgttcagttttagtaattttagatttagtgattaatctgggaaaaggtgaatttcttctttgagatatgttatataattttagagggtttaggtgagtttcttgtttaataattttgaaggctgtgatcagatctaaatattttctcctattttcaagactggaaatataaaggtattttaatcggtctgaatatggtaaaaccggtaaatggcactttaagaacacttttctggtgaaaaatttttgaaatttttcaaggcgaataatttcttttttaatgtgggggttccaattttcggatgaatattcaagtaagggtctaatatagcttttatagattttaatccatgtcttagatgattttgatttcattttttgaaaaagcgttctgcttctaaggtaggctttttgaagaatagcagaaatatgggatttaaaggtcagtttgttgtcaattaagattccaagatctcgaattgtttgggtctctttaatagtctttccattaaatttgtatggaattttgaaattatctttgccgaggtatagagaagctgatttttctggtgaaaattgtagaccccaaattttggcccattggctgacgcaatgtaaggcttcgtctagttttttacgttgagattcggtgtcatagcaaaaataaattttagtatcgtcggcaaaaagttttagcgaaattccgtcagggattactggggatagatcatttataaaaattaaaaatagaattggccccaagacagatccctggggaacacctgatttgatgggaaattctttggaaaactgctgattaattctgaccttgaatgtcctgttagttagaaaatctttaagccaatttagaaggttgcccttaattccaattttctctattttataaattagcaattcatgagggactttgtcaaaggctttaattatgtccaaataaatacagtcgatttttttattgagaagtatggcattataccaatcctcaagagtcgaaattaattggagggtggtagagcgctttctgaggaaaccgaattgttgatcagaaattaagttattttccagtaaaaattctgttattcttttggctaatattctttcgaaaattctacagcaagaacaggtaatggaaatgggacggaagtttgatgctagattcttatctccgtttttaaatagtggtagaataattgaggttttccaaatttttggtagtttaccggattttagagacagtttgaataaatctgttagaggtctggttaaaattagatgaaaacgtttcagaaaattaaaacttaaatcgtcaggagatgtattatttttgtttggaaggtgggttaaaatttcgagaacatctaaaacattgaaatgaacgtcagaaattgaaggttgattaacagaaattattggaggaggtttggggtattctgataaattttggaaggattcagaaaaatggtttgcaaaaatgtcagctttagttttgtcatcagttatgatttgttggttatgagagatgggtggtatttcccaacgctgaaaatcttttccaatatatttatatatatttccggggttttggtctaagaattttttttcctgtttttcctggaatttcctagtttgaattttgatgtggagtgctatggatttatataggggaagatatttttcaggttcttttttgagtttcttccaaagagctgccttttctttaagctttttgtcgctaacattaacgcagcatttattttttgattattttttgtatttaattttaaatttgttttttaattttctctttttttgtgtgtttttattccttccattttttccttatgcttcagccaagacggctgatgatgttcatttggctgttgttgctgccttcctttttgtttctcctccgcttaagtcatgccaatttgcttatccctggcattatgacggaacgcgtcgaattggcaccaaaatcggtaatttactcctttttaatattttttttatacatattaatccttaattttttttcaattaagcaagaatacatcggctttcttcagtcggctttgaatggcactgaggtggaaattcgggtcaaatgtgaggaggacgttgaaatcgaattcgatgtcgaatttgccattcgaagttcgccttgcgccaaggaatttattgtggacaaaatgcgctaaaagacaagtcaaccaatttgctggtaagctttgcgtctttcg

SEQ ID NO: 7199 - DNA, 2005 bp, Heterodera glycines
cttgttggtgtttggcagtgcaaagataattcatttttaataaagaattcgacaaagtaatgtccaattttgttaaaaggggctggtgtattattgtgccatttaacgcttttactatttagattaaaatcttccaatattagtgtttgtcctttaattttttcttcaatatagttaaagaattttttgagttagaaagggaagtgctagggggccggtagacaccgataatggaaaaatttttgagatttttaagcctcaatgtaacaatttcgcatccaaaaactgattccgcaaaggctgaataaacggaaaattttttttctattaagattgaaactccgccacctcgtttgttttcacgaagggctgaaaagatttgatagttttcaggaattgctgcatgtaaaatatcaaaattttgaggtgttaaccatgtttcgactaatactataaaattatatttttcaatgttaagtgtggttatgagggggtcaattttgttcataattgatcgaacatttgataaaattcctataaatttttgttctggaattgatctattgaaattttggttattgtctgaaattgttggagatctgtgaagttcaggattatattttgaaataacagaagtggcttttgtcctagaaaaagtaaatgatggtgtatgagatcgaattgaaaaatgatcaaatgaatcaacaaaaaaagaaagattgggatttgtgtgtgttgaaaatttttgtaaatttttttgaaattgggtttcgttacacacaaaacccggaaaccttgaaatcatcgaaaattttgctgcattttttgtccaagttcgtgcagttggtttgaaatggcgctagcattgttggcacgtggcggatggttggccattccgttgcgtttggcctgtctttgttcgtattccgcctggagttgttcacggctgagagacgggcgaatcagcaaacggccccagtttggcagagaacggaggcgagtgcgctcctttttccaaccgccgagtgcaatgtgctgatggacggaggccggcagcaccactttgaccaagcgtggcgaggcacggtgaacatcaggacggcccattcggtaggtcgtcgttggcaccgcctcaacacccaattcgtccaaaatccccgagacaaccttttgatcctctcgaacacgctccgaaggacgggctgaagggttctccggcattccaatgatgaccaaggaacggcgccgttcctgttcctcggcactgttgttgtttgcgttgttgttcagaccatcgatgacgtgttggcatgtgtggagggtagtcagcagaacgccgaactgaagtttgacggcctgggaaatgtcgtcttgaacaagaagagcgttgactgcagcagaaagtgagtcgatttggccagccaaagcgtccgcggaaatacgtgtggttttggtggaaggtggagttgctgttgagtccattggtcgtttcatggtttgacgtagaacaaaaaataagaagaaatgaagatttttaatttacgaaaaaatttcgacttttatttttttaattcacctaaattttaagaaaacaatcatttatcaaatatatatgaacttttcaaaaatttatttttaatttataatttaaaccttcaattggtactctgggggtttgctgctctaaatcagaatcatattttagagtaataatttatttttaaatttgtttttcctcataacagacaataaattccttcttgttagaattaaaaatatattaattttgtattcttagaacaaaaaattgagttttactaattcattgttaaatgagttattttaatttacaaatggattgaattattaattatgaaatttatttaatttgaaattcgttagataatctgtgatttaggtcatatgttttaatttttgtcttttttttttattaatttaatttacattaccgtaatgttatttaaaaataagttgaaatatctat

SEQ ID NO: 7200 - DNA, 2024 bp, Heterodera glycines
cttttcgtatggcttttgccggcaccacacagatcaacattgatgtccgattcggcagattgagtgccgagaagaaaggagccggaaatgagcaggcgcgcgcgattggcagactgaattaaaacaattaaaaagacaactaaattgactaacgatggatcgtttaatttaattcgtgttaatgacacaattagcattatcaaatgatatcaaaaactcatcaacgcttttcctctgcctcaaacacaaatgaaaattggcaatttatttttactatttttggccaattgcattttctcacccattcctcaaccattgaatggattttgatcagtgcattttttatttgctcctcattttcttctcggtcatttgcgtttccaaaattgcgtaaatatttttccaacttaattaaataattaattaatttttattttattttcaatgaaactttttttgtcgctgttaattcgttcattttataggcctccgttgttatttgttgtgacaattttgcgaacattggcataatttgtctgttgtgccaatctttcgtgaccaaattttgtgcgtataattcgctgtctaaatttattttcaaattaaataaataattaattatttttaccaatttttatttgttgctccatttttgcccactccctttttaagtgctcaaaatgaattgggtcgaattttgtgccgataattttaaacagttttttcgccttctgttcgtttcccaattcgtcccatttcgtccgatatttctcatcttcgataattaaaaatgcgtattttctgacgacaatttgctgcattaattgcaatttttcaatttcgaaagtgtcacttttggacattccgtcaaaaaaatcgaatccctccaaatgagccaaaaggttcaacaaagtgtagaaaagtttgttgagaaatgcccacagattttcaatgctgtcaatgtttagggtgaatgccacttctttgatcactgtccacaattgggccgaatttttggctttttttccatcgaaaaaatatttttgggggtccaatcgaaacaattgctgaaccgttttaatccgctgctcaatttcatgcacaagtgttcctatcaaaagcaccatttgtttttctgttgaacttttttcgccggttcctttgaacttttcgtacagaaaagtgtcgtcacagaatgctaatgaataattaattaatgattaaatattataattggcataattaaaaaaaattggctttgctccgcttaaattttaattagcccattttcaccttttaatggaacgatcgcctcgtaaactgtgcgactgtccaattcctttgcctttaattctgccaaaaaacttcgcaatctttccatggctttttgtcgccgcttttcctttgagtcaatcgctttttccgacctttctttgtttgggctcgttgctgctgaatttccctcactttcgccttcactttctccaaaaactgatcaaaatttgcaatttatcattaaataaaaaacattttattattttttttgtattttaatttatttaattattttgcttttttgactgacttttgtcctctgtcaatgatttgtccgtttcgtttgcgttctttggactttccgtcgtttcgcctttcgtaatttcctcatcctccgcttcaatttgtaaattgtttttttctatttttgaattttgttttaaatttttatccatttgaatttccgatgaaaattccattttattgtaataaatgccagcggcgcggaagaatttttccaatttttcggagtccaaaaattccaaaaaatttcttcgtttttccacgtccgcattcattgctaaatttagaggaaaattaattttaattgaatttaataaaatatttttttgccaataaaaaatacttctgattaattggccaaatgatgggacttctttttcactttttgttaataaattttccaattttgtaaagtgcattttctgaatttctttatgtgtcggcac

SEQ ID NO: 7201 - DNA, 1825 bp, Heterodera glycines
ggggacctctagagcggaattggcaattatcgcacttaaagcaaattaattatttatcgaattcatttttttaattcgtttcactttttccaattcccacaaattatccaccatttcgctgcttgtcaattgcttcgtttcgttttcatttgccaacgcttcgttctgcgcagcccataaggtaaagctttccaaatagcacactttggccaattttccgtcttttccgctcaattttgaaagaatttgcttcaatttggcattttcgacctcaacttcaattgccattcgctttaatttcgcattttccttcgcttttaatgggcggagtttcgccaaaagattttccagtaaaatttcgaagtaaaaacagaaaacagaaagtgtcaaattgtctttggtttcgccattgtcctcatcccccagtattagcttctcatataattgcattatgttgaatgattcggcattttctaaattcgtttttcaatttttaaattgtcaattgttggcattttgtaaaactcaccgtaatccgtcaagttttttgtcccttttttcgccatgctttcaataatgagttgttcaaacatttgcgaatcttttggaatcattctctccaaccgttctctatcaatgtaaattgctaaaaattggcaaaattaaattttccgctaattttactgctttttcgccccaatttgttcatacttttcagttttgcccgaaattcgtcattttgaacaagaagctctttcagagtttcgttgtgagtcgaagccaaaaatgggattacggcgtgccaccaatcatctggttgtccaattccgcctaatttgcccttaattgctcccaatgtgaacagatgttgcattgaagtattaatggcatggacactgttcaagtcgggcacagaatccatcccattttcggttattgtaaatgcttcgtccaaaatttcttgttcgtcactttttggcaaaatttttgctttatgaattgtaaacctaagaaaatttgtttattttttactttcaaatttaaagaaatcaaaaaataaaattaagcgcaaaatggtggcacacaacgatcaatgttctcgtttcctttgagtaaatacgaaaaaaaatttgttttggaatcattgaaaagtccattccgatttccggactaaaaaccgcgaaattttcttttcgagactcttgagcctaatcttaaacagaatcaaacccttaaacacatgccatttataataggcaagcatgttaagcaacagttcggccttcagccagacaatctcttcattttggtaatccaaaaagcgaatgtaatttcgcacttctatttttgtgatttggccaactgacaattctaaaacattgtccaaaatgcccgattggttaattaatgcgttaatattaccgtttcggcacatcctttgaagttccgcgtatttgtggaatatatttaaggacaattcctgtccagtgtttctgtccttgtccatgtaaaatctgttcagtctgtacacagccgccttctcttcggccactgaatttttcagaaattcggaaaatgcattttccgatcggttcagtctgatcattctgagcgtgtgctgctccaacagctcatctcgcattgtgcccaggttttttgccaacaaatgaacaatgccaattttgtcgggtcgttttttctgagttctttttttgttgtacagttgagccaacgaatgccaaaatgaatacactttcatcgccgagttttttgaatgttttgcaaattttcacaaattactgtcccataattctcaaaatctttc

SEQ ID NO: 7202 - DNA, 2967 bp, Heterodera glycines
  unsure (1)..(2967): unsure at all n locations
ttttgcctttttgggggtcgaattttttaactgttaaancttgggcaaatatttcaaaaatgcgagcaaaaaatatgcaaattgcgagccgaaactcagcagtttccgactgttttttgtcataagaaagcatttcgacataattttgtgacaatttttgatcattaattacatctaaaatattttaatggacatattaattaaattgcctttttatttttaattaatttattcctttgataattaattttcgcttaagcttttattaccaattgacattattattggatgttggaattcaagctcttctaccaaattttctccaattaattttgcaatttcatttttaattgaaagaattttttcgttatttttcatcaaatttttagagcgcaatgttcgcattttataagcaaattctgtttcaacattaaatttgctctcatcaaaatactcagacattttcctaaattattttttaaattattttaattaaaatatagattttaaattaccatttataggctgtgccttttgcattatttctcccaatttttatttcgcctttttcttcctttgaattggtcaataataaaaatgaaattgcgctgtaatgcaacatttttcggtcatcaacgaatttttcgatatgcttttttgatgttttgtccattttgtcaccattttccaattgttttcccattttggcacaatcaatcgcagcataatttgtgtctttgctctctcttcgaaattgttttttgtctatcaaaatgcatttattaatttaccgtatttcctaaaatacagccccccccccattaattagagcctcaccctaaaataaaacccaccttttgagggggtaaaacacgagacaggagattttttgctgaagaactattcaaattttttttggcacttttttttacgaaaaagtgatcgaggccggaactttatttcaattttttccaaaagaaaaaaatcaaataatttaatttaattatttttaaggtgaaaagaaagaaaacccaaattgtttgtaaaaagcaaaaaagaataaaaatccatcaattaaaaataatcaatttttatcataaattaaattggaatttcatttactttaaattttaaagtttttctcccttattttttgttttcaaacataatttttctgtcacatgttttttcaaaattttctagtggttggaggaagccgcggtgccgataagcatttgttaacagaatatgtccaaaaaataaccctttttgtggatttatggaccaaattttaaaaatttggcagattttggagagatttgaggaatttaggctaaatttgttaaacaattttgcgcctaaaaagaacaataaaattatttttctttaaaacttatttttctctcagacccctttctcccccccccccattcttactagagaccggacaactgctggggtcggagggatcccgagtcgggatcccgactcaatcccggtcccgatcaatcccgaacattttggaaaaacgatcgggacggatcccgatcgaatcccgatcccgctcaatcccgaagatttttttcgggatcccgcgggattatcgggattgctaaaactcaattttttcttttacattttgtgtcatgttttgttcaaatgcttatctaatatttataattggtcaattcgattgataaaaatagggattggaattatatcaggtttttatagaaatttttcaaaatatgtcatgtcaaaaaaatcagtttttaggtcaaaaattagaacatttaacaacatagctttaaatagtttttttacaatttaatcaattaatattaatttttgtattttcgcctcctatgatcatttttaacaattttgaggaaaattagcagtcctaaagtgcatcggaatcaaaaagttcgatttttaagaattttttttgcagtgaatttagtgagttcgattcccaccgaggcccctaacattttgcccatttcttattttattaattcgaaaaaaacatattttaatgatttaaaattaaattatatttaaaacatgccaaaaacactgcgaatattgaggaaaaatttccaatattcacagcttttcacgatttgcgttgaattttgatacaaattctcaatgttcaaaaattgttccaatgttttttccgacaattttttgtgttccgcgtccaaattttcttttgtttttaccgcttttaataattcattcatttcattaaaataaataatctcttcaatttttgttagcgaaatttcttcaaaatttttgtcacattttttttcagtttcaaatgatagcccaaaaaaatttgcataaaaacagtcaatttgatcaatgccaaatgcttaaaaagttttaaaatattttaaaattaaaaatttcattactttttttagcgccttttaaagaacagacggataaaaaaattgtcaaaaataataaacaaaatgaattctccaaaagtaccatcataattgagtttcctaaacatttaaaaatatatttttttattattaatattacctatgaatataaaccttgtttaatacttaatgataataatattataataaaaatgtaaatattgcatgaaaagtatcgatggaatgaaaccaattgtaaaaaatgtatggtttttgaagctttgctgagagagaatacaatttgcattttgtgaaatatgtcatggttttttggccctttgcataaatctgcaaaaatattcataaattatttttaatttattcaaaaaggcgacactatgaaataaatttaaaaaattgaaaaattaaaaaatgttttctttaaacgaaagattaattaggtgttttgttttgagtcactttttatactaaaaaacaagaacaaatgtgcacaataattttcaaaatgttttcgatgaaatttaaaaattccaccgatttatcc

SEQ ID NO: 7203 - DNA, 1411 bp, Heterodera glycines
ttggaaaaaattctcgtaaagggtgaaaaaggcacaaaatgtcataaaaatgccctaaatagtcttagaatcatatttttaatattttaaaaattgatttttggtatctctttttttttgaaaaaaatggtttttaggggtacattttcaaaaaaaaaaatttttttttaatttttcacaagaaattttgattaattttaaaaattctcaaaaatttatggagaaattgctaaaaagtccaaaatatgtacaaaaagcccgaaatgtgtaaatatgctaaaaagctcgaaatatgtaaaaatatataaataaaagtcccgatttttgttcgcaaacacaaaaaagaatgtgttttttttctactattcagagcatttggggaatccaggaaaaatatgtgttacataaaatttccatccctaataattatatttaaaaaatgttaaatttatttttttaatttataacgcctattgctattttcttacaaagtcgtgcaaaacggcatttcaattcaacagttggaacatttactgttcgttcaattacttccagtgctataccttgctcaaacatttggtcaattttttccaactaaattaaaaatttaatttaattaaatttaaaaaaaaaagattcactgatttttcaggaaattattcgaaaaaaatttcccggaacacgggccttttcatataactttgtttaaaaggaaccaaatttttaaatttttatatcattcgatagctctaggtgccatcaattagcctgcaaaatttcaaaaagtttagtaaagtttcaaaaaaattattaactcttcaaaaaaaaacttggtttttttgatttctcagcaggtcataactttttttaaacttgacgaatttctttgaaattttcaaggcaaatagagaacacaatttgtgaaaaaaaaaataaaaatgtatagggcctcaaaaatcaaaattttggctgtgttttcacttaaaattggtggctcagttggttaaattcgcatttttggagctcgggttcaaatccaacatgaaaataaataaattttaattaataaatgataaatgtaaagattggaaattaatagaaagtgaaaaaagatggaaaagggctctttggcctaaaattcgattttttaggccctgtaacgtttgaactagacgccagacaccgctaaaattaaaaattcacaatagaagtcggccctgctctatcgaatggcatataacacatatggattttccgagttacagctcggaatgttcccttttaacattttattgtataattatgtcgaattcattcaacaactatccaaagcacataataaaactccgttttttattcgctttattatgaggagtattattttcggttaattaacatttgcacttttaca

SEQ ID NO: 7204 - DNA, 2228 bp, Heterodera glycines
ctggctcagtcagggatcaaagctgttcaagggcacacaaacggactccagttctaattcaaattttgctacaaaatctatctaaaagcggttaccccacatttgcgtcaatgtctaaaatcgggttcaaacctaagttttctcaatccctggtggactaaatagcattatataagtggtcgaaagtgattgtgtcggataatttgatagttaattaccttttgaaaaattatcaattattcaaacagcagaattaatgctcctaataaactaaaagactgtgttttcttaattaatgctgtttagactatcatggcttgaaaaaaaatagttttgaatcagattttgggcatgagcgcaaatgtcttaaaaaactgcttattttttggcaatttttttgatgaaatttttcacattttccatattggtagattctaaggatttaaaaatacgatctactttaaaacattaatgttatatttctatttttggtaaccgtatgcaatttaaacccgtacaaaaattcgttggcccgtgaaatgactactgttggagatacggtagacaggataaatcattgaaatctgaatttaaatttgaagttgtccgcctatgatatcgccatggatttggcttcatccgtttcaaatgctcgtcatttgcgtcgtcgtcgcggtgccgacaaaaatggctatttatacgagccgacgacacgacgacgtctttacacaaaatacgaagtgaaataataataataataataataattgtttttttattttaactaataaaatgccatattccaaatatttagactgattagtctcattatcagtcgtaattaaatttttaccagggacttcttgcggagttctcattctgcgattgcagtgcaagcaagcttggatgtcaagcattgaaagtgcaaataaaatccatttaaatgaacttttatattaaaaaacatttaaaaaattttttgattaaatatttttattgtaaataaatgtaaattattccattatctaattatctaattaatttaatttaaatagtttaggaagaaaatgggcaagatggactgaataaaacacgacctctttgtctatgcttttacaatcaacaaaatgaacaggtctttggtaaaatgccaaatttggcataattttcaaaaatcctttaaggtttggccctgctttgagccggcaaaatggcaggaaaagcgttgcgggggatgcaccgctttgggcaactgcgattttgaccagggccaaccgggcgaaacgtcggatgatgccgagaaacaacagccgcagaaggccatcaacaacaacacttccgccgacagcaacagaaacggggcatcggcttggtggccatgcctttgtgcacccgcaatacggtaagttggacagacactgtatgtacaatatttcaatcgactgctgtttggtgagtatgactaatcacttggaattgtttgggcgatcatattttacataaaatttaattttaacttttttttaattctcagaatttgcgttcgtgttgatgacaatttgccagaaactgttggctctccgccgttggcagccgacaactcatccgacccttctccttcttctgctgatccgccattgcttgaacgcgtgcccaaaatttgggagttgaaaaaggcggaagtgaagcgaatggaaacgccggaacagaaggaggcgagggaagaagcatatggactgagggtaatgagaaaacgaacggacaattaaagcgtttaattttaaattaattacctaaatggcattttcatttccttttattatttaaatttgggttactccccgaccctcggcggagattaaagtcggatatcatggagaaaattcctcaacaagatttttccgggatacctggacaaatttagaagattacggagagaacaccttctttggtgaggaaattgaaaaaaaaatagaatttttttttaataaaattcttataaactcatttaaaactcaattctctcatcctatttgctcccaattccccgaataccgtatttgctctttttatccccccggggggattatttttcaacctcctcagaaaggggggggggataattagacacggggggataaatggagaagggggtattatttttcgacagatttatttagtgtaaaatttttgaaatttatttgaacacgtcgccaaaaaatgtcatc

SEQ ID NO: 7205 - DNA, 3804 bp, Heterodera glycines
  unsure (1)..(3804): unsure at all n locations
atttaaattntgggttactccccgaccctcggcggccctccaggcggatatcatggagaaaattcctcaacaagatttctccgggatacctggacaaatttagaagattacggagagaacaccttctttgtgaggaaattgaaaaaaatagaatttttttttaaataaaattcttataaactcatttaaaactcaattctctcatcctatttgctcccaattccccgaataccgtatttgctctttttatccccccggggggattatttttcaaacacctcagaaaggggggggggggataattggggacggcgggattaatggggacggggggataaaaagagcaaatacgttagattcagggaacaactctaatttaaattttcaattttttttgccctttattgaaaatgcaaacttaaaaataaataatccaacctccctcctccctctacgagtttttttccttttacaatttattttcacttcactgctttgaatgattaattttaattaaattttaaagggtgtgtatgatccgatcgcaattcgttcaaaagctgtcgagaatctcgtgtttgctgtctcacaaatgagtgaatacgaacagagtcagatgggctacagtaagcgcgagttcatcaccaagtaaacaatgcacgaacaatcaaatggttatttgtgattatatgacggaaatttaacactaataataatcactgaccctttatgtacttttgatagttaatttttattaaatataattaaaatatttttatttaatatttatttttaagatgcagtttcaatgggagggaatgttcggtggaggaagacttctcattgtatgtggacccgacttatggcaactgtttcacattcaatgcccacccggacaaaaatgtgttgagtgaacgagccgggccaaattatggtaaaaatgcgtttcaattaaaaaacaaaatgaaaaatgccatttaagaaatttgaaatctttgcaaatatttaggcctccgtttccaagtttttgtcaatgtcagcgactatttgcccacgacagaagctgccggtgttcgcattactgtgcataagtcaatgcgtggcgtactgtactttttgatttcaattcttgtttttagtcctgaagaacagccctttccggacacacatggccataggaatgaatttgcttattttcaaaaaaatttaaaataaattctttttagtgctccaactggcttcgttagctcatttggcatccgtttgaagtgagaataaaaaaacatttaattattttgaaaagaaaacattagcttaatgatttaaaaattaaataaaaatatataataattttgaagatgtgttaatcggttgccaagtccatacggcgaatgtgttgagcaaggcaaaactgatgaatatatttatcgggacaaggaatattccactgaggtaaaatcttgcaaaatcctgtaataatcaaaagttatccaaatgtgacaaatccataacctaaattagcgaatttaattattgaaaatccccttctgctgaaggggtgccaacgctcgtgcatccaacggatgctggtcagaaagtgcgggtaagaagaacagttgggaaacagattataataaatgaaatataataattaataaatattaattactaggaataaaatttataataataaattaataataataaggataattaatctgcaaatattctatttttggcaaatcaacagatgtggcgacccgcgttttcctcgctatttgaacttcagcaattgtcccgtgggcgacccgcggctgagttagtgttaatcttcaagaaattatttaaatgataacacaaaaatggaattcatacgcaaattgtaaatgagaattgcttgaaataatgaaaaatcagctgaaaaagattccgttttaaagaaacaattatcaattataggaccagcaataaagtttttttagcaaaaataattaattagttactaacaatgcatttaaattcaaatttgcaggagagtgtctccgacgtgaaatgcacagcgctgcgcggtctgccactcagcccgactgcgtgtgccgacagccgtgtcggtgcgatcaaataaaacaattaattttgattgcatttaattagaaaattaatccataataaaaaaagttctaacttttcttcagtgagcaggtgttcagcattacgtacagttgtgccaggtaaatattgtaaaattcgaaatgtttagctttcaaattccgggagggggtgggggggggtaccgttttgttaaagtatttctggtcgtttcccctctgtcataatgagaggccatttttatgaaaaaatattctgggaatgcgataccgacaattcatctgatcattttttcttctcggtctcaagtctatctcagtccatttgagctgttaaatccctttctcatttacttaatttaatattgaatttgctattatttttataatttggcgttttttcattattttctcatgctttattaaatttattcaataaattaattcaacagatggccctccagcgatttggcattgcacggcgaatgcgacccgtcgctgagcggtgcgcaatgtctgcagttccatcgagaacagtccgccattgtcgaggtgtactttgaacaattgaactacgagagtttgcaggagagcgaagcatacggagtaaaaacgaaaatttatttaaaattaaagaagggagggggaggaggggctaatgcttaatggggaaatatgtccagcggaaggcaaagcggaccaactgcgtttaggaaaagttagaaaccatcaacaaagttggtatcattaaaatgctctaaaaagctttacagctaaccaaaactcataatgatttgcaaagaagtaaacaattaaaattaagaatatacaaaaattctgacttttctgcagtttcaggtcttaatttttatctggttgttaatctcatagaaataccttacaaatacagtctaaatatagatgaacaaagaacaaatgttagctacaaaaagccattaaataccacaaatttggctttctgtctcttaaagtcacaatcaaaaatctcgagtaattgttgcgagaagttgttactttttttcttgtaacaatatcaaaaatattttgctgttttcccatagatgccaaatttgctgtctgactttggcggacagcttggcctatggatgggtgtttcagtgatcacaatcatggaagttggcattctaatcagtgagctgctggttttgttttttgtgccaaaaatggtcacttggctgagtcgattgttgaacattgtcgttggcactgatcgggtgccgtcgggcgatggcccaatgttgccttctggcgacacggacccaatgtttgcatttaatttttaataaataaataaatatgttgaaaaatggttatttaataataataaatatgatttgattcctaaaatattttaatatatttaattgagaagttttatttcatttttaaaaattaatatttgatttaattaatttctctatttttaacacaaaagaaataaattttaacctttagttttcctataagaaaattgtaaatattttcaagtgtttaagggctaagaaaaggcgtgttttggtccacaaaggctctgttatccgttgggcagccgaatcagaatgttgcaatgcgggaaaattaggacctggcacaaccaactcaaatggcgagggcaacaaatattactcgactattgatgattaaggccaccgga

SEQ ID NO: 7206 - DNA, 1396 bp, Heterodera glycines
  unsure (1)..(1396): unsure at all n locations
aattttttttcaaaatacgcattatgtcgatttattttggcgtaagatgcatattttctatgaaattaatagctaagcattattttggatcaaaataaatagttgttaaatgaattcaaagctttttcccagaaaaatttacctttggaaaaaaaattcgaaattttttgttcgaattcgggtccggggtttggaattgagaaattcgacttcagtttagtgatcagcacccccgaaaacccccaaatactcattttgagctcaaataaaaaataataattttatatttgggacccccattctttacgattgccgtttatggcattgcccaatttataacaccaattttggtttattaaataggtgggacagacttttggatgaagtgcagcaagtgggcgcttacccgatggaccgcgtggtgcccgtgtccgccttcggaaatccggcacttggcgaattttacaaagtgatgccgtcgagcggacttcgagttcggttttttctttattttgtcattttctcccatttttgggtgcaaaaatgtcatagaattacaaattccatacatttgaattgccatggattatttaaattttttctagcgaggcttgtatcacatctttttaatatttttttctgggaaaaatcacaatttgaccaattctgaaaccggactcgaattggaacaaaagttcacatttttcaacaagttcacatttacgcaacaaaatccattcaatgcaaagaagtggacagaatgagttttcgactttttgttcgagttcgaatcatgtattcaaacatgttttcagaaaaattttcttttaaaattctcaaaattttcccagcgtttgcatcgccaggtcacaaatttgaaagcccccgcccctaattgacaaactacgaattattggctctaatttcctcctttttttacagttggaaatccgtcacgaggactacaagcagcagttgggggacatcaaacaaacttattggattgctgaagtgaaagaggcaaaccctatatttgattacttttatgacagtttttatgtccaaccttcgaattttgctgggcaacaaaataagggacgatcgaaggaacaacaaaaaaaaaactgtgccaaattggcatttcgttgtcttcaattagcatcgaataatcttgataatgctgtgtccctttctctttagctcgtcggcttttaccttttgctgcgttacgaaggcatggacgaggagggggacgaaagggacgacttttgggccaacatcggctcggacgatgtcaaaaacgtcggctattggtaagtttaggcattgttctttatgttccatttttttaaatgtcgctcgaggcaatttttattccanatataaaaattgccaa

SEQ ID NO: 7207 - DNA, 2480 bp, Heterodera glycines
  unsure (1)..(2480): unsure at all n locations
cccaattgcctctactctgaccacccagcgcgtgctttgaactaataaataccactcccccattaaaaattgtttatttgaatattgtgttaacctcgtcttcgcccgtctctccgactccctcttcctcctcttcatcatcaatttcttcctcattctctccgatgttttgcttcttactgtcaattctgcttgtttctgatgcatcttggctagccgccgccactcgaacctaaaacaaaaataacgaacgtttaagaaggttccgttttaacgtgcagttgctcaatagacctgcacatcggggaagtcctcctcgtcgttttgtccctcctcctcctcctcgttgctttcttgctcactgtcattctctcttctgtttgacatttcctcctcttcccctttctccacttcatcttcccctctcaattcgtcccttatactgctgtctccatctagacttccaaattcattttccgcttctttccgtcgttgctgatggcgtgcagccgattcatcatccaatttaaacatcagccctaaaggaaagaccgagtttcaagttgattgtactcacaactgaatgtaacagaaagaaacgaaccaaatccgagttgaagttgacacggaggcagaaagttgcgctttcctctgatcataaacgcaccagcaggaatgtattcgcccgttggagcagttcgggacacctttgaagaaatgaaatttgatgaaaggttaattggcaaattcacagccgtacctgctcccgacggacccaccatgagctcaccgacactcccgcgtcccaagccgaagaaaagcacacggccattgtcccctggaggaaaattcagtcaaaattatttagctgtgaattactgcttcgttcagcgtccgtggcggaggttcagcgccggaacggtcgcggtttcgaattacaaccgaagcagctcctcttaaataagaatagaattaaaatacagttcgaagtccgaactgactgaatctctgcgtgtacgtaaatgtcacaagaacgcatgtaacgcttaaccaaaagctcattctggtgggcatctctcccggcgagcaccaaaaaacggtccgaactaataaactgagaatggaagggaaaggacctaagtaacgccaaaagaaatacaaattggcaaagctcacccagtggaatttctcgaaccaatagcttttgcgtgctcggatcgtactcattttcttcgtcttcatctgaaagtgccaattgttcatcataacaagactcgtctgtttaattttgcctggttaagtttatttttggcctggctttgagccgatttcagcgctgtcttcgaagctgcgaaggttttttgttcttttgcgcttgccattttccgttcagagtaaaagcgtcgtgcgttttggtctgcattaagcccaatgtcgatgtcaatattaaaagtagatccatcagtttcttccgggtcgctgagacgcatcgtaaagctttaaagattgggctgcaaacaaaccaatgctaaaagataaccggttcgagttcaattgcaacttggaaatgctgcgtacgacggggtgttgttccgctatcgttttgagccacggctcaatgtctgcccaactcatattggcaatggcaattctgaacaatacgaatgcaattcgtcacgaggtccacgacaaaaaaggcaaaaatcgcttgcctcataaggtacaatgccttctccaccaattctttgtttagcaaaaccaactccgctcggcgttcctggacttgttgcacttcgctcaatgcttggatacgattttcgtggtcgcgtcgcacattcttcaaacagctcacagcatttatcgttacgcttattttgccattacctgcacttttttttctgcctctttttctgctcccaaaatgcgttgttccgctttttgtgtttcgatcgacgagtaaaatttgtccactgcttcgctgaatgtatcaaactcgagcactttcaattgctgctcattgtcagtgctccgaaattggacaaagtcgtacggatagtattcctgaattaagtaatttatgtttcgtttttctgactaattgtaagtaaactttatagctttgaattgccggccgtccctccgcttttgcgtctccatttgtcaccgcccttttcacttcctcataagcgatgaatccgccgaatggccgccttttaatttcttcagaaatgcgcgatgcttcgaccagtgcacgctccacgagttgcgcgcccgcttcagaaggcggcaaatgctctccaatctaacaaattgtaagtcaaatgagcaaaagcagaaatgaaatagaggcgtatattatatccaaaagaagattctgtctcattttcatgaagggactgactggcaaaaggatatacgttttttaaatccgngtattttaaaaacctgttcctgtgtcagtactctcccaatagacttct

SEQ ID NO: 7208 - DNA, 4717 bp, Heterodera glycines
gatcaacaccaacctgaagcaccgtaaaacgggactgattgtcagtcccaaatccaacctgagaaacagcgggtgagacgccgcgtattaatgtgttttcggaatttcatgctgaacccggaaggaatggtcgacttcggccaatcataagtggtgctgtggattcttatgccggactcaaaaagaatgaacgctttttcgttgggcctgacaaatttcaaaaaaagataagaattaaagtagaccaacctttgtaattttatcaaatatgtcttcgagtttatgtcgtagacattaacaactctcatcccaacaaaagcgcgcaaatcgtgcaaagctgcacaaagatcaaatgtcgcgaatttagttttcatttaagaagaaaacgaaacaggcttaattaagtttttgatgctatttcatatgagttcataagctattggaatttgacaattcttctatgttgtattgtaccacaccttgtcaattttggggccctagcagttcaaaaaagatttagatgtttggcgaagtggtttttgtaatatagcaaagttaaaaattttgttttccaactgtgtttggctctcgaattttgtgtcattttgtagcattttttgtcggcttaccaatgataccttacttcactataagagcccaagtttttctagtatgtttttgcataattaagaaagttgtggatgttattcaaacaaaaatgtcgtcagctaattcctcttctgcgacagcctcaacatcgggaccaaccaacaaacgtcaaagaatgcggtcggaatgcaatgtttccaatgcatcggttcaaaaacagaatttaggcaataatcggtattcaatgactttccaacttattatggtaactcatcgattttctttaggcattttgccaatcatcgaccacgttatcgccaaccaaaaagggataatcggcggcttttagtcccgggtttggtttccaattgtcctgtcagaattcgttctgctgaactcagtgatttacccgggtttgttttttcttttgccattttctgagccctttttagtttctcatatgacccaattacgaagaaatactaccgaattttggagaatggtcccggacgtgtaagtcaaaattcgaactacacacatttatgttatgttcttaagcccccagggtcaactctccaacatttacgcaatttagccgtacgagccggaaacacagagacatcatcgaattctgcaacttcctgctttaagccaaacaggaaccagtcagcggatatttccaatttgccaaattatctacaacaactccaactcggtcctggcggtagttcgaccacgagaagaaccgggcgtttcgtggaggaaaggcggcttcgtcatgttaagcaacagcccagctatagctttgaggtgagttctgttattttattggatcgggtgggttactcccgttgtatcttttttatgctttatttttaagtaatcgcttttaaacaggtttccggcacttggggtcagcgcttctcgagttgccaatttctggacgtgtcggaggatggacgaactttgattggatgctggtgatactttttcagaaatcactagcacctttttttttgtaggacttcagagcaaaacaatcttttcgaggggcactgttctcgtgtgctatccttcggcgtcactgttgacccaaacacagccaaaaaagacactcagcgaatggcactcgccgaagatgttggggacatggcatcactgttggactccaatgggaaataccgctgcaacacctatgggtttttggatgcgaatgcttatccattttttatgctattctctttcagattgtgctttgagccaatagacaatgagatttgcttgggctcttccaaccgaattctcattgacatggtcacttttttttaaaattaattcaaaatttcatttcgttttcggtggtgtaatagcacttagaagtctctaaaattaattcaaaatcacaaaattcttttttgaggtgcttgccccggctgaccgtgacgtcacttgccttctctttgccactgctcgttctttttaccaggaacaacaacattccgtcggatcttgtccaaaaattgtaaccaaatgcacggttaacttgcgtcccattgaattcaatctttcggaggaggtaaatgttctatcagactaattgaaaaatgttatatttttccgatatattaaaaaaacatgacttttaatatacatttcaacaaaaaatttttttatcaaatttagggccgtgaatcgatgtcatctcccatttataatgcccattggacttcgactgaaccgatttggtctttgtgcttcaattcgcaccacatgaaaatttgcgttggcatggaaaaatgtgccaaaatactgaacgtactcagtggacaaaatttttatgtcggaagcggcggaaaaaatgtcatttcgtgtattttttccaaggttactttgttatgtttttttgatgatacctaatgatttctccaaggacggaaataccctttttctgggccggaaaaatgccgatgtttccatgttggacatgcgcatgacatcgaaccataaagttggcgaattggcccagtcgccctctaccggatacatgcatttgctacagacgcgtcctcacactttagtcactgagaattttgaaggaaaggtccgccattttttgtttttgtctaaaaatgataactgaacagatcaaactttgggatgtgcgtggccgttgtcaacccttggccgaattggagattgggcaccgcaattcctcacataaattaccttgcttcgttgatgcttcagaacgctttgtattcgccgttggtgaagacgcgacagtccggggatggtcacttcacacgggcgaagttcgctaatgaaaaactatcataagactagggcgtatttttcttgagccgaaatacccatcctgaagattctctggctccgaatccgaccctcgaaaaattattgtttttttctttttgtaaagctgctgtgttcggtcacaagtccaaagatgcatcagcgtaaccctctgtcctatgcgcagcaactttccatgtcaacaaatgaccatccagcaatttccggcgtggacttcccacgagtggtattttataattgaattcataatttttttttttgattttcaggcattcagttcttcatggggtggaaggacgggaaattcggctttaattctcgcggtcgatggagatttgctcgttcatgagcttttgctatgagatggcggctatgtctaacaaaaaacgtttatttatttaagcatccagcaaaatttttatgtatttcaacttttattttctaatgcctttattgattgcatttttacatgtaaaataatctcatttgataaatgattgattaaaaattcagttacaaatctatgctcattaagattacaactataaaagatagggtcaatggcacttcaacaatttcagggattatatacaaagatgtttttgtagtgcatttttattaaggaattcccccaaaatagattcaaataagaccagaaaaaagcaccgtttttttgttgtaaaatttagcctaaggagagttcaggaataaatgataagtcatagaatcttgttccttgtattttcggtcgccagttgcagaggtattctggaaattattaaatgttggttgtgagttcggcaatttgaaaagccctggacttggattctaagttggatctggacaaaaacccaggcccgggaaaacccaagggcttgtaatggccagggacctgtgctacgaaattccatttgagctgaatcgcttcgttattcgaaccagtggtcccattggcaattgtcgttccacagttttaggcacacaaaacaccattcggactgaaaatgatttccaaaagtattttgggtggtttctttcacctgacattgcgtgcatcggatgtgtgcacacccaccattacgctctgtgggcgcttcacaatgtgggcattgtttggtcgtgcgacggataagcgacgcactttccgcgtcggtagggcagcgaagacaattctgattgttgtcgacgcatttgcatcggtctgtccctcctgcttttgtgctgctacaacgacgacaaatcactcgacagcactccggacacagaaacaccttcgaaatgtgccacaaaggttaggcaaattgttttttcctgaaaagacttcgtccgccgttcgttcgacacttttttcgtcagttccctccacaagaaaagcagcgccacaatttggccatggacagtgctgtcgtcgttccgcagtttgagcagaaaaaaacagttgcgctgccaattggtggtagtgctggtaggaaggcttgcccagcaaatacaaagtgtgaacatcggtgacgacagctgaagtgcgttggaattgtgaaacaaaaagggcaatggaaaaatgccaatttaaaaagcgaaaaattaagcgcttttaccggtgcacccgtaaaaggggcatccgacggtgtaaccgacttgggggtgccattttagactcatccgggacaaaagttcttcagcatatgcgacgaaacattgaacgcagctgagatgggtgcagtcgcgcaatcgaacgcccaagggaaacgaattggagccgcaaatgacacattcggag

SEQ ID NO: 7209 - DNA, 1582 bp, Heterodera glycines
agatttgtattgtatattaaagatttacgtgcttaattgtaaaattaatccatctctgcatataattcgtcgatatatttcgtcattaaatgatcatttattcaagtacgagaatggagttggaaaataatgaaaaataattttggaatttattcgcttaactgaaaatattgcgtgaaaatttgcttataattcttcggatgagtgttgtcatatgcaatatcaaaaagagtgcttttcattaaaaagataaaatgtagatcatttaaatattgttattcgttttttggcacatcaattgccatgaaagaaatttctttcagaatttgttcagaatttcctgctttaagactaattacttgacaaagcttttgtgaaaattaaagatttaatataaaaataagcttgagtaaacttaataagtggttgtttttaccagcacttttcacttctagttaatcgcttttcaatattcgttattaaacagtcatccatttaggttcgagaattgcgtaggaacattatgaaaaaagacatttttaatttactttctgacctgaaaaaatcgtgtataagcactccacataatttgcctaatgaaagttgtcatatgcaaaacgaaagagatttgtattgtatattaataaattaattaactgtcagctgttaatatgtttttttaatatctaaaatattaaatttacattttaaaatgtttttgaaatgtgagatgaacgaagaacgtctcccccccccccccctccgttcacgcgcatttatcgtattgatcttattttgggcagcaaacgtttggccatataatctgtgatcaatcgattttggaatggaaaaaagaacaccgatcagtgatcgccacccggggcgattttaaaattcttattgttatgctttcatcactcaattattcgatacttccaacttattctctgttccctttttgcattacccccccccccccccccgccattccgtcgctttcatttgcttttccgttggctgtcgtttaaaatgttagtccccccccccactgaacattgacagccattcattctgagatccgattccatccaacttcattttaatagcatctgcacattctcaataaataataattgttcaattaattctcatttacacataaaaaatccatttaaattaattaattccaccgtttggtccaaaacatttcagtgaattgatcagatgaacttttgatcgatgatgcgccgcctttcctccttttcttttcgctttttaattgttaaattaattgcctttcccttcgtctccgcttacaccgaaaaaaaattgcaaaatgaacttcaaaatggatcatcgatctcttcctccaatttgtcctccttttcgtcgtcgctttcgtctcccaatgtgccgttcttccaaattttacacttcgccagcaacggcactttcccttcatcctccaatacttcgtccgccaattcatctcatttcgtcttttttccgttctctgtcccagtttttggtgtgccggtagcaactgcttacattgactgcaggagcactgatcagatgatca

SEQ ID NO: 7210 - DNA, 4270 bp, Heterodera glycines
  unsure (1)..(4270): unsure at all n locations
cacattaaaaatccatttaaattaattaatntctccaccgctttggtccaaaagatctcaatgaattgatcagacgaacttttgatcgacgatgcgccgcctttcctccttttcacttcgctttttaattgttaaactaattgcctttctctactcaattctcttcgtctccgcttacaccgaaacaaaattgcaaaatgaacttcgaaatgggtcactgatcttttcctcctcctcctccaatttgtcctccttttcgtcttcgctttcttctcccaatgtgccgttcttcgccagcaacgacactttcccttcatccttcaatacttctgccaattcatctcatttcatcttttttccgttttctgtgccaatttttggtgtgccgggggcaactgtttctattgactgcagcagcactgatcagtcgatcagcagaagcacacaatcaatccgttgggagtgcggcattaaggaggaaaaggctgaaaggaatgaaaggggggaaaattgggaagacgcgggaggagaagggcacagcaaaagtgccggtcggggacaatttgcaccgcaacagcaacggcaattccgaagcggaccaattgaattgtatcactcccacaaagtcagtcggttctttacaatgtctgatcacacaatatttcgaaatgatcaacattgcctttatgtcctcctcaaggtgaaccaatcggatggcaaattgttcatttcggcattggtccgctggcacttcctctcattgatctccaaatatttttaccgaattcatttttggattcggcaaaacgcttcctcaatttcggatgacggcgttcaaaaggaaattcggcatttcgttgttcatttggcggcgagcgattcgaaccgttcattagaggacaaaacaaatgagcacggaataatgacaaaggcagaaggcaagcaaaacactcggagaacacttttgcctttaggctgcgctttttcttcacgtcgacgcttttttcgaattcggaaattcttacgaagtgagtggcgatggcatttcaatgccaattattaaaatatccttcagattcactgctcagccgaaaaaatcaatcgctttcaaaaggaaaatgacacgatggagagaagcattttgttgggaaatgcttataaatcaattgcctttctaaaaatatgtaagtcgacaaaaaacggagggaaatgggggggggggggaagagaatgccatcggatgagtggggcagaagagaggaaacaatttgaaaacaccgatcggcagatgatgaaatggacatggacgggtgcccggatggtcgtggaattatgctaaacccaaaaacatcagcggaagcattggccaaacggaaggaaatggcgagtcgatggttagcgtccctggccattaattgctcaaatggcaaacaaatgagcgtccctttttctgctgaaggacgggtgcgctacgctcgatccgcttcttcccttggcattccgccgtcaatgtgagttttttcgccgcgccgccctcccattgcattggcacttatcgcgtccaactttggctaatgaacgcacttcacaacgaaacgagcgtaacatcggtgaagcatttgcattaagcggtaaatgatttccttttgcagcaacagttgagccgaatgngagcaaacgtttacattggcagtgccgaattcagagaattgccaacggatgagcgaatgaaataccaattaaaggtggggaaatgccgattctgatcatgggaagcaaaaacagcaaacaaaaggtggtgccggaggagcagtcaaatggcatttgcatatgcgaaatgaatcggaagtgcggctgtgttcaggcaaacgatcggctcaaaggggctcttagtctgatcaaacaatttcccggggcattccgccgtttaggtcgaaagtctcggccttaattagtgtcccattaaaggcttattggtggactcattaaaaggttgctctttgctttaggtccattcagaaccgttttccctgctgctgccaaattcgtcgtcctccgatcagtccgatttcgtctcccttttgcgtccctccgtgccctttttctctgtgccctccccctcctcccactctttcgccctccccccgcttcttctcgcctgtctctttctctctctcactctcattctgctggccatcattcttctccttttggtccttcgccgttctgctgatcaatcggcggaacgcaaacggcgcattttattcattttcaccgggtaaataaaagcaaaaataataaattgggcaaaatttgtcgattgcacttcagaaaacaaaaaaatgtggaagaatttggactgatgagaagaaaagaattcggcgtgaacatttcgttgcacggatcgcaaaagaaattggagtcaattttattggtaattacctaattaacaaagcaaatgccgtcgaaggaagggaaggaaggctcgtcgcttcaccttctcttcccaaggtgaacgcccagccaaaccgccgcaatgaattggaacgcgtcgcgagggttttggtgaagaatggcatccgcgtgttctacgaccgatgggacagggaaagcattgagcgaaatttgcttggatgggttcaaaacgcggtgacaaaggcgactaaggtcggtcgacggacaaaggcaaaggcggggaattcgtaggaaattcgaaagattcgaccaataaatctaatttatccgtccttttgcagattgttttgttctacgacagtcgtgctgaacaactgctgctggttccctgcgcaggacaaaacggggatttgttcgatcgcgtgttctgtgcacttcaccaacatttggacctcaaaaaaacggttcgaatttcgaacaaagcgcaatatgaccaattcgtcagattttcatcaaatgggacgagtccaaattggcggatggacggccgttgtctgcttttctgttggcggagaatgtttttctgtttcggcgcgatttgaaacaaatttttgccgctcttaacgtgacgatcagtgacactgaacagagagacattgaggtgaagtgataaaacaattttttttggtgattaattgttcagcgtgaatatgaaaaaatgaaagtgattggaaatccgaaggaaatgagagaggaaaagcccaatgaacggacccatttgctgagcgaatttgaagacgaacacatggcgaagaacaacggcggggggcaatttggcacaaaagaaacagtgacggcaccgacagcggaagggggaaaaggggaagagggaacggaggcgagcagtaactgcaacacaacaacaacacaatgggggacgacagggatgagcagtgactgcaacacaacaacagcagcagcagcgcaattggagtggcataatgaagcggaggaacaaaggacaaagaatcagctggcaaaaggaaaagaagaaggtgattctggagtgattgtgccatgaaattcaaaacaacaatttattttttatgttggttaaaaaatacaatcaaaaagaaataaagccccccccctctccccctctctttcccccagtcgccatctcccgactcgccgccctttcagttcctcattttattttcaactatttcctgcgcatttgccccaattttgctgattgccctccgtccatcgtttttgttgtcccctgccgtttcacctttaccgcgccttattttcatcctactaattaaccggttaagttgttttcctctttcctgctggtgactgatcagttaaggcatttgctcgagctgaaatatttgtacaatttgtcacaattagccgtttatttcctatataaagaggacgcaaaaacattcccatcatctacaatacctaatttgtgataataaataaaaaacaatgaattcttttgtaccatttttatttttgatgggtttaatttgcctatcagtgatagaaaacgtcgactcggtgctgaatttgccccttttctcctttttcactgtatattcaggttcgagtgcggcgatatattcgcttggcatgtcacaacgaatgtgccaaagaatgtgcgagacatcccggcttcgaaagtacgtcaattgttgaaaatggctttcattgggtttgtgtgcgaagtgtcgccctccccccccccctccatttccccgcttctgtcctaaatcgaatgttgggcaggtcaatgctggccccactgcacgaagtactgcttggactacgcggcaacaca

SEQ ID NO: 7211 - DNA, 3449 bp, Heterodera glycines
cagtcgtgcctcttctcgtggctttatcttccccagagcctttgtattggtcgactggttctctcttgccatatccgatttcacgcgtatttgtgaacgtgggtcgagtgaaacattatctgcgctttaccatcaggcgttatttgactgatctcgaacagtgtgttcttcgagaagttcacagttatcatcggatttgttgtcattggcactggtgctgccactttgtctgttgtccatttgctcaatttaaaatcagacagatttgaacaaaaaggttttggacgagtactcaccaataattcataccgctttatgtcatggtaaacctcctggagacgctcatatccatgcgtaatcaattgatcaaattcgtgaggaattttaatctaaaatcaaaaaatatcaatccacagaatgccgatgcaatttgattacctgatttcgagtggaaaagggcattttactggaagattcaactttatcggctaactgttgtaagctttggtcaggatcagcggcaaataaagtcaaatcattggcattgtctaacaaacaggaaaagagctttgagtcagccacatcagcattctcttcaatcagacgaagatcttaattaagttgcaattttaaattaaccaggcaaagattcggacaaacctttctcaatctcatgcagttgctgctcctcaacatcataacccatttcactaatgacttctctaatgacatcagaaaaatcttcgaaaacattgtcatcacgaaacaatgaatccataaatgttgaaatgaattgtaaatttttgacgcgttctaaatgattaatacaagacttggttatgaatttacttgagatcggcgggagtgggactcctacgggatttttacgagaataccgctcccgtttgcaaaaaggcacttatcagtgtattttttgaattagcgccaaaattattctcttaacgccaaatagcataatagcgtaattttgcgcgctaattcaaaatttacactggtaaatgccttttgtattttttattttgatctgccataactcgcttcatttcaaactaaactgaacaaatttgatatctaaaaaaatttgtaatggaaaatctactaagtaaaaactaagcaaatttgagttctaagaaatgtgtgactttcaaattttcacaaagcaaaaaaggcaattaggtaattacctattagggtattttttgaattagcgcgcaaaaaattacgccaattacggctatttggcgtttcgcactggtagcctaaaattgactcgctgtgtattgtccgatttacagaaacgggattgtgagaatcccgcgcgtatcaatgttttctccagatccaagttattattgttcgagaatgtattttatctaatttaggtaatggaaggtcacggattcctctattcgctggaaatcgaaaattttaaatccttcaaaggcaagcattacatcgggccttttaaacgattttccgctattatcggaccgaatgggtcgggtatgtccaatgcataacatttaaaatcgctacatacataataatggattaaggaaaatcaaatttgatggatgccatttcttttgtgcttggtgaaagaacgaatcatctgcgagtgagaaaacttggggtgagtcaactgttttcacattcccctttttaaacaactaattatcgcttaggatttggtccatggcgcgtccatttcgatgccggcgagtaagacttgttgtgttcggatgatttatcgaaaccctgatgggactgaacggacttttcaacgaacgacttcggaattacgtgttgatgataatgtggtgaatctttcacaatatcacaaagcattggaagaaatcaacattttcagcaaggttttgcactctttgtcaacattatttcttaattgccactgtaatttcaggccagaaatttcctcgtttatcaaggcgctgtcgaacaaatcgcaatgcaaaaccccaaagaaatgacacagctttttgaagaattatcgaagttaggaaattttttaataagaaaaattaatctttgactttgacaacatcacatgttgtaagatctgcagaattcaaggacgaatatgaaaaactgaaggaggaaatgcaccaagcagaagcacgtgctcaaaaaaacctaaataaaaagagagacattacgaaagagttgcgcgaggttatgatggagaagaacgaggcacggcgtttccaaacactaaaggaggaattggtcacacaaatggatggggtggcaaattaaaacaattttaaaaatgattcaggtcatccaaaatcggacgctctttttggttcaattattctttgcggagaaaagcaaacaatttgttgaggagggactcgagcagttgcgcttggatttggaaaagaaaaagagcgaccgaagcgaatttgaaagtgatttgcatgagaagcaacgggcagcgaaggacgtgcaccgggagaagcagcgaattgaaattcgattgcagagagaagtggacacttttgatggtttaatcggtcaaaaatgaattaacaacactcaaaggaacgaaaagtgctgaacagacgaccgaatgttaccaaaagcaaacaacagttggaccactgctgcctcaaattggactcagtgcgaaaagcgtacgaaacggcgaagagagcgatggattctcaggagaagacggtgaaagaggccgaagaacggattaagtcggtcatgggatggactttatcagtaaacacagcctcatttcatcaaggaaaacgcaaaaggaaaaggccgttttggaggaagaactcaacaaggagtcgcaggcactgcaacttaacctaagcaaggaacaagtgagccgatttttgccgcaacgaattcacacggccaatgctttttggtggtcgccggaggtgttgccgccaacgaacactttcggacgcgcgtcaaagaaatcgctgcccaacgaaattttgccgaagtgattgtgttgccgcgggaattgtgcccggacaacggagtgatggtggcatggacaggcgcagaaatattggcaccccgaagggaaaagggagaagaaatcgactttttgagttgggcccccccccccccgaaacgaaggtcctggctacgcccttggggtggaatgttctcgaagggtgaaaatggacccgtactctcacgtccctaaatgccactgaagacgtacctcgtctttcgttgcagcgtcgttctgctcactgcccattccctccgcctccccttcttcgataaattcgatattttccggatcgaattcgtcctcctcgtcaaaaaccttgaaagaaatgctgtattatttacaaattttccattaccattgctggcacattcggctccccatcttcgtccgggaattcaaaaaagatggaatttggctc

SEQ ID NO: 7212 - DNA, 1958 bp, Heterodera glycines
ctctagtagtcatattagaagatatttatatttaattgtttaggaaaattttccttgaaattgccagggtgtgtagtccttggaaatcacgtgcctctaggcacgaaaatgatattttcgtccttatttacacgtgatcgtgcttttcgtgtggcgtcactttttcgacaaatttccaacatatcgcaaaaaacgcatcacaccgtttctcgcggtgccaaacgcgcgaacggcgccgctcgaggggaggagaagcgacgtcgttttgccgtggttggcgccccgccagggggtggcaccgcgccggcgccaccagcgccggcaccgccgcccccggcgccgttaaggtttgtacaaacaccgccgaccgcaatttgaccggctaaacatttaaaaataattaaaaaataaatttttaaaatgaaaacatgtatagaaaaattaattaattagaaattgtttagcaaattcttcaaatctttaaacatcaatagggctagcaaaaatatgcacacataaaattgcaaaattgtgaataatataatttttataaatttcttcaaacctctcaaaaaaatagcaaaatcgatcatttataagacaaaaaaaattatgataaaaataaagttttattaaatttgaaaaataccaaaaaatgaaaataaattattttttgcgtgtttttgaaataatttactaattttaaaaaaaatagattttttaaattaatattcttgagaaaatatccggtatgaattagtctacttaagctaattggtgctaggtcgatccacaaaaaactcaatgattaaattaaaaagaataatataaaaattcgccatttttgttctaatttttttgcacaaatatcttttgtcatctatgggcggaaatgcaacaaaaaaaaggtaaacaaaaatgaacggcatgaaatactaaaattaaaaaaacaaaaaccaaaaatggaatggcttgaaattctaggagcaaaatggcttaatctattaaaaaaaaaatggaaaacccttcaaatttttgatttaaaaacttaataaaatagtagtaattttaaatattataataatttaccaacacttttgttcattgtagtggtaaaaatttaaatacttccatataattgatgagtaaaatgtttatttgtgtttaaataccgtatttgctctaattatcccccaatctccattaatcccccaatctccattaatcccccagtctaggaggcgtttgaaaaataatccctctatcataatcccccagtctccaattatcccccagtatacgagggggttgaaaaataatcccccatgggggataattagagcaaatacggtagcttaaatttatacaaataaaaaaaaatatttagcctatctaattatataaacaaatttcgatttactttatttctgaaaatgttttaaaaatccataaaaaaatataaattaaataattaaattaaatattaaatattaatattcattgatacttttgtaagttcggctcagcacgaaacaaaataaatatatttgttttaataaatctcatttatttgactcattttagaaacgcgaaaacatttttcatctgaggaaaaaagtgaaataattgtgaattttggcagaataaaagaagaaattaggaaaaaatttggagtgaaaacaaacacgaaaattgatggaaaaattgcaaaaaaattgggtgttagtatgagaacaatttactattggaagaagaaggaatattacgataataattagacttttccacgattttcggattaatccctgggaattttttcaacaattttcttcgtcaaataaccaatttgaattaaactctccatcccttcctatgaattataacatctctaaaatttgtaaaaattctttcctgataatgaagaaatagactgtttctttgcctaagacaccaatttt

SEQ ID NO: 7213 - DNA, 3367 bp, Heterodera glycines
  unsure (1)..(3367): unsure at all n locations
ggtcccctttccatgtatggtggggtctgatcagtcacaaataaccaatcccggtaaatgatcatagtaattggacaaaatcaggtcattgatccctagttggaggaaggaaagcattggatcaacaaaatcctgtgatcagtccccaaccccaaaaaaatcgatatgatgagacgcaagcaattacagcagctaaatacgctctgatctaaatgcatgctgttgagaggaccaaataaaactgattgaggatggcactgtaagttacaaataatcaacgtcacgaacactgtgctgattaccggataccaaatttattggatcattagcatccccaaatgccatggcattgattccaaaatcttttcgacaaattaattcgcaaattcagacacaaaaactcaccggatgggcattgacacatgccggcaacgcaattggaaccgcccaagcacacctcaccacttgggcacgggtcaccgggcaaaactaattaattatgcgcaattaatttatgttaattaataccatttttgcctctaccgtacccgtgtgcacattccgacatacgccggccatgtttacggtgggcgcaatgcaggagcaaattcgttccgagttacagtaggcattcggcgggcacgcctcacccattgctacagtaatacaaattaaattattaaaatacaaaaaaaaatatttattttttaaaggattttcattattttaccgcaagaagcgcctgccaaaacagtttcaggccgctaaaatataatattttatgtttagattaagagagaaaaaaaaataataaaatgaaaccaaaaaatgtttggcataatgccatacaacaggggtgtgccaaacttctgtcgttttcatttcccccccccattttcggcattttttgagtttgattttcattttttcgttaaaaaaactcacaatgcattgcccattttgtgccacaaatggggacggacacgtgcacacgccttggacacagacggcaaaattggtgcacacattcgtggccgagcatggctggccggccccaacttgggtgaccaccgcgcaccggacaccgtccggcacggtgccaagcgggcacttgcactgaccctgttggcagctggcaccgcccaggcatcgctcgcgacctgtcgggcacggtccatccggtggcactggcaattaattttaaatttttgtaaagtaaatgaatttttaatgatttgaataagcaattttttaagtattgcgtcaatcatagattagaccgcattccggcattttttggcgccattaattcgcattatcgcaggaaaagtgccggtatttcgtattttggcattttttagtcgccggtcttcgtattttggcatttttttttggcaccgctatttcgcattacggcaccaagtgtgttatttcgtatttcggcactttttttggcaccgctatttcgcagctttcaacctcattaatattaatcttttattaaaattagaaaatttttaatgtttttggaatcaattgggaataatttttttaaatttaataattagaaataaaatattttaaatgaaaaaataaaattaaatatgcagaaaaaaatcatcattccatgaatgctttaatgtgcgttttacatattgccaattttaaatgtcattgctaccggttggcggatattggcacgtcccaccgatggccaacagtggtggcacactttaaaaaaatattttacaaagatttttaatggcactgtactctcaccaaatgcacatgccctgctcgcatttggagcctccaccgcattcaacggccggggaacaggccgagtttggtggtactgtaacaacaatacaagggaatacagtatcacgaacagtgagtgacggtgtcagcaaaataatgcttgccattttttaaattaacaaatgattttttcgccgtgtttgttggtaaaaatcttagaaatttataggaaaaaatttttttgaaaaaatatttgaaaaatttatcagagatttttttgaaaacacttacgaattcatcagaaaattttgaaaaattgaaaattttttcttaagcttacttataaaaatttttttttaggtgcttcttgaaaaatttctgtttgaagccaaaaatgaaaaatggcaccatataaatatggaaatttcttcggtagccttcctctccccatttccacaaattggaagtgattggactgatcacctttcctgatcacccccaagcaatcgattctaattataataatcctcatgccgtgccgtgcccacctgtcattttggtgacacaaacatcgttgagcgcactggtcccggtcgggcacacgcacgtgccgtccatgcaggtggagccgccaacacagcgctcaccgcgcacgcacgagccaagcggcgcggcacgcactacagtagaacaaatgattaattacagtaaattagagtcgttatggtacagtaaccgcgacggttttagcgagcgtcaaaacttaaaaatcatatataccaattacattaatgttataaagttaattttaaggatatgggagctattacataactgattttaaagttaaaggttgtattgcataaattacagaaaatttgttacagtattttgtttaccatatgagtgactacaaaattatagtaacccgaattataaaaaattattatgattaaatgatgctttttcccttctcggaacacagaagagacgccactgtttccattacagtaaattagactagagtatgttacagtaatcggtcagattacaaattacagtagaaaccaatctttttaataaaaaattattatgattaaatgctttttttactcggaacgcagacgccactgttgttgaccatgcttgtagggcatgtgcactgatcattcacacattgggaaccgccggcacactgacgattcaccaaacagggctaaaattgtaaaaataattaattaattattattaattttataattttatcattaaatgatgtgacataatatctctgccccctcccaactttttatttttcaataaaaatcttaaaaattttttagaagaaaatttcaagaaaaaaatttgaaaaaatattcagaattttttgaaaattaattaaaaaaaaaaattaggtaattcatcataaaattttatattcaaaattttttccctgaaaattttctctacaattaaaatttattgaaaagcaataaactagactaattaatattgtttttttttccaaagatattggcctatncaatgtgataataaattaatttattttttgcaaatcggtcagatcaaaaacaaaaccaattta

SEQ ID NO: 7214 - DNA, 1961 bp, Heterodera glycines
ggcaaaaggaattagggaattctttaaagctcagaattagagcactgcctgcgccggggcctatgtctaggtttttcctgggtcaggtccaggccgtttttttgaaaacttggacttttcctggacctggattttgttccaggatttccaggtcacatatatcaaatatgaaaataactcattcctcagtttcgattctcgagtcgagtaatttctcggcattttagggtctcgccctcgtttttcgggaatgatttctcggtctcgattctcgctaaatacttcatttctcgtacatcctttacgaaatccatatgctttttaaaacaatggcaccatttaaaggcaattaattgttgcaaaaaagggtgcctgattattcgggcaccggcaacggctcagactgcacagcattcccgggtaaacggcatggcattggcttgagtaaaggcattcgccgccgggctgaacagctgaaaatttaaatatttaatttaaattaaaaaattcaaaataaccctaaacgatggaacccaatatagcagaataaaaatgaattaaaacatcaattttcgtattcaaatttaaatatttaaaagcacactctacctggtaagcagcttccggtcacgccagagaacatttgtccttgagggcattgcgtgccacttaatgggagagaaaggcaattaattaattatcgaattaagtcatttatcacactaatgaaatacaacaacccgtcactggccacaggcaaagattaattaattatttgcccaattaaggctcattgattaataactaattaattaattgctccaattaagagtccttgattaattaccacgtcccgtcagtggccatgggcaataattaattaattatttacccaattaagagtcattgattaattattaattgcccaattaagagtcattgattcattaccacgtcccgtcagtggccataggcaaatcctttgggcacacgcactgttccagcaaacattgggcgccctcaaaaggcataaataataattatgtaaaataaaattgaaaatttacaacattaattacttggacaacagccgaacattgcattgaatgtgaacatgggccagccccgggcaaaattgctaaaaatttcaaaaaaaaaaaaaatgatattggcataattttaaaattaaaaaaaaatcaatcaaaaattattaaaaccacaaacatttttgcaaaattgtaatttttttaaatctaaaaaattttctttggaaaatttcttgaaaaatgcaaaaatttaaaatttttttttaatccagaaaattaaaaaatccaacaagagaaaatctcctatttttttcggttttcttgttcaaaatttttgaaaaagcaaattttaaattcaattatttttaaatttttactaggggcaggtgaacaggaaagaatggttacttttgccctgaaacgaaaaactaccgaccctggcgacattggccaatttcggccacccaaatttcgccacgcctggtacagttacggtcggagaaaatgcaactgtgcccgtcctgcgacacgcgcatgccgtacacacattggcacgtcagttgccggcaaaatgccttcaaggccgcaatttttagattaatatatatatattatattttcggcacgagactcttgaggacgataaatgtgccaatttcgttccgattttttcagaattatttaatttaaaaagtaattaaacgaaaaatattttttcgaaattaacgcaatctttcaacaaaaaaaaaacatgttttcataccccgggctcctcggcagaacattgctgtgagtattggcatggtgccccaggaactggaaacattaaataataaagcaaaattgtcacatggggttttgatatctaaaataaatttaaaattaaatgaattaatagttgagcgccgataaatt

SEQ ID NO: 7215 - DNA, 3222 bp, Heterodera glycines
  unsure (1)..(3222): unsure at all n locations
ccgtccttttttggatntacggaggcggtaaaaccttaaaccaaaaaatcataattatntaaatgcaatattaaatttgttaggcttttggtccggcaccgcctctttggatgtttacgatggcaaaattttgtcgaggtacataacaaatccgctggtgtttttggccgtacgtacttaaatccccttttgtccagtgaagaggatgtccattgtggttacggtaaattaccgggttacggtgttcggctttttgtatctcggccagagaggtcgttcgagattttttgtgtttaaccattcgagaattaaagctcattttggccaggaggcgccggggaatatgggcttatgggaccaattgcttgcgctcaaatgggtgcaccaaaacatcgaatgtttgcctttgatttccataattgagacaatttatgcctttgttcagctttcggcggtgaaccggcacttgtcactctcttcggcgaaagtgccggcgccgcttccattaacatgcacatgtctgttccgttgttcaattttagtaaagtctccatcaattcacttttaaaggctttcgccccgttcgcagccctttttcgcgcgtgccattatccaaagcggaagtgccacggcaccctgggcagtggaaaacaaacaggtggggggggggggggaagtcaatcggaagtccaaaacgagtgatcactactgctgatcagcaaagtgctttatgaatctgggccaatttgatttattattttacttatttattcaaagtgcaattgtttcttaaggtggcattgcatcgggcggtcattttatacggtaattctaattaatgataatttgctattaaatattttaatcaccaaaatggcacagattatatgaaatgcggcggtgccaaagagaaaatgtcccaattggcgcccgaggcgtggaatttggatgccgttttggagtgtttgctgaaggcatcctcagaaaggcttcgtgacgcggaatggagccccgttatggaatttgccgactttccatgggtacaaataatatttttaattattgcctaaattgtttggtggttttcctgccccttttcgcccatttaggtgccggtcatcgacggcgatttactcgagcaaagtgtgagtagttcactcaaacagggcaattttaaggtaaaatttaaaggatggaccatttttaccattttgggctaattataataattaatggatgtattattattttctgcaattaaatgcttttcgaatattcgttctgttcagcgcactcaacttctcgtcggcagcaacaaagacgaggccatttatttcattgtttaccaattggccgacatttttcccccgtcggaatttttcagcaaaaagttgggagacaattaacaaaaaaaactattaaatttgtttaatttctccagggaattcatcacaacacgtgagctgtggctgaagagcatttccaaccttttgccccgccaaattctcaaatcgtcgctgagtcttcaggccatcgtgcagcaatacgagccggacggggaattgccagtcgaatggtggcaatgggtggacaggtgggaaagggggataaaggggtaattaagagcatttgacgatggggaaatctttaattaatcagaccaattaagggcattaggggggggggatgttccttcaaaatgaccattcctttttcagtttggacaaaatgctcggcgatttgctgttcacttgcaatgtcaacgaatttgcgcttgcccacgctgagcatggcgcgcccactttttattatgtgttttcccaccgcgcttctcaacagacgtggcccgaatggatgggcaagcgaacttcgaaattcaaatttggatttgaagtcattgggatttgtccacaggtgttttacatgggtacgagatcaacttcatttttggcgagccgtacaatcgcaagcagttcaattacacgcgggaggagagggagctcagctcgcgctttatgcggtcagaaattcaaataaattcttaacaaaattacatttaatacatttttctcgaactatttgattttctactcctaattggaattatttccttttttgaaggtcggccctaaaagtgttatccaatagatatctccgcttttggactaaatcactttttaaagatattgggccaactttgcccgaactggcgacccgaatcgcaacgcggacggctcatacactggtgggcatttggcaattagggctaattaggaagaatgactgtggttaaaaagcccttaaatctggaaaaataattcagctgacacttggcccacttacaacacgaaaggcatggaatatatgaacctaacagtcgagtcggactactcactgcgaggggcacgacggattggcacgggcccacggaggaaacagtgcaaattttggaagcagttgatgccgaaactgttgctcctctccggtatttcaactgttacattatcccatggattaatttaacaatttggcacttaatttgttctcatttgtcagccgatcttggtgagtcgttcatccgatggaagcagcacatggagcgttgggagcaggagtacatggcggactgggaagcggccatgaaccgatggtcgcgtttccaatcgtaccgcgacagagacatcgccgaaagcatcgatcagcaggggacatgcgttggaggaggaggaggaggaagctgatcagtgatcggagaatagaaaagcagaggaggacaactaacaatctgtgatcggactgcggcggagtgctgagttttattgcttggtttacgcaatggcacttggtcatattcccatttattattcgggtatttttattttcattttttttattttgtgtcatttaatacattcgaagaaaatttttcatatataaaattggcgtcttgttattacgattattattacttagtcaaatttacaatttttcccatttaatgaaagtcgacagtgtccccaaatacccccccccccctcccaaattttcgccgttgcgttgcttaatccaatttgtcgtaaattgaggaaaagcattgacaaacaacgagcagggcatatgaatgggtaaggagttggcacgtgggcacattgctaatggatggcttcttctctccgtgccctttcccctcggctgcttttcccccttctcggcttttcgttc

SEQ ID NO: 7216 - DNA, 758 bp, Heterodera glycines
cattttgcacccctaaaaatggggttttttagtgcctattttccattttttagagcttattttgggggttttttagagcctaaaaatctgagccctactttgaacaattgccaaattcgtcagtgaattttaatttttaggtcaaatttaatcacaaaatttccaaaaggtcaatttattttacagtgaaacagcgacattctttcttaatcttttcgcctttttattttgcgttttttccttttttttaaagtttttgttttgctttttcgccttttctcaggggaatttgtgccgggcgaaggtcacgcgccctttcgctgcaaaacattcgcccaaaatgcaaaagttccccaatttccaatccctcccctttctctcccccgcccattgtttcgcttctgtcccattctatgctttttaatcatcaaatgcttttcctccttttattagggcgaactctgctctcgaaagtgccactttctgttccagaattcgtcttccgttcggtgtccgtcggcactttcgccgccttttctcctctttcataataaaatataatctttagttgttgcgctccccaagaaaaaagaaatgaaacggagttccatttaccattcattcgttccatttttggcatttcccttccaattgctttccattcattcattttgcgctgtcatgccaaaaaccgcattttttcatttcaaatttaattaaaggaaagaaatggtaattaattaatcatcgctctgtta

SEQ ID NO: 7217 - DNA, 2042 bp, Heterodera glycines
ccagtgcccaacctgtacttcctgcatttgctgtacatccgccacgacttgcacaataatttgcgctttctcctcggctctttgtccgtttgccaaataacggtaacttttttttgccaatttcttcacctccattgtgcccattttggcattttgttgcacaattttcagattgccatcactcgcattcccacccaaatttgctacgctttcacgggcattttttacattgatcacttccgttggctcgtctttggccacgaaatcgccgttatggttgaagaaataatttaaatttgattcactttttctacagtattttcgcaccattatcgtaccaatgactgtcgaaaggggtaaaatacggtaccgaaccattctccgcgcattaatttttctgttacagttttggccacggtattgtccaagcattatgagcagagggaatctccggtcattggcatttgcgcagtttttgttacggtactggcataatgtgtgctgggacgtttcgtaaaatccgccattttagcgaatttttcgacaaaacatgtcataactttgcttaaaatcaaccaaattttacattcttagtatcattcgatagcccagctttttctctattagcctgccaaattaaaaaaattggtcatctttagaaaaagttgtatgaaaataagtactatttctaccataacttagtttaaatttgataattttgtttgaaattttgcaaacaaaatagagaaaaagcttagctatcgaatggtaccaagaatgtaaaatttggttgcttttaagcaaagttataccatgtttagtgaaaaaaattgctggcggattttacgaacgcgccccctaacccgcataatgtgctaatgggtggcgttatgaaaaattatcactgatcagctggtgatgtccacactgatcgggctgtacattggcagtgagctgaacaactcgctgatcaacaacggcgtgatcactttccgaggcgacttctacggcctgtaccatatcatcgatgttacagtacgcctgttcatttgggtcgtttgttttacggtatctttttttaattttaattctttcatttttccgttttccaatttgccaaaggttttcgtcactttgctgttgtacaaccaacgctgctacgcttttacgcggctgcccaacaaacattcgctcgtccagcgctaccaattcgccgaaaatgtccgttcgagtcgccaactgttggccattggcaccatcgttttcgtttggtaattgcaaaagggcctttttaattacccaatccattttttcgcttcagcaatttgctgttcgattttgttatgctgcgaattgcctacaacaaagaccatttcaacgtcgaatattcacaggcatttgactttgtgctcgccgttggccttaaccttattccgatggcggccatttggtgacattaattaataattagtttacaaattgatgtaatttatttaattattcccagtttccacgactcaatgcgtcgcgctgcgagtgcgcactttcggcgttttttgcgcttcgtcgggccaaaaaatggcctcggcagtcgcactgcgacatccccgcggtcgccggtgtcccattgcgaaagtccgactttcattttggacgcaaaacgcgcaaaacagcggaaaaaggcaccaaaggcattgctaagtgggagaaagctgattttcaacagagcggaggagcaaaatgtgagcaataaataaaacaattaaagcaattaataaataataattaattattgatttaatgagtgggcctttaattgaagaaaatttagttgaacaatttaaatgcttaagcaaaaaccgattaaataatttgaccacccaaaactgaagatgaaaacaatggaatttcaacagaaacccaaacaacatattgacaatgagtttaggtttattttgacgaactgcgcaagagttggtcaacgcgtgggcagaaacagcgacgaaacaccgccgaagggaatgccttccgcggaacggacg

SEQ ID NO: 7218 - DNA, 997 bp, Heterodera glycines
cctccctttggacctccgctggtgttttgcattccctgttcttcgatttgctgcttcagctgctcaatttcctcgttcagtgcgttcagtgtttccgtctgactgttaatggtcccactgctctctctgggaataatttttaattttttttttgaaaggccaaattaaacaattaaacagcgaaaaagcgtgcctgtactgctcggtgatggcggccaattcgttttgccgattgcggtacaacagaagtaaattgccgaactgttcctgtcaaatttggacatttatagaaaatgaaaaaaccaatacaaagggggctttagatcggatcattattaatcataatttgtttaaaccaaccatttagccattaattaccccccccccccctccaaaagaataaatatgccaaaagcacagacattcaaatggctttcgcgcgtcctaatgcgttccatcgcctggccaatctcttcgcccgtccgtgccatgaacggcttcagctgcgcgtactgctcgcgcagttcgcactccatccgctgcatttgctcagtgtgcatgcgccaatccctcagattggcgcgcaccgttactttgagctgcggcgtcacccgcttcaattcgtcctccattttggccgagtcggcgacggaagtgcgcaacacatccattagaggaacagtctaaacaaaagggcaacaattaaaaatgatctttcgaattacccaccccaatctgcgcctctccagaagaagtgccgtcggcagagactccaaatggcatttggttttcgtcaatttcttcggccggctcgtcaatgtcctcagccatatccacttcgtccaaaaactaaaaattcaattttgattttgtgaaattgaccggctggctaattaatttttgttttttgctactattttccccacttgttcggctgtcaattccgcctcgtccgcttagtcttggccttcattttgttccgccagatcgtcttctc

SEQ ID NO: 7219 - DNA, 991 bp, Heterodera glycines
aaataattacctaattcattaatcgaaactgtgcaccatatacccattgccagacagattgattgatcaatcggcatcttttctaaccaaataacccatggtagtctgccaatgaagaaggtttcgttactccatccgcatttgtcattaacgacgttttaaattgtctaaatttaagcaaacaaaacgagctggtttcagttacgctgttgacactactttttaataatttgatatgaaacttagttattctaattaaaaagtaaaattattattaattgtataaaggataaaagcattgatcgtaaatgaccaccatcattgtgctgtaaaattcagatttaatgagtggtgagatagacaggaaatttaaaacggcaaaatgctgaccccaaattggataaaaacagacgaaataaaataatttatagatttatataatcaaaaaattataggcatgaaatttaaaacggcaaaatgctgaccccaaattggataaaaacagacgaaataaaataatttatagatttatataatcaaaaaattaatttggtaagatgtccggtcgatttttcagtagaagaattgaaaaactgaatgaaaaaaacagaagaagaaaaaccgaaaattttctcagtcggtattggattaaagaaccgaaaaaattaggcctaaaatcacgaccaaaaaagtcgatttcggatacaattaaatttgattttattatttgcaattaaacttattaggacgcggatttatataccttgtagagaaaaaaaaattctcaaaagttggtttaatttttcgaaaatcttaaaataattaaattgattaacctcccgctaaaacaatcaaaaatgaaaatctcgcatgttgggtagtggtgtcaaaagacgcagaatttaagaatataaggaaatccttagttttttttttgtattttaagaactattcgaactatattcaaaaactgacaaaaatcgcactttct

SEQ ID NO: 7220 - DNA, 3455 bp, Heterodera glycines
  unsure (1)..(3455): unsure at all n locations
tggcgcccagttggcggtgcncagttaagctgccgcctagttggcgtcacccagtcggcgtcgctcagttggcggcgcccagtcgggcccccaccgcgaattgtcggccggaagtgccctaaaagggaggcttgttcttctgcagttctgctggactctttgttttctttcagttgtgcctttgcttaagttccaggcgtggagcgcggccgcgactgcgacaaatgaagcagcgatggacgatcgcaggatttttgcgcaatctgcgaccgtgatctgcggctttttggaaagctttttttaatttaaatgaatattaatttatataaaggtctcgtaaatactttttttttaaaagcaacgagattttaattaattttttaattgaatgtagtgaaaaagggggtacttttcggttttggggcctagatttgaattagaaaaacaccaaaggacgcacagatttatatatataatagggttgcacccccgaccccgccccgaccccgaaccccgacatttttggccatttttcggggttaaccccgacccgaaccccgacgcttccaaccccgacaaccccgaaccccgacccttaaccccgacttggggtcggggttaaatatacacccctaagaatggcatttttgtgagagaaagtcaagaaaatttaaacaagttttgaattttgaaccattttgccaaatttttattaaataaagaaaatttgctttcaattatgacatatattgtggtgtattggttagtgcatcacactgacattactgtctttcataagttcgataaccattgacgttctcattttaaatttatttttttgtgattaatactagagttctggtacggaccggatccgtatacggatttttacggatccgtagtccgtattttttgggccgatacggatttttacggactacggatttttagtccgtaatccgtatgggtgcctagtccgtactcttggtccttatccgtattttctcaaaataccgatctctaattaatacattttttaaacaaaattatcaataaataaaaatagaccattcttggcataattgttaacagattaaacccaaattttcaaaaaatttttactttcgttgaaatttaaaattcaattttcatgactaaataaatcatgaaaacaatatatttcaaaatattgacaaaatatcgaaacaattaaatttcaaaattcgcttggccgagtccaaaaattcgtaaatcttattaaaaaaattggctcaaaatcgaaaatattcagcactttttgggcaaaatctgttaacagacccatgtaaattttcaaaaattttcccggcggcgcctatcggcaccgccggacccctttctcctgaaaagcctttagaaaaagcgcgccgagaaaaaaagatggtttgaaaacgaaaaaagtaatcagaaatttttgatcattttttgaataagattcacttttttcaaattgccggatccgaaaccggtttccggattgggaaaaatttaaattttcacatgttaatatttgtaaaaaccggcaaaatttcatttattaatatagaaattcgatgcaccagaaatgtcgccgccaaaaagacataatgttgccgacaaaataaaaaattttaaaattttcaagatattaaagcatacaaaaatatttatgataaaaaataaataaataaatataaacaaataaaactttattatggaaattataaaaaattttgactatatggcataaggtaaaaatttaaaaaccccgaaccccgaccccgacccgaacaatttggtcgaccccgaccccgaacgattttgttaaccccgaccccgaccccgaacttgctgaccccgacaaccccgaaccccgacttttctaaccccgacgttcgggggtgcaaccctagttttttaaatggggattttgaaaattaccgtgaatataaaagtcaatgagtataatttttagaaaatggcgaaacgtcatagaaccgaaaagaaagagggagaagaaacagaagaaagggaagagaaagagaacaaagaaaaggggaaagagaaagagacagaaaatgaacaggaaatgagggaacttggccaaatggaggtcataaattaattaataaagaaaagtcaggaatttgaaaattcaggatcagatttcgggtgggagccagaccgggtcggattttactaataaaaccttgtttttcaagatcctgatccaggtcccaaacttttgaccctgaccacgatcagtttctaaaaatgcctaaaaaatttaattcgaaaaaacaaaattattgaggcgtcattattagtgctcgactttttgaaaaaagactgggcctgggtttgttgggcctgagcctggcttgcgtggacaaaatttcggaaaaacaaggtccaggagaaacccaggttgccgaaaaaggcccggaccttgcttgacctggatctaggaaaatccagacttggacccaattccaggtcgagctctatcaactttattatagttaaactaagtgtacttgtcaaaaatatcttgagactcccggtaaaattatcaaatagcctcagcactttagcttaattattttctttagcatccgttgccgaattatttgttgccagaagacaaaatcccggagtataagctgcacaaatgcacacagtgtttatgttcattttattgggccaaatcacttcaaaaacactcatgcaaaggccaacagacggagaaagggacagaagaagaaaaggaagcggtgatcagtgattgattgaaaatgaatttataataatttaaatggattaattaaatccgaaatttcagaaacaaactgttactgatgctaataacccgggagagcagaaggaggcaagtcaatccgatgcaaaagcattgggtgaaaaacagcagaactgttatgatgaggtaaatgggttttccagatctgggattttccttatctgctaaaagtctgtaagaatttgcataaaattagggtttgctgatttttttgctttttgaaaaactttacctgacgctgtctttttttatgaccaactgaaacatgatcagcgtcagacacatggacaagctataaaatatgtaaatagaaggggaaaaatcgaaacccgacccggacttctttcttcgacccaacccgatttttttctccacccgctacaatccaggaagacattatttttaataaaacgttaaattaattgttactttttatttcaaatttaacagaaaaccaaagccaatgctgagaagcaatatgaggtgggtatttaattgaatgagaattaattaactactaattacttccattcatttacaatactcaaatgattattgtaatatttgcataattaattttttaaatttttaatatttctaaattctgttacatggaaaa

SEQ ID NO: 7221 - DNA, 2625 bp, Heterodera glycines
tttaccgcaacattttacacgctttcaattgcatgctcgtttaagatttttcttttttgtatttgcgaataaaatgagggatttttatttacatatttttacatatttcgggatttttctacagatcacataccttcatactttcaaattattttgcgcttttttggtacaacttttcatttttgattattgtgaatgcttttctaagaatttttataaaaaaatcacaataacatttatattttatagtttgttactggctaaaatagcgattttaaaataacttttttttttaaattttgagcaccgatatcgtaactgaaacccctttgtttttagagaatttcaaatgtctttaaagccaaaaaccattagccagcgcatcgagatgatttttgacgacggcgagggcgcggacattcactttttagtaggcgaaggctcagaaaaagaggcaaatgccataaaattgtttccttcaagactatgcttaatttttaagcttattgcagcgcataaagcgcttctcatcccggcgtcggaagtgtttagggcaatgtttcgatttgatcagcaaaattcgaattttggaggcggtgaaaaaagaaaattaatgcaaatataatttaattgtttttatttgaagtggacaacccagtggaagtgcccgacgttgaagcagcagcattcaaagtgatgttgcgcttcatttacacggacggattgagcgcattgaacggagacaatgcaatggcagtgctttacgcaggtaaattttagttgaaaaatattatttaaaaaatatatttaatttgcacattgtttcccggccatttttaggaaataacggatttttcagaatgaaaatgaaataaatcagcgattcgaatatcgatttgaacattacatcattttagagatcgacattttgaaaaaagcctggacctggacctggatttcctggacaaaaatccaggcctggatccaggtccaggtcgatctctaatcattttattttaattcttgtttagcaagaaagtattgcatcgatgcgttggtcgaaccatgtctgcaatttccaattccaactttgcgcaatgtttttctggcttacgccctgaccagtcttcttcaattggaggtgggaaaggcgtaaaataacaattttaattaatttaattggaaagattgtcccgacttcagcttttaataaaattacagtatcttttgaacaatttccctaaattttggatatttatgtccaccttttttgtaatatttcagaatttttggtccactctttcccaaattcgatttcaacctacataaaatttgtatattctctgaactgtttgttcagttaattatttttaggacttcgcccgccgctgcttggcttacatcgataaaaatgcggactctttgatcagatctgatgattttttgcaagttgaccaaaaaacattgtgcgaaattttggagcgtgatcaattgcaaatctgtggagaaatttcaatttggaaagcggtaaatttatacaaatatttatttaaaaaagcaattaaaatatttccattgttttaattaggctctccgttgggctgattgtcagtgcttgcaaaatggccatgaatgttcagcggagaatcgtcgtgccgcccttggccctgcgctcttccaaattcgttttccactctttcagccaacaaaattttccgaacttattggtaaaagttaaattgttaattactcttttgttttgtattggcatttttgttgatttttactgaattattacccaattaatgccaatttgaattttgagcagcacaattaattgccccatattactatttattcattgaattccaccttttttacagttccttccggcattttgacaacggaagaatttgtcggcgtctaccaattctattgccatccgaattttcagtggttacacccgttgaaatttccgcgccatggccgaatttctgatcggcaccacgcgacccttgtgttggacattgagaaattttcggaatttgcacaagaaattgtcgggagtgaacggagcagtgaagcggcgtttgtcagcggaatgccgtggaaaattcgtgcaacgataaaaatggcgaaacaaagcactggaaaatgtttggacatttacctttggtgctgtgccgcttcagtagaagaagaaggaggaggtgagtataatcatcaagggtgtggtccatgtggcccaaaacaatttggaatgtgggatttatctttacctaattttttaaaatccagagggataggcgccgccgagaatttttccagatttatgtgtaatttgtcaatagattttatttttaaaaagaataatgtacatttgtatataatatttatataaaaaaatctttgttatgttttatgtaaatttttgtttccagcggaatcgatctcaaaaattatcgggccgggaattcctcattttttaggtaccggtatatttctcagtcccatatcgtcgggaccaggggtgtgcgaaatttcgtgtcgtttttgtttcgccccttttttcgtcattttttggaatttcgttttcgtccattaaaatttttcgtttcgttttcg

SEQ ID NO: 7222 - DNA, 3688 bp, Heterodera glycines
tcaggcctttgatctgatcaaaaattttttgctggcaaagttgtaggccatagttggggcatttcgcttttggggtccgctaagctctgaaagcaaaagcaaaaaatttcgtaacactgagactggcggcaaagtcggtttttgagccgctggtactcagttggcccttggaccggaaaacctatatttttcccggatgcgcctcaaaaagttgtaagacccttccactactttcagggcgctcccggcctctctgccgggagattttgttcctgcagacgaaactccttttcaatataacatatatagtaaatgggtaaccttcttcaaccgtagtaacattaattttgattgaaatgcagattgctcagccatctcattgtttgtcattatgtttgcatatgtatttacgtctatcctgcctttttgattgtttttggtgcacttcataaataaagagaatcagagcctaccattcactttgacgggcaaaacagaatatcgaattttctaaagaaatcatccaaaactttgagtattgtcaaggggtagtgtttatcttccgggtatttaactcgacttattcattcagcacatgtacattggtttaccaatcgagtagtgtgtagtaaaattaacgaaggagtagagagaaatgaagtcacatagaaattttttcattccgtcttcaaatccactcatttatttgttgctcattaacattttagcgatctcgtagcctaatacacttacaactggatggacaacttgacttcgtataaattcataacgttttacattcctctcccgcactttagcatttatttttttcaattagacattaatatacatcttctaggtagcgctaattgcaggcatgctaaacatatccgcttacttctattgcagttctctctgtttccaactattcatccacagaataatgatcaatttgccaagtgttcagttgaaaagttattgatctagaaatatcgcaaacaggccttatactagtcatacattcctttagtacatcaatgggtactaaaagacgctgccttccttaataatgccttagttcctttgagacatcaaataattccctcctaaacgataccagcgctgtcattaaaattttcaatgtcattacattttttctcattaattgcctctgtaaatacaaattttccagttgagaagatagttgtggtagaatttgtacctagacccttcattatatttgaaagatttatgtggttgtttttagtggatggggatattaaataaattgaggagaaaagttttactatttattgtcagtaacaccataaattgaatttaattttaggtataatttacttaattttaatcaatactattgtatttattatttttattatattttaatacaactttaatttaattttaatttaattttttaatttagttttatttatttttatttttatttaacatttattttcttttaattttaatcttatttttatttttattttactttttatttgaattaatttgaattttattttactttatttattattcagttaatttaaaggagttgttcagaacctctatccaataaaggctatttcgccgctcagcacggcataaaaggtactttaaccgtgcaccgtttagcattgtatgatatcctcactattttcaatatttttacttgtttttattgtttatttctttgaaatttctattaatattttacttttgtagtgtttaatgcaatcaaagaacattttaacttgaaatttttaacaaaatgaacttaataaaatattagtagttaattattgtaaaatataatttattaataaataagattaattcatttattaaaatctaaaaataatgataagaatatatgtatacttcatattatatatcattttattaattaatttttcaatataaaatttctttcttccatcattaaaatgtttttgcttagcaataagtaaaaaattccatatatgcacgctacccctctccgcctcccatctgatatgaaattcttaacgcttttttcttaattattattattttttcatttatttccttatttttagctatcatcaccattattattattttactaaatttattttaatatttattttttctacaactcttcatctcttcattaggcttgggttatgacacaagtaccatttgccacccctccagtcgccacatgtcaccacactcctcaaataagttttgggttatacgaccaccatttggcaggttgccaactaaattgttcatgctatgccacactacactaaaatgagtcgccgtatgaccaacattttatgccatccacggtcagtcattagcgcttaaatgaccaccagcgggcgctcagatagcccatgcgggcgcttaggtgacacgtgtgagcgctcaggtggcctggcatcccttccctccccaaaggccacgacagctgatgtccgtccctccaatacgatttgactttaataattatttaattaattaattttatattttttcatttatttttaaatttttatctattattttaattttattttaatttatttaatttacctaattttaatttattttattttatttttaatttaatttgaatttatttaatttaattttttaattaatttattattattattatttatatttttgtgtggtattagagagagcaagagaaaagagagatataagagagagaaaaagaaaaaagaaagagagtgagagagagagtgagataagagagaatgagagagagagagaaaagagagatataagagagaaagaaaaaagagagagagtgagagagagagagataagagagagagtgagagagagaaagaaaaaagagagagagagaaaagagagatataagagagagagaaagaaaaaagaaagagagtgagagagagagtgagataagagagaatgagagagagagagagaaaatagagatataagagagagaaagaaaaaagagagagagtgagagagagagagataagagagagagtgagagagagaaagaaaaaagagagagagaaaagagagatataagagagagagaaagaaaaaagaaagagagtgagagagagagagataagagagagagtgagagagagaaagaaaagaaagatagtgagagagacagaagagatagagagagaatgaatgttagcttttttattcaattattttttaaattataaaaaattttttttaatttatttattttaatttataatttattttattttaatttaatttattttttattaatcaacaaaaaacccttcaataggtttaggttcactcccgcacccatccaataggttttggtttaaaccaataggttttagttttgggattgtttatttatttttattttttattatttatttatttttaatttaatttaattatttaaatttattattaatcaataaaaacccttcaataggtttaggttcactcccgcacccatccaatatgctttggtttaaactaataggctttggtttggaacggtggttttccaagggccaaaaagggggctagtaactactaagtgatcgatcaatttgaattatggaattgttgacgtgctcatagaaattgttatttttagcatggaatt

SEQ ID NO: 7223 - DNA, 1010 bp, Heterodera glycines
  unsure (1)..(1010): unsure at all n locations
cactgggactgaaatggcggggctgaaaaaataactctggggctcaaatggctgcgctgtaaaaataactctggggctcaaatggttgcactgtaaaaaataactctggggctcaaatggcatacgcgagcgtttaaatggcacacacgcgggcgctcaggtggcatgcgtcccttcccttccctataaggcatgacagctgacgcccatcnttctgcctccctttccttctctaataggatttagccttgggttttatccttcagatgttttttcaattatttacctcttctgggattggatatatttattataggtgttttttaaggcttaaatctggtactgaaatgtccctttcaactgggactgaaatggcggggctgaaaattaagggccaaaatcttggtgagtaactacttaggtgcgaaaattggaacccaataattattcaaaataagtacaaaacatttcgtcaattattattactgccccaaaaagagttttcccagtgacattgtcccggttaattgccattttcaattcattgtcttggatttacaatatttagcccaatttatactccctttccatttactcactttgacttgcgccggcctcagtttttccattataataaaatcgttccgttcaaaatttgtcattttttccaattcttcaattattttattaccaaagaaaatttttttgccgtacttggacgatccacattcgttccatttcatcacatatttttccgggttcattttcactttctaatttaattgtttaagttaattaattttctaaaaattcactcacttttattatttcctccgcttcttcgtccccttctccgatgctccaactttttgtgagcacttctctnatanctttnaccatntnaacttcttcannacnnngaaataagaggtcaacaactccgnnncaatntgaaaanctttaccctatgtagagaaataggcctcccagttccaaaaagatttgcatgt

SEQ ID NO: 7224 - DNA, 1343 bp, Heterodera glycines
ttcgatagccctaacctttctctattagctcatctaaatttcaaaaaattttggtcaagattgagcaaagttatgccaaaagtacacaagcaatcagctttcgaaactgttggacaaatgaaaaaagtgcaaatgtttacgagatatgtatatccctgatgattgatatccgattttggtcaatcggcagtcaggataaaaaaaattactcaccagtcagttcattttaattcgtaaaaagtcaatttttagagtccatctgcagtaagagcaaaatttattgttttcacttcataattggacacggatgagaaaggctttttgacagccaatgattttgaacagttttttcgcatgcaaacagaagccaatgatttttgtcagttgactaaaaatcaactgacaaattggagcaaattttgacaaaaccattttaaatgatttattctaaaattctatggataaatccggtttcaagaattcactaaatgtatcctcaagacatacataacacaaatatacatatgttgtgatcaatgaccattctatgataaaaaagacaattatgagcacgtcaataattccatctttcaatttggttgatcacttctaaacaattgattcattcacttctgctgctgatcacttgggccgggatttacgtcgagaagcctaaaaacacaaacgcaatgacttttaactgtttgcttaagcattcactgacctgtcaccgatttcgtcctcgttgtcaatttggataaaaatttgattccattgattcaagggccgaaaaattcgcaatccaatcgcttcttcttcccattttgtccatttgctcgcatttcgcacaattggacaacggatcagcaaaaaatgttcgttgtggtcatcacttcttttcaatgccaattgttcacgggtcaattcgttggtcagattgaagagcacgacggaatcagcaaaaaaagtgttccaaataaaaataacgacaatgaaattgacgggagatgaagcatcggcaaatgcctaaaatgaggaaaaattggttaataagcgaaacccaaacagggtaaagtgccaaataaatcaatagtaagcaccgctttgatggcttcaatccgcgacatccaattctcaccatccgtgttcatccagcattcgagcatctttggcacattgctttgaagtggagtgaaaagccatttggtcaccgcttgtccatccgatgccgtggcactgtcatcgcatggaaattcgccgaagagattgacggtatatgaactgacaaagcgaagcgatggaaattcgttgagaattgacgggtcgacgaatgacgcaaacgg

SEQ ID NO: 7225 - DNA, 944 bp, Heterodera glycines
gattggtcctcccaagccatcccctcaaatcatttattcggagaagcaaaagcggacagtgttcaatttttaacatttgtgaaatgtgcggcagaaattgcccatttccgagtgatcaacaaaaaacaaaatcaaaagatgcttatgtggatttcaatgttgatcctgggaccaaatttgttggcttttcgcattttgaccaatcgcttggccataaaataaacgaaaatttcaaaaacgaatttttttgccggaaagaaaaattggcaaaagtgtggtgcatcaaattatgcaattaaccttctcatttgccgtgcgcatcatcctttgcataatgtaaccttcgctgaaaattactattttttaatattttggaatcaaattcccaaaaaatacgaatcagaatcggaaacgtgcttttgggcaaaatctttcataaatcccaacgaaatttcaaaattttctccgcctgcacgctcctcaaaaaatttttttcccattcttctgccgtatcaggaagaagagttgagacgtattcaagcagctcaagtagcagcaattcaccttttttgattagtaattttacataaataaataaaattaataaaaacaaataataaattttactttcagtccataaaaggaaatgcagcggaacggatcagctcaataaatttttgctctcttttttaaatgttttgctgataaataagtctaaacaaattctcaactaataagaaaaacctttgaaaaaccgattctgtcatctattttggcccaatcgaaccccgaactccgattcgaacaaaaagtagaagatccatttttgaacaaaattcacattttatacacaaaatcgcttcaattctttttaacaccagatctcgggtttgattgatcgaaatggatgtcaggatggtttttcaacccttaaaccccaaaaa

SEQ ID NO: 7226 - DNA, 2909 bp, Heterodera glycines
gggtttggattcattgaaatggatgtcaggatcctttttccaacccttaaaaccctaaaaagtgattttgtgcaataaacgtgaattttagtgaaaaatgaatttttgagtttttgttcgaatcaggttccgggttcggattgggacaaaataaatgtcagaatcggatttaccgacactgaaaactagagaccggacaagagggtcggtcgaacggtttcggttaaaaaaacgaaaaaaaccgaaatcgaaaaaaccgaagaaaaattttcggtataccgtttcgctttcggtttttttgaatttttttatcttttcccaaaaaaaaacaataaaccatttttatcaatagaaaaagtgatcacctctgagtaaaattgtagagctatttaagctctatcaatggtgtactaaaggcttggaaaatgatagaaaaggcagccaaaaaacatgtgtttgctccttgattcaaaaaaaaacacaacgattagttttagcgatttggtgccttttttggcgttttttcccgaaaaattccattaaaaattcaaaaaaatcggaataatacacccctaagaaatgatctaaaaaaattcagagaatatacctttatgaattgaaaaattttcacaaaaattgttcgccaaaattcattttttttcttgataaaaaattttaggtttaaaaatttccttattgaaaaacattataaaatattgaattatcaataaatcagcaaaatttagtttttggttagtttttacgtgttttgctccctaaaaatcattaattaaaaaatttaaatgccttttttcatgcctttttcgggatttttgtgccttttttcagtgcgattttgcgctttttggtgccttaattgtgagctcaagccataactttagggccggcggtgctgataagagccgccgggaaatctttttgtaattttaatgctatttgttagcagattttgtctaaaaataccaaattttgagattttgggctaattttttaagaaatgatagcttttgggggggggggcgggggggccgataggcgccgccggaggaaaattttaaaaatttttaatgaattttgttaacaaaatggccaactgatttgtccaaaaagtcggtcgattggttcggtttttaaattatttcggtcgaacgggttcgggttaaaaaaccgaaaaaccgaaaatccaaaaatacccgaaaaaaaccgaaaaaaaaaacgacccgggccgatctctactgaaaactcctgaaacaatattacaaaaaaaaaatttcattttttttaaatctccgcataaataaatcaccagtacccaaatttttaaaatttgaaaaaaaataagcaaaaaaatggtttttgggacaaaaaatttattgggtgttgacaatttttgccagcatcagtcccttccttccctaaaatttctttggaaaaattaacttaactagcattcaaaatgtaatgaaaaagttatgcaaataatctaatgaaattccacccaagcaatggaaaatcaaatatggaaaataaatgaatatacgaattgcgaaagagttgggccaggggcacgcggaaagaacattgttcttcaaaatcaaaaaaacgaaatcgaaaaaaatacaacgaatttcttgaaaattttaggtaattcattttgaaacttttttgcaaaatttgttaatttttcatttttcactttctttttcgtttttttgaaagaatttttctttacaggagtaatgatgagaaaatatcgaaaatatctacataaaattttttgaaaggaccaccgacccattcggatccgtaccgaattcagaggaataatggtaagccacccctgtctagagaaaggcaaatcaacctttaaattgataccccgcaaaaagcaataaaaaggttgatttgccattctgtacccctgtcccactctctctccattctctggtctgatcagtgattactcattggaccttctacaaaatgggttttcacttgacaaagtcccattcaatggagtgccattccgccatcgatcaccaaaatttcgccagttatgaaagaagcgtcgtcgctgcacagaaatttcattgcgttgctaatgtcgcgaacagtgcccaaacggcgcaaaacggtcatagaagccaactaaaaaccgtttttcggaaaatttagctgccacccctccctaaattcgaaaccactccctaacataaagctccacttaagcgatgggtgattgaaaaaaagccacgaagccaatatttagaaataacaaaaatttagaaaatgtaaaaacaaaattacaaaaaggcaaaacggacaatgacacaaattttctcggttatttaataagtctttcaatcataattaccaaaatttaacgtaattttactttgctagtaaattttatctagaattaaccaaaatttagaaaatccaaaagattaaaaaactgtcaataaattggttttagattcgtacattaagaatttaacactttattttgccttggattctaaacataatatctgataaattttgatcaaaaaagatttacctgttcatctgatggttgtccaaccttcaggtcgcggtcgagtaaagttttttcaattgggccgggactcaaataaaaaattcttaattttcatattccactttacttggtactgacttgatcgagttgactcgcactttttgtgccccataaatcagtgccaatgtgcgggtccattggtccaaagcggcttttgttgccgaataaaacggtgccaatgcgacagggcgaattgaagccaacgaactgacattcaaaatgacgcctttctgttctatcagtttgggaagacacaacgacgtcagatgaacaatgctgagaatggact

SEQ ID NO: 7227 - DNA, 2182 bp, Heterodera glycines
ttttttgctcgattgatttgaagaaaggagctcaaaaaacgcatttctgcattaaacttttttcatttggacgtcatttttcggcactagaaatcactattttggcatctcgtcacttaaaatagtaaaattaacttttttggcgttttgtcactatttcgacattttttggaaaattccttaacaaaaatgcaataaaaccaaaaaatacacccctaagaatcgatcccaaaaaaatttcaaaaaaatacacccctacgaatcgagctaaaatttttcaaatctactcctatgaaatgaaaaaaatttcctcaaaaatttactttcttggcgccgccgagaaattttttgagagtagcttcccaatttccctatgcgggcaataggcggaggaggtcgacctgaccgaactccgccccattttacatttaaaattaatcaattaaatgttaatttgggattttgttcgcggcacaaaacactaaaaacactgaccttctcaatccgacattgtaaaggtaatccaaattgttcaaatcaaattgttctttagtgccttttagcattacagtcccggcattgtttacctaaacataaggacaatattcaaaaacaaaaattttgaagctcaccaaaatatcaatttgtttgaactttttaatcgttttatcgaaaattgccgttgtcgtttcaaccttttcgatgtctccgtaaacttttagcactttttcgttggacacattggcctctttaatgatcagtgcctcagtttcctttaaaaatgtattaaacattattttcagtcaaattttacacactttcaatcgttctttgtccctcccgtggatcacaacattcgctccttcttttgcaaattcaattgccgcatctcggccaatgcccgaagatgagcctaattaattgggggaagggcagggagaggggcatttggttgagaaatcggtgccaggaaagggattctagtgttgagtgcattttttgttaaatcaaaaattattattcgttaaaatattttgtcaaaaactcctccccaaagttgactatttttaatgaaatttgtttttcccacatgaatgtcaaatgaatttttaatggattacggaaactgattcataatgactttgtttaaaatacccctggtttattgagaaattaggttcggatttaatgagacaattaccagtgattatcacaactttgccaacaaagcggagagcttttaaatggaataagattaaaatttattttaaacatttaattataaaacatacgatcttcagactgagcaaacaaaaagctatttaaaagcataagaagcactaatttgatgttgcccattttaataataatatgaaattaaataaaaattaaataaattattaaaaatttatgcagaaaatgctttaaataataataatacggaattttatatgtaatgaaatactccaaaatttcgcaagcttatgaagcttacagatcattgctaaaattgccctttttcatatgacaaaataaaatcgaatatgatcacactttggcaaaaaatcacaagggaaagggcaatttatgttaataatatttattataattgtccttttaaatgactatttcaaatcaattaaatgctcccacgggaaagacttacgaataaaacctattaatacaaacaaaaataataatatggaatttttcaataatttgtaattttcagacgacagtgttaaacttcgaatgccaaaaaatattaaataaaaaggaaaagtttccgttcgtagttctctcttaaaactttcttccgcactctttccttcttcagactaatttttctcttcctctttctcctccttttttttattttccatttttccttaaaattactttttttcaagtcctccaatttatttttcaaattttccataacattttcaattatgaaattttgattctcaaatgactcttcgtatttttttgccatctcttcaaagttttaatttctttccattttttgttttcccaattttacatagtgccattttcagcattttccactcaatcatctttacctgaatttttaaggtcatgtcctttgattttgacgaatttttatgattttaaaacccaaatgatcgaattttgttgtaagccaaaagaaggcgcgaga

SEQ ID NO: 7228 - DNA, 5489 bp, Heterodera glycines
  unsure (1)..(5489): unsure at all n locations
atgttggactgacgcaatttgcgcattgtttttggccaaacaatggaacaaaaaagagaaataatgacaacaaattgaaccatttcatttgtgaaaaagcaatcgaagaagaatcactcaatggcacgtcgatcggaagaagaggtggtcgtaaatgaattgaatgcgagaatgaaaaaaggacgaagggtgcgaaatgcgaactttgggtgggacgaagcgaagcgaaggaggaaggaaattgggtgtgaaccggtatttctcgggttcattatttttcttctgacccaactattaattacataataattatggtttaccctttgttttttatttgaaaaatattattaaaaagagtgtaacttttgcatttttttaacaaatcaggcaaaaatcctccaaattccctctcccccctctcccccccccctctctctctctctctccctctctctccgtctctctcacacaaacactttcctctttctctctctctctcttgcttcattgcctctctcactttctctctcgttctttttctctccccctctttttgaaagcattttgtgcgaaaaactcccgctaattcaaatcatttacaaggccggacagataacagtcatcaattaatatatagaatagattgataagcaactactcattctaaattctttattcacacataattcaatgttggaagttgttctggaatatttgccatcgtggattcgcactcttaattcggtgcattacaattgagctcgcttatctgtattcttttttttcagttcatcgattatgagggtcagcgtaagtctgaacgttttttccaggtgttcttatctgttgttctcattgtagacatttacaacttttaggttattttgattgtccacggtgtgcttgggttttttgctggttatctcactcaacagctgtcggtgactatgtacagcgtcggagttggatttctgatctcttgtctgattgtgcttcccccttggccgttttaccgtcagaaccctttgaatgtgtgtcttttgctacagtttacagtaataaattcttttagtggcaaccaaatagtccggtagaggaagacaaagctgcgaatccgtcatcatcatccggcaataagaattcaaaaaagactcgttgagtgtgatcataattcgatacggtttccttgtacactttcttattgttgataaaccgcttctgttgctacggactttttttcatcctaaaagtgctttattgttcatgacatgtctgcttatttatttgattttcttgcttatatttcttattcatagcagacaatgtctaatgttctgttttcgtcagctctaaaatgcttcaaaacttggcaaactcttccttttaaacacttcagttttcctcaaattggctgtttcgggggccgtttattcagctcaaatacgtaggttgaaaaaaaaaatcataaagataaaacttatttttcgcagagaaagttctgatgacgagcctttagacgcagataaaagtggcctcaccatatacaatggagccggagccatggaattttttattcatcacaattcgtagatatgccacttttttagttgtcgtctcctcgaattccgaaggaatggtcaaaagtgccgatcatagcaattaacagacggcctctttttcctggttttatgaaaaaaatcgacgtgatatttcgatttgagactgactattcaacgattacacaaaaatatttagttggtccaaaatgaccagttgatggactccattaaaatggtgtgcgatctcaaaaatccttacgttggaattttcgtgaaaagggacgatgcgtaagtcccatttaaaaatatggagtttgagtttgttttagcaatacatcggatgcagtcaattcgatcgacgagctttaccctgtcggcacattcggcaatgtcgttgaactaaaccgagtccatccgaagaggttggaaatgttcgtcagcgcccatcggcgcattcgactgttggaaaagttggacacactcgacaatgaacaagtcggcagaacacagcggagaaaaaagagggtacaaccgcaacagctgactccaaacagagaagagggcgctaacgggaccgaagaaccgcaaggcgagaagccgcttctctatgcgcgtattgagaatgttgttgagccggtattcaagccggacgattggatgaaagtaaatgcatttatttaagtgacaaaatcatttctcccgtctaggcgaccattgacaccatcataatgaccattcgtgaaattgccagttatagtccgctctttcaacaacaaataatcaatttgctcattccaaaacaaaatgtgacggaagatcccatcgccttatgtgacttagtcggcactattgttgaaacatcgaccgcaacaacccaagacttacaggatttgatggagaaaacggatgtgagagtttcgatatattttagtttaaaacaattttatgttaggtaatggaacgactacggaaagctttggaattgctggagaaggagaagaccattttaagaatgcggaaccaaataaaggaggacgtagagcgaaaagtgaacgaacagcacagaaaagcaatgctttacgaacatgtgaaaatgcgaaatcttttaattaattaaaattaaaatttagctgaaagcaataaaacgggaacttggtatcgaaaaagaggacaaacaagctgttcttgagaagatggaagaacgattagccaacctcaaagttcccgagtacgcaatgaaagtaatcaaagaggagcaagccaaactgtcatttctggaccctcacagcagtgagttcagcatttcaaggtagaaacggttctttcccattaatataattaacattttaaaggaattacttggattggctgaccagtgtgccctgggggaaaacttctgaggaaaacatggacgttcacaaagcacgtcaaattttggaggaagaccattatgggatgaaagatgttaaagagcgcattcttgagtttattgcagtcgggatactcaaacagcagacaaacgggaaaattctctgcttccacgggcctcccggagtgggaaagacgagtattgcaaaatcaatcgcacgtgcacttaacagagaggtgagtcacaattaaaacggaaatggtaaccgttattttatcaatctctgttaatcttctatttaatcatctctatgttgtcttgtcccgacattataatgcgaaaaaggcgtcccgtgtttatcgcaggaaccagggtttcgactggggaggggtaccgcctcaggcaacgactttttttgttgttgcttttcataccattntgaggtaaaccttgaaaaaggtgcaccaaaaaggaaatttttaatntcatcaaacaaatattaatttttaaaaaaaattcgtgtatggggggtcttggaagatacataccccgtgtaccctcctcccctttgggccgtttctggtttatcggaacacaaatatacgggttagctgatgcctcaaaagtttggacacaatttatcctattttctgctaaatccgcagtttacaaaaataccacagattctttcagtactaccgcttttcggttggaggcatgacagacgtcgctgagataaaaggccatcgacgcacttatgttggagcaatgccgggcaaattgattcaatgcctaaagaaagttcaaactgagaatccactggttctcattgatgaagtggacaaaattggcagagaaggtgcaattgttattcaatttttgaacaacttcgtttttagggtaccatggcgatccctcttcagcgttgctcgaagttttggaccccgaacaaaacgcaaattttttggatgtgagttgaaattaatttaacaaatataattttacattcagcatttcttggatgttcctgtagacctttcaaaggttctgtttatatgcaccgctaatgtaactgacacaataccgggtccattaaaagaccgaatggagatgattgaagttgcgggttatgtggctgaagaaaagctggagattgctcgcaaatatttggtcccaaaatgccgtgagaaatggtaagagcttacaccaatatttattttaatctatttcccatttaaattcattttaaagtgctttgcccgacgaaaaattggttataaaagacgatgcaatcgattcgttgataaaatcttattgccgtgaatcgggagtacgaaatttggaaaagcacattgaaaaagtaatttaatatggcgaacatagaagccctttaaaaattgttttagattttcagaaagagcgcttatcaattagtaagcggagaaggcgcccaaacacaaatactgccaattgtggtggagaacagcaacctcaagaaatatgttgggcgagaaaagttcacttctgaccggttgtacccgacaacgccggtcggtgtagtaatgggattggcgtggacagcgatgggtatgtcgaattgatttctgaataagtaatattgcaagctctttctcgtttataggaggctcggcgctttatgtcgaggcgactcttgcaagacgtttgggcacaccttcaacagatgttcagcaagtcactgatgagaaatcccatcagaaaacagtgaccggcaatttggaagtgaccggacacctcggcgatgtgatgaaggtacttggaacatttaggaacccccggtctattattttaaaggaatcaatgcgtactgcttacactgttgcgaaaaatgtactactgagaaaggacccgcaaaacgaatttcttgaaaaagcgtatatccatcttcacctgcccgaggttgacctgtcgtctcctttcgttgacccattcaaatgttttcccttagggcgctgtgccgaaggatggcccttctgccggctgcactgttgtcagtgcccttatgtcgctggcacttgaccgtcccgtggcccagcagacagcgatgaccggggaagtttcgctgacggggaagattttgccggttggcggcataaaagagaaaataatcgcagcaaaacgggcaggagtgggacggattatactgcccagcgaaaacaggaaggacttcgaagatttggctgactttatcaagaaagatgtagatgcccatttcgtttctcattacgatgagatatatgaacttgttttccaatgacagctttcttttcggttgttgttttgttttattttgaattttcttatttctttcaaatttttaattgaataaactcgattgatttatttcttgtttccttttacatttaacttttgttgcttactgattgattatctttgttaaatcctttcttttgtcttcgcttagttttcgaatatgaatttccattacgttgaaccgtccatggatgacttagaaaatgatgaggaactacttgctgaactacgggccctggagagtgatg

SEQ ID NO: 7229 - DNA, 2452 bp, Heterodera glycines
tgttcgttcgattaggtatttaatttcttaagagtgcacttatctctgtattgccatggctcacaacggttgacttcccctgcatttccgttcgtccgttctttacgtcaaaaatcattaattttttttttcgttgcatgtgcctggtggtgtctgagtgggtgtttttgttaacataacgttcattttgtacttcctcgttctaaaagataaagatggacaaattttggcgctatttgcaaatagaccgattttgaattttattaaaaccaaaggggaggcctttttgttttgcaaaatttttttgataatttgtgaaaaactttcccgcgggttttggtggtccctgatcacgaatctgacatctattttgactaatttctcatgattatggccccgagaacctaccgggactatgtatttgcaaatagcgccgaaattttaatgccttttttattgataaaataatggttaaaaatactcaatttgtaaataaaatataatttttaccctcttttattcatccaatttactttgaccttgggctccatttttccacgacttatcgcttcgatttcgttctcggtattgtacagtcattccttccgttagtcataagccaagaccaatcagcagatttctcatatgtttgggtggcgaatatcgaagataaaatctctcctccccttcccaattacagcgaaaatgtcgctgctgagtgttctcccgacgcgtcacttaagggcagttctgagtaacaacaaacaatttcttctttctcgatatttttccgtctcaaatttggcaatgcaaaaaattcgagtcgccaatccggtggtggatttggatggagacgaaatgacgaggataatttgggctggcatcaaagagaaggttaccgagagaatgaaacattccttaaattacatattttgaatttcctttttctttgactttctccatttagctgatcctgccctatctcgacatcgacatcaaatattacgacttgagcatcgaaaatcgagacgccactgacgatgaagtgacagtggacgcagcggaagccatcaaaaaatacaatgtgggcataaaatgtgcgacaattacggcggacgaggcgcgcgtgaaagaatttggccttaaaaaaatgtggttgagtccgaacggaacaatccgaaacattctcggggggacaggtgaggaaaagctttggaaatataataaagcattttaaatgctaattggaaacaacgaataaaaaatacgctcaaatgtttcagtgttccgtgagccgatcatttgcaagaacattccccgagttgtgcccgggtggaagaaggaaattgtgatcggacgccacgcatttggtgaccaatacaaagcgacggatattgtggtgccgaaggggtccaaatttgaaataaacatcattaaaagtgacggacaagttgagaggcactcggtgttcaactttgccgatacgggcggtattataatgggcatgtgagtggggggaaaatggagaaaatttattttagcgattaggggcagaagcttgcgtttattttctttaaaaatttacaaattaaggtataacacggacgactccatccgtggctttgcccattcctgcttccaatacgccctcaaaaagcaatttcctcttttcttgagcaccaaaaacacaattttgaagcgctacgatggccgcttcaaagacattttccaggaaattttcgacaggtattcctatcaactgtaaaatgcttctttaatttgtagtagcattaaaaaatttccagggaatacaaatccaaattcgaagcgctgggaatttactacgaacaccgactcatcgacgatatggtcgcgcaaatgttgaaaagtgagggtggctttgtttgggcctgcaaaaactacgacggtgacgtccaaagtgacgtggtggcccaggggtacgggtcattgggccttatgacatgtgagcgaattggcaaaaaataaattacattgttttactaagcaaaattttttagctgttttaatgtgtccggacggaaaaactatcgaagccgaggctgcacatggaactgttacgcgtcacttccgcgaacaccaaaaggtgaggaaaatgcttttctggcaacaaattgtattttcaatattcacatttttagggtaatccaacgtccacaaatccagtggcttcaattttcgcttggacccgcgggttggagcatcgcggtgttttggacggaaacgacgcccttgtgaagtgggttttgttgtttcaaattttcaaacaaaaatttgaactttcgcgtgttatctataaatttgatgactgaccaaaaaaaaaacacaaagatacgctcgtactttggagaacgcttgtgggccactatagggtagacaaaatgaccaaagacctggccatttgcatctacgg

SEQ ID NO: 7230 - DNA, 3295 bp, Heterodera glycines
  unsure (1)..(3295): unsure at all n locations
ctatgaaaatcatcatcatttttggcccgcttaattactccattaaattctttttcgtaagaaagaagaaattttcgtttcgatgacatttatttttttgtataaaattatctaaaggaaattaattaaaatttattgcaaaatgagaatttttcgaaaaaatgttaaagatttgaagaaaaagttcgaacactttgccaaatatacctaaatttttcaaaaaatcatgagtttttgttagagcccggagcaggacgggatcatgcgcaagattttgcaggatcccagtccgcaatcctgcattttttggaaaatgcaggattgcaggatttgcaggattaatccggccggatccggtcgtgcaaaaatttttgaattacaatcctgtaacaggattcgcaaatttgaaatttccgggctctagtttttgtcacttttttatcaaaaggccacaaaaatcctcaaatttctcaaaagaccataaaaatccacaaatcctcattttcaaaaaaatcctctttgaccctctaaaagaacacaaaatgaggaaaaatcctcagatatcgaaacctgcgctaatcacgaatctgagctaatatttgcaatatcaatggttttgaccatgtttttatcataaagcatcgtaaaaaataatccgcagccaagcggattcgaactccaggtccccgtctcatatgacgtctaaataaaattttttaatttatttttcgtcgggaccgcaattctgcagtatttcccttttttttgtccttccaagatttcgatgattttaaaaattaaatggcaatttggccaagactcttaaatccaaccctcgggttggaggttcgaactctagagaatggaccgctttaaataatgctaacatgcccacttaacagattccatttataaaccaaaatgcgagacacttcaaaggaaatttttgtgcgccaccaatccgagctgaagtatgtcttaaatattggatgaatggtttatccccctgccattaaaagtctcttcgccgtcacacatttcgccgtacaaaatggactgatgctaatagtgcaaaatgggcaacagttgagccacattcggttgcagaacggacggcggacaagtgggacaaaagaaaacaatgcgaccaaaaacattgcatggaataatgacccttttcagacttaaaattgcccatcgattcgatggaccgcgtcgctttccttcacatggaccccggcggacagcacgcgttggtcagcaccggagctggcgacaatttctacgttcacatgcgcagtgcgtctgtaaaatcactccgacgattgaaagtgggcacggggggtaaaggagtaattggcactttggcttaaattaaaaaaagacagggccatgtgataagcgcaattggatggaactccgaattctgcaaagacaatgagacgggtttcattgttctgggcacagccaaaggtggtggtattgttagtggtagatactgttttttattgttatcggtagatactgtttttatgtatttcgggtattttttgattttttccccgtttgggcaccgtctcattttgtccaataatacatggtaatgcctccgtccggatcgttacttttaccatcccatctggactaaatatgattgttttcgaacttctccaatttgacattgttttccatttcccctaatttagggaatttgtatgagacaaatatcaccgcagcctccaccaccacccttcccgtgccttatctgaatttgctgtccagctcattagtcgacgacaaagaattggccatctccggcctttgcctacgccaatttcccgagggggacgacgaacagtgagttttctggaacaatttttaatttcaaattcggcttctacaaacagtccaagagctttatttctgccgatcatatttctattacttctcagttttcttctgttggtctgcgtgcccaatcgtctgtactgcttggccggcccgccaaatatggctgctgctgctcaaccgttggcaccgctcccaggccaacaaatggtgagcacagtgtggagcagtgcgttggtggaacagtcaatgcccgagcgggaggccgtccttcaagcgttgttcaattggaacggtacggaaatttgttcgtgaattacggcctttttgttccctttgaagctgaccaccggcctcgttacctttgcatggaggctggggttgaggaacgtttgcccagcacattggccattcagccgatgaactgttcggatgacagcgacgggtgccggttcaggtaattgttatttataattttccagataatagattttaatggcacctttttttcttgcattaggtttggttggcttagttccagcggaatttgcattggcaacgtgggcacgggaagagcgcggaagcgcgcgttgcccgacgcgtacgacatgattgacattggcaccaaaactttaaagtgagcgatgaacgctgggaaagaaatatacaatgccatatcgagaattgatttgttaaggcatcggctttcggaaggccgagtcgattatccgctggacattgtgctcaccgaacaccatttcttgcgtcttttttccagtcgattgaacgcgatttcgctgttggatgaaacaaccacgttcgaagatatttttatggtatgattaaatgtatcaaaattggcacaatttctatccctccagggcattccaaaagtgatcggaatgtgccgtgacgcctcctcccatttggtttgggttggcaccgagtcgtccatgttttcatatcggcccaatgacgagacgaggcattcttggagaaactaaagaagttaacaaattgctttagatatgtttggcggcactatttggccaaaggcgaattttccaaggcgaaaaaagtggccaatcaaatggaagacaaacagccatttcagctgatcattaaaagggaggcggagaaatttttgactgacaaaaagtaaaagaaaataatgtaaaatttaaattttaagtttttttgcgcagttttgttgctgcggctgagtcgttggcccaatccgacaaacccttcgaaagggtggtgctccatttgcttaccgctggcaccagtgcaaggaatggactgaagcgttttttggaactgaaacttggccaaattccaatgccggcacgtgccaatgaggtggccaatttgctgctatttcaccttttaatattnngcagatanaccgttttttacatttgaggataaatgcgtcgcgatttgt

SEQ ID NO: 7231 - DNA, 1525 bp, Heterodera glycines
  unsure (1)..(1525): unsure at all n locations
agccaatggtgtcaaaggtgttgctgatgcgtggcgcctaccgcgaggcgctcgacattctgacgcgtgagactcgcttcgccgaactgttgtacgcacacgcggcacagcttgcgttggccgagccgcgtgcgctcgttgacgctttgttggcactacagcagcaacatgcgtcgttggacgtgttgcaattgttgcccgccttccaacaatgcctggacaaacgcctgccggaccggcaagcgttggtgtgtttgttgagacggcgtttctcagcttccacgctttttaggcggatgcgattttcgtttttttggattatttccctctccaaaatgcgtctccaccatttgtcaacttcaccattcatttgtacgccgtttttcggccccaaaaactgctcgtccatctgcaaaagtgcgccggcgagtcttcttcccaaccaccgtccgctttgactgcgagacgcactcacaatcattgtcatttcgatgttgcccaagcacttcgtatttgcacagaaaatggcaggcatatggcgtttccatcctattttaccattttgggcattacagcattgcacgagtgttctgtgtttttgctttgcctcgagcgtctttacgaggaagcgacgcgtttggcgttgcgtcacgttggcctcgcgtgtgccaaagagtgcgcgcgacgtttggacgccgactcagccgcagcagacgcattcgccccaatcgggcatttggcgtcctttcatgggccggtggatgaggaggattttggagaaagtggcgatgctggtgtacaaaaaatggaacaacagcagcagcaagtgcaggagatgcgcaagcgagtttggatggaaattggtgagcaaatgtcggaaaaaatatattgaccaatatgctttgcaattccattcaaatttgagttccttttttttgttagcaaagagtgtaattgcgagcggtgcgcctgtcgagcaatgtttggcactgctgaaagagtcgcggggtgccgtgcgcgtgcaagacgttttggcacattttccagaatttcacaccatcgaacacttacgggagcccatctgcgaatgcctcaagcaatacaccaaccaaattgaggttgtgttttactggaccgaatgctgctggataaattggatttataacaaaattccagcaccttcaaagtgaaattagggatgtcactgcgatggcggaggaattgcgcaccgaaactgcgaaagcgcatgccaagtgaaaactcgcttatatgaaaattcctaaatgacaatatatttattgtttttttagctttatggtcgtcagaaccagcgattgttgtgcgatgtgccgtggcattctgttgacaaaaccctttattgcttttgtgtgtcgtcatttcttccacagaaactgtttggaggacaaagtgaaggtgagtcgcgaagcattttaaaatttgttgcgaaaattgtaattccttcccanagtcttcttccactgagtttggccgattggagcgcgag

SEQ ID NO: 7232 - DNA, 3369 bp, Heterodera glycines
cttcataattttttaattataacttttattttttgattaaggcccaattctttaatctattcataaaatcaattttgttttcgcaaataattaagaaatcaaattaaatttatgggaggacaatgcccaaaaatcagaaaatttaaattttactattattttttaaatatcatttaaaattttgattaggtgtgatggggacaacgattgtggcgacaattcggatgagaccaatgatcagtgcaaagttgcggtttgtgagccaccgttgcgcttccgatgtgcacactcccgtctctgtctgaacattttgcagctctgcaacgggtaaaaaacaaattaatttaattgcaatttaaattgttaaatgttacttaattattatattaatgtatggactacttaattaatgtgtgtttaaccattattaagtgattggttaatgttaattaccattgacaagtggctaattaacagacaatatttccctactaccactctgttaagtaccctaattaacaataactactatgcttaattacctttgattagtactaaattggtgataaatttcagctttaatgactgtggtgaacacgacttctccgatgaacatctatgtaagtttccaaaatttaatcgacttttcaagaaaaaagaatttcatttgtatatttaaaaaaaattaatttaaattaattttttccctaatttagcaatgtgttcatccttttctgagtatggcgattgctctacggacgaattcaaatgctccaatggcaaatgcatcaatgccacacttgcttgtgatcggaaagatggtgagatgagcggtgatcagaatttttgatttttgaaatttcggagaaaattttgtccatcaaaaccaattctttctaaattcactcatactctcccctcttccgtgccaaaaagcaatttttttttaaatttccgtttaaatgaaatttttttttttttttttttgatttcctcattcaaactcgtgagtcaaattttctgatcacagattgcggcgatgccaccgatgagattggctgcgcgaaaaacaacggcaaaagttgccattccaagggggacaacggcgggtgcaagcacttgtgcactgatgtgcaggacggctactattgccattgtcgggacgggttcagaccagacccggccaacccgttcgactgtgtggtaaaaaaaaaattggaaaatttgattactgctcaagaccgaaatttcccgtgattcgagatcaagaaaaaaagagacttttctcggctcagggctcgagaaaatcaaaaaaaaaaacacaaaatcaattcaaaaaataattattttttattaaatttccaaaactggtctctgtttattgaaatatatgttcatttttgaatacatacgtcgtaccaaaataaaaatcaatttttgcgaaaaacggacaattattgattgagctaataatagccgattcctaaggacgtcctttgtgaacccaaggacggacgaatggaaatttggataaaaattcacaaaatatttttttcaaggacattgatgagtgccaaggcaacaacacatgcacacagcaatgcctgaacaccaagggctcatatctgtgcaaatgtgtggacgactacacatcaggtacagttgcgccttttctttgttcaataatttatttttgtcggtaaaattcaataatttatttttgtcggtaaaaataacgaaattttatcggcattttttttacccctaattttttgttaataaaatgtcgacaattttttcttttcaaaatccgaataatttttatttaaaaataacttcctagaatgaaaattcaagaaatgaatataaaattcttgaaaaacctggaacgagaaaaatgttggcattcgggtcaataggccaagaatgttcaggtcgggatccgggacgcggaccgagaaaaatgccgggattcagatcaacctggcaaagctcttgattggatgtctaaagacaaatcgctaaatctctccctgattttgattcaattctgatcaggcgtcgtgatcggtgcaatggcgggcaaagattgtcgcgcaaatggcgagccggcattggtgatggtggccgccaacaacaaggtgatgcagttgaatttggtcggcgcccggggccgcgtcaacgccgctgcggagtccgcggacgtacaggcggacattgccgctgtggagttcgacccgcgtcgggaacagatgttttgggtatggttttcttgagcattaattaatttgtttatttaacggtcattgaatgatttatttgccggtaatcagtagggaatagaattacatggaaatccatatttttttcctggactgtgggaggcctgaaacgcacgaaaaacatgtttttagcttggtttgaagcttctaggaaggatttctatatccatattttccatatttttccatatttcgcgatttatgtccatatttccatatttttccatattttggcattttggtccatattttatgtccatattttggcatttttcaaaaaaacctctattagaacggcccccagcagctaaattagcctttttgagcccaaaacccgaaaaatttttcaaaaaatcattttttcgccaaaatttctcgagaatattgaataaatttaaattttcttaaaaattaataaattatgtcaaaaataagcaaaaaagcgaaaatttcgcttttgttgttgattttgcgctaaaaaaattaataaattttagcttttatgttttttttcttttaaaatgattgcacgtaattgccgaaaaaattcgagaccaatttccgaatgttgaccgactaattgcaaaacgaaagccgtctttgtcaaagcgccttaccgagtcaaaaaatttggaaatgtatctcatatgcaatttcaaccaataaatttgaagaaattttgcactcaattttgaaaaatttatgtccatattttgacatttttgccatttatgtccatatttcgcgatttttgccattttatgtccatattttgcgatttttggtccatattttatggccatatttcgcgattttatatccatataattacactccctagtaatcagtttaattgactattagttggttaggtcgctattaattgccagtttaattgatgttatgtttttagattgatgcctaccaaaagaaggtgttccgttcggcattgccaaagggcaatcagtcggtaagggcataacgggcaaaatttggcattttaatttgtgccaaattttaaatactcatcttttttttttgccagcacgaaggccagaaactgcaaattcatttgatgacaatgtga

SEQ ID NO: 7233 - DNA, 2295 bp, Heterodera glycines
ctatttttacaagttttttgccttaaaacggccaaaatttggtcatttttagtgaaaaagtaagtgcagttgttacccagcagtggaaaaaaagttattggttaaatagcaaaaaaaaaaaaaaaaggttttcaggttcgggtcccccccccccccgaaaaaattgttttagatacgcccctgcggtcaaccaatggcacttcgtacaattttttgttttaaattttagaagaatgttttgctttttttttaaatcacattttgattaattaaaaatttttctacggacttccataacatcacaattcgaatgccatacataaaattgcctataatattccatggccattaattttaaaaattgtttaaaaatttttaaaaaattaaacccaaaaattatttgaattgttgtattaattcacaagaaaaaaaagtccgcgttacttagaggtaatcaattctttctctaactgtcagttctcttcttttcccacactctttcaccctctcactatactcttctgtaggaggggcaaaaaataaccaaaacatttggctatttccatcactgattttttttttttgttgcttttgtttttaaaaaagaatttccatccaaaacctttgggttggaattttaaaatattttcttctggcgtaattgctaaaaatgccaaatttccaattaggtattttatgtaaaaatttaaaaattaaatttgaattccaaatactcccataattgtttttttccccaaaaggtatgcccgtgacatgttgcaggccgaaagtgcatgtgcccgcgcacaatgcacccatttgtgtgctgaattgccggccagcggtttccgttgcatgtgcccggacaatgtgacacaatttgatgacggctcatgtggcaccgttcgaattgaggagttgccggtgaaaaattggaatttttttttaggattttccaaatttttgtttgggtttgcgtccggggttcgaacctggcccgaaacggaaatccatgttctttgatttacgacccagaaaacggcacagattttgacgatttttaggggtcggggtcacttcggcgcggaccatttcggcgccgcaaattttgaaatgctataacttttttatttgtcagttagctttagccaatctggcatcatttgaaagctctatgtgtgctctatatttacatgtaaaaatagaaatgaatgattcaaaaataaaaaagttatgccacgcggcgccgaaaaagccaagaaaaagttaatttttgaggttttttggccataacttttttgtaaactgacgaaattttttgaaattttacaggctaatagagaatctgaagagctatcgaatgataacaaaaattttttaatttggttgatcaggaaaaaagttgttagcaacggcgccgaaaaggccggcgccagatagaacagaaaaataaccctgtcacattttgcagcaaaacgccaaaatttctctattttcaaattttatttgtgtttatgcagtcagtttatgtttaacaaaaaaatcgtaagactcaaaaaattacccaaaaatttttgtctaattaaataaccgtgtcttaattgcattaacaaatacctattttcttccagccacccaagcaatgttcgtgccaaaatggtggcatttgcaccgccgccggcacatgcaaatgcggtgactttgagggcgaattttgccaaaaggtgattgattggttgtggttggtggcagttttaaatcatttggaatcatctcatcattcatgcaattgtttcttttttttttttctttcagcaatcgtcagtgactcgtcaacttattggacgacttggtaattaattaaaattataaaattttggtagtcttggtaaacaattttcaaaataaaaaatatttaaataaaaatcagagggaaataattaatttttaagtataaatttaacctcaaattctttacaatttaccccaaaacgactattttcaaaaacttttagcctaattcaagaaatttcgtttttgaagtcagaattccttggcgcctaaaagtttcggaagaagaaatttctgtgttcgaatttctgggccaataaaactttcgggagtcggaatttcgcgccatccttgggtgcctacctatttcgcattcattattattttttcaccaatttttcaccgttttttaaggcaacggtgcctactacgcgttgctgttgatgttctccatgctggtgtgcctgggcatgctcaccgtcattgtgctgttgatgtacaaaa

SEQ ID NO: 7234 - DNA, 1355 bp, Heterodera glycines
  unsure (1)..(1355): unsure at all n locations
tttttgaaaatttttgcaaagaatttgataataatatatttgtactgtatgagctaaatggttggtatgggcagatggggctaaaggaacattgcgagaaatgctccccctaattagcagaaaaatctcaaaaaatatctctttttaaatttagaaatttcggaagtgacattttactctgaaaaatttgttattttttttaaatttccgaatacatttttaaaaaaaaaatcaattttatttgttttttttttttggtcaaacgaccgggcgggtgattaactatatacagtactagagtagcagtcaccggtaaataatgttcactttaaaatggtaccagaatacaaaaaccaagttaatgccgttttatactgttgtacatactatttgctatatgagaattaatgattctcgactcataaatcaataaaaatatttctcccttttttctcgggtctcgactcccttggtcctccccattcctcactctccttgcattgttaatttaaaatgccaaaattgcagtcctccggtgggtcaggcgagttgcatcagcaacagcatgatgggccaccgtccaacgagctgctgcacggcctgaacatgaccaccactacgtttgcgaacccggtctatgaccatggggacacgctcagctacgaggaggacaccaccacagttggcgaccggggcagcagcagtggcaccaaatttgagaccattgaaacgggcaaaatgtgagggagatcatacacacaatacagttatacttgatcaaaaatcatagacaaaattgaagaaggttcatgcataatcaatcagcagagctcagatttggaccagagtatttttaacccccaaattcatttctacttttttaaaaataatttaaaaaatcgaaaaaatcaagtagttgatgaaaagaagtcatagataaaatcaatgatttttaaaatccgaattcaggttcgtgatcagcgcattttttaaagcctataaaaaatacctacgaaatttttaacatttttttttcgttgggacaccaattcttgaccattgtctcagaagcatcaattaattttttcataaatcgcgaaaaattggctggtgcattttttgaattccgcccaatggtctgaaattcgaagaaataatttcacattttactttattttcatgaattcttccgatattcaaaatgttctataatatccatttttcagcaacccattgtttgaggagcataacagataaataaatgagtgaagaaggaanttgtgccgtgcgtttcttatgattgtctctctttttttttttgccaaaaattatcatttttattttccaatgtgatc

SEQ ID NO: 7235 - DNA, 1569 bp, Heterodera glycines
  unsure (1)..(1569): unsure at all n locations
acaagacaaattctaccttcggattaggccatttntggctcccctcgatccaaaccccaaagttcgaacacccgcgacatcattggaaagtccaccttttggacggtcaaattgaagtgctgctcaaagtgatttctcacctgaacaattctcaattcgttttcattcattttcacacattgataccgatccaccaatcacgaaactttctcgactcgatgccgagactctcgagcagcgttagcctttcccctcccattccgcggcccttccccactcacttttctcactgcttctctctgctcgttttgcaagtgttgtccgatcagcacattcaaatcctccatgtaaaaaaggcgcaattgatacgtaaaatccacttcgatggcaaatcccgccacacttttcctcgccaaaacggccattgccaacgccaatcgtccgcgtaacggcacatcggtcagttttcgctgcgaatcttaacacgtccatcagctcgccaagatcagtgctccctcggcgaatcatttcggccgctttgttcgccggaatgaatagcaacggatcagccgatgcccagccgatctgatcaatcggttgaaaagcgttgtataaggcgaagagggcgtccgccagcaaaaaataggcatcggcaaagaatcggaggatggggtaaaaggagcgaatgaaagcgtagcgacgcattgcgaaggacggacaaaagtcggagttgggagaggacggagaggggcagggggacttggcctgaatttggagaccgatcaaacgcattaaaaccaatttacaatttccaatcacttcataaaagccgcttctgtcgccgcacattcctttttcatttttatagcagaaattgtcattttcgccaagaattgaggacgaaagtgaaaatgaaagggcgagtaaagtcacaaaaaacagcggaaagttgcagcgaattaccattttatgtaaggttgccagatctgaggatttatcctcattttgtggctttttgagaaattttgaggattttggggaaaatcctcaaaatcttttaaattttgataaattggcataatgtttggcaatttaaagaatttttttaatgaaaatatgctaaaaatatggtcaaaattcttaatttttcccccggcggcgcctatcggcaccgccggaccgtaaaaatcctttatttacatgcaaaaatttgctcaaaatcgcaaaatttgttcatttttcggacaaaatctgttaacaaatcgcattgaaaattacaaaatttttcccggcggcgcctatcggcaccgccggccccccttgcgccccaaaatttttttgggaaaagcgccgcaaaaaaatcaacttcgtttttcatgttcagaatcccaaaaaatgcttatttctaacaaaaaaaaatgctcaaattgatcatggacaatcaaaaatataacatttgaacattttaaacgtgttttgaatatttgtgaaaatgaggctttttggcccaaaatgaggcttttttgcttgccaaatgaggcttttgaaaattttcatctggcaaccctg

SEQ ID NO: 7236 - DNA, 2427 bp, Heterodera glycines
  unsure (1)..(2427): unsure at all n locations
atgcatatttcgcgatttgtatgcatattttcgtgcatatgtgttacattttctntaaaaaatcctctattcaaaatgccncctctntaaatatgtcatttgaccncaaaataccgaaaatttcaaaaaactctataactttctaaaaaattggaaatttatgtcaaaaacaagttaaaatagaaaaattttaggcttttttactcagttttctttaaaataataaattttttagttttgtttgtattcttcttttcttctaaattgatttttaaaccatatttatgtagttattttagagatttttggcttaaatttacgaattttatgaaatttttaaaattttatactcgatttgaaaaaatttatattcatattttgcactttttggtgcatattttagatttttattttttgtttttttgtcttacactattttttaaatttctctaatcatccgccaaatttttttcggggaatttcctcccccgaaagtcaccaaattaaaacaaacgaatttttggaattaatctcaaaacaaaataataaaatcggctaaattagtcaacaattaagagtacgagttgtctatgcttttcttattaattgttgtcatcaattattggtataaatgtacaattatatatatttatttttagtattcggtcattgggatttcttaggcaaattcgcgacgatcgtcgccaaatgccagcaatggcacataaggcaacacatttcccgatttggcatttcgttcattttggcattttgtggtaatacattccctccgcgcaatcattgcctgaatgtacgaagtcagaagatctaaaaaattcggtttaagccaatgcgagagggttaagcattcgaaccgtccattttgtggccaagtgttgtctcaaaaagcaatcggttgcccttttccattgtgatgtgaaaatagctgaaaatttggcaaacatttgaaccaaaggcaattttcataacaaaaaaaaagtttagtgccatccccgataaagtgccattctcgaatctgccttcgatgtttgttagtttttttttaattttacgtattcgccggttgccattgacaaatctgctcgaatacgtaagtgcaaatgtgctgcttggactccgaaccgtagagagatattccgtcactatgaattccaataaaccaagggatatttattttttgattaccgattgattgccaccaataattttgagcccattttcgagtcggccgattgtttcaccaaaaaattaaaaattattttcggaaaaaatgaatgaatgcctcgaaaaaggcggagccaaaagtcggctcagaagaaagtcgtcgaagaaacgccattttggcatcgtcggaacattttggcatttgcaaattggcaccaaattcggcacaaattaacttaacaattttttgatgagtttaaatcgtcgccttcgctttttcttacccttttccactcggccgaattttgcattttcaaaaagtccctaaaaagagaaatttaaatttattttataattttttccatttccattttcatttcgcatttgcttctttcattccctcactttggtattaattgctgcaaaatgtgctgaatgtgcgccagcggcggctctttcccatctttcgtttgtgccctcaaaatcagtgccccaatttgtgccgcctcccttttgccaatgttgtgatagcctcgcaaatacttcgggagttcctgggaatattgttttgctgaattatttggccaattacaattggcctttgcctggtagtaatggaaaatcaagtcttgacgcatgtcttgacccggcacgacatccaaccaaaccttgcgcataaaatgcacctgccaaatgaatgaatgcttttaaaatataaaatccttaaattaaatgctcatcaattaatgcctaatgagtaattattgactaatgatcattaatgccccgccaatatttttatttccatgttttgccttatacgcaaattgcactgcttgttcagctgctcctccgttttgtttcgcccaactctttcgtgcccaacgctgcaatttgtggatgaaatcgaaaaagtgatcgtccggcggaatgcaaacgactgaaaatgcgcaattagcccaagggaatcaattaaaaaaagtaattaagggtaattaaaatttttatttttggtcttgtttattttttgtttgtttttgatgtcctttttttgttccaaaagcacacctttctccccgattttaacaaataggaaaagtccgatcgccgaacggaggccaatcgtttgggcaatgttttcgctcagttccttcgccaccgaccaactctcgacctgaacagaaataaagtcaagaattaatttgaatattgaaaattgcctccacattcacatggcttccg

SEQ ID NO: 7237 - DNA, 2016 bp, Heterodera glycines
tgtctgcctattttcccagcgtcgttggtatgagcaaaaaaaaaaaaaaaggtcgttcgggcgaaagtttttcaaaaatacacccctaagaatcgggcgaagaattttcaaaaatacacccctaagaatcgggcgaagaattttcaaaaatacacccctaagaattgacttttcggatcggtaccccccccccccccccaagcccaaatcctggatacgtccctgggcgccatgttatcagaaattggaagagcgaattgagccctcgtaaaaaactaagacaaatcatagccccgtcccaaggcctattttacgggaaaaagccggaattttagttttttctgcatttatttagggtatgtttcacaatgttgatttgcatctctctcctcaataaattttctaataaattttagtatgttgaagtgcccggcatggctggtcgatttgaagcggaatatatttacgactcgtactgtttttgtttttatccccatttcattttaatttttttcattttcagctctcacttatccgacacggtcaaactgatgggcaaggaatacaaccggaaaaagctgaagcggaaatgatcaattgaacaatttatttttgaatctcttatatggatcttcataatgttgttttttgtctagatttatctcgattttattttttaaattattttattttgatttttaatcgcatttttacaagtttcccccatttgtcatagtattcatttgatattccaatcattttaacttttttttccatgccgtcatttttaacaaatttatcgaataacgatggctaataataatcattgtccaccaaatgtttctgtagaaaatgatggcggttggacattggcagttcgtacgaagcacgggtgccgtcggcgtcgcgtgttcagtgccaaaacgacgacaaaatgcggggccaatttggacgggccaagcacaaatgcattcaacgaggacggcactgaaggaggagaagttcaagcagcagtggaagagttgacacttcagatggaacgcctcgtgtgcagaatgccacacacatttttgtgagtcataagttgtgatcagggtcgctgatcgtgaattcagcacccatattggtgtttattttattcgtgtatatttggtagagcccggcggaatcgggactcccgcgggatttccgactcccgcttttcggtgaacgggatttttacgggattcccgttcaggactcccatcccggtaaattttgaactcccgctcccagaaattttttttaccggattctaatatttggcaggttttgatgcggaattcaaaaagttgtattgtccacctttttgtttgcttccagagtcagacagtgcactatttcttcctttctctcgtggctatgcggaagaaaagaaggaaatagtgcactgtctgactgtctgcctattttcccagcgtcgctggtatgagcaaaaaaaaaaaaaaaaggtcgttcgggcgaaagtttttcaaaaatacacccctaagaatcgggcgaagaattttcaaaaatacacccctaagaattgacttttcggatcggtaccccccccccaagcccaaatcctggatacgtccctgacacatggaacaaaaactttggaaaaagattgttcaggtgcccttgccaatttttggcttgtgttcctccaatcattttcatttaaaaaattcatcagaaaatcaaagagtcacttttttatgaataattaaatgctccaagtcatttcacatttcatcgctttttctagtcatgcaaattcagcagtttttttgcgagttttggtttaagggagtattgagaatttttttaaaaatttttggatgaaattgcaaattctgtcccttttcctattgccttctaccaccacctgcacgagctgttcattctccacgtcgtggatttgcttctgtgtcttaatcactcgctccaagtgttcggcgtgtgcaatcgccgcccgtttcagttgcgcgt

SEQ ID NO: 7238 - DNA, 4147 bp, Heterodera glycines
  unsure (1)..(4147): unsure at all n locations
aaaagacgagagcgagagtttggcgataggcgagagtccccaaaaacacgagagttggcgagtggcgagaggacgagaggcgagagtttttcaattttttgtagccttattttttatttcaaaaaaacaaaatcatatattaaattagagttacgggtccgtgtattgccgggtccagaaaagccgggtcagggtcctagttaataaagcgggtccgcgtcaaaccgggtcatgaaaatcaaaaaaaaatcttcgaaatttttcatgaaaataaaagcttatattttaaaaatataatataaatattttcatgaaataaatttattttacaaacaaagtttattatttgtccattttttgccattaaaaccacctttttttcagcgcttctttcaaacttcggggacagttggggtccggcggtgccggtaggcgcagccgggagaaattttgaaaatttatttcggatctgttaacagattttattcaaaaaatgactaaacttgtgcttttagtcaatgcgatttacagaatttgtatcaaaaatgctcaaattattgttataaataaaataagttaaataaattacgacgcatataaagaatataaataataatacttctaaaaatttaaaaattatcatacttccagagttaataattaaaaatatgatatagagaaagttaataaatactgcaaaagttaaataaatttaaatatcttctcatatgaagaaaatataaataaaataaaaaataatttgggagttcattaacgtcaaacccatcaacctcaagcttttcaatacgaaaatgaactctaatgacgtgaggttcgagcattatacataaagcattaatcaaagctgctgaaatataaactaaaaacattcatttaagtttataaaataaaaagaaaattatttattcagcatttgaaatagaaaaaataaaaagttataatgtcactttggagaatttgaaaatataaacaaattttaattcatcaaaagaaacgattgataaatatcaattcaaattattatctattttattatacaccaagaaaaaaacaaaaaatgtatttgaaaataaaaatttctgacattgctaaaatgaaaatatgatgcaaaaattctttattctcatctacttgaaaatgatttttacgcagttatttattttatactttttaattaattaaataaaagcaaatatttttgttgaaatgattaaccctaatattaaaggaataggaggacaccagaggagcgagatatttaacaaaattaatgaatataatttaaggaatatgacgctaattaaaatacaattacgcactaattattaataaatatcaaaaagaacaaataagaaacatattataacaaaaagctatgaaaaagaaaataatatgctgtgtttttagaatattgatactgcctatagacataatggagttaaaaaataaataatattttttctgataaataactaataatttatctaaacaaatttcattatcaatttgaataggagttttcaaaatttatccaaaaaatatctattattaggtcttatttaataaagatttactatatattaaaatataatataaaaatgaaatgaataataaatattttaaaaattaatttaaaaatatacttaaaagttgacgatctaaaggcttttcactttattgccatgtgaaaatgttttgaattataaatgacttgaatgatgaaataaatgattaacaataaataaaaaaacccatcaaatagacattttggtaaaaaattttacgaaaaaatatacttaataattgaaaaattgataatttaatagaaatattagtagttatgagtacatttgtgtttggggttcacgccttcgaacgtcccccatgcgcaccttcgctgagagggacgagcccagctcggacatggtggtaatgcataataaacccagttgaggaccagtacaagacaagggggttccactatttttctatttttctctattatttcattttgtataagatttttgttaaagttaaagaaattaatagtagtatagagtaacgcaaactatttgtgtgaacaaaagtgagtgataaggcataaatttaatattttattaacaaaaaaataaattccaaaatatacgcataaaattattaaaaccaacaaacgacaaccaattatccaaattagcagtttataatatcacaaagtaaatactcagtctcgaaagttcccttgataaataaattggttaatataactcagttttataataagtatatacccgatacgccttggcactcgctcttacacgtaatatgtagattatccatgttgaggatttcgattttgtttagcttaaagataaatacattttttgtttaagatactatactcactatttcccgttcatcctcaaagttaaattctttcgccccatagcactgaaagagtttcctcataatattttcaaaacaatttattataatttttttccgtaaaatgatgaatctcaattttaaagaagaaaatgtcctgcgtgaacccccctcacatgaacaccctctttttacgcttttcccacattcattacatcccttaattattcattgaatattttttcttttgttatatttggcatctaaaaattatattaaaaaatagaaaaataaaaaaaactaaaaaaaaaaaaaatgaaaaaagtcactttttatggttaaaaaaaagaggttttttttatttttctttttttttgtgtctttaataatattggtttattaatttgtaaaggattaattattctttttctttaaatgaaaatttttcatcattatcatttttttatctacaaattattttttattaaaattcctttttgcagatattatattactttttaccagattttattttctatttttatttgtataagctttttgctacatttggcattactatttttaatctttattattgttatcttttaaaaaaataaaaatttcttaatctttttgttatttgtaaaaagaattaaactttcatttaatcaattctttggtctcccgttttcccctttttctcattaaacattttttgctttcccttaaaatatttctcaattttttacaaaatggaaccatcaaacaaatcatttatcaccaccgcccgatgcggccaccgaatatcttccagctgcaactgcgagctcaccattcccaacgtaggtccgcagagtctttttaactcgggaattgacctaaacaaattaaataatatttaaataaaatatataaaaaattgtcattattacatgctttttcgaattcagtttgtaggtctccaatatttttttaaccagtttgtgcttttgaagcggcccagtatcatgaagaatcgattttatcatctaaatttagaaattacccctaaaaattaaatggttaataaacagaaacgcacaaatatatatggtgcaggttcgagacgggccattgattttaaacaatttaaaagacaaaatacctgaaatttacgataatttttattgaaaaagaaattaaatttgcacatttgtaaaaaaggtatttgtaaaaaacgatatgaaaaataagtcaaaaatttaaaaggtcaaataaaaacatattctaagtataaacaaggggtacaaatttttaaattaaatttgaattttatgaaaaatattaatactggtaaaataatgatagagccgtgcaggaataagaaagacaactcaaattaacgattttaaaataacacgaaaaaagaaatgtgcgaaccaatcgaagcgatctaatcgtagataaagaatggacgaacaacgaattttataaacataaacgacaaaaaataattgatcaaagatattttaaataatactttcaatttccgaagaaattctatttaaaatacgatataaggataaaaaaaattacgtatccgaatgaaaatatattattacagtaatttaatcccaaataaaaacctaaacattctggtcagggttatgaaactggattcgaatggaacgaactatttgaccattgttaaaaaggacaaaactaaccggtttatgattaatgaacggattatntatctgctaaa

SEQ ID NO: 7239 - DNA, 2670 bp, Heterodera glycines
aatttacccattttcgtgggatattttataaagtgtaatattcaagaataaaccggaagaatgttatgtgggagtcccacgacacgaaacttgacgattttagtcttatttctaacacatattaggcagatttaaatagtaattaacattttttaaaacgattgtaatttttttcaggaccgaatttttgatatttaattatttatccaaggaaaccgtgcggaccaagggtatcggaatgagccttttcgtggcagacgggtgcgcaataacaggaactggcgcggtcgctttaaccgccagaacaatcgatactcaggtggatagagtaaactataattttcccaaaattttcaataaatcatgcaactttgccaactgtagaattttgatcaatactatcaatatatgttaaattttcacggatttaaatttcagaaaatttctagtcgttctttatgatttcttaattgaactaagtcgttttgtgggacgtttttgaaatctagttcgattatgcgggtccgtttttgttgcaataaaaacatccacctaaaatcgtttaattttaatttaacttattcctagcattaataaatcagctctatttcatttattattttttatttagcaaattttgaacgcatccggccaattccactaaaccaaggtagaaaattctccactccttcaccatacacatatttaaaaacttttagttcgcccacatttatatgggagtaagtaacattttttcaattataaatcaaatgactaatcatataccgaaccagatgggtgagacaactgttcaacccggctcccccacctccggtgttttatgtgtttagagggcccgcccacctactgaatgaccctcgcctgtttgagcgcgttaacgggggtagtgttatttttatgccgcctcaaaacatcgccctaaaaacatgatttagcgagtcctcaaatgccgatgggtctccaatatgaccaaaacggagttgcgattttcaacccagccgttccaccccccggatacgagaaccttcgccccccgggaacataaatgccaatcaaataattggacgattttagcaccgatttttggctaactgttaatcgatccataaactgttgatctctcataaaagttgatctgttttgtggtgtctctttcattttaaagggaaaagttaatgaaaatagtgtgacgggtgaagatactatgaagatggtgaaaataggtgataggcaattaattaagtgtttgtacatattgcttagaatgcattttcagtgcctggtgatatagagtgcgcggtataatcaattgtctgagttttgactaggtgggctgagtttttggctaggtgccaattcactattgattcgtgcgctaaccattttcatcatcaccaaatgctacaattttctcgtccaccaattatcgtgccttatgatgtctgtccgtaccttatacacgccaaacaatagtgaaaggggcgtgactcagtcagccatgcgcatactttgttcgctaaactcggtaccagccgctaccgtttatcacggacagtggccggcgtctctttttgtgtatttaaggaagggatttgtagcacattactcactttattaaagcagcaaaaattaaaattgattatttttaattaaatatgtccgaaaaaattccttaaaacaggaaaagaagtaagagcaaaaagaaatgtaattaatttttttaaaacggtcccaaaaaaaaatgacgaaacaaattatttcgaggaaattgagagttatataacggaaaacaaaaaattcggcattacggggcatgttacaaaattctattttaaaaatgcctatacagagtcggctgaagaaaactttaaaaaaacaattaacaaacttattgagaaagcttgtaataaagaggaaaatggacgtaaaatttgcaaaatgtctgtgaatttatattgtaaaggaattacagacccggtagtaatacctatcagaccgaaggagcaaatatctgcggatacgattcttaatgagtttattaaattacaacaatcgtattcggaaatcaatttactcgatcaagaaatatctgtaattttcaccacttattcaacacctgctggaagcggtaaaaaaatataattaattcatatgctcatcatttttaggcagaaaatcaaataaattaatggaaaaaaatgatcttagtcgtattcgtatttctaacgctgacagtttcggtaagtggttaatcaaaaagaggatttaaattggtttttcaggtttattttatgccttagagctcacccgtcattaccagctcattaacaatgggataacatataaaaaatatttatgtattataaataatccaaaaaaacaaaaaactattgtgcgagatttgatgaatgaggcggacattaatcaaaaagaaaaatcctacgggctcgatcatatcaaattaattcaaaatttttgggatcaaaaatattcaaaaatatatagaattgttgcctttgacgatgtaagaatattctcgaaaaaactttctttatttgtgttttagagatgtggtttgaagcctatatttaaagcagaaggtgggaggcggtttgaagttgttgttttattgcaaaatggacactggtg

SEQ ID NO: 7240 - DNA, 2115 bp, Heterodera glycines
gcttttaagtccccccgggaggggggaccgtttccaaaaattttgtcccccattttctgcggagagtccaagtcccttaaaggaccaatttcttgtcacggacgacagtcgcctttggccccttatggaacagaaaaggtggaatattcagatggggtgcgtcccttcctaaaaagttctcttttcgtctacccctcccatccttgtgcactatttcttttcaaaattggtccaaatttttttgctttttttgaaatttaattgtaaaaattcgaaacaatttcttttcgatttaaaattgtgcttcacaatgcttttaagtcccaccgtgaggcgggacagttccaaaattttgtaccacatttttctgtggaaagtccaagtaccttaaatggacaatttcttgtcaacgacgacagtcgcctttggccccttatggaacagaaaaggtggaatatcagatggggtgcgtcccttcctaaaaagttctcttttcgtctacccctcccatccttgtgcactatttcttttcaaaattggtccaaatttttttgctttttttgaaatttaattgtaaaaattcgaaacaatttcttttcgatttaaaattgtgcttcacaatgcttttaagtcccaccgtgaggcgggacagttccaaaattttgtaccacattttactgcggagagtccaagtaccttaaatggacaatttcttgtcaacgacgacagtcgcctttggccccttatggaacagaaaaggtggaatatcagatggggtgcgtcccttcctaaaaagttctcttttcgtctacccctcccatccttgtgcactatttcttttcaaaattggtccaaatttttttgctttttttgaaatttaattgtaaaatatatacgaaattctttcttttcgatttaaaattgtgcttcacaatgcttttaagtcccaccgtgaggcgggacagttccaaaattttgtaccacattttactgcggagagtccaagtacctttaggactacagaagagccaatgaagcagcacatttaggacagttatgaaaaataaagaaggaaatattcgatggggtgcgatcctttcaaaaaattactctcttcgtctaccctccctcgctttttgtgtactaattcgtttctaaaattggttctgaattttttggcattttgaaattaattgcaaaaattcgaaacaaaatactctgaagatttgtaatttcacttcaccatgcttttaagtcccaccgtgaggcgggacagttccaaaatttgtaccacatttttctgtggaaagtccaagtaccttaaatggacaatttcttgtcaacgacgacagtcgcctttggccccttatggaacagaaaaggtggaatatcagatggggtgcgtcccttcctaaaaagttctcttttcgtctacccctcccatccttgtgcactatttcttttcaaaattggtccaaatttttttgctttttttgaaatttaattgtaaaaattcgaaacaatttcttttcgatttaaaattgtgcttcacaatgcttttaagtcccaccgtgaggcgggacagttccaaaattttgtaccacatttttctgtggaaagtccaagtaccttaaatggacaatttcttgtcaacgacgacagtcgcctttggccccttatggaacagaaaaggtggaatatcagatggggtgcgtcccttcctaaaaagttctcttttcgtctacccctcccatccttgtgcactatttcttttcaaaattggtccaaatttttttgctttttttgaaatttaattgtaaaatatatacgaaattctttcttttcgatttaaaattgtgcttctcaatgcttttaagtcccaccgtgaggcgggacagttccaaaattttgtaccacattttactgcggagagtccaagtacctttaggactacagaattgccaatgaagcagcacattttgggcccttatggaaaaaaaaagggggaaatcagatgggggggcgtccctccctaaaaagtctcttttcgccaaccccccccatctttggggactatttctttttaaaattggtcaaatttttttttgttttttt

SEQ ID NO: 7241 - DNA, 1375 bp, Heterodera glycines
  unsure (1)..(1375): unsure at all n locations
caaaaattcgaaacaaatactctgaagatttgtaatttcacttcaccatgcttttaagtcccaccgtgaggcgggacagttccaaaattttgtaccacatttttctgtggaaagtccaagtaccttaaatggacaatttcttgtcaacgacgacagtcgcctttggccccttatggaacagaaaaggtggaatatcagatggggtgcgtcccttcctaaaaagttctcttttcgtctacccctcccatccttgtgcactatttcttttcaaaattggtccaaatttttttgctttttttgaaatttaattgtaaaaattcgaaacaatttcttttcgatttaaaattgtgcttcacaatgcttttaagtcccaccgtgaggcgggacagttccaaaattttgtaccacattttactgcggagagtccaagtacctttaggactacagaagagccaatgaagcagcacatttaggacagttatgaaaaataaagaaggaaatattcgatggggtgcgatcctttcaaaaaattactctcttcgtctaccctccctcgctttttgtgtactaattcgtttctaaaattggttctgaattttttggcattttgaaattaattgcaaaaattcgaaacaaaatactctgaagatttgtaatttcacttcaccatgcttttaagtcccaccgtgaggcgggacagttccaaaattttgtaccacatttttctgtggaaagtccaagtaccttaaatggacaatttcttgtcaacgacgacagtcgcctttggccccttatggaacagaaaaggtggaatatcagatggggtgcgtcccttcctaaaaagttctcttttcgtctacccctcccatccttgtgcactatttcttttcaaaattggtccaaatttttttgctttttttgaaatttaattgtaaaaattcgaaacaatttcttttcgatttaaaattgtgcttcacaatgcttttaagtcccaccgtgaggcgggacagttccaaaattttgtaccacattttactgcggagagtccaagtaccttaaatggacaatttcttgtcaacgacgacagtcgcctttggcctcttatggaacagaaaaggtggaatatcagatggggtgcgtcctttcctaaaaagttctcttttcgtctacccctcccatccttgtgcactatttcttttcaaaattggttccgaattttttggcattttgaaattaattgtaaaaattcgaaacaaaatactctgaagatttgtaatttcacttcaccaggncttttaagtcccaccgtgaggcgggacagttccaaaattttgtaccacattttactgcggaaagtccaagtaccttaaatgga

SEQ ID NO: 7242 - DNA, 4418 bp, Heterodera glycines
  unsure (1)..(4418): unsure at all n locations
cttctcaatgtcctttttttggtctgccccacccctcattttgccaaatttcgtcgttcgtttcatttcgccgtttctttaggcctcctttttgtgtttgtattcggacattgccttggacacaaaatacactcgcccaatcgcaaattccaacgaagaagtaaggaccaatgaatgggctgctgcttttgacgatcatttaaccaaatttctgctgtttaggctgaggaagactcagccgacgcatcggccgaagacgaagacacaacgacgccgcaacttttcatagccgaaatactgcaaatccatctgtacaagccgtccgaattcctcaagaatctgatccaggaaacgcttctttcgttggctcagaatggctcactgctcggactcaccaatttgcttgtgcttgttttggtggtcatcaatcggtcggtcgattggtcaaaaacagtcaagtgatcaatccgatcaccgcccaatcgcagttcgatgagtggcaaaggcattcgcatttcacgtgccaaagtgattgctgtgttcgccggcgtttggctgttcctcgtcgtcagtcacgtgcttttctccgcacttcagtacttcgctgtctcgcagctgcacgaactgttggagttgaccagcagcaaccccagccaatttgcatgtcgacggtactctcagccaataagaaatggnggggggggggtcgaacccacggcccacctatttcatgggactgatttcttgatcactgggcctgatttgccgataattcactcctcccactccccccccccccccgctcttttagaagtgccactttcatggtgtacaatgaaatcggagagcgctgcgatcggttggccgtttaccaagagttgggccactttctgctcagaggtcacactctgttcaccgttgtgctgctgtccatttctttggtcattttcgtaatcactgntgtattagccatcgccgncgtccaanagagcaacannncattttctagaatagaaaatagcgacaaatcaggcaaaaatagcnncggcggaagagaagcganncggggggaaacggacagtagagagcgggcggaagcactagtgaggagaagagcggtagagtaggcnngggcgggggcagggagggggnggggggggggtctcgaactgatgaatgcttttcgtttttcagtgactcgagcccattccgccggcgtgaaacgctcttccaaactctcgtcctttcgctgttcgtttgtccttccgtttgttttgctttcattccgtcccttcttttccagcattgctttcttcctgtcgctgttctcccaaagcttcatcgaaatgtatgtgatggtggtcaacgatcgtcgcgagatcgcctggtgggcctccgtctatcagctgagtcgcattgcggcgttcatcgacccgttgtttaaccccgtgctggtggccgtccgcactccgatcattcgcagacgcgtaaattatcactgatcagtccgatcagttgcccgatcaatcatctctctgtcccttgtccgatgctttccatttgctttagctccgtttctgtgtctattctctgctcggctctctctgctcccttttctgtccgtggtgtcgtcgtgtgtccctttctctccgcaaccgaatgcgtcaccatgattccgttgctattaccatgaaaacatggacggaaaggaagcgctccagcggctcccgaagggcttcttcggcttcgtatttaagtgccgactcggcgaaagtgccggactggcgaagcatttgttcacgaaaggcaatcataaaaagaatgctggcatttaatcactttttattttgcagtttttccgttcgataagacgcgccgaaaatggcggaacaaatgccaattcacttgcataagacaaaatgttgacgaatgtttgacatggacttttgaagttcatttaattatgtccaaaatttaaattttaaaataaaaataagggtgtattaacagttgaatttttaataacaatgataactcatagataaggtaattgtcctccaaacccatttgttttgccctaattaaatgcaaattgctgcacttaattggtgtttttttggccatcaaattgcagcttaatcattttcggttgttggaaaggacaaaatcgacaacaaatggattcatcagtcaattgagcgaaacgtttagcccttccgttaaaacagctgctgatcactccgttatttccattgaaattaaattggctgccaaatgggccgccattttcacttcttttccctctcaaagattactttttgagtcttttttcaccataattaaaataattgaaagtaaaatttaacggatgttttgtgtcaaatttgttgcaaatttttgttgttttattcacagaaaatgagtgaaaataattcgaccattgccaacgaaaacgaaccgatgctaaaaattcggggtaaaattcattcacccattgttggcattgtgaagaaaaagcaaaaatatttttagacgttccggaaaatgaacgcttcgaattggcaattcgaaaatttgacttttgtcgtcgttggccccgcaatttgcacaacgaattcgctgctcagtcagcggccagcaaaaattcgcacaaaataaacaaatttctgcccatttgcgtggattttttgggcgaaatcgtcgaatattttggctcggcaaaagaaagcatttgcgaacagatttatccatctctttttgaaattgtcagcaacaaaatttatgatgatttttatccgccgttggacgacgaagaaaaccaatggccggcggaaaaaggggaaacattggcaaaagagggccaaggagagcaactgcacggagatgcaaccgaaacattagcaaaagagggtgaaggagggcacgtcaatgctctttctgctgatgaatggcattcggttgagtggagccattcaaaggtcgaaaattagggacagaagccatgctaacaaataagcactaaatattaattaaataataaaattgattttctgctgttgttcgtttatgagccgtcccaaattgaatttgactttagttggtttatgagctgttccttttggtgctccgatcggacaaattccgtgtgactcgtgccaaagagtttgtcgatcagaaatttgtacggcgtttgatcacaaatgtggcaatttgtccgcatagcgaagtgagacgctgtttggcacagatactccgaagcatttacctgaagttcgtccgcttccgtccccacattcgcaaacacctcttttactccctcggcgaagccgtttttgacgagcggtgccaattggcaacaacaaaaacatttcacggagttgcggagacattggacattttggagaagtgaattggttgaatgaaagtgttttaccaaatgcttttaagtgtgatcggtggctttaaagtgcccctcaaaagcgaagagaagcaaatgttttccaaagttttgcttccccttcacaaaagcgactctcttgaaagcttttacaaaatggtaaattgattatgctttctgattaaatgattctcgcttcggctcatcgaccgggtcattcaattcatcgaattggacgcgcaattggcggcggcggcgattgacaaaatgttaaaatggtggccgaaaacgaatggacagaaagaagcaagcgattagcaaatcgcatttttaaatttatgttgttgtttagtgtatttttctggatgaattggaagtgatcctttcaaaggtcgaagaccaaagcattttgaggccaatggtcggccgactgttcggccaaatcgccaaaagcatctccagccaaaacttccaagtaaaatttaaattctctaattactttggagtttagataatttttattttgacctaaagttcaaatttgagaattaccaaaacttaaaaattccaaaaagctaaaaattctaattaatttaaaaatattttatgaataatttaaaataattttctttttttgtttttaaaaattgttaaggtcattctcgaaatttttgcactaaaaagtgttgatgttttctggtctgatagataaataaatgactcatctccttaatatttttaatcatttgcctttcggtgtccatcaaagcactccatttgtggaagaatgaacgaattcttcaactgatcacaaaacatttcgcactttttacgcaaataatcgctgaaccattggcagaaacggtcaaaacccattggagcacaaaaacccaatcggaggcgaagaattttgaaaacattctaatggaaatgaattgggcggcaaaaaataaaaagaaaaattataaaaaatcagaggaagaataaaataaaataataaaaatttgttgtcattagagcc

SEQ ID NO: 7243 - DNA, 1767 bp, Heterodera glycines
aaaaggtttatgtgattttttatttaatggaaggatgactttcagtttatttccaggtatttaagctgtttttgaaccatgcatagaaattgccgtcaaactgatatttggatatatttgtggccattcgggtccggatttaggaattggtcaaattttcgtcgtgtcatttcgggtatcatcctttcctgataatttttccccctgacaaaggaggggtcggcaagtgaccgtgggatttccaaatgaaatttggtgggtggatagatgacgcccaggttctattgtgaaattttgactatttttgccaaatgagcatgagtgccgagatatgacgtgccaaacttttttaatgaacaaacaaattaaataattatttgcaaccattcgcattgtcaaatggtgtagaggtaatgcgttagtaacagtcgcaccaggttcgaatccgctatatgcaattttttttttttaattttttttttgctttttatgaaaagtcaattctcaaaagattagttttataaaaagactttatttttaattttactttttattttggtacatatgataataaaaaatatttttaattttactttcattttgatatgtacataagataataaaatatttaaaaaatacgacaggatatttattgcacctttatgtttaatgtagtaattttttgatttctaatggaaaaaaatttaaaataaaaaatatgtttttactaaaaatttttagatagttaactttgcatgaaaatcaaaaataaaaattataaaataatatatacatgcatgggattcgaacctgtgacataaaaaagatttgactaacctactacctctacaccaatggcttctttcttggccaacaagaattatatcttttctaattaaaaaagcgtaaaaactttggcacgtcatatctcggcactcatgctcatttggcaaaaatggttaaaatttcacaatagaaactaggggtgatttacccacccaccaaatttcatttggaaatcccacggtcacttgccgacccctcctttgtgagtgcaactcagaatcgtaaaaaacgcctttttgtttacttttttatgggaccagtaaaagttagtattactcctatttttagcttaggtattcgaagtttctaggacgccttttcaatttccatattgtaaataaatctggaattctctggcgatatttttgaaattaatagccttttctaattgtgcgtttactaatgaatagaaaaaagaattccaataacatcacttctaacatcaacatacattataattatatccgggatgtgaccgaaaaatcttagaaatcagaacttcaggctcaaaaaattgaatttttgggtcttaaatccgaacatttctaataaatcagaactgatcacttccacgaattatatttaacattttttgatgacatatcgtgtttaattgtggaaaataattaattgaatgattttgtttgccttttttattattgattaattaacagtacttgcattaagaacaaatcattaagaagatagaagctgagtaaaatgagaaatattcataagacaagaagataaattggtaaaatgagaaatgatcgatcagtgaccagtgaaacacacccgacaataattctaaatattagaatgggtgggcattattcattcattcccaaggaatgcttgaaaacatttctaatcctttaagttgtcgggtttcttgttcattcccgtcaataatttcgcaat

SEQ ID NO: 7244 - DNA, 1509 bp, Heterodera glycines
tttgatcaatgtacagcacgaatggacaaattttttaagacgcttatcatacagcgccaatatccactcataacttctgatctgaatgaacaacgcaattccgtcactcatcggcagattttccgtggcactgcgaattgactcgctgctgctgatcgacgactcgccaatgctcgcgtccaaactctcttcgacgcaactcttctcctcccttttcagttctgcttccacccgcttcttctccgtctttttccatcctcccccaaatcctccgtcgattacgtcgaactcatcgtcaggttcgcctccaatttcagtttcgttttctttgttttggttgtcttcgctcattaagtcgtaagcatgactttgttcgtcaccaacatccgcttcttcttcttttacatattcctcttctttctcttcgcaaatcacattgacaataaaccaaagtggcgattgtcgttcagggaccaaacagagccgagcctgggcaatgataagctgaccaacccgcacaagtgacaaatgattgccgagttttccatcagggtcaagcagtacaccgaaattatcgacatggattgaacctctgactgtgaatgtcggggaaagcatcgaattggttacaggaaaacaaagttcaaactgaatgtgccattgaaatgcttatttcttcgatgtaataaatattttaccagtttgtccccttccaaagatttcaatgagaaatttgacgataatccaactggtaaacttggctctttattcaatgataaatcaactacaaaaagcttcgaagagcttattgaaggaaggacgggacggtcgacttctcttaataagaatttgttggaaataccaaacgaacaaggaatattcaatgaaaaatcctgattcattttttcgtattagtaaataccatgggtttttggcaatcctggtaaaaaataatgatttataatttaacccgggtacaatgaactagaaacccggcttttgcactttaaaatattacctgcaacaaaaatgtacgatatcgccgacggatatattgtttgtgagcttatttgtagcaattgctaattgcccatctcgtaaacagaggatcaatacgaagcagtaatcgtcaaacaatttcaaaacaaatccctgctctttttgggtaattaaatgcgagaaatgaaaggtcgacacatgcttaaattatgttttaagccaaaaagggatcaatggcactcgtacaaaggcaacacgtacaatgggcaaatatctagtattttttaaatcaaaaatagaatgcttttttttgctctataaaaaagtgtaaaaattgcgcattataaaagttaccatttgtacgagttgtcgacaccaaaaaattatattcaaagaaaaacctttgaaacagcactaagttttttgctctccatcacaatgtctttgagagactgcaatttccaacgaggaataccaatttcccatcctcttctaaaatttgctaattgg

SEQ ID NO: 7245 - DNA, 2180 bp, Heterodera glycines
  unsure (1)..(2180): unsure at all n locations
agttggttacaacccaagaactttactaaatgatatactatagtgttattgttttattaaattctacctttttattaaattttttttgaaatttgagtgtcttcttttttgtttaagtttttttaatatatcagatttaaaaacagatttttaattttaaaggttcactttcaaaaaaatttctctgaaaaaataatttttaattattatagtcaattttatcccttgtagcctccatatagcttgtcgtaggccttttctaaaaaaaccaaaaatattggtaaaaatgtaataaattgaattaaaaatagctttatcttttattcattttaagattttttttaaaatagtatcttttgattcttttggttttacttaaattgaaagaatatttataatttcactgctgccatttgtgccggcaaaaaagcggaaatttacatatattgagaataattgtttgcagaattcaaaaagttaattttgtatcgaaattgacaatttataaaaaataatgtttaattcataaataactaactgttaacatctattattttttaatattaaaatatttaaaattaatgcataaataaataatatatattttatcttcgtatataatttatttattttttatttgtggtttttatcaaaattttgcaaactaacatttgaaaaatataaattcgagcagaaaaatcattctttttataccattgccttttaaaaatttatttattagctatttttgtttttctgaaaattctttttaatattttttacatcgtgttttgttgaacgcaacaaatatttatatatttttatccataagtaaagttagaaataaattggtttcgcaattcattaacaatagccattgcgtccataaaattttcataaaaacatacaactttgtcaaatcgcataaagaaatcgggtttccgatttgtcacttattagtttttaaatatttatgttattattcactatagttttctaatttaaaatagtttagcttttaacgattttatataacaaattgtgagatttaatgcatatttgttttttattttgataacagaaatcgaagaaaaatatgaagtaatttttgttttttattacataactattttatgtttaattcgtttatttttgtttatgttacaataaatgatgaaaacaagttagtcagtaatattaagagtttgaaatttcgtttcgaaacattgatttagtatgtataaataaattatggaacttttatatttcgttcgtttattatcatatttagtgatttctcatgcaatttttcaaaatattcaactattttggtttcttttgtgaaatagttttatgattaatcaacatcatgcgcaatttaaaattaaatcatagatagtaataaaaaaagcttaaatatttataaagttgtgcttataattgaatatttgacaattagcaataaagtttaagcaaaacccccaaaattcttccggcttttagtcgtgactcatgacataaaaaagtttcagggggtgggggtcacaaacggataacaatcttttattcattcatttcttatttaattgtttttcaaatttagttgaaattaattaatgaagaaaagggtcggaaaaaaaagataaaagaaaaagttccagaacaaaaaaaaatcttaaaaactcatttaaatagacttcatctcatttcaagtgtaatttacgagtttcataagaccccgaaaatctcggttcggggttcggggttgtcggggttggaagtgtcggggttcggggtcggggttgccaaatcgttcggggttcggggtcggggtttttcaatttttgccttataccatatagtcaaatttttttattattttagcttacaattttttattattcataataatacttttatatgcttttttatttctttttatctaaatatttttgaatataattaattaaaaacgataaggaatttttaaaatgaacaattgtgaaaatctgtaaaaatagtcaaaatttcaaatttttgctccgacgcctggcccccaaataaaaatagtggattttattcaaaaaaaaatgcccaaaaatttctgatccccttttttgtttttcaaattatctttttttcgcggcgctctttttctanagacttttaggaaaaagggg

SEQ ID NO: 7246 - DNA, 704 bp, Heterodera glycines
ccacagcttctgcatagttggacggcggtttctgacaaactgatgtcttaatacgcagtacgaaattatgcctcttgagaaatttctgcagcccaactgatgcctggagaaaattttcatttagtagtataggtagcagtttctaggcgatccattcggccaatttcaaatttttcatgtaaaatacagaaattctgtaacaaaaatgcattataaatagggatgcgatttttaggcacaaaaaatcgcaaaataggcacctaaaaaggcagaaaaaaatcgcaaaataggcacaaaaaagcccaaataggcacaaaaataggcaaataaattttttttattaacgctttttaggtaacaaaacacgtaaaaacttaaatatttcaattgtaaatgaaattattaaatgttttaaagttttttttcgaatatgaaaaaatttttaaaccaaaaaatttttattaagaaaaaaatattaaatttagggataatttttttgaaaaattttacatttcttaggggcgtattttttgtttttattgcatttttgttaaggattttttcaaaaaccctaaaataggcactttgggcacaaaaaccccgaaataggcaaagttaggcattataaaagtcatcgtagacaccccaaaccatgcggaaagggcttttttcgtgcttatctgtgcgtattcagtgcgcaaaat

SEQ ID NO: 7247 - DNA, 3766 bp, Heterodera glycines
ctgcgaagggcacaatgtgggggtaaaatttaccacacatttgtggccttatactactaactcatgttattttttactgaagttacaatgtaatagaatatataatcactatatttgttaagcttgttcagccatgttctagttactgcattccaagccattgcaacttaagttttttgtttataataaaagagaaattttttcatttgattatttttaatatatttcaaattatagcatatcttatgattgttcttttgtttaaaatcaaaaaggcattattccaagcgtctaacccaattttttacctgttaaaaaactcaaaaatggtcaaaatttcatattattgcactcactcacttgtgaaacatttgccccttttgatctatccactgagaattgattaagccgctctaggttatgggaaacgcaagtgagatcgggggggggggggggacaagaatgtattccgtatactactaacgttaaagccaaagttatcgcgttacttaagatcataacgaaattttatttataaccttgctcaataataatcaaatgtttagtcttgatatcattcattttctctattagaatgcaaaatcaaaaaaattcatgtacttaaaactctgcacttttttatcatttgtttttttctttttttttgttattttaatgctttttcaattatttttaggtcttatgcttaatgttttttaccttatatgaacaaaaattatttatattttttagtgttatatgataagaaatatcttattcctatttaatcttataaataatgttgattaatttattgttttttttgatttgttttacattgtaaaggttttttgtaatgtgaaccaaatataaatgtcttgtgctggtcaaaatttaattatgtagatgaatgaatatcaaattaatgaactactcaagaaaaaatcattattaagtatttatttatctcttttaaaaagtgttaatttatttttttatgaattcttttaaatttttactttaatagattgcttagtagtatatgtccacaaatgtggccccaaatgtggtcccttttcaccgaccccattattacccagattgattaatgcgaaagtggaaaatgcatattgcaaatgcgaaagtgcaatttgcaatatgcatgcgagtgcatgcacatgtttgtgcatgtgtgaatgagcgagtgagtgtgagtgatagtgagagtgagagtgagtgatagtgtgaatgaaagtgagagtgagagtgagtgagcgtgaatgagagtgagagtgagtgagagtgtgagtgagagtgagagtgagtgagtgagagcgagagtgagtgagtgtgagtgtgaatgagagtgagagtgagtgtgtgaacgagcgtttgatcgagcgtgcgttaagcgtatgagtgcgcgcgttatgcatgtgcgcgtgtgcattaaacgcatgcgcctgtatggccgtgtatccgcgtttgaacttgtatgtgcgaaaatgagctgtccaaataaatcccccgccgcaataaaataattttttataatttttctgccaatcaatattcttcgtgacagccgaaaaaatccgtgccagcctaaaaaatcggtgccacccaaaaaaatcaacaccaacagttaagaaaattaagagactcccatctctctaaattccaacacctaataccctcaaaaactgttgtaaacagcgaaccatttttattttatcgatcaatatgtaaatagtaatagaaaatgagacacatttgttttttaatattgtgatttgtgatcattatattatagatatgtacttagacatctcttctgtttaatgtccctattcttccctagaaatccccttttttttgttttcaacacatttttacacatattttcatattaaacggtaataccaacaaattatatggtcgaaatgtcaacattaaatccgcgtccaaaattaccaatttttaaattttcttatcctcctggcattcttttacccgctgtcaccccttcccctgcttcccttagtacatcaataaaaattgtcgttcgcccagcggaaaatataggttggcgtcagccgttcatttaggatattgattatatcaacacaacgagaaattaactttttttttcaccaaagatattttattatttaatagaaaagaataaacagaacatcggcaactaaattgcaagaaaaatcaaacaaaaaaaatttaaaatagtacataatatggtaaattaatcaaggatcgattaggttcaaaattatgctcaaccggctgatgggtgggattagtatttgtaaacaataaagtggaaagatcataagttgaagaggccctacaattataattaatacatcgatatctaatgccacgccgaattcccgtttctttctcgattaatccttcacttctaaaccaaatcccggacagtagtacatactttctcggtatgatgtcatcagattaggtgatagtcgggcgacagtttgggtagataggatcgaacccatgcccatagttcaatatgtttttatacttggtgttccataattctgctgctcgagcggtgtcaccatcttcacatttaagcacataaagttttgctagctcaaatgcctctataaatgcatatttatagacgccagagcatggtttagaatcaattccatatggaatccaagacggtggaccaacattgtacgcaacagcacaatttaatccctaatatatatcaaaaaattttggctcaaagttttttttctcaccgttgaaaacccaaaatgcacagaacccgggagagttattataccctcaccagcacgctgaacataataaaatataaacgttttttattataataaaattagggataatattttatatattaaactgatatggttataaaatttcttttaaaaaaataatttccaatcactatgataatgtttttgctagtcacaagcttcgaaaaaatattcaaaaaaaaatgttttagataccaaaaattactaaacactatgtgaaaatatatttttcttaaaatcttatctttattgataactcacagttcggatacatcggatcctattttcacggatgatattagggttcaccaaaattgacttattccgcaaatattccggatcatttgtgaattctttaacaaaaaaggttgagagcagatttttaaatttcaaaaaatctgccgccggaatcgaatacctgaaaatacattgtcataaaaagaccccccccccactaaaagtaccatatagttatgccaacattgtcagttccgcttgaagggcacaataaattcacactataaaggtcagaattctcagtgtgggcggtaaaatatgagccggcttttcgtaaataaaaatagggcgacgtaattccctcaattggaacaccaagaccaccattatttgtcgataaaaactgtagttctaagatggagcccaaagatggctgccagtctttgtcacccttttgcataggcaattctttggcatattcaaatattctttgttcttctgttacgccattccaaaaaacgctaaaattttacttctgtaaacattttctatatattttaagagttatgtcagtaaaaatgcagggtgccccaaaggttctgagagcctattaaaattgttaaaactttatactcatctgtctgtcagccaaaatttccggttgcaaactatctttttaactttttattatcctgttt

SEQ ID NO: 7248 - DNA, 1296 bp, Heterodera glycines
gtcagggttgaatcccgttagcagcgaatgatttcactccatttaattgaggcggtaaagcggccgaggagatcgtgagagtagccggaggccgcctccggaggacccgagcggccgagggcgttagggggaaggagccgaagacccttcgggaacctatcggttttggattcctttaacaacaaataatttttaaacacatattttacatattttttaattataacaacatccaagcagtttccaaggcccacggaaatctaggtagcgaagctctcgaagcgcgaagcgctttaaatcactaaagcacgcgcaagcacgcacccgctagttatacgtatttaatttaatttcttaattgtacatttacataattttataattttacatacattttatatttttttagatttaatcaagaatgtgtcttatatttagagccttaaatttgctatgatattcgtaagaaaaattgtgcaatttaatgagagagcgtcagcgctctctgcaattccactgagagcgtcagtgctctcagtggagaatagcctattttttaatacaaaaaattgtaattaaaagctgtaaaagccaaattatccttttataccatatatcgaataattcacgtacatattttagtttattacttaagccattttttacatactcctttcatatctctttaaataaaaaagatattttttttatttttgtaagcaacaataatctttaaacttttttttagaatttatttgtatgaaataactttatgaccaaagattttcaattataaatactatccttcatggaatatcgaagcatttattggataaaaaatgtagcaacaccggattcatttaacaaaaaaatacatatgatgaaattattccaggggtgtcttttattcaaaaatttttaaaaaaacatcccgtaattcatttccaaagtcctcccggcatttgacccaattcagaatcgacccggaattccacacgatcgcctgggtgccgtagtgttacggcaggccacagcccacttgaatccgcgatgaattgtttattttggccttaaaataaatattacaatcacaaaaaaaattatctaacacgcacctagcaaatcaccgttcaaaaaatatgaaaggcaattctctcttttgttgtggaaaactcctattttatctccctttgaaaatggtgctacatattcaggattcctttccattgttacaaatttggcctgttgaggcaactccatatgtgttgtcggcccatcccaccagtttggtccttt

SEQ ID NO: 7249 - DNA, 3216 bp, Heterodera glycines
  unsure (1)..(3216): unsure at all n locations
agggtttacccccntttcctcacccattttttcgaaaaaataatccctagaaaacattacttttggaagcagaaattttttttcgataaatgaggtgggaaacataaattttactattaccaaaaaatttctaacaaaaaatttaaaatttttttttatataagaaaattacaacggaaaataataaaaatttcagcgactttttgcgttgagtgatgcctctcctaatcagaacattttgatttaggccgcgatgcgcatgcagaaccctgctggcctcatggggacaatgtatgcgcctgccagcggtggatttttcctgccacaggccatccagaaccaacgtgctgcgccgttcatgcaaacaccgaatctgtccggggcacaaatgcgtggcgctgtccctcgctggaacaatatgggcggtttcagtgaggagtgccaaatggtgtctttgtttggcatttccattttttttgtagatcatccaatgcaaggctacatgatgggtccagctggtggcggtcagttcggcggcgctaaccaaattgctcgtggaggacctcgctccggtggtggcggaggaatgcgtcagtacgggggacaaccgcgccagcaacagaaccgcatgcctggtatgggcggaggccatcagcagcaaggaatgcgttaccaggtgaaaacatgcataaaaaccgacacgcaaaaaaaggggtacatggggcgagactgatccaggggggggactgatataaattccaacaaatttcaaaaaaatccgccaaacaaaaattagaacaaaaagattttattaaatattaaaaatgaggatggtgttcgtatattggacaaaaaacttgtgcaccgccccaatgtttttttttcaattgcagggacagccgagaggaatgcaacaacaacagcaggctcaacaaccacaaattgcctattcgtcgtatccgcagcagcagagccgtggcggcatggcaccacagatgggtggcggaggcggtggaggagtcaaagctgaccatgcgatcactgctacacaccaggaaccgttgaatacacatgatgcttaccgaggctgccatcactgtatgtattgctgtctgtcatcaattaaattcacctataattttttattttttcctaaatagggacaaaagcaaatgtatggtgagcgtctgtacgcgatggttgccagttgcttccgggacggtgatgtcgagaaagttggcaagatcacgggaattcttctcgagatggagaatgccgagattttggtcggtttttttcatcactcacaagcatagctgtgcgggggggcggttgtgacgccgaacgcaaggggtcggcgggtgtcgaacgcacgaggcggggggagggttgagaaaaaggaaaagaaaaaaagagaaaaagggagcggcaacatcaaggaaatggtcgcgaaattgcgttcgactaaccctgaggggtttctcgtcgaacgcaaaaaaatgaagacttgaaaattgattagtttctttaagaaatttcgctaaaattttccaatttttctgcgactgacaccattttcctcctgcgttcgacgaattttgctgaagaaaattcgtcaaacacaagaagaggggctgaaaattttctcaaataaaatttgtctttcatgtcagattttcccaaaatggcatgtcattatttttttgttatttagttgttgcttggagacgaggaaatgttgcgtttgcgcgtggacgaagcagcaacagtgctttaccaggccacgggtcagaaggaggcgcagtaggataaatgaagtggatggattggatgaataaattgatgagtaaaaggaaaaatcaaaaaaattgatatgttatttggcttctttgtctgagtaaatgcttatctgttaaatgtgttgaaaaatgtttccatgggttttctgctcgcaaatcacgaatcgggcacacatttccgactcccggacccgaattcgaacaaaaactcgagaattcaaattttcgaatttcatatttttgcttcaaaccttatttaaatacatgaaaacgaagttaaagtcatagtgcttcaatataaaattatttaagccatttttagactaaaaacggaaattcgaattttgggcttgtgttcgaattcgtgtcagggattcgagattggtcgaaatgggggtaatataccgatggtaggatcactttttttgaaaaaaatatttaactgtcggaaccgctgaaccaaacaagaaattcaaaattcttttgttcctaaattgattaaaatggttggaaatttagtcaaaaactattgcaaaagcaaataaataatggtcattcagtacagagagatcatgttaagtatgttgaaatttttttttgcagtttgaataagtacatacaaatcggagcagttgagcttgaaaaacacacaaatatgttacacatggagaatacaatacatgtaagagaacggatttctcttctcctcagaactccgccattgcgttggtcccgccaaaggtgcgcaacagagtcatcatttcggcattgccgcctccttcttcggccaagtccattgcgcgtctgccttaaggggggggggatatataatataaaacagtgaaattttgtgttaaacccaccatctgcgccaatttgttctttgtccgcgcccttttccagaaggagtctcgccacttcagtgtgcccattttcaactgcgtacatcaaagggttgtagccaccgccgtccgtcttgttaactgcagtgcccatgtccaccagaaaagccactgaaaaggaaggttgaaaaattatgtttgaatttgatgtcaattttctacccaccaacatccagacgtcccgcaccgcttgcgcaaatcaacggggtcttcccaaagaattcttgctggtcaagagccgctcctttctcgacgagcactcgacagacgtccaggtgtccagcttctgcggtgagcaacagcggaaaaaattgtcctgaaatgggagattgattaaactgcgcgtatttgaattgaaacaaaaatggaaggagtgaagggaaataactgttgtaccagctgctggtagccgaataatagagagtgattaaaaaaggcatttttcactccttttatacacattttctcccccaaaaaagacgagttaggcaatttattttcgatttataggtaag

SEQ ID NO: 7250 - DNA, 3983 bp, Heterodera glycines
ccccccccccttaaggcagacgcgcaatggacttggccgaagaaggaggcggcaatgccgaaatgatgactctgttgcacccctttggcgggcccaccgcaatggcggagttttgggagaagaaggaaaccgaatcggatcggaggaggacgaagaatccgttgctgttcaccaccaccatttccattttcctcctcttccaaaaccgtacgctttcggggcacctcgtgccgcggcatcgctcgtccaatggcatcccgcgtttgcatggcattttcaatgacgacagcgtcgtcgtcatccgattccaattcgagaagcggtggacgtggacgcttattgttgttaccattggtgctgcgcagctttgccggcgtggaggagactttgttgttgcttccaccactaccaccaccaccaggtgctgtggaaaaaaagtagtcaccaaagggatcgtcactatccacaggtcccccccccccagaaaaaaaaaaattattttttaaaaactgaagtaattttcatcacaaaattttgaaaaatctctaaaaaaaatttcaattttttctttctttctttaaattcattcaaaaaatttactacttgtaagaatttttcttgaaaattccaaacaaaaacatcactaggacattcgacgcaaaaaaataatgaaaattttaagaaaaaattcaaaaaacgattaaaacccaaaaaaaaattcttcatgaagcaacacgatcggtgcttttttttaatcttccgaataaaaattgtttggaatagtcatttttgctaatgttttattacactttttttgtaaatttttcttacggtttgggggaggcggtgcatgacgaagcgcgtgccgatgctgcgcctcggagggcggcggcccgtcaacgagagtttgtccgacctgttcccgttcgtcctcctgcagatgacgtttcaactccatgtcaccgccctcacaatcgatgtaagtgcgatactttcggcaccaaaacttccactgaggtaaaaatttttttttttgaatttcagaaattttttgtaatgaatgatgcactccgctttttaggtaaaaataaaaaatatttctcgtaggattttttcctttaagaatttttttaattttcgggagggcgggggggtggggctgattattacacacagcggcatcatttcctccaaaaattctaccgcccttggccccgacaacatctccgctgctcaaattcgccacctcggccccattgccattgaatatatggccaatctcttcaatctgtccatctcttccggcattataccacaaatgtggaaaaacgctaaagtcattcccatcccaaaaccgggcaaagaccataccaaccctgccaacttccgtccgatctctcttctctctccaatcgccaaaatccttgaacgcctactactcccctctctcaatacacacctcccacccgcaccacaccaacacggcttccgccatggcttctccactgtcaccgccctacattctatttaccgcttcatcacagacggtctcaaccgaaaacaaccagttgagcgcaccgttgcagtagccctcgacctctcaaaagcatttgacaccgttgaccaccgattactaatatctaatatcgaacatctcaacaacaacactccctgctcatcacaaaagatggctagccaactacctcggcggtcgccaagcccaagtcaccttccgcgacactacctcccccctccacactatccgtatgggagtcccccaaggcagcgttctctcgccaacccttttcaacttttacaccgccaacttcccctcacctcctcccggcattcaaatcgtcacatatgccgatgacatcaccattttggcccgtgccacccaaatcaattctgccagcgaccaaattaactcctttcttccacgtgtcatttcctggctcaacgatagaaagctgatcctctcaacctctaaatcctcatcgaccatcttcacgaccagttcacatgagcaccgcatcgacccccatatccacgccaacgactgtcctatcccagtccttcgtaatcccaaaatactcggcatcacatttgacccacaggtcacctttaatgctcatgtgtccactctccgcaccaaacttcaaaaacgcaacaatatcctccgtgccctcgcaggaacaacctggggccaatgcaaagaagtcctctccaccacttacaaagccattggacgctcattactaaattatgcagctccaatttggtctccccagctggctgactcccactggtcaaccctccaacgctgccaaaactccgccctccggacaaccactggctgtgttactatgacatcctctgaacatctccattcagaaacatccatcctgcccgccaaagatcacaatttccttctctcacaacaattccttcttgcctgccgtgctcccacccatccctccttcgatgttcctcgccctcgtccatctcgccaaatgaaatggaccctcgagcaccgtttcggccatataatagactctaccctatcagatacacgtggagaaatcctaccggcacaaaaactccttcacactcgtatggttgctacaacaattcgttcctccaccaaccgcatccttggcaagccacccccacctatcgacaacagcgaaacttccctcccgcgtgtagcacgctcacgccttgcccaactacgagccggcttctccccgctgatcaacagctacaacgccaaaattaaccctcacataaccaactcatgcccagcgtgcaatgccaccccccacgacacaattcatcttttcaactgcaccgccaaccccactaacctcacaacccaaacgctgtggacccacccccgtctggccgcgactttcttgaaactcatgccagttatccctttcacccagcaaggagtcggctaacaacaacaacaaccgccggaccccttctttcccaaaagttttttgaaaaagcgcttcgaaaaaagtgatgtgaaaatcaaatctgaatttctattaatattcgatgatttagtccaaaaatgattaattgtttgaaataattgaagaaaatttgtttgaaaattttcattaatttaatttattaaataaaaaaccaaataattttgtattattttcacttgatataaattaaaatttgaatttttttttaaatttttaaaatttttttgaatttttaaaatttcccggttggtcccggttcccggtttttcttgcggtcccggtcccgaaaaaaaatcgaggtcccggtcccggcttctcaggtcccggcaagtcccggtcccggttttggcaaaaaatcccggtcccgtggcactctagtaaaaacatctatgcaatttaacacaaatccggcacatcgccctcggcgtcaacccaattgcatgaacttggacgacagatgaaccaaaattttcactgatttcaaggttttcggggtttgtgtgtaagcaaccccaaattcaaaaaaaaaatacaaaatttttcaacacatacaaaccccaatcattctttttttgttgactcatttgactatttttcaattcgatctcatacaccatcatttatttattctaggacaaaagccgctcctgttatttcaaaaaataatcctgatcttcaaagatctccaacaatttctgacactaatcaaactatcaatagaccaattccagaattaaaatttataggaattttatcaaatgttcgatcaattatgaacaaaattaactccctcataatcacacttaacactgaaaaatgtaatttcatagtattagttgaaacatggttgaccccccaaaattctgagattttaaatgcagcaattcctgaaaattaccaaattttttcagcccttagtaaaaacaaacgaggtgacggagtttcaatcataatagaaaaaaaatttctgtttattca

SEQ ID NO: 7251 - DNA, 1436 bp, Heterodera glycines
aaaatgatatacttacacttctgctcttggccgagtagtaaaattcggtttttgggtcatggtaaaagccggttgccggatcgtagaaatagcccgagctatgctcatattgaaattttgctggatcgggctcagctaaacaaaaagcaattaaaccaaaaaaaacaaaaatttcatacaacaaattggcaaaattccaaacggagtgttcactgaatttgcggtggaagacgaagaactctgattatgagttgtttggtcaatgatttggacatctgaaaatggaaaaaatttgttaaattttgtgtaaattatgaaaaaaaaatccaataaatatgcaaaaccttcttgcgtttctggcaacaatttaacgcgcccttcgctcaaaactttggccaacgaatgacgagaaaatgagacaaacactaaagtaaatagtaatattaaaaacaaaatgatttattgatggctttcaatttttcatatttttagtgtgcattgaagcaaaatcaaaaaaaaataatttttttgaattttcgactctttgttcgagaccggggttcggagttggtcgaaaatggacgccaaattgtgatcagcgacaaggaaaaccgcctaattgtgagaaattttcagggcatttaaaaaaaagtttttttttttgcaaaatggcgaggcaaagagtaaatcttaatattataggtattacccgttttctaagctacaattagacttttgattaggtgcaattactagaaatttgattttttgaaaaagaggacagaattttcggggaaaaggaaacttttttacaaaggcaacggcatttcgacaaattatagccaattaaaaaaggaataattttttggttttcggtaccggcacaattgtcgatgtataaacatgttcgttgcagcttatggtgggccatttctgcgtcaaacagtgaccccatttgaatgaatgcgaacagtcgcgaggcggccaaacggacgttcaatggctcaacatcagtaaaacggacaaccgcatgacggacagacaaatcatcggcactcgcgggcagttcacggattaacaaagctaaaaaaagtaatttttttagttaaaaaattttccaatagtcacctaaatcgttaaatggcagcctttttaagagttttagaaacgaaaactcaaaaccgctgaagatccaaaaacaacaacaaaattaccaaagaaaaaaaaatttcaaaaaatgcccaccccctaagctttttattaccatacttttttgtcacaataaatatcattcaaaaaattactgtcgcatggaagggtgccaaccatcgtcaaacccttggcgtccaatgcaaatgcttcgcccttggcccgtagtgtgccgcatttgaagcagttggcacggccattgaaattgttgataaagcactaaaagg

SEQ ID NO: 7252 - DNA, 3341 bp, Heterodera glycines
  unsure (1)..(3341): unsure at all n locations
aaaaaatcctcattttttaaaccataaaaaatgcaataaaatcaattaagagtcatatttttcgtttgaaacaatcaatgtcatcaatttcttgtcatttataagcattttatggaagtctgagcacgaaaaatcgaagttgcacttcacttgggccaatgctttcactgtgcatctgttaaattttttgcttttagattgctctttttgtagcgcgattttccaaaaaactttttggaaacattgggggagggggtccggcagtgcctataggcgctgccggaaaaaaatttggattttgagtgcgatttgttaacaaattttgtcaaaaaatgatttttactgaggatttttcgaaaaaatgtttaagatttgaagaaaaagttcgaacattttgccaaatatacctaattttaaaaaaatcatgcgtttttgtcacttttttaacaaaagacgacaaaaatcctcaaatttctcaaaagcttcacaaaaatacgcaaatcctcatttttcaaaaaaatcctctttgaccctctaaaagaccacaaaatgcgctgtccaaatggcacattgctaaccgcgctttttcctccccgtcatcattggaagaagaagcggaaacgggaggagaagcaaccgcagcattttgttgatcggcacttttgcttccattctgatccgcttgctcttcgctcggttccaacgcttaacaaatttataaatttacacatttgagtcttttaatccccccattttgtgccattctttcccatttgatgccatttcaccctcttttgttccattcttcccccatttaaccattgatgccattgtcccctattcccactacatttgtcccattctcccccaattgatgccattgcccctgccattttcccattgtttcccattttgtctcattcttcccaattttgtgccattgtcccccaaattttcttccccattttgtgtcattcttccccacttttttccatgttgccaattccttcctcctttttgtctccccatggcttttcctcctcctcctccgtcccctcatgctcttttccgccgttctgttcgcttctttttcttcgcctctttttgtactgctccccaatgtttcgctgcatcgctccgccaaccgaaggcggcggcgtttgcggtgaatcgatgtgcgcctcgtgcgaattctgcgagtcctcatctgattttgttgaatcattttcatagaattctaactgtattatttttttagaatcaatttaaacgccgcctatcccaattttttaaaaatcaaatttaattatggtaattaattatccgatttaaacaaaaacaaatccccattttaattatgtaattaatcagtgattaaatttttaaaaatattaatcccactcccaagcaccctttaaaaaatcattagtaagttaattgccctttaaacatttccaaactcattaattaattaactaattacccccccccccccctctcccaccgtccgttatgccaagctgaagccgtcgctgtgcggaggagcagcgtgagctggcacgtgagctgcgctgggagcgcaacgaagtcggccccttacgatcgaatgccttggaaaaatcataagttcggcggccaaaaatccaaaacttttggtcgagaattggtctcgagaggaactgacaaatgggacggagacaaacaaaaaaggaaaaatgacaaataaaaacttgaaaaatcattttcccgtggatctttttaaaaattatttattttataatttaatttattttgttaattttcacattcattgatggcaattcaatgcgcggaagaagctgttgtgccgcgatttgctgctgctgctgttgcagtgttttctgttctttttggatgccatccgacgcattctcaaaaaataaaataaatatttatttatttttattattttgcattttgtatttttatttttgccatttgcctccaattccttttccaattcggcaatttttcgtgtcgcttctgccaatgcgtcggtcgcttctctttgctgcctaattataatatttaattgttttatcattttaaatcaaattttaactttttacgaaaataaaactttcaaaaatttgatcgaaaaataaagcatttctactctttcactctctttttttcttttctctagcattttttcagtaggcaaaaattcgtaggcgaaatgtcaaatgttggcttagtaggcgaaacgtccgatcttggcttagtaggcgaaatgtccagtaggcgaagtgtcagtaggcgagatgtctagtaggcgaaatgtcaaatgttggcttagtaggcgaaacgtccgatcttggcttagtaggcgaaatgtccagtaggcgaaatgtcgtcgtgccgaatatccctgtttttgaggactcaaaaatgtttttgttggtaagtttttgatttggaactgttggttgatggaatgaatttgttttttggaaggttgacctttttcgccaaattttttgcctcttcatttttgtcggcacatcttaaaattttctgaaatttgttagaaaattttttgaatcctttcctcttcaaaaatcttccagaaaaaatagactccagcatgaatttgagctgatctctttcggcggatatgtccttcaaatcattttccaattgatggattttctcttgaaattcacattttggcactttttccacttttttgaaatttaaaaatttcttgaaatatggttctccagcaaaatttggtgtccaaaattattcacttttattgggatttgcttttcgttgtaaggaaaaaatttgcttcccatgggggggtaccatctaaactattaccctccttttaaatagcgcctttaaatagttgtttattacacacaaatacaacataatatacaatatagacatatacatacatataatatatacatagggctgacaacgcggaataatgaatataggtccgaacaacacggaataatgaatgaaacacgcggggcacgacaatcaatcaatcaggttgcactccttcttcgtcggttcgcttgtttctcccagtcgtaagggaactcgcggatgccattcgtgttgaggtagtcgcgcagaaccccgtctatccattcgtatttgggccgctggtaaaactccaggtcgtcctgtgggaagaggggggggggggggtaattaggaataataaaagcggcacaaaatgacgcataaaacgcacaatgtgtaaacagatgtcgtagaatattnggcggcatntctttcacagtgcatgcaggggncccgttgtgcacttccttcggctt

SEQ ID NO: 7253 - DNA, 3275 bp, Heterodera glycines
  unsure (1)..(3275): unsure at all n locations
ctgcannggtcttgagaaaaaattaaantttnntatttcatttagtcatggggattacacacatgcacatgtggtgtagtggttaaactttctacctttcataatttttcgcctgggttcaattccccacttggatagaatattcctcacattttctttaccattattttaattaaaattttaattttaaaaaatattccaacttttttctttcattttaagcatcctaaaaacccaaaacttaatcaattggtcattttttttacaaattctgttaacaaatcgcattaaaaattacaaaattntttcccggcggcgcctatcggcaccgccggccctccttgtcccccaaaagtcttggaaaaaacgtgccgcgtaaaaagcggtgttgaaagcaaaaaaggtcattgatttacattaatttacatggccggagacccttcgcaaaattggaaaattggccgctgatcccttgttttgcaataatctgaattttgaggtctacatctgaattttagtgttctttatcctgaatttgaaaaaaaaacttggtcaccctcaatatacatatacttctgaacaattctaatgctaaaaaacaggcactcgcgcgaaaactgaataaaaattttgtatttggaaaattttgtccaaaaatttttatgttctaaaattaccggtttttaccggtaccggtaccggtaccggtggaaaaagttggtaccggtaccggtaccggtttttgcagtaccggtcagtaccggtaccggtttttttgcaattaccgattaccgctcaactctaatttaaaatcattaatggtctaacccatctcaaaaaagatatttttcctttaatttccgatcactttccatacaatttaagacgtaaagttgtgttaaaatcacaatgcactaaaacatcccattcttttattaatagaactgctctaatttggtccaaacttaacaaagtgttaacagatgccccgtctgttgactgcttcaaaaagcgaatacagacgtggctggaggctaacaaaatttaactctaaaagtacccattcttccataatactactactattttataattcaacgtgtaagtggtcaccccttcgttggattttattttatttgaataaatactattaaataaattttttcgagtctcaagccattttactggcggaattatttgccaactacatttttccatgaattgtttattatacacaaatacatagtataggtcgaacaagtacacataatatacaatatagaatatacatacatataatatatacatagggctgacaacacggaataatgaatataggtccgaacaacacggaattatgaatgaaacacgcggggcacgacaatcaatcaatcaggttgcactccttgttcgtcgattcgcttctttctcccagtcgtaagggaactcgtggatgccattcgtgttgaggtagtcgcgcagaaccctgtctatccattcgtatttgggccgctggtaaaactccaggtcgtcctgtgggaagagggggggggggtaattagtataattaaagcggcacaaaatgtcgcataaaacgcacaatgtgtaacaagatgtcgtagaatattggcgggcatttcttcaacagtgcatgcagggcccgttgttgcacttccttaggcttgtggcttagacggagtcgtttcattttgcctgtctgaaaatgaagggggaaatggatatttgaaatcccgcgccaaatcccctccgacccacaaaactcacgcggcgttcgctcgtcacatgggtccatggcagcttgccggtgtacatgtccaccagtgtgtagaaccaagactcgatgtcgtccgctcggcagtagtcggctcgcgcgtgtgctgagatcgatgcgtacattggcgttccgcggaagtgcgtctttgatctttgttttcgtgctcgaccctgtgaaaaattggaaaaaattaattatgcgagaggaatgggcggataatctctgctcacggattggctgatgtaacggcgcgcaagtccaaagtcgatcaaaaaaatgcgtcggctctcattggtctccgcgcgtccgatcgcggcattctccagtttgacatccagatgaaggtagtcaattttgtgaagagcctctagcgcatcgagcagttgaagcgaaacgccaattgccgtcccagggctgaacacgtcgcccgccgcgctcagcagatcaaacaggccacgtccgatcagcgacatactgaaagttggggaaaaaattagaatttggcataatttgcgattcgggcgagagggattgaaaacaaatggcaggagtcatcaaaatgtgagccttttatacgcaaattctgctgggcactgcagcagccaaaatttcgccggatgatttttttggattgggatgtataaaaggaaaggaaaatgtcggttggtcactcattcccttcacagcgcgacaacaacaacaacaaacaatcagcaacgacgacaattgcgcaacgcttcaacacagcacatccatcacccgtgcacacgttgactccgatcacttctgctgctgctctccaatcaacacaatgggcttcctcttctacatgttcctggctgcggtgcgtacggagttggagcggtgggtttgggggtgggtggaattcgcgttgtgaatttggcttactttcagtgggctctagtaccgtttatgcgtccaatggacttttatgcgtccaatcaatttttatgcgtccattcaattttttatgcgtccaatcaatttttatgcgtccaatcagatatttatgcgcccaatggatttttatgcgtccaatcaatttttatgcgtccattcaattttttatgcgtccaatcaatttttatgcgtccattcaattttttatgcgtccaatcaatttttatgcgtccattcaattttttatgcgtccaatcaatttttatgtgtccattcaattttttatgcgtccaatcaatttttatgcgtccattcaattttttatgcgtccaatcaatttttatgcgtccaatcaatttttatgtgtccattcaattttttatgcgtccaatcaatttttatgcgtccattcaattttttatgcgtccaatcaatttttatgcgtccaatggatttttatgcgtccaatcaatttttatgcgtccaatcaatttttatgcgtccattcaattttttatgcgtccgaatcaatttttatgcgtccattcaattttttatg

SEQ ID NO: 7254 - DNA, 4553 bp, Heterodera glycines
ttcattataaacgcatttatcttttaacttatcttttaattttagccaagtactataccatttttaatttttgtcttgttctcccggaggagatacgagccggaacgcgccaccctttcatcacacattctcggcccctcactgcctcccgaacaaaaaaatgagggacagcgcgtccaggcatcgttctcccggaggagatacgagccggaacgcgccaccctttcatcacacagtctcgtcccctcactgcctcccgaacaaaaaaatgagggacagcgcgtccaggcatcgttctccaggaggagatacgagccggaactcgccaccctttcatcacacattctcggcccctcactgcctcccgaacaaaaaaatgagggacagcgcgtccaggcatcgttctcccggaggagatacgagccggaacgcgccaccctttcatcacacagtctcgtcccctcactgcctcccgaacaaaaaaatgagggacagcgcgtccaggcatcgttctccaggaggagatacgagccggaactcgccaccctttcatcacacagtctcgtcccctcactgcctcccgaacaaaaaaatgaaggacagcgcgtccaggcatcgttctcccggaggagatacgagccggaacgcgccaccctttttataaagtcacacataaaataaaaaacgctaaaactaacccgggggagatacgagccgaaatgcgtcaccctttcatcacacaacacataatccgttcatcattgatcttcattgccaaagaactgtccttcaacatgcgcacaatcacgttgaagtggaaggcacttcttcaaataattagattataaaaattcgttgttcgatttataaattaaccattttcactctgaatgatgctgccaagaaattgttgcatccaatcatcagttttaactgaaacgtaaaacaatttcttgaatctaaattgtatcagatttttaaataccaaatttgttctccggcgtctcaagagtatagactttgatgcagcttacgtacttgtcttcatctaccggtttgaacaagatgggcttatgctaaaaaggataaacatttggaaatacagtttttaactatttagtaaatttcaagtttaacattagttcaacagaaaaagaccaaacaaaaaccatggacgttttttacgcataattataaaatagactatttactagaatttagtcttatcatctataaaataaaattataaataatgaagcattctctttaaaatataaaataaaatattaccccttttttaaacaataaaacattcagcagaagtctggaagtccttccatttccatcatcaaaaggatgaattttgagctgcaaaaggagtttttaattaattattttaaaacatagttaaagatttatttaaacaaaacattttttgattttaaattatctcacgagttctagatgagcgcttatggccattttaatattttccagcgggtcctttggctgattgattgtttcaaccagttctttcatcgcacttggcactgcagcagcgtcaattgctgtgtagtcgccaacacccacaagtccagtgcggtaaattccacccccatatattcgtcgtctggcgattgcattaagttctttgatatgctgaaaagcaataaaacaaaatatgaatgctatcaaaaaaagcaatgaatcttgcgcattttgtaaagttttttgctatcactagggtcgcatcttatagacgaaaaatcttgaaatagttaaaaatagaaaggaaaaggcaacatagactgaagaagaatccgaaataatgaacgaacattaatcccattaagaattcatgcaacttaccccttcagttacacttggagcattaataatctcatagttgttcaacacctctttcagcagatcatcgtcatccataaacatagttttgccactatacttttcatcgttcgtccacgtcataaacattttttttggcggcctcatctagaaaaaatccgggatccatatttaaataaaaattatagtacttggctaaaattaaaagataagttaaaagataaatgcgtttataatgaaagcataatgggaaaaatgaaatgattagtaaaggaatgtcgattatcggaaaagtataaaggcatggccaaagtagatggcaaagaggaattatctttgtgcgtccccacaaattggcctaatttcggtgtaaaatgtctgatcaacaagtctttaccccaacttgatctgatgatcactcatttttttctagggctcgggtattctgattttacaaaaattttctgattttaaggctcctaatttggctcccgacttttggtcagcggacttttcggcataaggacttatcgacagcggatttcaaaggatatttcgacaataaaggatttttacagaaaataaaatatgatggaatttcgacagtaaacatgaaaataaatcttatattaaaataaattaaattttttccagtttctaaatttcttataaatttacatataaatgtgcattgctgtattgctaatcattattactagtgagaattttttaaaaactttattttgaccttttgcccaaatttgtgaatatttactctatactgtcgaaaattcctctatcgaaaagtcctcttaaaattttaaatatttctctcgaatattctttgctgtgaaaaatccggcgctcccaaattttacttaattaaatgttctgatttatcttcaaaattgccctcaaaatggccaatttttttccattttcacagcccaaaaaacacaccgcttttcagttttaaaacgggaattaaaaaatcacactttcgcatgtttaataaattctatatttaaagtgaatttgataaattaaataagagtgctaaattactattagggctgggatttttatgttttaacatatttttctgcgatttaattatgtcgagagaagcccaaaatagcattttctccgaacaatttttgatttagataaaagcacatattttggtgttttggcacataaaaatgtatcacacatattcggggtttgggacatattttggtatttagagaaaaatgtgtaaaaaaattaagaaaattgcaaaatatactcctaaaatcaattttttaaaatttatttcgaataccgaaagatttatatttcaggatttttagcaaataaaaatcccgccttaattattataaaaccagcggcagcacccccctaaaaaatgaaaaattttctcaaaaattcatctccaaaaatttattttttaaattaattaaaagcaaatttcaatttttgctgctttaaatcttcatttttgataaatattttcttaaatattttgaaaaatcacgaaataagggcaaaaatagggggcgaaatgtccaatagggataaaacattttaggggcaaagtcaaaatagggatttctagggtcggataggggcgttaaaaccaaaaattcccgaacaaaaaatgtgcttttcgtgcatttctggtcgagtttaagccgcagaaataagtaaaaacctaagaatcctaatcctactcatatgtaataagaaatgcggcaaaatttaattatatttttagcgttaaaatacattaatcatatgacctaatcaagacaaatgaactgttgttccttcatcctccatgtctctatgaattttatatttttgatttttgccaagatttcactggctgttattttgcccacaaattgctaatttggaaacaaaaatgacgttgaaaaattaatttgttcatttcataccgtacaacaaatcgattagcaactcattaataaaacagccatgccaaattggtcagactagtgagaaagcattgagttaaattgactaatagcaaaagccaacggcattttccaatcgatagcaaatggccccaaaaaaacaatttcacgcaataaccaaagcacaaaacgtttgtcagtgagtgagtgcttctgctgctgatgaagtgcgactgggcgggggggggggatttcgcaaatgtccgaaaatggcccttgagaaatggaccgcaaatgcccgaggcgcacatgtccgaccgcatttgttttatgtcgatgttacgtgaaggctcttggatagcagccaatgggattttgatcaccttaaaacttcggataaattaacggtatttaaggcgatcaactttcaaatactgcgtttgaaaaattgttaaaatgattacgaatttgacattcattttgaaaaattcgggtcgaaaatacgatttaattatgtatattagtgcaaaaaatgacaccacacacattgccggacgacatcggaatgtgcaggtgcgcctcggttttcactgctcggatggtcccctgattctcgttcaagtcgatgtcgaacggttggcccggctgtgactgccgcttttccttgtcctcccgacgacgaagatgaaagtcgggcattttgtcgtccaatacttcaaatccttctccccgaaacacgctccattg

SEQ ID NO: 7255 - DNA, 936 bp, Heterodera glycines
aaatgaattaattaatggtaaatggcattgcccccccccccccccccccccccattatgtgggggagggtagggagggagcagcctccccctccgggcgccaactgaatgaataaatttatatttgttttgtatgtttgttttcatatgaatttatggatgttcggcatggcatcggggtaataaagggaaaaaacgattgattttaaaacatgattttcaatttttaacaccagaaaccgaaaaaaatcggggttgaccgattaattttaaaaataggaacgtgagaaagaattttatttgaaaaaatagggtttcgttttactgagaaattttgcaactcaaaatcccgaaaaattcaaaattcgccggggaaggagggtaaaaattgaatgaatttaattgcaaaagttttttttgggttaaaaactgaatgaattgaagtacaaagtttttttgtacaaacaaaaaccctgaaaatatgctgaaaagaaataggtgtcaaatttttccactaaatttttttttcgagggggtggggagcgtcatttttgtcgccgccacagactgactcggcattttctgatcccctcaaaaaggcaataaatttgagcgtgccaattattcgagattctcagtattgggaattaaacttatcaaattttttttactaatttaacataaataattattaattgagcggggggagagttgggcaaatcggggggggggggggggaataagtttacccaacgaaaagaataataatgcagcaatctgcgcccgcgggcggcaaaagcagcggactttgaccccgcgggacggggaacaaagcaacagcatccatcgactgtggcccaccccaaacactttcccccttcgttagcatttagcaataaatttgggcaagggggagaggggcaaacgacggcggcgg

SEQ ID NO: 7256 - DNA, 340 bp, Heterodera glycines
  unsure (1)..(340): unsure at all n locations
cccccctgcctacgcccttgatggggaaggaggttctactgattgttcaatggtttcattacagggcttcctttttcatgtaaatacatgtatttttttcttgattctccgtagcctacctaattaaaattgattgagcggataaactgaattagagtgaaaaaagaatatttttacaaatctccgtctgttttttgtaccaaaaaaatgtgatgaatttctgtttcaaaatttgtttctgaaaagtgtataaaaangcgtaaattttcgtcatttaatgaagaagccttggcaacattcgtaaaaaaaatgaaaattttaaattctcgaaaaatgttcg

SEQ ID NO: 7257 - DNA, 2570 bp, Heterodera glycines
gtagcagaagagaagaacaatggtttccagtgactgggggcctcggtcgacgtagtcgcccaggaagacgtactgctgctctggagggttgccgtgcgtgtggaagatcctctgcaggtccgtgaattgtccatggatgtcgcccacgacgacgaccggcggctgaatcctgacgagcgtcggctgcattctgaagatgtccgtggccgccttgcagagttgtttgagctcctcgtcggtgatctgtggaaaaaatgaaattttttaattgttgaaatgtcatgtcaaaaaaatcccacctcatccgtgaagcgttggacaggcgactgcctgaccttcctgatgatcgcgtccacgaagctgcttgacaggccatctccttgcacaagtgttgaagtcgttgccgaaggccgagactgctccgccgctgccgccgccgttgcatcgaagcagtactcctctcttgccattgttgcgccgggcacgtcgcttcgtgggattaaagttgcagacgatgagcaatatataataacaataatatgtgggcaatgaattatgtgatggaacaatgcaaatgcgctccttttatatacattatttccgttttcactatgggtcaagtccagtgcagtgttagacaaaattatcatttcgccaaatagcgtaactgacgtaattttttgcgcactaatttaaaatttacactggtaaattccttttttgtgggccagagttttttcactataaatcggtgccctagttattttccccgcatttcagttggattttacgggtgtttggatggatatgttcccttttttgaccatgccgaactcggcctcaaattggcattgctttcgccacgttttgatgttttagtggacaaacatttcgatggcaaaagcaaattggtaatttggagaccaatcaaaattcgaaaagacactgacgcggaaatgccaaaactgtctgtgtttattgaccatgccaattcaattgattttccattgcccgaccttccgctgcccgacaaaattcgctttaaggaccttcagatttggtaattgaaattcaaacattttgttgacgacaaatgtattcccttttcaggtacgacgattccgtcctcgcttttctccgtgccaatcagcaaatttgggacaaaactggcaccaatttgcgtttgaaaaaacaacttaaatttaagaaaatttaaaacttaacttttttgaaagcctaagtgttaataaaaaactaaatctgctgattttcaaaataacggaaaacgtacttccttgaattttcttaataactttttttcgaatttttctagaattttttccaaaccaggctaggtaataaagaaatttgatatgtcccggcgacgttttgtcctgctgctccctgctcggaatcccccattttggccctttgcaattgggattttttttaatttccgggggagggggaaacgataactggcgaatcatctgcagggggaaacgtattgccatcatccattggcacaaattcacgtaacttctaaaccgttatcatattttgttacttcgtttactcccatcagcgcaaattgtgccatgtgaattggtcaatgaacgaactcgagaaaaactgacattggaggaaggaccaaatcataaatggggttgaagcgatgccaaattggacaaattgttcagtgggaggacgaaaatttgacggacaatttgaacaatgtcaaaattcgtttgtgtcgcgtcaaaaattggattgggtgagcaatgaaaaaagaattttaagaaaataatacaaattttcaacttttccgtatatccaatctttgaacaaaatgaatttatgccattgtccccatcagcggcgtgtcaaacaaagaataggacgtcgaattgtgcggaagtgaaatataattgagaaatgatttaaagcccgggcgcccgccggcgggcttttgcagatgcgcccggtccggtaaattttgaaaaacaaacgtgcccgattaaacgttttcttaccggttaattgcaaaccgctggcccgagggctaaaaaaatgggtcggggtcacttcggcgcggccatttcggcgcggccacttcgacttggaaattttaaacagatttttattcgaaattggcaatttttagttaaattacactctttgaaaattagcatctcaagaaaaatcatcattgcattgttcttttctgatcactgattgctatgtgtatatattgtatttttgctgtgttgtgctgaccggataaataattggaactgattttttttagtgcaaatcccacccaaaaacatgcataattaccccgtcacatagggattagaggtcgataaaatctgcatttagggtcaaaattagtaatttaaaaaatcggcgcctgaaagttttgaaattttgaatgcaaattggtaacagatttttgccaaaattaaccttttttgtgattttaagccacttttacgaaaaaaaataagttttgtgagccccgacggcgtgccgacatgccgcgcccgggggaaaattggaaattttaa

SEQ ID NO: 7258 - DNA, 2691 bp, Heterodera glycines
  unsure (1)..(2691): unsure at all n locations
tcgctgaaaattnntgttaatttgaaaaattatatttgaagggaaggggagaaggacgaatagcaaaatagagaagcaatgaaaagtacaaaatgaagcaataagtgaaaatggctgcatatttatacagtccaataagcgaatggcaaaatcggaggaattttcaaatttcatccgaacaaaaaatttgtttatgcgcctttgtttttttatataaaggcgagtcaaatcaaatcgcattaccattcctcgctattcaaaactattttcattctttttcctctcccctctttttaacaaaatcctgcacttttttactttgatcgtcccaataaaaaaccacatgcgaattccttaaatataatttgcaatttttcgatattttctgtacaaaattttgggtcaaaaaatgacacactggtggtcagtgatcaggaaaacataaagaatcgaaaggggctttttcgtttggttcgtcatagtaaaaaaaagtgctaaaaatgccttttcgtcttttgcacatttcgcttgcctttttcctgtattttacattggcgtttcttttaattttcagcgaacaaacgaccaacgtcctaatttctgaaaccaccattctccaaatggctgctccctccattcgtctcatcaccacgtccaaggcgcctcctgcgacgggtcacaggtcggaacaacggaggccatcaaaaccatcttcatgttttttgttttttcagccaggcagtgctcctcaacaaccagacgctgtacatcagtggccagaccgggatcgcggcggggtcgacgaatgtggtgccgggtggagcgcgagccgaggcgaaacaagcgatgaccaacattggcgagattctgacgtacgccggctcgtccttcaagcacggtgcgtgagcaaaaacctgatcatccagccatcatctgtgaatttgcgccccttttcagtgatcaactgcaacatcatggtggccgcatgagcgacttccaggcggtcaacgagacgatcaagaacttcttcaccgaggacacgtaccctgcgcgcagcttcttccaagtggtcaagttaccgaagagcgcgtacgtcatgatcgacgtggtggcgatcgttcagggccagagctgagctgaagaacgggagaacgagcgcggcagacgaataacagagatgtacataaacctgtctattgtatatttgcgtgatcaatgttcatatcgatgtattgttcttttctgatcactgattgctatgtgtatatattgtatttttgctgtgttgtgctgaccggataaataattggaactgattttttttagtgcaaatcccacccaaaaacatgcataattaccccgtcacatagggattagaggtcgataaaatctgcatttagggtcaaaattagtaatttaaaaaatcggcgcctgaaagttttgaaaatttgaatgcaaattggtaacagatttttgccaaaattaaccttttttgtgattttaagccacttttacgaaaaaaataagttttgtgagcccgacggcgtgccgacatgccgcgccgggggaaaattggaaattttaaacagatttttattcgaaattggcaatttttagttaaattacactctgaaaattagcatctcaagaaaaatcatcattgctgtcttgaaatcagcaaagtgatggtaaatgagaagagtaggtggcttttcattttaatctcaattttgttgctagatacctaatcgtagtcagattcttagttttgctagaggccccattcaaaacgaatttcaaagccccaaaaactctttgaccaagcggtgaacggtttttccggacaattgccgtctttctcggtttcgaaaaattttgacttgctgtaaaggattttagcggacttctgtaaaatttaacgaggaccagaatacatacaataggcatttatctgattggcgcaacataatatatacatacaatcgtgatcagaacgaggacagttattacacgcaataatacaataggatcgaatacatgatcacatcaatatacaatacacgaatgtacatttgttgttcatctgtgcgctcttctgcacttcggctcactggcccgcaacaaccgccaccgcatcgatcatgacgagtgcattcttcggcaacttgaccacctggaagaagctgcgcgcagggtacgtgtccggggtgaagaagttcttgaacgtttcgttgacatcctggaagtcgctcatgttggtcaccatgatgttgcagttgataactgaaaaggggcgggaattcactgatgatggatgatgtgatccgacttttgctcactcaccgtgcttgaaggacgagccggcgtacgtcagaatctccccgatgttggtcatcgcctgcttcgcctcggcgcgcgctccacccggcaccacatccgtctttcctgatatcatcccggtctggccgctcacgtacagcgtctggttgttgacgagcactgcctggctgtaaaaagcaaaaaaattgagctttcacaattgttgtccactgtttccacctgtagccggtcgcagcaggcgccttggacgtcgcgatgagacgaatggagggagtagtcatttggggaatggtcgtttcagaaattggacgttggtcgtttgttcgctgaaaatttgttaatttgaaaaat

SEQ ID NO: 7259 - DNA, 1591 bp, Heterodera glycines
  unsure (1)..(1591): unsure at all n locations
tagggctgggatttttatgtgctaaaaatcctgaaatatgtaataaatatgtgctaaaaaacaaaaaataggcctaaatatgtgttaaaaatgcaaaaatatgtgctaaaaattggaaaaaccaagtgtatttacgcaaaaaaatcatatttaatatcagtctttatcacttttcgcccgacctccaattaaaattttggcgatatcaatcaatttgtaaagtcccggattaatttttccatcagttgaataagttccttctgggaactttgaaatccagtgacgatttaacacagcgttcgatttggctgctttaggcgcatttaaatatataaagaaattttctaaatgcttaagaaacgtaaagtagtcaacttttagggtgcattttcagattttcttgtattttttttacgatttttctcaaaaatgccaaaatatgtgcaaaatatgtgccaaaaccccgaaatatgtgccatatgtttttatgtgccaaaacgccaaaatatgtgtttttatgtttttataagtcgctctaaatcaaaaattgtttgagaaaatgctatttttgggcttctctcgccataactaagccgcaaaaaaaatatgttaaaacataaaaatcccagctctaatttttaaatgccaattttcaaagattataaattttaaattatttgaccaaattattttttaatggaaaagcaatgaatgaatgctatgacaaaaaaacaaaggctaacgaagctaatggcattttgttgaatatttaatgaaatccaactttaaaatatttttcataagaacgtgtatgcgttttaaaattatttagccaaattattttagcggaaaagcaataaatgctatcaaaagtacaaggaaaccaacaaaaaaaaagctgcccgttgaggtagttaaaatcgataaaaaatatatttttattataaacaagcaaaataatttattccttcttaattatataaaaaaattccaagatgctggcttattagaaataattgatcacttatttttctaatcaaatttattttaattcgaatttgttttctgcgataaaaatgccgttgttttcccaccggattggacagcggcgagtgccgtgcgtgcggcacgttcagcaacagatgcgcagcagcgagtgggccgcgacggcgacgggtccgtggcgagtgcgacttggccagcaaacgttcgctgtgcgaaatcagcgggacggtgtcgtcgaggcgacactgtgccaaaaaggaaaattcattcaaaaaaaggaaaagcctttttattagcgacaaaaaaatcattcgcgcgaaagcgaaacattttgtttggcatttaaaattatgggaacattttgaaaggtgccattttgttataaaaaagccatcaattgaaaatttcaataaaaaaattcaaaaaaggctaatagaaaactcattgagctatgaaatgatagcaagatcatttcatttttgttggnntcagaaagttttgaccaaaaatattttatgtttaattaaaaattttagttaaattatttttattttttatttcttgctatcattcgatacccctaaat

SEQ ID NO: 7260 - DNA, 3002 bp, Heterodera glycines
agcaaaatttatttacctgctcaattggcacgggtttggcaatgcccaaacggacaaattgaccaattggagcggcctaaaaacagaagagaaaagatgctttttgattatgagaaaataaaaaaatattttaaattgaaaataaaaaagttaattatataaaaatttaaaaaattccaacgtaaaaattatttaattaaaaattaaaaaacaaaaaaaaagtaaaataaattcattttgtgcaccttgagcacctccaccgccctctccaaactgctgctggacaaatcttcgccgttcacaaataaaagacgatcgcccggcacaattcggcctttttaataaaataaaaaataatattaaatttaaaattaataaatttaataattttcaatgatttttaaatatttttcattattttcccaccgtccgcttgtgccgcgccgcccggcaccaaactgcgaatgacaatgacccgctcagcagggtgggacgggtcctgaccattgaatgttcaaattaattccaatttccataaaatttccagggcaggtgggagaatgaatgctcgagaatggtgtcaagagtcggggcccctcggcactccaccggcaaattttaaagaattttttatttgcatgttcacacccgaaccgaggtccccgcaacaaaagtttttggaaattagccagccaaaagccatgttagccaaatgctcgaattcgaaactcgaaaacataaatgaaaactctttcggacttcagtcagtcattgtaccaaaagtttgcaagaatccgtgtaaaacccatttttaaagccgtcgaaaattttccgattaataagcaccgaaaaggaaggcaccgtattcccctcgttcggcacaaaattcccccaaattttgcctgatagtcggccacggaaaagccaagccctttggcgtccttgcgcagtgtgaccacaatgggcacacaatgccacaccgcaaagccggacagattctccagcgagcgggagcgcagccaccggttggcaccagcggcggacgacgcgcggcatcgtcgccgcgccgccgtgccgcccggcgacagcggtcgcgcaccgcttccgtcgtcttcgtcgtcgtcagcgacggaggccgccaaatcggccagccgaagctccgactttgcctaggaaattaaaaactcaacaatttccagtggaaaatctcagataaattaaatccgattttatggcgtccaaaaaaatgacagaaaaaagtgtaatttatatagataaaatttttatgatgttgaaattttccaagtatggcatttcgaaaatggcagaagataatgaatgtgacaaaaaagataaaaaaaattctaatttaatttttgtttacgagggaaattattaaaaatttaaaaaaacagtttttgctactgaaaaaacggaaaataattattaattgtaagctaaataaaaattgattataaaatatttgatcataaatgagatctgttttatttatttaggtatatagtttttttacaactttcgtttgccttgtaaaaacctctaaaataaatttttttcgaattttttcacgagctcttaaaatttctaatgatgaataaaatcactttgataaagtgctgatcaatggacatcaatgaggccaatattgggtaggccaacggcaaactttgctcggatggcatcacaaaattaatatgctcttaaaatgaaatttaaaattatttcaaatttaaaaaaaaaaattttaaatacccttttcagcccttcggcaaaaaatcagacggacaaattcgccgcaattcttttgcgcgccgttcaattcgttgcgaacgcgcacaaacgattcaccaaaaagggcagtttcattgacctaaaattttgtaataaatccgataaaaggattaaaattatcaaatttttggaattaatccgctaaaatttattttaaatttattaattaaactaaatttatcctcccaatgttttggcacctgtaaaagttcgtcgcccgctttcagtgcgcccgtttttgctgccggtccatcctttcgaatgctttcaatgaaatggtgggaacacagctgacttcctttattaaacaattaaagctaagaaatttgtgaaataaaaattttgagcattataaatgagcgctaattagttaaaggcaccaaaatttttttaaattttttcgttaaaaagaaagaaacatgtaattaattaatagcactgtcaattaggcgtaattaattaattaaatattacagatagaataaatttattaaatcaaaataataagttttatgaatatttatttctattattggtgaaatggcacccaaaaaataatatgcagctaatttttatatttttttcattaaattaaataaacccataattaattaatagtcctgtcaattagacagcaatcaatcaattaattaattagtcatacatttgcatggaatttcccacacagttattatgaagtgaaatcaaaaatttttcttatggatatcatgttgtttgttacataagggtaagaagcagtcagtctatgccatcgaaattcaattaattaaatttaatcctttttttgccaattttcaccgtcacaaatgtccacggtgccctgccattcgatgcccaatccgccgtcctccaacacacgctcgtccggcctcacatccaccacaatgacgtcatattcggggcccattcgagtggcccaatagctctgaaattaattttgagaatatttttacaaataaaatagaatattttccattaaaacttattgtaattaaatattttagttaaaatttttccgacttttatttttaaatatttatattcatttttataagtatttattttacaatttatagttaatttttaatattttatccaaaaagttattttaaaaatttgtccgctcctttttattaaaataattattttttttatttaaatttaaattt

SEQ ID NO: 7261 - DNA, 1698 bp, Heterodera glycines
gtaattaaatattaatagttatgagttttcagccttttcttttttaatatgatatattcatttttataattattaattttacaatttatagttaagtttcaatatttatcaaaaaagttattttaaaaatttgtccgctcttttttattaaaatatttattttttttatttaaattcaaattttccctcccccattaccttatagtcgaccaacgacagttcatattgttgctgagtttgtgtaattggtggcaatgccgagctgatgccgccgactgtgcttgaggaggcggccgactcattttgggaggcggcgacggcggccaattcctaaaaaggcaattaggcaatttaataatcgatttattaattaattgatataaaaaagtaataatgggaaggaataattatttattgacaattgaattgagttgccttttatttatattatttaaataattatttcattaagcatttataattagattaaaagcgaaaattttatttatttttcaaataatccaaatgaatcttttctactataaaaataatatgaaaacacaatgcaacattaattaggaatttttttgttttgcctgctcatgtagcatttttaggcacttcgcctgcggcgtgccctcctcaaatcggatcagtttcagccgcactctttgcccacttctgatcagtgtgcgcaccgattcggcctcaaattattatggtgaattatttttcttaaaagccgaatttttatttaaaaaaataatttttaatcttctcgcccaagtaatcagatcacaaatggaatagttgttcagaatctctgtgccggacataaaacggtcaaaatttttaatttttcataagccagaatctaatttttgattaaaatatggccaaattttttgattttaatttaaattattatttatttttaaatgattttcacatggctcagcccctccaggcttcgtccgttcacttccacaattaaatcgtgcagctgaatttggcgcgacagatgggccgacgattggggcaccagcgatttgatgaacacaccactgatctcttctgaacacagaaggggcaatttttagacaagaaaaacatatttaaaaaataaaataataaacaaaaggaaaaagccgaaggaaaggatttgtggggcgggggggggggaaagaacggagccaaaggcatttttccgttaaaattcttggaaaatttaaaagtttggcaatgtgttaaaattttggcaaaaaataataaaacactcagtctaaaaaattttgagtgagcccttttaaatttattcaattttttaagtttcctaatcatcttattaggttaaattaatccccaaaatgcccatttaaatctttttggcacaatttcaaaaaacgaatcgattttcgccctatagtttcgaaccctttaagatttatccaattttttaaaattttcgaattactaagaggtttaagcaaacccaaaggtccccctttacacaattttggcacaatttcaaaaaaaactaatcgattttctcgtgccttagttggcacaacgacgcttcactctcccttaaattcgtacaaattgatcgcccattttaggccgagtttcccacccctttaagcggcttcttcttctggggagattttcttcgcccttggcccgcccctctcatcacca

SEQ ID NO: 7262 - DNA, 2574 bp, Heterodera glycines
  unsure (1)..(2574): unsure at all n locations
tttttttgagcgttttaagccatttttagcagtttttaatgcatattttagtgtatatttgagcatttttggggttttagtgcattttttcgggatttttagtgcatgttttatgcgtatatttggcattttttagtgcatacaacttataaccctattaataatatattcatataaaaaagactcatcaataatagaagagtttcctttttttgtagttttaatattaggttttaacatttatacttattttgaaaaataacttgaaaattttgttaatttattgtttctcgaaaatccctgataatcaatttttcagtatttggacattgtttccggtgattattttttcaaaaattttcataatgtccatgtctttctcaaaaattgctttctattaacttttcgctattgttttcataaattttctctacacacatacgggcaccgaggacaatttataatccttaaaaatgcccaaattttgcagttttgagcatttggtcaggcggtgccgaaaagggcagattatcaaaccctgaaattttaaaattaaaatttttatttaaataatttggaaaatttaaaaaactcaaaaatttctcaaatactcaaaaataagcactgcctaagaaataagctcagttggggggggggcactgttttacatatgggaacaaagaatttgactatttaatatttacagcttaataagtaaataaactttagatttggagggaattgccgaccaggttcatcaaagtgaagggattgtgccatcggtgaccaattattgaaaaatccaattcttctctctttaacttaaactttattcattgcaaataattttctctttgttaaaacgagcttaaatttcattagtgaaactgttctccaaacttgaaaaatttaataattattttggcaaaaatgtctctttaattaaaagttttaagatagaacacaaaagggattttagaaatttgtacaatttcaacagttaaaaaatgtttatttctcagcatcgccggtctcctcatttcttaaatttttttttaatagcgatgactacaaaaatgacctttcggacaaattctgttaacaaatcgtattaaaatttaaaaattttcccaagcggcgcctattgtcaccgcttaaccccccccccccccccggtgcagaaaagtttttttcaaaaagcgcaccgcaaaaaagtggttcaaaaagcaaaaattgtcttgaaattccgactttttaaaaaaaggagatccaaaatttggtacaggccagggacgctcgtttaaacgtgctttttcaaaattccataatggctaaatttagtaaacttggaaaattagagaaattctaactcgtatcgttaggtttgaggccgcactttcacgtttaaaaaattaacaaagggtttactaagccatacttagtcgttggtctaactttttctctgtccattttctcttcaatcacattcgaagaagtccgaatcgatgtccaaggctaaagttaatcgtaataaagcagcatggaattattcaaagttttttgcttgcttattgatgaaaaaatttcacttttctcattctgtaatgcacaaatatgagaggtttttgagcaaaaaaaatttgttgagcctatgtttttagcaactataaattgcatccctagttatgaggccgagaccaaagtgtcaaaatggattggccaacatttgcgaagctgacattatcaaaggattcgaattttatcccaaaatagtttgtccagccaataccctaagctattataaaatgaaacccgtgactttgctcgagtcgagaactctcggccgacactctcgatcagctcggacctatcccccaattaatagctcacacactttcaggacaactctgaaaaaagtagatgtcactagaagcaagaagctcttcgcgagcaatggccatgtcaatgcggaaaaattcgatattataagcagtgggcgcattgtgaagaacggcaaagtcagagcggataaaatcatttttaaatgtgccgggatcagttccattagtcgaggccacaaagaacgctcgatagagtttgaattcaagcaaaagcactgtaataaaaattaattggaaatttactaaattttgtgaaataattcattaaaatatttatttttaatgaaattatagtttttattgtaaaaattacatttcatcagatggaaaagacacgcgccggaaagattgccagcacatttctgcaaacgttcaacggcttcatcaaataagacagcctaaatacgagctgctgaaggataccggaattttaggcaaaattcgggacggggaattacgggaccaaaaaagggaaaccgagaaacaccacaatgccggtgggaccaaaaatacttgatcagctccggtcgagatacctgtctagcagggctggacataacttgttttcaattacggaaactcgtaaccctanactccaaaaaatgctgtaatttccgtaatccgcaattacgtccagccctgctgtcccgtgaaagatcagtcagaaatcatg

SEQ ID NO: 7263 - DNA, 1424 bp, Heterodera glycines
agatgtaaattcaaaaagaaaaatcagttggcatgccaaaagcttcatttcttctcacaaagctttttgaagaaaaacgttagcatgaaaatctcagaaaatgttatttaattttgaataaataatgggacacttaaattagtatcatagagaaggagaagaaccaagaaatttagcgattttcatgagacgagactcagaagaataaaacataaacgggacatatccaaaaaacatattttatatgcatcaaaaaaatggctggcaaattagcaaaaaaagggcaatagcagcctagaaaatcgatcctaattaattgtattaaaatatgaagatttgtttttttaaatttttttttctacgtaattttaaaatttgagcaaattcagaaaaaaaccaatcacaatcagcacaaagccttgcatacattaaaaaaaatttaaaatcaaaaaaccccttgttatgcttaaatttttgtttccaattttattatatttgctttcataaatatttgttttctagttttaatagaacctctgacaaaatgagttccgctgctgctgctggcgcggctgtgatgatgagcaaattcattttttggaactttgaaatgcctacattttttaattaaattaattacttgaaatattaagccctacaaatcttgcaattttaaaatttaattttataaaataatttttggttttaattaaacgcagattttcatttttttttcagtcgaatcatttttggtattgaaactgttcaaaataagaaaaaaaaagtttttaaaattaagtaaaaaaatttaaaaataattttttttaagacctaataaaatataggtattaaaaaaataaattttaactgtaatattaaaaaattattcataaactctaaatcttgtttctttgactctggaaactttaaaattgtatttcatatatcataaaatgagactttttcccgaaacattcgtaaaaggtgtgccattggcacttttacaaaaaattttaattttttattaaaatttaaatgctcaaaaaccctcgcgaatgcaggttctgacggtgcaattgactggttgcctgttgttgacgttgctgctctgcaaggaaactgctcaactgttcggctggcgatggctttacggcctcattggcattgtgtttaagtgtgattctgttcagccctggcataccgtacagccatgggaactgttgcaattgctcagagggtaaaaatacttgctgcggcataatttgctgctgttgcgggtactgtgctggttgcagttgtgattgttgttgtgcgtactgtacttgttgcggattctgtagaaattgttgtggtgcctttcccttatcattcatctgtgcattgtttttgttgtcatcattcattggcattccgtcacaacgcaa

SEQ ID NO: 7264 - DNA, 2400 bp, Heterodera glycines
cctatttttaatacaataagtttgttgctcagttcaatgactttcatcatttatctgcttcttggaattgcagtacatataaaagcttcaggtaacctcaagaatgatggaattaggggtggtaaaaaatttacaaatatttttaataactttattcctacaaaaacaaaaaaaaagtcactaccataattcgaaaagaatttccattattaataattagtcctttttagtgactacgcactttattaattctcataaaaattgtttctaaattcataaaacgtttctctggaaaatggtcaaaaaattgatgttccatcctcaaaaaatttccggcattttttgtctcaatgcttaaattctttgtgggtattacaaaaccaaaacatattggtagcataatattcattaatccgttggcaaattttgaatatatttttgtattgtatcggtcctgaatgaggtaaaatttttacctaattaacgcctttaataggtttgccgtccgccgattcgttcaatcgtcgcacttttcgcgcacttttttgcattatcattgttaatatcggcggctatttctttacactaagttgttacattttgttaattcccacaatttcatcgccgatcactgcttggttttaccaagcaattacagcaattccttttaacattggctcagcatcaagcggacccattttatactttacgaggtgttttttaaaagaaaaatatattttttaatttaacttcctatttcagtactgaatatcgtcaggcattccaaacggagtttccatctgtattcaaacgaattttgaatgtgaatcgagtaattccgctgcacaatggacctcaattaggcactacacaatggtgaatgatgtcatccagcagaagatgctcttcggtaccagcccaatcattaattggcacttaattgatgccgcgcgttccttggcctattggcccagaaatcatagaaattctctctaatgttttgattactaattcatacaacagaataaattttacttgttttttattttatttgtggattggtggatagtgcttcaatactaacagtacttttgtcatgagttcgattccggctaatgttttcctttaatttatttattttttctgattaatacagggtttctttatgttcttgtttctaagaaatgttctgatttgggggtaatgccttattttcatctaaaagaagaaaatttctgaaaaatttggctaagtactaacaaaattcatataaattctttaaattttccccggtggcgcctatcggcaccgccggcccccaaaattcctatattttttcttaaaaattatcccaagctcgcgaattttgctcattttttgtacaaaatttgttaacaaattgcatttaaattttcaaaaaattttcccggcggcgcctatcggcaccgccggaactctcccctcgcacattcatcaagtttttttttgaaaaatgtgccgcaagaaaaaaaatttaaaaaatctgagttccaattttgagtaatcacgataatttaatatagttaaaaacgaaaatttatcgaaaaagtcttaatttttttggtgaatatctgttagaaataaatttaaaattcgcccctatcggcacgccccccccccaaaaaaaaaattttttttattaaaaaaaattacccaaaaatccctaaattttggttactttttagtcgaaatctgtgcaatttatgtcaaaagaaatagtatcgaggcgatcaacaaataaaggaatgtggagccaaagaaagcattcttaaaaaatatatttttgtgagatttttggacctaattcaaagcaaacccccgcccccgtccccgcgggggcgaaattttcgtgcccccgtccccgcccccgcgactctgacccccgcatcccccgcccccgtgaaaagccacccccgaaaaatgattttcgggccgtttgagtatatgtgaggtatggactgtccaaaaaaatggctatctctttttttggcaatctggtaatagaaatctctttggaaacaatgacagtggctgtcatcaggtgttatgctctaaaaatgattttcgagccgcttgagtatatgtgaggtatggacggtcctaaaaaatggctatctctttttttggcaatctggtaatagaaatctctttggaaacaatgacagtggctgtcatcagttgttatgctctaaaaatgattttcgggccgattgagtatatgtgaggtatggacggtccaaaaaaatggctatctctttttttggcaatctggtaatagaaatctctttggaaacaatgacagtggctgtcatcagttgttatgctctaaaaatgattttcgggccgtttgagtatatgtga

SEQ ID NO: 7265 - DNA, 1938 bp, Heterodera glycines
  unsure (1)..(1938): unsure at all n locations
tttacttatantttggattgccacgattattatcgtactcttatcttgtcgatattgtgcatggaaattgaattgaagaaaaataaaagcagcaagaaaattttgaggaaaatgttaataattttaataattaaaaataatttcaattattaaatttcaattaaatctacatagaaaattttttcctttattaatgcaatgaataaagcaagttgacatttgaatgaatgcatactaatttataaaataaatgaccatcattaaattctttaaaaaatttaagaagaatttattatttaaattatatctttcaaagcttatgatcgggtattctgcagtggaataacttgagtcacatttgaaattcgtctgaaaacgaatggaaactccgtttggaatgcctgccgatattcggtactataattgctaataaatattttagtttttaaaattttaaaaccttgtaaaatataaaatgggtccgtttgacactgcgccgaaagtcgcaggaattgccgtaattgctgtacaaaaccaagcagtgatcggagatgaaattgtgggaattaacagcaaatgggaaattgcagagaaccaataaccgccgacattcacagtgataatgaaaaaaagtgcgcgaaaagtgcgaggattgaccgaatcagcggacggcaaccctaaaaaagagctaattaagcaaattgcgggctattatgaatcgagtgcaataagcataataaatttaaatatatataaaacctactttgttttgattgtgattaaaatcacagacaaattaaggatggcgccaattactatgatgactgcataaattcctgcaattccaatcagagaccagctgggatggacatctttgaaggccaaataaaactgtaaatttggatgtgatttcaagaataaatgcatatttaccatttttgcgtttttagagcatattttggcaatttttttagaaatgataaaaattttaaaaattcgaaattgcatatataaatttagaaaatcaaatttttttggaattatctaaaaacgctcattagcctttgttttgatgtttttaaagtcgattctgtatttatacataattttggcatttttttgagggttaaaagccattttgagtaattttaaggcatattttagtgcatatttgggcatttttcgggtttttaggccatatttggaggatttttagtgcatattttatccgcatatttggcattttttagtgcatacaacttataaccctagttatattaattataaataaaaatttatcttttaattaaagaaattgctaggaaaagaaaatgttgacaagataaaaagtgttgccaagcatttactgaagggataaacttgggcaggacaattctcccgcatttcatttcgtgacaaaatgtgggacaaaagtaattatcgtttaatgaattaataattattgctacaaagattgtggttaaacaattaaaattttgcactcgacaaactcccgcattttaattgtgagaagtaagtcacgaaagtatcggtttaaaatgaaaggtcttgctaaatttaaaaaaaaaaaaattaagaacgcttcttaggggtaatttttgatttttattgctttttattaatattattaacattttcaaaaaatactgaaaaaggcatgataaggcaccaaaatcgcgaaaaggcaaaaatcgaagtaagaaatttttaaatgtttagtttgggaacagggatgtgcgaaaatcacaaaaaaaattttcgtatacgaaaacgaaacgaaaaagggcattcgacacgaaaacgaaacacgaaacgaaaaaaataccattttcgtaccaaacgaaaaaaccggaaattttttaaatatattccattttatattaagaactttaaaattgtatactctaactgagggaa

SEQ ID NO: 7266 - DNA, 1000 bp, Heterodera glycines
  unsure (1)..(1000): unsure at all n locations
aaaaaaattgaggatttatgaccataaagatctatttcaacaaagaaaanccgggatcagcagggacggtccaaggatttcggcttggaagagacagacaccgacaaacggatgaccgtgtttttattgggcagaaaaaaaaatgttttcctcattttcaaataaaattttggagaagagagggggcggggcgtactggagatgccaataggtggaagcgagaattttgtttttttttagaaatattggtatatttgtaaaaaagatttaacaaattcaacgggggagagctcgaccttggagggggtacaaatctgaaaaaagcctatgtttcccttaaaaattttgggtgcggaagtgggggtattgggggagaagggcatgcatgcactagggttggaattccgagaccttaaaaaatgattattagagcccccttaaaaattgcaagaagtcggaattccgtgtctctcaaaaatttcgtaagactaaactcagaatttaattcaagccccgataccgtaccatgcagcaacgggaaactcccggaaagtgggtcagtaatacagtatttctaaaacaaagttctgtagcatttcattctgaattttaattcaatttgttaaaaggtaaataaaactgagattccatgcttcattgatggccttttccactgatccattttccggttacgcctcgggaccatccatgtggatcagggatttgaatcgtggcagtcttattttttcgctctcaactgcctacatgtgtaggcagtctctatgttgctatatttttggagtgttgttttttttccattttcatataatttgaatgaccctttttcagtttgttttcccgacggttgacaatgaccgcagtgatttgttggtccataaaaatgaggacacatgcgagaacagcagggatgaatgccagcggagctgtccacaacggattgccactgaacggatgaaccaaccagccacggccgtgccaa

SEQ ID NO: 7267 - DNA, 1062 bp, Heterodera glycines
agctgtcccacagctattttcgatcaaccattacaccatctctaatttattctctacaagtctctctctctctctttgtctatcgcactatctgtctgccgttttcttttctctctctctctctttctctatctcaccttgaacagcttcatacaagcctcgtagacgaaaatgacggcgatcagcatggcaaatgattcttccgtgaagcgggtaatgtaggagacaagcgatgaagcatcagtcgccaccatcacaaaaagaatcagcgcggtccaaacatggacccaaaagcggaaggacagatagttgagtgacaggccctgatcagagggtgcaaaatttaaaaaactgagtttctatactttttttgaaaaaacttttaaaaccaggctaatagaggacatttagggttatcgaatgataccaagattgttggatttagttggaaaagaaaaaaagttatagccaaaaacttgtactcggacgaaaataatccctatattccttaggctaaataacccctgaaatagggattaataaaaccgcttttcccctaaactgacagtgcacatgtcgaacacgatggtctcaaacacgagcacgggcccagtggaaccgatgatggtcagtggttgtccgctgaacagatgatacatcactccacagatggcaccgctggctaaattttccattgccgcctgaaatttaaaaaaaaaatgagggagggggggggggaaatgtttttttcaaatcatcatttttgaacatgatgaaatgggactgctgctgatcccaagaaagaaccggcgttcccgttataaatgggtcagaaatactgtattctctaagaaattgaattacctgtttatttacggtaatctacatattaggacctgaattgagattccctagcattttggggggcgggattttttaaccaaaacgttcctcaggttcttactgtacctacacagaacaatcgagcattattcattcatttccacgatttctcttactgtattatatacactttcttactgtaccttccccgtccttact

SEQ ID NO: 7268 - DNA, 2243 bp, Heterodera glycines
agagattgtcctcataccgtatccatttaaaaaacacaccgtttcactgacatatactttctgctttcccaatttcgctttctggaattcagtgtttagcagccattccctacatttttcttcccattcattagtggtgcggtgggaatgccattttttgcttttgcgtcgcctttgtcaccgccaacggcgccgccgctttttggcaatccgtcgctctttgctttcccaccatttttactcttctcaaccgctgtcaacagttctttttgtgcctgaattttcattaaattcaatgcataattattattttgtattcatctaaaaaaatgaagtgatcggatgaaggaagtcccggaactgagagggaattttcctgggacatttttacaatagcccaagatagggactgtatcccaggggggagggggtaaaaatacacggaggacatacaccaacccccccccctacccaaaggggggggggggaattttttttacgaaaaagagaaaaaaacgtcgaaaaattggctgaaaacggaattttgaaaatcgaaatttgacccagatatgctgatcgaacggcagtacattttgataccattcttttatttttttcaaaattcaatccaaagaattaagatttggtttttgccgagactctcgagttgcacaaaagtgcacacaataaaatatgcaaatgtacttcaaataaggaggcactacaccacctgaacacgactctgttgattggggatggaacttggcggttcaatccgaatgttcgggtcccattccccgggtggcagcacagtgacagcgtccaagaattcgtcaacaccgtccaaaagatctgaccgctgtttggctttgtaggcgacctcgtggaaaatctgagaaacacagcagcgagtcagcaaatgcatagtaattaaaaatttgatttttttaaattgattttttagggaacaggacaaagtttcgccgccgaaaaattaccccgtcataatttagccggccgaaatttcgccgagacaaaatttttgaaagcatttgttctattaaaaaaatattttttaatactttttattaaaaaaaatacctgttaataaataaaaaaatttcggagagtgtggaaatgtattgcgcccatatgcatatgctcccacgatcttattgatcatctctatgtattcacctcatcggacattaaagtggcaattgcgcgtccaatttctttgaactgtgccgcatgcccggaggggccaagcaacaaaaacagaaagcgcgttggcaccggcacttcagtcagatcgccaagcagttgggccttcttgagacgaacaaacgcagtgacatgatgggtgaggaagtcaacctgagtgcatgtcacacatttttggagaaaatttattaattgctaaggggtaattaactaattacctctcccactaaaacattggacgcctcagcgccgggcggcaactttttcatgaagtgcatatttcgtgcaaaaaagtcactgctctgcgaattctccttttgcatgtccttgggcaaagaaccaaccttagaaacaaaaaaatgcaccaggattatctaattaaaattcttggcataatttatgtgacggaattatataacctaatgaatgaggacaattactgcaaaattcagtcgtcgtggtgattaagcaaatttttaaggcatgcattgatatgggggaaaaaaagctgcaaatcccatactgatgcatttttgggaagccatattaagtgttataaagtctggaacaatttgaccaaactgctaagggctgacagttttgaaaaaagcctggaactggacatgggttccatgttgggcctggatttcctgaacaaaaattcaggcccaggaaaaatcaggcttatcatggccttgatccaggcatggacctattactcactttgggcagctcaagctgattgccggatgtttgccgcttcgttggactgtccgaatctgtgcaacgtccctgcagatttttgccatgggaaaatgtgcggccaatgtcggaaatggagcgaacggcgctcaaaaagcttccctggcttgatccgccgtttgttgtggcggaatgccgtacctttgagagaggaattggcaaattttggcacagtaagcaatgtccattaaaacaacacaggtacggcatgtttcaaagtttttaggcggagggaggagggggcaaagcggaggtga

SEQ ID NO: 7269 - DNA, 2588 bp, Heterodera glycines
atcaggacaatgccatggagaagacatgatctgggatggggacagaaaatcattcattgccattcattgactcgactattttgatcaaactaccgtaattggaagagggcgtgcagagaaagggtggccacgtggggcttggacctgtaaatataaaaaaaatatccatctgctgatcactctctctcgttttgtcattttggcctctttcctctctctctctctctcgctctctctcattttcggcatttcaccaatttccctctcgtctctctcctgctctgtgctaaccatcactctctctcattttgcacatttttggcatttccctatctcgtctctgtgctcaccatctgttcccgccctcctccacgtcctcctcgaacttcacccatcttgccgtttctcgccattcctccacatcaccacttcgccacagttcgcccatttccgtgaacactgctggcgaatcatcctgctcattaagcagaaacatcactcgagtgccgggcgcttattaagtgtccacgattaggaggaggacgggaatgccaaaatcacacaattacccaaatcctccattcgctgcatggtcgaaagttgtggcatttgctgcaactccagggagtcacggttgcgcgacatgcgccgtttgcggatggattggccacccgtctcatcggcacggtgaatgcccatagaccttaatggctaggaggttgatatttcattttttgcgccgcaattccggattccgacagatggcgctgagattaagcatttggggttttttggcgtcaggattccgcaccgccgcaattttttatgccggaaatgcgcatttcgacagtttttggcgccggaatcctgcatttcggcaattttggtgccggcacttggcaatttttggcgtcagccgcattccggcatttttggctgcggaactatccctggccagcaggacagaccaactgggttgtcccgcgcccccataaaggccatttttttttacagattttgcccccattcacatccaaagtgattcgcgtcggtcagcagcgatctctttgtccgtttgatgaatgttggccaaagtgtcggcggaagttgtcggctgagtttggcctgctgctggctgaggctcttccacaggtgcagcgggtccggtaattgccactttgctagcggatccagaggctgaatgttttctcttataaattaggaccgtaaacggcggccgccggaaaatgcgtcagtaatacagtatacgacggtgaaaaggcgttagtaatacagtagtatgcgttagtggaaaatatacattatatgccaatggaaatgcgtcagtaatacagtatttatagcattaaatattatacaaaatacgaaaggtcaacaaaatgtatatgaacctcattaatttcagttttttgaaaggttcaacagttttacaaatatactgtaattggattattgtattgtttatttccatacattcaattagcgcataaaatcaaaaaatcaattaccttatctcgtttttttaagaaattctgattcactgacgcatttttccaattctttggtggggggtatttgctaaattccaggacaatgcgcagaaaaaatatgataaagcatacaaatacgggcaacattgcgataatgaaaagctgctgccatgacaattcttttgagactaattgatctttgaccaactggattttcaaaaatgaacttatggcgccgcccccttaattgactcattagacatttattagcctaaatatattttaaaaatgaacttacggcgcccccttaattgactcaataaacattcattagcccaaatacaacagatatccaattttcacctttgaaagctgctgccatgacaatttgtttgagactaattgatgtttgatcaaaaaataggggttcaaaacgaatttatagtgttgccctcttaattgacctattagacattcattagtcaaatacaatacaaaatgaacctgtggcaccccccccccccttaattgactcattagcccaaatacaataaatatccaatttccaccttctgctgctgacattgttgaaggggcagccgatgacattttgtcaccgttgttttggctgttgttcatcttcttgaggttgtcagtgaattggcacaattaatggccaaccttgaagcgattggttgctgcttctttaacttataaaagccattgaaaaaatgaaaaatgcacatcctagagaatggcaagaaatatttttagcgagaatcaacatcagaaaaaattctgagtggaaacaaaaagaatttctcggctcgagactctcgacggtatgactctcacacacgccgccacacacgcacatactacgtaatttgctgctaaaaattctcgatcacgattttcgagttgagaaaattctcgggttttttttttggtctctctgcctcgactcttggtatcagttttcgagtctagggatcaattgtcggtcgctgttctcgagtctcggaaaatctcgactatagtatttaatcaaagcaccttttggcgctgaaatttagg

SEQ ID NO: 7270 - DNA, 3117 bp, Heterodera glycines
ccatttcctctctgattttttcgtatccatttatcactttcttttgcccttcccaatatattttcctctccaatttttctttgctttgctttatttttacgttcaacaaataaacatgcgtcacaacaaaaatgtacgattcgattttactgcgcacttcgaaaatttcctccgtaaaaaaatccgtgtataaattgtccaaataaaaatgcggagcaccgtcgcagggaacggaagtgaagagcatctcgtagtaccaagaggaaaatcctgtaaagaaagagggaaaagtggagagagagagagagagagaagaggggagagagagaggggaagagaaagagagcgagaaagagggggagagagagagagaggggagaaaaaaggagagggaagagatgagaaatagaggaaggaagagagagaggaggaagagagagtccatgtccggaatacaaattaatcccaaaatatacgcctaaaataggcataaaggtaggccggcttttgcgccgcggaatttgcggcggcaataaaaaacagacatttgcgccgcttcattcaaaaagatttcgatggtttgaatgagccgttggttcgcttcccatcggccgaattaatcttttttttttcttttttttccctttcgtttaatttgttcaaaattctttaattttaccttttacaattgcttcgcgaattgtttggccacagaatgaaacgtccaaattcaacaacaaaattaaaaagaattgcaaatgcatttttaagtttcgattggccaattgcttttctaaagactgagaaaacccatgaaagcatattaaatattaatttgaagaaggcacggataatgatgctaattgataacaattagggcccaatttaagcagaaaatcattaattaataattttcaaaaataacgaaatatgcgaaatacgcaacaacaaaaaaattaggtgaggaaaaagtgtattttttcatgcttttagttgtggcaattagccaaaatcaaattgtaaaaatgctttaaaatccgtcgcattaataaaattaaatggaaaaaatgcagattttttaaataattagccaaaagaaatattttccatttctaacaaatttatttatatgcagaaataataaaataaaataaaaaggaaatcaattcgatcaattgacaatcacaaattaaaaaaatgaaaaaaacattcaaaattaattaaattttattttcttttaaatcgatcgtttcattggccttttctgatcaaatcagtacctcgctaattgactaaatttgcccctcttcagaagaaaatgtacccaacgtcgatggcccgccattcgacgccgctttcgttttggccccgtgcgattttgaacagtccgtcctcgccccaccatttgttccacgagttcacccccaaccaatacttttgtggcgttccgtccgtgccgttctgctcgccccatccgatcagtttgaccgcgtgtccgccctttagctcaccccacgtgtgctaatagagaaacaaatcaaacgaattgtcgccatcgggcactcttctgagaaattagtctgtcgatgatcagacccattaaataatattgtcgaattcgtttcttttggccaactctgatcagcgaactcagaccgtgccacaatttgttgtgccgtactctgtaaatgcctttgctgtagcggtaaaagtcctcgtacacgtcgatgctgaccaccaccgagccgaagtagtaaatctgaacggtgtgtccgtccgtttgtgccaattactgctgctcgagaccgaaaatttcccgagactcgagaccgagacttaaccccgagaccgagactcaaccccgagccgagaccgaaaaccccgagaccaaaaaaaccagagacttttctcgagtcgagaccgagactctcgagcagcactggtgccaatcagtggtgtcttgcctctgccatgattcctctctcgctgccctccaacattttgccataacattcgtccatccttcgctcttggcatttcagctgtccttcaaagtcgtccatgccccagtggttcgttttgatcactgaaatgttaccttttggcctcccctttggcattttccttctcacccgtgcggtagcgcgtctcattgctcggcggcagaatgcgtccgctcagtttgtccatggccatccgcttccatcccgcttggcaatgttccgtacactcgggcgccttccgctccttctccgggtccgacttcagcggtgggaatacgtacggcttgcacccggtgccgttcaccaccggcgcacccgtcaaatagccgtacttctccaaatacttccatgccaattgtggcgttcccccgttgcagctgaattgcaatttgcctaacccaccatggtttcccccatttttccgttttcccccattttccgcattgaatttcaattcgtttttccgtttggcttttcgcttcgtacccatcggcttcctttgtgcaactgatcaggtccatggtcgatgagtacaggttcgggttcttggtgaacaccaaatagttgcggagtgtcaagaaaatgcacgccctgtcgtcgcgcgcggcggccgttgcgacggcccaacacgcgccgcacttcccctggtcccgggcgaggccaatccacgcggcgcactgcgggaatttgtcgcgcaagtcgtagtgccgcgggaagaccgacatgggctgggcgtaggccaaagctatgtactgtaagtagccgcgcaacgcgttttccaactcgcgtttatcgtactccgtgtactgtaacagtagaacgatggttactgtccaagacccaaatggacaattcgcgcttttttctgtcccatttaactatggcattgcaattggcataccgtaccgcttccctgtacagtttctgcatgtgttccgggttaaaatattgcggtggttgcggctgtgggtactgattgaacggagtgtagtaatgtcgcgcatattcgtattgagaagcagctgcgtaatgcttatacaattggtcagagtactcaaaaaattggcgatcgttcgaattttgctggtactgaatcggccatgcctgcttttat

SEQ ID NO: 7271 - DNA, 1314 bp, Heterodera glycines
ctccttccctttttgctattcgttggcattatgccaagcatgtgtcctttgcttgaatcggacattatggcaaatgtttcgtgcactttcgcctgtgtcaatttgtctcattatactaagtttccttagttcttcttttcttttcccgtaccctctcactgtctcactgtttacttctccccactttccttttctccatcattctctttctccctaccctctctttatcctcactctttaccccgctctctctctctcgccctcttcccatccacctttctctctctcctcctctcaccccctctctagtgctgttcgagaccaaaaatttcccgagtctcgaagccgagacttttctcgagtcgagactcgagaccaagaatctcgaacagcactacccctctcagtgttcctttctctcttctctctctctcttctctctttctttttgcccacctcccatcccattccgtcgcttttgttgtctccgttgatcgttttcaccaaattctgttccttttttagcatttccctttttttctcttccgttatgttcagacgccctttgccgctcaccgtttgattctttcaaaagcattacattatgccaaaagttcaaattgcctaccaataatattccatagggaatgccttcgtctaaatttgccacggcattccttttacaaatggctccaataagcgacgaattgcacggcaaataaagccacgagccttctttggggtctaccgcggcacaaaaggaatttgtttcatttgaaaaggaaactgaaaaaggaacgaatggaacagggaaaagttgagaatggcattttcaagcatttaaaattgacaaatacgctttctttgatatcattaggttgggtgttcaaaagccaaaatgttcctttcctcttcctctttctcttcctatttcccttcctctttttcttcctttttctctttttttcctcttcctcccccgttcatcttttcctttcgcttcttcttcctctttcttttcctctttctccctctccccgatttccttttctcttctacatatctctctttctttgggcctcactttcgcttccgtccgccccgcgggtgcagttctcgcgctcccccgcccctctgatgccaacccaaaatgccattgccaattccgcttgtcccttttctctccgttcgcccatcgccggcacaaatgcgtccttcacaatgcttttcaagcaatttgtgctcattttcgtccaaaatagtcgtcccagggggaggtgaactttttgcacaaatcctccgcctgggcaaaat

SEQ ID NO: 7272 - DNA, 1567 bp, Heterodera glycines
  unsure (1)..(1567): unsure at all n locations
gagaaaaacatttttttgctgggggaaatgacggaaaganngaggggggcaaacagagggaggggccattcaaaggggaatttacgggaaaacccattatcattaacggggggggattggaattgaacgcacaattgaaatcatttacataaactaataaaaattgatttaaaaatttaaaaagtaaaaagcaattaaatgataaaaatttgaggaaaaatataaaaacgtattttttgttaatgagcaaaattaataatgcaaattaacaatggtcgcagaaacaccgaatgatctttggtcgagcaccgatcgccgccgatgcaaattcattcatttgtcattcatttgtcagcaaaaacttccattttcttggcactcaaaagggagtttttcaactattttataaaaaaaataaatcataaacaattttgtaaaaattgtaataaacagtttccttacgacgaaaatccaaaaatggaccaaaacaataacatttcccaaatactcaaattttattttttaaattttgttttttcgattatttgcaaatcaaagggaccaaagggcaatttctccgtttctccagcggtacaaaaacagctaatggtcggggaaagcttttaattgagcatcgatcgacggaagatgaaggaaagccgagccgtgtttatttgaacaattttagcatttccattttatccaacaaatgaatatttacgatttttattttctattaattaattaattatcaattatttaattgactttttgtttatggcaattctttcgcgcaaatatttctctttttttccttttatttcatgaaaaagtcaacactttcagcagacaaattaaccgacaaaatgaaccttttgccaatttcgcttttattcattgctgtaaaattagcagtgaatgcgccaacaaatgatctaattggtaattattcattctgtgcattatgcccaaaaaggcattttgtcattgtctgcccattaattgcgtaattaactaattaattaacccaagggaattgccccgcgggagagattcgcaccgattgtcggccggtgtgtggtgaaaagaattgcgcagacgttctatcgccggacagtgcgaggggcaattgcttttcgttgcgctgtttcccggggtgcgtttgtgcgagcggaattcggcactttgggaagggcggcggcgaatgtttgacgaaggaaaaatgcgcggaaatggcgacgaaagaccaaaacggcaccaaatgaagcacactcagtggcaggaaaagcggacaaatggaggaaaagcggacaaatggaagaaaagcggacaaatggaagaaatgaggaaaagcggacaaatggaggaaaagcggacaaatggaagctcagagaaacggatgagatgaggaaaagaacttgagttatcctatattaatgaaatacaaaattatttatcttaaaatgcatttatatacatattattataatgaaaattgatcattttcatttcataatacaaacaaaaaagcctttaaaattaccaatttaaatttaacaaattattt

SEQ ID NO: 7273 - DNA, 1104 bp, Heterodera glycines
aattaattctttattaatttgacgcgcaccgtctctcccgggaaagccttggtctcctttctggccaagttgtcccggcactcctggaatgccgtccaccccgcggtcgcctttgaagccaggtggaccgggctgtccgggccgaccttctttaccctgtaataaaattttttttgaattttttacattttttgataataaattttacccttggccctgctgggcctggcagtcccttttcgcccttcatcccaggcagtcccggctgtccaggaatgcctgcttggccaggataaccgcgtgggcctgtatcgccaggttctccctgaattataaattaaaaaatttatttttatgcaaaaaatttaataaattttgaaacgggcacacaccggcacagaagcagcaattgaaggcatgtgagggcattttctatattagtttctatgcaactaattaacactacgtaagcgaaaaattttggttagtatttataaataaaaaattatttgaaaaaatttaatttaatttttaatatttaatatagtaattttatgattatgattttataaaaatattttgataaaaatttaatagccaattataaaatttgtaaaccaaaaatgcaaaaatttatattttcatatttttaaaggaagttattaaaagaatatattcaagtataatcgtgttttgtttttaattaaaaatttttataataaatattattttttaaattatttaaattgagaaaataataattattcaattgatttaagtaaaagagcataaagcatttaaaataacagttaatttttttgatggggaaacaaaaacccgcgcgcgcgaccttttcaccctttgcgcccggatgcccctcagggcccacaattgtgcctttgtgctgggtcagcgccgccggccctggcggacccggcggtccgggaaagcccaggtcaccctgaaaagtgcaaaattagcggtgtgccgaaactcgccttggcgcctttgacgcccgggtagcacgggcggcccaaccacggagccgcttggtccggcgctcggggaggacccggcgggccacttggacccggcaaaccttga

SEQ ID NO: 7274 - DNA, 1475 bp, Heterodera glycines
  unsure (1)..(1475): unsure at all n locations
ttttntgggtcgaaattctgggaaatttttaaaggccattaatccaatatttttgactcgccagaataggtttggtatttaacaattttttaattaatccctttttttaggaaacaaatttggctaaaagaataatgtttatgattaattcattagtaaaaaaaaaattttctaatcaagtatttttttacatgtcctgggttgccatcattgccggggaagcctggcgtgcccactgggcctcggtcacctttcacgccaaaaggtccgggagggccttgtgcacccttaaattaaaattttttttttttttgctagaatatttgacttttagtccttttggcccttgcagtccttcagggcccggaaaaccgcgtgtgccggccaatcctggaggcccttgaggcccaggcggtcccatggagccttaaaatcaattaatattatttgatgatttattcttaaataacgcattaataaatgtcagttaattaattaattaattttagaatgcctttttctccaatgcaaaagcatccgcgctgtgtacaatcacgacaagctgattgctgaattgaataaataattatggtaataaatttatttatcgggtattaattaatttttctgacaatgacaaccgtttccactaaatttgtcccgacaatgaacagaatgacaatgacaagaagcaatggcctgaacagaaaacaaacttttatatttaaagataatgaacaaatgaggataaaattgaaaagaattttagaatgccttggttatgaaaagaaaatcctaatttttcagtaaaataattttttaaattaaatcactttcttaaaataagaaagaaatttgttttgaaagtattagcatttttgcaaaatgacaatcattttcaggattatcaataaaatgtgaacaaattaaaatagtttttaatttttaaagtttgtttaatttcattgcaaaattgaaaattaaattttattaaggcaatcaaattttattaagccaattacctcccttaattagtttcaattaatgccccaaaatttaacatgccataatgcaaagctgcgaagcatttgctccatctgcttgatcagcggctgcctttgccgactttggcattgttgttttgccgttgttgtctccatttccctgttgcctttcgccatggcgactgatcaccgaagaatttgcagctgatcaccaggatttttaaattatataagaattctaatggccaatatatcggcattaaaaatattaattaattttgattttattcacaaacaaattgatcaaaatttatatttgaaaatgtttttttcaaattttccaaaaataagaaggaatttttgtgaaattacgcgaacttttaaagtaatttatattaaaatttaaaattatcttatgaataaaattgcaatcatttttttaataattaaatttcttttttacacctgctg

SEQ ID NO: 7275 - DNA, 3667 bp, Heterodera glycines
ttccaggttgaagcagatacttccccatccatcgaccccaataaatccctccccccccccccccccccgcctcccccgtttctttattatatcggagaccaaatgtccccaacgaataggcccagacgcagctgtccccccccccctgcgaagaatcgactgaattggttgttggtggttggtgattaggggaaattttcgagaagtcttaggccggagatgtgccgattgatttaaatttaagaaaaagaggaggaaaagcatttgtatcaaaaaaggaatagttttgatgctatcatttaattggtcaacaaattattaaattgacacaattgaaaattaaaaacggtgttaatttttttagtgtctttctcctatgcttattatataaaacaatgtttgcatgatggaagttgttaaaaagaaaataagtaaatacggaacaattatataataatttcttttaaaagaatatttgtatgaatttattaaaatgatcctttgtaatatataaatatataatataatataatatatattttttaaatcagttaattaatttttttttatttccctttgcaacaatgccatttcggctattagtttgaatcatcagtccaaaatagtacatatttaaagaatttaaacatgaagcggccataacagttggccgtccgaatcgacaaaaaaatttgaggggggggggtcgagcgtaaatgttgcaatttttcattgttttacttcagcaaaattataaatgagataattgtaagagttatatttattaataaaaaactatttttacaaataaaaatatacaaaaaattagcaactataaattttggtctatattacgaaaaaatgattttccggtgatctctgattgatttcattgatgctcttcagtcgagcatcaccgactttggcggcacgtccaccggttgatgaccgtactcatcctgtccactgccaataccgtagtcgtccgtctgcccactcattgccccgacctcctcctcatatagttcatcctcctcctccgccgatgcatcaaattccctgctgctgtcttccgttccgtagtaataattctgataatcatcattatcatcggccatgtccaaattggtgccagccgaagtgtacgatggcaatgagttacggtcggctgcccccggtgtactgtaaggaacggtcgcaagcgaacgcgcatgggcgggcggtggcacagctgataaaaatttcggaaaggatgacctttattttgaatagatatcagagtttaccttcggattcaatcatcgggtgcattttatggggtggtaccggtgctttaaggacgattggcttaactaaattaagttaaaatttcagattataattatttgaaatttcaaacggttttttacctagcgactttttgtcctttcctggtgcttttttggcggcttggactttcttggctgaataaattcattacttttcgacaaataaaaaaaaacattaattgcctgtttttggtgcgccttttgccgatttacctttttttgttggctttgcatttttaactgttttaatttatattacaaaaaatattttatttataatccttctacctttaatgcctttggtttctttctttgctttcaatttgttatcttttttactaacttaatattttattattttaaatcatttccatttttttttaccttttgccgcttttccttttgctgggcttttgcctccttttggcgatgcttttccttttgctggtgatgccgccactgctcctttcaaggaatattttaataaatttttaaaattgtttttaccttttttattgtcttttttgactgcttttgaatttgctaaaataaataaataaaaatatattttttataattttaataaaatatttttgcccacccatttccattaggacagccatcaccaagcaaaccatggccatgaagagaatggtacgcattttgggaggataatttaaatgaaaatgtgatatgtttttcggcattttcaattgctttttatatgctccgatgccaaattttatttcgaattatttaattaaatagttggccaaacagagagagtggaaaagatgccgatagaattcgattttttatgttgacgaatttttttttcatttttcattcataaatttttgttttttccatttccggtgatttcttcatttatttgccaacatcaatttccatattcatcaaaaaattattagtggcatcattttaattaaaaaattattttgaaatgaaaattttcataaaacgattggttaatttattaaaatatgtattttttataaaatataaaaataattattatgaaagaattaaaaatactcatccttaaacagattttttggccggataaataataaaaccttttttattaaattctcaacttttgtgcctaattgcatttatcagatttatgtgaaagcattgctctaaatagtgcactcatttacatcaccatcaagcataagtcagttagccagcaagcataatgaatttcggcactttttctttaaatattttcaggacccaaccgacccgagaaaagtgatgggccggaaacccataattacggagggttttcaattacggaaatccgtaacccgtaattacgggggtctaaaagctccgtatacgttagcccgtcatatgtatttaaaaattttataaaaagaagatagtatttaatattatgctttttatattgatttcaactttcatggaaggaaaaagaaatacgcaaccaggaaaatttggaatttctatatatttgtaaaaaaacaattgtttaaattttgtttggcattgttttctcaaatgttgcatgaatttatttttattattttttatttaatttttagttttggtttttcttcgcaagcggatttttctgttgacatgtgtttgtgcgcaattcttttcacaactttcaactttaaattcttcaaataatctgttttggataagcattgatagatttgtggcattggcattccctattttgtaatttcaaataaactttttcagaaaattaatcacattctttttaagttttcgtcacattccaaggttttccggaaaatatgtgattatcgtcaatgccttttccttgtcaattactttttatgttattttttgtgttttttgtatgctctaaaacatcacgaaatgtaaactaatcaattaattaactgaataaatttgttatatatttttttaattaaaaggatagttattgtgagcctgttgatatatttcaaggtgaagtgtatttgctcgctactcttatcatggttatttttactttggctacaattgtcattaatattatcatggggattatgctaaagggtaaatttaattagataattaaaaatattaatctaaactttcataagacatttttaattggttgataaaaaatttttctgtgatcagaacaacagaagcaattcgtcccagtctcaaattgaaatcactcgtcgcattttcaagtcgctggctgtgatcatagcagtaatcttttgcctttggttctttggttttctgttagcaaatattatgggtcgaggactgatcaccagtgatccgtcactgcaatttctgat

SEQ ID NO: 7276 - DNA, 5697 bp, Heterodera glycines
gatcatcggacagtcgcggctaaattcgagtcgcgacatatatatagtaatatgcagataggtagctgctacactatcattagcattgtgcatatgtagcctagctgcagctcaagctaaggattttttagaaaagaaactgtcatcgtgcatgcggatattaatccttagcattgtgcatatggatttatctgcagatagcgatttatctgcagatagttagcattgtgcataccagcatgatgatgatgcttttctgctgacgcattttccggtcacaaaatgaatggggggggacaaaagaggagaaaaaaggggggggggagggaccaatcagtgggacacctccgatttgagcaccagcggaagacgaaaatagaatgtgcactccctaacacagaaaatgattcgcatataaacttaattgaaatagccaaataaaaagccaaaattctctctccccactttcaaattccccacaaatctgattttacctatattataacactaattgattctgccgaaatcacttttgatagattactgttttcttggctcaatttgtgggtatttgtgtttgttctcgaagtgcggtaggataaaagcgccttttgtgcgccgtcggtggcatcgcatgtccccccccctaatgatgtgatgcccttaatcactcctcccccgcctaatttgccaatatttattttctactgaccttctgccgccgatgccctttagaattctctttttctttctctctcactccttcaagcaaagcttccgccaaagcatcgattgcggcggcttttccccgaaaattgcctctcattttgactaatatttgctcaaaaataaataacattaattttcctcccgcactttaaacaacaaacaaaaagcacagagggcggataaatatcgaaaaacgcaacgcataagggaacgaacataagaagaactgaaagtatccaaaccaattaaaaccacagaaaagcattgtcaattaattgctattgtaaatttttggcttttttttttggcttcgacgcaattcaaaaagtcaataaaacataagagaaaattctttaatttttgtcgcttctcacgatgaaatttcgcagaaaaaataggtaacttaaaaatccgatctctaattcaaaattacaatcggacaatttgtgttcattcagaaatgttttgacaataattggaaccccaaaatgagcagataatgcaaacacaagaataatggaagagaattgggggggggggggggattgatcgcttccgtacaaaagggggggggaggcattgacaaatttggcaaaaatgccaaaaaaggaaaagtgcaaagaaaaagcaaatcgaaaagggataaccaattggaaaatgcgccaaaacttgtgatttttgacaggcgttgttccaaaataaagtaaatgttgttgtttgttcgagttcagctgggccttcgtttaagcagtggtttttcaaaaaaggcaattccgattaaagtggggaagggacgaaccgggaaaagcattggaatgaatgggagtgaatccaattgttgcttccacgaaatatgtcaaaaatgccatttaaattttattatttttctcggtggctcgcctattaaaaccatcggattttccttcgcttttgaaattttaaaatgttcaaattctcttttacctgatgaatttaaggtaacaattttgtttattatagtcaatgttttatattttagttttatatgtataatattaataccatttaaatttaaaacaaaaaaggaaacttcgtcttttttatttttatatttgccatatttataatataattgtttacaggatacaagaaaacattttcttaatgaattttgataattccatggaatgcttcacattggcaaaaagaggcagttttaaaagggaatgaaagtagcaaattgacacccgccgaagaaagaagtccgaatcggatggaaaaaggcaaaggcaaaagccatccccgcggggagagccgtgccaatcacagtcagtgccgccgaaaggaagtccattcatttccctgcagcgctcgtcagagtcgcggatcgtcgattctgtgcagcgccctccctttgagcaacccgccattggccggcaattggccatggccaatcgccggcgttttggccaccgcttccgtttgcatttggcgacagtaatggaccagcactcgttgataatactcgcgaggggtcaaagtgcgagcggtggaacacagcgaagtgtttctaaggggggggggggggaaagggagggaaaatgccacgacggaaccctcggaacgaacagatccaaagactcgctggaggccaactgccgttcggaggtgaaggacaatgtccggggctgctcaatccatttgaagtaataaatgtcctgcaaaaggcaaaggtcggaaggcaaagcggacaaagcaccgactggcggaatgaaagggcgcccgccaatccaattgaggtcaggctgccgcccattgatcaagcagtccagcaggtattcctgaacgaattggtccctttattgtcagttgctgtgcatgccaacctccggcaattgggcgagtctgtcgagttggtcgggagtaagtcctgacgagagaaaaggtaagccaagcgaagggaaatgccaaagagagcaagccgagaccgtaattcttctggagaaaagccacgtaggagaacacttcgccaaggtgaatgacttttccgccaatggtcagaaagctgctcccgagtgccctcccgtacaaatggatgtcctggatgtaagcactgccgacgaggtcgatgcacattgtggtgatgatcaggcctaaagagccggtcagccaaacggagctgctttcctgacagaccgatcacaatgtaagccaacgtagcaggcaaaaaagtgacattctgtgggacaatgtcgccaaatccgattgtggtcactgtgacgaaacaaaagtaaaaggcatcgacgaatgaccatcgctcccataattgcatcagacaagcgccaccggcggtgtaccctaaggaaaaccgaatgaaagtgacggatggacggcgaagtactcgcctaacatgacgacgaggatgaacagtgcggacacgcgtcggttgcgcttctccagcggcgtgtactgctcctcctccttgtcctccaccccgtccatgtcgctgctctctcccccctccaattcgtctgcccgtgctcgcgtgtcttcgctgtttgttcccgctctctcctcaaattcgtcctctccatgcactgttctgatctcagacacatctttaatgaccaatcttcaattatttgttattggttccttaattgaccttgaaatgtccccgcttccgaaacggtgtccaaaatgggagggaatggcggaggctttagccttctctgagcccttcgcgaacagacgcccaagcggaggtgcggagggcgaattcggctttcgctgccgcttccttcgttgttgttgttgtcgtccgttgttgtaacggcctcccgcgacaattcgtcaattgtggccaaagtgccacacggtgcgaccacgtgattggccacaaagggaccttctgaggccatttcctcgggaatggcttcaccccctacaaaaaggccatcatggccaacgtcatttgcactttcgtaacttgcccgaggtggtcgaaacgctcggcgcaaaagtcgtcgctgtggcggacttattggcacggcgattttcgccttttcgatttcggaattttctccgtcgcttccaaaacaaacaaatctgacaacaaattgtcaagcaaaaccagcgaagccgagagaaacagtttctgcgaatttgaaacagtcgtttatccacccaaatgcacacgcctaaaaatggggaaaaacggagggggggggggagagagtgccgaaagcgaagtcggaattcgtacttgagagaaaacggcccatgtcggcgatagtcaccaaaactgaagcaatcgcatattttggttttgggatatgttattataaagtaaataataattattttgaagaaattcttaaaattgtggaattcggaaatttttaggacctgaagtcccaccaaatgttacacatttaaaattaaaaaaatggaatccctaatgttaaacacaaaaagattgtccctaataattgcctgaggttaaaaaattagctttaaaatatggaattaagatagctgactattttaaattaaaaaaataaaagattaagcaattttcaattttaatcagcattccataacttttgcaaaaagcccggccccatcgaacgccgcgcccggttcagaatttgggactgctgggcctgggctgcatgttaaacggactctttggaaccgggcggcccgggccggtcaatcttacaattagccaagttttttgaaaaaagcatgccgaaaaaggaatatgatgaaacatcgagaaaattaaaatagaaaaattggtatcgatgtggcgaagtgtcaaaagtatcgatgtgggtgatcagaagaggcgggccatttcagtacggaacaaatgattttaattaattaataattattttaaatatattattttaaaatatttttaaatattatttgggggcaaaaaatccatcaatatattttacacattcaatgcattgcacttttattattcacaattgtatttttttatatattttataatttaagcatattattgatagaataagctttttgccatggcattacttgtgaggtggccaatttatctctctttaaattgaataactgctcttgcaacaattggcctaagccttttttctttgttttgtaacgcataacattttgtgcatgcaatgtataaatctgttatattttcattcgtcattctgtattttcgccaattgttctcacttccgattaaatagatagtatctgatagatcacgagaaagacatttttcaaatttcatttctaatcgagggctttcgtttgatgtatcggaaatagtgctcttgttttacccatatatatttttaaagtgcatattcccaattgaatccctgtttttgctagctcaatatgtagttccttaacagttttgatctgattttccttgtaacttttgatcagtttcattgcttctcgatttttaagaaagtcctcaaatttcgacttatggtttgacgttaagtcaataaagcaaaggatagtaaaaaaagttaaaagtaaaattttcatttctaaaatcgttttaaaattaaaaattgacaaaaaaattaagagaaaattagaagtaaaatattttagaaaaatgaatttgctttattatgagaagacaaaaactattattttgactaggttatgctacgtattttaatcgaatataaataaagtgcaataactcgctaaaaagtgtcgactgatatggcaaaaatctatcaataatatgcttaaattataaaatatataaaaaaatacaattgtgaataataaaagtgcaatgcattgaatgtgtaaaatatattgatggattttttgcctccaaataatatttaaaaatattttaaaataatatatttaaaataattattaattaattaaaatcatttgttccgtactgaaatgacccgcctcttctgatcacccacatcgatacttttg

SEQ ID NO: 7277 - DNA, 937 bp, Heterodera glycines
  unsure (1)..(937): unsure at all n locations
agattgggaatnntatgctttttgcacantttttgtgaatcaaaaaattaaaaattcattttatgtattggaattggtacccgtttttagagtattccaattcttacagaggacattgtcatgataatcagtgaacatttattgcttaaatttaagttttaacgataaaaagtcaggttcaaaatagtgacgtaaatgttttagttactgaaagaccaaaaaaaaaatgcgtgattccatatgacagtgctaggtcgtttcgaaaaactaccaattttacagattttttcgaaaaaaatcggtcataacttttcttaaacacaaacaaattaaattttatttagctttcagaaagttctgacaaatattaaaaaaataaatgatttttcaagctacaatataagagcatattatagcaaaattatttaatttggttggggtttaagaaaagttatgacgaattttttcgaaaaacctataaaattggcagttttacggaacgcccatgatgacagtttttacaaaaagagccagcatgccgtgatgtacaaatgaagaatattagcaccaataaggacttttatttgaagaattttcgggctcttatgttcaatgaaaaggacaaaaaagaattatctttcaatgaaaaacaattttatgccaacttttgcacacaaattttcgtaaatcaaaattattgacaagcacataaggaatgctcgagactgtcgggaattttgactctcgtcaagcagtacttcctcttaaagctatcatcttgatgatgatttcttcgggcctaagaacactctgttgaacactttttgcacaaatcttccgcccttttttggctttttgtcatccgcttcatcatctgctggaacgcacgcattgttcttccatttacagcgaaaatggtcgcttagtatctctttgc

SEQ ID NO: 7278 - DNA, 1334 bp, Heterodera glycines
  unsure (1)..(1334): unsure at all n locations
agcataatgtataagctattttttttgatgcttctgtgccaanatattcatgggtcgatttgccccggcataattttcaaaataaaaataaataaattgnaaaataatatttattatgtcgtacgatttcgggaaagattttatgacttcaaagcgcaaaattttcttaacaaaattcattgaaaaatgaatgtttaaaaaaggacaacatttttgcgtggatatcaataaaaacaatcacatgaaaagggcattattttattcttaagaaaattttacaaatttgaaagaaatctttttttctaataaaattataaaataaaaaaactaatatgtaaattttagctttatctaaaatattgctatttttgaatgtatacgagataaaaataaaaattgagttcgttgatcacaagttgtataaggtcccaggggccggggtccagacccctgcccctgcttaaaaaacaatttttttttttgtatcaactgccggggtccagggattttaccctcgtaaagtgctatttagctttattgcagatgaacataatcgattaactcaattcacacttagatccgaacctaaatattttattaattaatttttctctattaacaattttgaaaataatgtaaaattaatgttctaaaataactaatgattattttggacgtaaaaattttagtttttttattacaataaatttaatggacacgcattcataaaattcctgctacaaaacataaatctcactttaaatgtaacaagaaaattactactaagaagtgaatttcaaaaaatttttaactcaattcacacttagatccgaacctaaatattttattaattaatttttctctattaacaattttgaaaataatgtaaaattaatgttctaaaataactaatgattattttggacgtaaaaattttagtttttttattacaataaatttaatggacacgcattcataaaattcctgctacaaaacataaatctcactttaaatgtaacaagaaaattactactaagaagtgaatttcaaaaaatttttaactcaattcacacttagatccgaacctaaatattttattaattaatttttctctattaacaattttgaaaataatgtaaaattaatgttctaaaataactaatgattattttggacgtaaaaattttagtttttttattacaataaatttaatggacacgcattcataaaattcctgctacaaaacataaatctcactttaaatgtaacaagaaaattactactaagaagtgaatttcanaaaatttgacaataattttatttaaaaacttacc

SEQ ID NO: 7279 - DNA, 2135 bp, Heterodera glycines
aataatttattatttcgagtaatgaatcaactaaattattttccgacgatttataagcataaaaagcggggggggggatgtctgagtccgttccgtgtcatgcaaacacagaaatgaattttgccgaagaaaagcggctggggcggaacgtgcgcaaaaatgttgcgaagattgagacggagatatccccttttcgcacatttactgttaaggcaattagtcaaacgtaaatttgcaaagttagacaggaatttatcaaaaagcgatgacaactggcacatgacatattttgcgaatgttagccttttggtacaccgataataaagaatatcaatcaccgatcagacaacccagacagatttactttattagctttagaacacggatctatagacatttctttaagtaaaacaagaaatccgttctacggcaaaaaaaaaaaactgataaaatcatttaacttaattgtattaaataaaaaacataaatttacttaaaaaccggaccttctgtctgaaaatcttcggttgtgaaggaggtgccattgtaggcaaaggatatttatttggtgaaaatttattatttcttaatagaccaaaatggctttggacaaaatatgtcacaaaaatttgcggattttggacaaaatctgttaacaaattgaaaaatttcaaatccgttaaaaagtcaaatcttaaaatttttaaatatatttaattaaagtgtcaaaacatacacattggaaaactaacacactcattttatatctatgcgattctgaagtacgtttaaacaaaaaaaacttaaaattaattttaattttggctaattacatgagttgttcagttctttgcaatttgcccatttgatttggcaaacgctgatctcctcatccttactgtctccactcttgcctgaacgttactctccttgcactcctcaagtttcgaactttgcttaatcgctaaactctccgctggtcgtcctccccttcgttgatcactggcgttggtgaaggtgggaagtcagctcgaaaaaatttacaaaaaacaaacaataggccctaaaattttcaaggaagagctctgatttaaattttataacaaatcgtttaatttattatttcctgaatgatttaaaacaattggcaaaaaatcatttttttatataaatcagattttaaaattgagctttcgattaaattccactcctacattatgccaccttgtttaaagtcatttttaaaaatttgctttttgtcaccattattcaaccttagaaatccctattttcgggtattcacccttaaaaatccataatagcatttttacctctttatttactgtcttattttgtacttttttcaccctttaaatccgatccataatcataaggtgaatgatgaaaacagccatagaacagcggttcaaatgtcacataaattttgtttaattgatcatgattctcgcggaaaaataacacctattaaactccagagggttctcaaaaatggcacaccacagctgtttaatttggagacgtgttgtttaattgttaatcagttcgatgagcaacgttgcggttacatcggtcttgcaaaatttccagcgctgtgggatgcatgatataaataaatggcaaaataaacaaaaatattattttaaaataaacagaaaatttttttaaatataaaccgaaacgttttataattattgtcccaaaagtggacttaattgaaaaccgaaaattaaaatgaattttctatcaatattaatttggcacaattctacataatataattttttatttcattggagtaattctatttttattgatagataaaagaagagtatgtaaaaagtgtatttttttctacactatcttttaaaatataatttaacaaatttttattatttacagtacataaacgaatggaagtggttgggattttgctcacttttcagaacatatgggtttttaagtatgactcaagtgcagtatgctctaaccatatatggtaataacattttttaaatatattttatttgcttttcaaggctatagtttcactaccccgtttttcaacattttgctacaccattttgatcgaaactaatctagtaatttttttttaa

SEQ ID NO: 7280 - DNA, 2586 bp, Heterodera glycines
atatatacatatatatatttatagtattttacacttaatgcgcttgtggcaaaaatcatcataattgctaattcatagtttacccctcgtacccagttacgtaaaaaaatgagcggattgaaaagattccgaattgtctcatcgcctaaaaaaagaatggtcgatgactttccaaccaatctcaaacatcttcgcgatgtaattctatttggcttttccggcctgttctatgtccgtgccagagttgcagatcttcagttttcattatacaaggtttcgggtcgtctattctggccaccattatgaattaacacggatttaggcatgtccgttgaagcgtaacgggatgttatgtaagaaaaaactcgacgaggaactgtattgtgccagttgtgaccaccgcgccaacaaggcaacccgcaatctgtacatgagattggagctccgagattgcgaaaatccggagataagccagactgcgactgtcttttccgcggtagcggaacattacctaaaccttaaggttgagcaatttgccaaaatggtagaagagcagcccggacagctcgaagcactgcttaaatctaagattgagcagactgtcgctgtcaaactcagtataaaggtgcacaaaattcaatatatggatgtaaaaatattcttttttgagtttaaggcaaagggagagctcgagacgttggactgggtcgctgtgtccgtacagcaggagaaccgtgagagtgagggagatgacgaggcgtcacctgatggacaaatgaacttgacacaaataacgaagatggataaataatcgagattgagaacaggagcgtgaattcggaggcctatggcccgcctaagaaacgaacaaaaaagaactgatccaaatcaattggctccgtctctatggccaattatttgtagtagtctttggcctagttgatgttaacccggattaatatcatagagagggaaagagagatagaccattttgttagtaccatatgtatctttgtacaattcatccaaaaattagtttttcaagcaaccacagctgaaccgacgatgaaaagggagcaatccacagcggcgggcattctttcattattatcggcagcagcgcacaatgacaatacagcggcagcctcagcctcggatagcaatgccaagcgactacgtcgtcatagttgggactttaagacgatggcccattttgaagaggaacgggcaaaggcggaggaggatagacagaaaaaagagaagcagcctcaacaaccagcaccttgtttgagcaaaaacagcattatgtgcaccgagtggaacggttcgcactgcaacgccatgtgaccgagtttgtagttaacggaaagcatgatgagccggaagaggcgcttctctgcgccttcgagcatatcatcgctcgtgcaatccgaaacgcagaggattcccatcagcaaactgacaacggaagaggcgcatctgcgggcgacggtgtacgtcgtcaaaggcacgtcataagacttggaattttcttaatggtagaggtgagattttccctaagcgttattcgctcctttgttaatgcaaaagttttctttgcaaaacaccaggtctaaccgacccgattctgctgcccattcgtcctccggagcaaaacacggcagaagtgttgatggctgagctggacaaacttggccagtcggatggcgatgaggatgtgcatggtggagggatcagcaaacgttctttgttgctcagcgatccaattgaagtggtcgtcacatgtatagcacctccggtggtgcggcgccacgtttttaccaataccagcattggggctatgacgaccggcagctgatccgtgtgatgaatcaggacgacaacttttgtttattcatgcactggttgccacccgttcgtacacggaccaggaatttttaaaggcaacttcgcgacgacaacccttaacagaggcggatgatgatcatcagcgggattcagtgaccgctgagatagcacgacgcgtgataacgagaaaaaatttttgtgctggctacgaagcactgaacagtctggtgtccaaccgggagcggatgaatgcgacagtgacggagctaatgcaagctgcagaaattccagcggaccaagagtcgtatgagatggagcatatcgaccaaattcagcagttttgggtcggttgttggtgtttgaatgagtgctgaacggtagttttttaaaccaaacaggaccaaaactacgctggcatatacagaattgtgctgtttgaggatcactccgaagagctgcttcgcccaatttggaagggcccaatgggacgccgcctctgtgtgtcactgtttttgtcggataggcattattatggtatcaaaaagatacattgcgtttcaaattgggtcgaaaatattgcgtggactgtgaatgtgtttacacccgtgacactaaatacaatatctcgtgcaagagtcgctccccataatgtgctaaatgttgttagttgtgtttgttgcgccagcagatggccagtcattttttttttatgcccttttatttccttcttgatccagt

SEQ ID NO: 7281 - DNA, 1035 bp, Heterodera glycines
aattaacatatgagggattcgaacctgcgcggtcaaaaagggaaggcaggagcacaacctccgcaccaccgaacaacacaaaacagtgcaaatgtttatttaattattgcaataaaaaaaagtttggcacgtcataactcggcactcagactcatttcgcagaaaataaaagcacttttcttaagaacccatgggtgctctatccacccaccaaatttcatttggaaatcccacggacacctggggaccttcctttgtgagaaaaaaaagtcgcgcgcgccgcatcgatcaaacacacacacacatcccccattttatttacatattatgcccatcgattattacatcattttgtgaaaattatttaattgtcggcacttttcttgctcatacattaatagaaataaaaattgtttatttttttttggattggacatcattttaaagcattgtgataattggagaatcgcgagaattcagtgccggcgacactttacgcgatcggcccttatttttttcacaaagtttaacgggccgcacgcgggtggtctgctctcgtgacacgactcaaacgcgagcggacatgcgaccaaagctgttcgaccgctcgcgtgagagttcagtgattgggtcgcacgcgtgcgatccccaaatgtgatcgggccgctcgcgtgtgactctaaagtgatcgggccgcacgcgcgtgaccccaaagtgattgggtcgcacgcgggcgacacaacagtgatcgggccgctcgcatacgacccaaatgtgatcgggccgctagcgtgtgactctaaagtgatcggtgccgcacgcgcgtgaccccaaagtgattgggtcgcacgcgggcgacccaaaattgtggcgggaccgcacgcgttcgacccaaatgtgatcgggccgctcgcgtcagagttcagtgattgggtcgcacgcgtgcgacccccacaagtgatcggccgctcgcgtgtgactcgaaagtgatcggggccgctcgcgtgtaacactaaattgtttgggtcgcacgcg

SEQ ID NO: 7282 - DNA, 399 bp, Heterodera glycines
tcggaccgctcgcgtttaactctaaagtgatcgggccgcacgcgtgtgaccccaaagtgattgggtcgcacgcgggcgacacaaaaagtgatcgggccgctcgcgtacgacccaaatgtattaggaccgctcgcgtgagagttcagtgattgggtcgcacgcatgcgacccccacaagtgatcggccgcacgcgggcgaccgattagtgattggagcgcccgcgtgtgacactaaagtgattggctcgcacgcgggcgacccaaatgtgatcgggccacacgcgcgcgaccgacgagtgagtggaccgctcgcgtgtgattcttaagtgatcggggccgctcgcgtgtgacactaaagtggttgggtcgcacgctagtgacacaaaattgtcaggaccg

SEQ ID NO: 7283 - DNA, 3947 bp, Heterodera glycines
aaaaatttttaattaataaggataatatatttgtcaaaaaatatatttctaccgcaaaaaagtccaataattcgaagtcaatttattaaacatggccgtttgtataaataatggagcctgattaaggattttcaaaattttgtttttcataaaaagggagttcttgtttttgttaaaacttaaaatgtgagtgatgttgtaatcactcgccgggtacgtgatcagaaggaagcatcggatgagcgctgacctcagcttccgtcggtcgaattcgcgctgccgcttcggtgttgggtgaatgcttgtgcagtgtgagcttaggcagattcataagagtgcggggaggagcagaaggtaatatatagcagtaagttcgagtgcttagaacaaatgggacgttctactcggaaaacgacgacgacgatatggtcgttccgtcaacttcagctggacggcgacgacgacgacagaggcgcagcggggggcggacgggtcccagctgctcgggcttcggctcctttggcccgccgtcgtcggacagcacggacggctcctttgtggagttggctgcgtggagtgattgatgatgggatgggggggggggcgacgacgatgatgatgatgatgatgactaatttataacataatcttgctatataaaataataataataatttcgatatctgttgaccgcgcgtgagcatgcgcaaagcgaatgggggggggggggtgtggggtaaggggggtcagacgcgcacgcgcagccctttgcaactgaacagcgcacgcgtgactgcaaatagtttgcctaaaatgggcggggggggggggttggagggaaaattagagtcgacaaaaattgaatccgcccacctcttcaattgactcagacgggacgcggccgaaggcggacgacaaccaaagcggaagccggtgacaacgacgacgacgacgacggtgaagtcgttgacgacttcttcaccgtggtcggtgtctgggagcgggccggctcccggtcgcgtgccacgcagaccgagaccatccaagtgcgcttccacaactgggagcgggcgcggcgccccgacctactgctcgcacgctgcatcgcccgtctgatggctcgcgtgctggacgggcgtgcggagccgctccgcgtcgggctgtccgtacagccgcccggctgggacaactgcttccacgtgccgatgcgcccaccacagcagaacagtgcgcacgcgctggcggccgccctcgaaacattcgcgaagcagtacgacgagctcgacctgttctccgccgacgtctgcttcaaagtgtcggcggtttgggccttgcccggtgagctcgtcctccgcatcccccacccctgtccctcgacaaagtttgacccctccccccaccgtttagccgcgcgcgtggagggcgcatgtgccgaggacgagcagcgcgcacgtggcactgtccgctgccaatcctttgtgccggttgtgaacggggcgggcggcgaccgctggtgcatggcacgcgccatcgtgctggggctggcccagcggcgcatctgcgtactggagcggcgcaacgtggtccacttccgcgccttctgtctggcgcagcgtggcgaagcgggcgcgcccgaggcacgtcgcctgttggaggacgcagcggtgccgctggaccgcccaacgtacggggctgccgaggcgcaacgagtccagcgctggctggacgccagcctaggcgcccaccaagtgcggctggtcatcttcgcccgcgagctggcctaccgcgtggcgtggaagggcgcgcggccggcacgctttaacctgtgcttggtggtacaggacggccactacgggtacatacagtgcccggagcagctattccatgtactatactacctttagccaaaagaacttgtaaaattgaaaattgtttaggcgcgccagtactgtgtggactgcgagcagccggtggaccggcgcacacacccgcaaggctgccgggcgctgtgcccccagtgtcttcgctttggctggggccgtccctgtgcgcgggagccgggccgcgcgccgtcgcgctgcgccgactgtctgttcgtgttcgagaacgcggactgtttcgaggcgcaccggcgccgggtggacccgccgccgcctggctggcaacacgaccgtcgtcgcggcagaccccaccgtccgatgtgtgaggagcggcgcgtgtgcgcccgctgtcgtcaggtggtgtggacccgtcacggcgcgcacgcgtgcgccctcaacaacaatgttggccgacagcaagcagcacaacaacaacaacagtgcgaccgatgcttcgggattcacgacgcgcagtggaccccccacttcatccagccgaagcgggcgcagtgtcagctgatcgccaacgacgcggagcgcccagccgccccggcggaaggcctcgaggacgacaacgacgacgacgacgacgatgataacgatggcgatgctgacgatgtcaacgacaacgacgacggtggtgatgcggaacagaatcgacaacgtcgacgacggcgcacgctgcgctttctgttctgggacgtggagtgtgcccaagtggcggacgaaaatgaagagggggacgagggggtgccggcgcgaatgctcaaacatgtgccgctgctggtgtgcgcggaggtgatctgtgagcggtgtgtggccgcgggcgtggacttggagcgcgagccggaccgacgggcgcctggctgttgctgcggcggtgcggcttggcgagacggacaacaccgccggtggctgatgcgcgcgcgcgaggacgcgttcagcgacgacgacgacgacgacaacgcagacgcggacgggggacggcggtggcggcggccgaacccgcgccgcttgcgtttcttccacgacgcggcgaccgggcgttcgccgatggcacagtttgccgattttgtgctccacgacgggcccgtgaatgtgcgcaccgtgatgctggcccacaacggggtacgggggtgtacaaaagcggagttgaagaaaagctaccatctacgctttgtaggggcgttacgatgtgcatttgctgatggaggagctccagcggcgcggagtgcgtccccggcggctggtcgccaccgggctgcgcgtctacacgctggagctgggcggacgaaatcagcgcagcgtggtcgccaaggactcgctgaactttttcggctgtgccctgtcaaagctgccggccatgttcgggctggacggcgtgccggacaagcagttcttcccctacaactacatcagggccgaaaatatggatgtggcgcatgtgggactgccgccggctgccgactacgacccggaccggatgcgcccggcggagcgcgacgcgttccagcgctggtacgcggcggagcaacagcgtcgacccaaccgactgttcgtgctgcgccgggagctgctccgctactgtgccaacgatgtgcgcattctgcgacgcgcctgtctgcgcttccgccacgtggtcggcgagctgtcgggcggcgtggagccgttcctggccgcctccaccatcgccgggctggcgctggccatctaccggcaacaacatctgccccgtgatctgatggtgcacacgccggagggcggcttcctgcgcggacgacgcgcttccgccgcctcgcgccacttcttcgcgctgctggagagactgcacccgcaatggcgcggtcgactgcgcaccgcccgctggtccatcggcgaagcgtgcgtggaggacgatggttaccggctggacgcgctgctctaccgcccggtgccgctgcgcccgctcgtcatcgagttcaacgggtgcttctttccggtaagaaggggggggggggggttcctttttcctgcacttttttccattttgcctcgtccaaggttggctccgagtgctacccgaggcgc

SEQ ID NO: 7284 - DNA, 1815 bp, Heterodera glycines
ttttaagattttttaatactcaactcaaaaagttgtagccgtctgttaaagtgtccctattttaatgttacatcccaattaaaaaaacatatggatggaaaaaataggcgtaattactagagctcgcattttgaggcagatgccttttttctgcacactaagttccgatatattaagcataaaaaatgcattttccacttggtttgaggcttctacttgaacttttattatgctttttttgccttttcgagaatttcgtgccttaaatgccttttttggcatttttcccttttggtgccttttggcattttttccgaaatattccataaaagatgcaataagatcgggaaaatacacccttaagaaatgaaaaacttttcaaaaaatacacccctaaaaattaaaaatttttctcaaaaattgatcgccaaaatttcattttttttcttgataaaaaattttaggtttaaaaattttctaatgcgaaaaacattataaaaatttaataatcatttaaatgcccaaaattaagttgtttgattaggttttatgtttttttgctccctaaaaacccttaataaaaaaattttaaattccttttttcatgcctttttcaggattttcgtgccttttcatgccttttttcaattttttggtgcctattttagtgcctttttcgcgatttttggtgccttttttgcgagctctagtaatgaataaaataataataaaattccatttttttgtgacaattcttaattttatgcaaattttttaaaattttcggataaactttttttattgaaaactgacagctattggtcgaagcagggctggagcgcgcacagaaaaatcctgcggtcgcggatcgcgcaaaaaaaatgccgccaatcgcgtatcgcggtcgcgcatttgtcaagattttccagtttataaaccatttttaaattttttggataaattatcaatatccaaaaagcaaaaccagttttttgtagttttctgatcaaatgaaagaagcaacaaataaatatgaggagtaattatcagatcaatttccattcaatgatcagaatttctcatttcctaataattcattcactttttccggcactcattttcagagaatattttgcgttcatttgacccgccttttgcgcagacaatggcataaatgaaatgaaatttaatgtgacggcaccaataaaagcaaatcacccaatgcaatctgcttgaagcataaaatggacatcgttcaaattatccaaattttcgtcctcccattgaaccgccggccctccaatttggcatcgtttcattatccatgggaaaacccatccatcaacttctcctttctccaattttagaatttcgctggtccgttcgttcaccaattcaaatggcacaatttctgttggctcaaaaaattcaatttgaattttgtagcaggcagaagaagtggtggcacggagaaatgcctaaacaatgggaaaccgaaatcaaatggcaattaatccaaacattttacgaaaaagttgggactgacctcctttaaatcgatgacccatttactaaatcctaacgtaaaaccatgacaaatcaatcgcttgggttggccatcatttctcggagtgtgcaaccatttggacaacgcttggccagcagttggagttgcatttggcccatcaaaatcatcaattccatcgggaagcagttcaccggaatggacagaatcaatggtgagatcaactagaattgttggcgaaatgaaaagaatgaaggggtcccagttgatcaccatccataaaggccaaa

SEQ ID NO: 7285 - DNA, 3448 bp, Heterodera glycines
  unsure (1)..(3448): unsure at all n locations
aacaaaaaaataaaaaattttatttttattttttcagggctgtgaatgcacntcgtggaatgcgctgaaagagatatgcttcgtgcacacnccanttgagctgtgcannccagttcatgtgcaccnaatgctgcaatggatgtacagttttgggatgtttcggttttatgtgcagcgattgctgcgcataaaggggatcaaagccggcgggctcggaaatccgctgctgagcaacagagatgaaaacgcaatgacggattacagtgttttttggccccgctcctcatgactttacggattgtctccatctttttaaaaaaatcgtcaccaatttcggattacagtatttccgttcttgaaaacgcaataataacaaatgacaccaaaaggtccataatttttggtgaatttaataaactccccctcgaccacccgccgccccgctcattgtcaactaaaaaattcttgctcacaggcgaataattgcaattttcttgcacgaataaatttgttggcttcagtaagtaaggcttggaatatttgcataaaaaagagtaaaatatgaactaaacaccaaaatatgtgcgaaaaataaattttgccgattaattttttccgtcaaaaaattttttgtttgtttttttcatttttcattataaattattaatccaattttttcatcaaaagactgaaaaatatatgacataaaataaaaataattttaattatttgactttatttaaaacggggtaaagatgagacataattcagtggtgtcatgaacaatcgaaatcggaacttcaggatcaaaaaaatcagatttttgggtcaaaaactgtgttattttacaatttattcagtcaaaaaatcaaatattatttttcagctttttttttttgcttttcgcaacgcttttttgcagcgcattttttcaaaaaaaaacttttgtgcaactgggcggaggggccagcggtgcctcctgcccagaggtgtcaccgggaaaaaatgtgtaattcttaatgcgatttgttaacggattttgtccaaaatctgaacaaattttgcaattttgagccaattttttaaaagaaaaattaggagtttttggaacccggcgtcgccaataggctccgccggggataaattaaaaaaaatttaaattttacttctgaaacgcccaacacattttgtttgttttttatgatgagcgaaaaaagggaaaataaattttatttatataaatattaatattaattgtacgaattatagtaaatttgatgtgataaaattaaattgccaattcattaaagggcattgataaaccataaagatgaatttgggcattttatatttcataaaaatggagtttaatgggcgccagaaaaacagacaacacaaaaagactcgccattgacaactcatacaacatcttgggagaaaagctagctaacattggtaggcttatggacgaaaacgaagatgacggcaacaacaccgactgttctatttcacgccaattgttccaaatctgcttgacgcttctacaacaggtccaaagccaacagagtgagcttttcactctcaaacagcggcaaattgcggacgaagctgtgcaagatcacgagcggcggcgaagcgttgtcgtaatgggtctactcgaatcgcagaaacaaaagccatccgagcgagtcgctgcggaccgaacggccatctcaggcgttctcgatgagcttggcatcgagagcccgatcactgtttacagaatgggttccacggaccaagcaaagacaggtcaaaaccgcccgcggttgatgaaagtaattttcggctgctcaaaacatcagagacaaaccttgacacaatggaacaaactgcgcgctcaaattagtcaaaaaccggggatgagcaacatcaaaattcgcccttcactcagccaagaggaactcaaggcccgacgtgtgctgcaggaagagtgcagcagaaaaagaaaggaagatggcggcgaatgggtggtttacgctgacaaagtgatgctgaggtcagacattgcgacatttaaaaataacaccaattgacttgctattttaccaaatcacactcaaaaaacatttataaattcgcacttttccggtcttaagcatgttaagcccaataaccccaaaacgaaaataggggaagttaaagcatgcttagttaatattagatcactttacaacaaaattgatgaaatagctttaaatttggtaaataaaaacatagacatttttctgttaactgaaacatggacaaaggaggaaaacccaatcctctttagcccatggatacttgaaaactataactttgttttttgtcataggaaatctcaaaaattaacacgtgggggtggttgcggtgttttaattaagaaagaaattgagttttttgttaaattttctgaaacaaaatataattgcgaaattttggtttttcaattacaaaaactaaaatcaattagatttgtgcttgtttatcgaccacccaagacaacatatagacaaaccaaggaactttttaaatttttagaaacattctatagccataattatgttgtgttgggtgattttaattttccgaataaagacctggtatggaaggaagggcagcccatttctatgagtaaatttggtgaaattttttgccacttttttagtaagcttacttttttcaatgccacgagtggacccaccaggggaaattcgtggttagacttagttttgccggcaaatgatcaaattgtaaagcaatgtactattgaaggtggtgttttttcatcggatcacttagcgcaaattttcacattgactattccaaaaacactacaaaaaacaaacttcttttacactcgacggttttttccgtcgaatgtttctctttttaatattatggtttcttctagaattagcgctttatctaacgagcattttagtgtgaacgaaaaatacaacgcctttaataatacattgctagaaaccttaaacgagtgtattccaatgaaaaaaattaccaaaaagatttgacccctaaatatccaacgcatttattggcctccatcaaagagaaagccagactgtataggcaatgtaaaactgacccaacaaaaaaagcactttatgatagcattagtttacacataaaaatacaaacaaataaatttcactcgcaaattgagaaaaaggctatttcaaagggaagaaattccatttttaaatacctacaaaaatacgatgttaatccctttgaaataccgaatttagtctttgaaaacaaatgctatcatgatgatgatgaaaaatgtgaattatttgccaacttatttgcaaattcgtttaacaattctgatgttgaccaggctatctaaacttgggcaatagttttgttaatcaatgctttatatcagatatagacttta

SEQ ID NO: 7286 - DNA, 1026 bp, Heterodera glycines
ttcattaccaagttttcttaaataaggacccacaaatgctcaaattgtttcactttctcatataatccctttatgttttaggcatttgccaatgcttcttcatctcctgcccaattcatcattgtcctttactttcggatttcacattttgacctttttgtccctcctttgccctttaatttgatcaataatttgacccgggaacggctgacattggcactcattgacaacggcacttttttactcgtccgatgtccgctggtgcgtgacgagcccaaatgggccaattgggagagggaggcgaaagagtggccaattgatggacaaatgaacacaattgtcattggtgaacatgaacaggaggaagaaagcgaagatgatggtctttatttggtcaatttgttgaacaccggctgaacaaaagggtccgactgaaatggcatttttgaaagtgccaatgccaatgccgcccatctcattaaggggtggggaaaatggtttttttcgagaaaatggtaacaatttaaaaaggtcaaaactttaagctcagcaacaccaatatgatttgtctttgattctttcaatgtttggcttaaaactctaaaatgattcatttttgggcttattctttcgctttcggtgcctaattgaatgcattttgcacgttgattagaggaggaaatttgtgcttaattgatgagatgggaggagaacagcaattaattttttgtgatcagtggaacaacaattttccaaatatgtaattttaatttgttaaaaattgagattttctttaaaaaatatttttagccaggtatgggtacttttctagtttacaagaccaattccatataatgtactcatttttattatgctttcatcggatgggggcgggtatggacataaaatggcaaaaatatggacataaatttttcccaatttaaggtatgaattctcaaaatctcaaatcagctaaacgcaaagtagaactttcaaaatggctgcatattgtattaaaaatcattt

SEQ ID NO: 7287 - DNA, 1940 bp, Heterodera glycines
ttttactttacttattttcctttatataataattatgcataaattcttcctaaatatttttatgatgatgattcaatgtgaaagtggataaaattgtccgttttgtccacataaaatgaaaaaaaggcattcgtcatcgcttctctcccaaacactgcactgatttgtgaatatggaatggacaaaattccgatcagcagaaagataaagccaataaacgatgagtcaccgtttctattggcttttttggctttttaagcgattgcaaagccaataaacccactaatttactaatcattttacccattttcagcaaatttattcctttcccaaaatcaaaatgaatttaatttgcttttcgttcttttttgttgttcttgtgacaaatgtcatcggtgaagggtaattaaatgaattcaaatcaattttcaaatgctttctgtttctttagacttgccgaggacaaatggaaaaagtgcgaattgaatgggaacagaatgatcagaatgggaaaggacgttaaaaagtaatttgcaaataattttggtgataattaattaatgttcccgcattaattagtctgctgatttgctacaagagcaaaatggccgataattttggatggaaagtgggaaaagtgttcaaaaggcgcaacgggaataagcaattggctgaaagatgtgttggcacagacggcacgaagggatggcacgcgctaatgatcgaacagaaggaaaacgggatgatccttaagtcctcttttgggtgagtgatttaatttaaattaaaaagcaaatttaattttagaaaggatttatccgtggaaataggccccgaattttttattcaaggctccgactttttggacattaacatcacaaagggtacagttgttcagagcatttaatttaaattgatcgagtcattagcgttaatgagttcctcttccgctaaattggccgagttccaaaatgctcttccgttcggtgtttttttgaatgatttcgacggcgcagcgcttggaattgtcgcatttgaaattcattgtgccattggaacaaatgacgtgaacacttgcaaaacgatggtaagtgaaatttaaaaaataaatttgaacattttgaatgaaaaaatggttggctacggggggaatagaacccatggcacaaaacaactgagatttgaatgtattaagaattttttttaataaaaattttaattttgtaggctaccgaagaaaaaagtcgaaaattgaccactcggggaattcgaacttccacaaccactcgggcaactccgccaaaaacaaagctgaaaattgtaactccattcaaaactgaaacaccacgcgttgtaatcgttttcattttttaaaaatttaaataatgctttttctagtctgaaattgaaaaatcaccgaaactgaccaccctggaaacccatacaaaaacaaacccaaatgtcggaacttcatctgccgtaatcatttccctcaaattaaattaaattaaaaatttttagccgaatctgttcactccacgtgattctactgtgaagcatttcggcacaaattgcgtccaaattgattttccagctgaaattgcccaattttcgctgaacgtttccgccgcactattcggcattgcctgtaaacaatacctaagaaagtacaaaattggacaattgccaaaaaattacgatgaaaaaatggaaataaaagacaaaatggaagcgtgtggaaaagtgccgacagagacaaattgcaaaaagttaaaaaaatggaaattaaaattaaattaacccctaattaaggtcatatgagctaattggatgttatgaaagcaaaagtcagcagaaaattgccaacgaggaaattgccgaagtttgccgaaaacacctcgcaaatgccaagttttcggatgggtttcgaattcggaact

SEQ ID NO: 7288 - DNA, 3855 bp, Heterodera glycines
aaaagtcaaccagaaaatttcccacggagggaattgccgaaattttccggaaaccccttcgcaaaatgcaaatttttggatgggtttgaatttcgaacctgtgccattcgtatcccagggagaaaagtgatcgttgtcgaatcaattttggaattttcattcaccgagaataagtgaatttaaataaaggttgaaaattttttaatttttttatcaaagttataccatcacccgaaatgcttcaattgatgatgtgaaggaatttgaagctgcaacaaaatcaactcaattatttttcatcgaatttggccaccaaattgggcaaagtgcgctccgtggggaaagcggcggcacggatttgtcattggacgatttggtcaaaaaggcaaaaattatataaaaataatttaatattgttgtttctttaaatttagaatgaaacaattggccactttttgggctcaatcgctgaacaatcaattgatgggggttgggcgaaatcaattcattttattccgccgtctgacagatttctggatgtttttttccaaatttcgaacccgccattttcaagactgatcagtaacgagacaaatttgatgccatatgaaaatgacccgaacaaagtaagagttgggaaagaaaatagaaaaaggttaaatattactagacgattccgactagttgcgatttgctgggaaatgattgtgaggcgacacgcgaaattctgcggaaaactcggaaagttttggagtgctgctccccctctaatgctgctggtccatgcatttgtaaacttccgaagcccgacctggtaaattaataattcaagcaaatgtactgtcattttctgttagagtgaatttgcggtgcctaagggtacaaatccgtctcagccacaaaagtcacgcttcagcagtaacagccaatcggacgacccattggattggtgggacgatattttatatacgaaagaggatgcgcaacaaagatacgactattttatggaaggtgattactgtatgagaaaaaaacattgcttaattggctaattaattaattatgttggttctaatttaagtgtgcgcaccgtgtttcccaccaaaaaagaaggggaaacggagaaggaaaagacaggcaaagctaaatttgagcaaatggaccaaatttccaattgcgatccgtttcagcaaatcatgtagtatatatgtagaatgaatttataaattttttaacaacattcagtgggcgacccgactccgcaacaatatgttgacgctgttgaacaagggataaaattaatcatgtgggatcatttttatcaatgattaaaccgataaatagtgagataaatagatactttagataaacttttgtccaatattccttgctttctgttaaaaagccgaaaaataaaacacttctcaaaattaatattgtttaaaaattgtgaactgatagaattattatttagtgaccattttcctcgggtcttcccgcattttatagttttgatcatttaaacaaaaactatactagggacaaaacttgcgtaacattcaccacggatctgagccatgggccggacgaaggcatcgaaattttcgacgcgaaagacggatactgcggtcgatcttgggttggacatattaaggaatggcaacgtgtttcaattaagtgtaccaatgttggtttttattatcgttatcaatttaattaagttcatttctaaattatcagtccaacactgttgcccacgagtttttacatgcgctagccctctggcatgagcaagaccgggacgatgccaacaaatacatcaaatggaatccaacgccacgaaatgttagccaggattacaagaattttcttttgcaattttacattaaaaaacactggcataatttaatattttagcaaaaagagccggcgaaaacagaaaattacggctttccctatgattttcattcaattttgcattatgaagctgtgaaaacaagagggtcagttattttaaaggtataaatgaaaagaaaataatttggcaatgaatcagctattacgacatgattacgctgaaccgtttttaccaacgcacaatgtttcactcaacatatgaactttcgtttaaagacgccgccattatcaacaaaatttattgcgacggtaaatcgaattaattcattataaaatagagtgaattaatttaagaaaattgcaaaaacgtcgaaaacaaatgccaaaagggaggatatcccaacccaaagaattgcaagcaatgcctttgcccggtgggatacggtggagaaaaatgcgaaatggtcgaaaatggtaaaaaaaaaattaaaatgataaaaattattaatatttcagatggaaattgccaaactgacagggcaaatgaaattgaagcagattggcaaattcgaacgttgaagccaaaagtgagctgcacaaaaaaggatgagtcatgcggatgccattggcaaataaaggcaacatttatatgaaatattaaaaataaaattaaaaaaacgaaaacaaacaaataaaattaatattaatattataaaattaatttaaagaaaaaaaacatatttacagccacaagatggcaaaaaggtgatcatcaaattgaaatggctgcatgaaaaggtgctcacctgtgatgacccttgcggcacttatcgagtcgaaataaaataccgaaaagacaaaagggcgcggggtaatttaatttaattaaataataattatttaaattttgtaaaggtgcatttatttgctgttctgcccaaattgaagaagatgaaacaaagaattggattgaggcgggtgcacccggcgaggacattctcatttcggcttatcccaatcagactaattttgaacaattgacggaattgttcgaattgacttacgaaacgggtatgggcacgtaataattattattttatgctaattgcttttaaattacttagacggcgccaaaattttgccagcgagcgattgtccggacggtgtgaattggaagccggagagatcacccggacatgttctgatttgcaatcatcccgataccggcaagcttgttgaatgctgcacgaaggggcagaaatgtccattaagggctaactcaacattcagctgtaaactaattgtggtaaaaaccaagaaattattaaatttttgatcaaaaaaagattttagctttggccatactcttttagacagttttggcacactttgggaaaattttataaaaattttgcgaaatttgggtgtggcctagtctcagagagggtatgaataagtaaaacggaaatattgataaaaaattattaagctaaacggtcaataccgcgagatcagaggcgtaaacgaaagcaaaatcttctttttcgaatgttttgtaagtgacattaaataatttaattaattaattgtaaaaaaatacattgtcaattaattaaaaattaattgattgattggttaaatttatttttaaagaggcgagaaggagagatgaaaagcttttggggttattggaaggacaaaagcaaagacccaattcgcattggcgattttcaatgcttgagctacgaagaagccggcatcataaatccgccagacaaaacagtgattgattacccattgcgcttcaaaagtgccaacataaacgaataatgatgccaaagggatgaaccaactgcggagaatggatgtgatgcatagggcgggtgtttttacctatttaaaagttttcctttttataatattttattttttagtgtatttaactttggttttgtatttgtaaatttatttatattgtaaataaattatttaatcata

SEQ ID NO: 7289 - DNA, 1805 bp, Heterodera glycines
gggttgactgattgattgttgtaattatatagatgaccacccgacggtttcccattggtctccgccactaatggatgatcatttctttaactgttcccctgtcttaatgaattattaagtcattagatcatcgctaattaggcatgatcgctgtctgggctgatgatcggcgtcgtacacttttcgttcattaattcattcgttttatcgcaatattatcagtttatttctgctgctggtcacatttatgatattgctttataacattatctctcgtattcagcttaatctctccaatttaattgcatttaatgcctattttaaaaatataattattcactgatgggacggaattttttttaattaacaatgctttaagtatcaatttactacataattcgtgtttttgctgactttgttctttttttcccaaaatgcacctttcacgcacctttcaccttaaatgaagtattttggagtttttggatattaattccaattttttacgccttagggttccattttgggtttccgaattccaaaatttcggaagccttggagttcaacaatgtttttaaactccttttttgccttgctgtcagcttcccttctgatcatctgaaatacatcttcaatatttgtaaaaaaccaatttcaatttttgatttatttattttttctatttggcaattcttttaaatttttttcatacattgaatgtgaatggagtgatatgaatacaactccaatttaatcacccttttgactttttaatagttaaaaatcgaaaaaaagagaagttttaaactttttaatccatctttttattttattaaaaaaagaaacaaaaatttttttcgaaaaaactttacagaaaattctggcactttttatttgaccaatattaaaaaagacaactcacaaagttttttttttttttgtaattttttatcttagttttggcccatttctttctgaatttctattttacatttccccggcttttctcctttccattttagtgccatgcttcaacatcgctttttgtcaccaaaacgtaaaaatatgtaaagtggcacactaatgaatacttaatgagatgccttggccaccaaaactttttccgacgatggcaccgccggggggggggagagaatcctgcgcatattttataatttgtgtacagcttcattttatgggaatgggaaggcaattaattaatggcaatgcacgtgaataatgtggcatcttttataataattatatggccaagaaatgtcagaaaatgagtgaaaatttgtggaaaatgaaaagttttcaaggaaatttttttttttgaaggagagttttacaaataggggacatgtcgtaaattgctttttctaatagtagggtttatattttcggtgctaaaaactggcaaaatagttgcttaaacgagaaaatagctattaaaaagtttaaatttagggggtttaaaatgacaaaatttattcaaaaggcaacaaaattaagccaaactagaaaatcggtgctaattaactcgaaacgtagcaatatatcgccctactaattagtccggtcaagcccgtttagcagtcttttgattatccatttaaattgaggcaaaacattcgcttttctcgccacttcaacattctgatcagtgcgagagcgcctctcgtcgatcaatgattaatctcatcaaagtttccgatcattaggctgattctgatcacttgcatttcatttgtttatccgatggctttcactaaaattttggtttgcatatattcttttccccc

SEQ ID NO: 7290 - DNA, 4275 bp, Heterodera glycines
gcaattggcaccacatatgccaaattaacaccaccggcggagggcctttatgcgcttatgggttggcacgcaaagttcacaaatcaaacattaatcaaataaagccccccgtatttggaagaaaataaaaagccgtccagagagaaactcccggctttacataaaatgccaaaaaaggcgtattttttgttttgccaaatttggatggataataagccaacaaaacaaaaaaatgacaacgctatgagcataaatgtcaaaagctattttgtacaaattattttcattactagaattaattttcgtttgaaaaggtggcacaaatccgcttagaaattaaaattttggcgtcaatttctcaattaaattttcatgcctataaatttttttccctttcaattgtgcactttttctgattttttttggtccaaaaatggcagccctaattaactactaattacccccacctctccccattatgtaagtaatcatttttcgccctatggccatgcatactgtaattttgtgctgttaccggtttcaaaatttactcccacacattattaacccaataataattaggtaatttctttgtgtgtctttttgtgacgtattctgcccattgtgaatgatatgagagtaaattgtgggattttttttttgccctttcgtcggatgaaaaagcaataaattgattttatattatatatttatataaattaaattataaccatcatagacagagttgcgcatcaacagtttaaattttgtcgacaaccataaccaaaagagcaaatcggagaattgtgtttcattcttcaagggattttgatcagtcaaagcattttgctatttctgcttttaacaaatatttatattgtctaaatttgaaatgaatggattttggtttaagcttaattttcaatgaataaagtgataatataattttaaaccgttttttatgattttgagataaaacaaaaattcaaagacccgacccggtgcatgaattaaaaaatcagacaaaaactctttatggctcaagggctataaagataacgaaatttttctgtttttttataattaggctattgtatcccgcccaaaaaaaggtttggctcggagcacgcggtcgcttcagtccctccctaccttcagcaatttgtaattttacaaaaatttcgtgaatcgcaaatttctacgaaaatttcataaatcggcaatcgaatctctgggctgcttcaagtgaattatggagaatggtaatggtagtagtgatgctcgagtggcttgttcttgtgtctcgactcgagaaaagtctggggttttttcggtctcgataagtctctggctcaaaatgacggtctagaatctcggaagttttcactcccgaacatcgccaataatcggtgtgtatcaatcctgaggaccggcattttcatcttcttcgatcatcatttttgaatcctcttttcctcttgccttcccccgatcagtcagttatattcctcatcatccctcagcatgcatctctgatcaattttagcttctattcccccacttcccggtctcctgttgatcagcttttcttcttatctttcctttttttctgactagctttcctgccattctacgatcagttcctgtaccaaaaaccctctttctctctctcctgctgccgttgtattttattaataataaatattattattattatttttatttatttttccaatcaatgcacaatttttaatacaatgggcgaattgacggacaataaaacaaaacaacacattcatttatttattattttgtttattgttttattgtttggtcatatgatctgctgacgagtgagtgattgagtggaacccatccaattttgtgaaattaaacacaaaaaatgaagacggacggacgacggccctttgggggcatccgtcgctttttgtcggcggaatggcgaaagtgcgaaatggcgaaatttgtgtgagagcggagtgattgatttcggttgctgagtgtcggttgaactgttcaatgactgatcagtgacaaccaatcagatcagaggaggaacaaaaatgctgaggtgttgggttagggaagggggaaaacgaaaacttttgctatttcggcatggatttggcaaaattggcgtgaaatgagtcagtggccatttttggcgtaattaacctgaaaaatgccataaaatgaacccatatttggcatgaatttgataaaagtgccgtgaaaagtccaaaatttaggcaaacaaaaatacttggctatttttggcatagatttatgtgaaaatcctgaaactaacccatgaaatttacttaaattttgatcattttggcatgcatttagcaattggcgtgtagtactccgatttgaccatttttggcatgaatttggttaaagtgccgtaaaaagtcccaaaatttaggcacaacaaataatttggctattttttcggcatggatttggcaaattggcgtaaaaggtttatttgaccattttcggcacaaatttgctcaaagtgccgtgaaatgaccccaagaatttacttaaaccgataatgcttattattttggcatgaacgtggcaaaattaacgcgaaattagcccatgaaaatccaaaaaaaaatcttttgccattttcgacataatttgcgtgaaatgaatccatgaaatttattaaaacgaaaattttggctattttcggcataatttatacaaaattgcaatggaataaaccctagaaaattttaaaaacaaattaaataacggtcaaggacgtttttggaaatgaaaaaatgtcctttgaatcagcacgaataataataataataataatctccttggaaattcacttatacgtggcaatttgatgtgaactaaattaggattttccattttttgatttgccaaaaagccataatattaataataatatcaaaaataataatttattttctgccttcattttcttcagcttttctgtccatgaatcttatcaaatttgtctctcaaccataagtcgtcctaataatttgtttttatgccctgctgaaatattattttatttatttataccaaaaaaaatattttttaattaaatgatgctttaaaagctgtttcaaacaaattattttcaaattattttcaaattttaaccctttccttccgccttcattttctcttctccaatatatccgttgctttgtttcttggcgaatcgtctttctgctgaccttggcacatttgcagttttttcccccttaaaaccattttaaattatttttgaaaattaatgttttacatttattttcaattttttaatatttttccccattttttattccattttcgttcgtttcgcatccaattcaatccccaacaaaataaattgctgtatttgtgctttgtgtgagtgcgtgaattcccgtgggaacactaaaaaaggccaacaattggcggcggagggcgtcgcgtcgcttttccgccgatggctaatcttttgtccgtccgccgtgccgggggggggggcgccatttttggactttccaaaatcggtggaccgcaaactaataataataataaaataataaatccgtccgttaattccctggggggcaatggaaaatgggagaggaattaaaaatgggattcattttcatctttattttcactcatcgaacggacggacggacagcgaaaataaacgacgagagcaaagaccaaccaatctcatccacggcactattttagtcctccattctcaaacaaaatgccataaatggaggagagaatccttggggagaatggcatcgccgtgaaaatgccttgagaatgtcaaaaaatcaaaaatttgtgccgagaattgggggctaagatgggaatgaactggtgtcaaagttggggttaggaagaactatgaccatcatcaagccatgtcttgaattggacaaaatttgtttgcaactgctgtgcgtcgagatttgagattgggtcgtcgagaaagcaaataaacaaattataattattatttgccatcaaaagaggggagggggaggggagtatttatcaattgtgatattcgtgtcaaaaaggtcaaaaatgtgtcaaacacattcattgatgagtgggaggggtggatgggggagggagggattaacgatttgccctcccccctcccccgggggggggggggaggatgtgctggaaaactagtagaaacccaagtcccaaagagaggctggaccctgc

SEQ ID NO: 7291 - DNA, 1907 bp, Heterodera glycines
  unsure (1)..(1907): unsure at all n locations
ttcattgctattcaaccgtaaaaacaattcattaataaatgtaattttccattttccttttttggcatttgccattctctcccgcacatttttcccttttcttcggcagcggaaaacaatttttttcttccatttaattatattttttctttttattgagacaaaaataagcaatttttatggcattcctttttttatgtaaatcctcgcattgaattgaatttacataataatttacatgcaaatacataatgctacagacaaaatcatcattttccttccggcatttacctttttaaaaaaattatagaaaaaaaataaaattatttttttaattaaaaattttccaaaaatgccctcaagcgtttctttcggcacgcggcgccgctgccatttccacgagaaattggaattggaattcctcaaaaaaaacaacaattatctaagggatgcgcgcactttaatttcccgcattattcacccacacaaaacacacgcattttgccctgcggcaatgtgccgttgaattaaaaaagtaattaacttttgccgccggcggcacaatccccccccccattggcatttattcattttcattttttggcgttttgtttgttgtttttcttccggctaaaaaattaaaatttggccattcccccggggggcgggcggtgaagcggcgaatgtacacacaaaggcaccgagcttcagcagcggcagcaatccgcaaacatccatcatcaattttagcaagtgcacaagcagtacctcttcttctccgtctttgccttgcctttttgtgtaaacaattgtctctgcttctctgcactgtgtgtacactctcccattttgcagcgctattttctctctctaatctcccttccctgaactgtttttctctgctctcccctcactgtttctctcgcaaattgctccctctttttttctatgaccactctctctcattttccactgtttcgcacccaatgcttttctgccttctcttccactctctcgcctccctgcactatttccatcccatgcataaacaatctcctcgtccccctccctctcctcccgtccattagcctccactcttttttagccttcnccgaataatcccatcgctcatcatcagcagcaccaccaccacagcccctcgggggtggagagggggtaaaggccaattttaagccgagccgtcgtggacagatgggcggggggggggggagaaaatttggggaacggaacggaaagcaacggactgtcgatgcttttgcccttccgtgtccttcccccgccccatcttttccccatttgtccccccccccctccgggcgtggtctttggcccgactcaaaattgctttttctaatccgtctcccccccccggcgctttcgcttcctcccccccccctcggggcccattgttcgcaattaaaacgaaggggaaaaaaagaaacattttcacatttttgtttgttgcaaaatttccaccacaaaaactttttttcctgtgctgctgtttctgttttcgcacaccttttgctttctttgcctttcttctttttctgcgagcaaaagtcatttttaagtgggggaaaaatttcattttttgagaggagggaaaagcatttttatggcatttgtaaaacgatctgtgatcacagttcaaggtttcatcgcaattatttatctttaaattttgctcaattttccaggtgttttaggggctttggccccggtcaaatggcaatttaaaatttatgaataatttctaactttttggattaaaaaattgatgcacaatattacataaatcttactgatcaaatggtatatccgaagcacatttgctcctaattaaacgttccttctgatcaacaggaatgccatgatgttttcgg

SEQ ID NO: 7292 - DNA, 1918 bp, Heterodera glycines
  unsure (1)..(1918): unsure at all n locations
tttttcgtcgatactntttgaatggggttttntttcaaacccccacttaaaggttctttatttgtcctcatttgaagttgattggttgcttaaaaataataattaaaaagctaaataaatttataaatatttttattgcgctaaatttttaaattagaaaatgtcttataatattttagtgctattctttttgccatctgatcaatgttacaaatttatttttactattataaatttgttaaattctaatagttaatgtttttgttgtttaaacaaaacaaattttaatgtaaaattttagagtttatttccaataaaaactatttttctgtgaatttcgcgtgaatattaaaaaaaaatatttaaaaattgataaaattatcaaaaaaagttaatgaaaaagccctgaaaataagcgctaattgagttaaaatttttttgtttccactttttcagcgtggtatatccaatctttcctcttttttccattgatttttccttttcctttagcttttctttatttcgttcaaactaacaacttgggataattcaaaagtttataagtcaaggtaagctcattagcctgctaattgtaagtttcaaaaaaatttcatcgggaaacaaaaaatgccaataactccatttaatttggtcaatttcgatttttaataacttcatttgacaaaataacaataaaaaacattatttttaaaagaataaaataatagttataattcatctttgtttatttttcttccattctcccatttttgtcgtcttggtcaaattgcctataaaaattttttataattatttcaaaaaagttattattaaaattcatttttattggtttttccttcaaaaatttttcatttcaattttagataacaaacctgaggatttttgcctttttcaacaaacttttaaaaaaaaataatatgtaagataaaataggatttttaatattttttgtaaaatttaatgtgaaccgagactcttgatttgtcaaatttcattcctattttcagactaagtctccactataaaaatgagaaatttctcaaattaagaaccgagactctcgattaaccaccaaattccttactagtgatattggagaccgcaaatttcccgagaccgagaccaaaaaagcagagaacttttctcaaatcaagatcgagactctcgagcaccattatttcttaccattccgtggccaatgcatcttccgaaatgtatcgcgattcaatgccccacatttatgtacatccctttgagcacattgagcgtgtactccttgtgaatgtgcgtggccacttctttgtccaacaattcatttattaaatttattttttctgcgtctaatttttcgcctccattttgttgcttcttcttcttcttcaatttgagtccaattaaccatttttgacagatgggaaagctttaaaattttgtaaagtttttaagatataaatataaatttaaaaagattttattgtaaaatgacatcattattcgattatggtcacttttttgtatgaataaaaattataagttcggatttgagtctgtatggattttgatggttttttttgtaagattatttcgcatgaaatcagcaattgcaatttagtttaagcatctaagggacggacaacatttagaaatttacaatttttaaaattataattcgcaaattttgtacattccaatccatctgtttgcgataattgaattcattatctgggaatttttaatccaaataaattcggtcccagataattaatttaacaattgatttaattaaataaatttatcaataaaatcagcccccaaattaaaaaaaaataaattttaataattatttgaaatttataggcagtttactattttaatttgataattcatatataaaatt

SEQ ID NO: 7293 - DNA, 6793 bp, Heterodera glycines
  unsure (1)..(6793): unsure at all n locations
cgttgtcggtgtaaaaaccggtcatctgttgggcccttcttgaaacacggaccaaggagtttagcgtatgcgcaagtcattgggtgttcaaaacccaaaggcgcaattaaagtgaagttttcttacggaactgatgtgtgatccctggcactgcggtgttggggcgcaacatagtcccgtctcgatcgcatgcgatggggcggagacagagcgtatgctcggagtcccgaaagatggtgaactattcctgagcaggatgaagccggaggaaactcttgtggaagtccgaagcgattgtgccgtgcaaatctgttgtctgacttgggtataggtacgaaagactaatggaaccatctagtaactggttcccttcgtagtttcccccagaatagctggagctagttacacagttatactcggtaaaaagcatgaatagaggaataaggataaaaaatatccttaacctattctccaattttaaatgggtatgtatccagggtatctttactatgattcctggcgttaaaagaaagaaccgcgataccgtagcaaaattttcaacctatacctaaaaaccgttaaggggggcaccggcggtggccaggtttttaacagatttttaccaaaaatttataaccaaaataaaatgaaaaggttaatgttgtactagtgccgttaattcttattttgaaaaaatcggttccggcaatggtaccaaaagacaggtaattaccaacaattatcggctaataccgtttctgttaccgtgcaatttagttaaaaccacgacctcggaaatgcccatatttccaagaactgctggcctattcaatgttgtactaattagtaaaattttataagttacaaataatacacctaaattttgtgccgtttagaaaatattttcctaattatttaaaaaatagctttttatagcaaaaattcattccacttaaatatcagaatttggttaaatgattttattcaaactcattgtatgacttttctggtgaattttttgacagggaacagcttccgccaccaattttgttcattttcggacgaattagttgccgattcatgtaattgtctcagcttaatgtaagctaaaaatgtggagaatcaaataattaaatgttttaattagtcatcttaaattattaattaaatactaattaattacagttaaaatttaaaatgtattattattactctctctgatcgtgttttgtattatcctgaacgttgatttattgacactttgtgaagcattttgggtcaaacagcttggcgtgattattggcattagtagtgccgttgatttatctgatgaattccaactcatcgattcaaatccgttattttccaattcttcagtcaattgaattggcattggccatttccttagaaatttgagtatgattattggcattacgccttatttttatttagcatatgaaattttttcgtaaaattctataaaattcaatttatcgagaattttattgcatgattaggaagttttaaaaagaaaatgaattaaaatgacaaacaatgaaaaaaaattatttgtaaatgattttatttgtttttccattaaaattttaaaatgccattaatttatggatttagtgattttttggcaatttttacttcatttttgttaacagcaacatatttgatcatgtcttttttatttaaaaatcacctattcatcagaatgaacatcaatttttcaaacataaatggcacagaaccatttggataccataaaataatttttgccgccaaaatagaaagcgcggcaccgttgaaaaagccgacaaagttgccataaatataattacctgtaattcgattcaatttttaattttatcaaataatcggaaaactttttgcccaaaatttgagactccgcagcaccattcgaaattttttcatgttgcttttggtcctcatcaattccaaaatttgaatatttgccaaataccctgaaaatgccaaattaaattatgaaactaatttgaattatctccaattttaaaaattatttgcttgctcaaaagttcgctaaaaaattaaaatatcaattttgaaattatttagttatatatatttgaaattatttgaaaattaatatagatacaattcttttaatgatcgctataattaaatctttatatttatttttagtttaaattttttattttttctcaccggaaagcgatttgagcatcccttcgtgcggatttaatgaaaatgccataatttccatcattgatttgacgtcagttgcatccaaaggttcgtcagggatggcttcgatgttagggattaacacgagggccaagtcgacatcaatgccgaaaaagttcaactcaatcatcggaatgtaagcgcgcggagttttgttcagaaaggtgactttcggatgctaatgacaataattttggcaattaaataaaaaaattaattattattttaaaattattagtaaatttaggccaataatattatagggatgaaaaaattagtggattttaaaatagatcaatttatgaatgactttttcacaactttattattcaaaattttcaattttttagaattttttaaaaatatttttagcaataaagcccttattctcttattttctctttaaaaagaacgaagttttcaattttctgatcattaattcgtaaatattttagctttatttaatgcacataaactcgaggcatttaaaaattatttcaattaaattaactaattaattattgattaattaagcgataatgccttgcacaacaggcagtacaacgaattgtcatcgcaaattctttcgtttaaattgcaataatttttgccaaaaaatgtgtccatttcctccttttgggttactaatgtttgtcgcattacgcaaattatgtcaatgtccgcgtttgttgtccgtgcgcctaacaactgggaacccgtctccaacactcgcgcattgtcgttggactaattaggagggattaaataggaataaaaaaaaagaaaaagacaaaaatttaaaaatttgaaaataaatatttttaattaatctacaggataaaaatttcagcaaaaatgttatttattttccttttaatattaaagacaaattcgaaaatttttcgattaatacctagggctaaattcaggctaacaatagatattccttttcttggcattcttttagttcacttctagcttcccaaaaaaaaagaaaattgaaattttaaggtttttcaagatcttcccgatcggtaaaaactttactgttacagtaattaacacgttttactgtactgctcaccagaaaatcagttaagtagataattagcaatatgagcgactaacccatgccgaaatgagagatttcagtgtattcaatgcggatattgattcggttggctgcgcttcatggaacccattttcacgcagaagattgaccagcttcataataacatttttttttattaatttaaaataaaataaatttaaaaagtttacaaattcttcatgcttttcttcttcagaacttttaaaataaatttgctgtgtattttgtgggaaatttgtgcccagatttgttttacatttatccataaatttgccttcatattctttatacaattttctgtcttaataaaaatgttgagaaattattttactgttttatattggaattgttcagccatccgtgacaaatttcgtcggaaattttcgtccaaaacgatattcctatcaccgactgtccgtcataaatcttaccgaggcagggccagtttggtctagtcaagttcgaatgaaccaagatttttttcgtgatataattgttagggcttcgttttttaggcaaatgcctaaaatttctgcgcacttaatacgctcaaataagcacgaaacacgcgttttccacttcgtttgaagcttctacgatgatttttataatgcctaactttgcctattttggaagtttcaaaaattgatccccaaaatttttttttttttgataaaatttttggtttaaaaactgtctgtgttcgaaaaaaactgtaaaacaattgaaatataaccaaaattaagttttttgattaatttttatgggtttttcaacaaaaacgcgttaataaaaacattttatttgcctgtttgtgcctattcggggatttttgtgcctatttaatgcctatttgcgatttttttctgcctttttaggtgcctatttcgcgattttttgtgccaaaaaaaaacgccttaataattgtttgtaatttttaattgttgccaaaatattcaaaatattagggagatggatcgataatgaatcttacaaataagaatcgctttttgtctctgctataagagatttggggtttcattcctcagcatattgggatatattcccgaacatatgggattttcagttttgggtttctagaactcagtactgttctctttatgccaacaatttttcagttgactgctaattaattgccaaaaattttgacacaacttaccaattcgctgctgctcgcccaatgctctccacccgttcaaataatactcaatgaatcgatcggccaagttctgtttgcttgtcccagtgatttgggccaacattttgccttgcagtttcttatccatactttgccaaatgctttttacgctttttggcccgtggggcgtgccaatttcaattgcttgtgctaatttgttccggtgcaattgtttcctgaccattttcatctcctcatcctcctcatccaattttatgtcaatttttttgccttccatttcaaaaataattcgcttcaaaatgccgtacaaaaggtgcgcaaatttttcaaaatcaccctccgttttaatcgccaaaattttggtctcattgagtcgttcctccaggaacaatgatgtgtccatttcatttaattgtttgaatttaaatcgttcttcctcatttgcccttttaattgccagaattttgttgatttttgcaacaatttttgtccgatgcaaaatttcgttcacaaaaatgccaatgtccaaaatccgacgctgcatttccgtgggatttgtaaggaattgggcataagcaaaatgtaaaaattcatcggaaatgaactctaaaaaaccaattttaattctttaaataatatgtgaaaacgcagaatgggaagggtcaatacttttaataattttgacttctcaaattttcaagttttaaatatattttcgtaatatttacgatcgctatttgaatcaaacattttttcgtccattttaaatattggccaaaatttatggataggggagctcattatctgaataattgatgcaaattggcaaaatcatttggctattatgtatgaatttagatgaaagaaattattgattgtgatcaatgatcaacatttatgaaaaatagtgccaaaatttctagttcaattattttttgaaaaaatgaggggccctcttcccatcctgagtattgctacaaaattggcacaattcacttggcaaattggacaattctgttcgaaattcatcggccaatattctgttctgccatttctcattgctgacaggactttgcactgagttactccaattacgcggcgaattactagtcgaaattttcaaactattagaaactttgtgcctcaaggggctaaacagcatattctcgctgctgttccatgatggactgtcggagtgtcttgatggactcaggtttggactttcgtcgtacctgcaacacggattttaattatcattattttgagagcgggagccggaaaataaaaggattaataaaggagaaaaatgtggtttaagcagtgccgaggcaaatttggaaaccatttgatcaaaggttgaaatttttgggcctaaataagtcgtgaccaaaatatgggataaattgccccaaagcaaatttggaagcctaaaaggcctctagtctgaaattctcgttattaaaactcacgtgagcaaaatattgggtaatcagccccaagcgccaaatttggaggcctaagatccctgtggctaaacgtggtctaaaagtggcacaacggtttgcacctggacggggtatcaaagagcgcttcatcgttgcattggtcaattattgtgccgtgtgacgatggcaccaacagtctgcgtctctgccgctccaactttctcttttgttcactctctagcctccttttccgcttctctgtctgtctcgctgccatctgttgccccaatttcttcactctctcctcctctccaatcagttgttccatgttctgatcagctaaatcagcttcacgttgcttcttttcatcttcttctctttccaatttatcttttaattttttgtttttttcatcaaaatctttctgatcagttgaatacaaaattgtcataaaatcctcgatcaattcaaattgtatgaaatttattaatcgttctttggcctcctcatttgcatcaaatccttaaaaaatatttactaaatttctttttccattttaattatccattattatggcgtatatttattatgggagaggattagaggatttcaccttccgaaacgaaaattaaaaatttctaaaatctctcatctgcagctcttatctcggcataccgtacaataatgaaatatggtatataatatatatatatatatatatatatatatagagagatatatatatgggancnncnnnnatgcttctcaaaagagagggattacacatatgtaaattttact

SEQ ID NO: 7294 - DNA, 3628 bp, Heterodera glycines
cttctgtcccagcaatctgcgttgcttcatttgggatcaaattctcagcctttttgccatgcgtgatgcatgcatttactgttgggttgcttatccttagctttaattcgtctaaaagcccaaataagtccatcattttgcagctcaacaaattaagtgagcctgctttggcaacataaaatgtttgctcgacttcaattttgccaaatttgaatgtaccgaatccttttccaataaaggaaatttttgtgccgtcgaaagccttgccaatttcgttacatttttcgatcggtggtcgtccaacatattcgtgcgtcaattgatcaatgacgacaatgtccgaccccgtgtcgagatggaattcgactggcttcttgttgaacagaaccgctgtttttagcagcgaaatggaattgacggcatgcgtggtcattccaatacgaaggtggccaacgcggttgtttcctttctttttggcattttggcgtttgcgccactcttggacacgctcgcattgtttgtccaaatggccgacaaactcacacttgcggcatttgctcgttttgtaacggcattcgtcaggtcgatgcacgccgaagccacatcgccaacatattgtagttgcctcagtgttggtcctttctttgaatttgttcggcaaattatttggctttggactttccttgacgtatttgttcgttgaattgtttggctttgaattttgtcgaatcgaattcactggcctcgaagaacttgtcgcttcgattgcctttgcttctgaaattgtggattggaagctgattaagtcttccaccactccatcatagctgatgttggcgccatctgctgacaattttgtcagaattcgctgtcgcaatgcagcttcgttgggcgctttgagtgccatcaataacatgaggcaattaaattgctcttttgtcagctcatcgaatttaaaatcggtcagcaattttctgtgccgatttatgaactgcctgaattgttcgccttctcctctcaccgcttttaaacactcgtagcggtcgatgaatatggactgagccttggcaaatagcttctcaagcttttcggtcgtcactttaaaactgaaatctgtgaccgacgacggcagaactgatctgctgtattcgctgaaagccgattcgctcagcttattcatcaaacatttgaccttgacttcgtcgtccgccgttggtgctgtgcaatccaacgcgaatttgaagcgctcaatccattccgaaattcggctcttgtcgtccgttggctcgaatggtgaaatgtccggcaatattgggactgaatttgctccttgattgggctgtgccgccgcatttggtgcgttttgtcggatcgcaatcaattgagcaatttgctgtgattggtcctgcaccattttttgttgatccgccagcattttcactagctgatcgattgtcggattttgcgcaatttttgttgatcaattttcggtgaatttccttgtctttgttgagtaaaccgcacctggcggaaaccgcaaccacctgggtatcttggtttttttatgatgaataaaccgcgcctggcggaagctcacccttattgggtctattgcttttttgaagaattgatgaatagcaattcggaatctgtccgaaattgccaaaatattccgacgttgagcttcttttttaagacgggcgtcgccaattgttcggtcttcaagccgacacaataaaatgtttatttgatgaacaaataaattaaacaattttaaataaaaatgggcgaagtcggaggcggaataaataaattggaggagaacaaaaatttaggtgaagagaaataagtgcataaaaagcaactgaatgaatgaggggaatggacatgcattggacaaaataaatcaatagtgtcttacattaataaaggaagacacaacaaatagagagtggggaaaataagaggaaaagaaagagacaaatgcaaagggaaaataaatacaattgtgaactttcatctctcggggttgaccacccgaacagtaatacataaaataattaaaatgaataaatataccataatctatttctaaaaactctaaaatcaaaatgtttaaataaaacaatatttaaataaacatttattgattgacttattgatattggaaaaaagccacttccagaaaaatgatccgaacaatgagacaagaattatgatctaataaaataattaaaattcataaattaattatttttaaactgcaataaattattttacaaattcgaaattaacaaaaggtatattaaatacatatttaaatagttattattaataaataaactttatataaaagtttatttttttaatttatcataaatttttgctttataaaatcttaattgtatgcaaataacgagctttaaattttatgacatagacattaaaattgatcatagcaatgcataaaagacaattgtttaacaaaaattcaacatttttctcttagccaacattgttttaataaatatcaacactggcgttgatatttatttaatatcaacatacattaagccatcaacgtaatataaatgctatttttaaaaattcgataatttttaaaatgttaagcaattttttaatgacttttggcggaaaaataaaatgtggagagagatagaaaagtgagagagtgctgaatttcagtcccagtcatacaaaagcatttttgtgaagaagaaccagggattcttttttatgtaatacatgtttttttcctggatttgccttttttgcaattttggtgccttttttcatgcctttttcagcattttaggaaaaaaatagaaaattttaaaattttttgcaatttttcttatcatatttcactgcaatttccaaaaaaatttttcccagcggcaataaattgcaaaaattcaaattagaaaaatatttttattaaattgtaagagcaagagaattatcaatctttagaaaaaaaacaattaaagcaaacacaattcctaagacgaatcagtttttttgttgatgaattgatgttttcaataagttgttcaataaaaaattcgataaatcaaaataataattactttttcagaatctaaaaaatgaaattttatttgcttatttttgttcctattcgagaatttagtggctatttaatgcctatttcgtggtttttctgactaaaaaagaatccctaatcataatatttgatacagaattaataactcctgcaaatacaattattagttgattaataaagaaaaaatgagtattatgtagagtagagcgggaccgggaccaaaacacggacaactgagtacaactgagtaccgaggtcccggttttgaccagttttgaccgggaccgggaaattcccgtggtcccggactaatactcccggatattccacctttaaggacccctttccaggcagggccagactttgccgggtctaatgcaaacaaacagctgcacttcttaaaaattgactcgacaaattatagggactgtaaaagctgtgaaatttttatgaaagatatccttcatagatcgcgcaattttctattttgactcctataatacttacaaatacaataaataa

SEQ ID NO: 7295 - DNA, 3219 bp, Heterodera glycines
  unsure (1)..(3219): unsure at all n locations
tttttgcaatttgggtccttttttcaagcctttttcagcattttaggaaaaaaatagaaaattttaaaattttttgcaattttttcttatcatatttcactgcaattccaaaaaaaatttttcncagcggcaataaattgcaaaaattcaaattagaaaaaatttttattaaattgtaagagcaagagaattaacaatctttagaaaaaaaaacattaaagcaaacacaattcctaagacgaatcagtttttttttgatgaattgatgttttcaataatttgttcaataaaaaattcgataaatcaaaataataattactttttcagaatctaaaaaatgaaattttatttgcttatttttgttcctattcgagaatttagtggctatttaatgcctatttcgtggtttttctgactaaaaaagaatccctaatcataatatttgatacagaattaataactcctgcaaatacaattattagttgattaataaataaaaaatgagtattatggtccataaatgaaattttaaattttccaaaaattctattaatatggatatatattttttattgcatctgatttttttaaataaataccaatattattaattttcatccttgaatttttatgattttttgcggaccatgccaaaaactgacattcgcgcgctactttttggcgaatttaaaaaaaaaatcgattcaatgtacaaaattttagccttattattaaataaaaaatgaactcacaataaaaaaaataaaaaatatatttattcatgaagggcaaaataatctttttttttatataagatcaaattatttaaaattatttcaatttcttaatggctaaattaatattttaataaaaataataatcataaaaccgaagacccaaattgttatttcataaaattaaaaaatttattaaatttcgggcgtgatttcacgctcaaagcatgattataatcaaaaaattggcaaataagatctaatgaaatcttattcaagacaactttacttgaccaatttttaatattaattgtttaattttggaaaaaccgattcatggaaatattttaaccttaaaattttgataaattaattcatagattcaaacatataaaattgcgccgatattaaattagaatatttttaataaatctccataaattagaaaactattaaaaataattgaaattatagaggattttatgaaagccttcctttttcgaattagttcaatctattttaggaaaatttttaacaatttatttaaggatattttaatattaaaaataactttaaaattttttatttcattagcgttttatgtgtaattattagtcacaaagaggcctaaaaattcgcttatattttgtgaaaaataaaaaaattgtttaaaaattaaattttaaaattttaatccttcaaccccagaaatcaaacttttaatgggctggatgacatgataaaaatatactaaaactagtctagttattgaataaaaacgtaatacttaaggcggcgttgtaaaattatgcaaattaattgtataaaaaaatataatactctgtctttggacctttattattttgatttatattaacgatcttcctgatgctttgccatcaggagtaagaattaaattatatgctgatgatgttaaattgtatatttgttataaagcgagatttgacacagaaattatgcataaagcattgcataatttatcagaatgggcaaataaatggcaaatcagaatctcaattaaaaaaacttttgtactttacttggggaataaaaaccccaaagaaatatataaaattgatggaaatataataaatgttgtggatacaattagggatttaggcataaatattgataataaattgcaattttccaatcatgtcgcacaaataataaagaatgcatatttacgtatgcgttaaatcaaaatcttctaggatttggattattttgtacaaaacttatgttagaccgttattggaatatgctcctgaggtttggaatccatctcttctaaaaaatattaaaaaaattgaaaaatgtcaaaaatatttcaccaaaagagtttctttttaaatgtagccttccacccattccataccaaaatagattagaataccttcaactaccaacacttgaaagcaggagaaagctttctgatctgttcatggctcataaaataatttatggccgaacagatctgaatccctttgaaatacttaaaccttctaaacgctttaacattcccttttatagacttaactcgaaatataaattaggcaaaaaatttataccttttgcggggcgggtaacaaaaatttggaaccaactcgataaaaaccttattgaaataaactcattaaatcaatttaaaaataaaattaaaactatttcatttctgtaagattgaccggaaaaataaaagtcgaattattaattcattaaacaaaaagtgatttggtcattatttttattttttttttattgacctcacattatattttattttttggcggcgatctcgtttttaattgtttatgcgctttcttgagggcattttaattaatgttttgtcctcaatgtaagcggatttttggttttgtggactttataaaataaaacaaaaaaattgtttttctttttaaatttccttttgctttgacaagtgaaagatacaaacagccagtaaatagtgcatcaaattacctaaactaataaaaaagaagagaagaaaattattcaattaaagaaggtgtgatttaatataaagttacaattagataattgtaagtacttgcattttaatgagttcatttagaaaattaaataaattttatcaactataattaaacggtacatatatagctggcggcaagccgagaaataaaaattgaagatttggggataaggagcagtcgaagcaaaacaaataattttttgaagtttttaatatatagtatttttattttaaatttttctaatagattcaaagtgttcctaagccagccctccgttcggtatcaatgttaatatgtaaaatttatgttcgttggtttaaaatgataaatcttcaaataaagggcagaacaaagaaataagtaaaaaaatgaaaaaccttaatttacttaagacctaattttatgctacaaggacaaaatttaattcattcaattagaaaataattaaa

SEQ ID NO: 7296 - DNA, 5845 bp, Heterodera glycines
aataattaatcattaaaaaatcaaatgttaataaaataaatgtatcatttttataaaaacaacttgttattttgtcagtaaatgaataatttacaaaaataataaatttgaatacaatcaaaattgaatataactatatgaatttaactagtaatggaaaatcaagtaaaatatagagattctggaaagcaatttaaaaattaaaaaaattaagagaattcgcatattttaaaatggattattcttttctacaaaatttcattgaatatacaaaaaacacatcacacatgtaaaaaaatgttttaacataattaattataaaaacaactgaataataaaaatatttgtgcattatttatatttttaataattagggttgctccccgacatgtttcggggaattacgaaagtcataaattgcacttgaaataagatggaagtatctttaaatgagtttttaagacttttttgttctggactttttctttttgtgttttttagactttttatgaaaatttcttcctccccgactaaggtgttgctccccgacattttttaaatttctccagccatccccgacaaattctttcggggaatttcctccccgttccccgacattttgctccccgaggctcggggaggaaccctacttaaaataattgaatttattaatattagaagataaagatcaaattaaaatcgaaagaaaatattaaataaaaagtaaaaaagaatattaaagtttttaatctattttaatttatatattttattattctttaatatatgctattaatatatttcataaagtaattaattttaacgaacaaaaagtttatcataaagaagtattattaaatcaacaatttcttaaaggcaaattaaaaaaaccaaattaaaaataaaatataaattacacaataaatataaatttaatccgttaaatttttagagttatcacgaacaactacgtaacctcgataagctagcaagataagatttataaaatatacacaaatataataatatttaaattataaattaaaaaatagtaaaagtgctgaaaaatattattccgttggggacccgtctcgatattcagggatttaaagagaatataatattattttgtcatatataatttttttagttctagtttatagaaaatataaaaaacgctttggttattttttcaatttctattttatattggaagtattgaaagtgactttgaaattattaatcattttgttttctgtaggtgccaatttgaacaaactttttgtaattatacaattaccattaatgtgtctattatttaaaaaattccaaaatattcattgaatattacaatattaaaattgcttatcgaagaaaacttatcatcttattataataagtaaatcccaaacataatttttttcattaaaattgggaaaacaaaatatcgtaaataaacttattatatattttttcttttgcccattttgttttttgtttaaattatgcaaattaaaaaaattatacacgtgaaataaaaaaggaataattgataattgacacaaagcatatttcttataaataaaatttttacgtttataaaccttaataaaatgaaatattatgatattttaaattacaaattataataaatattaaaatataaaaataccaaaaaaataaatattaatttcaatgaaaaagttttaaaaattaatttaagcatttcctcagtatgttttaaacgcctttccaaaatcgagtaaattaaaaataaaattttacttggaaatataaattattaaaatttgctaaataataatccttttctcaaaataaaaaaaaacaaatatttgtttttaatgggaatattatgatttcttatttttttatcactacaaaaaaaaatagtttatagttaaaattcatatatttgtcaaaatgactccagatgaaaattatggtaaatattgatcatagtcgccaaactcaatatggtttaaaaactgtctgaatcgatgttaaatgcttagaaatgtgcaggaaaaactgttatgcaaaaccaatttaaaaaatataccagagttgtataaaaaaatagacattttaaatctatgaaaaatttgtctatttctaattcttcactcggcgccggatttttttaatttaacatttaaaattttgtctttaacagactaagtttaaatttcttataaaaattaagttcataaacaagcgttgtataataccggttcataaatattagtttcgaatttattcctgtggcgccgagcattcgtaatcagaccgggaagagaaggattttatacatttttgttttcactaaaaaatattttcactcttttaattaaataattcgaatatatataataaataataattttcttaatttacaaatttaaaaaatagtaaaatagcttaaaacgctccatcttggaagtgaccttaatgattatagttttgttttgaagagcacaaaattgctaactaattgctaaacaatgaacaaataaattaattatcgacaacattgaattaataatgaatgaatcatttattcttaaatttactgtaaatcatgtgctaatgcacaagagtaaacaaaaatgctagtggcgtaagtttccatccatttgtatttacatctatatatatacatataattgtactatttaggggaacacttggcaatggcgtcagccggcaaaaagcacacattccttctcggacacaagcggttcagctcaagaacctacatggaggagcatgccgtttccgctgcgtcagcatgggaggttcatggtaaatagtgctagtgtttattgttttaattaattttgtttttaaaaaattgtaggtgaggtgtacgaggctgttcgccttgtgaaggaaaatttcacggaacaatcaactcgctggatgtgctttgcatgccagcgaaccgaccacacattccaccggtgtccgaacaaggtcttcgttcataattttttcaatattagctaatttttcctttaaaacaggcgattctggacgaatttaaaaaattcgttcacgaattcccacaggaccagcagaagtttcggctggtcctgtcggacaagattgccatggatggcaaaatgctctgcgaattagttccggggttcggtcagtttttttttcttgttttatttctcatttaaatttggcgatttttaggcgggaagatcgtgcgccgacgtgaacaagaggcggccgcaaaattgcgtcagcaagaagcggatgctgcgaaggagaaactgcgtcagcaacagcagcgggagcaccttcgctccttgggggttggttttgcctcacttaatgaaagaatttcttacagctggtagagataattctgtcagctgtaaagtatacttacatgtgcaatgtttttaaattttttttacagcgaatgcccgcagctctgctcacgttggaaacgggccattccatcgatcaccttgacgcaaagagcaacatcgtgaggatgttgatcgagctggctgaggaggaggaggaggagaaaacccaccattattttttttttgtttcattatttcattttattttgttcacctcccacggctgtcccccttgggacgggtggaggggtggtggccggcgggcggccgaatgttgagaaactttttaaaaatttcgatgcccaggcgcctcaatagcgaggcgtctctaacccaaacggccctctttagggctgtgagattgcaagagttaaatctgcccgccggccacaacctgatcattcactcatatatttgttttccctttgctttagccatagctaggagataggcaagtgtaagcatgcaaatcactgtttggcatatgtgttttaccatatgtttacaatgcttacactagcctgtctccagctaaagacccctgccgtttttccctcacttcgttgaggttttttacccggcgggtcttcttctcacccccacttcatcatttatttgttttttgttgtgtcaacaataaatttatttgtaaattagcttgcatgaattttttaaagtttcgaaaaactaatttttatatgacttttttgtacacaacgtagttttgggaacccttcaagcgatcttgaaggggctctctctcgaatgccaagcatacaccaaggcttggaaacgatcatacgagatcgcttccgtggccagcaaaagatgtccgtcggctggctcatgtgtcggtgacttttgcacaaaagtccgaccctccacagccatccgagagctcagggaaaccgaaacgttccccgggaacagtttctgcatcgacagcacggcattttggggaaaccaatgtctcctagcagccagttcatgtctcttctacaagtggtttgcaaaaccacgctcataagccatttacgaagtcatcggatgcaactcttgggagtttggcatccatattcaacttcgcctcgactctaccgctggaagaagtgcgacagtcgaaactgtgcttcttccaggccgtgtgctcaaatggcacaacatcagcatttcaacaataggagtgagccaagcaccggctcccctactgaacgctgacttcctgattgaagggcgaaatgtcgcccttgtccgtgagaaaatcacggactctttccattgtacagacttgaaagccgcccaagctttcaattgtactctgggaattgacgcatgcacgggctgtcttcccgatcacacagacgggacagtctcgtgccattgtcgcgtcgccaatctcgagggtctaatggaagaccctcagcggagacttccgctctcattccgccattacgaactgcggaatcacggaaggcgaatattcgccataaccggatatagtccggtccaaatgaacattcaaatggacagccttcaaatgtccttggaaatgcaccagagtttgtgtacaatcacaccaaagcacatctctggctgctacaaatgtgcgacgggagctcagttctcctactcgtgccacactgacattggccaaacattggccgatattcaatgcgaagatggttcgcatttcacgagcaaatgtggcccgaacataacggaccacactgtcgtgctcccattccagcatgccgaaataagcacgacatgccaagtcatgtgcttggctgggagaaccaaattctccttggtgggacaactccattatatcccactccgacaacagtcagaattcggagcccgagtctccgaaagcctcgaagaggccagcaactccaggctgggctgacttcagtttcgactgggcgtccacccttcatgctctgtttaggcttaaaacaggcctaatcttcttcattgtcttgatgatcggcattgcaattatcattttcgttgtacacatctctcctgtgtacaagttatggagaacatttgcttggttgctcgtgaaccaagctccgcgacccaacaacgccacaactttttccgtggctgccattctctttttggcggccggaggatccttcggatgggaacctcgaaaaggggattctttccccgtttcatgcggggaattaagaatccccgaccccgaattttcattcagggaagcggaggggaatacagtacccctccatcaaaaaatcgattaccgtaatcgatcgccaaaaattgatataaaagaagaaaatttgaaacaattttcattccttcgctatcatcaagccccaaacaacactcaacgcctcagcaaactcatgccgattctgttccgagaacggcctccctttttctcggcaccaacaatcagccgaccaaca

SEQ ID NO: 7297 - DNA, 1135 bp, Heterodera glycines
agtcttccggagcaggacaaaacattcgccgccgcccccacgtccaaaatttacgaactaacaaaacacggtatttctccgcttctcacctttaaaggtatcgattggccagtagaatgtgagatagtttccggcgcacagacacgggggggggaggggagcagctcaatttttgttcacctatggtgctctgtctcattgaaataatgtgcccggtcctcaaggtaattttaatatattttccactgcgatgttttgtcccagcgacattttaggctgtgtcggggcactttgccattctctttgtcaatttttccccttttcgcagtttgtccgcgattgatgatatggagtttcgcaaggtgcacgtcagagggtattaccttttcgaccgccaatttgtcattcggtggcgctgtcggttggaccccgcaaataccggcacttcgaattcggaaaaatatggggcgtatgtgatcactccgatgagactggagggcacaaagtacttttctgttcggtttcaccttagtttcctaaattcactttttgcaacagaaatataagaaatgaccataaattgttttttttcttattgtaattttgggaacctttcggcgtctgaccatcttttggtgcattaaagaaatttcggaaattggggtttacacgtttttgttttgaattcgagtcgaagctcaaaactacctaaagccaaattgtccccactctaatcgctaaatttgttagcgttacaattatggttaaccgaggatgggttccaaacgaaaacatcgaatccgaactgaagaagggcaagcaactgcgggagtccgagctgaaggatttgaacgcggtcgtcagaagtgctgagaaggtgggccaagtgttgcgttatgttaacccaaccatttgtttatcttttgttttttcttagatttagtgtttaaattcagggctctcctttcgtcaaaaacgacccggaaaagggaatttgggccttcaaggatttggaagaaatggcaaggcaaagcgacgccgtcccaattattgtggatgccgatttcgaatcgactgaaaaagacggaccgatcggcggacagaccattgtcgtcctgcgaaaccagcactacag

SEQ ID NO: 7298 - DNA, 3841 bp, Heterodera glycines
tttgaggatcagccttaaatccgctgaaatttaccttctttgataagcgtcactttgctggcctcggcgtcccccaaataattgagaatgaattcgaccaatgtgttcagtttttccctcatcggatttgttgtttcttcgctggcggtttcgttgtccaattttttctgtttcaaacgattagaattagtcggctgttgttcttcttcctcccgctcaaaacataaagcctaaaatgacccggaataaataggagaagaaaaacattactacatcgatgtgcaggagtttctcgacgataagcgaccaaatttcggcagagatttcctcgtccctaatccaatcggcaaaacggagcacatttcgcataaaggcgagcagtttcggagacggctgtttgatgtgcggaaagcgtttcacaaaacatttgagcagaagaggcgtcgtcctgaaaaacaggaaaacaaatcaaaaagaagtgaaatttgacggacaaagggttgcaggagacaacgttttggatggaaaggttggccaaggcgtacagcgactcttggaaatggtcgtccaccaccgctggcggacgatgcgcctcaaaatttgaaggatcttaaagttgggaaaatggaaagcaaatttcaatgggctagaaaacctgcagatttaaagaaattgtgtgtgtcgtcttaaaaacattgtttcatacctttcgcattgccaattggcaagaaatggtcgacgaagcaattgaacactgaattgatatggtggacatggttgatggccaaagcgcataaaaagtcagtaaattgcgaaagcatttggggaggaacggtatgccaacgaattttctgaattttatcgaaaaaaattttgcgactttcccttaaactcacgcataatttaagcaccaagtctgaacaattcacgtccaaaatatcgtaggaatccaaaaactaaaaaaaataataaaaaaggatttttcgaaagacgaacttggctaaggaaggaagtgcgcgattcctcactccacaattcgaatgagctgagaatggaacatactgatggtatttgtccatggagccgggcatcatctgaaaagggcaaataacaaaatgaaaccaatgagcaaagataccattacaaaatcctgaataatctcacgtccgcaaggcaattctttgccctttgaaaggcatttcgtcggttttttctcaggcattccgtaatcaaaggcgaaataaataggaaaccaatgaataaacacagatcaacaaatggaataaaaacaataacaattacctaaaagaattaaatgctaatttaaaaaaagaataaaataaaaagaagttaaaaataaattaggtcgtttgtcatttgtgctcagagccccctttgattttcggggtgtcaaaagtgagtttaaccagtgtgaagcgatttaagcaaaccataagaaagttaaaagcttgcaaactacattagacaccgagtttatcaaacagataaattgcccactttaatacctatcttcttaatttccaaaacattttaaaaactggcgtaatgtttataaaatatttgaataatgaatcgaattgtaaaataatgttgcttattagagacgggaaatttcaaatttgcggatcccgatgcgggactggaactcaaaattctttgcgggacaggataccgcgggattaatcccgcaaatcccgcattggattgcggactgggatcccgcaaaatcccgcgcgggatcccgtcccgcgccggtctctattgcttatcgctcgccaggcgcaccgtaccctcagaacagaaccgagttaacagtatgttcatatgcttacaaattagaattagagtttacattctggcaccatctctgttcttccccattaatctactaaatgttcatttgtcggtggcgtcgagaagagaaatttatacttttttaaataatgtgtgctttattcttgagcaagtcagttggaaaatgtgcaaaatgaaacaattaaaatgaatgaatgcatttggtgcgtttcgctacgcttttcctttctcagtagagaatgaccgaattttgagccgatgattcttcagtgcagcttctgtgcagttttgagattgtcggcggcggaggcggcggcaaaaggcgctctttgccggaggatattttgcactgatgcgcagaatgccccccgagggagacggactcctcattgttgaagcagtattgcatgtactgaacggagggggggggcgatgcttttgaagcatttaaagggaaattaatgccaatcgggcgatttatcatatgaaaagggaatgccgaccgcatcttcgatccatttgaagatgtgcacgtcgtatggcacgtaaggctgccttaaaaaggatgcaaaaagtgatgccattttttgtttggtcagagttcgcttctacctgagcaaatgctcctgaacctccaaaaaccttttaactaaatcaaaatgccgttaacaaaacaatcaattagctgttaataactcacggtcctccagcgtaattcgctctttgctgcctctgcgatggcattggaaagtcagtgaatttttctttcaaaagtgccattgtctctttgctcccccacctgatctttttcattgctgaaatgatcttcattgcttcccgcatgtccctactaaaatggcttttgagttgtgttttgcttttcccttcctttgctttgccttaatccgtggatgccatggatttctctgattttacgcccaaagtaatgcaacttcgtgaaggtctttttcaaggttgaggagcacaagtcaagagaagctaatcaaaagggtgggaaagaaagcgccaattggccgactgtcagtgccacggcactctttgcccacctgtgatcactgcaagtccgataattacgtagagaatgaccaactgttgaggaagtacggggaaaatgagggaaaaagcggggggagcgattaattaccgcgagatacactgaaaaaaggggagggggtaaagtaaaaaagtacaaagtgaggggaagggaacacaataagtaccacgattggtgacacggatattgcccaatctgaaaaagggaaggaatcgcgagggaacggtcgaaaaaaggacccaatggtggtgatggtgttgaaggagaagaaaaggccgtggatgaacgaccttaaaagctggcgattagctgaactgatcactaaggctgggattctctctctatctttccctcttccctctcacatttgttcctctctcttcctcctctcctccatcggcttccgttcttcctctctctctctctttccttcactctccctcctcttctctctttccctcttccccctccctccccccttctcgctctctctctctctctctctttcccttttccctctcatatttcttcctatctctccccctctctctcgctctctctattttcctctcttttctcccctccccttctctccctctctctttccctctcacatttcttcctctctctcccccccccccctctctctctctctctcctgttttccgtccccttctctctttccctcttccccctccctcccctctttctctctctctttcccttttccctctcacatttcttcctctctctcctcctctctctctctctttccttctcacatttcttcctctcctctcctccatcggattacgttcttcctctgtctctctctctgtctctccctcccttctctctttcactcttccccctccctctcctctttctctctctctctcccttttcgctctcacatatcttcctctctct

SEQ ID NO: 7299 - DNA, 2682 bp, Heterodera glycines
  unsure (1)..(2682): unsure at all n locations
aaagacttaccaatggtcgtaccctaaagggggggggcgattgatcagaagggaaagtgatggactgtcattgtcgatcagtgcttcttacctgtggaagtgatcacagtcagtgcgtagagactggaagcggcgaaagtccactaaaatagtccgaatgagtggaaaaatggggaaaatgcggcaaaaatgggcattggtcagcgaattgggcatttggatgtacaaaattaggcattttttaaaattaaattttctgttttccttttcttttcccaccgtacctttgtggccaaagtgtgctctgaatcgctccacatttgcgcctcggccgtgaacctttcgtcatattcgtgagtccgggaaagcactgagagaaggggacgcattcgacgttcgacctgagaagtgaaattggaaaagggaaacgcccgggggaggcaatgtcaaagggaggagcacgtcttctaacatgccatttgccaacaaatggccatcaattagtcggcgagcctcggcatttctctcctaatttgggtcccagcaccgaccatcgacccgttcagtgcggagagggaagtcgcaccggcagagcgacaaatagcaacagtttccttcattatcagttcataaatatgcaaaatttgggacagtttgctccgtcgttgctccaattcgttgtccgcctccaaaaagatgaaaacgatggcacccaacgaaatgtaagtgaacagcaaaatgttgagcccaactgcaaaagtcggcattaaacacacacacttttggcatcataaaatggacttgtgaagtgctaaccgtgcggtaaaagaattttcaggtactgaaaaggggacgaatgagtaccaggggagatgaaaagccaatgaacggcactcactgaccttcatcgtcttctgcagtactgtctcgtgctcaccggaggactgcaacaaaaaaggcacaaatagggcttttttgccttccccccattttttggcccttcccgtcaggcgaaattccgttaaattttggcactttccgtctttttttcgttttgcccccaccctttagtgcacctgttctccgctcattccctcctcaaattcgtcgtatcttcttctgaactcgtcgttccatttcactcctcggattggtgccaaagacggcgtttctgtatttatttatttattttttcttttttggtgagtaaatttccgactaatttaaaagtgaaaaagggaaatgccttctccttggatttcgcttttcccacgtttatttgcctcttttgggcaattcccaaatttattcttttatttacctctgccgaggtaggaaatccaacactaaggaaagtcaaagttttccctaaccgatgccaattccaatccttccgtgccaacaatcattggccaatgctaataccataatgccatccactaaaaccaatgccaatgccaacagaatccctttgtctgattgtgccaattcggttcggcttcctccctctaattccgaatctccgccacttttctccatttcaattcgctttttcccgtttattcctaatttttttcctcctaatttatttcttttttaatcttttcttttttgccctttgcttttcattgtttttttgcctttaatatctttttttgtcgcctttcctttcacttcgctaacattcattcactggggtcgaacaaagaaagttaagttcccccgggagttattccctttggaaaaggaaaagagacagacggacatcgaatgggacgaaaaggaaaagaggaaaagacaggaaggaagaggaggaagaagaagagaaggaagaacaagaggaagaagaaggggaggtgnaaggagaggaaaggaagagaaaagggaagggtgggaagaacggataaggaaatgaaggaaaaggaagcggcagaggaagacggggagaggagggcgcgatcagattggcaatacaaatggataaaattataaattaccgccatgtgaaaggcgtgacacggaccgagaccgtggcaaaggcgggggaaccaccgaagcagcgatcgaagggtgccgatggaaccaagtgcggtccagcgaagcttcggtgaggcgacgcgtgaaagccgctgcaccggtggagcccattttgggagtcaaatagaagaaaatgaaaggaaaagggggaataaggaaaaggaaagggaaagggcaaagaggaagaggggaaacatgtatgaggaaaaggaagaggaagaagaaaaaaatggaagaggaaaaggaatgggaaaaagtagagggggtgcgggtgagggaaaattaagacagagagagggataactcaagtggccaagggttttgaggccacagcaaattaattataaagggaagggatgcggcaaagaaagtgggacaagcagtggaagtgaaagcaaaaaagaaaagaaagaagaagcgtcaattgggcagtgggagaggaggaaaagctgcaagcagaacaggtgagaagaaagagggggagagaggggggggggagggaagggatggcattgggtgctaatgggcgagggacgcaaatcaaattgccgagccgagacaaagtgagaggatggattattcccgacgatgtgcttgtgctcgcttcccccgtcctttcattgttcccgtggccaattgtccgct

SEQ ID NO: 7300 - DNA, 2133 bp, Heterodera glycines
taaggatgagacgcgcgtcgttcttcgtttcccttcctttggcgacgacccttccgcagattcattcatccacgccaattacgttcgttcgccggtgctcttcaacgatttcatcgtcacccaagcaccgatgagcaatacaatcagcgatttttggcgggtaataaaggctaaaaaagggaaaaaatagctatttaatatggagaggcgaaaattcattgaagacagactgaattgaatttcttcaacaaccgtaaactgtacaaaatatactttaatttcacagatggtttggcaagaaaaagtgtgttatattttcatgttgatcagtcgcaaagaatcaaaacgttgtgccccttattggccaaaaaagtttgcttaaattttgggcatataagatatttgtttatttttgtctcttgtaagtctcagttcaaaaccgttggcattgcatggactgaccattcaaaatgagggcatcgaaacgtcttctcgtgacccttttttccgagtcacaaaaattcgtatcatcggaccagacaacaccgaagtatatgttgtgaatgcttatcaccgctaataagaaaaacatctcaattactctttcagcttcgcttggaacattggcaggcggacatgaataactcggagaatgtcgaggcgccccttcgtctgctgcgcctgtcgcgcagttgcacagcgcccactatcattcacgaccatttagggatcagtcgcgcggcatgtctcgtcgcagccgaaatttgcatttgccagttgattcgcggcgggccaatgtgcaaagtcagtcctaattatcttattttgtattttccatttttacatataacatttaattctaaatgaagagcatcacaattgcccgaaaatattgtgtgaacagaacataaaagatatataatttgttttcagtatatcgttcaaaatgccgttcattatttgcgttctttccgcccattttccgttgaaacgccaatgcaatacattgttagtcttatttaatctaccaatgtggttggtcaaatgatttttaattttcttcaatttatgcaccttttcgtttaatttaaattttttttgagtttattcaccgtgtcgttcaacatttcattcgccctttcgttggcattccatctggttttgaacaagattacattcgatggctcgacgaacgttctcaacgtcttttcgtcgatgatttcgacagggaagtgagtaattatcttttttcctttgttcccgtttaaatattttgtttcggatccccgctttccgcctgctttctcctcgcgttgatcccgacatgctaccgctggtacgtcgccgtgaaaggcccgaactccgccgagaaatgcatgcgcccgtgggggaactgcccctcccggctgagatggaatgcgcaccctcaggcggtatgccatacaatcagcaaaacagcggtgcggaccctcttgtaaacatccaacttcctaaacgatacccacgcggacgccgttactaatacatacgaaactgacatctcacattcaaaatgactagaaatctataacaaacatgacgaaataatttagacagctttcaaattcataaaacctctgttaacaactaattgtaagactagtaattgtaattatgctttaacaatgaataaatataataaattcgcgttacaaataagtggaaaatgtcatccgtatatgaaaaagaatgtcggaaatgttcaacagtgttagacggagagtattatgagcaaaaagggaatggggggggatgggtacaatcaaaaatttaattgtgtacaaagctctgccagatgaaaacaaaagggcccataacttaaatgcatgggaactgacatcattcttccttttcctcattttcttcgtcaacaatgaatttgttgctctcgagtaatgtgtccattttgttggccgtcggtttgctacttttcctcacttggctgcttgatttacgcctggcttcattgattagtcggacggcttcacgttgagtcgctttgttgtacggaaacgttttgtagtgttggtcatcgtccagtggctataaggaaataattaattgatttcacgttaactagtaattgcctcttca

SEQ ID NO: 7301 - DNA, 3195 bp, Heterodera glycines
  unsure (1)..(3195): unsure at all n locations
attggatgcgttcgcttacctcggcgcgccaattctccccccccggctgctgttgcgaatacaaatccctgctgctttgtaccgtaggcattccggcgaaggacccgtgctttttcaagtaaatgaccgcttctttgacctacgaaaatgcaaatgtagaatgtcataattcttctgcgcgtaatgcctgaatctcctcattgtgtcggacaattttcatgtccttgtcattcggattgagcataatgaacggctttatgtactttttgttgtagcgttcaagcttcattcgaaactaaatttcaaacttgtcctttatgaattatgagatttccttgctcctcatttgcttcgttattattttgtttttgtgttgcgaatgcccacccaataatccccgcgcagtccggcgatactttccatccctccgaccatgtgactgctgacattatcggcgatcatctcaaaaacggtctttttgtgcgcttcgaattgcttgaccttcaagtaagtgaccaacttttcaatggaaccgccctgaaagggagaaaattggaatattgacagataatagctgtttaaaactaaaaagacctgcacaaaaactgtgaaaaggatgacgataattgtggtagttgccaacatattgcggcattcgaccaattcggggtccaaagacatcactaaaccgtagcaaacggcaccacgaatccctccgtaacccatgatgaactgatcaacaaggccaatgcgttccacgcgacgtttattgaccaaataagtgagcacaccgacgcctaaaaaacggggaaaatcattcatctgtttgaaaatggaaaagtgatgaaacattaacgaaccgatgaagcgatagacgagacaagaagccaaagtgaccaaaatgaagatgaagtccaaatcgtgatttttagaaactgcagaaagaccgaggaagacgaatataacagcttcacaactgaattcgtttgcaggatttgtatggatttcgctggaattgtcctacctcgaggaaagcgttttcatgaaataatttatggtaaccagcgactgctccgaaatgtttccgactatgtactgcttcattcccatgccgcacactacgattctaaagggcgagagtttattcacttgcagtgtgaatatgacattataaatggttaaaactcacgccaaaattcctgagagtccaagcgattcggcaattaaataagccaaatagggaaagagcaaacaggtgagtggctgcacaacactgacatccttgcccaccctaaagaaaatcgaataagaacggtaaattcggatgggacagggcccagacgaagaaaccatgcgtgtgcaagtgatcggccaaaacgacccccacaaaatgtacaattttggacgaggaggggtcgctgactgacttcttgcacacgcaggcagaaagtgttctccaagaaaagacaaagcaaacaaatgtctttcaaattcaattcagattttgtggtggtttggtctttgcactggtcagtattaagttctgacttggtgactattcccgtaataacggcccacaatccgccgaccaaaatgccaccgacagaaacccaaaaaaaggccaacagtccaatgaaatagtcactccaatgcacaagctcagggccaacgctggcaattgcgttcattgtgtggtaaagaacataaaaaggaattacaattagagaataaatgagaaaaagggacgaattctcacaatggtaacggcatcattcagaagggactccccaaacacacaaatgtacagcaattggttgacatggatctcctcaaatacgcaaatgaccgccacggggtcaaccgcggagatgagagtggcgaacagaaacagagcgatgggggaggggttgccgtggaagaaactgttgaaggcgtacagagtgagacctgaatttgatgcttacttttaaattaaaaaacaaattgacgaaattattatcggagaatcatagaatatcgaaacgaaaaagaaacgccaaatgttacaactgattcgtatgaggggagaaccaaatattaccaaaattttgacagtttaccggtcgctgcaatattccaaagagttccgaccacagcgtatgtggtgatagtcccaatatttttgaaaaactaaaatccgccattaatttttggtacgatacataaaaattccttttcgaacatttcgttgacttccttaacttgcctctttgttgggcaaaaagtagccagcctcaagcgcaattgggggcaaaaggtaaagaaagaaccaatccggtttcaggtaaatttcctgaacattttgatcattgagaaaaatcgtattggtcagtcaattacacgttcgggaaacataatatgcaaaattccaccgaaaatacttcccaaaacgagcagaagtgccgagtcgggcaaaatgcgatttattttttcaaaccgatggaaagctgaaagtaagcagaaaacaaattgtttaattctcaagttacgttaccaattttagcgataatcgttatgaaaaaccaaaaggcaaacgtaagttgcgtctgatgctcttcgaagtgcttaaattatgcccatgtttttgaatttataaatttgacaccatttcgaagaacacaatgcgatctctgtgtccgtggtgggaatgacctgccaaatgcacattttggaccgacgaattgttgaacgattcggacggaacttgagaagtattgagtaacgacgggaatatagacgaagattggacctcatcagtgaaattgtcactcatctgcaagcacaaaacaattttaatttaaccaattccaaataccgaatattaatttagagaagagtgaaacattctaacatattagaactaaattttataatatttttattgaatttttttaaaaaagaaaggcaaaagaatacgaaaataatttatatgaatatttttatttgaatgaatgtggaaagaataagaccagggaaatcaatgggatcgttcaaaatgggcgtcttggcgagagaggaaaaacggatgggaagagaagctgacaaaacgaagaaaaagatatggattcaatanatgggtanattcattgttatattagcaatgtcttcaaaggaaaaatattccattacatgcttttcatcagtggggaaattaag

SEQ ID NO: 7302 - DNA, 942 bp, Heterodera glycines
gggacgagagaggtgtgaatgtgaaatgaatgatggcatttaaaaacgccatttaaatgcctttcttataacgagcgacacacaaaatgtgatcttttatttgcaagtgaatatgtaaaacattctaaagttgtgacgtcattgggcaaaagtaattattgaggaggaaaagcagggaaaatgggaaagggaaagtgtgaagggaaacttacaaaagaagaagcggatgaagaaggagggaaaggctttttgtgggtttggtgacctttaagaggaacaaaaagtgacagaaatggcggagaagacaaagtaatgggagcgaaagcagcaaagattaagtggacggacatatcgcatcacatcaaatgagaggagaagagaaggaagagagagagagggaggaagagagagaggagagagaaaattacatatgagaataattagagtgaaaaggaaaaagagaaattaagcaaaaaggaaacttaatgagaaagaaggaaacgaagaaaggaggaacaaatgaaaatgatttgtgttcgtttggagcacatgttcagcagcagcagaagttgaggcggggaagggcagcccagcagatggacgaccccccaagaagcaatgaaaaaagaaaaaaggacaggtcctctcactctctctcattctctttcattttgtcagcgaattccgatggcatcccccaaattttgtgtgttttgcacctgccaaaagcaatgaatgcaccaacaaaagcattagaatattttggaacatccaacataatgggcggaagaatgacagaaggagccaaaagaaaacgaacgaattggctcagaattggggttaatttccattgccatgggaatgaatgggggggggggcggtgggtaagtgaatcaaataagaagtaagtaaaattgttggctttgtgtgatggtgggacaa

SEQ ID NO: 7303 - DNA, 1002 bp, Heterodera glycines
ggggggggggggacgagagaagggggaatgtgaaacgaatgatagcatttaaaaacgccatttaaatgcctttcttataacgagcgacacacaaaatgtgatcttttatttgcaagtgaatatgtaaaacattctaaagttgtgacgtcattgggcaaaagtaattattgaggaggaaaagcagggaaaatgggaaagggaaagtgtgaagggaaacttacaaaagaagaagcggatgaagaaggagggaaaggctttttgtgggtttggtgacctttaagagggacaaaaagtgacagaaatggcggagaagacaaagtaatgggagcgaaagcagcaaagattaagtggacggacatatcgcatcacatcaaatgagaggagaagagaaggaagagagagagggagggagagagagaggagagagaaaattacatatgagaataattagagtgaaaaggaaaaagagaaattaagcaaaaaggaaacttaatagaaagaaggaaacgaagaaaggaggaacaaatgaaaatgatttgtgttcgtttggagcacatgttcagcagcagcagaagttgaggcggggaagggcagcccaacagatggacgaccccccaagaagcaatgaaaaaagaaaaaaggacaggtcctctcactctctctcactctctttcattttgtcagcgaattccgatggcatcccccaaattttgtgtgttttgcacctgccgaaagcaatgaatgcaccaacaaaagcattagaatattttggaacatccaacataatgggcggaagaatgacagaaggagccaaaagaaaacgaacgaattggctcagaattggggttaatttccattgccatgggaatgaatgggggggggggggggcggtgggtaagtgaatcaaatactaatgtaagtaaaattgttggctttgtgtgatggtgggacaatgagacgaggcgggaagaggagggatgagaaaggaaaatgaaatggaca

SEQ ID NO: 7304 - DNA, 1104 bp, Heterodera glycines
attgtggttttttggaaaattgtatcctctccccccagggagccaggaaccgtcctttgtttgacgaattcgaaatggccaccgactgtttaactaaattatttggctatcactttttattgtacatgtttagaattcctttctcttgcgcttcgtgttggtcaaatggttgtattttctttcttttttatttattgtaatacatataaataggttgaagccgcgaaatgcggaattccaattgatatacagcagctccccgaactttattccaatgcgactgctttgccaaaatcagccacaagaaaaatggaaacaattaacgaggagactttgagtacagtcattacattaaacataataaaaattgccactaaaacacagaaaaatgcaaactgctcgaaaaggagctgatcaagcaaatagccttttgtgaggagagaacgagtaaattccaatcggcgggcgactcgaaaaacacccttttatatgagggattgttacagcaatcaaaagtattttgaaatttaattgttaatttacgtgaaaaacaatttaagaatgatttgcagcgggttcaattggctgcgttgggacaaacacaactccctaagtgcgtttgactaaaatgacggtaaagttttggcattttatagcttcaaattgcccgaactgtccttacccattatccaattgaattcttcaatttctgacgacaaattgatgcttagaataaagaaagtcgagcacctgaaacttcccgaggttataattttccacaatttctggtataattttttgtagggttggaaaccatccgactgtgctttgtacgttttcttcaaatttccttttccccatggtacgcatcaaactggacgaactcccactatcaaagggacaaattctcccggtaatttttgttaaagaaatttttttataaattgatatttttagaatttacggatgtttttcaactggacataagtcgcaaaacaaagcaatttttgcgcatctgcaaaagacagcctcttaaactgggaggtttattctgaaaaatagaaaatcacttttcttcttagatttatcagaagggcggatttt

SEQ ID NO: 7305 - DNA, 946 bp, Heterodera glycines
  unsure (1)..(946): unsure at all n locations
gagacgactttacgagtgagttagtggaagacgcctttttaagagggatgtgatggaaattgttcctcagaatgggtgtttttcattcttcggctcactttctaactaaattcagacgaagcgtcgattttatctgtcgggtgaaatatggaaatactttgccggatttgccttttgaaccgaagtttctgcaaagtccgttcatctcgttaaacaggttgttattattattgttggttatttttattatatatagtgcgtttgtttaggttcattggctataagccgtccagtctcgagaagtgtttcaaatacgagttgttgacggaacccgatctaaatgtgaagattgatctgatcgatccgatgacatattattgcgaacctgacgaaaaaactacgctcgatcccattgatgaacagcttcttgaggatgaaaacacctcccaattaaacacgcgacggtatttctgatcagattttgctgtttggaattttctttagttctattcaacatcgaaaggtcgttccatggatgagaaaaacggagtacatcagcacggagttcagtcgttacggaattgggcaaaccggagctgagcggccggacaccaaaatcggatatggaatgaaaaatcgcatcaaggacgaggtaaatgatacgcaaatacaaaaagagaatatttgaaagtctcttccactaagtcattcgaatataaagaccgggattcacaaattgcggcaatccaacgaactttctctgaagtccaaaagccggtccgtcaccattacagcaaaaaaggagtcacggcggtcgaggaaatgccgatatttcctgactttgaggcgagtactttatacaattacagcaataattgaattnttgcatttagttatggagatacccattcgctccagtcatttttgatgctgacccgctgccata

SEQ ID NO: 7306 - DNA, 3197 bp, Heterodera glycines
aagttttgtttaagcaatggcggacgacgacgctgaaacattcaaactttggcgcgtacgtaagactgttatgcaggtagttaatgtgaaggatcttggtaaagtgtttgacttacgtgtctttctgaccaaagaggcgattcgtttgttacataaatttgtctgcagatgtgccacgaccgagggtatttggttacgcaagacgagttggaccaaacgctggaccaattcaaggaccaattcggcgatagacccagcgaacggaggcccggcaggggcgagctgaccattttggtggcacataatgacgaccctaccggtgaatcctacagagaaggagctttactaaaatgccgttttctagaccaaatgtacgtgttcttcccagatgacccgaaaataggcatcaaaactatcaaacagatctgtcaacaaatgcaagaacagaacatcactcgagcgatcattgtggttcaaagtgggatgacaccgagcgcaaaacaggtggagaaatttgattgggagaagtgttggctgatgaaccactcatttatcatttaatttgtaaggcgattgtggacatggcgcccaaatacattctcgagcactttttggaggcggaactgatgataaacatcactgaacatgagcttgttccggaacacgtggtgatgagcagcgaagaaaaagcggaactgttagcgcgatagtcagtcccttttgctgggccgactcattttcaactttttaatctgatttagcaagctcagagataatcaactgccgcgcattcaagtcagtgacccagttgctcgttacttcgggttgaaacgcggccaagtggtcaaaatcattcgtccatcagaaacggcgggccgttacattacttaccgactttgcaattgatgtttaattcagaggatttgttgcaaattgtcacttgaataaattgtttttgtaattgaatatatttattgctgtcaaactctcaagaatatatttcgaattttttactttgactgaatcttcctatattttctcaacttgtgttacaatgacttcatttacccatcattttacatatttgggtttctttcaactcaatgaaaatttggacaagggttcagagtgcctgactgatggtttgcagcgcagaacaatcgaagaacaacttattgacagtgccgaaatggcacagcttaattctgaattaatccgcgctaattgcgaagacagcggtttcattgatgaaattgagttgcgtctcatttccggtgccctgcaatttgttcatcccaattcgccgattccttttgagcgaattccactgcacaaaatcaaacatataattagctttgagaatggccgaggtgccgtaaatgtgcttctggtcgagaattttgcttattcatcggaccacaagcttggccttgttagcaagtgccatttatttgaaactcaacgcggcgatgatgaccgaggagtggcaatggttgaagaattttgccaaggatttaagcagaaatttggagaaattctggagaaactatcagccgagcaacaacaaaaacaatgattataattttttacatctttttgttgttgttttttattttataaataatactttatggattaagaaattaggtaataccatttatctgtgtataatcgtataacacacacacgtgatacattatatagttttttccgtgtttttattttcttttgagatgatgtccttctcttctacctccgaaaattcatttgacgaaggtctggcgaatacttcgtttgttgctaataaatgccattttttgaagtgccactgccaatcgtgggaggacgtgtcgaggggcccccttcccttcccgtttctcgctcgacttcgtcatcttccttcacgcgccattcgtggactgagttaaaagccgatacgaatatttcggacgaagaatacggttcgttggtcgtatagaaatgtgaaaaactaattgggtgtttccgcttcagcagatcagtgggcgcgagtcggacacggccaatcccttcgtcagatggaattctcggacaatgactcgactttcggaacatttggctgtgaaatcgatggcacagcgtccgacgcattaaagcgaaatttggccaaaatggcactttttggaattatcgtagcgatgatcttcggaaaggtacaaaatggtaaatcttcaggccatttttaatttttagagcgtttacccttggggggatataacgaaaattaatgaaatgagcgaagaaaatgcgacgaaattgcgcacggagttggacaaaatagtggccgaaaaatgggaatttgagttgaaattggtgaaactgcgagaagaattggagacagagagaaatcgccgtaaggaagcggaaaaggtgggccatatcttacatatcgaaaacgattaaaatgaccaattatgaaacttcattttcatcatttcattcgatagacattacggaaggcgcacgaacagttggaaattgatttgaacgatcgaattcgactggagacggaattgggaaagacgcgggcagaactggtggaaacggaggaaaaggtggcggaagcggagagagaggcggacggaaaatggatgggcggtggagggatgggccaactgaacagagcgtaccgcaaagtcaagcgggcgcagttggcacacggcaaattgagggtgggaaattgaaacacgaaatggcagggcaacgaaagcgaagggaaaatgaaaagaaatggggggagggcgatttgaaagacgaaaaaagagggaatattggagttagttcgatgatgttcggtgagtctcaccactgaatggccttcacagtttcaggagacctccgagtggtgggtgccgttgtattggcgcgtggcgcgcgtcactctcttcaacgaacgctgaaaatgttttgtccgaatgctctctttcggtaggataatcaacagacaaaagcaccgaattttatccatttctttgtaaatatacatacgctaaactcaacagttcaatgtgttctcatgcttttgttccttttttccccttttttcacgcaaaataactttgaaatgtacagaaaatgtcataatgatcaaccatctttcatcatttttcgtaagtgatcagaatccttcctaaatgcagttaattattcggcaattc

SEQ ID NO: 7307 - DNA, 1589 bp, Heterodera glycines
  unsure (1)..(1589): unsure at all n locations
ctcatttcgttatgacncatcgtcggataccagcgatacgaaaagccaccatttgtgacggtgaggaagggacggcggttggcggagggggcggcaaaggcggaaggagcggacgatggggcgaagaatgggacggaatgttgggatgatgaggaggggaggagagacgagacaaagctggagagtggagggattaaaaagacaaaccaacggaaatggttttgaatttgaccttttttgtgataatcttattgggattccctcaaattagttccagttaccccccccccccccccttcactaattagcccctggtcagtccctcccccgcccccctttgtttggtgttttgtgtgcccaccaaattctcttccggcccctcctccgctggcaccacttctgtccgtcccccgtcgctctctttccatttccgccattctcatgccggtttcgtcctttctcctctctgtgcctttgtccgctgtccttccacaaggcaatgccctcttccacgagttcagtgttttcggcgacaacatccataaccccgaggccatccccgcggtcaattccatcgtcgctcccagcagctgtgaaataagataatttggatggaatgccaactcgtctttaaactatcggaaaacgacctgtaattgcccggggggctgttcgggccgaacgcactctccggagaaggcgcctccgcgcgacttacagccgacggtgtgcggaagccattggatgagcactgacaattggtggagatcgcacgcggaagcgatcagcgaggggaacacgaacaaaagggcgaacacacccattttgaacatgaacttttcaagtttggatgtgtctgtgccctgccgaaagacaaacaaatgaaaagcgatgccaatgaattcgctttaaaaaagattcttcccaattgaaacattcttcgtctgatttatgccttctctcaacaccaacccgctttctgaagtgattccgttctttgcacattgcggagaagccggaaaggataaggtaaagtccgagcagtgcggacgaagaccgagggacagtccaaagccacaaaagcgcactttgatccgcattgccaacggaacagagtccgctaagctcagaggcatcaatccgatcagtccaaagaacaaaagctgcgagaattgccgggactgtccacgcgagcaaatggagctgaacagagtgccttccgatggcctcctccgcccatttccgtgccgccgacaaataccttcgagggacggcattcttttgctatgtttatgttctcatgttacttccttttctgatgatttcggcacaattttcactttccgaaatttgttacttttttttggttttaccaagtaaaagtgagcatcagccaccacatggaagcagccaaagagaagtaaaagtgaagcaaaaaggagaaaacgcaaagcgaagggagcggagaaatgccggagaaagcaccggcggagtttgggccatccaaaagaagaaatttagggccggagggcaattggatgcaggcaatggcatcaaaaccgaacaatgaacggagcaagtggggaagg

SEQ ID NO: 7308 - DNA, 2408 bp, Heterodera glycines
  unsure (1)..(2408): unsure at all n locations
cggccgataagatcatttcactccttccccagaattcgtcggcaaataatgtcaccgcaaatgtcggggctcctttgcagaggcctaattgccgaaaattgtaaaaaaaaaacctgtggcgacgcaaacaattttgaacggggcgcgggcacttagctgaagtcggcgtagggtcgaacagtttgaaataggcggtgatcagcgtgaactccagccggtggattgtcgtcgtctcctttttgctggaaaagtgaaaaaaattcgttgagaaaaataataggaaaaattgagaaattttacaaaaaaattgacccattaaaattttttccatttttcgcacttacaccgcaggctgtgatgcagctgctgacaatttgctgagcagctccacttcctggttcatgttggacttgcacatctgcagtaagggctcaaacaaaagtggtggtgcgtcggccccatgcgccactgaatttagggaaaaaataccggcaaaaaattatcatcggcaacagcaattctttcactcagaaattcgaaatttaatgcactttttgtaaaaaaaaattgtttgttcccatggtataccaattaggcataatttacaagctcttttatttaaaaaaatcggtgccaacacattcccagttttttggtggggagggacaaatgggcggacaacacggcggttttttggggataaattcctttaatagttatccaattttgaagccaatacgtagaaaattaaaaaaaaattaccaaaagtctgagttttttcaaaaaaaactgttccgacgcgttcatccgccggaaggattgtcaacgaggcggaacaggtcgacgaagaagtcggtcaacagtggacagtctcggtcagcaaatagcgattcccgacggtttacaaagttttggtcggacaaattggcactggaaaatggcgatagattttagaaaaaaaaccggtggtaaaattaaaaaaaaagaaaatcaaaaaaataattttcttgccataattggagtctattcgaaagcctaatggattaggaagatttaattaaattagtttttttaatcaaaaacaaaatattagggaatcagaggtacaattcccgaatttccagtcagaattttgccagcaatttcaaaatttcttctttttcttacctataaattttttaacgtttaactatttaaatttaaaagttttttgggtcggacaatatttatgacatacggacccattaaatcaggggaaaatggggggaaaaacgaaccttgtgatgacgacagtggaatttcatgtgctgcagcaacacaatttcgttggttctgttcgggcagcgcgcttttgaggaggccgcagaatttgggcatatgaaagagacggacctgaaaaaaaaatacaatttactaatttggacagatggagtactggtgtacccaaaattttgccgctaaaaactttaaaaaattttcaaactttgaattctttcaagaaaaagaatccgagaaaagtttttataagatatcagaagaaaaaaaaattttaaaaattttcagcgtctttttggaaaacttttagtggtgaagatttgtcctgttctgtagaaaaccaaccaattaaaaattgtgaaaaattgggacattttgagttgggaaattttggatggtaaacattttttcttacaaacaacataattatgattcacacattggatgtcataaaaactaacccattgcttcggatgccacgccgttgcctcttgtcgtattgtttctgctgccgttgctgtccacccgcgcaagttggtttggtcgcgtccggttgagaacagcgcgcactccatgaattaaagggctaaagaacaaacaaaaactgagtaactatttggagacgagaagttctcataaatgggatgaaacttggctgaaaataacaaaacacacccaaagttggtggaatttttaaaaaatgggtcaaaaaccaaaaacttgttggctatacagagccgcgaaaaattttcaggaaaaataggaatgtaaaaaaatggttaccggttttcgtgatcttcttcctgttggtcgctgattgctgtgccgtgaacacagacaaaaaatcaggatgggcaagcaaatggtgaattgtttcaaatttgttttcaaaatttgaaaaaagtttttcaatcgcttcttttttcttccctttgaagaagcggttgttaaacagcttctttgccgcgtaccccatccagagaacantttgtttggggccaaaatttggcccatttttcgctaaaaaataattttcatgtaacaaaaatcgtttctctcaacttgaccgccgccttcatcagcctgtagacgtcgtattggtagtcgccaccatcgctaacaccattttgctc

SEQ ID NO: 7309 - DNA, 2052 bp, Heterodera glycines
atttaagagcttactttttttccaagtgcgaaatcgaaaagtcgataattgaggcgcgcactccattagagacgacatcgatttgttctcctcgataaaggtacctttaacaaaaacattattttccactgttttgcttttgctgcttaccgaattttttcatcgaccgggcactgctccacgagaatgttcccggcgtgcagatcccggtgctcgaattcgagaacgtcttctgcgatcgctagggacaaggcgacttgatggaaaatggagtaacattcgcggccattttttatctatgaaaaaacttcattttagtttttttcttttcttgaaacctaaccgtatacttctccagatcttttcccccataggaaaggccgatgattgcgaaatggagatcttcatgggcgtaaatgtctggccggtcgttctccaccaattcaggctttgccttcttaaagtcatcccatgctttcagcaatttggacggaagacatccttaacggaaaaatgagcttagcacggtttgacaaactttcttttaaaaacatttgcttttagatgtatctccattaagaaaataaaacacccataagcccaaattagttgttaactgcactccattaaacatacctttgacgaccttgctcatgcgcaattgtgtgaacgatggcgtgacaaagtcattgccggcctcggatagctttgaaagctcgttggtgatgaacaattcgttgaagacaaattttgctggctttagatggtctccattgacgagcttcaaacactgatcctcgttgacagcgaacgggataaccttgaaaaacacttgaaaaagaggcaaaacattaaaacaaaacaccttcagcacaatgcaaacaccatcaaggggtcctttaaagacttctccaaatgccccctcgccaatttttgaccagccgttgaaagaactaaaccaaacgcagcgttaaaaattgaaaataattaattttcggtattacagtgaggcgcaacaaagaaaaaaaagaaaatattgctcattttaagttttccaatttaaaaaaaatcaaaaattggtaatactgccgatggctgccccctttttttgaagaatttttttgttttcaaaagtatgaagacatggtttccatattcgtaattttaaatgctgtaattactaatttctaaaccgtatcaagccctgggggagattggtgaaactgttttattactaaaacaattaccccgcagaagcctcgaagtcgcgccaggacacaacatctgctggctgctggccgcagaattctaggagaactgccaaatctgaaaattaaaccattacgcgctaattttgaattttggcatgaaacttttacgctgtttaaatggaggatttaaaatttaattaaaaaccaaagggggcgggcgaccctattggattgcaaatttttttacgaaattccgccaaaaaattttcctaaaacatttccagcgatttttcaaaacttaatgatgaaaaactaagttctttcaaaaaaatagaggaaaattatttgaaaatattttactcttcgtttttaaaaaaattctgattttttcttgcaaaatttctaaatttgaaaatttttttgcccggcggagttatgtctcggcagagtttcggccggcggagttatttttcggcggagttttggggtgcaccgtttttttttgtaactcaaatctcccaccctatgttttaaataagattcaaactaattattttaatataatttaagttgcttttcttttaatatctacctttttcaaagaaagttgacgagcgcacacttcgtcgttttaacgcccttatgctcatgtcgtgacgttttttcagcttggcctggaaatccaaagctagtaaattaaaatttctattttaaatgtaaatttttgtacaatttatttcataaataaaatatttagaaaaatgcttttacaatttttaatcaattttttataaaaatatttttgaaaaagaaaatacagtaaaaacaaaaatactccgtt

SEQ ID NO: 7310 - DNA, 887 bp, Heterodera glycines
  unsure (1)..(887): unsure at all n locations
aaaaaattcaaaaaatccattcnctaattgttttacaaatatgcctctctcgtattttcaaaaatattcncaatgttttgcaccttcaatgcgcaagccgctgctgccgcctgtgccgccgaccgatctgccgccgcgccgctgtcgtcacaccgtcgccttccaccaccggacgcagttcgcactcgccgctcgtcctcactttgggccgtcttaaaaaaacaaaaattaaactcaaaaatagaaaatattaaatttttgggcaaaagtaaagaattgtggtcccaaaattgagttttcttgggctcaacaatcaatttctgtggggtttcgaaggtattgatcacgaatctttggcgcaaaacttaatttgaagctttaccggaattgggtaaatccgagtttagaaacacataaacacccttcggaaactgattttgagcccaaaaattaaatttgggaccacaattctttaccaacatttattttttttatttataaataatgtaatcaataataaaaaatttttgaagcatatccaataatttagaaattttttttaccaaatttgccatcctttttgtcaccaccgccatgttctgtcgctcctcctcgttgttgtccacctcgtccgttgcctcttcgtccgcagcgcaagccgctgctgccgcctgtgccgaccgatccgccgctatgctgccaacgcgtcgccttccgctactggacgcggtccgctcctgttcatgatttttacacattaaatatttaaaagaatattttgtaaaaaagaaaatacagtaaaaacaaaaaatactccgttaaaattaatttctaaaaaaattcaaaaaaatccattcctaattgttttacaaatatgcccctctcat

SEQ ID NO: 7311 - DNA, 2005 bp, Heterodera glycines
  unsure (1)..(2005): unsure at all n locations
ttggtccggcggtttccgaagggcgtcccctntggaaacttgttttgagttttattgcatttttattagaaattttttgaaaattgcggtaatttgggctaaaaaccgacaaaaatttgtcactgaacaaccgattacatatgaccaccataataatgtatgcaaatgaattatgtgtgtttggaggagtgtgcgcactctttcgttggcgccaatttgtcgcttagtgaattttaaatttcgttgttgcaaccgcgccggagtgagtacgccgaccggctggccgattgttttgtgaaagtgtgggtccaacaaaatgccaccaaaatgtgtgaaaatttttagacaagaaggacaagtgcccacccgcaacccccagcaaaaataaaaaattaaattttcaagaaaatgtgaaatttaaaaaagaattaattaggatatgggcctggtgggaagtttttggcggatatttggccaaatttattggataaaaatttaatttttcaaattattatgggaggggatttggttcgatattcggcccaaatttgttggcacacatagttaagagggtgacacaaaacttgcggtgcccatggggcccaatgaagagagagggatttcggtgcggcatcggcactgaatttagggggaccttatacgcttaataacacaacgggcgaaaatccaatttatgtaggctcgggctgtagccggcagctgtcagtttgtgtccccatcaggcataatttgtatagcaaaaggcgaatgagtcattagcgacattgataaaataaaagagaacgcaaaaaaacaaacatatctgcttcaagtttgtgatcaaaattatcattaaagaaggcatacccataaaaaacttttgcggaaatgtcaactaaacttagaattttcaaaaattcagaaatttttaagtgcataaattcgcccttccttttgcgggtttttgtgtctattaaataaaacaaaagatttctgatatatcattgaattcatagtttgtgaaattgtaaatgaataataatttttcaagaaatttaattaataatacatttttaatgtatgggtgcagtgtaaataacacaataaattaattaaaagatcgacgttactaaaggagcaattaaggtttgatttaaatggttttaaacgaaaataaatccaaagaattaaaatttcgaaaattgacaaaagtttgctaaaaatttttttgttccaaaattagtaaaccctcaagaaatgcatgtgcatggccaattctgtcatgttagcacaaattggccagaaatggcacatccaagcaggtcccatcccgatggcattgccctcggcttccctccaacaccgcaagcagtagtgccgtaaagagattaacttgtccattcgacatccattggcattagagaggtcattacggcaattttggccaaattccccccccccccgctcggtcccactcccaagcggggcatctaatctcgttttggcgggaattgtgctgctcaagaattggagtcaagtgtgcttgctgctcatgcttctgcctaacagcgacaaattgttctttgggctgatgtcaaaatgaagtgtaccaagtgccaaatttggcgattttgttgattattatttttaaatgaacgtcagtcacttgactaaatattgaataagctatataaaattaatttaacgaataaaaatggatattaaaaattgttaattttctgctttagcctcaaaatctaatttttggttggggaatttttttttcaattttttatatttattcagaaatttttttggtagatgagacaaaagcaaaaggtgctaggttgtttcataaattccaccaagtgataataaagttacttaaaattatccaatttaattaaaataaagaatatttaaatttaaataaatgttccacatttaatttttttgggccaaatctccaccaaactatacaattntaaaaattttgaaaaaaaaa

SEQ ID NO: 7312 - DNA, 2351 bp, Heterodera glycines
  unsure (1)..(2351): unsure at all n locations
gataaaaatcagcttttttctcaatcatccgttgtgttacaaaacgaacattggaacatttgccctccaaaactaaaagaaaattaaacaaataatagaagtaaaatccgaaaaaaagaaaataaaatgttatctttttttataattttcatttctactcactgtatttgagaatattcaaatcggtcaacgtcgcttctggccattggcatgcaatggcaacaatttgcacgaatttggcatgcatttcgttcacctataaatcgtgctttttacactttttggattaaataatggttaaatgaatttaagggaataaaaaaggtcaaaatcgaaagccatttcctttttcttgactaaaaaatttttaatttcctaattttttttttgcccaatttccatcggttaaaaaagggcctacgtaatttggcgcatcttttgccaacggaaggccaactcgcgctctgatgtcacgcggaaagttgagcgtgggaggatagtgccaatttagaaccggaatgttagacccttcaaaaagggttaacaaacctaaaaattatttaaaattgttacataacaaattaaataattgaatttgaacccaccagccatgtgcccatcggtctttgaccgtaccattgaaattcccttaagacgaaaaatgccgggcacgcccagcaacaattggcacagcgtttgcacctcactcaaacattgttcagactaaagaagcttaaaggaaattactttgaaaaatgattgaattatcaaaattccactaacaattcgcaattctcaccacaattttcattttctcgagccaatggcccattcggccaagcagaaaatggtcaaacgcagcgcatacgcgaatttgggaccattttttgtggaattttatggaggaaaccatttcataaagcagttcatttggcaactttttcggggtcattttatgagtttgggtggtaatttaggagatgggcaaccaacttataacggcgatgaatgcacagccatattcttatctaataaatctaggcttaattatcggcaattcactttcttacctaatcgtggccggtttttggcgccagtgccctccaaaaaaaacttcgtatcccaaagtaattaaagatttggtttgcaacagtaatgtttaatccatttcagcaacatttaataatgtagaaggtcgaaccaaagagtctaatcaaaatcaaatagattaataatttctggcaccaatttacaattaaaaatagacaaagaaaacaaaaaaggaaagccaaaaatatttggttatttaattgctcgattttaaaataaattcctcggtgcactcatcatgaaaatcctttaaaataaaatcttcatcggcttctaccgctccgctgtcctctccctcttttccttccactttttgttcctctttctcttccattctctgttcatctccctcttttccttccactttttgttcctctttctcttccattctctgttcatcttcctctttctcttcccatttctcgttctctgcctttttctcttctactttttgttcctcttccattttctcttccactttcttttccactttctcttcctctttctgtacctctttcagttcctgtctctcttcccttttctcttccttccactttctctctctctttctgttcctttccctcttttccttccactttttgttcctctttctcttccattctctgttaaaaattttatggatcgcaggaggggtctgattatttcactcttcatctaactaatcttttttgataaacaatagaaaaataaaatacttaaaacgtaataatttaaaagtaataaaagatggaagacacccggaattaagaatcctcgacagcacagaatcaaagcaaggcagaactaactacttgactaacggatctgttgtctcttattgcaaaaaatttttctctttaaattattaagctttgtatttttatttttttattgttatttttatttggttatattaaattaattttaaaatttaatttaaaaaaattattcttttagaattaaaaaagcattaattattctattttaacaaactaaattaaattaaacatttttttatttttatttgattatattttttaaaatttaactaaaaataaataatcttttatgaattaaaaataattttgttattattttttattttaataaacttaattaaaaaaataaaataaaaaaacaaaaataaaacaatttgaaataataataaatagaaaacaaacgtaagcaatgggaatcgaaccactaacagcatatcancaaaggacagacacactaaccac

SEQ ID NO: 7313 - DNA, 2102 bp, Heterodera glycines
ttttttttttccccaattttccatgggttaaaaaaaagggcccttagttaatttggcgcttttttttcccaacggaaggcccaactcgcgcttttgatgtcacgcggaaaagttgagcgtgggaggatagtgccaatttagacccgggaatgttagaacccctcaaaaaggggtaacaaacctaaaaaattatttaaaaattgttacataacaaataaaattaattgaattttaacccacccagcccatgtgcccatcggtctttgaccgtaccattgaaattcccttaagacgaaaaatgccgggcacgcccagcaacaattggcacagcgtttgcacctcactcaaacactgttcagactaaagaagcttaaaggaaattactttgaaaaatgattgaattatcaaaattccactaacaattcgcaattctcaccacaattttcattttctcgagccaatggcccattcggccaagcagaaaatggtcaaacgcagcgcatacgcgaatttgggaccattttttgtggaattttatggaggaaaccatttcataaagcagttcatttggcaactttttcggggtcattttatgagtttgggtggtaatttaggagatgggcaaccaacttataacggcgatgaatgcacagccatattcttatctaataaatctaggcttaattatcggcaattcattttcttatctaataaatctaggcttaattatcggcaattcattttcttatcaaataaatctaaccttaatttcgcatcgaaaagtaattaaagacacattttaataaaaaattcaacccagaaaacaaaaatgaaagccaaaaatatttggttatttaattgctggaattctttaaataagttccttggcgccactcatcattaaaaagtatttacttattttgatcaaaaattcaaatgtgcaaaaggacaaaggaataaaaattaattttaattaaaaaatagacgcatttctaacttatgttttatcattgttgatactgaaatggaaggacgcattgacaattgataacactgtatttttggttgaaagggaggaaaagcggattaaaagagagactgtcaagggatgcgcgataaatgcgtgaattgcaccgagaaaaatgaagtaacgacaatttcgagactctcgcgcagatcacaaaagtcaaaacagtcgtaaaaatattttgtgatgaaataattacgaacggaaggaaaatttctttgatggcacattagagtgggagaagaagcagaaggcacaaaaaattaagtaattgttatgatagtaatgaaaaaatgggagacgaaacggaatggcaaaactgtcaaagactgtgcaccaaatttgtttccgataaaacaatttgaaaaccaaagctaacactcgtgcacagtccattagacaattggcaaatacattttgtgaagggaatatgaacggcaaggaaagttcagtaatggcatttatggtgaggagagggcgattttacactcgagagctgagataattttaacgaagccgaatgccaaggacaaaggaaggcattcgggccgaacgaagcaaatttgaaaattaagcaaaaaacattttgtgggagatgaaaggcaaggaatgttcagtgatggcatttttggtgaggagggcgatcgattctggcaaaaaaacaaccgacagagcattcattcaatggtgtcgaagggcgagtaacagttcaatcgattcgcattcgatctgttccgttgacagtgccgcacatctgtacaagagattaatatcattaatgtcagatcagtgatcaaaattaaaggttgaactgatctctatattttcacaatctacccccccctccatttccccttttctctattcccacaaaaatcagttgaattctccaaaaagcaccttttcgttcctacaaaaatttatctataaaaaatgtctcaaaaatagacaaaatcggattaatataatggaataccaattttaaaaaaattttggttttaccaattgccctagtccgtgaatccgtgtacgttgtgcagatgatcgacatactctctcaaaactaaaaaataat

SEQ ID NO: 7314 - DNA, 2620 bp, Heterodera glycines
  unsure (1)..(2620): unsure at all n locations
ggtcggcagaagtcgaaacaantcggaaaaaatccggtggaacaaaagaagagcaaaaggagaagaaaagttggacacacgaagagcatttcttcactattaattatgggtattaattagcccaaagtcatcagccacgaaatacccgacaataattcgcgataaaagccaaaaagggaatatgaaagcgctgctgccgttcggcctttttatgcacaaatgtaattaattagtaattgatcaaagctaattaaattagggagaaatgaatgcttttcctgggatttctcgattatttcggcgattgccctaggctaacaatttgctgttcattaatatctctgaatcaatcactttagttatattggaggtgctcatttggcagctcttgaacaatcagagaaatgagatgacctatcagatttattactttaaaatatttattattttaaaattatttattaaataaaaattattttcccatcgcatttataaataaataaatcatcacaaatatttataatttattggacattattttggtcccagaatacaaaactagccgaaattaaaaacaaaatgtacaaaaattcattgaaaaatgaaataaaaattaaaattctgtcgctaattgtgccatttccttggggaaacccgcaacttctgtgtatcctttcaacgtggaaagcctccgccaaaatgtctccttttgtgccacgtccattggccctgtttctgccacggtgttcggccgtttaatgtgcaccaatcggacgggctgaccacggtccgtgccgagtgggggccaatccctttcgccgttgagcatatttggcacactaattgagagacgagatcaattattaaaaatgcgattataaatggctaacaattagaaaagaatggaatttgaaaaaagccgggtggaattgtgaaacacagcagctggacgtattttatggcatctcaaatgccaaaaaggtgtaatgagcatgttgacttacccattcttcacaaaactgccgtaggcatgtaccatctctgcgcgtactcttctgtcatcctcgtccaattcgaaattgcccagcaatggcacgcccaaagtgaatgcgtattcggctgcaaatttcggatgcaattaacaggcggcattcgccctccttcaccagtgtgtgccacggcgcggaacggcaacagtttggcatggcctttgttcaaatggtcaaattggtgcagaaagacgggccatccgagggcggacttcagccgagcttcggccaaaattggcataatgaaaaggacgtcggaaaggaactgaaaagggggtcagagaaacttgaaacgaattatcattaattgcccttaattaatccgttgctaattgccccccttttgccagtgtttcttttggctattctgataattttcggccttcccttctgacctaccaaagtgtactgcttcaaccaatgcattgtgtcgttcgtcggcgtttcgtcggcatagaatttgatcagtttttccacaattgcccttttgcgcttctcaacctctctgccattggcatttcgtccaatttgttcagaatggatgattttttggataaatttgacgagttgttcgtgcccaaatgtgttcagatttgtcacggttaatgcagaattgaaggtcagcagagagttaggactatgagtggcttaaaaaaggtgggggaattggataaacaaaatgccaatgccaaatttgtacactctcttcccccctctgagtgaaacatcatgagaattgaaagagttgcaaaaacttactaagaaagagtgcctcgtgcggtgtaaagcccataattgtgggtttcggcggtgccgtacgaatgagcagcgacagattggcggagggcacaaattcgccgtccacccgggggttgaaccgcgtcatggccaagtcgagtcggatcagatccaacttttggatggcatccatctgtaaaaagaaagcgccgtcacgccgtgtgattttaaaattaaaatggctctcaattttttggattttttgtttacccatttgggaatggggatacgtaccccttctatccctccctgggattgtccctatttgcttgaatggattggactgaccaaatcctccaattccgcgcgcttgacacagtcgcgcacattttgctccccatttgtgccgccgcatcccatcgcttttgctgtccgatctgagccgtcacggactaaatcattaacggcccacgggcacagcgcagaaccgctcatttggatggcctggtggaagagatctgtgagaaaacaaaaattaaaaaattgtgccattattttaatcgaaaaataataaacgctgcttaattaccccgcgtctgcggcgacagtgccaaaattgaggtgctcgccgcgcccgcactttggccccagacagtgacgcggtttgggtcgccgccaaatgcggcgatgttttcgcgcacccacagcagcgattgtcgctggtcccagaggccaaggttgcccgggttctgatcagtcccatccgtgaagaagcctgaagggacggacaacacgtcagaaagcaatgaaccctccgagataggcaattttta

SEQ ID NO: 7315 - DNA, 3476 bp, Heterodera glycines
ttatgggctgatcaaaaaaaaaatacaaaaatttttttgaattagcactttctgtcttttggcgttttaattttgaattcaaaatttgggatccctttcagcgatctcgatcccgaaaaatggataaatcaaacccttcttttttgtagtttttcaatttctgtttattatcaaattttatagcaattacaatgcttcaacgtctatttgttggcaagaatttcacctgtctgccgttgttcacttctcatcgcagttatccgggctcaaatttcactttccccatagattggtatgaaaataagtatgtgttactgcaccaacgcgcccgtgaaaaagtttcgcccgattttcacaagcaggttattattatgttaatggagcattttaatttcctgattattcatcactgttgcttataattccaatcttccgccttcttaagaccaccggccttaacggcctttacgtgaatgaaaatccgcacaaagaccttcgcttgctttaccaccgcattttgcgcgtgattggaatgatcccggacagcagtcagtaccggatggccgtcgaagaaattgtcaagcatcgcctttcgcttgttgaagcggttactatataaaatgtcgtggaaacgtgtttacggaggtttttaggtcgctgatcacgaatctgacatccatttcaaccttttcgaatcccggacccaaatttgaacaaaaaataggaaattcaaattttggtaaatttatgaacaaaagtgcgaatcttcaaaattttgattttcgactttttgttcgaattcgggtccgaaactcgagataggtcaaaatgagtgtcagattattgtcagcgaccctgaaaaccctcgtaaacatgtttccacgacttttcagaacaaaacaaaattttcccaaaaagtatgggaggcaccatcgatagtaatccaaaattctaaattacagaactttgtctaaattggatttatttctcaattgttaagcgattgttggattgttttgatgtttcaggaacccgacattcaacaattggagcagaaaatcggcatgggtcagattgaagaagtagttcaacaggttgtatccaaatttctttgttttggtgacacgactctatcaaatgaattgttaatacgctctttcttaaggccgagtatgaattggagtgtattcgtctgtttgttgcacataaatgttgggaaccgctggtggaaaaagcggatgaggcgcaatggcggtggccaattggaccaggcccataagggaatcaaatgaccgtgaaaatttgacgccttagaacgctgtattttttctcgttacaattattttaacgaattcacgtggagaatataaacagtataattatgggatgttaattaggataaaaaaagaaaaattttgtcattttaatattatgagcaccttatgtatcaactcgtacagttcttctgggctgccaataaacaagggcgtagccagacccttggctttgggtggggtggctgaattaaaaaattcgctttttagggatgtaattttctttttttttaaattccgaattaggagtatgtgttttgcaggagtttgtatccttttttcgccaaaaatgactcttgggttatgttaagagatgtgtttaaacttttcaaaaaatttgcccattttttgaattttttgttggatttcggggggagggagctttagccccctcagcccccctggctacgcacttgccaataagtcgaaatatcactattatttacacgcatttctccgtatccgcactttcccatcgtactctcctcctctgctgctctccctcttccccttcactctctgtttcacatccgttttctttctctttcacaactttttccagtgcggccattgccaattctatttgcagcgcatgtcgttcaatgtcatgtatctgagcaggggaatccccaaatatttcccgttaattattcctcgctttactcgcttcgccgcctcctccaattgagccgccattgtgtccatggtgggctgtgcaagcagtgcatgcagtttctgcatgcagtccgcgcgttcgccaagcacttgctgcacgcgacccgcgcgcgtgctggccatattggcacgtcgaaccacttccgcattgacttcgcgcatttgaaaaagatggagacgatatctgtgtgggaagttgctcataaaaagtcatgaattatgtgaaaaagacaaagggcggagtggaaatgacaaatgagaaaaacaaactttgtcagcatgttttgcacctcttctcgtccttcgatttctttgtaaaaggtgtgaagaccgctgaaaaacgcaatttaatcaaaatgaattttttccaacaaatttttgagttcccccttatacaacatatgtactagtggtcaaaatgttacttttcaaattgttgtttatccgtggcattggcggcagcactggcaattgcatcaccgatttgaccagccatcccgaggagggtgtcgacaactgcattcatttatttaggccaacagtatttagcttgaattcagtaaattgttccgagacaggctttaggttaaattggagagatggagttttgatttcacagatttaattttatgaattatttttttgctctaattcaaataaaaaacaaacggaaattaatttgactgtccctctcccgctgattaaaagccgtcgcttttccgttgtatctgctactgttgattgttgatgaaggcttttcacatatcttcgttttcaccgacacacagaatttatcggttgcgtatcagcggaattggcgccggagttatgccattgaaacagtttttgcttggcattttgatgggctttttgttttttgttgtccaccggcacttttgctcgtcattttatgctgccaaattcgcgggccctcgtcatgacacattcggacaatctttggctgatgatggcaaaagtccgacgatgaatagcgattttatttttgtaagcatagcatttgttggcatttttaattgtttgtttttttaggttggtgtgttaagtgcgcaggtaaattgatttaaaaaaacaattcctgttgagttaatccatcgattataccctttttttacgtttttttgataaagcatttgcttctccccttccccacagcgttttctcgacacgcgtgcatttcaaatttggcgcagttgggcgcgccgtgtgcctggccgcgtgctgttctttgtcgccgacggcactgtgctcagtgcgcgagtgcgtgcggcgcgcatgccagtggttgtgttgcgtggcgtcgatgacgcgtaccctccgcagaaaaaagcgtttgcaatgctccgctggatgttcgacaatcaggcaactaattaaaaaatgccgatttgcctttttttatcaattacaaaaccaataccgcattttctaaaatagaatacccggaca

SEQ ID NO: 7316 - DNA, 4699 bp, Heterodera glycines
gtgtataaattaagaattgactttaaaaacaccaaaacaatgactaggagcgtttttagacaattgcaaaacattttaattttaaaacttatatataaaatttagaatttttaaaatttttatcatatgctaaaataaattaaatttttaagtgaacaaattttttttcaaaaattctcacaaaaagttcaaaaatttgtaataatgttaccttgttttttttggtttactattttatttcatgtatcagcgacatttacattcttaagaatagagattgttttgcttatacgtacaataatttataaaataaatttaaaatggaaaatttaaatatattattttattatacacacataatttttagttatatttataaatataaaatagcttattattcctgatttaattgctgaataaaaaatatatttaaaacaaatgtaaattaaattttatttttagtcttttttaaataatggccgacataaacatgaattgcattgtcgaatgcccagggggccaaacaaactttaaacttaaaggcacacttcgttacgtaccagtaaatgaaaagaaatttcgaaaaataaacacagaaaaaattaatgaagacgaatccgattggaattttgaaaacattaaaataattgattggaaatatttgctcaaattcgcacttaattggaagaatttattaattattttaattttttcaacattagcactgtttattttattaataataatttttatatttataaaattttcaccattttacaatggataccgtattattagcagaaatttaattaacaatattatttttattttattatttaatcatgcaaattcaaaaacatttgcgttcggagggtcacatgaatgtgacaattcaaaattaaacattatgaatgaaataaagaacaaaattttgtgaagtgaaaatgaatcagcacttaagattttatggagtgaaaatgaatcagaaatgattaaattaaataaaaaggtgaacattaagaataagagtgatttaacaaatttacaaaaagaacaaggagcaattggtaatagaaaagctagtacattaaaatttaaaggcaaagattgccataaaatttatattaaatatagtgattcatttgtcaacatttttaaagcattgtcaaatttaaacaaagacaaaaaaccaaaaattgaagataaattaaatggatataaaaggaataagaaaaagcctattttttaccttaattatttttctccatccattttaacccaaataaaatattcacaataatgaacaaaatttccttgctaaaattggcgtccgaaatattcggaataaaatccgaacaagttgccaagacaaataaagacgattggaaaaaattccagcaactcgaaaatgaggtaaaaatcctggaggaacgaggtgcgcgaatatacagcaccatgaatggaaagcggaaaccgcatataaataataaaaattgggttttgtcaatggacaaaccagacgatgttatttttggaggaacaaaatcaataaaagaattgaatagccaaattttaaaaattgaaaaattaccatggtcccaagctggaccaggaatagtagttgatgggaaattttacccgttaatgagcttagaaattgggggcatcatcgaccaatttgacatatttaatgaattttggaaaggcatcgaaagggccaacaaaacaccaaaaaatccagaaaatttggaccaaaattccgaagaggaaaaaataaatatttctgaaaattcagtaaaaaaatctgtagaaaattcagaaacaatccaatttgaaattattggagaaacaaatgaaattgaatttgagactatgtgccaaatttttaaggaagagcgaaatgtccatggtaaggactccgtcaaaagaggcgacgggcttttgaatttgaaggtaaaagggtcacaaccccaagttagaaaaatgtcccttaagggaattattaaatggacaattttggcaattttcatcctttttggccatgtcaaaggcatggacaacaccaaaaaattggatgagagcatcatcgacgaattaagcgatgatggtgccattgaagaaaaggacgaaaaatcacagatgcacatgagcatcctcaattgcccgcctacaaccagcaatgcgcctcaaattcaagccgaaatcggcacactcatacaaacccaaataagcgcaatggccgaaaattggctgcgatcggcttttcagcaagggccaatgaatgaagcaacaaataaaaaaggaaatggcggacaaaaaatggggaaaaaaagggcatttcctttttcccaatcaacggcagaatcaggcgaaagttggaggaaagttggaaaaacgggcgcatcacaatggcagcgaacccatgaactgactaccgccgcagcagatgccgtcgaggctttggccgaacatcttcgcgactacaatgttgccgtgtccattctcctggtcacaattgccgccggacttgccgagatgaacaatcactacaagggcaacttcaaagggaacagaaagtgaattgtcggccgccggagtgtcgctaatttcatccttagcgacgaaaatttaaaattttatgattcatctgtttaaaataatttcacgccaaattcataacctttgtgattttaagcctttttattagtcagcattgtttacatttaaatttctgtcagcccgcctatgtaaaattgccgtatttaaaccattgcaaaatcaccattttttatcgttcaaatcgttcattaataaatatatttgttcgatcaaaattcactaataaagtgtgaaatataattgaagtattgggaaatccaataaaattaatttaatttaaataaaataaatatttaaattaattcttattgactatctgaaaaggagtcaataaaaactgtgctttaattttgtcaagaaattgtctttcttcttttttgaaaaatgttctcctctattaatcttgttttattgtcttaaaataattatttgttttgaattaaataaaatattttggatttgtcaaattcaagaagaaatttaaatgatttgattttttgggtttttaatattttttacagatattagtttggtttcaaaaaaataaacaaatatatttaattaattaattaaaatctgtaatatttgataatttaaattaattataatccatttttatttttttcctttatcgtaataaataaaattatttaaggaattcttaaaatcttatcagaatttttggcataaaatttttcgttttgaagatagaaaactcaaataaaaaattgattttttatgtataaatttatttttttaataatattttatttgcgttaactaatattatatagattttttcaattagaaattgtatttcaaaaatattatattttaataaatatataaattaaatgttttcagttttcttacttcctgagaatcgtatgttttcattgagctgcaaaatttactaattttcaaactaaattcgctatttttctattataattttaaaaaatttataataaaattaagttttaattaattaattcttgctctgctttcaattgatatttaaatttcataaatttccttttccaaatgtgctcgtttttgttttttaataaaaatttttacctatttaatatttataatttttaaaatatatatttatttaaagttatgtatgatatatttttagttttgttgaataaataaaaatgctttttattaataatatttacaatattttgtaaatttatgcgaaatttttaaaaaattatatgtaacctgggatatgtggcatggtttataaaaatatcgggtcgggattcgggacgagaaaaataaattaccaaatttttgcgttttaaagtcgagcgacgaatttattgcttttaaaaatcttttttacggcgctttttccaaaaaacttttgcggaaccgtggggcagacggtgccgataaggaaaaattttagtttacaatacgatttgtaaagtgattttgtctaaaaaagctgttatttctaattttggcaacctctgtagcaattattttgggcatttttcagtttttttagcaactaaaaatcccatccctgattttcgggatttgagattcggcattatggcggcaaccctgatgcgtagagctacctcataatttgattaagtttaagcaaaattatgattttttatttagcaataaaataaaaataattaaatatttcaactatttctacttttgaaataccggctcaccacggcatttacaaatctgtcagtctttacattttgggatcatttatacaaggtaatttgaataaatttgttaaatgtctttaatgtttttaattagtacaatcatttgatctggtgttacaaacgccagtgattttgaagtattttttaaatttattttaggtgtaatcagaaaaatagcattattttcattttagcagggggtgggtctggcggtgccgataggcgccgccgggaaaaattttgaaaatttacttctgatttgttaacagattttcttcaaaaaatgaccaaattttgtgatattagcaagtatatttacagataccaaaaatgttcacattttcaagaaatatatggttaaattcttctaa

SEQ ID NO: 7317 - DNA, 922 bp, Heterodera glycines
  unsure (1)..(922): unsure at all n locations
tcaaaattgggtaacatttttggtgattaaatgagtgtaaatatctttgacatggaaattatgagggcattctgtgcattggttgatgctcaaatagttcttctcgtgtcattttcaataagaaaatttgttttgtttggccaaatttggtggtcgccagtcagattacatttaaaaacaatttggggtcacattggttaatatttgttgccttaaaagtgtccaacattatttactcattgtcagatcaaagacatggcctcctattggcgtctgaaaagcattgaggagtacgagttggaaatgtccacgaaaagcaaagagacacgtcgctatgtgttcaactgtttggacgacattggccaagtgcaccttccgtccgacttggacgacatcgaccgaatgtgcgagcggagtgaccggcttgaatttgtcgacattctgaagcaaatgctgagcatggaccaggtacagcttgaactccttattggactcaaacattgaccatcacaattctcaacctttttaatttaaggaccgtcgtctgacaccgacccgcgggttgcaacacaaatttgtaaaaatgacgcatatgatcgagatggggcgcactaaatactgccaggtaatgaacggttaattgtaggcaacatttgcaatttagtcacataatttggtatgaatgtgttttctcccatcttgacatgaataaaatcccattaaaacgcacttcaaaactgacaatgagccttctanattataaaaatatatgccttgaacttggcactgccgggtaaaaacgtctttccgtccattttcattgcatttccattcttccatccatgcccaaatttgccccttcagatggctgctcagcggatgaaggtgtgctatcgcctcggctcctccgcggntgccgggt

SEQ ID NO: 7318 - DNA, 3538 bp, Heterodera glycines
aaacgcaaacacactgcgggcactgtccgtgggccatcgcggcagcggcgcaacaagtaagctaattgggtttgatttcttgactgggtctctgatttttcaggccgccctgctccccggcgctggcaacaaccccgcgggcgccgctgccgaccttttccttccggcgaatgccgcagccgcggcggcgatgcaacggcaaatggcgtcggcggcgcttcagttcccccatttgttttccgcgcccgtccaagcggccgcacagcaaacggccaaaaactactcacaacagctgcaactgttggcacagatgcaacaacagcagcacatgtggaggagggcattttgttggagatgaggggacattggaatggacacaattcttttttaaataaatgctccgtttctgttacactcaattagcggagtggaatttgggtgggaagggtggagggattaggatatgtttttacattcttggcattttgtcccccaggaggaatgggctgcccaagtgctgaacggtgtccggccgatgaatgcgcagcagcagcaaatgctgcaacagcaacaggcgatgatcgcccgactcaaaaatgacgcggccattctcatgcaaaattcgttggccgaacattacattttggagaggtcgggcaaaaaaatgacgaaaaatattgaaatttggacgagtttttaaatatctttaacgcccaaataaataaatatatttattacagtaagtccagtcaacaaataatttcaacaaatgtcatcagaaaaaggcatagaaaacaatcttttaataaatttgttttttgcaattggcttataaagttatgtaaatttctggttttaatatgttaaatgatcggaatgcatttttcctggaaaataaactgagactgtcggggaaattggcaattggtgggaagaaatttcaatgaatgataaacccttcaaaaatccctagagaaaagaattgagcgaattattgtaaaaagggaaaggttttaagagctgttccgaataaaaaagtttttttttttggttgactgttccgtccatcacatttcttcaaaatcacacgtcgttttcgacatcagtaaaaccttttcctggcacgttcttggcgtttttggaagaaaaacagcccaaagccgagaacacccacaacaacggcaaggccaatcagaatgaggaaaattgagccaatccaacccaatttggacggcctgcggtcggggacgtggtcacgaggggcggcgatactgtgaatgggagggataaaataaacaatgttatttcggaattattacttttctgcgaagggttccaccgagtcacggttggcactctcaaatggcttctccactcgggcgaactcttgctcaaacattcggatgctcaatacgtcatgattatctaaaggagacgagcatttttcccagttacctaaatctatctcaaaggtgaactttcgttttttgtcctattgataaaaaatgtctatttttgtatgtattaagtaacaaacattttgactgcttcggcgctagttgtgaattttaattttattaaaaccaaagggagacccttttggttggcaaattgtttggtaaagtattttaaccgtgaaaattattccttcccgtggattttccaggtcactaatcaagaatctgacatctgtttcaaccaatttcggatgccgaacaaaaaaataaaatcgaaaaatttgaattcaacttattttttaatccgggttagcgatttgacaaaataatatcatgttcgtgactaacgaccccgaaaattccacgggaaggacttttcaagatttattatgacagaacaattttgcaaactaaaagcgtacaccttttggtttttaacaaaaattaaaaaggcgagtttttttatcaagcgccaccgtttcttacctgaaagttctccagtagctgctgtaattccgaaatagtaatttgtgggcaaaataacatggtcaacagtgaaacagcgatgccattgcgaatccccagtaatgtctgtgaacaccttttgtaaacaatgttgggatggactagccagaggatttagcaacaaaaggacaaaatatggtccattaccgaaagagtgtccgccacgtaacggaccaacacttgcgtgtcgtggtctttgttccgaatctttgcttcacaacctaatcagcaaaaacaaacaattcaaagtgtaatagccagttttaccattgtgttctccgcccaattgcgtgtgagttccatccacgtcatggtcataatgaagcgagccattggaaaccatggccgaaatgtacggatgcgaatgctcaattagttaaaatattttgcttctgatttcacgagttttacttgatgaggtccgttgtgattgctgtaagtgtcaatgaaaatgccaagtcctcggaaataatctttggagccgaaaacagggccaagcgtatccgggtcttgaacataccaaatggccattccatctgaaaatacaaacattaaaagaaaggacagcaatcgcacctccgaacaaagagccagtcgatccgtgcactcggaaactcactataaattcccagtctcgcgcggtgttgggctaattttaagaatattttttatttttactgaagatagaacatgccattttattccacaatccaccactgagactctgcaaatcggatgtaagacggatatactgcggagttaaaatggcattgccaataatgtcccagaagggaaggtcactatcagcatctggaaaaaagaaaaatatactgtattttaacatattttttttagccatccgccaattagaaaggtatcaatgacgaaaaaaaacttacattgatatggctttacgaaagtatgctcccgtttgagaaatccacgcatttctgccaccgaaatgccgtcgatggcatcggctgttgggtcagaaagaacagaaaacggatgagtgattaaagaagcaaaaaggcacagacggagaagagatgtctttctaattgtgaacattattgaccgaggaaaatgaaacttaagaattcgcattctctaaaatgaaattaataattttgtataaaaaaaaagtagcagcattcgtttttaaatgtgaacagaaaaaatgacgaaaaaatgtgctggcattggctaacaatgagaaaagctaacaaaaagagcggaagaagcggagaacaaaaaggaacaaagaaggcgaatgcaaagacgaaaagccaaaaaatttaaaaataaaagggatatcgttgtataaataaaacaatttaaaatattgcagtttgctttaaatgagaaaaaattaggggtttgggttcgttcaattgcttatggaagctatatgtaatatgttggttgattggttgtttttgttgttttaaattaacagattccaaccattttatcataaataatagaattaactttaaattcatccgacttttgaatatgcgcatttttggtgggcgttaaacggggtaattgac

SEQ ID NO: 7319 - DNA, 3799 bp, Heterodera glycines
  unsure (1)..(3799): unsure at all n locations
gcattttcaattacacttcgccatgggtcacttattatgtgaccgaagatgccaaacaagcgacgttcgggtacagcacagcgccaggcgaaggtcatcagagacattcaaaactaacaaaaaaaacttgtttcattttgcattttagggaacatttaccggctaaaggattatgagcgccgattcagttccaaaatcggtatttggctcgtctttttgctgttagctttacccacgaccttgttgcctttcttcctctggtcagttttagttctttctaaagcaatttttccatttctcgcattcattcatggttttatagcctattgtaaaacaggcaaaacatagaataagaaaatggcaaccaatgagtgcgtaaaagcacggagtcatttggtgatataaaggtaccaagtgttaacttcgaatattttaaaagaggacgtaaaactcgaaaatattaatacaaccgcagctaaaaatctttttcgtatccatagtagctcattaaaaatgaatatagtctaaaaatcaaggccctaaataatttaaaaattttaaggtacaaattccaacagaaatatgcgacaaaaagcgggacatccggtcaacaaaattctaaaaaggctcaatgaaaactaaaggcaattatggagtgcgcaaatccatgccacctttatatttattaccattttgtttccatgcaaacttgtatttgttgtgttaaaccatttcattccttatgctgttgacgtaaacgtgtggaaaactgactgaattatcaaaacagtaatttcccgcctctattgaccagttttaagttaagttgttacaaccgacagaacagtctctttttagataagatcgaccttgttacaaaaatgaggtaaatggtacacttcactgtgtagcattaaacattcgactgattgttactaatttgaaaaccgggcggggactgagcaagcgatcagtcagttttaatgtcgtcgttgttcgtttacacgtacatgttaaagtcgaagatttttatctccctttcccgttctttccttttccattcgcataggaaggctgttcattcacaaaagtcttctgatttagaaatattcctttattttcaaagatatttctgccatttgtttcgcgacttttgcacattccgtctaataaatgcaagcgtaagttatacgatgataagtccatgtcccagacttttcgggttccagtccctgtcctgactgacctaaacattttgttctactccacttctcgaaccggtttaaatgtgttgggggtcttttattaaaagccctgtcccatgcgttcatgtcattcgtaagttttcctcttcttcagagtcacagaacaatgcttttgcaaacgatgggctttcagtctgaagaaaagcatggaaagcgagaatgtaagttcgcctcagttgtttggccaattgtttgtttccctattcaaaaaatcattttttcagttcgaaaggcatttccgtttggccgttcaatcggtcactgcggaagactatgaaaagatgcgtcagtatcggcaccgggaggactctctcgcgactttggccggtcgtctcttcctccgtaaggctgtccaatgcctttgcggcgtccgttgggccgacattgaaatttcacgaacggaacggggaaagcctttcattgttcgacccgagaacatttccataggactgaacgtttctcaccaagttggtttttgaaagaatctattccaggtacttatgtagtttaggggacagatttcacatacatttttagattcataaaatgtgtttagaaattaatgaaaataagttttatggggtttttggggtcgctgatcacaaatccgggctcagatcagcgctaccgttcactacatgagctgtacagggacaaagaattgataggctttctgtaccaataataccctcataggcaagatgcccatgaggatatcatccgtataattttcgaattttatttttcctgtaccaatggtacccgcatgggcaagatgccaatgaggatattatccatacaaattttttattttatttttgttcgagttcgggacaggggttcgaaattggcaaaaatgggtgctgtattcgtgacagcgacctcaaaaaccccttaaaacttattttcattaatttcaaaaacctatttataggcatttgaaaatgtatgttaaagtatcccgtaaactgcacgagtaccaaaattggaaccaatcttgattaaaatgccattttttcttttttttaattttacaaaaggaggatcctcaagagacacatattttattctaacttttaacttttattttccccgtctgcgcaagttctcaaaaaactatgcgccatttcggcagaaaaccttcatttctgtgcaaaatcgctttgcatttatgttgcccactttaaaatgcggcgccaagtccgaaccttggcattctgctgttggtgcccatcatttcggccgatcagcaactgttgctgctccaactggctgttgttggttttgatcagtgccgctgttttccagatcgccacccgagggcaaatccaacgcaattgtcaccgtttgactccgctcctcctcctcctcctcgttgtccattccaaaattatattatttttttcaattaatttttatttaaagctttaaggcttggtgaattaaaagcaggttttctgcaattactcctcatatctttggcatttaaggcaaatttattttaaaggctttaagaagaaaaataatttttgctcaacgaattcgtttttgtggcagttcacttaaaaataattaacagaatgccaaaataaaaaagttgccaaatttgaaaatatcaatcaaacctccaatgtcatcctgtaccattagggctcgcattcgtccttgaaattgtaatttggttcaaaaacccacccaaaaagcgttaaattatgcgggtcaaaaaaaaattgaataaaattaataatttttcattgcaaatattaaaattttacgcgtccttggatttcacgactttttcccattttgtccttgggaatcagtatacccgtccttggaaagcgattttttccatgcgaaccctgctataaaacactgaaagcttttattcagtcgcttaatcgagaaaattctagaaactgacaacattattcacagaatgttaatgatactaagttcgagactgaaaattcctaatactccagacaaaagatccgttcaaattttaaccaactcttctgcttatagccacgtcagtcgctcagcgcgcttgagtttggcactgctctgctgcacaacctttgtttgtgtccgatcagccatcaaacaacatttcggcacaaggacgaattgctggcaactgtgcttctgctgatcggacaagcaaaaagtgttcaggtgggcaaaagtttaactgcgattgcactggaaaaggattaagcttttccccaaaaacagcgccggtatttaccggtattttagatcccgattttggtaaaagccagcggtgggacaatcggcaccgaattagcactgataaaaatggggttttgattttttaggtaaattttctggtttaacttttatttttccgaaatcaaaaacgaacatttgtttttaatttgatattttttttatactgaatgggccttagtttgaccgcgacataatttttatttatttttaatcattttaattgtttttttttaaatatagacttgtgtgatcatcaantatactaattttttcacata

SEQ ID NO: 7320 - DNA, 2044 bp, Heterodera glycines
attgggaagaaaatgcaaaaatggtctttgatcagccaaatgaacacgttaagtgatcagataaattttgctaatgagcaaattattggacagtcgagcagcggcggaacgggttataattagaatgtgattatgacaaaatgattgaccatgaaataattttgagagggtggagcaatttgaaaaaattccaataaaatgaaaaatttaaatgataaattaacaaaattttttaattttaataaaaagaaaaagaaattgaattaatttaaatgataaattataaaggatttaatttaattaaaagtgaaaaaaatctcaaagccttgacaagataaaaatattagaaaaatttaaaaagtaaaattgaaaattataaaatttaatttcctttaaattgtttaaatatgtacaatactataaaataaacacattttaaactattaaaaatgctaataaaaactaagaacttccgttgtcgatttaaaaaatttacgcgaaattttacattaaaaaggagcgcaaaaacattggtctttgaccttgcgatcagaaatgatacaactgatcagaccaaaaaaattggtcattcaccggaaataaaaaggggcgggggcacaaaaaaggctctgatcgatcagtcagtcatgaatggcgtcaaaaaaatgtgatggatgctgttgtaaatgtcacagggtgtaaattaattatgcctttttatccagtttttaatggaggggggggggggggcggaaattcgaaaattggaatatgtgcgccccgcgtgacaatcgtgcaaaaaaaacgcgaaaaatatgcgcgcgaaatttgcgacgattgaaacggggaaaaaggaaacaatgacattttttaagttaggtgaaatttagacaaaaaaaattaaaaataaaaagccagactgttcatgaagtagcaccatttatggttggccttgtttctaagaattgtgtgtatttattttaagtaactcggagaaatttcattttgttaatttttataacaaaatttcgtaaatattttttcaaaaattcgtattttttacaaaaattacaataaaaaaaattaacaatttacctgccattactgctggtgatcaatttttgatcatttctctgttcattggaggcatcgatcactttttggtttcttttattatttatttctttaactttaatggagaaagctttttgaaataggcaatttttaacaaattaatcaacctctgctcctaaggctttttttcctccgattaaatggcattttaaaaatgttgacaagccaaaattccgttcggcatattcccagaattaaatggggaaaattaattctcgaatgaaaaaccacctgctgctaagaatgtgtgtgcgctgctgcactatttgtttgacaggtgccaaattaaaacgaaaatattttttaattaatttttaaagcggtaaaaatgattaatgggaaaaattgtcaattttgaattccgattatggaacaacatctgtcgtaaattatacaatatttatttgtttaattcgaatagtcttaaagcaaaactcaaaaccattgccaaattctgatcagaaatggctcgaggaaaaatgatcagacttttgtattccaagatatgacggcttgaaagattccggatcaagacgggatgttagaattcgaaccggactggatttctgggttaaaaatcctgttttcaggactcctggtccgagccaactttcaaaaacatactcggatcggaatcaggaatccggaaaaaccctgacaagacccggtcttgtttcggcctcaagacgacaatgacactttctttagcctaatgaatccagtcagcagaaaaaaatgaattgacataattctgagcatcaactcattatcctaatcactcaatcatagctcgtactttgccggccccgctgatgagtgaaaggaatgtgatttgaatgaatagaaagaattctgatcattatcaatcttcataatctgatcagccctgggggggggggggggggggggg

SEQ ID NO: 7321 - DNA, 4370 bp, Heterodera glycines
  unsure (1)..(4370): unsure at all n locations
acgagaaacttgccatgccaaaatggatttaaaaagtacaattttgaccagtgactttccccccctccacttttgggccccattagagcgcattataattagtaattgccttttcctcgaactttttgcgcttcatttatttgtttgaatttggcgcgtgccattttcgcttcatttgtttggcacaatgtgcccagcgaccgacgacgccaaccccccgtgaaaaggtcaccttttcatgaccaaattttcatgaatattctctcatcgccccgcgattgggaacatactgagcaggtggcaccagcctaattaggggaattaatcacacatatccatcattaaatatatattcgaggggacgtacggctgactgactcatcatcattagcagcagatcattatcgtcatattaaacatcataatgagttttttggtgccaaagtttcgcgcactctctgtgcccgaccccagcgcgccgttgtgtttggcattttgtgtgacgacggaatgaaatgccaaaaagcgcaattaattaattgggtgaaaggtaataatgagaaaagtaaaaaaaaaaattatttttgcgctactccgaaaagggtataaagcacaacaaaacacagaatgccaaagatggacgagaagggcaattattggaaaatctgtacagtaagtgaatgggtaattaattaatgattgctaatttgtaagcaaaaatgtgaatactgtaaatgaccgaatgatgacggaagttaattaataattattatgataataaatttggggaaaaagtgagtaaaattttaaaaatgcaaaaagtttaataattttttaagtgcgcttttacgtcaaatttttgctgttttcatgtaaaagtgctttttgtttttgtttttctaagttttgttttaaagtgcgtcagaattggcatttcaaaaaattgaactgaaaaaaattgcttaactttttgtggaaagaatatcaaaatagaaagcataatccgaatggataaaagctgcattaaaactgcaaaaagtgggcttcttaaattatgctcaaaatgcactgaaaatggaaaatatgtgtagtttggactgaaaaaaataataataaacaagttatggatggtatcatagcaaaaacatagcaaaataaaaataaaaatctaaaacctaaaaagtaataaaaattatatatttttttatttttttataaaatttttaaattattcattttaaactttttgaaaaaaaaattctataaaatgcttaattttttttaattttatcatcaaaaatcattagatttatttttataaggtttccttctacgttatgccattaatttcaaatatttaaaacctgatcaacgaaattaaatttaaatcaaaatttgaaaaaaaattctctttgtccccttataaataaaaatatttgttttaatagaaacaaaaatatttctttaaaatatgcaaaagacaaacaaaaattatgatgaatatgtaaatttttgttagcagtgaaggaataatgaccaccaaaaaatttaaataataaatatgcaaaaataatgagacaataaaatactaaataaaaataataataataataataattatacattttctgtttatttgatccggacagtggccaattcggaggacgaacaaaggcttaatctgttggccaaacaaatatataacaaataatcggcactgattttatgcctattgtctcccattatttttgttattatttatttcttttgtgggttacagtagctaagcgggggcactctgttgtttatttgaacaaatttggcggcgagtcataatgccaaaagtcacaaaactatttttgttatgtgaaaataggcaaaaaaaaaattggggcagatgagaaaacaattacaaagcttaggtatgttataaaaagtgtgataattcctctgctgacagcagcagagaacgcattgtttaataaaaaaaaataaatttattacaaattatttaattaattattaaatagaattaattttataaaaaatagttttatttaattatttatttagttactaatttggaataattgtttttattaattttattttttatattatttaaatttttataaaattacttttatcaattaattttaaagaatttttattcttttatcattagccttataaattagtttctaagcttgttttatttatttacattcataagttcaaaaagatatttttttaattggcaatttaaaaaatttaaatttttgctttaaattggcaaaatgttccgctgtcccttcctcctcattgtcctcaatttggccattgcgctcctctgttttttgctgcgccttttgccctcaacttcggcacaacgcctggaccgctgtttcgacggcacaaattttgtcccaagtgggttaaacggaggtcaagattatcggtatcatttcaatataacatttcatggcacgtttaatccccagaaatattttcctaaaaaattatgaatattgatgaatatcttttgaatttatggcttctattccagaatatattcttaatatggaataacggtaattacaatatgacatgtaaaagacgaaattatattactagggggatacggtagattcggtttttggcgctatttgaataagtagaatgttttaaaatttcaaatttttctaacttaaaagtcacgaaaacgacaatttatctgtgtctgtgaatatgctacgattaagcgatttcctaacctcctaacagtatcccgcacatatggagttacggtagtgtgtgggatggattacggtggcagcgccgtatttctttcgtccaggcgctcagagctgcacggacgaggccgacccgttgaccacccagagtcccaccgtcactgcaatgccaatttgtgaagcattttttgataccgaaccgaccgcaacggatgtgacggctgacacgcacccttgctatatgccgggtaaaatttccgaattttaatttttggtttttgaatatttttttagacaataagccaatggccagcaaatgccgacgccgatgcaaaacttgctgcttgttgccaaaatatggcagctgtgaaggtacaacaaaatgccttcttatacatacgcggcacagtagggatgcttgagagcgagcattttccgaggctcgaaaataccgagacttttctcgagtcgagaccgatacgctccagcatcactactgcacaatagtcctattggtttgattattaatgttcgttgatcgaaaatttcccgtgactctcgagcatcactcactactaatgatgcctatttaactaattataagctctttttagctaatgatagaaatcaacattgaatataatgcaataatttcaaaaaatgaagaaaatccctcagatggcacaacctcttccaatctcctggattagtatgtaatcgcaattttttgtgccattttttaagaccaacagtcggcacaggcgaccactccccaagtgccgtgcaatccgtccctttgttcggtggagaaatttgcggtcaaagtgtgcccgcgcacgtgcggacgatgcgtggactatttgcgcagcatggagcaaaccaaatattgcgacgatacggagaatgttgacaactgtatggtgctgaaggtggccgggggaatgaggacgaatttgaaaatagtggcaatggcatttagccaaaaaaaaaactcaaaatttgaatgctggcaatgacaataataaaaaaacctaatttgaagatggcaatggcattttgctgagaaattgagcaggcacttgaacaatggcatttgaaaaggacaaatggcattttgccaaaaaataaatgggtgtgatggcattttgccaaatttgtcaaaattttattgtcaaaatttttaatattggcaatgcatggatttgaaggagcattttgccaaaaaaaaatgaaagttgagcccatatgccaaaaaatatcgaaaattgactttggcactgttgaacgaaaactccccgaatattagacaaaaagttgagaatcttttttggatatnctttggatttatcttaggctaatatgctttctacaggaatcgggccttttgtgcgtccgccgacgcgggcgaaatgtgccgcgttgacgtgcaacgacccggcgaacaccagctttgcgagcatacacgcgcaaagggagcgccgctgtgaccgcaaatgacggccaccccggggggcggtgagcacaaaatgctataaaaaattatttatttattaaataattatattttttatttattttacggaaatactttttaaattttattttaatttttttttt

SEQ ID NO: 7322 - DNA, 3024 bp, Heterodera glycines
agaattacattgggccataatcagaagaatcccttctattttaaccaccacaacgtgagtgccaaatggtaactgtttatgaatcagattattcaggtgcgcgacattgagcttacggcctctggcaggacatatccccagtacccgtacaacctggactacaagaacaacaggtatgcaagggcttatcacgatgcccaagagcacctcggcatggcgtgcacaacggagagcaacggaatcagctacagcatgttcaagactgcctattgcctctatgtcttccaaatgaccaacgcgcaggaggactcgccaggatttgagctgatcaaagagggctgtactgcagtgaacatccgattcactgaagcagtacccaacgagggagttacattgattgcgtacggagaggcagacgggctcattcttattgatcgtaaccgttagatcactagtgacctcacagtatgagtcagaattattcctctgaaaacattctgatggacacgcctccgagggacgggatagtgatgtgctttcccgatgttatcgagaagtcgccaataaactttctcttctgtcttgtgtatctgttcggtgcggcagggacggcagccgtaggcacctatttattcctgcgagagagaagaattcgtaatggacaacagattcatcgacagacttctctttgagaatcctgcgacgaaaaggtacttcaccggcacatatcccgcagatgggttgccaaggtgttcaagatttccgtgcagtctgattgttaacctggtacgcttattttttgcttcattcgctcatcgtatttccattccggaccctgcaggtatgcccggaactcattggtgtgcgatatgggcacagtctcctgctgttgcctacttctttgactcatatggagagatgcctatcagcttgatcaaaaaatatttatccgataattttaaaaagatttactataataagaggcggtttcaatcggtgttgtccaatgtttgtggtcactatgtaattactttcgtttattttatgtccgtcggattgggtttcgaaaatattatgcaaattttgaatcgttcaaataaccctgatggatttgtttatcggtttgtaacaaagagcatagaataaatattaacgaaattagtcttcatcagatgtgtcatcatcatcaaaggcatggaaacagaaaaaagtaaaggcccaattccgaataaattcagcaaatccatttagtccatcatatttttcataatattcgttgaccactttttggctcgtgccgtcctcttgccttaagaaacccttcacctaaaatagcaataaaatatgaaacatattttccattaacctcaatacagtcttcagcatcgaaaatgtagagtcgattcaacgatgtcagcgtgcgaatcatcatacatccgcttacacgatagtcacgatggctactgtatgctggagttagtgttgtaaaacgaaagaaacatacccaaggtttggtagtggcgtaatacagccaaattcacgagcaacttcctcaaggattggcacacattcgatgagtcggaattcggtgttggatgtgacggtcatttttttcaataaaaatcgtaaaataagattgaggaaaattaaagtatgaaatatttgtacagtaaacagtacgcgaaataattgaacatttcaaagcactttatgaatcaacactgaagaaacacatgacattgttacggaggaagttatagaattcatcaattcccttttctttgtcgaagtagatagtctcaacgcttaggacgtatccaaactgcttgacaattcccttgaactcaatttggtctccttcttcgctgatgtagatgaaacgcggcttgtcctggtgctcgaaaacgtaacgcttctgctcctcctcgtacggcaccggaattttgcagtcgaacataaccgcaaccagatcaaatgctgtgcaacattcggcgagagtgaacggctcctcctttttgttcagttcttcgtccattttctaaaatattatttctatttgatgatattaataaaggttaacctcaacagatcgtagctcgtttgatggttcatccaaagacaggctttcaatcattgtttattcatcaatcggcgtagtcaaattgttgaaattcatagttggtttggctaaacagcattgtaaaagacagaaacagaaaatattcatgttaataaataatgaaagaagataagaatgattttgaaaaaagggtaggattaaggatagaaacaaaaaaacgacgccaagccacttttcccgccaaattttgaatttgaatctaatgcgaaaggttttcgtctcaataaattatggcgttatgtatatattgtggcgttttgtcttgttttgcgtattttcaaagtttttccaccggactacagtacccctcgcagtgatgacgtcatcatctttgctgcatatagttgataattatcctttttctggcaactggtttcgtggcagagtggtagtgtgttgggttggtggcagaccaaaagttcgagtccgcttgcctgtggctaatttattggaattattcaccggactacagtacccctctcagtggtgacgtcatcatctttgcagcatatagtggacaattatcctttttctggcaactggtctcatggccgagtggtagtgtgttgggtttggtggcagagcaaaagttcgagtccactagcctgcggattatttattgcgaattttccctgggctaccgtacccctcgcagtgatgacgtcatcatccttgcagcatatagtggacaattatcctttttctggcaagtggtctcatggcagagtggtagtgtgttgggttggtggcagaccaaaagttcgagcccgcttgcctgcggctattttattgcgaattttcaccggactacagtacacctcgcggtgatgacgacatcatctttgcagcgtatagtggacaaattatcctttttctggcaagtg

SEQ ID NO: 7323 - DNA, 2403 bp, Heterodera glycines
atagttgataattatcctttttctggcaagaggtttcgtggcagagtggtagtgtgttgggttggtggcagaccaaaagttcgagtccacttgcctgcggctaatttattgcgaattttcaccggactaccgtacccctcgcagtgatgacgtcatcatccttgcagcatatagtggacaattatcctttttctggcaagtggtcgcgtggcagagtggtagtgtgttgggtttggtggcagaccaaaagttcgagtccacttgccttcggctaatttattgcgaattttcaccggactaccgtacccctcgcagtggtgacgtcatcatccttgcagcatatagtggacaattatcctttttctggcaagtggtcgcgtggcagagtggtattgtgttgggtttggtggcagaccaaaagttcgagtccgcttgcctgcagctaatttattgcgaatttcagcaggactacagtacccctcgcagtgatgacgtcatcatctttgcagcatatagtggacaattatcctttttctggcaactggtctcgtgtcagagtggtagtgtgttgggtttggtggcagagcgaaagttcgaggccactagtctgcggcagaatttttcgaataaaaaaagtcgcgcacccctgcaataggtttaggcttgcagaaaaaaagtcgcgcacccccctgcaataggtttgggtttgcaaaaaaaagtcgcgcaataggttttggtttcagtactgaaaattttggcgctcagttggcccgcgctcacttggcggcgctcatctggctggcgctcagttggccgtgcacccctcccataggtatgggaggctaccgtaatccggtggaatttactgccctaactacttaccgcattttttaaaacattaaattaatagtttttgatacaaattgtcaataaaaaaagcttaaaatccacggaccgggtcagtttagtacgggccgttttagtacgagcgcacatttttccactataacttttttatttgttatccaaatccaactttcttgatatcattcgagagcccttcggatgctctattagcctgcaaaatttcaaaaaattttgttaagtttaaaaaaagtttgagccaaaaaagtttgaaaatctggttttttgaatttttctgaccataactttcttgaagcttaacaaaatttttcgcaatttttcagattaatagaggacacttagggctatcgaacgatactaaaaatgttggattttgttggcaaagaaaaaagttatagccaaaaacttgcgctcgtactaaaccgaccccgacccatttttaaacgttactcatcaatagctgtcgaatgataccaaatttgtccggttttgaccattttatagaagtgctccattttgttcaattttccgaattttaaaccggttcaaaaaccattttttttttgccatttccgcacctcaggagtatttttccttagcattacaggccatgagagaacgaatggcatcaattttattcattttttttgtgggtggtagactatagtaactccaaacagtgattggaatggtgtgccaaaattctttaaattttcccaataattttttttccacccgctgcagcacaccttccgccgcatttgtttgtatttgtagcgaaatgtgggctcatcagtgtccacgtaaagagaagggtttttgcgatggcaaatggtggtggtggcggtcatccgccgctgctgctgaacttcttccgtgtcatgcaaccgtttgaacgcattccgacaaaatcctgcaaatgtacacattcattttgagggcatcatttaaaattaaaaaaaggataaacttacaattagcccatgactacagtatgcccctcaaatgccatccaaatactccccccccctcccctccggaccgcctcggctgacgcccactgttaagcgactgagtgcacttatttatgggggtaattagcgcgctaattgatgagactgaccaatttcgcctcgccacacccactgcagcgggcatttgcacttcgcttccggcacgttgtgaatgcacgccatgcacacctcctcgatgaggttggtcagaatgatgttcggaaacattgcgccgacgtccgacaagtggcaaatgtgcgggagttcggtgcgcaacggtcgctcaatgagtgccgacagcaggacggcatcaatttggacagaaactgcggcaaagtcggccattccggcgccaatgtccgcaattttggcatcgttgcacaactcgtcgtgctttatggtgggccgcacatcgtcctaacataaaaattgcactcacaaaagcgttggaaaatgaatttttggttgctgatggaaaattatcggactaaatctgttaaaaaaa

SEQ ID NO: 7324 - DNA, 5745 bp, Heterodera glycines
gtttgtcgaaaaaatgggccaaatttcacgtgtcaaaatatcccaaatccgctggccatccgtggtgtatgataatggaatccacaactgtaaatcgatgcctcttttgtcgaaaatttggtgattggaacgaagaaaagcgatgacggagtgatcgatgtacctaaaaatgggatgaatgcttttattgtcatagctcagattttgaattactcaatataaagacgcttaaagcgaattttgctgggcaacggacggtcgtcgggcaacggaaattccacaaatttgtcattgaacaatacaaacagcttcggtcctggtcctttgtccttgcgaattttgatttgtctccaaattgtcaattcgcttttgccatcgaaatgtttgtccaccaacgcatcgaaacgtggcgaaagaagtgccaatttgaggccgagttgaggatggtcaaaactggggaaaatgtccatccaaacgtcgttgcaaatccaactgaaattatagaaaacagtttagtcaaataaacgacgaatttgtgacttttaaaattcattaccgtcggttcatttttggcagcaattagcacaattttggacgagttccgaatgatgtcaaacaaaagaacagaataataattcgttggaaactttatttttttaatgagagtcaaagcggaaaacaaaagatttttatagtcatgaaaagggaattggtgaatattttttgcatatgaatagagagagccctgatttttttagatttttcctattttttacggattgtacttgatgaaagaaacacgaaaatcacattttattaaaacaatttttgaatttttttgccttaaatggggttggacaatgtttaaatgggaaacgaaagatcattgacaaaaacggaaggggcggaaacattttggcataaaatgaccgattggaagaggaagcaaaagggaacgcaacagaggaggaccaccaaagaggagaatattttgcaaaattatgactagggatgggaatttaagtcaaatgacttttttgctgactctaaatgaccttaaaatgacttcaaaagcgatttttagtccatattttatggccatatttcgcgattttatatacatatttttaccatccctagttatgaaaaagtcaaactatctaaacgattaaaatggaaaatcatacataactagggatgcaatttttaggcaaaagcctatttttttcctgagctccccgtggcctgaaacgcacgaaaaacatgtttttttcgggtgttgttaagctacttttcgagttattagtgcctattttctaggcttttatttttagcgcctaaaaagcctaaaaaattttgaaagagcctatttttgcctattttggcgttttgcccaaaatttgttaacaaaaatgcaataaaaacggaaatctttgcatagaataaagaaatctcggaaaataaaatccggaattaaagattttattcactgattgcagttacaaaatattttcttagaaaatattgaacaagaaaaaaaaatttgggggaagaatttttgtgaaatttttccaattcttagggatgtatttttgaaaatttttaggtcgattcttaggggtgtatttttgaaaaatttttaggtcgattcttggggtgtatttttcgtttttattgcattttttgggaaattttccaaaaaatgccaaaatagtggcaaaaataatgacgaaacgccaaaatagtggcaaaaaattattttagtggctaacttccgaaatagttttttttagtggcgaagctccaaaatagtgattcctagtgatgaatagtggcactaaaaatgaaaaattttcgaaaaagaatgtgtttttcgtgcatttctcgtcgagttaaagccgcagaaaaaatagttaaaaaactaagaatccgatccctaatgatgaatttgtgtgacttttcaaattgcttaccgtcggttcatttttgtggcaattaacacaattttggccgagttccgaatgatatcacacaacaaagagcagaataattaattgcgttagaaatttttatttttttttcaaatgcgagacaaagtgaaaaaacaaacatttttatagacatgaaaagggattgatgaatgtttttgtatctttttgtttatgtgtcatgattagggaacggattttgctctagtgcagtttatgagtccaatcgacctttatgagtccaatcaattgtcaatcccgggtttttatacaataactttgttcatgttcgataaaccctacctttttggtatcattcgaaagtataaactgaataatgtatgacccaaaaagacaggcacaaactgctgcaggcgaaagagttgggaaaacggcaaaaatgagataaaaataaaaactttattatataataaattaaaaaaaaagtacaatggcgtcaggctatgcctactacaaatggagaaaattggcgagaagtgatgtcaaaaattgaaaaattaaaaaatttgaaatgacgcgtcccgccgtacattagtgttaaccggacggcaccgtgttttgtgaattgaataattaaatttatttatttaattttatcgatcactgagtttttgtggaacgcccacactgagcttttttgtggaacgccctagcaccggtaaaatctatgccactttaaaagtgctttacatgggacggacaatagaggctgcaactgttggaaaattttgcgcaatttttggcaaatattaaaactaccgttaatttttttaattttaaaaattagagtcaattttttgttgttgtttgaggctattaaaaaaattctttaaaagaagtcattgacctaggaaaaatggagcagcacaagtttttatcagattttattctagaattgtcattttttaactaaaatatcccaaaatatgtacaaaaaccccaatatgtaaataaaaatttttcaaatggttattttttggaaaaaaatcctcgtaaagtgaaataggcaaaacttttttttgttcaattcttttgaagaagtcatggtcatatgtttaggaacacctctttttttgaataaattctttgatttttgttatatttttataaaattttaattattttttccgtttgacgcacatccgaccaaactgacaaattactgtagaagatattagccgcaagaaataaaaaaattaaaaagttaagaaatttgtccgaatgcgggttcggattcgaaacatggatgttttgcacaaatccgaccaatttcagtcctaaacagctactcacgcgaaaacggccccgaccgattcttagggggtctaagaatctctatttgtaataaattgtttgaaatttgccggaaattccctgagaaatttaatgatttttttaaatcgttaatgggatttggggaacaagctgtgctcctgcaaaacccacgccacaacataaattttttgcctatgtaatcgaatgaatgcatttttctttcgaaaattgtgtagttttcaggattttgacggggatttacgacatccattagcattattaggaccggcaaaattaaaaagtgtcgatttgctgctgttactctctcttttcagcttcattctctcctcctccttccgtcgaatttttccttttcctctctttctcttccgtctctcctccttccccaatgctattttcatccttttcctcctctttctccccctccttgcttcgaatttttccttttcctctctttctcttccgtctctcctccttccccaatgctattttcatccttttcctctatccgtccaattgattatttgattgattgatttgtgggtggggggataaggtaaaacgcccggcaaatggtcatcattttgcaaaatattctctttgttggtcctcctctcctcttctgttgcgttccctttttctgtgtttttcgagcttctcaaattttgttttcattgttttccgctttgttctctaattataaaaatggtactacaggagtttgtatccacatttttggtcaacattttttcaaattctttttttggtttaaaaagttcagaaaacaagtatccgccgggggtttccgaggtcgctgatcaatgatcacgaatatggaatcctcttgattttctacttctttcccttggttcaatcactctgcagaaattcaaatattttgattttctttttgttcatgggttcctacatatcgacaagctatgcttcctcatacttttttttaattgcgcatattttataatttttttaaagaaaatccatacaaattgagcccagtagtccaaaaaaccagcctttttgttgaaattcgtaaacaaatctcactcaaattttcaaaatttttccccggcggcgcctaactgcaccgccggacccctttcttcccaaaaagttttttggaaaaaacgcgccgaaaaattatgtgaaaagcaattctggatttctaagattattcgatcatttagtccaaaatgattaattgtttgaaataactgaagtaaattcgtttaaaaatttcattaatttaatttagctttaacttttagattttataaaataaatagcaaaataaaaattaattttgtgttattttcacttgaaataaattaaaatttgaattttttttgaatttaaaaattcccggaaaaccaaggtcccgtcccggcttctcaggtcccggtcccggttttgcccaacattcccggtccgctcaactctacggtagtaccataaaaataaagtttccaacgcaattaattctctgcaatttgtgttatgtgccaaaaaacccccaaaatatgtgctaaaacccaaaaaaaaggccaaaatatgtgccaaaaattgaaaaaaactgctcaaaaaataagttaatttctcaaaaaagtctcattttttatcaatttcgctagcttaatgtaatgctttttggcgtaaattttttttcgctctcaaagatttactcatttttcggaatttcttcgctaaaaatcaaattttgctttaaaagtgaaaaagtcatgaaaagggtcaaaaaaatacaaaaaaaaagaaaattttgaaaaattattgggcatttatttgaccacgaatttgagtgccaaaaaagacatttttgtaaaaaaaaaacctaatttttccaaaaaatcgccaaaatatgtgacaaaaactgccgaaaccccaaaatatgtttttattcccaaaaagcccaaaataaatatgtgctaaaaactcgctctgattgaaaggaaaacaggtaaaaatgctatttttgagattttcatgcgatagatgcgcaaaaaaatatataaaaacatataaatccgttccctgataatatccgtcaagaaataggaaaatcctaaaaatccaagctttacccaacgcaattaattcttctgctatttgtgtgacatcattcggagctcggccaaattgtgctaattgcctcaaaaatgaaccgacggtaaaaggattttaaaagtcacaaattcgtcgtttatttaactaaactgttttccataatttcagttggatttgcaacgacgtttggatggacattttcccctcttttgaccgtgctcaactcggcctcaaattggcacttctttcgccacgtttcaatgcgttggtggacaaacatttcgatggcaaaagcgaattgacaatttggagaccaatcggaattgcaaggacaaaggac

SEQ ID NO: 7325 - DNA, 5768 bp, Heterodera glycines
ggcatcaaaaaaaaattaaataaaatgcccaacaaactttttctcaaatgcttttgcctttattcggttcagagtacggcacaaatggaccggaggttcgtctactgtctgttcgcgctctctttttttgccaacttttgcatttatgccccctgggcattcaaaaaaatcatttaccaggcaagcaattgatctgattgatgttgaatatctgatgttgccttttggctttgtgccgttcagattccccccggtgttctcagatgccccttggtaatttgcgaccgcaacatggacaccccctggttccgcatctacgaatgggtccgcgagttcctcacgcgtcttttgcccttcgttctcatagcctacttcaacgtgaacattctgatcacttacaggtgatgaccgataaggtcgagccaatcttttgtgatttgttatgtttgaggaccaacaaaaaagaccgtctctcattgtccagccaatcgtttcatcggaaggccgtggtcgagaaaagcgaaaaggtccaacccatcgctgagacaagagcctaatgaatctgatcagttgcaggaggagaagcggctgttcactgtgctgttcgccattaccgtcattttctttctgtgcacaatccccgcggttggccaaagcctattccgttgttgcttcacttttgcaccgctttttcatctttccaggccccggtgaccattttcatctccgatcggcagagccaatcgctgccatttcaggtgggtgaaattgcgtatttacaattggcatttagtggacacaaaacaacccttttaaatcccattttgattttgaccaacagatattccgttccgcctcgaatttgttggaaatcaccaaattcgctcttaatttttacttatattgtctcataaacccaggttcatctcactttgcttttctctaattgtcatttttgcgaattgttaagacattcggagggtttgcctcagagtgttgaaatgcaacggttggacttcgttgtacgaaagagtgagcagcggacacacgctgaggaccattccgagcatgccgaacagcaggtgaaggagcaattaatgggcgacggacgaaacgctaatgaccatcgatcaatttttggtcgggaagcaacaaaaccattttgacaatacggaatgggtctgatcggagttcgcgcgggagcagaaaaagtcggaacagtcatttggccacggaagagagtcaaaggacggacccaccggcggaggggacgaccgatcagtgccaaagtccgatcggctacactgaacggcagacaaaccattcgaaccattcgtcagggcagagaatggccagtcggacaacgccgagacggagcagtgcccgcaacacaacggacagtcatcggacgaccatttgcagcaacaaagacagcagtcattggcacgcgcaattgtgaacggagcgaatggagaaaaaaatgaaaaaagaaaatggaaaggaatttgtacattttgaggagcaataatttaaagatcatttcaattaaattaaatatgaaataaatttattaaagttcataggagaaagtgggggaaagacaaaaattgcaattcaatttgatcccttcccttttaaatgtatttctttaatttgtgccaatttacgccgctgtcctttccattcgctttttccggcactttcccttttaattggtacccaattttccgggctccatttccatccgccttcttccaaatgcatttgacattaagcacatgaatattttccgcttatcccaactcatccctcaaaagcaaattttccattttttgctttacttttgccaatttctgttttgccaattgcgtcgtttatgtcatttccaaatttataataaaattttatccaaaaatacaaaataaatgtttggatgaagggacattatgctaattgataattaatttccctaaaatcatttaaattaaaacatgtttaacccttgcgaatgttctcacagttcgacctgcacttgaacaacaaccaacaaccggtcttccgtctgtctttttctgctgactctgagatggtccccctttttccccatttccccccattttccccctcagtcaataaaatgcgtacaaacattccccaattacacttcacaattagacagccatcacattctcaatcaacacaaatgcttaactaataaaaaataaatcttctttttggtccattgccatagccaacgcttcatctcccaaattccatcggcggtgccattctccgtccgtctccccccccccccctccggtgctgcttttcctctgctcttccgctgatctcactccctccccaccgtttggtcctcaattatttctcattagtgccattttatgcttattccttcttctctccgcttcatcatccgctgtcattcttcagctgctgctgagtgttttttgccttcgttttcgtcccttttacaattgtataattctttcaattgagcaactttggcattatttcctcctccttgtttgttagcatttgaattagccgaggttcactcggttctcagccagcagaatggccaactccagtggccatgacccaatcgcgcggtggctcactcggctaaggcctcgttcgcgcatcgctttggtcattttcggcgctgtgatgatccacctcagcatcggcacttaccacaccttcggtttgattggaaagcatcttacaaacgcaatttgcagaaatgaatttggataggcaatatgctcccttacatggcctcgtacatgcgaaatttcaccgacccatcagtcaaaattgagcatctcatttgggtcccaactttccaaggtttggtttgccagaaagcgcaaaatgaagtgccccttttgctgggcaggctgttttccgttggcaatggtaatcggcgggtttctgtcccaaagggttgggcctcggctggccgctgccattggctgctacacaatgtggtgagtcaatgaatgggtgctttcttctgctgctcattaatagggttgagcgctaccggtaccggccggtaattaccggtttttttggtaccggtaccgaccttctgattttcattatttctcgcttgggttcaattccccactgggataaaatatttttcatatttactttaccattcattattttaaataaaattttaatttaaaaaaaaattttttttctttcattttaaacagcctagaaatcgaaaaagtaaccaaagactgggtcattttttgacaaattctgtaaattaaaaattttcccggcggcgcctatcggcaccgccggcccccctttcttccccaaaagtcttggaaaaaacgcgccgcgaaaaaagcggtgttgaaagcaaaaaaaaaaaaaaagataaatcaatttacatggcggacccagacccccttgtcttgcaaaaaaactgaattttagtgttctttatcctgaatttgaaaaagaagcctggtcaattaccggtttttaccggtaccggtgtaaaaagttggtacctaccggtttttgcattaccggtcagtaccggtaccggttttttttacaattaccgattaccgctcaactctactcattaatcccttagttttcaatttaatttttgcacagtctctaatccaattaagcaaatcatttgcatcgaaattagaatttgtcaaaaataataatttatttatttggttaaaaatggcttttccccaatgcttttggcctgtcttttcccttccgtccgtctgtccctttacttttcattcattctttggccccaattttcagtttgggtgtgctcctctcctcatggacaatccgccattcctattacggctttctgttcacctacggactgatgtttggccttggccagggaatcgctgtcagaaaatgccattatgccaaaactagtccctaattgttcagtatgtgatcgcagtctcttgcgtgatcaattgggcccccaaaatggtcggcctcggctcgggcatcgtcgccgccggctttggcatttcgtcctccatttttgcaccaattcaaacgcgcattgtgaacccgaacaatgtggcggccaataaggacggatatttcaacgatcagcatttgctgtgaatggcattttcatcaattggtgccaactttgctcgcttaggtcgcgtgttcccggattgttcgtcactttggccaccgcttatttcttcatgcaatgtattgggctgttattcatttgcgacccgcctgatgaggtccgttctccgtcgttcgtttcgaatcgtttcttaattacccctaattaccccttctctctttgtcgccacttaattaaccgatgcatttgtctcgtcccgtccttgtcctcctcattaaataattactgcaaatggcttaacctgctggttcgtccgctctttcagtttgtccgtcgctttttgtccccaattcgacctctctgatcgacatggcatggctctccaagaagcgcagtcattggttagctgccaatcggtccccgctgctttcctccgggtgggccaccgccaaaatgggactccaacggatggaacgcttcgggcgttatcaatacgctcggtttgtcagtagagcaacgaattttcaaaaacaaacaaacaaaaaacagactggcaacagccgctgaacaggaggaggacagtgacgaagagcaaaagcagaaaaaggcaaagaatggcacggagaaagaagcttttcctccccaaatgctaaccaaaaaccgaaaaaaaagacctaggaaagaaaggaaaagcactttataacacggaaaaagaaaatgccaactttagagtgaaagtgggagcaatgaacagcaacggcatttgaccaattcctttccgactcctccgaacgaatcggacgaaacggcagaagaggaggacgacgacttggacattggcaagcaggtcaaccgacaggggacacggcacagccgacggactgacactgacagaaaagtgccgaacttttcaggggcctccgatttcgctgagcacgcggcaaatgctccgttcgtccaccttttattttctgttcatttcgctgttctgctgctctttttatgggaatttcttctacaatttgtacaaagtcataaataataatgacacaattaattaattttcatttaatttttcagactttcggcgaaactttcatcgaagacgacttttttctggcctttgctttcagtttgggtatattaagagggtaactaattttagcttcattttttgcttccgcttgtcaggctctgtggccaatgcgattgctcgcgtcggctggggacttcttacggataggacgagtttccaggtgccaatgccttctgattaaatgtcaaatttcggcattttcttcctccttatccttcggttgtcccaggagggcttaagcatgtgactgattttaatcacagacaacccgtgaaaggacctatttaaaaaaccgtgacctgtgattcgagatcacggacaaaaaaaatttaaaattgttttttagtttgaaatatatagtatttttttaaacaaaaaaaacccaaaatttttaattttattattttttcacttattattaaataaacgaattgctatttcagaaaaagttgtaaattttcctatataggcgccggagaaaatgtttttgcagttttattaccatatagtaatgcgatttgttaagagatt

SEQ ID NO: 7326 - DNA, 1283 bp, Heterodera glycines
tacgacaacgcttccggcaaacgcgcagcagttcctcccgctcctcgtcacgaatgcagcatcatcagcacaacaacgacgaagacaccgaattggaggcgtacacgcccgatctgttgccttccgccatgtccgcttcaacctcacaagcgccaactccgctgccaaccaccagccacgcatccgtcgctggcccatggcagcgcggaggctcagtgaagtcgcgcaactcgttgaagctgttgaaacgcaaaatttttggtggcaccggctcgaaaaatcgcgaaaatggcggttgcgatgtggcggaaacgacaatttcggtactttttttgatcaaattgtgtcggaatcaattcgagtttcagctattacaatttatcaaatcctttctaattaagactgctccgacggatgaaaacattgtgtggacagctccgtcatcaccacaaattggtcgcacattcaacggtgttaccggcatgccaagacgtcgaaattcagcaagacttcgtgaattgcagcgcctgcttcgggcataccatgaacaacgaagaagtgaatggacatcgacgccaagcagtccaaggatccatcaacgacaacaaatgccaatgaaagaagcaccatcaccagtgggatatcatgatcagaattttgatcaccatggaaccaattatcccgttcatataccagtagcaaagctgagttactgtcgtggtgaactcggccctgaacgccctctaattcttcaatcacattctgtggatcagcagcagcaacaaaatttgcctgggccaaatgtgctaagacggaaaatcaatttgtcagagttggaattggcactgttaaacggtgccaatacatcatgcccatcaagcttgttcacaaattccagccaaacagcttcatcattgcagcaaccactgccaacatcggcaactgttgttgtgcacactcagccaccaggacacgcaactgctgagcaagctgcgacaacagttgttgaggaaaagcatgcttatcgagcaaccaattttcagcatgaacaacagcatcaacaaattatttcgttatcaaagcacctacagtaccagggtgctaccacagtaacttcaacaacacacttttcgtccgctgttgggtctccccagaagcagcagatggatttcctaattaaaaaggctaattaccaaccaccgattgatctgccactgataagcccatcaccatatgaacaaatcatttcatatgtggcaccccctgtaaatatgccaaaacaa

SEQ ID NO: 7327 - DNA, 2014 bp, Heterodera glycines
caacattgatcagagagccagaaaagatttgtatgaaatggcatctgaaaagccgaacaacaagcagaagaaaaagaaaaagcggcgaaacaaaagtgaccaaatgccaaaaacgcaccatggcattgttggacagtacgcggaaattcaaaatcaacaaatttctggcaatcaaatggcttcttctcccaaattggccaagccacaacagcaacagaatgccaagacttatccaaaaagcggttcttcaaatattttatcgctcggatttaatcagttagttcaacgccattttcaacaaagccaactaccaccaaaacaacagcagcaacaacaacaaaatgctgtcgttgaaccaatgctcaagtcggccaggtcggagcctcgtcttacggcacgggccaaccggcgcgagcattggctgctgatgagccgcccagaaatccctggctcatcatttctatctccaaccccgtcaattgccgctttagagcatttggaccgtgttcgtgatcggattagtgagacaaagtcagggattaggggtgctaaactttcgagagtcttgaactcgaaaacatttggagatatgtgacagccgtgtttgagtcgcgcggtgggcttggccccgtgttgagcgatgtgcaggccgagttggagcactggttgggcgacacgtcccttctattggccatcgcctgtgaggtacattggtcagtgccggagcggttcagaagccgacagctggaaattgagtaagttttgctgttttatggtactttattggttttaaacattaataggggtaacaataaaaaaacaatttaatacaattcggatgccgagaatcccgaacatcgatttttaaaattaaactacattacttaattagcaaagctctaattacacatccgagtttaatgccagaagaataaattttggttaaataatttttaattttaactaaaatctgtattttcaatttttcaaattaaattccatcggtctgcagcaaaatgccattattactactgctgtgatcaaaaatattggcccttaaggcttaagcaatgcttacacgcggtgctacgcgtgaacaaccgccgcgtgctgagcctgaacgataatgacaatgacgaggaaacagcggcggtaaccgcgaaagttagccccgcggacagtccgtttttgatgccacggcacgggccacggcaccgttcattctcaacccattcgctgaacaatcgttccatcggcggcggcagcggcgggcgtccgtttcccattgcgttggcacgatccaaaacggaggagtcatgcattcgagatgccgagctggacgcattccagggtcttgaatgctttacagatgaagcgccaccataaatggaataataaaaaatgtatttctctatctaaggaatttatcgccgtttttatccggcattgcttccgctgcaagacccggctactgttaaagcacatcaggtactgtactgtaatggggtttttacagtttggggacaaaaaatgatgcgccgacgcggaaaaagtatcgactcgacaaaattttttgaatcggcatctagctgagatctctcgttccatcttaaaattaatcgagatttaatcgttttttagtcgattttcattaaatcgctagctgttacggtacattcaattggtggtctattaccgtataggaagctactttgactgtatgtataccttaaaagggctattggacacttgaaaatttgacggacgagcacaagtcgccattggtcccggacccggcacgttttctgtaccaaccggaacagccggctcagttggtgcgcaagtcgctggtcgcggtcaacatggcggtgctacgaatggtcggcgacgagcgtgactatgacgcggacgaagcacgcggaaagcaagcaaagcccggactgaaggaaagtgatctgtaatggatccggtagaggatgtgatcaccgatcagaattgatgttttttgggcact

SEQ ID NO: 7328 - DNA, 2215 bp, Heterodera glycines
  unsure (1)..(2215): unsure at all n locations
tcatagtctaaaggtttgaaataggaatacagtaaggctcgatgttgtaaaactgaattattncaggactattcatcaaaaatgactattttatcggtagacnatggcttgtgggcaaaattcaagcgattgacgaggatttgcttccatgtaaccgcattttttacacagttttgccaagtaaatgaatataatttaattaattccgaaaaaattccaattaattaattacagaaaaatccgacataattaaggttcagacaaaacatcacaaatcagcattgatcaagaaaccggtgaactgtttgcacacaatttgactggcttaaaccatccaatcaaattttgcgtttttgcaaggtaattaaggattaattaggagggtgggggggggtcattatttcgtaattgagccgctgtttagtacgttcaagccaaattcaacacatcttgctataatatctcgacatggtattcccgaaaatttccgttcaattttacatcttcaaattgtaccaaatccgtcaaatattgctgagcatcatcatctcccacaacaaatgccgttgggcataattcgagcaaacaattcacattccttgctggaacatcagtttttgcgccaacaaattcccatagaatttgatggaatggcacttgggaatggttggattttttaaaagattcaaagatttttatatattttattttggggggcattttagtaatttaaatattttattttttaagggcattacaattcattaccaaataaagtaaattcatctgtaacatatcccaaattgtcattcgattccatcaaatttttgccatacggtcaaagtgatcagcaccaaaaaatcggtacattcgatgtgatcagacaattggtcggaattgactccgccaatgccaaattgcgcttcaatccggcatttgttgaagcatttgagaacggactgtacaaatttggcatttctgttcaggatgccattggcaataaagcaattgtttaccgaaatgtaaaattcggaaatatttattaattaatttgaagaaaatttgttttgaattttcaagattcatcttttggacgacaaatttcgcttacgttttcgctttaatgaatcgcttcatacaattggagccaatctgacaacatttattgggtgagtaaaaatttttcgattttaaattgcgacttaaaattaaaaaaatttttttttttttttttggtttttttggcattgaatttcgggaccaattcttgatattcttcatgaaataatctctgatcacatttttcatttgatccatctataaataaaatttaagaaagcttgaaaaacgacttcaaggcgattacaggattatgccatcattaccaatacgagacgaggaaaatccgggacaaaagtaagaaattctggcacaattaaaagcaaattcgaattcatgccaaattgaagtttcgtcatgtgtttccatttgtggtcaccaacaaataatggtagtggtgatgcaattgttgaatttgcggaaagtgaacggttattgtccacaaatgtacaaaattcgaaagccaatgaacaattgcatagcttatactcagaatacaaagtgatcaacattgaggtaatgttttttggagttaaatgccatttaaaaataaaattaataataaaatatttacagtttatgaaaattgaggtgatttttttccaagatcggaatccaaatcccatttcgggatttgaatactgtgatcctatcccgggctgatacgaagcaagcctgatccggacttttttcaaaattcctggctctataaatcaaccagagagtagattttcagcgcaaaaattagacttagccacgccctaggttagcaccaaaaaactaagcaaatgcttcaacgtcagcccgagatttttttttgacaatactttttatttggagaaatgtgttttttaacaaaatgaaaatataaatttcgaacaattcaaagactaagtttgtgaatggctcttcgggtcaattttatttttanatctttttttaatgaattataatttttanaatttatttaaaaatgatgctttttcagtcatgtgctgctgctgattcgtcgacatcatcggtactgctcaattccgattcttttggctcgtcgatggtgcagccaaatgccaaagcagtgctcgtctgcttcact

SEQ ID NO: 7329 - DNA, 4440 bp, Heterodera glycines
  unsure (1)..(4440): unsure at all n locations
atattgtgattaattattattttaaagaaatggtatttcccttaactaaaaattaatctttaaatttcaaaaaatttcccaacattcagcttcatacaactccaccngacaatccgtatagtgtttatgcgaaaagcaacaataaattgacgccttcttccatgtttgctatgcccgaatttattcatccaaaaacattacggtaatatacggctatttactgtattgtaaatcagaataatttattttttaaatatatttagaagtgatgaattggaatattgaagatgtttattcagagaaatgcctattcctataacttttctctgtttggattcgcaatttctaatttttttattattttttttttgtcaaatataataaaaattgttgaaaaggaagattaattaacaattgcattaaaacgggaattacgaatttctatttggattaattgaaataaattacaaaaaaaatcattggagtttacagattaatcccttaaaattcatttaaaaattaatagatagaattggattatctcccacaaaaaaaatgttgtttgcaaaacgccaacgcatttctttgcctttcgccattttgaacaagaaaagcggcttattttttgcgtgccaagatgagcttccctaattaattttcacaaattgacattgccctaggcgagattcattcattcgacacgaaattaattaaataaaccgcgctaatcccccacgccttccgagtccaatccctgttaaaatgtttaatgctaagtgttaattaatgccattttactcgactttttcaaacataggttttccagctcccctcatggcattttgtaatgaaagggcgggggtggggcggaagttatgcctcaaattgcttacatgaaagatgaagctgccctaaggcatacaccgatcatttctatggctttttcttcttcccaataacagcaaaaaatgttctaaaagctcttttaaaatgtggaataattttaaatatttatttttaatacaatgattatttatttttatccaaatcatggcaacattcatttgtgacctgctgtagggaatggatttaaaaaactgttacaaaaatttattcacataatacaattttttagcatatgattgtcctatcaaaaatgcacataaagtctattttgctcgtgatcattgatcattaatgattaaaatttaaaaccaaatttcaagactataattatgtatataagaaataatcctgattagtgatcaaaaattaaaaaatggctaataatttaatcgaatttatatccgattacaacctcgcaaatccttatcctcgataaaactatatttgttaaaaacaacatttttaaatttttgtatgattcagaaatgatttgctttcattcacttttatctcttctaatgctcttcattgccatgctattattgaccatgcaaaacagagcagttgactcattcctgttgagccaccgaaatttggtaattaattttaattaaaaaaaattaattgaaaaaaagaatcggattatatataataaaataaaaaaatgtatatacagataaaaaattttaacattaaaattttttttcaaataccttaaggcaaaatgattttttttaattcattaaaaaatttctttaaaaaattatcaaacaacgattttttcaatctgtaaaagattagttattttttcacatttattttataaagtacgcctttttaattatgagaaaggcaaaccgaataaaaagaatgtagcattgtcatttcccattattatttgcgtgcgtgaatgcttaatcctctcatgagctaatccattttataagtacaacataagatataaatccctctcttgacgtataaaatattgatttgaaaaaattttgaaaataaattatgcaactaataaaaatattttgacattaaaataaaacaaattttagttggttcctttcgcgtccaccaaaatggccatggccaacaatgtggccaaattggacaccacaaacaataacaacattggcgttcgtcggcggcaccattttgtcagcctttttatgatgaaagcattgccaaaatctggtgatggagatgatgatgaacgacaaattggtgccaagaatgtgctgtttcaaaatgatggcaaccacctgctgctgcaaccgtcggctaatgatggtgccattgccccgcagcgagtgcactcgcgccggaaacgattgcacatgttatccaccttgcgacgcgttggcacaccgcgccggtcaactgaactgcttaaacggcttgtggttgaacaccagcagcagaaacaacggcatgtgccactgaaacggattttgtcattcgatcttctctggatgttcaagagggatttctgagattcaaataccaattttttttttaatttcaaaagcaattaattttaatttgtaatgtgtaatgtaacaaatgtcacatgtacagtgtatcactgaattgtttttatactgtaaaaaactgatatgaaacaacaacgacttaattaatgaaggatttgctaggaagttgttgttggcaaaaacaatatttttttaatccatgtttattgcaccaaggcactaaaattttttgtcgaaaaacattatttaaaaatataaataataataataaatcccgcccgtagagaaactgaaaaacaattcctctacattttttgattttcttaacttgtaatttcgttcaaaaaagttcatttttcaaattacgaagcccaaaacttagatgagtcctccccatcggcggatagacaagcaaaacatatttcataattctatagattgacatttttgagctaattagtatattcattaccatttgcgcccccccccctaattttgtagccagttcagtacaacaaataaggcacttgtgggcctcaccccatccccctcccccgaggcattgtctggtgccaattatgcaaagttctgccagatgatttttcttgtcttgtgctccagacagaacaatgcctgcggcattggcacattttgtcgttgaagcgaaaactttgagatttaaaggcatcatttatcacattttgagtcagtcacattggcattttgtccaccctcaacactttcacttttctacccaaattcttcctttttccagctgggacaaattgccaatttattaaatgtcatccagctaaaatgaaattttgataaaatgtcatatgtggcactgtcttggtgtaatttttcatgctttaaaaaaagtaagcatcaaaaattgatgcaattcatgtccttttcccattggccgactatttcaaaattattacacaaaattatttatatatatatctataaaaatatttaaaatatttagtaaaaattgaattttcaattgaattttaaaaattttctcttctgaaacggcatttattaatagcttgtagttatttttaaataataataatttggcagtactattttttataatattatatttaattattttccatgaattagacgataacgtcattttatttattttataattaattaattaatgcatttttatttttgaaccataaataagcttccattttccaccagaaagcaggtgattatgtgtaaatgtaaacaattgttgccgaaacaagacatttttccttgttaatttacatattatggctatggctaaattaaggaacagagttataaaagaatgtgaatgaacattgttttgtttatttaaaatagcttattaaaaaaaaatcatttggtcctattttgaagtaattaatgccttttaattggaaaaaatgaaaaacatttagaaatatttattggcacacaaaaatatacttcggagataaatgaacaaatttttcacaaaatatatgaccgaaaaattttgcaaaattcttaatttaaacaactttctggccttttttcccgtttttagcacatattttggcacttttttttcgtttttagtgtatattttaagggtttttaggcgcttgtaatgtatgtgtatttcgggatttttaaatatgatccctgatattttcccaaaaatttagcctccagaattataaacacaaaatttgtgtgttggctttttgtataattttacaattttaaatgtccacctatgccccttttgcctaatgccatttcttccccgtttttttctcttcttctcttttcccatttgcattttctatttttgaaatggccctttttaggggggggggggggtaatttgaggggtacacccgccaaaaatggggtacataaaatcggatgggtaattcaaataaaaacagaaaaaaaacaccaacgaatttgccaatgtattcattacacgaccaacacaaccacacaagacattttcacgtcccactacgacgggggc

SEQ ID NO: 7330 - DNA, 987 bp, Heterodera glycines
  unsure (1)..(987): unsure at all n locations
gagatcgtggatgatcgaatactgatcagtagcgaatgatcagtagtgacnagatgaaaattttcgtggaatcgaacagtctttggaaaaatcatttattcatttccaattcttttacacagataaatttgatgatttaaaacatttttgactcatcttcattatttggtcaataatttaaaatcacataattaaaagatcttaaaatgactttcggtgagaaatgaaaatttcttgaattgagtatcggaaacatcggacctcaaaaaaaattcttacaactaattccggcttcaggaaatcgctaaatttatcctcataataacaaagacaaatccaattattattttaaaatatcctaattcaaaagattaaaattcttttttagtaatgctttggatgcgaaatgaaaaaattcttaaatcgagagattgagaccgagaatttctcaaaaaaaaatttttaaatggataaaattttttaaaaataatttgaaaatatttttcatattaaatataaattattggatttttccaatatttgtagaaatgatttgccaatcacatgccctccttcaattaacgttttcatcttccaaaattttcgcccattatcgtttcaacatgcacttgaatattttaataagcataagcaatcttcaaacatttattagggcatttaaagaaatttatcaaattaaaaaaaataataatttattcgacataaaaagttttatgctttttttgaagcctataattaaatttgttatttaataagcactttaaattaatataatatatctgaacacattaattcttctcggaatttaaaatttcattacaaaaattacttttaacttttcttttaacctttggccttttaagataaaataaattgaatttcacatagagcaaaaaattgtgcattttcaaccattaggaaattcaattaatttctcgccatgatcaaatttaattgttagcctaa

SEQ ID NO: 7331 - DNA, 3777 bp, Heterodera glycines
tgacggtgataattggcagtgattgcaattggagccaaatcggtgggggagtacggattgtcgggttcgatcaaagcgactgaaaatggagaagagattaagaaggaacgaaggaccggtcaccagtgtaaacgattgcttcttccttcgtcagattggaaagcacaaaatgaacggcggagaaactgacgcggggcccggcttggaaatggacggacgaattctgaaatggcatggcaaatcaatcattggcattggcatgggaaaggaagaaccaaaatttggacgaggtgcggatgggaggtgaaccccgtgaagagaccgtgctcaatttgaagcgagcggatcagttgagaatgagttcttaattggcttgttatgaaatgccatttatttaagatataataatgaattaatttgtaacactcaatgagttacagtatcacgcaatgatctaccataacagaattcaatgtgttactgtactcacttgattgtgaccgtctgctgaatgaaattggtctgcgttctcaactgcacaaggtcaagagtgaccggctcagcatcgcttggttctcttctcgaccgacgccttttttccacgaggacacgcactccgagaagaagccttaaaaggaagaaagatttgcttaagcttcgtccacccatcaatcagctcaccttgcatcgcctttggtctcaatttgcattcggctcgccgacggagtgacactcagtgaaaagggcaattcgttctcattgaattgccgtgacaacgaaggcgcggatggaatcgaaaaattgccctgaagcaatcaatgcacgggactattattattattggcactcacttggacagagccgagaagtgccaaccgaacgtggcgagcggcgttcactgaagcgaattggaaaagggcgcgggaggcgaagaaagtgtcctttaacgaatgaatgggcgacaaattggaccatttgtcctaatgggccgaccaatgcgttttcgtattgccttcggctgtcctgctgttcgaccaaccaattgctcagcgcttcgaagtcgaattcgttcttccaataacggtacactgaatgctcgcgagtgtaagcgagcagagccaaagcattggccaacacattcgaactcttacaattagttaatggacattaattgaccatttgctgaccaaaacgtactttatgaagactttgctccaaaaggccatcagtcggccctttctttgcaaatccctcaacaaatccccaaagggcgctttgtcgtctcgcaaagtcgaagtggcaagccgagagcgcatgatggaactgtaagggacggaggatcacaacaacaaatgaaagggaggacaaaccgagtggcggcggtggacatataagccaaggcggcgatcagacggacgtcgtatcgcttgtcgagatccacagaccggtagaaggaggagtggagatgcttccacgactccttcgcaaacggggactaccgctcaattgcatttcgctgattggcctaattggctgaaaaggcttactgctgcacacgcataagcagaacagtccatgaccgtttggacaaaaagagtctcgaggaaaagcctttgttcggagggatcattctgagcaaaatccgtcataagggcatgggacgggtgcaaccaacaaattgggcgtgcattccgccgcccatggcgccgaattgcgtctccgtccctttgccaccgtccgtcccattcagcacagaatgaacttcgcgagccaaaaaagcgatgggcccacaaaccgaaaaagggagaaaagaaaagcacagtttgaaaggaaaagcgtaaaacgaacaaattcctcagacgctctttgctcacaaagcagcgaagtggccaaagtggtcaaactgaagccaaatgagccaattcatttgttaattgccatttctttccctcaattagtgctcacattaaattgcgttccgatttttcttttggccttccaaattcgccaaaagcgcattctctgagccgaaattcgcagtcagaaaaggtcaacaattcggcgagcactgtcattatttccaattgttttttcgctcctttgttttgcttacaattgcccagaagctgctccctctgttccgtccattcaatgctttccgtcgttggcttttcctccccctcccctctctctccgtcgcccaccccaaccgtcatcatcgtcctcaacgatttcagttcgtaagtgagcaacgcgagctccttgagcaggttgggcagactgtacccctgaaggggtcgttctgatgggtcgggaatttgtccgcgacgcttttgtcggtattctgagaaagaatttttagggggggggggtggatcagcttctacctttttccactgttcccgaacttcgtacagccctctcgcttctctcctccccattaaatgtgtttagaggggatcggttgcgcactctttggaggggggcgcttccccgcgggtcgagcggagaagcgacgctcaaaagttcggtgctgagagcgggcggaaaacttggcacaaattctgccaaaattgctctttaagcccatttaaccacaattaattaataaattaattacccagcaataaactcacttgaaaactccactcccaaattgtacaccttccgtcctcccgcatttatcaacactttcgtctgcaccggttctgctgccacagtattccgctgttgatcagtacggtcaggcaaaaatggctgcagcatactgtaactgataacgtcgggagaagaagtaagcagagaagaacgaggcgagggggcagcagtggttgtggttggtctgagaacggacagaaaatgaacagcttaagccgaatgcttaactggtccgatgggtcgagtatttgctcaagagtcagctcctgcccccgggcgccctccccgtggcgttgccctttctccccttcctccctttcttccgcttcgtccgtctcttcttcctccgcccttttccttttgtacacgacaatttgccggaagtgttcctccacgtcgacccttctctgaattccatttcaaatcataattatttgcaaatattttgcctctgctcactttgacttggatttgcttcacaattcggtcgaacacttcagtctcgctgtctctgcagtgccaatcgtgccccttaagcacgtcttccgagcgcaattcaaatgacaaattgtgcattccgtgacgcagaaaacggacaaaactggaaaagatttgagtggatgatcggaaaacacagaaatttgttatgaattacaaatttttcagttggactgggttctcgggggtcaaaaccacgcgagtgaagtcagtttcgccaaaagtgccttaaagatacaaaaaggcaataaataataaagggataaattgtaaataattaagtaattaattatttaccctcgcggccaacatcaccacaaacttttggagaaaggccgtgaaaacaaacggataacttcaaaaaggggggggggatttgtggagggtaaatgaatttggcatcgtacggggcgattttgggtcaaattggcagcagagaccgcaatgtgaacattcacactttcgttcacataaacgtgtagaggcacctccacatccatgaacactgcgatcaaaaagcaagcttaaaatgaccgcggggcattttaccattcttttgggtaattagcgattggctcggaaaatgacaaacgccggagcgacccgcagaccaaaaagtgg

SEQ ID NO: 7332 - DNA, 2319 bp, Heterodera glycines
atgccattcggtgatcgaatggggcgtcgaattcaaattcaattcctttgacccgtccatgcttaacattcaatctatcaattaacaaatggaggaaatgccagcagaggatcaacccaatgttgaagtcgttaaacagccaaacttccgggaaaaaatctctgacgccaatttcggtgccctcctccccatttttcggttgctcgtcttttccccccttcgatcgaagtgctttcacatcttttaaatggtcaattagcaaagttaaacttccgcttaaatgccttccattccgctgggcgtcgttttcaaaggcggacgtcggataagccattggacattccctgctgcaaaagtggaagaagacagcacttcaaattcataagaaagtgccgacccattttgatcggcgcctccgccggtgcgtttccccccaggggcttttccgtcagagtctccgccgttccctttgcgttttgttggcgttcgcattgttcctaaatatcgttcattttgctttttctttcctcctccccccccccaaaagtcactttcatttccctgtaacaatcctccgatattcgggacgacattcgccccattcggccgttctcagtttgagggcactgtgggttcaatttccctgccatccgacagatttcttctgccaattgaattttccaagcttaaaatgactgatttcttaacagacttcgccttgctaatattcccggaacatcgaccagattggaaaacagtgaaacactttcagcgttttgctcgtccggctcgggactcaaaaactcggcgaaactccaaagttggtcagtccgggaagagtcgccattgtccgacaaaagaccgtccaaacggctgtcttaaaaattatgaatttaaatttggtaaaatggtgaaccgtaagcgtggagaagagccaaggagttggggcgagcccgcaaaaggacagacaaaggcgcaccgacggagacattgtgagaagaaagcgtaagggaatattgctggaggggaggggtaattagtagaaattaataaatggaaatgtgttgctggaggatttcattcatcatgaaatcctcaatcagatctgtttctgatccatcggtccgcaccacttgaaaatcaacaaaatccatcaaaatctccctccccccttcccgcaaagggatgacggacggcggaacgacagcaccgatcgattgattgacccatccgtacaaaactttcagttaaagtcccccgaattctcatttaagagacacaaaatgacacaaatatccccattgattttcttttgcttttttctgcttgaccattacaaaggcatcattggtaattatggctaaatgagtaatcaatcggccgttggactcattaattttccagcagactccgcctcttccatttacggtggcatccccgtgccgggtcggcgtgtgtcggccattagaatgtttcaacttttcctcaacacgtgtcggtcatcgcccactcttgagaaactttctaaggcattcgaaacccaagaaattttcattcctaaaatatcgtaattagctaattcaaaatgtcaatgcggaccaaattgccgaaaagttgcaacggaatttatactttgctgtggacgatttgaatgttaacgctttaatgggcaaatggcatacggtaatatgattacagtaaacagtcaaaactgtagaaatttacaggtgatttattcgcctcttgttcagcccgattactgtgcgataagctactgtaagtcaatcagaggctattcaattttcagtcccaaattgaccagacgaattgctcgaccaaagcatctattcgtcaatcttcacaacagtgcaatactcgctcaaggcaagtgattcaaccacaaatttggcccacgggacaggccaaaaatacgggcccgagccggggagtttgctcattgtgacgggccgaacgaatgaaccgtgtccatgtgagaatgagggacagcaattagcactaattgatgtctttagactttccggtaaaggtcggcccaattgacaagcgcaacggacaatacgcttatttggtgctcacccaggcactgaaacagccgacgacggtgttggccagggacccaaaagagtaagtcaaagtgggcccgaccccagcaaaggtgccttctgcacctgcagattcgacgaactgttccgggaggaagtggtcgattatctgcgcaagttttggctattggcaaaatgcgctaatgggcagcgaataaagagtccaatggacaaaatgtgacaagacatcgccatt

SEQ ID NO: 7333 - DNA, 2072 bp, Heterodera glycines
tgtcataaaaatttttacaagaaaaattaatttttttgccccgcattcttatgaaatttgaaataaaatgtcttctttagtcacaaaagtcggcatttgtccatgaattatgtaagggtaaaacattttttgtttgcaaaatttcagtactggtgagggttccaaaaattgaaaattttgcggttttttgaaaagtgaattttatttattttgaaaagaatattattattttaaagggatttggattttaattaaataccatcaatattttgtgtccactttcaccaaaaatttccttttttaattttctttgatcctgcctaatgatcattcattaaaatcattaacccctcccccaatcatttccccgttttcacttttttatttggcattttccccggtgccatcattcgtcaacttcggcgattatttgtaatcattccgcaacactcacttttttatcaatttacctttttctgctgctactggtttcattttacatttgtccagagcccgcaacatttaattggtgcgttttaaattgattaattacccccccccccctcctccaccgatcatttacatcattagcggtaattgatcgttggttaatcgcctcttccccacccatttcatggccttggcatttttcgtcgataacatcgcctcctctccaaattttctaatacttatgtcattcgattaaattctgtctgtctcctcactttccctggagaaaaatcaaatttattttttatcaaagcactaattttttttaaattttcaatatttataatacttaataattttgattttgtaaattagtcaatgacacatacaaaaaggaaaaaaaataaatgaagactatttttttaaaattttaatccctgtgaaaattacctttaaaattttttaaattttgaatgatgtccaaaggcaccgcttggaatgaaattaaattttcaatattgaagaaaaatttattttttaatgtgatgtaaaataagcatttttgcctttgtctttctttcctgagctccctcgccccccgccgacggtggcggtcaactgaatttaagaagccataatttttccatttgacagttaaccaaatttataagttgggtatcactcaaaaactctaaatttttaagaagctatgttatgctattgttacactattaaacaacacttataaaaaggtttcaacatgaattcgcaaaaaaaagttagattttttgcgtattttcattcattagtgacttctttgtcggtaaatctgtttgatttattgaatactaataagagcttattaagagctttcgaatgagccaattttatacaatttgggaaaaaagtatggcttttgaacttgcttagacacagttggcgggacgcatttgccgctccgcgccccgccgaggggttctttttatatatactcgccccgtcgtggaggatgagcggcgcgggacagtgcggggtgaggggggggggggggagattagcacatcagctccgcgggactgccccgaaaacaaaaataaatcgattttttcaagtgtccgtttggggtactctgacaattatggggagcaaaaatccaacgcagaattaaagtacaggctatagtgaagctattccggaaggattcggtctccccataaatctgggcgcatcggttcagggggactgccccgacaacccaaaaaaaaattttttggataaaaattatttaaatgaactgactagataatatttaaaataggttatttctcttcctttcagtatccctgcaaagtttggtgcgcttctgatcagtttctgaaaaaaaagttaagcctaaactttttggcctgtttaaaaaggaattaaaaatttttacaaattatattcatctcccttattgatagaaaaagcatcagagtgcctaaactaacatgtaaataaaatttggagcgtttcagaaccctttctgaaaaatatttaagaattaattttgcaaaaaataaataaaaaacgacagactcagattttcgaaaaatttttttagagcaagctagctcggcgct

SEQ ID NO: 7334 - DNA, 3225 bp, Heterodera glycines
  unsure (1)..(3225): unsure at all n locations
aaaacctaaantccgggttacacccctagggtatgtatgtatgtgtacagtaaaaatagtagtatttcttgtaaattctagggttccatcattacattacacaaaactctgctgttgtacaatgtatacagtagttgcgcatatactgtactttatatcttgatagtgtatatagaaatacagtacattcatagttttcaacagattgcatcttcttttgtatttctgttttgctgttggattttgttattttgttgtcgtccttcacctgcttccccacatttttaccctttcagcaccgtttcaatcatttgcatttgtttctcacatctcacacttcgccaactcattccacatttttttctcaatgattcatttttgaaattgcttactattcattaagaaaattatttaattaattaaatttaaattttagaaaatttatttattttcctttttccacgggtttccatattaaatgctgcttcttttgtcgtcttcaccgttctgatcagttgcgcaatgcttctttgatcgctttttatcggctgaaatccttcccatacttaacattcaaatcactcccaacctcaatttgatcacttttgctgatcaacaatttcccaactgatcagttttcgtgccgctgatcaaaaaatggcgtcctcaaacggtccctccttcgccacctctgcttcacaaaatgccgttcaaaatgcatcgaaaagcggcacatcctctggaagcggctggcatcaccaaaatcaaaatcgtccagtttctgttgtcactaatgtgtcgcgcttcaccacttttgtttatgctcctccaacaccggcaacaacagcggcggtgccgagaagcaattctcagatgacatcatcatcacaatcggtagcactaagcccttgaatgagcctaaaaatctgatcaagtcttccgctgatcaggctctctgatcttcttaattttcattttctccctttttcccactttatctaactacacgtatctttgtctcctcattgtctcacactctctctatctctctctccctctctctcgctatcttaaactctctctcattttctctctctctctcgctccctctctctctctcgctccctctctctctctctctcactctctcacactctctctatctctctctcattttctctccctctctctttctcgctccctctctctctctctcgcactctctatctctctctcattttctccccctctctctctctctcattttttccctctctctctctctctctcactctctcacactctatctctctctcattttctccctctctccctctctctttctcgctccctctctctctctcgcactctctctctctctctcattttttccctctctctctcgcttttctccctctctctctctctctctcgctctctctcgctctctctcaattcttccactttcaagagatcgcattatcaatggtctgaaagaaatccaattcgatacgaaacacagtgccaaaaaaaaattgaagctaagaccgagaatgaaatgttttattcaagttataaagaaatatgaaaatgtaaaagtgcctaaaaagagaagaaatgtaacgaagcgaaattttgattagtcgtaagcatcattgaattttcgcgaattaggtttatccttggcacaaattctcgaaggcgaaaaaaaacaccgtattttttgtcaactaaaatgaagataattgtaatcttatatacacacatatgtgatctcttctttctgttcctatcggcaaaactgattatcacttgtatatctatcatggaccagcagcaaatctcagcagatcagatttatatcagttaatcaaacgctttttgctgctgatatcatctcgtctctcctcattcctccccctcctttccctctttctctctcgcattttctttttgtctaactttctgctaaacaagattttggtcgaaattctgactgatctggcactctttgatcacaccttattctgtttatcaccctgatcactcttttgtcagagtactaatggttgtatctcaccgcccactgtctcatcgccgtctttctcttcctcctcattgcgcaaaaattatgagaatggcacttctgctggtggaggtggtgccgcacaaccggcgccgagccttcaccatcaccaacggcaccattcctaccagcaacaacagcagcagtacggtgatgcggcggaaacggaatgtttggagcattatgagagcaatttggagaagtacaaaggtatttatcatccatctgttgcattttggagaagcgaagtatataatgtggagattatgtgcctaaaggcttaattagccttaattaacggaggttgaattaacggataatcctaattcatgttaattatggtcgaattgctaaatggtcaaaggaatactaatttaattgcgttgttaaatggggcgctgagtcattcatccctttggagcctgttaaatttgcaaacgatttagcatatgaattttcggtaaaaatggttgatcaaatgccatcaactaaaaatatttgggtaaatagcgatgagttaattgcattaattaactgtaataaatatgcctccactaaacatggactttattgtcgttaaaacattattacgatgctatctacagtccaagttccaagtcggattttgaattctggcaaaatattatttgcaaataaaacattagcaattgttgaatttggcattcggtccctttaaagcgaggaatatttgcggcataaatcttcatcatcccatgtaccattttagatgaacgtgatacgatccagaagaaaacgttcacaaaatgggtcaaccaacatctgatcaaggtagggagagttcgagacttggggacagcaattccggcttattttgacatttggaagtgcctaaaatattcgatagggaattcttgatctcactcaactcggaaaatgtcccgactttccggttctaacacgggtcatgaccctaattccctagtccgacatacatttccgaattttttttctatttgaacggcccttcaacaaaataggacttttcgtgctattgttctttattagttaaagaaagtgccaagtatggtgtgaccaaaatgccaaaaattaaatacaaccgacaaattaaatccataaaatttaaattacctaaactg

SEQ ID NO: 7335 - DNA, 2055 bp, Heterodera glycines
cacatcaaacgtcttccgcttcagacattgacagaacggtagaaaatcatttaattagcttcatttatttaattatattttttaattctttctggtggggggtgtcttttttttcaatttcattaattattataagtttattcttttttttcccttcattaaattccatctctccttttcatctttttcctttttcacttttctctctttccctctctctctctctttctcttctctctctctctctctcgctctctctgtctctccgaaaatgcacaagctgtccaattaattaacaaattaattaattaactaatgaattattcttttgcgctccgcaatttctcgcctccaaaatgtcccacacaattagtattttccctccgcccaaattattgtttacattttattttgttttctttctcaccttttttcttctttcattcttcttgggtgtttcagaaccaccagttcagtcctttactcattttttaaattacaaaaaatttcgttaaatttttccgatcaatttttgtgatgaatattgctaaaaaatatggccaaaattctcaaattttttcccggcggcacccgcctatcggcactgttagaccctataattcttaattttctttaaaaagaaatttatcggcaccgccggcaccccccggttccacaaagtttgttttgaaattaggcctaggttttttctgggtcgagactaatcttaccaaaatcccgaaaaccagtgcaaaacccatactgggtgttttattgaagctcagatgttaagacagctcgtacaaaatttttgcacttgactcgaaattcgaagatttttcaaacaatatttaatatgatattccaattttttacaaaatattcttatctttttcttttaattcgttaatgccaaaatttggcaaccaaattgatgattcacaagaaactcagaaaacccaaaaaaatttcggcgctgaaatggccgggaccgaagtgtcccgtgttggtctgtcctactgtctcccatctaccaactctctgctgctgcagtccgtcccattgcctcaatcattcgatcatttgtccgctccattttcagccccccccctttattaaaccgtcacattccccggccgcaaaaatttcacacaatttttgcccggtccccatggtcgtggtcgccttcttttgtcgtccaattgtacacccaacagaaaatgggggaaaaagtgacaatttacacacatacacaattcatacaaaacattccattcctttcccccgggggcgggagaggtccaattcctcaattccttttgaatttttgtggggacaccaaaacaccaatcacagcaaaaatggacaaaaataatacaataggggtgagaaaaggaaaaagaaagtaaaggaatggaagaatgaaagaagaaaggatggttgtgattggtcggcgctttggttcgaaaaaataattaatttatttttcttttccgccccccaccctcgggcgtctcattaccccccccccccttccccctattagcggccatttcaaagggagccgaaaaatgggaattgggccgacaccgaccgatcagcaacagatagaagagaataaatagaccggggaaggtaatggcgatcattgcaataaaagtggaactgtctgatttaaagggaatgcgggagagaatgaaatacactaatttgatgccactaattcgtggccgtgactcattggctgctaaacgttggagtgggtaattaagtacccaattgcatttacttggacatttgtcgccttaattctaaaggaaattttgggtttcttttcgcagttggatcaaagcaataacaaaaaatttaaccgtgaatcggtctcgagccgagaaaattttcgggctttttgtttatcactcccggcccttggcagtttattgtcgactaaaagaatttttgggtcaatatttgtttggcatatacagcctttgcattttccacgcttggaccatatcaaaatcgctaaaccccagtgattgtgatttgtccgac

SEQ ID NO: 7336 - DNA, 669 bp, Heterodera glycines
tcgtcccctcgggggaggggcggggggggcatcgactggaagaaagggacagcggcaggaaaagacgaagaccgaccgaatgaatgattggacggatgaatgattttctgattttcctctcttcccccaccccaattcttccgttttcttccgtccaaaaagaactgcctcctcccccctttcccttcctccccttaaatgttgccggttctccctcctgctctccccccatcctctttttccgctttccgatcaatccgacaaccgtcctccttttaccaattgcctaccccccccccctcctccctccgtttctctattttctccacccattcatccctgatgttgctagtcccgcacccccactctctctcttatgcccccccccccctttatgccatgggttcctctcgcgcgcttttcccctccattatcccattttccgatcaccatcgttcctcaatcttcctcatccccattcccactaaaatgtcaaatcacgtaatgtcctccgccacattttgccgggtcttttccaattttctcaatgagatttctcctccccctctccccaaatttccccaatgccaatgccttcatcctcttcttcatactcctcctcctcctatttttttcacccatcaaccctatctcaccccccaattttgt

SEQ ID NO: 7337 - DNA, 3372 bp, Heterodera glycines
caaatggaaagtgtcgtcctcccccaccttctctcgttcatcatcgctttgatgaacaaaaccgtcgcatggccaatcgaatgataaaacgattcgtcggcgtgtgccgccattcggcgttcggccgccaaaaaatggttgccaagaaaaagacggaccgccgcatccgtctcccggacagacattgacaaattcattatacggaggcgcgaaaatcagtcactgatcagaagtgatcagagcggtgggggagaagaaatctattgagaaaagcaaattaaaaagtaattaatttgtagtttaagggcattttgtagctttctttctttgtgttttgccttcccttctctgttaaaatgataaataatattccgattaaaaacacacaaagcctaattaattcatgtaatgattgatagcgaaagcaaagtgaccaccgaatgggtgacagatggatttcgatttcaaatcagtgaatggtgggcggatgggggggattaaagtgcaaattctgtcattccataaaagtattgctgatcagcagaactatatctaaaaacatagtgattcatccgatccgccagacaaaaaattgctttggcatttgtgaaaggcacccgcaaaatgccattggcactgctgcggttggcatagcagccaaaggcaaaaaggaagcggcggaaagcgaacgacaaaagggaaagggtcaattaatacgtaattgatatgccaacgaaacaccaaaattaattaaggttgtttttgtaatttgccaattcgatggaattttctatttttatgaataaaataaaaattgaaatcaatgaaagcatcgtaattcgaatagaaagcattaatcatacggaaaaaaattatacaataaatgatttttttttaatttcggtcataaattatttgccaataaaatcaaatttattattttaatggagaccggtaaagatttatatttaatttccaaagaatactttactcccgcatttgttagagaatttgcgggacaaaatcccgtggggaatcccttcttatagtatccttatttaaagaaagcaaataacattaaaaatcatttaattcatcgcctataatgtaaaatatgacaaaagtgttcagactgctaaaacattgagtgatcggaaacattcgataagagaaacgatcggtttgctaaggaaaaagaagatggaagggatggcctaagaaaagaaaattctaagataaattaaaattaatacaataattggccctacataagtttaaagggttagaagaacaatgaaatgaataggcacaacatcattttgaaaagggtgggggaaacaaactctaagaaattgaaaatacgttgagacgacggcttaatgaataacaatttaatttattgtaagtacagtatgctctatacgagtatacggtaatacaataacggacagtaagaaaaacgagtgatgaaagctaagccggagttttcgcgccaacaaatttcagaaaactaaagtccacacagtgccaaccaaaggactttcgtctcccgaaatgtctaacgccaagactctcgaaacttggcaaagtgccgaatatttctgacaatttaatcattgggtggggcgggcgattgattgaggttcggagattcgaacggaacgaaaaggccgaggaaaaggggacagacagacactgctctaaatggcgagaaaggcaccacaaagcaacgagaaatgaggaggaaacgaccaagctaagaaaaaggacaaaagcggggagaggcaaatatttagtgaaagggttagccctttaaggaccattaaaagtaggcgaaatggatatgtgcttattttatgtacacagaaaagcgctgcgagacaataaattaaaatgcaaaaatccggtaaatttaaaaagtaaaataaaacaaatcaatcagagggaagggatagcgcggatatgccttctctttctatgcatgaaaccaaaagatgacgacaacaaatgatcagagaaattcattgtttattctctatgcaagacgagggaatgaatggaatgattgtgtgaccgttggagggttacaaataaataagataatctaaacgcactgctcttgtggaatgggtagcatctaacagaaaacaacaaaataaatgggaaggttggttggttggtgacggaagcacactgattgtgagaacgatgaaaatgatacgaatatgcgcaatggttcagagatggaaatgccggggcatttttgccaaaaaacggaaacaccatccccggagggtacatctctaacaactacgcatatttgaacaaataactatttgaaggaggggggggaaacacacatctaaaactgaaaagcctaaaaaaggggcagagaaaaccaaagttccacacattcaatgggggcatttcttttgcatctgatcagaagaaacttctcagggatatgcccatgggttagtgctgtccatcagcggctgctgcagcggatgggccgatgagatgtcgttgactttgccataataccacggatctttgacgccataatggtcaatggacggcacaatgggcgtaaacagcggcgagtcagcggtgagcggctgttgtgccagcggggtgaaaaagcggttgttggaggacaagtccgagttgtacaacaacgattgttgctgggcggttggctgcggcaaaatgtcggagatgaatttgtccacgttgaactggtagggcacgtcccctgtgtctgtcatgctccccttcttgcggtcgtcgttattgttgttcccaaaattctgttggtcgtcacgaaggatttcgcccggactgatcggctcatatgcggcagacaatccgttgggaatgttcccgttgttgatcacagaaattggctttgggcatgagagtctgaaaggaacaaattaatttaaatggaagagaaaatctttctgcgcacaacgcacttcaatgtgttcggtcgctttttactaccattgcccaaatgattggcttcgcttccaatgggcgcaattttgcgctgtttctcgacgttcgccatgtactcgtccaacatgccgtactcgtccgcatcgtcctcctcgatggaggacacagacgccgccgtcgttgtccccgtgctcagagtaaaaggcggcatcacaactgactgtttctcgtttttggcttcggtcatcgtttgttcattctgttgcaggttggcaatgctcaacggaatcacttcactgcccgcctcgtcgccactccaataaaattcgaaaggctcctcaaacgatccaatggaaagtgccgtgtctaggggagcgcggtgatagtcgtattgccgttagttgtggtgaa

SEQ ID NO: 7338 - DNA, 3419 bp, Heterodera glycines
ccgcagaggcgccggattgaggctgacgacgtttcctcttttcagatgaagccatttcgtaatagaaaccatccgtagtctggtcgtagtatctaaatggcaaatgtataactaattatacgaccaaatgtttcattcacttgaaattggccgaattcggcgaaagcaaatgctcatgtggcaaatgttgcgcggaaaatttgtttaattgctgcggtgccaacaaagacggcacagcgacgcacgaagtgccagacgttttcgcctccaatgctttctgtttctgctaaacaacgcaaaataaatcagcaattaattgaggcttaagtaatgttctaccagaagatgctgctggatcagcaccatctgttgctgctccgtcactctcttcggactgtgctccaccccggtcattcccttcatttgttccactgtgccccattccgggcgccgtttgcgccacccgcgcgtgccgttgtgttcgtagtaaaacccgtcactgacttcgtcataatacctgaaagggtatatatgtttgaattcgcgacaacttaatgaattcacggcttattgttagcataatttgtctttcattgttaccaatagtcttcctttccaccgtttggcccttttccatttcgctgttgtggagtcactgatgtcgtcgattgttttaccgaatcatttgcagaatttgaagcagtcactgaagtaaaatgaacataaaaaattagtacatataaaaatttataacaaattgtcaatggcacttgccaggttggctgccgtttgactgtgccgacgttgttccggttgtctttttactgccagtatttgttgaggacgaattggcacggggcctgtggcagttcgaatttatgacgggctgcttctgttgctgcaaatgttttttgctgcttttggcactgttctgctgctgctcgtccgtcattttcaccgacggtttcgagcagttcatcgtcgtcgttgtatctgccaaactgcccctacggcgattctgttgttgtaagattccgactcggttctgcggtgccatttgcccgttgcaagttgatgaaatatctgaaaatgccaagttagcatttgtaaaagtaggtaagaaaaatgcaattaagcaaaaaaaaattgaaagcatctctttttgaaggcaaaaaaaaacacagcacaaaaatggtatcggagtcggaaatgcatttcctattttggattttggcttctctccaacccaaatgaaatgcgatagttgccaaaaatggagaagcattttatttgtaagagtggcttcgtttctaatttgcaagggaatgacgtcaaaatcattttaattgcgcaattcgattttttgttggcatttttatgccttgacgcaattattctttcctttttcattttgcagaaatatgtctgaaataaaattgccccgtgttttgttcatccaccgaatttcatttcatttattattattacatataatataacccagagaagggaacggaattggaacgaataatccctttttcttcccattcccacctacctccgccccccccccctcctcctcgcatgacattggaaggggaaaaaaaaggggggggggaaggaatgaagttaaaaagcaaaggcaggtgatgatgaggagaaaacgaaaaaacggaggaaaggaaaaatgggagaatgatgacatggcaatgccattgcccaaaacgacgcattagtgaaattcatagggccaaaaagagtttccttcttggattttggcgtggttaagctcaactatggaaaggaaatgtcaaaaaacaaccccaaaatgataaacagagggatgactgccaataatacaaaaacggagggacaatgacaatgaatttataaggaggaggggacacatttaatccgtaaaggacggaatgaatgactcactaaagtttaaggaacaaacagtgacgataatcatttcacattgtgaaattaaaaaatgaatagcaaaactgtaataaaagcggcacctttgacgatgaaagatgtaaatcaccagcagagaaagagagagatgacagagacagtaaagagagaaaaagagggaggagagagagagagaggagttgaagaggaacggaagacggagagaggaaagcaaaatagcgaattgcagcagaacatacgatgtgcgaatgatgcgaaatggtggtggtgaggagcgaagtgatgttagtcacccgacgaatggaacgaattcgccgccggaagaagtagggaagggaagggagtgactaatgcacccactcatcaatcacaccgagggagaggcatttttgagaaaaaagaggtggggaggaggaaaggaatggaggcaaaggtgctgactgactgactaaacggtgttcgctgtcattaccccactagaaaagaatttcgaaataactgcttgcaaatcagttaaaaaatactaattaagctatctaaagggctttcaaaaatgtttattttgtttgaaaaaatcggtttgacaagagataggaaatttgcaaaaacaataacaaaacagattttgttttaatcccaaattttggggaaaacaacaacaatttatcattaaagaggaaatctatctgtagagaaaaaaaccattttcttaaaaaggcttatgtttttgacttttcggagcaattaattaaataatcaattacaaggagtttaattccttcgcaaaatttctgatcaaaaaatggtgtccaatttgtcattttgtgtcatttgcccaatgagacaaaatgtgtacagagacaaggccatatgaacgacacgtggcaatgacaaattcgaagggaagaaaaaaaagaagcggaggagcagccaaatgttggccaaagtttgagtaaggccaatttcgcaagggaaccattggccaaaagtcaatgaacaactgaggaaagaacacacaaaaaagtgggaggaaatggtcaaacatggaaaacagtgaaatggaaaatgtctttctcagggctatcccaattggaccaaatccaaaaccatgttattattctattttccaacccatttttagcgaaaaaagcagacgattataaaaatggtgcatttttagattccgaaaataactttggaaatgcaattgccaaatggcacattcccatggaagcaaaaattacgacaaatcttaaaataaatatcagagttgttttaggggttttcagggtctgagaaactgattcagacatccgcttaggaccccgatcccggactcgaacaaaaagccgaaaattcaattttcttaacattctcatttatgcaataaaacctgatcatgtcaaggactactggcacggatagaactgagatgcaaccgaaaattataaaacacattatcaaagtcactaaag

SEQ ID NO: 7339 - DNA, 1050 bp, Heterodera glycines
agtataaaaattattgctcaaaagagccgcgatttgtattaggttaatgagttaatggattaatcaacgaactggagctttttaccattttggctgaatttatatttatgtcgactaaaaacgaatgatcgcacatttacatatttttatatggaaagcaattaaaattcgagagctttttatgaagacagaaaaagatatattaaattattgctaaatttttttgtcatatgattagagggggcgggggggggggggagggtgattaagcgaaaaaagaatgggaaatatgggccacgagaaatgactgaataatgagaatgaatgaattgaatcggtatatttttggacgcatgcaacaagtccaagaaacacactgcgaagaaagggacatttgcctctgcttacaaattaaaaagtcaaataatattcaaatatttatgtaagccctgacaaatgaggcttaagctgtctggtagagatcgacctggacctggatccaggcctggatccaaactttttcagtctttggtgttttgttagtaaagccatttgaaatgacgtttgatagcgcttggcatcttttctgttcattattttgttaggtgagcaaagagcagagtcatttcaaaacaaaacaaataaattggcaaagcaaaagtatttccaatggacgagaatcagaaatgatctgatttttatagacgaaaagtctcaatagaaaaagcatgagattctcaaaaccatggaaaggtgggcaaacgaaaaactcacaattgtacataatatgtatgtgccttttcaatttaattgaattgtgggcgaatgttggttcagattttaaattaatatagcctaattggggaaaagcactcagtaaactcaattttcgagaggtgttaaagcatcacatccttagcgacattaggcacaactgaacaaacaacaaaatccgatgaactttcagcgatgttgcctttgcttatttaaaaatcgcgaggacataaaaaattttacgtacctatttcgtgttgattagttggaaaaatt

SEQ ID NO: 7340 - DNA, 1650 bp, Heterodera glycines
  unsure (1)..(1650): unsure at all n locations
ggggatctctagagcttagagattttctgaaaaaaatatttatgaattacctccaccaaaataaataaaaatttctaaaaatttgatcgtccaccttaatttgtaattgatcaggggctcaccaaattttgcagggatacgtaacggaacactacaaatgcttactaattttcctagattttttaaacccggtgaaaattttttgcagacaccaccattttgcacttaaaaaaatttcaaaaaactttaaaaattcatagaaaatttaaattcataggtactactgctaaatcaacgcagagacgcctttccttgacctttttaggcccctgcaaaatctggtgcgcttctgatcactactcgaaaaatgagtgattgaattttcactaaaaagttaagcctaaactttttggcctgtttaaaaaggaattaaaaatttttaaaaattttattcatctcccaatttgatagaaaaagcatcagagtgcctaaactaacatgtaaataaaatttggtgcgtttcagaaccctttctgaaaaaaatatttataaattaattatgcaaaaaacaaataaataatgaactctcttccttaataattttcctgcaccgaaggtactcactcggccgcttcgcggcctcgggtgntgcccttccccccacactggaattgttgttgctgctgctcatcggtgccaccaaacgaactgacctaaaaatgaaaggtaaaaaggcataattataggcaaaacggtatttatataaatggcgggtacttatacagtttgacccacataaaacatttcgcttccatggtgaacaactgtatatcttggtttattttttttttttgattccgcttcttcttaaaacaacaaaatcactaaaggcttatatcttatgacaatttttaaataaaacgcaaaaaaactaaaaattaaaaaaaatatttttaaaatctgtcgacgaaaacattttatttttaagtaaatttactaaaattaagccactgggtgcttgatttttcagcccctttctaaatgagagctttatttaagagagtgggtctaatttaggggggggggggctatattatagaaaataaattgagtaaaaataaaaaatgtttgcaaaaagattagcttttaaaagggacgatattttgagatttttaaaatccacatataatcaaaacaaattatcaatgactgagatttgtcatttatgtatgtgccattgaagtctcactctaaaaaatccttgcaatttctgttcggaagcggcggatccaaaatttggggtggccttgtcggcacatttccatccggtgggcatcggttacatgtccacgggcattgccaactcattaagttaaaatacaactaaaaaattcaaattttcttcaattgaatttctatgagcttgtcgattctcattttttacatattaattaataaattacattctaattatttttgtttttaaaataaaacatttaattttctattattttcttaagaatttgtattttatttaatttgaattattatcaatttatataataaatgaataattttcactaattatattttantgctaatctaataaattcactattattatnntgaattttttatttaaatgagtca

SEQ ID NO: 7341 - DNA, 2817 bp, Heterodera glycines
  unsure (1)..(2817): unsure at all n locations
cgtatccgtatacggatttttacagatccgtagtccgtaatccgtatttttttgggccgatacggatttttacggagtacggattttccggatttttagtccgtaatccgtatgtgtgcctagtccgtagtccggatcctgatccgtacaattttttgatacggattacggattttttaaactgaacttttgttgaatattttttttgaattttcattatatttcgccaagttttgataataaatttgaatttgataactctttttctcaattcttaacttattttcaacaattaatgaattttttgtttgatctttgaaaaactgaatttagcaaagatgagttcaattatttggcaaattgggttgtttaacaaattgcctaacgggaaagctgaatgtgttgagtgcaaggctaaccaactgcaaaaatttgagtttgaacggagccatggcagcctcaaatctttgattgtccatcttttttcaaagatccatgccaattcgacgtatgctgagaagtacagacaattggaaaaaacctcaaacaaggatgaatcccagaaaaaactctcaactttttttccatgttcaagcagtaatttaagaaatgaaatgactatttaaattttaaaataattttaggcactctcgctgtgatggacaaaaaagtggtcaattttttggtgtctaccaacacttcattcaaagtggtgaatcatccaacatttcaatcattgctcgcaccacaacatattaaagttcgttattcgttagtgtattaaaagaaataaagaaggcgtttatattaggaagaaacgcattatcgaacccaaattcttcctgaagtttataaacaagtcaaaaacaaaatcagagatgaactcaaagagtgtgaatcgatttcattcacgacggatgcgtggagtgggccaacaaacaatttcctatggtcagcataagaatgtaaaccttttaaagctgcattttagtttgactgctcatgggatcactcaaaattggacaatgaaaaatcatgtgttggcggtgactgaatttcagggaacacactcaggaaaagaaattgccaaattgttgtcaaaaatcatctcggactgggagatttgctccgcgaaaattcactgttttttgcgtgactctgcagccaatatgaaatcagtagtgttctattttttcatttgatatgttttgttttatttttaggcgttctcccagaccattgtggatgagaacggtttgacaacccaaattttggcatatgaaaatgtcagctgtggtgctcatttactcaatctcgtggtccaaaaaagtattaaatcagaaaggattgccgacctgcttaaacagtgtcgtaaagttgtcgcccatttcaaacactctaacaaagcattaggaatgttaaaggacatccaaatctttcttgatcttccggaccattcccttttacaagtaaatcaatataaatcttttgagccaaatgaccaaaatttaggaggtatcagtgaggtggaattcggctcttgggatgatttcgcgtctgtttgagcaacgggaagcgctgtaccagtacgccttcgaaaatcgtaattttgagatgacgttaacaaatgaagagtggggattaatcgaagaaatgatttctttgcttcaaccaatcgaagacgcatcaaagatgcttgtaaaagcaccattgtccggtgatttaaataaattaatttttaaagcccgaaacccagtttagcccaaataccaattgcactgacccttcatggaaaactttatactgccaaattaattaacaaagacattgatgtggtgcgttgttcattggttaatgagctcgagaaatatttttttgctctccgtgaaaaacggtataacattaatacacatttttcattttaaaactattatttaagagttcattgtttatcgacatttttggatttacgtttcaaggacaagtttttgctcgaaggacggaacatttttcttgctaaaatttcgtcatggctcaaagaggaacttgacgatttcatattgccattggttaatgaatgtgatgaaattgctttggctccgtcgcccaaaaaacagaagctttcgctttttgatgacctcaatgatattgcttcaacaagcaacaaggagaatgcaggcagttaaaaatttgagttttttaataaaaaaatcatttaagatccttcccagaattcatctgaccttgatgatgagctcaacaaatatttggccagtggttgtgtaaattcgcgcgaggatccgctgacagcttggcgacaaatggcacccaaattcccaattttgtcaaaaattgcgcgcaagtttctcactgcacctgccacgagtgtcccaagtgaagccacttttaaagtggcgagagacgtttacgattacagaaggtcgcagttgaagccagaaacagcggaaatgttaatctttttgaataaggcacttccaaatatcaattacagatattaaatttttcattatctcgcaattttatttttctactggtcaaaaaatgttatttaatatttgtaataaaattttgaacaaatctgtgttggtattacaggtacaagtatttttttattgattaaaaaaaattttcaaaaaatccttatccgtatacggatccgtattttttctggatacggatttttacggagtacggattttccggatttttagtccgtatgtccgtaatccgtatggatgcctagtccgtagtccggatccttatccgtattttcccanaaataccgctctctaattt

SEQ ID NO: 7342 - DNA, 1502 bp, Heterodera glycines
aaaaaatatcatagcaaattaggtaaatattcttcacctattagtcaaatttttccaatgatcaaaaatatataattcgaaaaatgaataattctaatttaaacttaaaataaaccgtttcagactttactttaaccggtaccgtactaaccggtattgcaaaaaccggtacaggtacgatcagtttaattaattgacgtaatattttctcaggcatgcttttttcaaaaaactatgaagaggaagactccagcggtgcctaataattactgagatgctattaattattggtcaatgacagaaggtgttaagattatcccgccaaactttcgtagtcctcctcgtcagtgatttccaattctattccatcagttggaattgaatgggatttgatgatgctttgggttggacgattaggatggggaggggggataggggggtcagcgttgacttacgattttccgccgccaattgtcgcctcctcgtgggcaattattctacaaaggatgaattggaccaggattgcggagaaatgattgaaaataagaaaatggacggaattctcctagttaaatgtctggtttatttggttgagtgatcacaaaattccggacagaaataaagggtgctgtgtcgaagtgtcaaaagtattgatgtgggcgaagtgtcaaaagtattgatgtggtgagcttcagagaagttgtagccaaaaatatttaaggaaccaatttttgaaatttacaagccacaacttctttgaaactcaaccaaatcgtttgaaattttacaggaaaatagaggacacttagggctatcaaatgataccatggatgcttaatttagatgcttgtaaaaaaagttggattgcattaaatttgtcaaattatttgatggtctcgtttttttgaagggtcgtgtatactaaaatagagccaaatatatttattattaaaagattgttattcaattataaatgaattaattaatttaattatttaaattaattttctgtactgaaatgacccgcctctttcgatcacccatcatcgatacttttgacacttcgactcaccacggtttttacgaaacgacctagcacgaattatttgtcctcacagatctgcagaatatttgagtgatcgttgtgttagtgatgttgttggggatggcactggcacttgcgctggtgatggatgtaaagatgaaagtgccaatggcccatcattggtcactgatttttggcagccgcgcaaacgctcgaccagcgaaatggtggacgaagaaaatcgaaatcggctcccatttggtgacgactgtggcacagtccgtgatggtggtcattgtgaccgtggcaccagtgaagttggtggtggttgttagtgatgctagagaccaaaaatttcccgggactcgagaccgagaccgaaaaccccgagatccaaaaaaacccgagacttttctcgagtcgagactcgagaccgagactctcgagcatcactagt

SEQ ID NO: 7343 - DNA, 2149 bp, Heterodera glycines
  unsure (1)..(2149): unsure at all n locations
agttccttgccaatttggaacgctggctgcatcctctctagacgtcggtgcatacatggaacgggtgtctctaactgcgcatgcctttcttaagttggcttttcctatcggctcaatcattgccagctctctgcaaatttcaacaaaagtaaaattaaaaacccaaatttttgaaaaaggctattcaattaattttggaaaaattcccaaattagcggagctgtgatttcggttttataaagcgctagatagttaagtaaagaaatgaagaatatcagaatttaaaaatcgaagatatgttcagcctcgggcctttttttggttgtaaatatatttcattgcatggccggtaaatgcatcagtttaaaatgtacaataatccaattacagtatgttttgtttgttttctttacaaattttattataaaatgtacaataatccatttacagtatgttttgtttgttttgtttttttttacaaactttaatgacatttcatttattagttttttttgataaaaatgaatagacaaattcataaaaggaacttttatctaaaatttacactaaatgcctaaaaatattgtattattaccgcattttcacggacttttattgtgtctttattcctaattatcccttttagaaacaatcagatgagtacaaagcattggtaaatctgcgcgactcaatgcaaaaaaatcatgaaagcatcatgaaagcaatttcctttgctcaagaaatgattggaatggaaagaaaattggacgactataccaatgtaattatatcaaagttcacagtttttggcaaatattttttggctccggtcagacattagtttttcgtatttaagcgccatttatggcatgttctaatcgctaatttaaatatttttcttagagttacttttatatttgaaaaatcaattataaaaaacctcaatttttattgagttcttaaaaattatttgtcgttgagaatttaagataaataaatattaaatatttaaattccaatttaatttagaatgttcgtattccgattaaaaatctttttgtacacatgcgaaaattttgggacccgtcaactgacaaatcgccagaagctgttgaaattttttcaaaagcctgctacacgaccgaattggccaacacccctctgggcatactcaatgttgtaaattaagcagaaattaaaattaaatttgaaatttttccagtacattcatacccacactgtcgaaggttgcaaaatggggttgaaaccgaaccaaatctcgctcttgtccaaatttgtgcctttattacaaaaaattcgaatgaagcttggcgatcaaatggacaaagacgactttaatacacgcgtcccaggtaataggatgagcaaaaaaaggatttaagggaaggtgccaattaaagatcgcagtcttgatatattttctgatttcagtcaaagaattcttttttttagttctaacaagttggttcatggaaattgacacaaaggttgctcgaatggtgttgggaaaaatcaaaaaattaattggtaaaaacaaaaaaaattatatcataaatagggctggaaatttatgcaagaaaatttgcaaaaaatatgtacataaatatgtaaaaaaaagccaaaatatgtatcaatgtataaaaagccgaaatatttacgaaaatatgcaaataaattttttaatggttatttttttgaaaaaatttcttcctaaatggtaaaatatgcacaaaatgccaaaaattacctaaataggcttagactcacccaattttttaggggtacattttaaaaaatgtttttattttttcataataaattacccactataaattctcaaatcttgaaaaaattaataaaaaactgaaaaatgcaaaaatatatattataaaccatgctctagaagcgtgaggggggagagagaggcgccggggggcagaggaccccggtgtgtttagtcaatgctttcgcgccctgctgttcacttttatctgctgcgtttagaagagaaacaagtggtcgaacgggagcacttcccgtcgcaattgagggacagagcgagaggcgtcaagaaaatgatcggaatatgccttttcttccccaattttctctnatttttcaccttttt

SEQ ID NO: 7344 - DNA, 4263 bp, Heterodera glycines
  unsure (1)..(4263): unsure at all n locations
ttggccatcgatggtactcaagaatgtaaaatttgattgcctttaagcaaagttatgccatgttttgtcgaaaaaattgctaaaattggcggattttatgaaacgacctagcaccttcataagcaatcaagaaaaagtttaactaacgataattaacgaaaaactcacaacatttagacacttctacttttgaatcggcccaagacgtctttagtgccgtcaaagaaatgatgttcaaggaggatgacgagcccatacaaaattcaatgtgttaaattaatattaaaatttagctatttttaaaataataacttttttgccaattagtcagttaaaattttccaaaaagattttcaaaatttctgaaatattcagtgaaatacaaaaaaatattagatttatactggtaatgaataatttattatgtttgcatttgctcgtcagcatgataaaataggatgagagaaaaattaaaagtatatcctggtaacatcattaattttaggtgtttgctacaagacataattacgggaaaaaattttcatcgcaaatcggtggaagagctccaaaacataatcagactcgacacacttcaattggtttgtaagaaaaaatcattgttatcatgccattgatgaaagacattttgaaattttttagctaaatattttttacttatttttgatttttagagcatatttttgtttttttttatgatctgaaggctacctattttggcagtttttagagactaaaaatcgtgtcctttagtcaaagtgccatgaccaaattttctgaaggctttactaacaataaaaatgtattttttattttttgtagatgatggttggttccttttgtgccaatgtgacattcaaaaagaacccaacggaaatcttttggtttcaaagggagattttgctgacggctgttccaatcatggatcacgtacaaaattacgtggaaaatgaaatggtaggtcataatcgcaataacaaaaaccaacagttcattactattaatgatttaaatcagagttgccaactgaaaattttcaaaaatcagcatttgaaaattttattcaaaatgaaaaaatcaataaaatcagtaaaaatattttttacttgaattttttaagtcggcggggaaaatctatgaaaggagtgccatttgttaacagattttcacaaaaataaccaatttttcgattttgtgccaaagtttttggggtcgggcggtgccgataggctaaaaatgaccatttttgatgaaattattaaaatcagcataaacataataattcataaaatcacaaaaaaaatcatctttcaatgataacatcattaaccctttgaagtctgcaaaatgatgataaagcaacagagttggctaccctgctttaaataaataaaaagttttaaaatgattaatttaaaaatttaattttattcaggaaaaaacatttccaaagattgaaattggcttagtcaaaagtaaaatcgaccaaatgagtattgatcagccagtgaaagagaatgccacaattttcaaagcaatggttgaaatctttaatgaactcaacaaatatggaaacagaagataagtttaaattttcctccaaaatattcaattttttcaatcgaaaattaatttaaagcatattttgcaaaaaactaaatggtttttactcattctaaatttttccaaaataaaatttgttattattctttagttttttaatttttaggattttcataattaaatttttaaaattatatggaacgtttatatatatatatatatatataatttggttttttatcgtaatgaatattttaacgtcgtttttcgcaaaaattgtcaagtgctctatcatccaaatttctaaataacacaacattttggtgggggagtaatcaatgtatttatttgagatattatcggcagggctttgtgtcaacaaatttgcaaaatgacaccgatttcacgctgcgctgttactcggagaattgcttttcggttttggactacaacactcttcatgttgtggtaacccgatttgataccagcaacgatgaaataagagcgggcgatgcgtaccgttggctgtttcgagttgatccgtacacaaaaatcaacctccagcagcttttggcgaaatacatagagtaatattattttaaaataaattatttatcggaatgccaaaattatatgcttttctttaaaaaattgctctgaataattattttggatattcttttttacaatttcgcatttttaaacccaaatagatattttacgcttattttttattgattaaaaacatttgaaaatttttttattaaaacctaatttttagagtattttttaattatttcctgtcactatttatgccagtaaatactgatacttaattggcacttaatttaggcaatattacaacattgacaaagtagcgcttcttttggagctgtttgagcggcgacacttgcccctgacaaacgaagactttttccataatcttgcaattttgcgggattttggtccgaccggaaaatgtgctgtgcgagcatcgccgttttactacccacttgcaaattatacggatacgtgtacggcttcgtactatttttcgggttcattcatccatgcatgtgaatcgtacattgtttatttttttgtgtgatgaatggcacattttggagcaaaataacttatgactggcctaagttaattgtaatttgaatttttaacaaaaaaaatgcttgatttattcctcacccgacccaactgacatcacacacactaataaacactttgtttaaatggtccaaactttcatcttcctactgaaccgcccgccccgtctccccattttggcatcgtttcatcacccatcggctagtccatccatttcgatcgctttcctcatcaatgtcagaattttcttgatccgttcattaactctaatttgcattttgaaagcgaattttgtagggcagcgggtggttgcgcaatggaaattgcacagaattggcataatcggtaaatacagatatgtttggcaccgctgcgacatcatctttgcaaatttccaatcaaatatttatgagtccaatggcaccactttatgagtccaagaatttttcaaattaattacctatataaaaattttgaccaattacattgtttttattttaaaattatcattaatttaaattagagtagagcgggaccgggaccaaaacacggacaactgagtaccgaggtcccggttttgaccgggaccgggaccagtcccgggttttttcccggttttcccagccaaaaattcccggtttttcaacccgaaaaggtcccggtcccggttaagcccaaaattcccggtcccgcgctactctaattaaaatacacgtttttgggaggttttcaatctcaaaaaagaaaaatctcgggtttttctattttcaatctcaattctcggatagcaattttggttacaattctagagtaggcttaagccccgacccctcgtagaaggaattctcggggagcgagctcgaggtcggggcttaacctcttattcttgagtttaatttttagtcatgaaagaaaaaaaaattttttttttgttaaaccaaactcaaattaaaaattttttaaactaattaataataaaataaaatgttacaacgaaatttccctgggttttgtgcaataaaatgccaattttaaacatttgtaggccccaaatattgtgcgttggacggcggtgtgttcttcgaggatggcacgaggcgttgatagttttgaatctttcttttttgctactgctgttcgcctcttacaattttattatttcctccaaaatataaaagtgttcctttttcttcaataataattcattttaaagtgctgatgataataattctgtgtgaatttgtcgaattaccaaaaacaaaaaaaaaatttccgttttttagaattttccatgccaaatttccgtaaatttttattgaagaaaaattcacacacccgtttttttgccgtatcatttcgtgatagaaatttttttttgtcgatgtgtaacgcaatttatgaaaataggaataaaaattttgtcaattatattttgggcaaatttaattaattgttctttcattanaatcctatttatcatttcaatttgattatttgtgtgntgggtagttttgcgcaaaattcctttattaataaaaactcattgaataataattaatt

SEQ ID NO: 7345 - DNA, 2383 bp, Heterodera glycines
atgctgaaagtaaccaaattgatttattaatgcctcattagattcgaattagccttatggaacttttaattaacatattatcagaaaaaaaaccaagtttaccttcaaacaccttgaaaggtattaccaatttttttcgtacttttaaaaataatttatgcattagaattttttatgattatatttaaatatttttatttctaaaatattcaagtctgactattatcgatatataaattatattctgatgttttatactaactgctattaattttagaagttttatgtacaaataatgtttttctgtaggcaaattaattttaatgatttgcattatttttacattgtttaaataactgtgcatatctaattaatagaccttttttatttgtattaatactgaaattgaattatccttttcaccttaagtttttaatagtttctaacataatgcttttagtagaaattatatttttgatttcatttgaataaatttgttttatgatatttttcattaatttattactaaagctgtagttatctaaattatatttatcttatactatttattttttaagttaaaaaatgttcactccgaaatttgcttcattaatgtttacgggttcatgctattatgtaaacattagggttgagcggtaccggtaccggtactggccggtaattaccggtttttttggtaccggtaccggtaccggtaccggtttttttcaaaaatgaaattaccgttaccggtttgtctagtaccggtaccgccggtaaaaatttgcactggtaagaatgggggtctggtcgagaaaagagtaggaaattggtgaagaaggagaaatttttgagaaaaaattaaattttatttcatttagtcatgggattacacacatgcacatgtggtgtagtggttaaactttctacctttcataatttttcgcctgggttcaattccccacttggatagaatattcctcacattttttttaccattattttaattaaaattttaattttaaaaaatattccaacttttttctttcatgttaagcatcctaaaaacccaaaacttaatcaattggtcattttttttacaaattctgttaacaaatcgcattaaaaattacaaaatttttcccggcggcgcctatcggcaccgctggccctccttgtcccccaaaagtcttggaaaaaacgtgccgcgtaaaaagcggtgttgaaagcaaaaaaaggtcattgatttacattaatttacatggccggagaccccttcgcaaaattggaaaattggctgctgaccccttgttttgcaataatctgaattttgaggtctacatctgaattttagtgttctttatcctgaatttgaaaaaaaacttggtcaccctcaatatacatatacttctgaacaattctaatgctaaaaaacaggcactcgcgcgaaaactgaataaaaattttgtatttggaaaattttgtccaaaaatttttatgttctaaaattaccggtttttaccggtaccggtaccggtaccggttgaaaaagttggtaccggtaccggtaccggtttttgcagtaccggtcagtaccggtaccggtttttttgcaattaccgattaccgctcaactctaatagaaaccatggatttagacaaaaacacccataaaaattgactattctggcataatttataatccttaaatttggtcatttttagacaatatctgtgcaattataccaaaaaagaatggaatcgaggcgatacatcgaataaaggaatgtggagccaaacacatcattcaaaaaaaaaaaaatttttttttgagattttttggaactaattaaaaacaaacccccgccccgttcccgggggcgcgaaatttctcacccccgcccccgcccccgcgactctgacccccgcaatcccccgcccacgcgaaaagccacccccgcaaccacggggtccgaaccctagtttttcttattgttagaccgatgaaataaaatacgaccatcaattctctgctggaaagccgttaaatacgagcagaggaattattcttactgtattttcgaatgatttacggtatacctatccaatagattatcaaagccacaaaggtacacaaatttgtaattgttgtattcttttacattgaattcactcaacatttgaatcacattgtttttcctcacttttttacagtacctcttccatttccctcaattaacgtgcatttatcacaaaatgcttattattatttgaaaataataataataatttgctcaaatcaaatgatttttgcttttttatttcatcgcaaaaaactcatttgggaggattcatttctgaccatcgtttagcaccaaccgcc

SEQ ID NO: 7346 - DNA, 2712 bp, Heterodera glycines
  unsure (1)..(2712): unsure at all n locations
tcaaaaggggggcggctttatttcagggtgggacctaatcaagggagtggggctatattataggaaatacggtaatttgaattattttatattaaatgagaaaaataaattcatatttatgcaaaatgaaatttcacataataacaaagcctttgctttggttgatgtattccgttatcatcttgcttttcagcgcacataccaatgggacgaaaagaagacaactttggtaattttctcatttttataattaggggtggatttgagtcaattttttttgctgtttttaaatgaccctaacctaattgaaagaagtattttattctttgtttgaagcaatgcatttttgttttatttttttcaacattttggagatattaatgtggttgaaatttttagcttgaactgtttggaaaatcgacatcaaaggattgtgttgttcagtcgccaaacagaacattgttttgtgcatgtgaaggcccgttttacacccaaaatcgtccattaatagataattctcaattttttggtacgtttgtttctaaaaagtatgaataagataaaaaaaaatatttattatttaatttcattggaaatgatttatatttgtattaaatactattaagcgaaagttagggacaaacccgagtaatcaaattcacgaaaatgtggatatacctgtacacattgtatcacttattgtacaattgaatattgataatttatagaaaaataacaaatataaatccacctttaaataattaaattatttaaaaatttttcccaataagatataatactttttactttgtcttcttaatatgcatatttttatagcggcaatggatcctttttggtcggaattaccagcacgaataattggcacatgctgcatggcatcagaagagccaaaatatcgcggagatgatggtggttaacagggttgtcataaagagactttagcctcattttgtggctttttgagaagccaatgatgctaatgttttcaaatgaggcttttgttttgttttttgggaattttaagatttttgggaaaacttctgaaaaataatagctatttctaatcaaaatctaaggcttattgaacgcggatgatatttcttctcgtctgtcgaactgctcttgctgcgagaaggtattgactagtgatcgaactggccaaaagcttgatttaaaaatttgtaaaaaaaatttcttaggagccaaaattgttgaagatttccatcgtaagagtgtctacttttaattaaattaatcaaatttatttagaaaaacaaaatcagtgacacaccagaatgccgaaaaatgattgaagaaatgaggaattgtatatgcccaagccaagtggataaacgggatgaatactaccgtgacgtattcctaattgattttaaaacttttaatagtaaactgtttttaattcgattaaattaggcaaaaccagttgattttctgccacactcgtgcgtggaagaagaaggttggccgcaaactgattgctgtcccgaaaacacccgcgttgaatgttgcgcattccatgaaacggtttatcagactagcaaaattgctttggatatttcaaattattattttaaataaatattataataatattttaggaagcagatgacgtccgaaaaaacgtggttttggtaaatgcgctaatatacaaaaattgaaatccaaaaacaattattagatttatgaatattcacaattactattttgatcaaaaacaagtagattagcaaattacagaattaaaaatttcttattaatttgtgttaatttagaaagctcgcatgcgcaattatgggacagtaagttatttgttgagatagcattttatcctcaccagaaataaaaatcttcaattaaatcctcatgttgtcatgaaacaattccttttttaacatctaaaattcaaaattaagttaatactgtaaattttgaagatttttatataaatccactaattattttagccattaaattgccttgaatgtgactacaatgttttggaagcacgactgataatgctcgtcaaaatagaggacgattcaccacttttttgcgagttgaaaaaatcctgcaatccgtactttttcttattaattatacaaaaatttttcaaaattttttaactagtaatttgtcgggcttggcgaaatttggccgccgtttcaacgcacacaaagaaaaatgtgctgcattgatcaagcagcagcagtcgtcaccatcgacggagcttaaattggaactgcgtcaggaattcatggactacagcaaggaagggtcctttctgatcgattaccttcgtgatcattgatcagtgccagaattcggacaattccctcncaaaaacncacaaaaattaataatacctttaacctctcccctcccaaaaaaaacccacaaatntaattcctttatccccctcccccaccaaaaaacgaaaaacaagtttcttcatcccacaacaaaaaataaatccgcccaggttttttttcatttttcctgactctcttgtttaattaaaatttaatttttatatatcgattttcgttttgtaataatctgaatatgttcgtattacgcattaattattctaataaaatatttattacaatttctacactttgttgtataaaaaaaattaaaggatgatgaaatgagaacaaaatctcataa

SEQ ID NO: 7347 - DNA, 1762 bp, Heterodera glycines
tttttgaatattttttaattacaatatatttttcaaaactttcctggtttactccttttggggtgtacagtaaattccatttagttttcactcagatcatcatttttatcaatgtttaatttcccggttcctatttttactcgagaaaaccgtatatattaaaggaaaaacggaaaataaagaataaaaattaggattcttaagtgcatatttatacaaattggagattctatactttgttgaccaatttttagtaaatagtttatgattttaaaaaagtccttaaggtgcctgtcaaaaaaagattttttcaaaaaatttcatatataaaaaacaattttaggcctaatggaaggatatggtgattttttctctatgtttccttcccactatactaattttctcaaatttcctttcacccaattttgaaaaagtctgaaatgtataaaatagaaaaaatgtcgaaaagttttcagtttatgaaagccaaaaaatgaaatatgctgatttgcagcactaaaatacttgaaataaataaaccgactaaattatcggaccaggaaataacgtcgccagccgaaacgtcgccgggcgaatttttggaccataacttttttcctactcaaccatattaaacattcttggtattgttccaaagcttatgaaaaactcttgaataatttattttattttcacatatttttgtcttttttaattcctgtgatcatccatatatttttgtcacttactctacgacatttatctgaatagtcgtcagagtaagtggttctcgcccttctgatgacttttttattttttatgaataaataaataaataaatgtaaaaaaagtgatgaaaaaaataaatgctaaataatacatgaaagaacaaaaaaataataaatacaaatatattaatagggataacatttatagttgctaaaaactgccaaaataattaatttttagtttctaaaaaccccaaaatagttgctaaaaatgggtaaatagttgctaaaaacttccgaatttaggtgtgtaaaatgacaaaaattttattcaaaagtcaacaaatattaatccaaatcattattgagataaaaatttttaaaatagaaattcttgtcaagaaaataaataaataaatttggagatgaatttttgagaaatttttcatttctttgtggtgcatttttgaaaaattttttgagtcgattcttaggggtgtatttttgaaaattttcaaaaagttaatccttaggggtgtgtttttcctttttattgcatttttgctaacaaattttgggcaaagcgccaaaatagttgaaaatagttttttttcaaaaaatttatagttttttagttgctaaaaataaaaaactagaaaatagttgctaataacttgaaattagcttaacaacagccgaaaaaacatgttttttcgtgcatttcaggctacggggagctcaggaaaaaatagtgaaaaaactataaatgttatccctatatattaaattagaccaattagcagaaaatagtcaatgttttagttaaaagtgcgatgtatcataagtagagaacgaattttgaggcatatgccttttttctggcactaattttgatacattaagcataaaaaacgcattttccacttggtttgagacttctacgttgacttttattatgcctttctttgcgtttttttgggattttcgtgccttaaatgcctttttggcattttgtctttttggtgcctttttgt

SEQ ID NO: 7348 - DNA, 4087 bp, Heterodera glycines
  unsure (1)..(4087): unsure at all n locations
aaaaaccctttttttttttgtggttttggggtaaaaaaattggggggctttttatttgcatatttttgcatatttcgggatttttgtgcatatttgcatatttagggtttttctgcatatttcatgcatattttgacattttttgtacatattttcagattttttgcatattttggaaaatttgttaaaaaaaattcaataaaacggaaacccctaagaatcggccctaaaaaattcaaaaaaatacacccctaagaatcgaccgaaaatttttaaaaacaccactaagaattggaaattttctcaaaaattcttcccccaaattttttttttcatgagaaaatttttgatttaaaaaatgtcaatatttgctaaagagaattttataaaagaaatgtagcagctcattggcaagtgcactagtgaagaaaattttttaaaataaatttgcacccctaattttcaagtttttttgtgcatatttgatgcatattttgcaatttctgtgcatatttgatgcatatttcacgattttatttgcatatttatgcgcatattttggccatttttcgtgcatattttttgcagccctgttggtaagcaccgctttgatgacaccaattgtcgacttcaaatttgcatcatcgagcagacagcaacttaacacctttggcccattgtccggaaggcgagtaaaaagccatttggccaccgcttgtccaccaaacggcatggcattgttgtggaaagagagaacgcgaacagctgtacaatcgttgagaagtgaggggacgaatttccgaaaacggcgataaacacccgtaaacaaaacataccacgaagtttgtttccgaacactggccaaattttgcgcaaaatgaactccaaaattctgtcatcggttacgttgatgatcaaatgaattggacaggaggtgaaaagttgatgaaaacggaggagaaatttgatgacattttggtctatgtaactgaaaatgaatgggaaatgttgacaaacttttgaattttgccaattttacgagatctcgatgcattcaaatccgttgactttgtctggcgacggaattggcaacggttgccaacgggaattgacaatttccatttgctttgtgccattctctccaattttgctccgaattcgaataatttctaacatttgttgaggcaaattattaagacagtttcggcacttttacagctgaaagggcttttttcatgaaaattatataaaaagttatgccatgggacgaaaaaataccatgggacgcgtaaatacttaactatttacttctttttttaatttatctgaaaaagaattaagaaagaaaaaatgaaggagaaatgaaccttttgctgtccctgataggtcactaataataattaatattaatgagaggggcataaaacaattaacggcaaaacgatgacccaacaaaatggaaaagaacagaaacattttgattgaattttctctttccaatgtttttattacgtttttgtattattgtaaattttaaatcttttttaattacaaatttttatttgacattaaaaaacgtaaacatgaaaatagggatagcatcgaaaaatctttgaaatcaaaagataatggcaaaaaaaaccaagaatattcggcaaaatagctttaaagcgtttgggtaaattaaatatagtataaaatttggtattttcgcctcccatgattatttaaagaattttagcgataaattaaaagactaaatttggtaacaaattagtccaaataccctgaaaagattatgaaaaaaaaacaaatttggtcagtcattatctcaaaatcagagaacatttctttcaaataaggacaaaataaatttttaagattttaagcacaatttaaaatttaaagcaaatatatcaattaatgaaaatgtcgaaaaaaggtgacgaaatgaattttatttaatcaatctctgatcggagttgaaacggttaaactgatcgaattgaggctgaaggatttccccttttcttgtcgtctcttgcacaaattaattttttaatcgtggattaagctgatccaaaatggttgcatttaacagcgccagaaagcattaaaaagacatatttactatttaattttaaaatatattaaatttatatggtgatcagcccgacatcaccatcatcatcagcaattccattcctaaaccattgcaaatgttcgtattttcaattgcccttaaatatgcatttaaaaatatttgcttctaataaaaaaattgaaatttaattatttgcacttgattttgaagatgattaaaaaaaattttctaaaatccataaaaattatttttgtattgaagaatgggggcacatataagtgaatttaatcgaaattcctagtaaaatttaaaattttttcaaatccctaaaaccgttaaaatgtcaaaatatgcattatcatcaattttccttaaatccgcttaatcccgccttcaaacattttgtctttatcctcccctgagttcccttaaaaacaaatatttattttactatgcattcattcggcgctgaacaaatcccattaatctttcaagtgtagccaatgcaaattcaaaataatggacacactgagaagtcaatgtcaaaatatcgatacttttgcaccacccgaggtgcaatttgacggcgtcctgccgcagaaaacatggcgaagatgacggaaacggcaggatggacggggaacggagtgagtcagtgttcatacacagacagaaaaaaattagtctttttgatgaaaatctattaacaaatcagaacgaaattactaataaaaaaaaatccggcgacgcctaacggcaccgtcggactttttcctcttttctccctttaccgtcgaccctctccccgaaagggtcattcttaacagtgtaaaaatttcgcggtttccgatactaaaaacccgagaccgggaaccgagaccggcaagcgaaaaatccgggaaatttcccgagtcgggaaccgagactctcgcacatccctaaccttaaataatagggggcctaataaactaaactaaaaaaatatgcaaaagtttttgcattggaagaatttatgtaaataattttttcgcaaattttcaattcgaaacgaagtaatgtccgagcaatataatttattggttaatgattgaaaagagaaaatacaattcaaataatgtttcagttcttttccattttgttgggtcatcgttttgccgttaattattttatgccccctcattaatattaattacctttcatcagcgacagcataaggttcgttcatttctccttcattttttttctttcttattttactgcgttcaatggcacttgaattattcgatggcattttccgcgtcccattcaaatactgacacaaatattcccaaagtaacgaattttatgaaataaattttatagaaaaatagaaaacatttaggggcattgaatgatagcaaaatttaaattttggtttattttgagagggctttcactgaaatttaacgtaattgaagaaaaattttgaaaattttatcctcatcaacaatttggaaaaatgtatgcgcatatttttcttttttacaattttatgtgcaatttacataatatttttataattttattgaacaaaaatcaattgatttcaccaaaacatcatcattatccccctgctgatgttgtgcctttccctccggcgataaatatttgtgttgtttgtccttcttctttggagagaggaaaaaaaaatttttttttttgaataaacactttctcttctgacctgggctttgtcttgattaggtcatatgattaatgtattttaaatataattaaattttgccgcatttttttcattttttagggggttgcattttcatgactttgcaacgatttttggggtggtgtatatcatttttttcgggccagtatgttttcgcatgttttcgcgtgagtgcatgttaacaagggaacattccgagctgtgagtgggaaaatgcctatgtattatataccattggatagagcnggggtcgantttct

SEQ ID NO: 7349 - DNA, 2806 bp, Heterodera glycines
  unsure (1)..(2806): unsure at all n locations
aaagttttgaaaaaatgaataaaaagttttatttacttcaagattaccttgnaaccaagaaaactatagaattgaataaatcacatgcttttacgcggcttgcttaaggcctaaccagcggatttttcatggatacaattttgtttttgtttaccctttttttttgaattttccgcccatatattaccaaagatatttgtataaaaattaagaagaaaatgtgaatttttattttatttttattcttttttaatttattttcttttaatcgtataattaaatgcattgaccccgttttatataattatatttaattattttatcaatcattgagttttttcgaatcgtcacatcacgctctctgacccgcccaacgatttttttctcatttattaattgcaatacaatactgttccaattggtaaataaatttaaaaatgaataaccaacctccttttcccaatttaatcccgaaattcgattcgcaatgaatttaatttgtcaaataataaaaattttttaatttgtcaaataataaaaattttagccaaaaagctataaaagtgacaaataaattcatttttgcaatcataatttacgacaaaagtgtgctgctgctgctgctgctgctaattgccataaaatgaatcgacggtaaggaaattttttttagaaattagcaatttttaattccaattagcaatttttaattccaattaaccatttttaattccaattagcaatttttaattccaattagccatttttaatttcaattagcaatttttaattccaattagcaatttttaatttcaattagcaatttttaattccaattagcaatttttaattccaattagcaatttttaattccaattagcaatttttaattccaattagcaatttttaattccaattagcaatttttaattccaattagcaatttttaactccaattagcaatttttaattccaattagcaatttttaattccaattagccatttttaattccaattagcaatttttaattctaattggccatttttaatttcaattagcaatttttaattctaattggccatttttaattccaattagccatttttaattccaattagcaatttttaactccaattagcaatttttaattccaatttttgtttctcatttcagttggatttgtaacgacgtgtggatggacattttgcctcattttgaccatgctcaactcggcctcaaaatggcactgatttcgccccgttttgatgcgctggtggacaaacatttcgatggcaaaacggaattgataatttggaaatggatagtaattcgcaaggacaacggaccaaaatcaaaactgtctgtatgggtcgatggcaaatttgtgggatttccgatgccggaccgtccgctgcccatcaaaattcgatttaagaagcttcagattaagtaattttagacttttgtatatattaaagcaatttttatatttcttcagttacattgaccattctgtgctcacatttcttcgttccaacaagcaaatttgggacagaagtggcatcaaattggaagtgtttgtgtattcatttgatacggatgtccaaccgacttgggatgtttttgtccgtcaaatttggcctatttttgcgaaaagcattcgtcatttgggctttcgcaatggcgatcatttggacaatttccgtcgtcgcacttcaccaacgattctcactgatcttgatcaattgtattcaatcgattccggtgctctgttccccgatggaattgctgatgatgggccaaatggaaatgctggtcaagcgttgaccaaatggcttcacactccgacaaaagatggacagccgaagcgattgcgttgtaatggttatttggatctaatgaatctcgaatgggtcaacaacttcaaagaggtgtgtctcgccatattttctataaattgttttcgtttttccattttttgtgtttagacatttcgccgtgccaccacttctgtcagttaccatattcaacttttttttcatgcggaaccaaagccacttgaatcatttgaattagtgaacgaagtgacaaatgagaagctgacactgaagatgagcaaaaaatacaatggatcagtgtataattggctgttgcaacggtgcccaattggggagacggcgacggcgccagttaagtggaaaaaccgcgaaaattctgatgccaattttaattatatcatcagatttgatccttggcatgacaataattcgggcgccaatttgaacagtgtccgatttaatttgtgtgcaaatagttgcattgggtgagcagcaacagcaatatattattttgtcgaaaaaacaattaattaattcattttaggccattgtcgccaccaacggaagaagaaaaagaagaagatgaagcggatcaaagcaacaaaaatgtcgtctgattaagtgtacggaaattatttaattaattatatttgagaaatgaatgatctcaatttgttgtgcttattttctctcagaaatgcctttgttaagttccaattctataaaacatttattttcttgtttttttttattggaaaatgtttttatccgtgaaatttggccaatttttacgaaaagcattcgccattttggctttcgcaatggcgatcatttggacaatttgcgcagtcgcacttcaccaacaattctcaaatggcaactcgtacaaaaaaaaaaattttctaagaattttcaactaaaacttagaatttttagataaaaaaggcactttacggttatcggtgt

SEQ ID NO: 7350 - DNA, 1768 bp, Heterodera glycines
tttcgttactaatagaatcggatgattttttgtgtaatatttcatggttacttgcgcaaaagaacaaaaagttttgcaagtttgaaggtcgttcactaatttcatttgccgaatttgggctaaattagtgtttcgtcacacattacaatgcaaaaagtgactatttaagaaactctaaattttcattaccaatataaaattttgacttcaaacattagtttatgctatttatttttgatttaacatttttttcccattaagaaatgtcaatgcaacaaaatcaagggtccgatgatgctttgccaatgtgggcggtaccggattttgatgaaatgggccaaatgccgcagcggcaaaaacaaaaaaaaatcccaacgttgaaggagtttcggaaccaatggaaggaacgaagacttctgtgggagagggaggaagcagaaaaaaaagaccccaaaacatggaagaagaggaccgatgagatgaagaaaatctgtgaggagagattggagcaatcaaaaggtgcaggcggcagcaacaaacgacaggagccggacacatacacttggaactgggacgaactactgcgccaagaaagagaatatttggacgggggtctatggggaaaatgatgagataccccccccccccccttcacctccctcccgttcgattgatcgattattttattttctatttgaaataaaaatatgaataaaatttaaattgttaaaaaacatttaatttgttacccttgggaattttgattttttaatctttctttttttcataattttcgacttgtttgcattttttgagtttttgtagtttctgattttttggttatttttatggattttatgatttatttgcgattttttaaaaaattgacatttttattaattttatttttgataagcagcgtgaatagaattgcataacgaacactcatgagaatgtttatatttaagatgttggatgacttttttttttattttgtctgtctcggcagttgatcgcttccgccctccttcattttttgtctcaatggcgtttttggctctctcgcgttgctgctcatttttctcgcccaattctgcgtacaactctcggacatgcttccgaatttcatgtccagactttgatgaggttgatgagccggaagtagaggggatacgctaaacaataggatttttatcatcattttgtgtttttgataagttcattgaggattttgcgtatttttgaaacttttgtgggaaacatcaggatgttaaattttatgattaattttaactaattgtattatttttgacaatcatttaattgaggtttttaatagacccggaaaccaaaatctcaaacaaaattttcaaaaatttcataaccagaaagaaattccattcttttctgaaaaacgcaaaattacaaaaattacaatttcccaggggttatcattttttggtaaaaacttagttttttattgattttaaaaaaacacctttaaaatagaagtcattaagcctgcgatttggatctcgttgcccgattgcgagacaccctctaatggattgtcagatataggcgaatattgttggttttggtgttgctgttcttctaactcttcgccctcatctattattaggtgtgttgtgagccttccttcacaatcaataaattggggaggtggaggtggtggtggtggtggtgccaatgccaaaaatggcgatggttgttgttgttgttgtggtggtgcccaatgataatgatg

SEQ ID NO: 7351 - DNA, 1620 bp, Heterodera glycines
acatctggtttccagtaaatactcagatccgtcgccgaacaatcttatcttccagaaatggcagattttttcacaacgcaggcagttacagatgtcgtacagccgaagggatgctatctcgtagaattccttcccttcgtcctcaaaatcgcgttcacattgctccctgtggcgatgcgagcattgctgggtttttaattattattattattaggccactctggcctttcggcgagcaaagcgcccgccgtcaggcgagcaaagcgcccgccatcaggcgagcaaagcgcccgccgtcaagcgagcatacgcccgccgtcaggcgagcaaagagcccgccgtcaggcgagcaaagcgcccgccgtcaggcgagcaaagcgcccgccgtcaggtgagcaagcgcccgccgtcaggcgagcaaagcgcccgccatcaggcgagcaaagcgcccgccgtcaggcgagcaaagcgcccgccgtcaggcgagcaagcgcccgccgtcaggcgagcaaaagcgcccgccgtcaggcgagcaaagcgcccgccgtcaggcgagcaaagcgcccgccgtcaggtgagcaagcgcccgccgtcaggcgagcaaagcgcccgccatcaggcgagcaaagcgcccgccatcaggcgagcaaagcgcccgccgtcaggcgagcaaagcgcccgccgtcaggcgagcaaagcgcccgccatcaggcgagcaaagcgcccgccatcaggcgagcaaagcgcccgccgtcaggcgagcaaagcgcccgccgtcaggcgagcaaagcgcccgccgtcaggcgagcaaagcgcccgccgtcaggcgaacaaaagacagtgcccataagccacctcttgtgcttgctgccgcctcgtccgcgctcctcctatcagactcaagcgcaggtaaagagtggactccttctggatgttgtagtcggcaatagtttgaccatccttgagagtttttcctgaaaagtgcattagttttcgctaattttcatgttttagtaattcttacttacattccttattattacaataaaaacaaataaaatttgtagtttcaaaattttcgatttagtaattctttttaacaattacaaatgccgttttttaactattttcactaaaaacccaccgcaaaaaatgagacgatgttgatccggtgggatgccttccttgtcctggatcttcgccttcaataaagaataattatttcaatcatttgtgaatgcttaattaaaaaattaaataattttagaataaaatgaaaaaaagcctcacatgagagaaaataattcctaatttttattacgggattcgggatttaaattttatttgaatataagtaaaaaattaaagaattaaatattaaatttgtaaaatctttaatcgcataaaacaaatgaataattttttcaaattcaacgccatccaaagttgtggaaataacggcgatgggcggaagagaatcgatgaaaaattgctgttatttaggaggggcgactggtggaggcagttgcgacgccaacgaaaagacccaaagttgtggcgataacgatggacggaataatcgatgagaaattgttgttattttgggggggggattttggt

SEQ ID NO: 7352 - DNA, 2444 bp, Heterodera glycines
aatatgtatataacttttgttcgcaaacacaaaaaagaaagtgtttttcctactaattaggctatggagaatccaggaaaaaaatgtatttacataaaattagcagccctattaattaatataacttttgtctaaaaaggttctttcctaattaattttgcaattattatgtcagcgacaatttatcaaatctttttataattttcttatatgtatcagctctaaaatatattttttgaaaattaaattctaaaattcataactgcaaaaaaccataagaaaaatcttgcccacggtataattttcaaaatttcgtttcatctctcattaaatcggatttgtatttgcataatgcgcgtgttgaaattcccaattctgcggcaatttggcgatcggtgagctttggattatgttttttcatctgataatatttcttcatcttttccattttctcacaaattgtgagaacttttcgttctaaaaataattttaaaagattaaaaatgggtgaagaaatatttaaatttgaccttttgaaacattttgtttaatgccgaatttcttggcccatctttcaattgtcaaaaaacctacaccaaacatttgtttaatttttgctctaaattctttccattccttgtccggatgttttcccatttgcataaattcactttttgttttcaaatatttttcaacaatttttctttttcgattctcaattttttcatcggtttttccattttttaattgcctcttccatttataaatgctgtttatttcaatgcccaaatgttttgctattatttttttacatttcattctttttccatccaattttccatttaatttcatttttaatttgtcatatatttgatcaaatcgctttaatatttggcgtttttcatcttccgaatttttatggatcatcattccaaattctcttttccattcgtaaattttctcgtaattaacacccgatttttgagcaatttttctttcaattttgtgccattcttttccagaataatatttctttttttcttgcttgaatttctcttttattttatgaaatttttccacaatttctcttttatttttattagtttcatttgaaaaacgatcacaactttgtccattctttgttggcattggcaattggcccaattcatcataatccgtggacatttcttcactctcctcttccttcacttccacattttcatcaaaattctgatcaaattgacgaacattttgtcctaattggttattctgatcagcaatttctccatgaattatttgatcattttgacagatgttttcttcttctgctccgtcgtcccatgtttggccaaatatttcagcaaaacttttttcttgggttattttgccagcctcaatttggttaattgcttttttgaatattaatgcgcataataataaaaatattaataatattttcatttttttgtaaaaatataatgaattatttttataaaaatatttttcgcaatgaattttgtaattattaattttatagcatggcttaatttttcttcaatcaatattaaccacatttaatcattatttcattaatttgacaacatttttataataattcaattattaaattttccttttatcagcgaattgggtagtaattaatatgagataactataattatgaaggtttttaaggtaactatcacaaatatcacattttcattctcatctgatgtcattaattgactaatttttttagcacatattttggggattttttggaaattttatttttattttttacgaaattagcttttttgcactcaaattcttggcaagatatccaaaaatgatcaaaaattttcttttttttctttttgcactttttgatattttttaatggcttttttcatttttaaggcaaaatttgaattttatcgatgaaaaacagaaaaataagtaaatcttggagagaaaagtatttacgtcacaaagaattgaaatgtttttgattagaattgtactagcgaaatggataaaaaatgtgatttttttgataaattcacttattttttgacagtttttttttcaatttttggcacatatgttggccttttttgagctttttaggggtcggggtcgaaaataagagatagtcatttttcttggatagataaatttaaaaattctctgagaaattaaatggcgattgcgcaccgccctccctctcacgctcgagcgcttttgcaacgtataaaatttctcaaaataagagatagtcatttttcttgtatataagataaatttaaaaattctctgagaaattaaatggcgattgcgcaccgcccttcctatcaagctcgagagcatttgtaacgaataaaatttctccaaataagagatagtcaatttcttggatattagatatatttaaaaattctctg

SEQ ID NO: 7353 - DNA, 1958 bp, Heterodera glycines
ctttcattgaaaatttcaaaattgcaaaagatgtttttcagatgttgttgaccaaaaacgaccagcgaaaaacaaacggagcggcaaaaccctcgtcccggcaaaccaatgccccagggcaaaagtgacaggggcagcgaaccgccaccccgccagcgcaaacagaaaaataacgaaaaaaattgttataaaattttaaaaaccgggctttttataatattaaatattaaatcattgcatcgcccaacgcactgaaacagcaaatttagtagcaaatgcattaaaaattataaaatccaaccattaaaatttggattggtgggtattcaatcggacgtgcatatctccgcaaatattggagtaacaggaaaaatgcatataccattcgaaagctgcgaaaaagctcttccaaaaaatagcaaaaaatcctcgagagggccaatacagacccagctaactgctcggaaatttgactaccacttgtaaaggctaaactatgagcaaatttcatgttttcgagctcgtttgaggaatttactagtacagaactataaatgtagcataaaatcgcttcgtcatgtgacaagcgtgacaagcaaaactcactgaaacgtaaatatatttgctagattattattaagaagcggacttctgaatagttttcctcagatggttctagataattatcttgaaacaatgtttttttatagaatgctaccgcatttgttttttctgagtttcggacgtgcatatctccgcaaatattggagtaacaggaaaaatgcatataccattcgaaagctgcgaaaaagctcttccaaaaaatagcaaaaaatcctcgagagggccaatacagacccagctaactgctcggaaatttgactaccacttgtaaaggctaaactatgagcaaatttcatgttttcgagctcgtttgaggaatttactagtacagaactataaatgtagcataaaatcgcttcgtcatgtgacaagcgtgacaagcaaaactcactgaaacgtaaatatatttgctagattattattaagaagcggacttctgaatagttttcctcagatggttctagataattatcttgaaacaatgtttttttatagaatgctaccgcatttgttttttctgagtttcggacgtgcatatctccgcaaatattggagtaacaggaaaaatgcatataccattcgaaagctgcgaaaaagctcttccaaaaaatagcaaaaaatcctcgagagggccaatacagacccagctaactgatcggaaatttgactaccacttgtaaaggctaaactatgagcaaatttcatgttttcgagctcgtttgaggaatttactagtacagaactataactgtagcataaaatcgcttcgtcatgtgacaagcgtgacaagcaaaactcactgaaacgtaaatatatttgctagattattattaagaagcggacttctgaatagttttcctcagatggttctagataattatcttgaaacaatgtttttttatagaatgctaccgcatttgttttttctgagtttcggacgtgcatatctccgcaaatattggagtaacaggaaaaatgcatataccattcgaaagctgcgaaaaagctcttccaaaaaatagcaaaaaatcctcgagagggccaatacagacccagctaactgctcggaaatttgactaccacttgtaaaggctaaactatgagcaaatttcatgttttcgagctcgtttgaggaatttactagtacagaactataactgtagcataaaatcgcttcgtcatgtgacaagcgtgacaagcaaaactcagtgaaacgtaaatatatttgctagattattatttaagaagcggacttctgaatagttttcctcagatggttctagataatatcttgaaaacatgtttttttatagatgctaccgcatttgtttttt

SEQ ID NO: 7354 - DNA, 4669 bp, Heterodera glycines
ttcattttcaaacttttagtgatttttttttaaataggccccagttttttttaatgttacaaagatagtacttgggttttttttaaaaaaaaaaagcgattcaaccaccccccccccctccaccgcccactcaattgttttgtttggcccccgaaattggcccaataattaaaacaaatgtttttaaacagaatgatgccctcttacaataaaaataaatgacattgtgtaacaaaataaattcttttcatatttcttttatttatgaattagtttaattagttttcactttgatgggtcaccgggacccgaaaatttgtctgtcaaaacaaattaaattaaacttgtgacacaatgtgaaattatccaatttttcgcgtcaaattatgagaaattattgtttgaaaaaatgcgacccttattttcagcactaccgtctatctatcgtaccgtaccacaataccaatgtagaaaaaaaaattatgggaacacttaatttattaaattcgaaattccaaatgtagaaatttaataaaattcggtgcaactcgaactaacattctttttcgatcacatagtcccaaatttttggaacccgtccatctcagtaccgtatagctttacaacaatttaaattccaatttgttggaataggaattcaaattttaatatgaccgtcttactacagtaactttctctctcagtaccgtcataatgagtcatgacagtagtgatcagtgaatgttgaatcacaaaaatgcacttttgtgaaaacaaaataatgacaatcctaatgatatcatgcacgaaaaatgatcggcaattttcaggttttcatagttcccaaaaatttctctcctcgctccgcgcttccctttgtctgggtccacattttaattgtggtaatttgttaattagttttttttaagttttcctaattgatcaccaaattaattataatgagtaagttgtgtccctttggtggttttgtggtatgacttttcttttgttcttttgtgtgcgcattgcgcagcagccacattttggcgatgcggcggcgttccccctttgatcatagaaagtgatcaggctctgttcaacgcaccccccccccttttttttgatcatttgtgatcagagaacttatccctagcctgatcaccaattattgtcatttgatttatttgtttttgaggaatacgagcgatcacgatcaccactctctcgatttctcccgtcgcgcaaatttatttgtttttgagtccgatcaccgctcacccagcagcagctgtccctccttcacgcacgcaccggtcaaagagtgtctgcccgtgactgatcagacagagtcatataacagtcagacggcaatgtctgtttctctggctattcagagaaaggtcaagattcttttgtaaaactcgatcatagtttttttgggtgcgacctatttgtttttgagttcgatcaccgcgctctgttcccatctgcccgcatcgatcagagaataattaatctttccgtgactgatcttaatttcgtcattagttttttccttttgctcgccatattttttggatttgatttatttgtttttgaatttgattatccccaattcctatcctcctccacggagtaattaaaatatttaactgtaatttcgtttgatcaccagatttaggggatttgatttatttgtttttgagttgaaccaactctgtcccgtgcttaagtgtgataatttgtgattcagagccattatcagcccctcttctttaattaggtacgcgaaaggtgcgcgatttaatatgatttatttttttatatttgaaatgagtccgatcaccctcatcccgcgcaattacagagcaattgtctgtcagagatcgctctaataaaccatttcgatcacatttttcagtttaatttgttttttcaatcacgcaagtaatattatgtcctacttcacccatcatttcgatggtttatcttgatcagatttatcatgggcacaaaagttataaaatctctctcgctctctatcatcactctctctctctctcgctttttatattcaatctaaaatgggtgatcagaagtctttgccattatgaccaaaatgattagaatattcattcataaaattaataatatctctttcatttctgtcaaatactttcattcaatttctaaccaaaatataataattgttgtctttctctgatcagcgcaatatatttgctgtggtaaaattatctttcgtcgtgcaatgatcatacttatcctccttttctgtatcagatcacaaataaatttttgatttattatttattattgggttcattcaccaccctcgccccacccgcgcacccaccaaaacaattaatgaattaattcgctttgtgctggttacactctcccccaatttgtggaagagcagcaaccgcagcagcagtaatagggaaggttcttttgctgcgcatagcaaatacgtcaattccgatcacattactgcacagcattaactttctctctctctctctctctctctctctctctctctctctctctctctctctctctatctctctctctctctctctctctctcaccaccaccacttattaatgataattagaaataataattcactaattagtggctaggtgagtcatctaccgccacattttttcctttttgctcggggcgaaattgcgtggcaatcactccgcactttgatcaccaatttttcttgtacacaaaatgattttttcctcaataatgaatgttctgtcaaaatgtgaacaaagtgagagccatgaacaccctgacactccgatcaaaaaagtttaattattacaataaccgggggaggggaatcatttcggccgaatttcgtcacagtcatcggaggaggttggggtatcaggccgaggaccaattttgttaatttgtaaagtctgaggcccattttgagcaagaaatgctagaaaaaattaatcgaaacgttaatttctagtacattttagcagaaacaaacaatcaaaattttaatacattgagataagagaaatagagattaaggagttagaaaatgatcaaagacaaagttggcaaaaatgggtgcagtattcgtgatcaacgaccttaaaaccccttaaaacttattttcattaatttctaaaacgatatagattgtcagtttgtgaaattagagaaagaaaagagagagagagagagagagagaaaaagagagagagagagagaaaaagagagagagagagagctaggaaaagtagaggaaaagtacagagacaaacaatgaggtagagatattgctgcggggatgagagtcacaaggttgcgcagagatgagaatggaatgtgccaaacacaataactcaccgcaagcttcgactttctccgtcctttcttcatacgtcacattttacgccccattcatggtttattgttttgttgatcagagcagtcggctgctgcggcaaacagtggtaaaactgattgctgcgctgatcagccaccgatcggtgtcaattagtgtagcgatcaatgtgtccggtgtccccccccccccgcatcacaacggtcgccgtgcgtcgccgcattcccccgcggtgcacagtgctgcgcgaccccttcccacagcgcggcgccgacggcggcaagtcgaatgacaacggcggcggacgcagcgcaagcatatgaagcggtgcaagtattcacgtgaataacacattgatttggtcccttactcagtccatcgcttcatcaaatgatcattaactaattaattagccaattagtagtgactataatagttctgtctattgtttactcggtccctcgctctttctccgtctcgaaaattccggggagaaacgtcatccattgacaatcgccaaattgcccaactcataattgtatcacttcgtcagcgccaaaattgagaacatttcgtactcaaaacaacaaggcacaatgttttctggtcattaagttttagaggagttggatttattttaatataaatttattataattaaattggtgaaataatttaattgcattaaaacaaatcaaatccaaatatttttttattttataaatttgggaaaattttgaaaaaatgacaaataattcttcacattaaatttatagttttgaaaaaagtcgtttttaaatgaatatacttactttttcatgatttggttaattttgggcactttttgattatttgtgttaataaaaaaaattttggcaaaaaaatgagtgagacaaaaataccgatgacctaggaatttttcataatttccaccaacctaatttaggttggctgttttttgccaatataaaacaactccaattttttttttactaaacacaaatcccatattatcatggaggtcatcgcaatttatctccacccaaagtgcatgtacttcaccatcatctcatcacatatcctagcatttgtccttcaaattgggcaaaattccttcgcatcgcatcagtccccccccccgacccgtgcccattgattgatgtttattttggattttggatggcattcgtggcggatgatgatgatggtgtcatatttggtgcattctgggtgccggtgtatccccaaaaacgcgagagggatggg

SEQ ID NO: 7355 - DNA, 1973 bp, Heterodera glycines
  unsure (1)..(1973): unsure at all n locations
acatccaatcactttcccactaaataattgttcagttacgagtcgcaaatcttctaactcaaggacgtagacgctagcaaagtgagggaaaagcaaaaagaggggatcggtcgaatggaatcggtcggtcacactcacatgatgagttttagcagcaaatgttcaggcagcattctatttcttttttcaaattcaaaatcattaattataagacgcattaatccatttatttgtgattggtttaataaaagttattctttgttcataattgtgccaatataaattttttgtagggccgtgtgcagataatgcgcggacttgagctgagaatgagcgacgccactgcctatcatttgtaaggcgattctgggaattatcaatacacaaataagcatcaactcatattaataagcgaggcagcacctcgatatgatcttttcgtctccctcccccttccccccccccccctgcccgacaaatcccgccgttgggtggtcatttgacctgacccccaaagaaattttggggatgcctcccgacgacggggctggagggtgcaattgaaggacaaacagataatgatgactctaatttggaggacaactgtactaatagattttatgagttatcaaatttatcagttagtcactatttcaaaatttattgttattttttagcacacaattttggtgggcgtaatgatatgtgatcaaatttcataattacttacatgttaggtgctctaattatgctctaattaacaacaaaaataattgggggaactgtgcggtgcataatgaacctacgcctaaaatttttttcggagaacgggaaatgaaatacccgaggcctaaaaaatccaaaaatgacatcactaaagttgagcgcctttaaacgaacttctattatttcttccattttacacttatttttaattctcaaacttttttgaggcgaaaccttggtatgtaaattttcaaaatttttcacgatggtgcctgtgtgaaaatatttaaaaaataatacttattgaaaaaaaatttacaaaaaatatttgcatagtaaattaaaattaatttttatttaagaaaatgatcatgcttatcttattactgatcacttttattttaaagtggggccctactcactttcctcaatttatcctgcacatgattcagcagatccttttttctagagtgccacgggaccgggaattttgggcaaacccgggaccgggaccttttcgggttgaaaaaccgggaatttttggctgggaaaaccgggaaaaaaccgggactagtcccggtcccggtcaaaaccgggaccttggtactcagttgtactcaattgtccgctaccaggtcccggtcccgtggcactctacttttttctactgcatatcctaataataatatctgatcactatcaaaaatggatgctccgccatcatccacattaaataattttgacgctttaccatcacatcattattttttaattatccttcatgcgtgtaaatttgcaccacaaaactccaccaaaatggttgaaactgcgaccagtataattatttaagcattatgataataatgctgacggagctgatcatttttagatcgcaaaattctctcccacaaattttttaaacaaattaaaacaatttttcgcccattttctttcctccttctccgcttccacaccacttaatttggatcattttttgcaaagagtttataaaaaattttcgcgctctanaattttgcggacaaaatgaatgatgatcacgaacaaaaataaaagaaagagtgatcggcagtctttagtttttataataaatgtanttattactaatttgttccacctttcatacgtcattttgtctttttcgtcaaactcaaaactttgatcacaaaaaaagatgatcagaatggtgcatnagcatattaaactgatcagagagaagcagtgaatta

SEQ ID NO: 7356 - DNA, 3984 bp, Heterodera glycines
aattttaaaattttagagggaaataaaatcttcctagtgaaagtgcggaagcagaaaaggcgcaacccaaacattgtattccgggattcgttcaacctgatgccgtgttcgttagctgcactcatcccttcttatggtctggacgtggaggacaagcccttcttcccgcatttggccaacagaccggaaaactacggcagagaaattcgcccaacgcccgacgactatttggcaaacggtatgatgcccgggaagaggcgacaattcgacgaatggtacgctgcgcaccaccatgagccttttatgctcgatgaggcgcttgccaggtaaaaactatttttacatgtataaattaaatttttctgtttcagttattgcacgaatgatgtcaagattttgatggctgcccttgtcgcattccgtcgggaattctttgagatttcgcgtcgccaggagtacatggacgggatcgacgacagagagaaccatgatggcatcgacgtactgcgtgagtgcatgaccatcgccggcgcgtgcatgcgacactttcgcactaatcacctgcctaacgaccaccttgccatcgtccctgagcgaggttacgacaacgctcaaaatcaaagccttctcgccttacgattcttccattggtactcggaggagtacggggtggatgtgcagaccgcccactctgccggaggagagaaacggatcggcccctactcggttgacggatggattgaggcagaggggcgtgcaattgaagtgcatggtattgattatttatttttattcagtaaaaaatcaatattttaaggctgtacttggcacggatgcaagaaatgttatccaatcgataacatgttgttgcccaacggaaagacagcggggcaggtacgggagcgcgacgcaaagcggatggaatacatctgggcccgagtgaatcgtgtggacgtgtattgggaatgcaaaatcacgtctatgctagagcggagcaaagccatgaggaaatccttcgcgaactacgtggatgacgggccactggtgatccgggaggcattcactggaggacggaccggaccactgaaattgctgcgcaaagcggggccgggagagaagatctcctattacgacttcacgtcattatacccttacataaagtcagttcttttttctgtatttgacaaataaattgtaaatcttaagcttcaccactcgctatcctgttgggcacccgaaagtacatgttttaaaccaacaagtggaatggatcagcgcggcggacaatcctttcccgttggcgctgctcaaagtttgggttgtgccgccccgccaaatcgatgttgcagtgttaccggtcaaagtggacgaccgactgtgctttccgctgtgcatcagctgtgccaaagaatacccaaccggaggcgtggacaacgactaccactgtcagcacactgatcaacaacgcggatgggtcagcacctgtacatcgattgagctcaacgcagcgctcgacgagggttaccgcgtcacgagggtgttccgcgtgctagaatacgagcaaagcgacgacaagctcttccgcccctacattgcggaattcatggctcaaaaaatccaggcaagcggatttgacagcagcataagaggggacgctgagaaggaagaacaatttgtccgagagtgtgcggagcagtttggcatcaacattgatcctacaaaaatggtggtcaacaaggggaaacggtccctggcaaagctctgtctgaacaatttatgtgagttttgacatattaattttgacaaaaaatgtaatttttagggggacgtttttcgcttcgcaactttggcctgtgccagacactcatcactgacgacccggtgacgctggccgagtacttggacaacaaatcgatcgaagtcacatcgatcgatcagctggacgaggcgcacatcctcatcacctacctccacaagaaggattggatcgatgagcacgcttgctcaaacattggtgagactaaagttgtaaacttgtgctaatttgataaatttagtcatctctctgtggaccacttccgctgcgcggcttgttctgctcaaagccatgcagaaggtggttaggtcgccggggtccgagctactctacaccggtacatatgccctaaaaaattgcatgaaataaattgcaaatattttttagatacagacagtctcatcctcgtccacccggaggagcgatgtccgctcaaaactggtccacatctgggccagttcactgacgagtacccggaccacgacattgtggagttttgcagtgggggtgcaaaacaggtaaattttaagttaaattcatcaatctgtattgattatttcacattttagtatggtctgtgtttgcgacgaaagggagctggggcggatgccaaaaaggaatacgtgctcaaggtaagcggattgacgctgaactacgacgtgatcaacaaccaaggcatgcgttacgagacgttcaaagaagaagtggtgcggtacgcaacaacgggtgattatgagccaatcattgtcacttatcctaacttcctccgaccgaacattcgggagggagggagggtcgtatccatgcccctacagaaatgttaccgaccatatgttgggaagggaattataggcagcgatttcaatgtgaagaattttggccacactttgtaatgtttttgttttctgatgtatctgtctttctcatcaatacaccataaattgtatttaactcatttttcaataaaaattcatgcataatttatgaatggaagatgaaattttaaaataattaaacaaacgaagaaggcatttttaggtagaaaagtgcataattaggccacagaagatacaattgtcaaaaaattaatgaatttgaaaagcattttttaattaaaagattaaagtgatcgttttatgattgaaaaatgcataattaacataatataatttaaaatttcaccaaaatgatggagacatttgactgcactcattgcgccctatattttctgtcatctctacatcatcggataggcgcaaagttttagttgaggatgatgactttgaggatttctgatcagtctcgccaatttctgtgaacagtcgccccaaccagcattcgtggtcttgatcatcaacaatttcaaggagttccagtggaaaatgtctgtcttcgcctccccccgaaaatctctcaattatacatggcgcataagggaagtgcagctttatacggtgccgcgcataaaaatgagcagctacattgatgttgaatggtcggcgcaaatgaccgtatgcgggaaggaaggctgccccttggtccgaaattccactgacaaaaaatgttttccgcatcccattacggtcgttgtatgttgtacgcacttttcgtccaatcagatgtttcagtacaatgctccgatcctcggggtgattgagccgatcgcgcaacgatttgacagggcagttaagcagttgagcacagaaaacgctgacgagcaccatttcagcaagaatgaatgttatgacgactaatttcatttttatatacgatcaaaagttgggccacgcccatcatttagttcctgattagccccgcccactctcacctatataattcagctgcctaaaaaccgaaatcatttcaatttatctgtccaaaccaaaatcatccttcattaattcaaaacaccaaaattattttatacaaaatgaagagatccgctgctactctttctactgctgccgctccaaatcagcatgaaaataaaactgcgcccattccgactcaagtggaaactgaaccagatcatgagacaaaggggccgccgccacaaaaaagcgcgcggtggaggaccgagatttgtggaaattagcgaagggaaaatatttgcttactacatacctctgcccagggtacatgtaacatatagtctaaattttttattt

SEQ ID NO: 7357 - DNA, 1738 bp, Heterodera glycines
acaagtgaaggacattgggaggaaagtaccgatttctacggtacttattcaccgatctcaaaaatttgacacttaacagtacatcccgcatcgaattactggagaattgggctaataatgaagtgagaattcagtttcatttaactggttttaatttatttttctataaattttagcgctattctccatacacatcaaaccgggctacggtagtgtcgccagccatgttgcgtgagacgtttgaattgctaaatcagcagcaaaaacaacatgaggcaattgcaaatcgagttctgcgtcctggaaatgaggaggtggccaccatagcagtttcgtccttaaaacgtgctatggcttcgtcctcatcatcatcatcatcaccagcagcagcaacatcagtcaaaaagtcaaaattggtctcggaagatgaccggggtataattaatgtgaaaaatataaatgcaaattaataatttctaagaagtggcagctcttgcactggcggcgttcacacagatcaaaatgcgcttggctgaagacattgagggcctggagatgcgcactcgaaagcttgaagaaggtgcagccgcgacaacggaggcgcagatggaaacgatgcgccaacaaatggagcaaaaatttcgtcaaaatctgctggaagccgagcagcggattgatcacaagtgggcgacgatgctgagcaaagaacaacaaagaactcagcgaattgcggcacaaagcgcggcggtgattggacaactgatgaataagcgactggcagaggggggagaagaaaaggaaaatacgagagagacagaggaaaaaaagttgataataagtgatcggtgcaattggtgcttagagaaaggccagtgttatttggagttaggggatgcggacatgtgtttagctgtccaccgtgcactattgcgataatggccgttgacgagccaaaatgtctgatttgtttccaaaaattaactgatttggaatacttaggatcataaacgtgtaccgaatatttgctttggatcctaattattttaaatgtttgtactcctataattgtactcctatagtatttcctcatcatcacttttttcattgcctacagtaatcgttaacattttcatttctcattaactaactaaatttgtcacatttatttgctttggatcgcatgaatttacaatatttgtgtaattgtactcctacagtatttcctcatcatcacttttttcattgcctacactaatcgttaacattttcatttctcattaactaaataatttgccgtctttatttgaccacactgtaacccataaaaaatgtttgccatctttatttgatcaaacagtatcccataaaaaatgaattttcatgaacaaatcccaaatttcgaccgttttgatttattgaaggcaaaaaataataaaaaatgaaaataaatgtgaaaatgcataaaaaaaaataaatgtgaaaatacataaaaaataaattattgttgttgttgttgtgatggtggaaggggtggaggcgggaaggggaaattgaaaggcatcatcatggaaaatggcatcatcatcatcatcggaaacggcatattcagtgaagtaggcacagggtttgctgtagcagcaggtggtcgtggatgagcaacagatcgctccttcgcacttcgcttggctgcccccgaacgcggtttatgaaaatttttttttttttattaaatgattaa

SEQ ID NO: 7358 - DNA, 2417 bp, Heterodera glycines
ttcttttctaataatgctttaagtttcttttatttttctttaattttaattcttttttccatttgtaaattttcagtccattaattcccaattttacgccaatcttttgctcaaatttattccaaatttttgccgaatatttcccctttttcttaattccttcttttattgcgtgaaatctgtgaataatgccgcgtttttgctgatcatcgaattgatcattctgatcaattaattcattttgataattttgattataatttgtattttgaacactttcattttcattttcttccattttttcattgtcccatttttggccaaatatttcagcaaaagttggccgtattttaccattcttttcacataaattattaactgataaagttttgccagttgaaatgattatgaataagaatacaaaaacaaaaataagaaaatgcatctgttaaaaaaaataattatattttaatattttttaaaaatatttgttataaatgataaataatttttttaagttggcaaaatccattaggaaagaattgttaataaaaaaaattctaatgaatgttgagaaagcattgccataaaagctagcttaatcaatctgtgaaactgatcttcggtagaattaaaaaaattcaacaaataattaattgataaataataattaaaataattgagagcaatgaatttaatcacaattgaatttgcattattttttttgtggcgtcctcattgatttttttaatccatttaaaaatatgaaatttatgatttctctattagcctgcaaaatttcgaaaaatttcgttatgttgagcagaagattaaaaaactggttattcgaacattttttgtcatagcttttttgaacctaaatgaaatttttcgaaatttgtcatgctaatagaggacacttagagctatcgaatgataccaagattgtaggatttagttgacaacgaaaaaagttatagttcaaaaactcggcccaagcgacttcgaccctttcatgaggtgtagagacgcatagtcctttttcattctctaccattccattccattacaaaaggcagacagtggaaacagagaaagaaaattattaaaatagtattggaaaaaacattttctgccgtccgtccaaattatttacctaactccaaaaaagcaccgaaccagtaactcgaaatttaccgggccaaatttggtgcattaaatcccgcagagttccagttcgggaattcccgtcttgcttgctctctaattgtgattgaaaacgctgggtactgaaatatccgaggctctaaaccacgtcgtcattttgtcatcagttttttttcattcgttcgttcacgtgaacaaatcatgctttgcctgaatgatttttctctcctcacaaattacctatgtatgttatgcacactctcgctttttatgtgattcatgtttttaaaattcgtttcataatttcgctttaaatcttaaaaatttaaattttttcaaatttggcatattgaaatgaagaaaaaactggaaatttctatgcttacatcgacgagagaaaacatcaattttctttacctttctttctctattctttcgttaatgtgtaaagattaaattttccctaattttaaaattttatttcaattttttgactccattttttctaaggaattcatctgtaaaaaatgaatttatgttgtaaaaggatattactgttcatcgcaacaatatgtgtatgtccacggttggcaacaggttgagcattttattagattggataggcttggcttccaaggttccctgggcctagtatttgtcaaaaaatcatggcctggagcctactaaaacagggtttttcatttgagacccaagtcccaatgcctgcgtttttcaggccttggtccaggcagtttctgccaccaaatttttcctgggcctgttttttttcatgatacttggccaaagaaaccttgggttttttttaccaaaatcctcttgcttgacataccacttatgccctgacaataatatatattatttctggctctagttaagttagccgtccaaccaatgaccatcctcaatttcttaggccatacattttttatcttctttattaaacccatatattcttggtatcaaacaaaagcttaaagtttagggaatttataaggctctaatacactttatgagtccaatcgacttttatgagtccaaagatattttatgagtccaatcaattgacaaccccgggtttttatacaataactttgttcctgttccaacaaaacctatctttttggtatcattcgaaatcacaaagtctagataatgtaactacactagtaccaaataatacgagaaaacaagagaattctaacatttcaagaaggttacaaacgaaaata

SEQ ID NO: 7359 - DNA, 4222 bp, Heterodera glycines
  unsure (1)..(4222): unsure at all n locations
aataatacgagaaaacaagagaattctaacatttcaagcattttacaaacgaaaataataagtaattacttaattaatcaaatcttttttggtaattccctaaacgctgcgattttatatattttagcttcgttagactttgtgctttcgaatgataccaaaaagataaggtttgttcgacatgaacaaagttattgtataaaaacccgggattgtcaattgattggactcataaaagtcgattggactcataaagtgcattagagccatttataaatgcaagaaaagagcaaaaactgacattaagaaaaattacaatgagaagacacgaaattaatcatttttcgagtatattcaagaataattttttttttgcatgttgcttttagcccatttaaactttcaattggtaccaagaaatatatggatttagcaagtaaagaaaaaagtgatggccaaagaaattgaggatggtcattgattgcacacacaaactgcaacagagccaaattttgtacaattttcgcgtcaaactttccattttaaatttcagcaaactcggcaatggccatcgaccttggctccgagtacatgaagatggcattgatcaaaccgggcgtgcccatggagacggtgctgaaccgcgaatctcaacgcaaaacgccaatggcactgaccatccgggacggggaacgcttcctgggcgacacggcacagaaaaaagtttgattttaatttttaaatttgctagtgcttgtatgaagtctctcgtcactctcttttcttggaccaaagcttttgtactacttgatttttagttcttttctgggtcactctgatcatgaatatggcattcattttggccaatacataacccgaattcgaatataagtctaaaactcgaaaaaaaattttttttgcaatccttttttgtttcaaaccgaaaaattctttgaaacgtaacaatcacaaataattaaaataaaacaaattggtactgagttgaacggctcggactttgttcatttcatcaaatggccgaatttgtggtacagaaaattgattttgaacaccatccactaccataattgtttggctttcttcaaaaaaactttttcgttttttcgctaatttttttgccatattttttttttgtttttttaggcacttggcatgccacggcacacttttgccttctttttggacttggtcggcaaacaaatggacgacccaattgtgcaagcgtttcaagccgaattcccacatttgacgctgaaagcgcatccggcacgaggcactgtccaatttgagacggagtgagttggggccaaatgagggcaaaatttggatttttaccaggcaatttgagtagatgttgggatgaggttcgataacaacctattagcaaaaaaaacaaaacatttttttacggttttcattttgaagcgttgcaaatttcgaaattttttagcttgccaattttttttttgccattttcagtgccggtgacctgtctgtggagtgtgcacttggcatggtcctgtccaatgcgaggcacgaggttcggctctaatttggccaaacaacacatttttctatatctttctcttttttgttctctgtctcctcggggttgtgccaaattccgtgcctttttgagaccgggtgaattacaaatttaatttttttttgtgtgaaaattcaaataaaaatcccggatgcatgcattttgcaactttttttttctgcaaattccgctgatttttaatgatccgctggcattttacacatttagaaaatgtatatttttcgtcctgggttcgctttttctctctttcctctctctctctctctctttctctttctctttctttctttccttcctctctttctttttctctctctgtttctctctcactctctcatctcccttccctctcaccatctcatttcatctcggacattggtaccatcctcttacatttttcctttctattttctctcctctctttgtctccctccccccctctctctctctctctctctctctcgtgacatttccttttctctccctaccattttctctgtctcaaattattttcagtgtgtataattcattaaaatttgcattaaaaggtggaggcatacgctggccaaacggtgcgcgacgcagtgatcacagtgccttcctatttcgggtagcgcattacgaaagcccttaaaattgcaattaatttggcaaatgtgatccgccatttttaaaggctcattgaacgggcggcggttgaagcggcggccaaaattgcggatttgaatctgttgcaattgatcggctccggcaccgccgccggactcaactacggcgtgtttcggcacaaagaaatcactgaacagccacaggtaatggtgttgccaacgccaacaaacacaccagggtgtggggctagtttcgtaggataaaaagcagaaaaatttgctgcattacagaaattccgacaccaaaaagtgtctgtatgtggattttttaaaaaaatttgatttttttagtctaaaaggtttttgaaattaaaatttttttgtatgaactgccatttaaccctttgtatttggcactgaaacaatcaaaaaaatttttaaattttttttttgattttttcacccccccctttttccattaaacagaggctgctcatctacgatgttggatcatcaaaaacgctggccactattgttcaatttcggcttgtcaacaatgacacggaagcagcaccaccgctaccagcaacagcaacaaacagcacaacgaccacagcgaagcgaaaagcaaccacaatttatccacaagtgcgtcgcgtgtggtttggcaggcctatagatttcaaaaaaaaatcgagggaggcaggttcttttatggtattcccaaaccccgaaaaatctttaaaaaatcattttgtaaaaagattttaggaaaaaatttcgaatttttctaatgcatttcaggaaacctttgagaaacttcgtaattcatgcgatgcattataaaattttgaaaaaatcacaaattttcttttaaatttttttacttaaattttgtttaaaagagttttaaggttttctttttgatttaaaaaaattctgggagagggtggggtggacggtgaaaaactgagaattccattattttccgctcctgcatttgttgcttaaggtggaaacgctcggcgtcggctacaaccgcacactgggcggtcgtcagttgacacttcgactccgggaccaccttgtccgcgcgttcaagcagcagcacccgtcaacgagcaataccgttgaacagaatttgagggcaatggccaaactgatgaaggaggccgaacgcgtcaaacaggttgaattttcagaaaaaaatattagaaaatttgacgaaaagaaaaaaaatttttttttttgattttcagcgacttgttttttttgggaaacatagccagtgggaatgccttctcggtggcgcctatcggcaccgccggtcagaaaatttgaattttaacgacaaaattcaaaaactagtacttttttttggcggaaaacagctacaaaaatttctgtttttttctctcggtcgctcacattagagaaaagcttttttggcccgaattgcaaaaaaaaaatcttcgggttccccctccgaatttttggtttttggttacgacttgaacatggcatcttacaataggagtaagtatcgcaattcctggtaattattcttatgatatttttggtgatttcataaatacgctcttttaaaacccatagattttgtcggcaaacacggaccattacgcccatgtggagagtgtgtttgaggaccgcgacttccgcgtcaaagtcacccgggacgagttggaggcgatgttccaagactttgagcaattccacatggagcccatcaccgacgcgttgcggatggcccaacttacggtggaccattggacgtgttgtgttgatgggtgccggcacacggatgccacgcctacagaccgtccctcgcacatttctccnagggggttggttggcactatttaaacgattgccagagtttggcgacatcggccagctttttttgtgccattgacccattcattttgacccaaaattncaagcctgtcagaaatggggaccggattaaaaaaagcgaaaacaatttttgggcagaaatggaaaaaaa

SEQ ID NO: 7360 - DNA, 6843 bp, Heterodera glycines
agggggaaatttaaaatttacacaatttccttagtgaaatcaatataaaattcaaaaaattttcccggcggcgcctatcagcaccgccggaccgcccgccacccccttccccaaaagccgagacaccccccatgtcccaatcgtccgtcgtatggccattgggctgagtttttaattgatatcaagcaaattaattattgaatttttcatgaattcactactttgctttatcacctttctccaaagttccttccggcgttctgacatttgaagaagtgcttgtcatttatcagtaccattcccatccggatatctatggagtgcccgaattgtacccaatgaaatttctgtgccatggacgtgtttctgattggaacattgccaagggcaacagagcgacatttccaatggaaattgagaaattgtcggaatttgcacgagtgaaagtggggagtaaacgttacagcgatgtcgttcaaataaagggattccaattgaaaataaaggcacaagttaaaatgaatgagcaaaacccagcgaaatgtttgggcatttatctttgttgtgccgcttcagaagatgcagaaaaaggtgattcaaaattaatttaggtaaatggtttattaaatttattaaaatgaaaattggagttgcaaatgttcggcaatattttgaattgtttcgcaaaagagcggcacgaacgatttaacaaggaaattaagttccgatttgtttaatgaagataacagctgtggatttttgtatttcattaacttttctgtgagtggcaaattagcttttttttaattgctcagaaattaaggaattaatggacgtgaccagaggattttacaaaaaagaggaggacaaagtgacattggccattgattttagcgtggaaggacgaggaagaatggaatcagaccgagactcagacaaatccgccgggaaaattgtgatggaaattggcaaattgtcatgacggcaaagaaaaaagtttgcgcatttacctctgttgtaccgcttcagaagatgaagaaggtgattcaaaattaatttagatcgtaccatgtgattatttggagaacaatggcgattctcaagggcaacattgcccaactgtcctctgcccaacttcgtcagcaaattttatccccccccctactgaccccttgcgttcggcgtcatcatgacccgacccaactgaccccttcgccctcctcccactcatttactatgcttcctatatacaaatcatcaaaataattcagtttcgaaatatttctcaaataaaaattattttttttaaggaacaagtaaaatccgtggttcaaataatccgtcagtggacaatccatcagtggaggacaatccgtcagtaatggataatctgtcagtggataatccgtcagtggacaattcgtcagaaaattttttttttgagcaatgatcaaaaattttgcaaaaattaatattaaatttaataaatattttttaatagattcttaacatttctagttacttaacattttaattaattgaccatctcgagaaattaccatttaattcttttaaaaatgattatttcataattaaaaaaaaataaaacaaattagtaattcacattttaacgacttaattaattttcacattattttaaataaatctggggtttttaaaaataaatttgcttatggattaattagtgacggattgtccactgacggattgaccactgacggattgtccggaccccaaatccctccgcagtcatttcttgcagtaattgtcgggttcatttatagcaacatcttttgtgaggcgacggcattggtaacgctgaccaaaacgcaataacaattatttttccaagtatgacatgttttaacagtatcccgcgggattaattccacaatctcacaaatttcgaaatttccaaaaaatgcaggattgcggactgggctcatccaataaaatcctgcgcggtatccaaatcccacaccggtttcatgacaaactcgtacaaaagacgctttggcctaggtttgcctgggcctaggtctaagcataggcaatttcttactgctatgacaaaacgaaaaaagtaatttaaaatccaacttaaaattcatacaaattttattttaagcgaatttaattttctattgcatcgcacgacgaaaaaacttttctccgccgaccattgcttaatttcatctgccacatttggtgaaaatcagcaccaatttcttgggtatatttgagacagaatttggataacaaatttcggtcaaaaattttattgctttcctaccgtttcgatgttttggtggacaaacattttgatggcaaaagcggattaacatttaaaataatatgaatttgccaagattgatggactaaaagcttgtgtgattgtgggtgagaatttttcgtccgctgctcaacaaaatttgctttaatctccttcagatagattaattcaaattcaaaagcattttttaaatttgcttgaatctccttctgattaagtactttaaaaaatgtaaagaattattaactgatgaaagtctcttcctttggcgacatgaaatttgggcaccagaggaaaggggatttgaataaaaataaaacaaaataaatatgtaaaatcttatataaaaatcatcaaatttattaaattttaaaaccctcgtgcttaaaaatttatattttcgtgaaaaattaaaaatgtaaatctgctgacaatcttattatttagtcaatgtgtccgtgacattcactggcgtcgcgataaaaaaacaaaactcatttgtcagtgaatggagtggcgccccgtcactttttgtgctgtggtcaaactgtttcaaaggccgccgtcgccacactgcacattcgtccataatgaccaatcaatttgcaaaaatagcgcggtcaaagctgctctccctccctatccgcggtcagtccattttccatctttttttccattattattttgagtttcgtgctttaaattcccagaaattattttgatcaaaattttgtaatcataaatttaaattacgattattatatgtatttaaaatctttgcatttttatgtatttattgtcccaaaacccacaaaattttctgcgcgcctcacccctgtgatctgtatcgcgatttaatatattagaacgaaaaaacaaaaattagtgagcaaaaacgagatacaccaattgaaatttgtctttaagtgttggagttttcctcattccattgagccgtctccccaatttagcattgcttcattttctattggctaacccatatccatttattttatttcatatgtcatgaaacattatccccctcaccgattagcaatttttttttattaatttaaaacttttgatttttttatttacttgtcccaaattgaaacaaaaaataaattaaacgagatttaaaattattctttgtgctcatctcttatcacattcaagcaatgtttattcaattacatccaaattaatgcatttaaatgatatttattggaaatgaatgaaattatgagtaaatgacattaaaggaataggagggaacaattattaattttgatattaaaattattaataaaattatgattaaatgattttaaaggaatattaagggaacaattattaaatttggaattaatattattaatgaaattatgagtaaatgacataagaggaataggagggaacaattattaattttgatattaaaattattaataaaattatgattaaatgattttaaaggatatgaagggaacaattattaaatttgttattaaatgttatttattatactccgtatcaaccctttaattcgataattagatcttggtcccggcggcttggccagtaaatttcaatgcctctggcttaataattttttattcattgtctgcgtattatgtagtatgtatagtttcgttgcataaaatagagacaactccccaattttcgtttgttaaaactagagcccgggcgcccgccgggcttttgccgagcagcccgccgggcacgataaattttcaaacaacaccggtcccgggccgcccggcaaaatcgggttttttagcttgcccgcccgggccctgtcattttgaccgggctaaaactggcttaaatttcgccaacgaaactgcccaaaaaattaagatttttggaaatttatacaatttcaactgtcgaaaaatagatttttctttgcggcgcctacatataggcaccgtcagagccaaaaatattcaaaattagtctaaaattagcaatttttggtgaaatctcttaaatggatgcattacgtttatttaataatttattattattaaatattttttaaatattaaactataatcagaactggagttttatgtgccaaaaaatttttaatcaaaaaatttgttaaaataatgctcctaattatttgccagattttgaaattcataataaacaatgattttgacttaatttcccgatgagatttttgtcaattaatattttccacccaaattaaattatttttaaattttcagcaatttgtcaaaaaatgtgaaagtttttttgttgctttaataagaaacgaatcatttttggtgagtaccggctaaattccttcttttttttgccggtgatgattttaaaataacaccagggattcgtatgaaattttcaaatccttttttaaaatataatctgtggtcaaaaagggcttttgtcatctaaaaattgttggtttaacttttgaacatattaaaatagcaacaaaaaatcctagttccgttaaattatttttataaattttgtttaattattaaaacacaccggaatatgcatgcaggaaagaagtgcctagctctgtgacaataatgcacccagtgcgctgcgcgagactaaaatttagtaattaaaaacagctaatttctgtttttcaattcctgcctttctttctgcgtagtgttaattttaatggaaaataagcgcaaaagaaagaataaatattcgttgggcagttgtgcttccaaaatattcggcaacattcttcgccggaagctgaaaataatccattattttttaaatatatgaattattaaatggaaaattgcccttttcaaccccgtacattatttaaaataaaatttgcgaattgttttagcaactctaaacaataaattagggatggcatttttatgcaaaaaatcacaaaacggcattaaatatgcacaaaaacggcaattaaaattttgtcattgatttttatttaagaaaaaacaaaacaatttgcttttcatgcttatctgagcgtgccaagtgaacagaagtttacaaaatgccatccctggacaaatggtttttatattcatatgcccaattaatgtttttgtccattttgacactggctctaactgcacccaaatctttgtaaaaacaaatcattactgtagttcaatggaaacggacgacgtcttaaattccaacaaattgcggttgttaaaatattcccagaagtgcagatcacatgctaatgttgccctatttcttgccctggcttcagcaacaataaattgccaaattgtaatctcttcccgaacaccaaaattatagcgttgctcagggcacaaattcttaggagttgagttgctaaacaaaaaatcagttagcgctttctacaataagctctgctgtctcaagctcaggtagttgcatggagtgctgggacgtttcatgagcgctaaaattatcaaagagccgaaaatcgcatgtgatctaagcctagcaaaaaatggtgcaagtaaaaatcgcaattacgctcaaaaagctcctcaaacaattttagcgcttccaattccttctacaatcgcctttatacatcccattatgagcgctaaaattatcagagtgccgaaaatcgcatgtgatctaagcctagcaaaaaatggtgtaagtaaaatcgtaattacgctcaaaaagcttctcaaacaattttagcgcttccaattccttctacaatcgcctttatacatcccattatgagcgctaaaattatcagagtgccgaaaatcgcatgtgatctaagcctagcaaaaaatggtgtaagtaaaaatcgtaattacgctcaaaaagcttctcaaacaattttagcgcttccaattccttctacaatcgcctttatacatcccattatgagcgctaaaattatcagagtgccgaaaatcgcatgtgatctaagcctagaaaaaaatggtgtaagtaaaatcgtaattacgctcaaaaagctcctcaaacaattttagcgcttccaattccttctacaatcgcctttatacatcccattatgagcgctaaaattatcagagtgccgaaaatcgcatgtgatctaagcctagcaaaaaatggtgtaagtaaaatcgtaattacgctcaaaaagcttctcaaacaattttagcgcttccaattccttctacaatcgcctttatacatcccattatgaacgctaaaattatcagagtgccgaaaatcgcatgtgatctaagcctagcaaaaaatggtgtaagtaaaaatcgtaattacgctcaaaaagcttttcaaacaattttagcgcttacaattccttctacaatcgcctttatacatcccattatgagcgctaaaattatcagagtgccgaaaatcgcatgtgatctaagcctagcaaaaaatggtgtaagtaaaaatcgtaattacgctcaaaaagctcctcaaacattttagcgcttccaattcctctacaatcgcccttatacatcccattatgacgctaaattatc

SEQ ID NO: 7361 - DNA, 1364 bp, Heterodera glycines
  unsure (1)..(1364): unsure at all n locations
tgaagtttaattttttcagaagtctgatatctgatcatccaatttccagaacttgatttatggcgactttattcagaatcggagtttcaatttcccatttttaagacattaatgtttttcataatgtttttttttcgcggaataatcgggtccttccttcactgaactgataacacaaaaaatcaaatttttatctgataggtgaaaaattttaaactctattaaatggaaatttcaaaaaaaaattaataaattaaaaaataattaaatttgaatgataaaatttagtgacgaagaaagttgtgcaccacgtgaaggccattgtgcacaagaccagttcaagtgccatacatcgggcatttgtataccaggcacatggaaatggtaaataaatatttgttttaaaattattattaattgaattatggttaattcaattaatttttctgtactatgcacgccacctacaatgtaaaacacatcgctcaaatttattttgatgcaaaattaaaactgatttcagttttctcaatttcttcgagtatttttttagtaataaatttttttattattttgaaattggattttaaaatacaaaaaaaatattaataaaattcttttaaaaaactatttttaatttcttacaagaagaaaaaagtcataagaaatttaaaaaaaaatcttttaaagtaattttctgttatgaatgtacaaattaataggtacataggtatgccaaaaattctttaattaattgattatgtcattattattaattacagtgatggccaattggactgtgacgatggaagtgatgagccccgagcgacctgtgaggagatgcacagcacatgccccgctggtcatttccggtgcaacaatggacggtgcattttctcggtgactattgaacaattaattaatttaacatatcttaatttatgttaggtttaattttattcaaaaaacatcaaaattaaaattatttttttaattgcttaaaaaaatttgtaaatcaatttcttaacaaaaatgcattaaaaattcaaaaatttcccggaacctccattttatcttatttttttaaattttcgatagccttttaaactccattatcctgcaaaatttctcaaaaaatttctttaacttccaaacaaatttttggagtttaaatttttgacaatttgcagtttcatcttctggttttctgcatttttcagcttcgagttctagttttactaattgataagagtcattttggtaattaattccaaatttccaattattatttttcatttanaaatacatatcagttaaaagagacaaatcatntacattggatcgagatgattatgtgcccaatt

SEQ ID NO: 7362 - DNA, 6902 bp, Heterodera glycines
  unsure (1)..(6902): unsure at all n locations
gatgaaggtggtcgatgctcacgcggtaagcgttgaaaatcgaggcatgatcaaaaaggatcagttntgtgatactcgagattctcgagcgatttatcagtctcgggtctgatcatgtttatcacattattgatctgattcgattgattattgcagatttgtgtgtggctgatcgtgccgggtgccaatacaaatgccacaattcacccgaaggaccaatctgttcatgtccgttgggcgaacagctgatcaacaaggtcaatcaatttaaaattttggcaaatttaaatgacatcgaaatattatttaattttcttaaaatctcccatctcgtaaatgttgaggatggcaaacaaagttttaaaaataattactatttccaaaagcacgataaattaccgtaatgagagtgaattttaatgagtttccattaaaaatatttgctttttttagacaaaatgtgagccagaaaatgagtgccttgacccaagaacatggtatgtaattttgcaaaaatattacacaccgtatgccaataataatactaccgtattgtgtacagttctcaacactgtacggacgagaagcacggtttccggtgcagttgtgatccggcatatgagcttgagccggacaagcggacctgcaaggtgacagaaaaccgtgcggacatgcgtgtgtacgtgtccaacaggaatcggcacgtttttagtggctattggctatgttaattattaatttaaaaaatcaatttaaataattttattcattttctttttttttcataaatttcttccgatttagcatttattggtcggacagttcgctggagaattggcgcacttttgctgcacaagtgaagaaatgattgattaatataataagcatatacaaaatttcaaatttttttctcgatttcaaatagaaatttttaaaattaacaaaatttattttctttttcaaataataaataatttagttttttgaacctttttaaagagaaaatgcaatttaaaattttcttaacaaattttgctaaaatttctaaaaaaattttcatgcggctcctatcagaatcaccaaaccatcctttgatttttttcaaaattttaccctaagttttaaaattttggaaaatttaaagttttataaaaaataaaataaaaattgagttttgccattaaatacaatcatggtggcacaacatgcaggtggagaatgcggtggcattggcctgggactcagtggacgaccgtatctactggtccgacatccgggacaaacgcatctacagtgccacccggaacggcaccgacgtgcagacattcatcggcatcgggctggacatcacggagggcattgcggtggactgggtgggccgcaacctgtactgggtggactcctcgttgaacaccatcgaaattgccagcctgcaaaagccgggaggtgaaatataaaaaattcaaaaagtgccagaaatcgtgactaggcatgtataaataaattcagtgttttcttggcctttgtccaaaaaatagaggcctagagataaagcatgaaaccatagaatttaaatccctggatccagtgtgacatgcctggtttttcaggacctagacacatgcaagcctacaggctttttttcaaacttacacattttcaagaagaaagaaatcagaaatttttttaaaaatattttctgcgatttttaggaaatttttttgaaaaacttagtaattcatcaaaaattcttttatctttctttatatgcttaatttgtttttcgaacagttcgtgccgttctgctccatgacgacattgatcagccccgagggttggccgtcgacccgcgcgtggcactgatgttttggaccgactggggccaacacccgcgcattgagcgtgccaacatggacggcacgggccgaaccattttggtgaacacaaaaatttattggcccaactcaattgcgctcgacttcaccacaaatcgtgtgtattttgctgactcaaagctggactacatcgactttgtcaattatgacggaaaaggtacggtgtgtgaaagccttactataatcaatgagttttccatccaaaatcaaaaacaaatggattaggattaaaaatgttattcttcaagacatatgacaaatcaggacagattttaaaaataaaaatcatttttaaattgactaactcatgctttttcgaaattaaagttacaacaaaaattaattgcgaaatatttggagaaaaatgggggggggaaacagaatatggaagaataaagagaaatggtaattggaaaattctataaaagaaaaaattaagcaaaggaaagaaaacagcaaaaaaaaaagagaaaagaatggagaaaaaatgaacgaaaaatcggatgaaaattaaaaattgaacgacacttataaacggattaaagagttttggctttttcaacggcgccagaattaagcaaataaataatctgaagaaaaccctgtttttttttttttttgcaggtcgtacccaagttattgcaaacagcaaatttgttcaacacccacacgcaatgtcaatctttgaggacttcatttactacagcgatcggtgcgtttgagtttgttccaagttatccctgaaccctaaatagtgttccacttttttttaatcccgacatttataccaaaaatttccgtcccccggcatctctaatatccggcatttatcccttaaatttcggtcccagtcaaatctccgaaaacccgggaattttttaaaccgaaatccagtcccagaaattttatccatcaattatctccaaatctctgacattttcccaggcatttttccataaaatctcagagtttcagaatttatccctgtcatcggcattttaatttccaaaagctgggatcaaaccctttttcattcatgtcattgattacaacaattcagacgactgcaacgtctgcaactgtatccgaaatacccgaacggcaccaaccaagattatccgtcccacacattctccaaggcacttggcgttgtcactgttcaccccgttttgcagccaaagctgatgacaacaagcgcatgttccgtctcgccaatcccatgctcgcacatttgtgcgcttggcaacaacggcacatacacatgcatttgccctagcggaatggtgctggacacggacaagcaccgctgcgttgctgaccatcgtccgttcctgttgatggtaagttttcttggtggggaaacttggtgtgatcggacaatgtcaaaaaaaaaaaaattttttcatggcacacacacacacacacttattgttattcgacattctcggtcaggactcgaataaggtctctctgttttttggtcttgactcaagaaagtcctgaatattttggtttcggtctcgagtctcgacttgagcaaaggttggtctcagggccaaatatcggtctttcattttggaaagtttgtagtctcgaacggctctaataccagggggaatggcttattaaattcggagaaatctttgttttttagtttttccatcagtttctctcaaatctttttttcaagtatacagtatccgctttgaacttattaaaccaccgtaattactgcaaaataaaaaaattgcctaggtcacgaaagtcatattaaaattagatggattcgagggctgattatttcaaatattactaaaaacaaatttcacaggtattcaaaacgatgatcaccggcacatcgttggccggcggcgcaaaagacagcacggcaaaacaacgtgccgaaatggccggcattacaccaatcagtggcttacagaatgcgcatgatgccgactttgatgcccaaacacagaaattgttccacctggagcatggcagcatggcaaggctggtcatggccacagtgatctcggatgcacgaatttacaaaagtgggtttcttggagtgatggatgcttctaagtagtatttcggcactctaaatactgtattgtatcaggaaaatatggtatgtgttgtgtcgtgcgattggcacaacaaaatattagaatacaatatttattcaaaaagtaaaagtggagaacgaagtgatgagtcagaggaattaatcaataactggtgaaggagcagatgccattgctgctgtgtgtgttgacaaaatgaatgaataaggaaaagaccatgagtgaacgaagtccacttattaaatggacaataattgggtgatacagtataacaataaatgatcatcatttggcgtgaatttaaatatataataaattcactacacaacagtatgtatgattcagtaacagaattaagtaacgttttgcactacgaaacgggaaataaccttatgatattcaggaatattattataatagaggaatacaataatatcacgaatgggaatacagtactattacaatttgtatatttggatgaccaagaaatattagatttccacctaaactgttgatccaggcctcaatttcctgggtcctttccaatttatttttttcgtcaatcaagggttttttaggtctggattttcctgtattttttctgtccaaaaatccaggcctaggtccaatatttgtacaggtccaatctaggcttttttgtctaatatttaaataatttttaagctgaactgctgacaaacaatcgcactcagctgttgacggctcaaattccgaatgacccattttgcatggcgtacgattggaacgggcgcaatttgtacgtcggcaacaaaatttcgcaaactatcgaagttgtgcggacggaaggcgaacaggtggaaattaaaaaatttattaaatatttcatatataaaatttgtaaatatttggaaaaaaatggttctaataaaaactaataatagttgaaataatttctttttttttttttgttttcttcattaatttataaataaattaggaaattttatataaaataatttgcgaaaacaaaatctgatttaagccaatcaaaaaggattcttattttcaaatatgtcctgatttttcagcttgtccttcggaatatgaattttataaaaaaattttctgattcaaaaaaggttatattgcaataatattttattgattttcaataaaaatcatcctctccctctgatcaacaacagttccgggcggtgatcctgcacaatgatcaaacaccgaccgcggttgcgcaacccattgccattgcggtggattctgatcggggcctgctgttttggcttgaccaaggcaagggcggtgtggccacaaaggtggcacgtgccgacatggacggcggcaacccattggtgttggtgaacatcgacctggccgagctggaccacctggcgctggacacggtcaaccaccgggtgtacttcacggaggccaaagctggaagataaggacactaaaactaaaaaaaataatagcttttaagtcaaaatgcccatttcactcttaacagggacaaattcaaaaaaatttaaaaaaccaatttatacaagagccatttcccctaaataataaattattaaaaaatattttttaatatgtacttatttcgatgatttaaaaatttcttcgttaagttgtgcgtttccttgaattttatgtccttgaaaaaaattttttaggttttttttttgcaaaattaaaaaaaagttcattcttttgaaaattaaaatcggtgaataaattgttaaagcaattttaatttcattttacagaaaaaaaaaaattcttattttaaaattttataccatttttttgccatttttcgctttttttgccaatgttgtcattatttaattaaatatttttgggcttttgccactgaaaaccccacacctttctcatcaataacaaaaacacttaattaagggtttttaataattttttcttattcttttaatttttaatgatttgtatttttgcatttttacgatcaccagcgtgtcgtatgaaggacaggacaagcactatttgctgaacgatccggcaaaacagccgcgtgccattgccttcttcaacaaccgcattttgtactccgactcggcatttgacaaaatatttgccggcgaatttgttggcgatgagcaaccgcccgaattttccgaattccgtgccaatgttgaacagttgaacaacctgaaaatcatccaccccagcacggaaaagcatccttggtaaaaaaaaagaagaagaaaatttttgtgttatttgtttaatgtccatggaaaattacttggcttttatatacaagggggaggggttaaccaaaatttttacatttaaaaattcaaaaaaaaaaattggggaaggagggccgaggggggggggggcggcagtgccaacaattgctgccggaagattttgaaaattttgctacgatttattaacagacttccagcaaaaatgtcaattttaaaatttttggaagtttgaatccgtggtgccttagaaaatttttggaattttttcaagaaaatttacttcttgatttggttgagtttcttgcctaatttttaaaataaaatcagaatccctgataaaattctgacagagggtcctgtctttttagggctctactgtcaactaatagccatattaattataatgggcaattaaattttacggataatatatgctatgaaaaagctaggatgagaataatgccatcatgacatgaacaaaataatattattgtcttcttccttacaattttttaccgtaattcatcaatttgtacaccgactttaccgtatcctccacccattttttaagccatgaaaacaacggtaattgtgatcagctctgcattcctggacagcgcggggaaattcacatgcttgtgcggtaccagtttcacgctgga

SEQ ID NO: 7363 - DNA, 1332 bp, Heterodera glycines
attgattttggctgtctttgtccccccgggcgctttctgttcatcaatacagatgagtattttactttatcataatgtgtacttcgtcgtgtgttaataattaattgacaatttgatgatgacggactagcggtgaagaagaagaagaagtggccaattggagcaattagaacattaaaacaattttattatttgttatttttttatgcaacaaatattaataaaaatatatgtttttatttatttatttttattcatttattttacatatttttggggtctattttttataattgaaaaccagaaatatttccttgaaaaattaaaaaagagccccctcccttgaaatactcccctcctcctttgagtgaggttgaaaaatagaggcctaattcattaagtattcttaatttttaatattctaacaagaaaaaaccaaaaattcaagatttgttttttacatttcattttcaaaaaaaacaatttttttttttttttgagaaattcggtttttttttgtaggcaaaaacgaggaaaatggcgggggggggggaggcaaccagcattcacaacagatccccctgattaaccgaatatattttacataaaaaaatattttatgccaaaaatagtcaaacaaatgtctgacgaaattggcaacattttgtcccattacaaatgccaaccccaacaacagtcttcgaccgctgattgtggtggtagtactgtttcggcacgacttatgcctgctgatggtcaaccaccagaagtgccatcgtcgccggttgtgccattggcattggctgcagcacccattgacaattccttccagccaaagcatttaacagcggttgccaatttggacgatttgtcgggcgatgaggagggcaacttggtgcgcaacttgtccgccacggtgtgtatgtgcgtgtggatttggcggtggggttcaactgagccccgccaactgggccccaaccaactcgggcttccggaccaactgggccccgctaactgagcgccaaaaatcattgcttgacaatatgaagcaaaaaatatgactggctcatggtgtcgagttgatccggggcccagttggttgagctatcggaaggcccagttgaccaagtccgttggtttggaattttggaatttggacaagaaaaaagtttttgtctctttcgaatatttaaaaaaaataaaattcgggaaattaaaaaaaatatgcccctttttgtggaaatataatcatttttatatttcagtttttgtacgaaaacaattataagcacttttgagttccttctggccataacttttttaaatttaacg

SEQ ID NO: 7364 - DNA, 3032 bp, Heterodera glycines
caaatttccgttttcaaaatttgctgtaaaaaattcaaatttgcagcgattggcggaaatgcacgcggaacgcgagacaaacaatgccttgcaaccagccccagcagcagcagcgcaacaacaattagcagcagccggccgaagacggctgtccaccgtatgcgaggatggtacgcatttgcatggaaaaccggtggcattgcatgactcacgggtgctggtactgtacacgggaggtgggtgaggaattgctaatatattcgagaggtgaatgaggaatcattactgtatacacaaggctaactggggaattcttactgtagattgtggggcggagcggtggggaataatattatagtaccggcatgtgagaattattattgttcatgggactgggtcatgaattccaagtatacgcttgataggaattacggcacccagttcgcgagggtttttttgtcatgttaattataaaaaaaaccatttttcactcaaaaatgtttttcaggcacaattgggatgcgcgcgtgccatgatggaggtgcggtaaatttaaatacctaatttttacagtgcaattaacttattaaatagggacacccaagagtttgtccacttggcgaaaacaaaaagagctaataccaatagtacaattctaataaattaagagataaaaattgaaaatatttctcaatgtttgattgttctagaaaaaatgaattcatttcaaaaaattccagaattaccaaaaaaaaaatcactaaaaatttagctggttcgttcttttcatacatagaaaatgagatcattttgtttttagtattttcaaaagttaataattattaagaatctctgaatacccctttaaaatgatccgttgttaaattctttcccaaactcttttttttaaatttatattcattattttcaccgacgaatttttgattgcttttgttcggattgttattttcaatttattattatcactttttctataaaaaactcatttttttaaataaaatccatcaaataaagtagggctttaatcccctttccccgcaatttggtccccgtcgttccccggtttggccgggacccctcctgctgcctataagctttaaaaattcaatatcgcgcatagtttacgcgcctgagcagtactatttgccgcgtgccatccgcgacattccgccgctcaacgacaaggagtacgctgatcggatgtacgcggatttgccgctgaagccgctctgtttgccgcccgtgcacgggatgaacaagcgggtggtgtattgggtaaggacggcgaatgaaatcctactcaaaaaaatgcggaatctccgaccttaaccgaagttcgggcaaagaggattttggcaaaattggatttatccgacttttcagttggtcgaatatgaaccgctgttggattcgtccgacatgacttttgacgattggatacgaattgccaaagtttgtacggagaattgatgatgctcgaccgaaaaacttctcaagatcgaagcactaacaatcttccaatggaacaaaccgaattgtactgcccaaatcgcattaaatcgatttactattgcaaattttcggttttttttgtctccagcggccaaaattgatcagacaaaacgagaaagatctaaaaaaatcgaatcataaaaaagcaaaaattaagctagagttattaaattatttttttaatattagcaaaaaaattaattgaataaaaaggaaaatcgcattatttcttatcacttttggcgccggattcccaaaaagccgaaaatttacaattaagcaaatcaactaccttcaacagataaaagaaagtgatttgggcagtcacacttcgggatgctccattataagcaaataaagatgaagatcagggctgcaagcaaatacggattacggaaattacgggggtttttggacccctgttatgacggattacgggtttctttaattgagaaaatcaccgtaaatactgattacggatttccgtaattgaaatcccagttggatatggaaaaacaaaaactaaaaatactgatgagccttaaaagccgagtccttctcaagtcggaagaccggcgagaagactctcgagtatcatttcagcactgaatgttgaatggcactttaaaattggttaaaatttgcaggacattcgcaagtcgtattctgcctacgacggattcgttgtggtcatttttttacatcatttttaattttatttaaatattatttattaaatttgtatatcaatcaaacagctccacggcaccgacacattggcatatacggcatgcgcattgtcatttatgatggaaaacttgggcaaaccggtggtgatcacgggtgcccaggtacttgaatatatatgggtgcccaatatggacaaaatgtacccagaccaactcattttagattgatcaaataattagatcgaacctaaaaaagtattaataattgtaatattaaattaattattatttgcattttatttccaaaataataaatcataacttagctcaaacttattgaaatttgaactgaataataaagaattatgtatctttgaaatctatttaatcatagattgatttctgaaaaaagttatatataaattaaatgtatcatattttatggtcaaaccaaaaatttcagtacgttttatcgcttaaaattctgcaaataaaataaataataattaaatttacatatcaattaattccaaatcatgtcgtatcaatagattttcatattatccaatcacagttaattcatctcttgggattaatttattttcaaatattttagtaaaaataaacaaatttagtctaaagcgaaaattcgcagattccggtggcagaagtccgatcagatgggcgtgaaaatatgatcggtgcactgattgttgcaggcaatttggacattccggaagtgcgtttttaaacatgccaaaattggggagtgtggaaatgttttctttttaattaattttaggtttgtgt

SEQ ID NO: 7365 - DNA, 2030 bp, Heterodera glycines
ccttttcaaaaaatgtaataaatccaaattaatcccacttaaaacggacttttttcataatcaaaatttttaattacatcctaaatttgggaattaattagacaccgcaccaaaaattttatgatttaaaaaatcaattaaatctaaaaatatttaggcttttgcgcggcaaccgttccataaaggtcgtgtcgttgatcatttgggggttatggccaaaaatggtagtttatatgtttgttcaaggtggacaaccacggcctggaggcgtttgacagtccgaacatggcaccgttggccaccttggacatcaccatcaacggcatggctaaccaatcagcgatttttgggcacaaaaaatttttcaaataaattttcagtgaattatgagtccatttttcgcagtggccaacttcggcctttcactgtgcaagaatcgttgtgccgaaatgttgttgtgctacgcattttcccttctatgcccattgaatcggtgcaatttcaaatcttaaaatttttgttacagtaatcgaatacagtaatggaactgatgtcgcaatttttaaaaaatgccctttggcgctgtgtaaaaaatcgtaattttccaacacttagtattaagatgctaaatttttgaaactttgcttagcccacaggctaattcggcatgtaaagcctttcgagttcatttccatattggttacaaaaaagattttattgttgacttttttgcttaaaatcaaaataatttttaatttgtgataaatgcggcactctccccccttgtgcctatgtgccagtggaggataacgaattaaatttttatttgaattaagtcatttttatttattatttcgtaataattaatttttataaatcaaaaaattaaattttaaatttttattattcttgtcactcatctttatatttaaaattcttccccttcaaaatgccataaaaatttttaaaatttaaatgtgccaaattcttctcttttttttctcaatttccatttttttggtccgcgctttgctccgtccgccaacccgtggcgttgtgctgcaggcgtacggctcgggcaacattccgctccgtcgggaggacattctgcaggaaatccgtgccgcggtccaacggggctgtctggtggtgaacgtgtcacagtgcgccaagggacacgtggcggtggattatttgacgggaaaggtggccaaagttagaggggaaagcatatattaagcctgagcaaatccgggccaaaaaatggaaattttagtctttgggctacgatggtggcgctaggcgccgtcggcaaaattttgaaatttcaatgaaatcttcaaaaaaaaggttcctttaaatttaaacttagcttgtttcatttcaatgatttttcgtacataaatttttaaaagcttaaaaaactactcgataaaaaagtcaaatatttttttaaataaacgataaaatcaaaaaggaattaaaacgaaaatttcagaaaaaagaaaaattaattcgtttaagaaaaaaataacttatataaaagtacgataaaataaagtcaagtcaaatatattttttcaaataaacgttaaaaaccaaaaaggattaaaactaaaatttttcgaaaaaataaaaattatttatttgaaggtttttcctgcccaacttacttttttcctaatatttagaaaaaaagtctattttttcaagataaaatattttttattttaattattcttcatgttttttgggtatcattctcgactctcgcggtcaattaattctcggtctttgttttcatgtctcataaaatttcaactctcgagctgcccccaatattttcggcaaattttgtgtttttgttttaaggtattggacgatgccggcgtcattttcggctccgacatgaccaccgaggcggcgttgaccaaattggcctacgttttggcaaaacaggagtggaacattgagcagaaagtagcggtaatgttgtatttaaataaataatttggatataaaaatgtaaa

SEQ ID NO: 7366 - DNA, 1031 bp, Heterodera glycines
caaataattaaaaaatgaggaaaaatacggcgcattttatgctttttatttggtagtaaaacaacggataagaaaaaagttattccaaaattcctgaaaaatttcgaattttcggaaaaaatttcataacttccttcatattaggggtactggcaatatcgaataatgataaaatccgtaatattaagattatttttatgctttttatgaaaaaaccgatttgtcatttttggacaaaatcttttaagaaatacaaccaaaatttaaaaaaaattttctgtcggcgcccccgctttctcccagaagatatttcctaattcgagacgagaaaaagtcgggatcggtactcggaaagatttggaaatgtatttattacactgttctatcttaaattttttttggtgaacatatttttgattaaaaaattgtgaagttaaaaatactaaaaattataaaaaacatattaatttatatgttttatatgcctcaaacaaaaaaaaagcaaaaaattcataattctcgcaaaaaaaatttcgacattttgtcagacttgtcgacactttgtcccaccctccccgaacattgttagatctgccaagacattgtctaaaccgtttaaaaccccattatccctgctctccgaacccatttacccccaaaccccgcactcccagcaaaatccgcccattttgagcagttttccggacaaatgacctgctcaacctggggctagggggccaaattttttttttaaatgttcgcctcggcgagctctacaataatagccaatagcgccgggcctaccaatccaacaaaccaccgcttcccccggcactaactttttaagacccccaaccaccccaggggctaaagggggtccgcccctttcacttaatgctggcgcgccaattttttttttaaaagacgcggcacccctaagagcatcttttcataagcaacacacaaaaccgccccaacacttgaacatatgcaaaaatcgaaaaagtggcaaaaaaaaccaaattcaaaaa

SEQ ID NO: 7367 - DNA, 5917 bp, Heterodera glycines
  unsure (1)..(5917): unsure at all n locations
tttgaagagcttgagttttatagtccaaaaaatgaccaaattttgccacaaatcttatgtaccgtatatgctctaattatancccatgggggatattttttcaactccctcagaaaaggggggataattagagactgggggattatgatagagggattatttttcaaaacacctcgtagactgggggataattggagactgcgggattaatagagactgggctataattagagcatatacggtatattttcttgataaaatagtgacattctgtcataaaatttcaaaattgtgagtatgaaatcaggacaaaattgggtcactactagagcccgtaaatttcaaatttgcggatcctgttgcaggattggaattcaaaaattttttcaggaccggatccggccggattaatcctgcaaatcatgcattttaaatttgcaggatcccgcgcaggattgcggattcttagaaattttgaaaaaatttgaatgaaatttccaaaaaaatacctgacaagaaattttaggggctggcgagatgcattaaaaaggcgactaagatttttcgaatgggtcagacggtaaaaagagatcggaaatcaaatctattaatggtcaataaatttgactattttttacttttcaaaaaattaattaactgattttgaccaaaaaatgaccaaatgtcacaccttttgactcaattctacaggattaatgtcgatccagtggtgtcgataggcgccgccgggaaattttttttgcaaattctaggtgaaatttgagatgaaaattgaatttattttgattgatttattataaatttattcaaaaattttggcattccgtcttttaacattttcaaagaatgtatgcggatcctgccggatcccgcacaaaaatcaaatttgcggatcctgttgcaggattggaattcaaaattttttgccggaccggatccggccggattattcctgcaatcctgcattttcaaaaaaattcaggattgcggactgggatcctgcaaaatcctgcgcaggatccggtcctgttccgggctctaattaatattgcttatttttgaacaattttaagtttgtgccatatgcaaatttttttaaaacgttataaaaaaaattacatttcttttctcttttcttagcattaaaatatttaacttaaatgtattgaaatagccttaggatgtaatttttaggttttttttcctgagctccttgtggcctggaacgcacgaaaaacttattactgcctattttctaggtttttaacatacataaaaactaaaaaattttgaaaaaatctactttggcgttacaaaatataataaaaaatgaaaatgcaaggaaaaatacacacttaagaatcgatctaaatttttcaaaaaacacccctaagaaccgacccgaaaattttaaaaatacacttgttatccggggttttagaggccgctgatcacgaatctgacatctaattcgaggtcatggaccccaagaaccccatggaaaaaattttcatgactatatatcaaaaaaatttgcaaaacaaaagtgtcccctttttgtttttacttttgataaaattcaaaatcggtaactttccatatagcgccaaatgtacttacatgaacttttcatccctattaatcactaatcatgcttgaagatcattaattaatttatttagcaaataattgctttgtaatggttgaacaaatagttgaatatagagacgatatcactttcgcagtcaaattggatgttttggagaccggcaaagttgttgtgtcgccaaaaaagaatatcggccatcttctctggtgagtaaatttttctttttttttcaataaaatcttaattttaggtccataaaaatcatgaaatacaattcctcaaaacatagtaggcgtaggtttatccgctactatgttcaattcgagcggcaggccgatgggagtcctgcagaatttaaggttttttttcttaagaatttggacaatcgaatgatatttaaaaattaatcgcttttgaacaaaatttatattttgatattttttgaataacaggttaaacaccgttatttattattcagttggatgcttatttggattcatgtgctataacaaaaccggatcgagctcccgaacacgactaccaatacacgtggagttgtgagccgttgcgatttgaaagcatcaaaagcgatgagctgacttggcattctgagtggcgttggatgaacttggacgcacttcgcaatacggaaaacgaatttttggatgaccagggccgaatccatttgtgggcgagggtggacattttcgaactttctaattacgggtaggttttaaacagccctacaactaatctttacgtgtgatttagacgcgctgataagccagacctattaacagtgaatggtcgaactttccgagtgaataaatacgtaatcaaacttcgtgctgaattcattttactatgtttttcagattttggctggcttttccccattttttcgcactttctttttcaaggacggcttcaaagaattccttactcagaacttcgagattcgagaccccgaggtggatgccgacatgtttggtcgtatgctcgacattgttatgactcaagaccaatacgacccggatggtgggtttggaggccatgtttatttacacgaatctcaatctccgacttgacagatgaaactgtggaaggcttgcttcacttagccgacaaatacgaccttgcttgtgtgaaagaagtttgcgagaaattcctcatggattacagtgaacagtcgcgcattttcaaatttcggatggcggaagcttacggacttgtcgccttaaaagtaaggaggacaaaatttttaatctactagtttgtagtgggtttgatcgacgaccgatcctctgtattttattcatttttttccaaaaagcataaaccgttttttcttgcctaaatttgagtgataattaaaaaaatttgcagtgtctgatttttggaaggtgggttgttttcgaaaattaacagtgaagaagctaacacgtttatcccgcgttaaatcggaatgtttgaacatcgttcctctatatttaactatgcattttttgttaccgttcgcaccccttctagcaaattcccccctcttatgctttcctcttacaaattaggcccgtaacaataaaaaggcgagataggttaattgctttattttgtagttaatccatctcaacaatttttttttcattaagggtcaaacattacggagaatggacccgcaggagttttgtgccaattttcttgccaatgtcaacgaattcgccaaactcagcgaaagatccaagcgcacttgggacaggcgcatgggcgacttcagttttggtcgttcttcggcttttccatgttacaactgccggaagcgtcggcgagtgttttcgcccgagccaaacattcatttgtccatcggtgattatacggcacgctcgcgcacagtctcttccactcacacggcaagcattcgcactttgtcccggtcaacttcttacgatggccaagcgagtaacgacgacaattcatccatttaccatccgccaacggaggcctccttttctgcatagcaacaaacgcccagaaccacaaacattgcccctcatagttgggcaccctctgattttgcgtgtgtttttcttagatgcaaagaaagtcaagtcgaatgttcagtgattcatttatttatttctgaaattttgctcgcataattgttcaaacacatttattttgatctaatattccgtattacttaataattttagtgttcactcagaacgagaaaattgtgtattatgataaacgcattgaggaaaaaatttgttgcgactgacgaaggcgcagaaccaaaattgggttagttagtgtataaaataagatcggctaggaaaaagggactcttcgaatggttacttactaaaaaaacagcctttcttttgtacgacttgatttatgatagtattttttggttactcatttaacctccactccnttttgattagcatgcactaatcgtcggacgaacatttctgctaattacccttttcccgctggtgttaacctcgttggagccgaattgcaacggaaatttgccactggcattgattacaacagttgaattttgggaattttctgaaaaaattaccgtattagtgaaaattttgatccgtggcgaccgaaacaccggcaaaacttccctttggagtcggttgcagggaatgccatttcggcatgaagaggagggcgactcgtacacccaaacggaagagattcaggtgggaatctgaaacggcaaagaaaatggccctggagggggggggggattggtaccagggaaggagttccgaggccctaaaaaattgcagaaatcggacttattccccaaaattcagggacaattccctgcataaatttgtatttaaatttattggaccatttgggtgaattaaactccttccgtcaactaatcttttgaggtcgcttcgatcacatggaattatcgtgcccatgatttcgttgtcaaattggacatttgggatgttgtggacaagggacgtcgtgccgacccttcgaccggtgcggcggctcctctcaaattgggattttctcgcaaaaatgcttatcaatcggccaaatgttccgttgacattccctcggctgtccaagaagtggtaaatgagaaattaggcccgaattttttgaatattgttggccaaataacagctgtaagccaccagaattgtcattaaattaatcattttctcttaaattgacttgatttatgcctttttgaagattcaaaacgctgcttgtgatgcgagcactgtgaacgtttacaacggctgtgacggagtcgtcatgttattcgacgtgaccagagattggtcagaggcgggggggggggggaggcgtacaacaaagatcaatcgctcgctgtttttaattaccgcattttcatgtttttctgactgtgttttgtgtaggacctgggcttacatccgtcgcgaattgccctcagtgccggcccatattcccgtgttggtaatggccaacaaaatggacctgatcagtgctgctgatcagccactgccttacaccatcggcgaatgtctccaatttcttcgcgttttcaatgaacggtggggaggagcacacatttaaagggcggggggggagttgaggggccgaatggnttttagcattgggtttcggttaccctcccccctctgttaaatttgacattttaggtgcaaaccctgcccaaatgcatcttcctccgtccgttgtcccccgctccctttgccaattcgatttgtgaaggcgtcgatgaaaagcgcccggggactgaaatttttgtacaatttcttcaacattccattcctaaatgtgcaggttcttgactgacaatgaactttgcttattgctagaaaatgttaatttttaattccagaaaagctttcttaaaaatgcaatggaagcgaatttgagggagctgcgaattgcggaggaagaattggacattttggcgaaagaggaaggacaaaatcccacaaattggcgaagaaaaagcgacgaatcggcggacgaaggaaaaggcgaagagagaaaccgaagacacagtggagaggaagagacggaggaagaaagggaggaggaggaggaagaacacacggaagaggaagagaaagggcatggggagaggcagagacggcaaagggacggagagcggacgtccccagcgaaaagcgcacaattcgccgccgcttctcgcccccgtccctccccctcctcctcgtcctcgtcggaagaagtgccattttcaaattcaaagggacaattcaa

SEQ ID NO: 7368 - DNA, 1051 bp, Heterodera glycines
gtctcgacttatgcggaggattttgacgacggaacgaattaattgccaattataacgatgactcatcggccggacatttggacacaatgtgcaatttgtgatttcacacaaaattattccaaattaattaattggggctaatttaccattagtcagcatttaattccaaccaaatgattccaatgattctaacaataagttgaaattctaattcttttgttccttaaaaagtttattacatataaaaatatgtaaaaaatatcacagaaaaggcgaaaacaaaaacaaattgacaattgccgaataaactttaaatgtggggacccgtttaactacacaaataataacaatgcttgcaatgcattttctgtgatttgatcagtccaataaaaagttttgttttggatttgcagaaataaatttgaagaatgttgcaagctaagcttaagggaatgggtggacaaacgatgcttacactttgttttgccaagtattgcaattctgagattgtcacgacttcccatgctaatgagggaatggaaatggtaaagctgtttcgctcaatcaatcaggcagtagttggtcgagattcgttatcctttgaaagtttttctgatcatttccgagtgaaatgcaatttccgtgcgatggccaattcgactgattccgccgccgaagaatcaaatcaaattgtgttcgaaacacaccgcccaaggggtattcggtggacgagcgcaacccccggcgtgggagtgctatccgccaccaaaagttccgcgatgttcacccgtggcggtgcttggggaagcctttgacggacaatctgcggaaagagtcagtcccaactctcgtggttttgtattcgtcccgtccaacccgaacgattctgtccagagagtgcccttgctggtgtttgttttggcacttttccttttcactttctttcacccgttgcacggttccatttgccgtcttttgttgattctgtggtttgaggggatgttaaaatggcaatgcattttgttttggcacttgcttgtctcagtgttcg

SEQ ID NO: 7369 - DNA, 2658 bp, Heterodera glycines
  unsure (1)..(2658): unsure at all n locations
ttacgagtttcgtcgacaagacgatgcttaaaaggcaaacaaaaaaagttgaaggaaaagcaattcgactgattggaggagagtcattagtattaatttgttactttttaaggggacaaatttaaaagcaatgaggaaaccagtttaaacggttagatgaggtgccaattccattcaaatatccttttggagtgctgtttttatcggcacatttgcaaggttatgcgttagtttgccaaatgggcgtggttttggtccgcttcgtcccccttttcccatcccatttcctctctcccccccccctccgttagtccgtccttctcaacctgttcgaccctccttctgcttcggctgtgctgttgcttctcattgcaattgttttccatccgccgtgtgctgctgctcgcctccgaggcgggtctctcctctccgaatgccatttgctgctgtagctgcactgtctgtggctgtggcggcggtgtccctctgctgctgccccctccgccgttggccacacttccggcggcactgttggcgccgtccaaagatcggtccaacagccgcaggcgcaacgtcgacgacgcgttggcacccgcggaggaggcgaagtcggcgcctgcgcccgcctgggagtgttggctggtggtggtggtggcaccacgcgagccgggcggaagcgaagtgttgctttgaatttggcgcaatttgtccgccaatttctgtgcatttggttagcgtattaattaaggagaaggaaagagcagtcaattagcagttaaatgtccgaataaaatttgttaggaaaaggcaaacaattaacagagcgcactttttgggttaattgttgcgaatgaattggtcacagcaacaacagaagcaatggacaatgaatgaatggcatttcccatagattcccatttaatttcgtaaatcgtatgggcatcccaggcaaatttgattttttaggaaatttcgtttttccaatttcgtaaattttttacaaagttgggtttgtaaattttcaaaattatagatatttttagcgaaaatctgtcaaaaaattcatgaaatctgctaaaatagtaaatttggtcatttttatttttgaaaaatcggtttataactaaaaatggggaattagaactcggagttggctccaccccgccctttttgtgttcatctcccgccccggctcaccttcctgaagctggccttgtacacactttctccgctgatcagtccgccttcgcgtgccgagtccgagtcggacacattcagcaacatttgtccgctggcggactcgagctcccgcgaacggcccgcaatgaaataagtgcggattccctggtggggcgcggccttggagaaacccgaaatttagaaaaaaaaacatttggtaattaaacctcctccaaaatgtattggccatccaaaaagttggcggtcgcctcactgacgtggacacgccccgcaacgccggtcgactccatcttcaaaagcgacccgtccctaattgcttcccattgctttacctcattagcgaatgtcacatcgttggagaacacgtcgaatttgaaccgtttggtgccgaccattccgcacatcactttgcccgtgtgaatgcccacccgcatgttcacgtcctggccccggtccaagtcgaactggcgaattgcgatgatcatcgccagacccatctccacgcagttggccgcgtggttgggaatcggctcgggacagccggcgacacagtaataacaatcacctgacaatgagcgggaaatgggaactaattgaccaattaatgactattgcttccactttattacaaatcaattaagtaagtgagcaattaatagtcggctaattgcttacccaatgtgctgattttctccaaattgcatctgccgcacaaataatcgaagcgcccgaacagatcattcagtaaatttaccagctcatcagctgatttgtttgacgacattttcgtaaatcccttaagggtaaaggagaaataaaaatgggaaaattcggaaaaaaagacagaaaatcgacgatcacttgaatatcagcaaaaaggatggacacattgttcatcagattcattgtgaacgggcggaatttgcgcacatttggcacccctaaaaggacaatgccaatgagagaaacgggacgaacgaacgactgacaaataaatggcccaaatcgtaaaaactagagtgaagcgggaccgggccgggaattcccggtcattcgaggtcccggattttgaaaagctcaggtcccggtcccggtagggcaaccgggaaaaacaagcactggtaagaatggggtctgagtgaaaaattagagatgaaaattggagttaaaggaaaaaattaaaaaaatatattaatatattcttcaaaagtgacttttacaattttgcaaatggcttagtggctagtctccttgactttccttcttctttcccctggttcaatccctctacagaaattttaattttcattttgtatattcattggtttcctatcgacaaaatatgatccacttatatatttttcaattgacacatattttatcatttttaaatgaaaatccgtttataacttgagacggataatcccaaaaacganngccttttttgttgaaaatctg

SEQ ID NO: 7370 - DNA, 2820 bp, Heterodera glycines
ttaaagaaatttggtgagataattgatttaagtaaataataagtaagtcaaaaatgctgtgaggaactgaacattggggagagaagccctacacgggcagtgtacaaattcaaccaattccattcactcctccgggggcggggaccaggtttaaaacaacagaaaattggaggggccagcagcaggaagaaaaacaaaaagacacactgacatgagacatccattcgaatttcatttcatttcaacgctcccttttccattcccacgacgacacaccgccgcgaaaggtaaagagaaagggctggatacataaaataatcagcggtagcaaattgcagcagcaactaactgacaaccaattgtgacaaattcaaatttagaaattattgtaatttggtagaaaaggtggataataaaacaaataacaacaataggaagaatgcgaatgatttcaccatccatcatatatccattttttcaatttcttttttgtttttgctttccatttcattccaatgcatcaccattcgtagtatgccttaagttcactttaaggtaaatgtgaaactttcaacatttcactcaatttccattttttattttaattatttgcaaaaacgcaccaattgtctcgcagagcatttcctgcaattgcacttcacttctgagctgtgcttccaacagtttaatgttaacacggatatctttttggagcggttttccagcgtaagtgtctaaacgcagcaaaacaattggagtaaaggcacaatttgtgtataattgcaacaatttttaccaattgcgacggttgccacgtcgtagagaatgtcaaagtacgaagcgacgaacaaattgtgccggaggaagaggaacaacccccgaagttcttgtttgtcgtggttagccagtgcctggccaaggcgattccgaatgcgaatttggccaaacgtcgccacaacgagatcaggcgaagccaggggatttctcatcattttgccgaccaattctctaaacgacccttggcgaagcaggcgatcgtaagcgcctaagcttaactaaaaacaaaaagacataagcgggggtaaataaaattcagaggtaccgaatactgaccttgtccaattgttgttcggtcaattccaatggcacattttccgtgcccaatattcggtcttcgtgcactatttctatgtgcatctgtaattgtttgttctttggtttgtctttgatttgttagctcccaattggtttgtccaccttggcctctgcttcttcccgctccgttttgcttccgtttgtccacccattgtcaatttgtgcgtcaaaacccttcacgtgtttcgactttttccttttaacgctctgcggttggtgtccgatgaccatttctttgtttttttgtgcttcccttcgatacaatgccaatttgttcggcattccgaatgccaaaaattggtcgttgtccgagctgatcgaaagcgacagcacaggccattcaagccgtatcgagtgaactacgtcatatttgccgtcgtcgtccagtcggacgacgttcacacgccgatcgatgccaccggtgagcagacagtcgccgccactggccaaacagagcgaagtgaccttaagggagggaaacgcagttgcaatgagtcgaattaattcttttccaccattttgttgtgtttttcgatgttcgccaacagtttgcccgtgttaaggtcccatagtttgacttgcgtcccaccggcggatgccaaaatttggtcattccgaatgtataaaatgcgctccaccggtgcgccgtggtccaattgttttatgggcactgttggttcggtgcgaatgtcccacactttcactgtgtgatcataggacccttaaagcggcttgtttgatcggccaaccaaccaaaaaagcagcacttgcctgtgatcagaatgtgttccgactcggccgatgcgacccccgtccgaattgcatctgtgtgcgcgttacactcccacaacggcacagcattgggcgcggatgcggctaggtcgaacagttttgttgttccgtcgtctgccatcgaaaacacttttcttccattcgcatcgtaacagaacgcattgacggcacagtgatgggcccggaaagcgaaatttattaatgctctgataaaaaaatcatttggtaatggattcaacagaaacggaaaaattagcagtttgtggaaaatattttacttacagatttgaaggtttcagacacggtgtagaatcttaaaaaattaatattatttaaatcttttataagatttacgcgatacaaattaaggaaatagtaaagttcatgtgatcttgatagaaaatggataatgaaaaggtggtttattgaaaaaaatggtgttaattcgagtgcaggacctataaataaattaatattattttaatcattaaaaatattttagttatataaatgataaatcgaaatgtattaatgctctgataaaaaaatcatttggtaacagaaacggaaaaattagcactttgtggaaaatattttacttacagatttgaaaggttcagacgcggtgtagaatctaaaaaattaatattatttaaatcttttataagatttacgcgatacaaattaaggaaatagtaaagttcatgtgatcttgatagaaaagggaaaatgaaaaggtgggtttattgaaaaaaagggggttaattcaagtggaggacctttaaaataaaataatattattttattcattaaaaaaattttagtttattaaatggaaaatcggaaattatttaatgctcctgaaaaaaaaaa

SEQ ID NO: 7371 - DNA, 2081 bp, Heterodera glycines
  unsure (1)..(2081): unsure at all n locations
gactcggactgagtgtcgaagaccatcagttcannccgcatgagtgtcactcccttnggattaaaaatgaaatggagggaaggaatcgtggaaatggacaaatacccagccagtgagccatcttttcgaaatttggccgaatttgtccgttctttgaaccgcgagtaaatcgctttgggttcgcatttcaaagggtcaaaagtcgtcatctgacaatgagatcaacatttgctttacagttacaaattaataacaaaacaagggtcaaagtcgctgcacctctttgccactcgttgaggccaaaagagggggcgacagaggggagaagtcgcagctgctcacatggccttgcagctcaaacacagccgactcctaaaacaaagggaccgactgactaccattcccagcattaaaaatgaaatattttctcacaattttccccctttttaactcattaacagcataaatgacccaccgccattcccatccaatatcgctctgcttccgaacatccgaactgtgccgaatcatcgtcctctatccgtacaatcggtttgtaatgggtccgaattctcttcgatgaaatcatcgcccattaattgtcatttgtttttgtaaacagaaaaaaacaaagaaaatgtaatattgttttttttgtcggattaacgtagttattaataaaaattaataataaacaaataacttttattatttagcatttaaaaatcaacaacaaattgcgtcccccttcttcttctgctgttccgtgtcctcttcttcgtcgctttctctctcattttcgaatcgctttcgcttcccaacaacgcccattcgtttgatcattttcctagccatcattgtcttcgaaattggtttctttgaagaaattctcgacaaaatttcttcctgaaaattctcgttttcccttgactataaatcagcgaaatgcttaccttcacatcgacctcagtgatggaattgaacacgtcccttcgcgacaccttcaaaaatggttcttcctcctccatttcgttttggcattgaatatcaaatggattttttccgccgcttccgctcggattgccaagcaaaatttcttcagttttggttgccatttctggcgaagttcccttctncaattcgacatattttcttgtaataattcctttttttctgagaaatctgatccgaggcgtaactaccaacccataagacctggaaaatgtatggtatttaacatttaatattaatggtcccaagaaatgtgtaattcgacaaaggaaaacaacctggaaagtgcatcgaaatcaatgctttgcacatcaaacacttcctaaaattaataaaagtgctgctgtgcatttaattgggatataacaaaaagtaaaaacttttaaaataaataaaacgaaaacttttaagtattcatgaaattgcgcttaccttcaattccgaaaaatagagagcttttgcataagcgattaaactcttaaaacaaaatgttattttttgttttaaatataagtaaatgtcaaccacctgctgagcaaattgcttcaccgatgggaaaggaaccatcaaattggtgattttattacgaacatcaaacactttgttggagtcgactctgaaattaaccaaggtaaaaatggagaaaaaaagacaacaaaaatctatttaaagagaactcacgtcacttttgtgacggggacattcctttgcctgagcaaagcaacaaaaggttcttgggacggcgtaagcataagcatcgcttctccttttcggttcatccgtgccgttctcccaactctaaaaatttattccataaaatccacctcgtaggagaaaaaaagaccataaaagggtgattacctgtgaatgtaatcgtcgaccgtggaaggacagtccatctgcagcacccaatccatcccccggaagtccaagccgcggctggccacgtccgtgcacaccatcgccgcaccaccatcgacagcgttgaacttgttaaagcgttcaatgcgtttgctctgtttcaggtcaccggcaaaggccggtgnaagtaaaggccgggccgcaaatga

SEQ ID NO: 7372 - DNA, 805 bp, Heterodera glycines
gcgtttgctctgtttcaggtcaccccaaaggccgggtgaagtaaaggccgggccgccaaatgagtgaatgtttcagtgatgaaacgagcccttgaaaaggaaaaatcacttaaaaactaaatcaaaagaattcggatgggatgattcatcacctgcttacagcaagtgacaaaaaccaatgttttcttcgtccgattgttcttcagaaatgacctgaaaggattaaagaggaaattaactaacactaagttttgacggatattatcgaaataacaaaggctaccaaagcatgttcagttttgcttcttccatgcacacgaaataactctgcaaaaaaggatggattgaaaataaaaaacaacatttcagaatttcagtgtttggtccgcttcacctgcaccaattgatcgggcgtcgcactgccggagtgttcgtgggccgccacgaagacggggttacgaagcgaaactcggaccaaatcctccgtccgtcgcgtttgggtggcagagaacaacagagtttggcgttctttcggcaaattttcaatgatggcgtcaatcggaaataaaaatcagatttagaatattaatgttcgctgatcagcgacttataattcagtcacctgatgtctaaatcccatgtccaaaattcggtcagcctcgtcgatcaccaacatttgcagctgatcacaactgaaatgttcattctcgtccatgtgttgtaaaagacggccgggcgtacagatgattatattgacggaagacaaccgctgcttttcaaagtcgacgtcagtgccgaaaatggg

SEQ ID NO: 7373 - DNA, 1687 bp, Heterodera glycines
  unsure (1)..(1687): unsure at all n locations
tattattcaatagaatttatccatataatcaaagtattcttttttgattttttgtttgaccacagttttgatgactacataccgtaacgtggttggacttactgaatgagaagcacagaaaatggcgaagagtggtggatggaaagaagcttttttgagtgttttaatcattgcaaaatttttactttaaattcaaaaaagtccaaaatttgtgattttaggaaactttaaaaaaaaaagaattttaaggattgacacaatttgaattttcgaccttttgttcgaattcgggtccgggattcggcattggtcaaaatagatgccggatccatgatcagcgacccaaaaaaccttggaaacacattttcatgacttataaatgcaaaaaatattttttttcaaaaatggggggggggggggacaaactagagtattaccgaaaattgtgccaattttcattaattttttttattccctcttctgattttgttggtccacaacaaaagttggtatatgatcagcagaggacttacaaacatatttggattaattttggtttggttgcttttgaataaaaatttatcattttacaccccctgaattaaagcctttttgtgcctacatattttccattttttaaatggtttaagaaaaattagtggttataggcatcgccaggtgaaaagtgctattggcccaatttattaaataaacagtactttattanaattcattctatcaatttctacttcaaaatttgactttaaatccatttacatgatcttttttccaacaatttcctcatttgtttatatttaccattcttaacagtgatcagagtgatcatcgcaagctctgatcagtttaatttgaccactcatgcatagaaaattgatcataattatcaaaacaatttccccttattttttattatcaattaacataaataataacattgatcaaatgaaatgattgggaaacaggcaggcaacggcagggcattagctgttttttgccccagggcagccaacagattttccccctcaggcatcaaggataaagcatcgtttgtgttgatggggtcatccgctcgctcccatcgcctcattccgagatgaagcacaattatcccctctccccgtaaaaaataaaataaaagtcgcgcatcaaattaagcctcctgcccccgcgctgggcatccccaaattaagcccctccctccgttgataatcccatgaagcagcttgttcaactcctctcacaaaaagcattgtcattatgtgtgtgtgcatcatgtgtgatcgccaaatgtgtactgatcggaccagtccatttcgggttctggtcaaccactctgctcacccctccccgcccaagcttgatcgagatattagcatcattcagaataattctgttatgcaccaccacacacacacacacaaaacaaattccaatcgcgatcagatcggacaaaaataattttagtgggggcggggagagaatgcttcttgtccattatgctttatcctctccagtggtgggtctgttggtgcttcttcttcattcatccttttcatctcggctgactctctgatcagctgttttgggctgctttttcctaatatccaattttggtggtccgtccgttaattgcttttcgttcccatcacattttttgcttcatttt

SEQ ID NO: 7374 - DNA, 3479 bp, Heterodera glycines
  unsure (1)..(3479): unsure at all n locations
ctcaacttttgatcgtaagtgtgntcgagaattggggatggtcgagatcagaattgaaaaaaaaacaactgcgaattgcagaaattctgtggagttttggagagcgaaaatccgatggatttaaatattttatccctccaaaaaatatttacgcataaaaatcaaataaaaatgtctcggaacgtacgagttcccgaaaaagccggctccaactgcagtttacgcgcccaatcaacaactaacctcaatttcattttttttatgatcaatgccgacatttttgttatcaatcgaacatttaagcctatagaattttttgctaaactaagttttctgagttaaaggcaacaaacataaaaaattagttttgattataatcgaaaaaatgctaatttattttcacgttgtaattttttttctcaatgttagcatttactctttttttgaattaaaaattcccttgactttaagctttcgtttgatgccaagaataattaagttatggccgaagaaactgagtatggtcattgattggatgcgtaaactgcagtagagcgaaaaccaaatgccaagtttcattttggcatttgtgccaacatttatttgccaattggcattttaatccacgcaaaaaaaaatggcataactttttgcagttgcttttcttcgcctccacctcgttggcattggtcaaggtggttaagcggcagagtggaaatggtgccgccggcccagcagaggaaacgcatgtcggctttgagggcaatgatccgccgccgagcagcttaaatgagcccatctcagcgatcgggcctgatcagcaggtcaaattaaaatgattgaggaggacaaattttgtttctctttaatctgaaccaagggtgtgcgaatttctcggcattttcgttgcgccccatttttcggcacttttaatttttgtttcattttcgcatttaattgcgggattttttttggctcggtgccgacacttatataaaaaaatgggcaggtcaatgccacgaaaaatcgcaatgagcaaaccgaaatcattttttaaaatgtaattttttttatttggtaatctttgtgccaaaatcccatccctgtctatatccaaattaaaaaaatgagaattttcttcgattttaggccgaggacggaaagggtctcgccgacattgcctacgacacggtggaggaacagtcgcagtcatcggcggcgtccagtagttgggcgacttctccgtccagtaccagtgccgctgcgactgttggcacagtgtcgccgggcattggcgacgctgaaagtgccgccgagactcgactgcaggacaccgccgcgtcagagggcacaccatcggcaacgactgaggaggcgtcgccggtcggagtggaggaagagaacaatgacaacaacaacaattcgcctagcagcagcgacagcggcgacgctgccgccaccgcgtcaacagttgccgaggaagggcagcgactggaggagaccgtggcgaccgccacgacagcgagcagtacagcacgacgaatcgcggctgtggcatcagccgggaagaagcaggacgagcgcaaggggcgcaagaagaccgggctgccaaccgcagcggtggagaccgcggcgaccgatggcacggcgacaacaccggcgacggcacaacaacagcagcagcgcaactgcaactcggaacgccttcggcaactgatcatcgaggtagggaaggcatttggacagccaaataatttaataatttagtttttatgaagtaaattagggttggtcatttaaaaggtgtactaattactagttcgcaagtcttacgagtagtcatagtctaatgggtcagtatcgtttcgattctcagagttattcccgaccttgaatctaagggatgatttactaattgccaaatttagaacatccattcaaagccatccgtggccaagcgccaaattcagtccaaagtggccgaggagatcaacggaaagattgacgtaatatgcgcacgacatgcgttcagttacattgtcaattcaggtcataaaatttttccattaattaattagttgattccataattatttttaaaaattaattatcattaacaaattaattgcatcattagataatttgccatttttgaatagaattgttttgtgaggccgaacataacggagtgatctgcttgtgcttcaaacaacagtgatcaatgatcagccgatgaaaaaacaaacgatcaaagaaatttgataaaattgaatgacactaaatttaatttatgataaaatcacattggataccaaataattttcaaggcctttttataataaaaccattaattaaaaattagcaccggataagcacataccagaaaaatgctggaatttttgcaaaacagattaaaaaattattcgaaattcgagtgctttttaaatattaaacattatacttaatcgtaataatttattaagattattaataaataatacaaaaagtgacattttttgggatttaaatttttttgaaataatttttgcatcaatcaaaaggccaaggaacataaaacatttgcagaaattagaggacaccagtctcgatcatacacaattgaaaacatatttacagtatactcgggcattttgctcctcaaggtgtaggtccatgatatagcccattttcagcgtcatttgcttcacgtaaagccggcacgcattcttttcatcggagagtcggtcacacatcatattaaatccctcaaacaaccgtacaaagctgttaataatctggaatgttcataaattgaagtgaataatgaaccaaatgaaaaaaatggaaatggagtccggaaatccagtcagcactactagggaaaaaattaacacaatttaattaagaatttaaacaaaaatttcataattatcattttttctttaaaaaataatttcccatttagagaagtcaaggtccctcatttccactggatattggcctaatatatatgggatcaacataaactcattgaaattgttaaaatcacttacgcttaacgcctttttgtgaagcaggtgacagaaggcgcaactgattgggccagaattggaaacagttgtgtttgcacgcgggctaaaatatgattttattttattatattttagtttatttatgaattaaataataataaccaaggcccggcgatcagctcacacatgacatcctggccagtcagttcaattgccatggatatggtggatgaaaagagattggtgtcgaaacgttcgcactccgccgaagtgatcggtgacgttttttcatcaatgtgctggcaaattgtttggattaggccaatcccgccgctgtgtgaagcattcaaaaactgaaaacaatagattaaagtcttaaaattagccatatttggtgaagccgctataaaaaattgtcggaagtgcgcctttccctcccccccccca

SEQ ID NO: 7375 - DNA, 2670 bp, Heterodera glycines
ttttcaaatcaacctaaagggcttcaaacaaaaaatatttcaaatttactgacagaatggatgatgaaagaggagcctttgcagaagcacgggcccaatgttccaacaatttgcgcaaccgaatcatcggttctcaaaagtgctgttggggttttgcgtgccacagcaacggtctctggccgttttttcgaccttaaagttagtaaaacaataatttaaataattttcgaaaaattttccgattatcaatttttcattaaatattctgtaaaaaaaatgctgaaattatttttaaagatctttcaaaaaaaaatttgaaaatttttgtttcgatggaaagttcattattttctattttaaatccattttcatacaaattttcggtcaaaagtaaaattgtataacaaaatctcctaaatttttattttaaaatttgctatattcaaaaaaaacctaatagaaaaaattgaaaaattttttaaaacctacgcgactccgagaaccgtgtcaatgatgtcaattgcttgcttaaatcccgctctggcccttttcagattggccacaatgttcgagttgccaccagcagggttggccagtttgattgcgtccgcagcaagtatggcatggtaagctgagaaaattttcattattaattttgataattttggcaatttttatttcaattatttcattaaatttaaatttttcatttaaacctttgtccatttctgccgaatttaactcggcatttgcttcgagaatggcatttaagataaaaaatatggtaatggcgatttttgtaaaatattgcaacattttgaagctgaactggtttaagtgttctaaattagtaaactcatttttttggcaaaaattgattaaattatttcaaagtacaacagaaatgaaagtcgattttgaaggcttttttggtgaattaattttatttttaatgcttttttaaatgaaaaagtagaaaattctgaaaatattggattattttataataaataaaatattgaaaattttgattaatttattgttaatcatatcttttcaactgatttatttcagtcattcataaattaatgccttcttttaaattttttagaaaataaaatggcgaaaaaaggtagccaaaaattttgggtaagaccttcccaatttatgtttctcttaaaaaattgaaaaatattacgaatgaatgaatgatgaattgaataaatgtgaacattgtaaagcttagaaacgattggaaaagcaattattaaaggtcatttgggcaacgagagtaattttatgattatcccccaaagaaaagcaccaaaaaggtcattcattattcgagaaatgtaaattttatcagatgaaaaggcaagaattatagcattttagagggagaaagagaaaggccaaaaaagtgcaaaattgctaaaacaaaccttggcgaaaaatgccaaaatgtgctaaaaactaaaaaattgctaaatctacttcaaaaagtgctaaatcatatggtgctatgcgaaaaattcaagaaaaacgaactaaaacaagtcttttttttttctaaaatgcttaaattgagctccaaagatgttctactgcttataatcccactaaaaaagaatttaaattttaatataaatttaaagcgtaaatttatgatatcaaaatttttcagtgtctaaaaattcgtaataaatttatttattaatattttatgtgatctttttttaaatttcattatgatatgttcgcgcactcatatcaaaaaatttcttttcattttcattcattttcaatttctgatttttttttaaatccaaaaaatacaaaaatatggaaattaaaaggcatcctagaagcaccaaaccaagctaaaaatactatttacattatatttaggccgaagtacttataaatgtgcaaaaaaatatatggaaacatacaaatccaggccctataaaaaataaataaatatatatataaatatgccaaaaaaaagcctcaatatatgtgctaaaactcaaaaagtgccaaaatatttttcttttatgatgacatgtgacaaatttttctgaaaaacgacaatttcagtcagatatttggttttcgggatctcatgaaaaaaaaagaaaattgtttaatttttacttaaattcatttgaattttgataactttaatttctaatctgaaaaatgtatgtgttgctgcaaaacttaattcattttaaataattagttaaataaataattttattgattttggtgatgatcgagcaaatcccatcacatattaatcttaaaagttttccataaattgacaatcaaattttaaattaaatataataattgtaaagattccttcaatttttattcatttaagaaattaattgaatgacaattctgttgttttgtaaaatcctaataaaaaaaatgccaaattggaagcagcaccggaaatatttttggagttcgacttccgattttttcctagatttttgaattggaaagcaattaaaaagctataattaattattttttggatttatttagttttgctttatgctcaacaaccaccgtcggaattatcgccagaaattttggtggaattgcatgataaattcacaaaaataaaaaatgaaataatccaatcaattaaggagg

SEQ ID NO: 7376 - DNA, 2647 bp, Heterodera glycines
ttcataaaaaaaccgaaaatttgtttttgtttgaaaagctgtaaataaaatgcattaaattttctttgccggatttgttgcgaaaaggaaaaaagtatctaggcaaaaaaacaacaacaaaaaacaagtcatgattttttttacgaaaaataccccatttccgcaaaaatcatccaattatctagattactcgccttgtccccgaacacaatggtggccaatttgtccctgtcgatgtcaccgtttttcacaatttcgtccccaaacactttggacaatttctccctcaattccatgttgttcttgtacaactgatggacaagcgtatcgcattcgataaccttttaatagtctaacatttcaactaataatttaatgcttgaaacttttttgaacggtttaactcgcagaaaaaaaacaaataaaaattggttcaattggatgttgttgcattttttaaaatttttgcttggggaaggtgcagaaaaacgttaaaaagccatgtctcgcaactccgaaaatctaattttaaaaaactcgagggggttgggatttgagagaaaaaaacggtctgatttttaaagattgtctgtgttttagcaaaggccattaggaaaatatgtttgcccacctcgcagcccttctccgccaaaaaggtggcaatgtgcgttttgccggatgcaatgcctccggtcagtccgattacgtaatgcgcattggaaatggccgcctttggagggcccggctcagccagcaaagtgccgagcatttccttgcgcttcaaactcgagctgagcttcgtctcgttcagcaccttgtccgcttccgcattcttcaacaactccaccagacaaatgtccaactttttgaagccattctcctgaaaaggggtggaattgaaaatggaaaacattgtaatgtccgctggtttgctcaacaaatttaaattggaatttttgaatttggtgcaaaaattccaaatacccattttttgtaagggatcgaaaacatgggagaaaccgccattaaattgcaccattctcttcgcattgaccgcctcgccgcccttcagtgtctcctcactgacaacaatcgcttggtaatggtcaccaacaatggccggaccatacgcatcataaatgggcactgtttggcattcgatgccttcggaaatgtcgccaatgaattcggtgacggagcggcaacgagtttcgaccggctccatcagttcgtaaagaattttttctggaattttttagaattcaaatttaaaaagccgaaattcattacttttccggttggattgcttttctgcggttttcccgaaaaaagagcgctagcaggacacttaaacattctgtttttggtcaactttccaagcccaacataaatgtattttaaatttctgagattgcacaattcgacatgggcaagaaggccgtactttcattcatttttccgtccgtcactccgcaagtgattcttgtccgtgccgtcattgccgcctcggagagcagcaatttgtgcccgttgtgcaatcggtcgaacgtcccgcccaacacgacatggtcatacggcttttccggaagtttgtgatgggaggtggcaaaagaatccatcttgaaagttggcccattctcttcgcgaagcatcggaaaaatcggatggcttgggtctttgacctgaaaacagcaaattttcaatggcattgaatatgtgccaaatcttttcaagcataaatttacaaactaaaattaaattaattatacaaaaaaatcaaaaacctcgtcatagaaaacccggtcaactgggacgctggtcgttcggttcagaaggactcggagatcaattttcggcgcaatggatgccgcattaatgtaaatggcgggaagaagtgcccggatgacgtccatttgctccaaatgcacgtacaacttttgacgtacttttggcattgttattgccaaaaggcgtttcaatttttgccgtattaattcctcatttccgcgcaggacaagcagaccaatgtcaatggaggggctggccatttctgctgaattcatatctattgttgttagtggtacgggatcggaaacagggttcttgtttggttttccaaggactcaggttcggaaatcaattttttgaggtattcccggcctacaaaaaaagtctaccggcttattttcataaaacaaagtttatctaaaaagaaaagtaaatttccgagcaaatgttacaattgttggtgagaaaaaggcaaagattgctcaagttgcaatcagtcagtttgatctgtctcgcactaattaatacacagtgaaaatagaattttcaaacggaataatttgttagttgatgggcaattaagccacaagggggtggtgagagtttgcccgtcatcggtgggtggccacttacaaaagggggtaattagggacgggggaggggcagtgatttgaagttgcctctccactgctgctgctaatgctgatgacgattattggtcgattcgcttttgttgttcggacggacggacgaatggacacggaaattgttgcaccaagatgcatccgtccgccacaatttgcccaaattccgctgctggagcatcatcagtaactgacgaatttcctctgctgtatgc

SEQ ID NO: 7377 - DNA, 4397 bp, Heterodera glycines
  unsure (1)..(4397): unsure at all n locations
tccccccccccccgaaaattttcctggctacgggcttgttactgaatctaattttactcttctcttcggtatcttttaatccaaatgaaaaatgatgccctttcgttaattactaaaatttcttcagatgacgaggaagaggaggaagagaatgccgggcccacccgaattgacatggaagtggcgcgttgccgcgccaacctcgngcgaggagggcccctactttgtgaagatgcccaactttctgaacgtcgtgtcaaaaaaatttgacccggaaacgtacgaggacgaagtggaggaggacgacgcgctggacgaggagggacggcgaacgcggctcaaagtcaaagtgagccaactgaataatggggccgggaccaaaaaatttgatagtaataggccagcactcacctctcaaatgattttatctataaagtaccccccccccccccgaaaatttcaagaaaaaatttttgaaaaattttcagctactttttttgaaaaattttcaatgaatccaaaaaaccaaaatttcttgaaatatactggccattaaaaattatccgagaatcaagatcaggactcgaagcattgggaaagtgctcttgacaaatcatcccccaattctcagatggaaaacacaattcggtggcgcattgcgcgcgacagtcagggggaggagaagcgcgaaagcaatgccaaaattgtgcgatggtcggacggcaggtggacaaacacttttaaatacaacagaggaaacaattttaaattgcaacccgaattaaaaattgcaaattaacataaaaaattttacttttcgaatatattatactctcatttgtcagccctttattttttgaaattttttaaaaataaaattccccaaggaattggttgggacaattcgtctttgttccatggttcccttatttgtccccactttttcagcatgtccctctatttgggcaaagagatcttcgagattgagaagcagcggctgatggacaacaaccatttgtacacgcgccaagggaccgcgctgcaggcgcaagcgctgttccgtgaaaaactcattttccgcccggtaaacacaccgacaaaatgatagatttttgaagggtttttcttcaaataaagttgacgtggtcaagcggaatggataaaagtcatcccataaaaagtcactgttttattttctctgaagcattccaccgaaacgatgacccatcgcaaaatgacgatgaacatggcggagaagacgaacaaagcgcagaaggtcaaagtgttggcgcaagttggcgacaaccccgaggcagaacgaagggtgggccaaatatggaaacattggcatttttcaatgccaaaactcaccaaagtttgcatattatgtctaggaactcatccggacggaggaggaaaagctgcgggccgcggcgcgtcgcgaggcgcagcagcgacggatcagagaacggccgcgcatggccggactgacgccgggcttcctggagggatacgagtcgggtaaacagtttgggaagagacatttgttagtggacaatcattgattattctgctttttctatggttgataattgtgtgaaaattgtcagtgacaaatgaggcaaaaactaattgccttttttaaaaagcgcccaccattatgcctatgagtttattaagtcgcaaagttttgaactttggattttgtagtttcgctatgattggttttgttttgttttcccaccccctccttttagacgagggcggcgagtcgttggcggccataaaacggcgttaccaacacgcgccgtacagtgcggggggtgcccacgacggcggtgccgccggccgtcgttcgtcgatggcgggcggccgcggcggctcctcggacgaatcagcggaagaagaggagcgcgatcgacgggcgcgcaaggcgataaacgaggcgaagatttacagcgacgacgaggaggaggtgggcggcgcgagcggcacagggccgataaatggcgacggcgcgggcgacgactcggacgcggtgagcagagttgacagacatggcccccaatgggcaaaaacactcccatttattttttccaaaaaattgccgaaaagaatcaaatatttgtaaaaaaataggagccaacacacaacacaaacagcagcagacatcagcctcaacagaagaagaaaattgtcatcgatgaggacgacgaatgacaatggcacagaacagcgaagggagtgacaatcggcgatttccccaaatgggggagggttttttggcagaagtcgaaaaaatgtcaaaatatggttttttgtgctcaaaactttatgattaaaaaacgcggccagactgtatgttcaaattgccttctcagttccaaaaaatcctgaacaacgccccatttttagtgcattttgtctttggttcaaagggtttgactgatttgacaacgacaggttcggaagcagtacctccgatcaccgtataaccagctttacaaactcttgctttcggattggatttggtgcgtgcgagggatttttcgttcggttcgaccactctttgtctaaaatgcaacaaaaagtaaaatgagtttcctgaaactaattatggcagaagatagagcgcccacacccaataacactttgcttttgagtaaaatcctatttattgctccccccccccctcatccgtttctgtgtttggttagtaattttccgtttttttgcgtgtcattcgtcgccccccccccccaaacaaaaagaaacatttgattccatttccataaattatggtgtgactgattgatgactgacattttttgtgtacagatgaaacgtgtaaaaacagcacaagcccaattggtgggtaagacccccggcccaagcattgaaaaaccctccccattttgtcgacgagtcacttatttttccgttcccgaaactctggtataattttgggctttcaattcaaaaaaatttcgccatccctgtgcgtaaatgactaaaaaaggcgacgacgaaagcggcggtgaagcagcggcggcaattcgtgtgctcgtgacgggtggcaccggactggtcgggtcggcaattcgacaggtgctcgtggcgacgggttgtagggatgccgaaatggcacgccaggcctctcaatgatggcaaaatgacaagcctggctgaagatggcacttccatcccccgcccccccatatttattttgtcgttgaattttgaatttgccaaaggtggtgacggaggaggagcagcaacagaagccccagcggttgcaggagcagtggtttttcgtgggcagcagcgagtgcgacctgaccgacttggagcagacgcgggcgcttttccgccgcgttcggccgacgcacgtggtcaatttggcggcaatggtcggcggactgttccacaacttgcgccacaacctccaattctttgtcaagaatttggtgagacagtgccaaaaagaaaaataaatcccacataccgtatccatttgggtttactgtattttttgaaagggatgtctcaatcatgggtgggatgttctattaaagaaaactgtatcttaattaccatatgtcttcccgaaggcgatctgtcaaaatgttctccaatgctgccatgagactgacgtggaacggtgcgtttcgtgcctttccacgtgcattttccccgacaaaacgccgtacccaattgacgagacaatggcacgtgaacaatgaacatttatttatcttaataaattttatcgatcatatggttttatcgtattcctaaattacgactcccttttctctaaaataaagtccctcttttgaggggaattgaaaataaagcaccggggctatatttctggtcaaaaaaagggaaaacagagataaaagtcaaattttagagggtctcaaagaaaagcgtgatttttcaggtacataacggaccgccgcatgacagcaattttggctattcgtacgccaaacgaatgatcggtgagttgcaatgatcagctaaataaattcaaatttccaataaacaaacagatgtactcaaccgcggatatgctcaggagcacaatcgaaagtatcgagaaaaaataaatattttatttttgattaaataattttaaactttctctctccctctctctctctctctctccccgatctctctctaataattaatgcgtcgagattgccgacatttttgaacgagtgttccaaaggtacacttcggcagtgccgtgcaatgtatttggaccgcgtgacaattacaatttggagaacggtaagagaaaacgcaatggacagaagagcacagacaaatctttacggagagggaaaaactgggcaatgcacgaaaatatgaaaataataataaaa

SEQ ID NO: 7378 - DNA, 3822 bp, Heterodera glycines
agaataaactgaaaaatttttaaattaccatcattttttcgcatgcttttttataataaatattaaatgttcatgttgtttttagtgaaaggttttgaccccaaatatttaatcaattttaatttattatttttggtagaattccagaaaatgcaaacaatcgctgaaattaaaaatttcgagattattgaaggcggaagagtttttattgtgagagtgagaattgagaacgtagtacatgtggagtacagggtttgtattaaaaatgaaaaaaatatcagttttttaatgcttgcgttttatgccgtaagggggtgtgttcatgtggcgttgagaaggcactgacaccttatttgaaggtgtctgtggcagatgatactgggattttggaaaatgtggcattttttggtgtacgtgggaagaaaaacggaatggtaatgttttaaagaaaaaataccattctaatttaaattcaggaggagttgagaggattgtctggggccgtgtgcaccatgaaaatcggcgcgagagtgaaagaaatcggagggaagaaggggatctattactctttgattgatattgtcagcctttaaatctataaataaacttgttaattttttcaaataaaaatgttttacttaaaattatttctagtttggttcttgttggtcggaacggaaagttgttgcctttcaaaagaagaaaaagagcaatttaccagtgcccgaagaactgtagaaggcgtatttagagacataattaggttagataacgaagcaaaagaattttctttttctgcacataataccatggttgaagcccaaaatataaaaaataaaaaccctgataaacctggtgtaaatttttggcatagcaaattattagatggagttttaaaaattcatgccctatttgacaaaataaaaaaagaagaaaaaaatatgaaaaatattaaaaaaggtatgcaaaaatgtctagacagaaaagatttaactatgtgtcaagaattagcagaagaggccaaacaatcaatcgaaatagccaaaaattatcggcaagaaattgggcaattttatcgtaccgcttactcgcagccagatttaggtattggagatttggcaaataaactaaaagaaacaatgcgcgaaaaccaaatacggtatgaaaggcaaagacctcaggaagaatttagggatgaatttattgcttataaaatttaagaaaaaaaataaaaattcgagaaaatgaaactgtatgagaatcaaaggttgtgggacataaaccaaaaacaggtgaaaagggaaacaggtgaaaataggtgaaaaggaaacaggtgaaaacaagtgaaaataggtgaaatttcacctaaaaatatatagggacgtgcatttaatggggcatattagagaatgtctcaactagtatcaataaaaagtgccaaaggaaaattttgtgatggttatcgctattacaaacataaaacgaccaagttcaaaatttggtggaaatgtgaacttaattcacatgggtgccagggctggggtttgaaaaggaagggttttttacaatgactcgccgacacaatcatcatccagacactatattgattgaaatcgaagaggatataaaatatcgtaatttttctgcgggggcaaaatgttttttgggtgacaacaagaattagttgatgatgctaagaaaaagccgagactccaaactgaatttagagacaaatttattgcatataaaatataaaagaaaaatttaataaatgaaaaataaaaaaaatgaattctgaaaaatcagaaaaagctaataccattttggtggaagctgcaaaaaaagagacagaaagagcctggagggatgtagcggcgttagcagaagaagttggcgattttgccaaatcttctcgggaaacgcttaatcgtgcaataaaatctagggaaaaagctccgtatgctaatggtgttcgggaattatatcttaaaatgtcagattcaatttgggaaattttcaaaatcatggaccaaatcaatttggagtcagaaaaagccgaatctgcgtggcgtgagttcgagagatgcaaaacatttgaccaggcaacaaagttcgaggaacaatcgcaaaattcattaattgaagcccgaagattacattttgagtcccggagggtgcagagccaaatgttaaattatgaaaatagactccaaacaattgttttgggagcatatgggtatataagaaccaaaaaaaactaaaaggggcgcactcaaaaggtgtttgataatcgattcattttgtcatgaggacttaaaatttggatttacaaaatataaatctaaattttattttaaaaatcctttcataattaatgcagagcaaaattttaaaaatatcctcgcatcaataatcgaaaaaatttataaaaatgaacagggaaaattcaaaagcattctgaagctttcctttggttttgaatcattttattgccctcttagatgccctagcgaaaacacagccgaggctttgttccgacaagtcttattaaaagaagaactatattcgcttttctatcctttggacgatatcataacactagaagtaactataatcccagatgtccacaatagaccaagaaattgaatttattaagaaaaatgttacgaaaaattggaaatttgccggaaaaatacttaaacgatcaaataatcttgaaatctttgcaaataaacttttcaaaggggtgaaaactttctacataacagcatttagtgcacctggaatggaaaatttatatttttcattcttagaaatgctcgaaaaaattcaaaaattacctaaacttattatgcatgagtatggaaaccaagcattagctatgcaaaaattagaaattggactcaaagaaataaatatatttaaatgtcaagaagcagagaatttaacatgtttgaggcacaaaaaagaagttgcgttatgggtaataggaaaaaaagaatttgcgttatgggtaatatgatgatgaaaaaaacgttataaaaaagagaatagtgtaaaaaattttcattataaatgctgagactaatcagaataaagtatcacaaaaaatgacatctttgagcatatctcatcatgctgcgcatcccaatggtttttattttatattatttttataaaaattcaataaattaaaggtatttggacaaaatctttcgaaccaattaatccaaaccatgagttcccaacagtaaaatacttcgaagtcaagcttgtgggacacgggtgattatttttacgttaattttttatgatttaatattagcacatatggaatcggcttttcaacgcgaaagtacggatccggtgaattcgttggatggaacgacgactcgatcggttatgattccatgggagatataattggttaactcattagggtctcaaattcggtactttttgttaatataatttaggcctagaaggctatggtgggccttcagttctcaagtggcacacaatgggggctgaagatgtcgttggggcgggctttttgggcggacgaccttttttcacgctaaacagagacgcctttcgtaatattccccctcccccattaaatttttattttaattttaaggcattgacgaagtgtttttaaatgatagccactttgtctttccgactgtttcgatgatcggcgaaaaaactactgcgatcgttaataccggaccaatattcttgtttaatgttaaaacattatttatgccgttaaccaaataggccccgtaacttttagaaggaagcataaacaaaaatttt

SEQ ID NO: 7379 - DNA, 4211 bp, Heterodera glycines
  unsure (1)..(4211): unsure at all n locations
gttgaggagaaatttcctcnccttggtagctggcataaaaccaaatactttattatttgttgttgttgaataaataatgttgaatttgaccagttttccctttttaaccaaatttggtaaaatgaaaaaaattgtggaaaataaatgtttgtgtttttatttaacaacagttcaatccaaaataaattaggatttatatatttgatcggtaaatttttgtaatccgttaattgccttccgctttattcgttcttcagtacccgatacgaaagaaatgtcaagcttctttatttttgtggttttgagcccatatttttgacgaactaaagaatttgaaacacaatcattttaatggttttcgtcccgatttgtatctaccttggacatatttcggacaggtttcgacgatcttagccatatggtgcgcaattggtcgctttaacattaggtcgaagattgcttcaactgtaaccaattctgtgaattggttactttgttccatgttttcgcaatcctcggattgcacccactcttcaaatccgggccaacctaggatttccatatttttacaattttttattaaattatgaataaattatttgttgatttttgaataaatttacatatacaaaatttttaattatattattaatttatttaaatataagagagacatgagggtgatgggcgcccaaggttcagatatgaacccagggtgaacccgatttcaccctgaaactccaagggtcatttcgttgtgacaacgaagcgaccccaggcgcttcaggggcgagagtagacagaataaaagatatggtttattataaaattattttcattaaaacatttataatttattttataattgattaattctcaaaatatatttttaattcataactttgattaataagaaattcaatagataaaaaacatgccataaaatgaaagaaaataatctctctattattttggtgtacatagacggcatgaactttgctgatcaaatagcgaccgtgctcatccggtgcaattctgctgtctggatttccttcatcaatttgtactgccaacttaaaagacagattgatcatttttattagagcccggtaaaaaattttccggaggcgggagcaagagttaaaacttttctgggacgggagtcccgatcgggaatcccataaaaatcccactgccgttacaatcccgttcaccaaaaaaaaacgggtgcgggaccggaactctcgtaaaaatccccgcgggggtcccaatctccaagctctgattcttatttattatacagaatttcacgattcagttttttatatttcgcttttctaccagtttcggcttggtgcgtttgtttgcgcgttttctttgttgttttgccgtgttttttgcccgcttggatgatgttgaagtggcggtgaaagttgaagaacttctattcccatcgtcaatgtcagactcggcaccaacaagttcaacagttgcaccaatgtcgataaatgccgaattcgcgtcagggtcccagtcaatttgctcttcggtctcatcgatttggaaattttcggcaattggggaccattcgttattctgaacacattacacaaaaatgaataacaataattttattgaaaattttagtgagatttgttaacagattttcagaaaaatgctaatttattatccagaaaaattaggaattttatagaaaacgtatgccattttattttaaaaaaggaaaaatttaacctttttctacccccaccccttccctcccacctctcttcctacgataggataaattttgctcaccaaatcggggttaatttgagcttgactaaaaaacaccaaaaaactgcgaaaaggcattataagggcaccaaaagtctaaaaaaaaaagcattaaaagtatgaaaattccacaaaagatatgaaaaaggaatttaaaatttttttattaagaatttttagggaacaaaacatgtaaacttaatcaaaattgctcatttaaatgattataaaaattttataatgatttttgaataaggaaaaatttaaacataattttttatcaaggaaaaaaaatgaaatttccaatctttaaaaaaatttcatttaatacggggtgtacttttaaattttttaattattacctgaaaaagagaccaaaaacggcaaaatgccaaaaaggcacgaaacacgcaaaaaaaaggaaaaaaaacataataaaagtcaatgttgaaggctcaagccaattggaaaaatgtgattttacttgctaatatattgaaactaatgagccgaaaaaaggctctcaaaaattgagctctaattattataatcattatatctatttttacaaagattctgaaagaaacccgagaaatttcaccgttccgaaaacgggatcgtctggctgaatttgatcgttgatcgccccggagatgccattgacggcttcgtaacgaatcggattggtgatgcatcggatgttgccatggactgtctgaaaaagcgaactcaaattaattagtaccgaaaaatcttacatttctaccaaagaatttagaaaaaatgaaagcaaaaaataccaaaaatgaattaccctaaaaaaattgactcaaaatgatttttttaccggaaaattgagttaaaaataataataccagatactgtcaaaaattttcatttttgttaaacaaatgaaaatcccttcgtccattttttgataccggaatttctctgtagttcaggccgggaatgcgttttagccccccacagcgtgccaaacgacggatgacctgtttggtgatgccttggatgttgtcaagattggtctaaaataagaatagttaacaatgtcccatttggaaaaacttaacaaaaacttcacatttaatcaattaaattttatttaaaagtattagttaccctagaaaatttgtcaaatttaaaataattttctcataaatagttttaaatgaagtggcttggtaaaaactaattaaatttcgatagttattattttttgcaaattattttttactcactttacggtaaccttttgcccctccttttccgcgtccctttcctccgtttccttgtccagacatgttgcagacaattggagagtttaaaaaatttctgatgctaaaataaaaaaattataatacatagattaaacgtcctacaaaacgtaaaatgtaaaaggagaatcatctccgcaacttattgtatttgtgaaggatattcgtcggggggggggggggggtgttgcgaaggacagcgatcgatttgtgcgcaattaggcgttgaaattggggggcaacaactaacaaactgcgcggaagaaaagggtgaaaagtggtgcgagggggaaattgaaatggaatgttaaaaggcagaaagaaaggatgtggaagggtggagggcaggggggggggattttacaccggattaaggattttacaccggattaaggtgccttatactacttgaactgatgattattttgaaatttaagaattgtctttttattttattatgttttttataaaataaatataaaaaatctttataaaataaaagatttacaatttaacatgaatcatagttttatattgtaattaattatattaatatttttttatttacatattttttgtctattaacttttagaatttatttttcaattttttattaatttaataaaatatcatttagtagtcagttttcgttaaaatttttgaatcagtctccatgtgtcaaggaaggaaattttattctgcatttcctgtttccttacatgcaattgagtaccagatgcacacattggatgttattaacggtgctaggtcgatccacaaaaaactcagtgattggtcattttcctgaagcctattgcattactttcggggcaccaaaagtgcctgatccttaacccgactggcccggttaagaacaatttagttgtttttcaagtgctatctcccagaccgggtccggttcaaagctatgcgtgcggtaccaaccggcttttttgtacgctcgatgagctctacaaaacggtatcaatggcatccggctgtatcaactataaatggagaaaattggcgataagtgatgtgaaaaatttaaaaatttgaaatgacatgcgtcccgccgtacattagggttaagtggacggcaccgtgattttgtgaat

SEQ ID NO: 7380 - DNA, 1456 bp, Heterodera glycines
gggttcaaagccccttgcctgtaaaatttataaattatttttttgagttttttatgccgctttcacgaatttgacattcattttgcccaatatcgaatcattaaccccaaatcgaacaatttgaaattttaattattcattcctagactggacggcaccgctttatgctctctctgtcttaaatctcttcccatcacactctattgaaatataaaaaccatcaaatgaaaattttcaataaaaaaactactcaaattcttaccacccactaaaattttgttagggaaaaaattattttttcaaaaacttcgagcttcgtgcttcgaaaacttcggggttttgggcttcgaacttcgtgcttcgaaaaaaattgggcttcgctgtcggcttcggcttcgagtgctaagccgagcttcgcccgtccctgctcagcacccagcactcgttgatcttttacttttccgcacaaggaacaggacgaatggctggggctggatttaacaccctctcatttttgcgttatctctctccccattttatttaccgccaaaagtcattaaaaaaattgtttgtaaattttaaaaattatcggaattttaaaaatagtgttgatattaatgttgatggtataatgtatgttgatgttaaataaatatcaacgtcaatgttaatatttaataaaaacaatgttcgttaagagaaaaatgtagattttcctttctctaatgacaacccaatttgtaaattgaattttgaatttattattaaaaatattaaaatcacactcaacctagagaaaaaaggaaagtttataattggaaatgagaaaatgaaggcctttactttatttatgcatttctgctcgagagtctcgggtctcggctagtgaaaatctcgggctttttggctttgtttcggaattggttttcagggatttgattctgaagctttatcttactccgtccgtttgggttaaaattcccaaatacttttacgaattgtttatttaatttgttttttttattttagaaattttaaagtgactgatcgatttgaaatttgcatttggtttcgctcattttctgctgatcatttcgctctttgtctttgtccgctcagttttttcaattttagcgtcgtgtgccgtcctcgaagaaaacgccgccgtcgatggcacaatatttggggcaaatgcccttgaaagcgatgaactactatatgtgattatattaaaataatcaaattgcagcatataatttgattgatcagcaaaataaaacagcaaaaaattgaatggtctgtaataaattcgttatgcaaatgtataaaatacaaataatcgccccaatttggcattgagtcaatcaacattttaaattacaaatcacaatcactttggaattaataatcgatcggtccaacaacaaaaacaatagccaaaaccatcccccgatca

SEQ ID NO: 7381 - DNA, 2232 bp, Heterodera glycines
  unsure (1)..(2232): unsure at all n locations
ctgagggcaacgcgggcacggcggtggagtggcctcgcntgagaaatgcattttanaacattggaaaaattgtgaaaaagcaatcacaaattgccggtccagcgccggcggcgccaggcactccgggcgcgcccggcttgccgggctttccatgtcgtcctggccgtccctgagggcccggaggtcccggcacgcagcatggtttgcacgcgccaccgccaccagccacgtttgcgcctccggcacggcccaccgacgagccagaggggccggcgccagaaggcgcgcctgctgcatgcgcttcgtagccggcctggcgcgccgttcggtttccgtgcgcgacgaatggtgcatttttcagcacctcaacctcgcgaaagatgtcggaggaagagccctgtgaaaacaatgtaattgaattcattttttattcggtggacacaaaattatgacataattccatcaaatttcggtatttcgaataagaaaaaaaggaaattaaaattatcaaaattagaaaatataattaaaaatagacaaaatcacaaaattttgattggttgtaattttcgtagaccgaaaaaagttttattttactcggagttatttatgcccctgttttagaccacccaaacgttaacacgatcttggtttggcaaattcaatgtatagcgattaaattcaaaaaattaaaatattttaattttagaaaactaattttacaaaaattgaaatgccaaatttgccggaaattccgctgatcaattttcgaataatcctaatgggcaaggaagaagtgattaatgggccaaaatcactaaaggattgatttagcccctaacagctttagttggttttttttttattagactcagtttttctcatattttgagtctccaaaagaaaaattttttgcttatgaccataaatttttgtctaaatattattttactttcgaaatcattcaatgtcaaaaacactaggcatggacggagttcaatcactcatttcccaatacccaaatttttacggccataaaaaatttctcggaaagtcacagtaattgcccgaattcacctggcacaacaccatgtcctggttgagctgtcgccgcacatggctcacatagttgtacatcagcggcagcgtaatgaacgccgccaccaccgaggccagcgagaaggtcagcgcggaataggcgacaaatttgtacgccttcacttgcgtgtcgtaattcataatgtgtggcaccggttgttttataataatcaatggattagcccgcctttgaagggataattaaggataattaatcgccttttacgctcattaataatgtcccatgatggaagcttcaatatggtaatgacccattaaaaaaggaggatttttttttattcccaaccagtggacggacggctgctttaattgaaaattacagtaatcgatgatacagtatttcaagggcaaatattgtaacggtaaatgaaaaagaaataacaaaaatgtcccaaataatgattataagattttgagaaagattaaagaaattattgagaaaattaaatttattgataagattaataaacaaaatttattgtttttttaggaaattcaaaaaatgattttattagccctattaaaaaataaaaaagattatcaggattatatgtacacattgttgctccacataaatgtgcacttgttggaattgggaaaagtgcgcgctgtgttttttgccccgagggtatttggcggaggcaccctttttgcttcttcctcttaattggcccttattagccccactatgggattggaataagtgtgctatgtgttcttttgctgctgatgcttgctgagtctcagaatggacggatccctccctatttataggggggagaagccgatggagggatagggggagggcaactccaatcagaggcccaaccgaacggggcggggacgggggagaagcgggggacctgctggctgactactgattgattatgattgcttttaggcttcactacttcatccggattctttcgtccatttttttgctgcttcatccctcagcttttctcgctccacgccccctttaactcctcccattcgtccatccgccaccgccgccgtaggacaaaaacagcagcaacaacaacaacaacatcaacacctgtactaactctaaatggagtatgataattatgcttatgctgataatgatctgca

SEQ ID NO: 7382 - DNA, 1184 bp, Heterodera glycines
  unsure (1)..(1184): unsure at all n locations
agcgcccgcgttttgcttgagggcatttgcgcgaacatttggcgcacaattcactgtcggcaaatgaatgaatgcttacttcaccggcaggcaagtgataagcatctcttctccccgcccctgtgttccccgcggcgcgggtgggcgctgcatttttcctgttctctctcattccgcttcgtgatccgtccggcttcatccattggcggctgctgctgccgatgcccccggcacttttccttattcatcccctcgggcagcagcaccacacagaagcagatggactcggcttatgcttgtgtttttttttatttgccgttctgttgctctgcttcttcttttttcttgttttgtttaccatacactcatttgcccccgtctcatccctttgcgctatttgttgttcggactgactttgcacttgcactctaatggaggcgttaatgggcgaacgataattgagttaatgattgaattttgcaaaaaaaaaaaaataattcttgaatttacttttgcactctttatttgacattatcgccgttaattataatggtttttgctacataatttaataatttaaataaatttcaaatatattttgctaaattataaaatatctttttttaattacaattaattttaaatgataattattttgctgaataataaaatattacaattattttaattaataatttatttctaattataattgaaataaattatttgaaatattttgctaaatgataaaatattacaattattttttaattaataatttatttctaattataattgaaataaattatttgaaatattttgctaaatgataaaatattacaattattttttaattaataatttatttctaattataattgaaataaattatttgaaatatttgctaaatgataaaatattacaattattttttaattaataatttatttctaattataattgaaataaattatttgaaatatttgctaaatgataaaatattacaattattttttaattaataatttatttctaattataattgaaataaattatttgaaatattcntgctaaatgataaaatattacaattatttttttaattaataatttatttctaattaaattttataaaagttaattcttcgtataatctattctataaatgtttgggattttttcac

SEQ ID NO: 7383 - DNA, 1503 bp, Heterodera glycines
  unsure (1)..(1503): unsure at all n locations
agatcagcaaaatgccaaaacgaaaagtggtggtaacaattcaccaaaaatttaaaaaaatatattttttaagaaaatcaaaatttctaatcaatggcggagaatggcatacaaatgtggcacaaaacaaaatgttcttacataccaaattatagtagtcggaatgtgtgtgtgtgtgttttggcatagtgtttgttggcaacaattcaagaattgatcattgatcaattgaaaatcaattactacaattggcgatcaatccaaaaaaattcgggcaatacggagaatttcggcacaatcagtcccctaatttccgtgatcaatcagttggtgccgacaaattcgttgtcggggaacagaagcaccgagtcaacaacgccggacccttcgcaaacaccgccctggttcaagttggccggcttaaattgagcaattgaaattacaaaacttagtcctaccgtattcttccctagccgaaatttactcattagtctaacccagggttctcagttttttttaattcagggcaaaaggcttgaatttcgagttttcaatcaaataaattaaaattttttgtgtcaacggttttacgaattttttttttttttttgcttttcataaagttttgcggcgcggtggccggcggtgccgaaaggcaccagtggaaaagtaagttaaatttttcgcagttttgccaaaaataatcacattttaaaatttttaaatcttttaataacaattactgtaaaaaataaaattttcacaaaattggctagcccttaaaaaacagcccacttagggactctgtggtcaaaatcaatgcttctatgggccaattttaattaattgtttaataaaaagagagaattataagcaattaattaaagaatacttatacagttgttaaatactacaatagacgccttttcgttctggtaaaatattacagtattcctccttccgctaccgtatcataatagcctgcccaatttacactgtcatttaatgaccaattaatattaccttgcttcgggacaagtagccttcggccgaattccacaacactttgccgttggaactatccgcgatgatggagccgtagatgcccaactcgctgaccacgttttccaagtaaggcacttggaaggggcgcatcaagtaattctgaaagggataaattaataaattattttgtgaaatatatttaaatttttttgattaaaattcgagtctctcactaataaatttcattatgcaattaaaaaaatgtattgccatgtaactttttgtaaattatcaaattgatatgagctaaaaaagtagccgattaaatattttttgtaaattaagcgctttcaacaaaaaaaaaatcgattcccatttaattttgtgagtttagattctaagccactcaaaaattttcaaatttttcatttatcaaatagaggggaaggagttggtctgacagntaactaacgaggactaaagcggaggggggggggg

SEQ ID NO: 7384 - DNA, 8832 bp, Heterodera glycines
  unsure (1)..(8832): unsure at all n locations
gaaccaactgaaagaaacaatgcagagcatttactatccgtcttgtttggagacgagggatggaaaaaagttaacttgagaattcttaagcaaatcattgaaggtgtagagttacaatatcatccaaattttgaaagattcaaagcggtttttacccatccgagaattgaatttatctctttttcgcctcagctcggctatgtcttgggttttgaaaaacctcaaaatgtaaggaataatgaaattgctaaatatggaagtgatctccgtggtggatttgcaagctttgccgtctacgcaaaaggtctaaccgagaatatgattgtaggaaattcgttgagctcgctccttcgtgttgtatcagtgtcgggggcggtaccaggcgcgtacacggaaaaaatttacgactcaccgctttatgcacgtgttttgccaaaagaagcatcagaaattgaaattgaattgcgaactatgaccgacggacgactggtaccattttcctatggtacagtgctgatcgtattaatatttaagaaggtgataaatttttaaatcattcattttttgttaacattcttaattgataaaatggtacacactctttatgacacttcggtttcgggctatgatgcattttttgtgcaaaatggttgtggaatcggggaagattcctcctaccaagtttttcgaggagcgccaccatttcagcgagggtggggctcagcacagacgggtgcaggaataggggatatttttcgtggtctctggcgctttttcctaccattaattcgcagagccggagataccgtagcagatgaaacaattcagactggaaaacgttttataaatcgagtaatcgatgaaaagcctggcttgaagggaacagtagagacattggcaactgagagtaaacggggagcggacaatgttttagagaaggtaggatttcggcgctaatttggcacaggaggacgaagaaagcatataaaagctaacaattcctccattctatcacatcaaacgataattggaaaaacaataacaaagccattaattaaaagcaaaaagaggcttcgatcagacgcgtttgggctttattaaaaaaatgacatttcacaaaattgacgcgagtagcatcgattcgattaccaacgccgtggacttttttagtatacctccgacaaatgtcaccgtgtcatcttcaaaggttttcgagattttgctgagtaatccactcaccgacacaccttaccattttaaaatacactcgagccaaaattacattgatctgtcaaaatgttacattttgaccgaatttcgaatgcgaaaattgacatcaccaaatggtgaatggggatatttggatgctactgatcaggttgtaccgatacaactgatcggacacacgttcatacgagacatgaaaattgcaataaatggtcgtgaaattttcaactctaattcactgatggcatacaaaacttatctttctcatgagctttcgcaatcacttgaagctaaagtttcgcatttaactgctgctggatatgaccgtgaagatgctaacaatttacaaaacgcaaattccgaagggttcaaaagtagaagacaacggtatttgggaggtcgaacagcacaatacattgcaaaaatcgatgccgatctgttcaatgtgccccaatatttgattaatcattgcgaaattgacataacgatacaaccccatgacgacaattttttgttaattgacacattagaccccccgggtcaaccatatagcattgagcttgttggattgaaactctactgcaaaaaagtcagtcttatggatggcttggctcttgagttggcgaaaaaattggaaatgaaaccagcacggtatgctgtacgaaaaacaatgatgaaagcactgttcataagcccagggcgctatgaatttaatgcaaacttgttcatggaccaagttccacgccgcgtaacaatgggtcttgtggcaaactcagattatgtggggaacatcaaaaggagtccattcaactttcagcactttaatgtacgtgagttgagtgttgtggccaatggtcgctcctatccccaggccccgtatgacattgactatgaaaattggaaatttgtccgcccctacaatgacacgcaagaggcgcttggttttgccaactctacatatggaaatggaattgattatttttcttttttgcacactcattgtatttatgtgtttaacatgactaatagtggagatgatcatggcggtttgttcgacctgatcaaaaagggatgtacagcagtgaacataaaattcaaaaagccagtgcccgatgggggaattacactgatagttatgggagaagcagactccatctactttttagataaaaacagaacgattgcaactgatancaccatttgatttcaaaaaanatgtttcatttattctttattgtcttgttttttcaccaattgtttgtttgattgttgaagaaggaataaaagctgaggaaattccccaatataatgagtggaaaagacttttggggtttaaaaattcttcagaaattcaaaaaaatactacaaaagcaacgctcgcctccactttagttaaaaatgtttcaacaacccgaaaaacgacaacccaaaattcaacaataaaaataaaagttactacaacaagtatagaaacaagcagtgccttaaaacaacaacaacagcatcatgataactttaatttcccctttgtacccctctgcaaagaattaccaaaagaggcaaatgtctatgcgcatattttttgttggtctatgatcatcctttttgccttgtccgtcatcagcctcatcatctatcagcttcgttcaattctttggcttaagctaactttaacggaaaagggcaataaggcaaatggacagcaatcagattaccaaaatattgatgtcttcagagaaaacaagccggacgttccttggatgcttcccatgcgaccaattacctgacccaaattcattaagatttccttgctcattgattgttaatttagatgctcatcaatttcccggttctcactgggtcgcaatgtttgcatatggattaaagaagaaagtaatttattttgacagtctagcgctaccgataaacggatcaattggtagctcctttctcacttcatttcccggagcggtgtataaccaaaaagtctttcagtccatttcatcaaagtcatgtcatttttgcatttgtttttactttttatcatcaggttccacatttgatcaatttctaaataaatttaatcatttaaatagtcccgaattgtatgttcaacattttgttcacaattttccaataaaactttaaagaaatgactcttttttttttcattgtataattaggtctatttcacaaacgaaaggaatgaaaagtaaagtaaacacaaggtaccgtctagtgtctagcaccactggctgccgaatggacctaaccaatctgcaatgacccattgaacgctgattggctgaatatccattcacccattatttatataaccctttcctcctgcacaaatttaggtgtatgttgtgaaaaggccagaagaaggtcaatttactcgtatttccaatgggtgtttactttccacacagctattgcaaatgatgattggtcgtcgtccccttctcatttgtagatcccgctgaaatctcggcggacattgagaaaggaccggggaaggtcaatatattcgtatttccaatggatgtttaccttccactcgcaaatgatgattggtcgatgggcatttcccttttcatttgtagcttccgcagaaatgttgaatgatgattggatgaaagagtagaatggtcttatgactaatattgttggtcctttctgcataaaattgtgaaacaataattctgtttatatgtcttaatagtttccggtataaaaaagaatagaatatgctatgaattcattttattattggaaataataaaaaagtattttagcaaaataaataaaataaaatgccaaattctcctcctccatctaaacgtccccgccgcttttttattgaagagttgctccgtgagccattcaatcagctttcgccaccgcgcaaatcaccaaaagattacgtaaaactgctcaactccgaaactgagcttgtcccaaaatttcaatggctgaaaaataagtcgaactttatcatcgagaatgtgcctgctgatccagaagcccttctaattggaatatttcaagaatgcatggatgaggcaatgaacgaaagccgcgtgaaaggaattaaaccaacccatctgggctgcaccatttccagtcaactgctaacatcagacatttggatcccaattcggcagcttactcctgacaccatcaacacaattctaaaccgatttaacgacgttgcgcaaagcaaaaagcaggatggagtgacactttggggcgagccctttactgtgtcagtaactacagtcaaccggaatgggctgccagagaaaagacaattaaaagggggagcagcacgtaaactggcaccagtcaatcacaaaatacatcaacaatgccttattaaggtgtataatacttaggttttgttgaatataaattatttaagatagaaaatgctgataattactgcttgttttacgcgatgcaagcaacaatggtccgcacagttggtaccatgacacgtcaacatttttacgattatctgcatggaatcaagacaatgatagggaagctgcagagagaaacaacagaaatgatgaatgctgtaaatgctccgctcaacctcctcaattatgatgcagaaatttatgttccgcgaatcatcgattggtggaatgacgaaaaatttgcgaggcagtggaaattcaaggcgtttattttcggatcagcagggcattacaagccattgtttaaatatggggcggatgactacgatgtgtcaattctgctgtattttgatgagggacactttaacggtgtgcagaaaaatggcaatttgtttgggagaccgtattgtctgagctgtgaaaaaacttatgatcgtccaaagcagcacaccaaaagttgtaaagcccgctgcataaaatggtataaaaaaacgtaatagcaaataaaaattctctattttattagctcccaaatgggaccgctttttccttgtaaaccaatcgatggatttcgtcaaaaatgcagcgactgcaataaaatgttcttcaaccaagtctgctatcagcatcatctttccctaaacttttgtaaaacgagcaaggaatgcaaacattgcggtgtggtgtgggacttgaacaacaataccaaaaatggaagagaggtaggttttgttttttcatcaaattttttgctttaaggaattgttttttttaagggtcacaaatgcaacgaaagatggtgtgaaaattgtcaaatttttcatgaatttgagcgaggctgctttataagaccgcttgaaccgaaccacaagaaggaaacaatgggatggcgtctggttacttttgacttggaaacaacacaacacacgcctatcgacccggattttccggaaaaacggaagcatcaagtcaatttcgtgaccgcaaaagtcgcgtgtccggattgtatttcatcagggagatggaaagagagtttgcgtggcaaattctgcaacgtttgtggctatcaccgaacagtcacattcagccagatgccttttcatgagacaacagtcgacaaacaaaatattgaccgtcaccctttggttgcatttgtgaaatggatactttacaagctgccaaaacaatacgacactattgcttactcacattttggagggcgattcgacatggtcttggtctttcgagaattattattggaaggattcaacccttcaatgattaaaaagggaaatcgattgtttgagatgaaagcaagtttttttttattgattaacgtaaataatcgtgtatttgtaggtgaaaagcaggaaaaagatgaacccaaatgtgactttccgagactcgtggaacttaattcctgggccactggcatcgatggtcccaatgttcggtttggatgtgcaggacaagcccttttttcctcacctggcaaaccggcctgaaaattatggatgcaatctcttccctaccaaagctgactatttggcagacggaatgaacatcgcaaagagaaaagaattcgacaaatggtatcaagagaacagaaatgcaccctttctgcttgatgaatcattggccaggtaaaaaaagtaaaaatttttaaaataaaacacattttagctactgcaaaaatgatgtcgatattttgatggctggtttaattgctttccgctctgaatttttggagatgacaaaaagatccgccggggcagatggaaaagctgatcgggctgcatacaccaccccacacaacggaattgatccaatacggcactgtattactatcgcttcagcatgtatgcggcattttcggacaaaccacttgaaaccagcacacttggctctcgtaccagaaaagggatatgacagttgcggggataatcaaagcgatttggcactcaattttatggagtggtatgcggaaaagtttgatgttcaaattcaaaatgcatattcagccaatggcgaaaaaaggtagaatttgtcgaaaatacaaaaaaatgggcaccaattttaagggttggaaatttccgtcttgatggatggattgaatctcagcaaaaggggctcgagatccatgggtgcatttggcacgcatgttccaactgttatccggatgataacgaagtgctgccttgcggcaaaacagcagggcgaattcgcgagaaaaacaaacgacgaatggaaatcattttggaacaagtcccaaacgttgagattttttggcaatgcgagattgagacaatgttggcaaaggacaagcaaatgaggaaaaaattcgacgaatataccggtgacgggggaccaatcgatatccgggcatcattcatgggaggaagaactggggctctgaagctttttcacgaggcagcggaagggcagaaaatcagctattatgacgtcacaagcctctaccctttcataaagtctattaattttcgttttttccttatcaattttttcagttttacaacggattacccaattggtcatcccactcttcacgtcccgtgtgaagaagttgattggcgacggccagaggacaatccatacccattggccattctcaaagtgttcgtcattccgccccgaaaaattgatgtgccagttttgccggtcaaagttgatgatcgattatgttttccgctgtgcatgaaatgctgcaaaaagttccccaatggtgccgtaaagctgtcttacagttgcaactggatttgatgagacaatccggggcaatgtcgaggccgaggagcaatttatcgcggaatgcaacgaacaattcggaattcaaattgaccgtactaaaatggtcacgaacaaaggaaagagagccttggccaaacttgccgtcaacaatttatgtatcaattttcaattttattttttgcatattttaaatataggggggaggttctctcttcgaaactttggcctttcacaaactcatatcacggacgatccatctgagctcgccaattatcttgacaacaagaaaatcgaagttacggggcttgacatgctgacaccagacagaatattaatcagctaccaacagaaaaaggactggattaaggagcatccgtgctcaaatgtggtaatctcccttttcaccacttcggcagcccgattacacctactaaaagcaatgcaaaaagttgtgcgtacgcctggttgtgtccttttgtacaccggtaaaaaaatataattatccaacaaaaatcatattttattttaagataccgattcattgatttacgcccacccaattggcttgaaccctctcaagactggaccccatttgggtcaatttacagatgaatttccagaggtcaaatttttaaatttaattttttaattcaattttttatttttagcacgaaattttggaatttgtgagcggagggtcaaaacaatatgggttgaaacttcgtcgcaatgactctgaccaaattgaacacgttttgaagctcagagggatcacactaaactatgatgtaacagaaaatcagggacttcgctatgacacattcaaagatagtgttatcaaatttgcccgtgagggaaaagttactcccataaaagcagtgtacccaaatttcctccgtcctaccgtaaaagaaggcattgttacttccgcccctatgcaaaagacatacaaaccatatgtagggaaagggattgtttgctcacatgatttccgggtacttgattttggttatatttcaccataattttgtaaaataaattgaattattataaatttattgcttgaaaattttaaataattcaaaagaagacacaatttgaaaaaaattaagactgagaagaggtcaattttggctggaaaagggaagaattagtgaagagaagatacaatttctgaaatattagtaaattgaaaatgaaaattttaaaatgagttaaaagaagatacaatttggaaaaaactaagcttgagaagaggtcatttttagctggaaatgtgaagaattagtgaagagaagatacaatttctaaaatattagaaaaaagaagatcaaactataatctaccataacgaatacccatcactttgactgcattcattgcgcccatttcgcattattgacatgtcaga

SEQ ID NO: 7385 - DNA, 4139 bp, Heterodera glycines
  unsure (1)..(4139): unsure at all n locations
aaaaatgtcacacgtataaaattcataagttgtctcagtttcaccgaaattaatattccnttgtatcatccaatagcactaggtgttctctattcaaatataaatttatgtagaaagaaaaaagttattatcataaaagtaaaaaaaaaattgggtcagaatgttttgtccataccttttttgaaattcaataaagtttttaatatggaatattaatagagcatttcttagagctatcgaaattccattaaagttggaattctgactgtagattttttgtacttttatggccataattttttataattgaaaaaaaatttcgaaccgcttggcggatttatgaaacaacccaagacgaaaattttgcattaaaaatgatcaactgatttatatggaaaaacatggagatattcgaggatcggaactttttcaaattcaagaacaaagatcgacaatgagtccgagaatggagaaagaaaccgaggcgccaaaaaccaagaaaactgaccttttcaaatattcacggtgccacaaaagaaaggttgggcccccgtgggcggaagggattaagctgggattgcagtggaagaaggacagccggtcgtactcgtgggaaccgtaaccgttcttcatttggagccacgcgttgtgctaaatggcaaaaccgcctaatttctgcagaatcgggcaaagcccggcctccatcacaaaatatatcagcaatctccgagacccgttcattgtttttttgaattttagtcttttttggcatcccaaatgcagtgatgttggagtcatggcatattgtacaaaaaaagtcttttggcaaatgcctgaacctgtaaaggcattctctggtcgaattaatagaaactctttaaaaacattaaaaacataataataatttaaatgatttaatttttgattacttgaaacaatcaatttttatcgcttcatgaacaaattttaaatcagacagaaatttagtcattggtgcctgtacctcctgtaacgtttactgatattttttcaggtttaacctgtatctatttttctatataaaaattttttccggtctctgatccagataaaactcggttcctatttattacttttgagtttaaacagtttccatgcagctgtacagtggcaatacattagctaaagcctatataaaatcaatgctcttacaaatcgctctcgctgatcatcgctgagcatacggtactccattcgcttacaccgtgccaaactcttatccggctcgcccgactgtcgttttggtctgctggtctcaaacagttgagttgccgcttttgccgtcgagatgcactgatctaaaaacaagttaaaactctaaatttatttatggtttcaaaaatttcataaaaaaattctcatgttttgaacaataaataaaaagtattcctaaaatgtttttttaattataatatttttgcaaattctattagatttctcaattttcttgcctttcatgtatttgcataagcagctggtgtttaagcatccgtaccgttccgaggccaccgacggcggcggttgggctgctttttctgccggagtcgctttccgatgggttggcaaacctttaatggtaatttcttatctgtcgcatattttttcttgaaaaataacaattaacaaaagctattaaataataaataaaatctataaataagcggaccaagcccttgtgacggcggtggcaattccttcgctggcacaattcgcccttctctttccgcctaaattttcacttttcgttctcgactgtagtagttttaaggttaaactctatattttgtaaggatacaaaaaaattttatcattttattttcgacataatttatactttgtgaaaacgaattaatatatacccatagttttttttttacttttttgttcctgggagctaaacaattcaaattttgtttttcgagaaaaagataattgttttttttgaaaaataaaaacaaaaacaaatcagacatctttgcacacccaaccttccccttgtgccactaccgtaccttccgtgcctcttgccaccattgcagcctcattatgcatgcttggcgtaaatctggcgccattcttttgcatacggtataatctacagtcaacggtggtagtgttgtgggctgtgtgccaccactgctgctgctttcctcgatgcatgtggccaccgtgtgccgaagatatacagtaatgcagaaaaacaacaacaagacgaagagaatggtttggtcaaattggattttggcacgcaatttacccattttgaacaattttttatgccgaaatcattgataagaattattttagttaagaatcaatggaatatttgggtgattacccaatgaaattctttataattcggaaaaataaaaatatattttaaatttttgtttgaattaaagtattcccgtgttacaatatttcctccccttcccggtatggccatgaattaccattttttcatggcttttagaataaaaattctttggaattatggcatttcaattaataaaaattgtaaaaggaacgaaaaacatttcatatgtcttactaaaatgttgttgaagattgggcaaaacattctttgccaaccgacagaattcacagtttcaagcactaaaaacctttgagcggcggttggcccatttttgagtcatttcatttattcggtggtggctttgctttttggtgataaagcattaaaatgttgtctgatttaggctgatgagtcattcattccctttttacatttattgtttcataaaattactttttctatttaatattaaataacatttgttgggcatgcattaatcatgaagtgaacaaacattacaaatgaataaaatatttcaatcaatcaatcatttaaatcatttatacgcaaaagcttgacgcggaaaaataaagaaaaaatgaaattatatcaaaacaatcaattggtcacttttggagttgggtggcaaagaaatcaacaaatcaaatccaacggtgccgcgtcgttgcgcgaaaaccgcaaaaatgagtattttgcgaaaaccgcaaaaaagggcgttgcgcgaaaaccgcaaaaattttataattaatttatttaaatgttattaagcaaattaatcaaataaaattattttataattaatttatttaaagtaaatccctaataaatataatctataatcaagcatttaattcaatcaatttggatccatgattgcttgaaaatgtccccgctcaaagtagataaagttgatttaattctcttgcttagtcaattcagcagtaggattatctaaatctatttaatacttaacataacttattataatattaaataataaagctaataatttaaaatgctggttcatcagaaataggattataatcaaacattccatcaccatttatttatgttaagagtcataatccatattttagtcattctctaggattaacgacctaccatttggattgcggctttatggcacgccaaagaatttcttcttagtaaattttttacgagtttgacctcttgggtactaaaaaatctatgaattttgaacaatcgtcataaattttttaataaaaaattccaatagtttcaatcatatcggaaagagcaaattctgtttcttcaaagatgttggtgcataaaaaccgccatccatgcttttttgctaaatccgccaaatgggctataaccagcgtatttcctgaattctcctttcatttcctaaatctgccatcaaaagaatataaaattaaaatatggataaaattatatatatttttatcatttgagtaaatatattacagtcgagatttccctagttgtttgtcaaaaaaaataaatctatgaatgttatacaaatgttttattatttgagataaatttgcctaataatttaaaaaaatcaattataaaataattttatttgattaatttgcttaataacatttaaataaattaattataaaatttttgcggttttcgcgcaacgcccttttatgcggttttcgcgaaatacccatttttgcgggtttcgcgcaacgacgcggcaccgttcgaataaagaacgaattgtatctagcattggttgagc

SEQ ID NO: 7386 - DNA, 3056 bp, Heterodera glycines
  unsure (1)..(3056): unsure at all n locations
aattgtcattttgctcttaatgnttgatttggctgatctggtttttgtttgttttgactgatcaatgagtgactaatcacttttccctttttcccaccttcgccatgccgtgttgcacattcttntaagtcaccattgtccaacatttcttgacttttgttcacaatcccctcttggcgcatttctgccactttcgccaccatttggcttatttttacccatttttgagtgcatttgtcgctgtcacattgctgcttctgctgtttgttgaccatatctgacaatttgttgaatgaaattttgttgaaaatcgtgccgtcccgtgcgtagtccgtgcggaacagctcggccgggtagcatttgccggccaaatactccaaaacgcccgccgctgtcatccgtctttgaggcataacatccaacaaattcttcaaaaaaaaaaaattaaaaatttttaggttttgtcataggtcttctaaaatcgaaataaatttgtggcaaattttaaaaaggtcttcaaaaaatgacataaataattaaagttgctattattttagaagttttcattaattttaagtttagtttacaaaaaatggtttttgtggcatttaaatcttaatatatttctgaaaaattttggttttatcaatctcctaaaatgccgagctcagcagtttttttatttttgtttcctgtcaaacccagactttgcttgtttaagaatattaaaaagcgcattttaatgaaagtttgttatttgactgactgtgatgagaacggcaagccgagggaaatttaaccaaattcggagaatgcttttcactgttttgacagaggaagttagccaacgcaaatcgtacacaaatcgctttggctttggccattttgctttaatatcggtcgatttgccactgtaaacgggcacaatgtcaaagagtttcttagcaattgccaactaaaattcaatcagatttaaaggataaaaattaaaattattaaatataattattaaaagaaagaattaaaacgatcgtgttcttaatgagtatcatttgcatcattatcattatcattaacatccccgcccccttaaattatccaacaaactaatcaattacccgtaaagtttcttcgtttgcgtcggggaactcctttttgaccattctcacaaaaatgatttcataagtaattacacccattgaccacatgtccgcttttgaagagcactaaattttttaaggaataaaataaaaatataattttaatacaaaatcttttaaacttttttaatttaaaattaaaattttcctgtatttgctcacctttcttctgtaactttctgggctcgaatacaacggtgagtacagcggatttttgggcactcttcggtagtcagcccgcttgtaatgtgccaaccttttcctccataatccccaccgaattttccccgggatcggttcggctccgtcaaaatcgatcagtttcagcaattcctcagactcaccgctctccacatcaacagttggcacgtacaaaaaattgtgtggcttcacatccaaatgcatcgcaactgtttgggtggtgaatgaatattcgagagtctcggtttgagactctctcaatgaacttttcaaagtttttgaatttgtgtcgcgaatttcggtcatggataaaaaaattttgcccaaaaagcctcaaagccatataaaaaggtttaaaaattccttctaaagtattttttaggtcattttaaaatttataaaaattccttctaaaataatgaattataaatcccttttaaattcattaatttgtttttgcgccctaacttagagcataactttatacgaattataaaacttaaatataaaaaaataactaaagaatgattaaaagcatgtcatctgattgtgtttttgtaattttagttttttttttgggctttgaacgaatttcccataaaattagctttgacacaaaggcttattcacagaattcagaacaattaataactaattaccctgatgcatttcctcgattggcacaaccaattgtctggtcatctgcagcagttgctgctcagatttgtctttgtcgttatcgcttatagcattttcgtcgttgtataaacgttcgtcaaacccttcggcgcccttctccattaatatcagtgcgcgctttgaccgccttctttctgttctggttctgagtaatccgcttaacagaattaaaatagaatcagtaatattccaagctgaattaagagcaataataaattgaaaatttttattttttattaaattgcacttggcatttgcttatttgttagcttcgtagcataataatttttatgtgtattctctttgcttgaaaaactatttaattccccatcaataattatttttgaacatttaaataatttgcattttaatgattgttgccttactaatcgtatattttcagcagatgccttcttttcgtctcgtccaatttttcgatcatttttattacttttatcgaatttcgaaaacctttgtttgatatgctttcacttcctctgcccagcctaatctcttttaccgccaagcattgcttctcaggaattccatccgcttttccatttttggcaaaagcaacataaaccttttaggtgtatttacaaaagttttattaattgattttttttattttttaaattttattttgtgtgtctacagtaatttttttaacggatgaaaagcacatgtttttggctggtgatctcgaactgggtttggtcatgtttcattttttttgatttgaagtctatcttccttgaaaatgagttgaaagttccgattttacgccttactggtcccagtcaatcaatgtttcggttttttctaaaatcttgttcccgaccagtcaggggtgtgcgaaatttcgtgtcgttttcgtgtcctccccttttttcgtcactttttgagtatcttttcgtgtttcgttttcgtcggtcaaaaatttttttttgtttcattttcgtatttaaaaatcttaaattttcgtttctttttcgt

SEQ ID NO: 7387 - DNA, 2114 bp, Heterodera glycines
  unsure (1)..(2114): unsure at all n locations
ccttttaggtgtatttacaaaagttttattaattgatttttgttattttttaaattttattttgtgtgtctacagtaattttttttaacggatgaaaagcacatgtttttggctggtgatctcgaactgggtttggtcatgtttcattttttttgatttgaagtctatctttgaaaatgagttgaaagttccgattttacgccttactggtcccagtcaatcaatgtttcggttttttctaaaatcttgttcccgaccagtcaggggtgtgcgaaatttcgtgtcgttttcgtgtcctccccttttttcgtcactttttgagtatcttttcgttttcgtcggtcaaaaaatttttttgtttcattttcgtatttaaaaatcttaaattttcgtttctttttcgtttttggattttaaattttcgtttcgtgtttcgtgaaaaataaatattttagtttcgttttcgaaaattattagttttttgtttttcgcacacctctgagcccgactaaccagaatacataactccgatatcagagtatttatacactttttgaggtttttagagggtcaattgagtatttatgtattttctttttgaattagtttttattattgtaaattaattgacctttccaaatccaccacttcccaattcgtcgtttttatttgttaagatttcttttctccttccatcttttagcgacttgaaggaaatgcttttgaattcttttgaatgtttaaaataatcacaattttctaaattttttgaattaaattttttttatttttataaaatgccttttgtcgacgccgccgaattgtccattaattctccgcttccatttgcttttgtgtcgtctttttcatataattgtttcgcattaattagtttgtcttttaatgaaattgaggcgatgaaaaataatattaaaatttttattaggaataaattcatttttaatatattttttaaaattaaatgcaataagcaataaataaatatatttaatgattttttcaattgatttctctatgcttttatttgctatttcatcactttggcttctctttcagtgtttatttttccattattaatgaattacgcatgaaatttttattgataataaaataaatccattccaaaatcattttcgtattgacatttaaagcggcattaattaattagattcagagaacgcccaaaatgattcagttaaattgctccaatccatcgtaattccaagcaggacaaatgtgaacaatcagcaggcgaatcatttttaattgactttgtcggaagttgtttttcgatattaaaacttgaattcgcctatacagaagtaaagtttcaaattctcccggtggcgcctattggcaccgccggaccctccccacgccccaagccgaaatccttgggacttcctgcaccggcacgctcacaagcgccgctgctcccaaaattctaataaaattttcaaaattttaagtttagtctaaaagctcaaaatgggaggattattgaaaattgatgaaaacatttttgttaagaattgcttttatttaattgtgtttttaaaaatttacttatttttatcttacggcaaaattattttgcacctttataattttcaataaaattcaaaactggtcattttgcatatagtgtaaatttcgccataatttaaaaaagccatgtcagtaccccgaaaatttgggtcagtaccccgaaatctgggcaaatctgaaaccagaacatttatatttttgccagatttaaacacacctttaaaatagggaaaatctgataaatcaggatatttggaccttcaaaaattaaatttattaatactcgacttttatcgttgactataataatacaataatttattttaaaattttataaaattatgcattaattatccctaaataatataagaattaataaataattcgttattataactttttataacacttgattgcccatttggcctggctgttgtttttgctgctgtttctgctcgatttcaccaatgaaaaatatttaagaatttcgctaaaaaaataatttatttacaaaaaaaatttcatattataccanagtcgtttta

SEQ ID NO: 7388 - DNA, 1806 bp, Heterodera glycines
attttgggtttactttactatgctggcccatgaaaacatgcagtttttccggtgccaaatttttgtgaattttcattcggcgcgtcataagcggattgtttggtggcaaatgcaaacaaattttgtgttattcgaatgcgctcggcgggttcgacatttccaaatgtatcaacaaagggtctatctccactctctggcgaggtatggccagccaaagcagagtggggcataaacaagaattttttaatctttggtatttcctctattttgtgcctgctctacatttatgtcttgtgccaatatgcctattgcaacagaaatttattcagctttcccgacaaattgttgagataattattctagacgatttttttatatctcaatgcttaactatcgcatttttgtttggcaactggtagaaattggcagtgaaaaaaagtttgtttgtaactatttacaataaaaatttatgtagcatttctaaaaaggatgtaaaaataagttcttgcgtaatatttttatattgtgtgttgaagaatttgagtctgcttctgatgcaagtggaaaatttttcagcttttctcgaaaagttttttcccagaaaaaggatgggacaaataaaaaactaaacatctctcatgacaatttaaattcccttacattttgggtttactttactatgctggcccatgaaaaaatgcagtttttccggtgccaaatttttgtgaattttcattcggcgcgtcataagcggattgtttggtggcaaatgcaaacaaattttgtgttattcgaatgcactaggcgggctcgacatttccaaatgtatcaacaaagggtctatctccactctctggcgaggtatggccagccaaagcagagtggggcataaacaagaattttttaatctttggtatttcctctattttgtgcctgctctacatttatgtcttgtgccaatatgcctattgcaacagaaatttattcagctttcccgacaaattgttgagataattattgtgagtgggaaatgtttgtgttcaaattgatccatcgttttttttaattttcagatttgcaaggggagagcagcaagacggacgaggacctgccgatgagcagtgttccctattttccgatggtgcccgactcaatgattgcggaggagcacatggaagagcggtccaaaaagttggagaaatggctgcggtcgatgctcaaagtgccggtcaatcgcgaataccacgaaatggtcaaaaagcaaccttatttttaattcttaatatcattcggtagctcagaatgtctttattaccctgccaatttcaaaaaaaattgttaacttttcgaaaagttatgactaaaaaatctggaaaacttgattttttaaaaatttattttgccagaacttttttgaaagttaacgagtttttttgaaattttacaggctaatagagaacacttagggctatcggctaaatatcaataattaaaaatttggttattcttgagcaaagtattaattatctttcgtcaaaaaatccttttgatggttttttattacgacatagcactgaacaccacttaatattttgcgattttagctaattttttaagaaaaatgggattatgggggttccaccaggaaaattttttggactttttaatgaatttgttaagaaaatttccaaaatttgcgacccctcaacctcgctgcgaaccctctcgcgccacctcttttacaccggccatccttcgctgcgaaccccccccccccctcgctggcccctttgcgagcgagggggg

SEQ ID NO: 7389 - DNA, 3690 bp, Heterodera glycines
caggccgatctctataaaatttcccctcttttttgtctacagtgtgctcgacttgcgctgccaccgtgaggaggacacccaggactgggtggacaccatcaaacgcgtgtggaagagaccggacagatttggctgcaccgaaaacggtacaactcctcctttccgcagcggctcagttcgtactgccaatggttcgtcgacgcaaaagactgctgggagaaggtggcctcgctcatcgaaatggcgcgcgaggagattttcatcgccgattggtggctgagcccggaaatatttttgcgccgaccgatggccgagggaaattattggcggttggactgtgcgctgaagcgacgcgcggagaagggcattcgcattttcattctcatctacaaagagatggagatggcactcggactgaagagtctgtactcgaaaaagcatttgcaggagttgcacccgaacataaaggcgagtcggaccaacggaatgatggacgaatcgccaaattctaaatttggatcattgggaaatgttttattttaccccttttcaataaggtattttatcaggagtgcatgcacccaaaatctcaccgcctgaattcaaaatctgattcatggttttctgaatttgaatttttattgcttttaggttatacggcacccggaccattatttgggcagcggaacattcttctgggcccaccacgagaagctgctgatcattgaccagctcattgccttcgtcggaggcatcgatttttgctacggccgctgggacgacagccaacacatgctcaccgacttgggctccgtggtgttcgagccacgctcggagcagaacgaagtggtaaagaaaggcgaaaatgcgcaacgtaaaacaacagaagcaacaacaacaatcatttaggaaccaattccgaaggacaacggaaaagtgacggaggacggacagaattggcagcaaattcaccgtcgtaccgagcacataatcgacgaggagaggggccacaaaattggcgagaaaacgactgagacgataagcaaaccctcggcggaaaatggttcagaaacacatataaaattgtctgatttggtgccaattatgcgtattaattaccaggggacggaaccatgcgactgaaagaggcatttgcgacgcaaaaacagccaaagttgagagaagtgatgcaacgcgcggtggacagagtgcgcgcgggacggcgagagagtgcggacggcaacagagacacacagacaccgcaacaaatgcagagacaacgccattccgcggacggaacggcagagaaaacagagattgtggtggagaacggacggccgatggtccgcttttccaacttcaccagcaatttgtccgcgttggaggagcaccaaacgacgaacattttggacacgagcgaaggggggacgacaccaacaacaagcgaaacgtaaacttttaagggacacgggagtaggtagggccggacccaatttcagggtactgaaattttggatcgaaaatacatgagcatggttttcgaattttagcgatttttcgtgaatttgaactctaaaataactttaggttacttttcgaaactgttgcttattgttatagaagataaaaattactttttatttttaaatatttacttttctgtttagttaaaattactacaaaacaagctattaaaagcgttagtccgaacttctgacattttcggggtcggaattaccgaaaaatttgggtttcaaacacatacaaatttgtaagttacatctaacgcagccgctggggaccaacaaatgccgcaggggaaattataaatacggaaaattaatgcataaatttaagacaatcaaaagcgccttctgggccgaagggaatgacgacgccgacggggaacgcgcaagttatgatggagccgaagcagaacaccctcatacgacgagcactgaacaatttgaagcccgaaaaggcgcggcggcgctggcgtttggccatgcaaccgtcggaggaaacggcggatgaatacatagtcaagtacatacattttttagggggggggggggggggtttggcgtaatatgcgtgcgattggttcagctactgccgactccaagagaccaaagtggacatgtcggggctgcaaggggccggcaaattgtggccaggcaaagactacgtgaactttgtgcacaaggattttgttgacgtcgacctggcctttaacggtctttgataagcaacgattttccaaacaaaaacccaatttaagacttcatcaatcgctacgacaccccgcgaatgccgtggcacgacattcactccgttgtttacgggtccgcggcgagagacgtcgcgcggcatttcatccagcgatggaacgcagcaaaggtggacagtttatggcaccgattcattcccaaccgaaattcggaatgcatgccctttttgcagactgagaagctgaagagcgacaacagatacccctacctgttgcccaagtcgtacaattccatccgcgtgcctcgcgtgctgttcggcgaaaacactcagcgagtggaggtccaagtgcttcgctcctgcgcccattggtcctcactaatcgacaaaacggaggacagcattcagcaggcgtacctctcgctgatcgccaacgcacgacactatgtgtacattgaaaaccaattctttgtgtcgatgataaacagcgcggacgtgggaaacggtaaaatgctttagtgggttacggtgttcggatgcccctcttttctgataattcagtggaagaaagcatagttttaagtcagataaaaattacatttactttttaagagatttgccgcgttttgtgcgaccgcatcatccgagcgtacaggtggccatttttaaatcatttattttttaattaaatgctcctaattaattcattttgagggagaaggagacctttcgcgtgttcgtgctcattccgctgttacccggcttcgagggcgacatcggcgccacttcgtattcggcgctgctcgccgtgctccactggacaatgctttccatcgccaagggcgaccactcgctcatccaaaatctgcagagggcgggcgttgaaaatgtgcagaattacatcactttttgttcacttcgaacgcattctcaactctacggcaaatcggtaaaaaaaagagggaaaatggggaggattgacccgtgcccgaacggaacgaatgaatgtatgatcaaatttctgacatttttgaaggtcaccgagttggtttacatccactcaaaactgatgattgtggacgatgtgcacacaatcatcggaagtgcgaacatcaacgaccgttctcaggcggggaaccgcgactcggaggcaattctttggcatttttggtcaattaattaattgattgtctaattgattgggagtaaatgaaaatggaccaaaagcaatggctaactgactgtttcaaggtctgtttgctgatcaccgatcacgaatttgtcgacggccgaatgaatggccaaccgttccgtgcgggcaaattcgcgtcctctctccgaatgcgactgatgcgtgaacacttgggtctgttggagcaatcgcttccgaagacttcgccggagagagcagccgaaattaaaggcatcgatcctgacatgtccatctgtattcgaggacca

SEQ ID NO: 7390 - DNA, 2936 bp, Heterodera glycines
ccccccccccccgcatcgcaaaatttggatcacagagcgatgccgcgaagaatacttagtgttttatggatcaacagaaccggcaacaacaggtggaagtgaatttttgtaaagttgtctttcgttttatggcaaacaaatcgcccctcgggggacaaaggcaaaaaaaggggtgaccgcctcaattccgagagaaagggagggcatttgttggataaagtcaatcgaaatgctgctaaactcacaaaattcagcacattttctccgaaaacattcgtcgctgtccgtcggtgcgtttaattccgtcgctttgctcagtttcaacccgaccaaatcggagatttgcttctgcgccagtcgaatacgtcggaacggagccgtggcggaagaacaattttccctttcgcttttacccctttcgttttttcgactttcgtttcgggcgtccaaaaatgccaaagcgacgagacgagctgaaaatgggaaagtgtcaaatggaagtggtgatttgtgagttggttggtccatttgaggggtcgttttccccaaaaacccggggggtctgtccgaatgcgtcaccaattcacacttccatcattcattgtggtccatcgctcaaagtgccaaagtccgccacttcccccccccctctcccatttctcttcctcattccttgtcgcctgtgtttgtcctttggattctcttccctctctcatcccctgcggggtcatctcccccattccgccggcaatgagttgagttaattcaattccttcccctcttcccccccccccccctctcattgctttccttttcaaaatgcgcagggattagggcaaactgagggaaaaagtgccgataagtgaagggacgaaagaagaaaatttgagcaaaaagaggagatgagcaaaaaaggaaaacaaaaagtaacgtttaaaaagggaaaaaaatgaaaaattggacgattaaatgccaaagtcggaggatgacacaccgtaaagcgcgggaaaatcctctgcaaattgttggggcagaacgatggccagagaatgattgttcggcagtttggaagtgggaggcagcggaggaaaaggggccgaaattggtggcaaattctcgtagactttttccaccgcactgatgttgacgaattgggtccgatcatcatcatcctccactaaatcaattgcgatcactttttagcaaaagattccttttcaatctcctctccgatcacttatcaaatcaatcccaacttccatcctccctgatcagtccacggtccctccctccccaatttctttcctctccatcacttcgtcttcctcctccgatcagtccccactcacatttctcttccattccgctgtcactgttgcaattggtccttttcctcccgctgtcgtcctcttctcttccttccttctcattctgatcacttcctttgctccctccgattggttccattggtaaattggtgtactgttgtctttgttcgtccccataactttcgcttttcctcttcatcagtgcatccctcttcattttgtgcttcatccttatccgtctcagcaccgtgtaatgacggcccgagggcgagaaattattagccgaaggatcactcggccgaggcaaaagttgaggagaaaacatttggcaattgaggccaaccgcaggagaagcaggaggaggaaggaaatctcgaaatggagaaagaattatgaaaaaatataaatgaataaatgatcagtatggctccaatttttaggtgctaaaaatgggaaaatacgtaccaaaaagtttcaaatttaggggtgtaaaatcataaaattttatccaaaaagcaacaaaattaagctaaatcagtaatgagatacataatttttaaattcaaaaaaatttgacaagaaaaaaaagaataaattttgtagatgaatttttgagaaaatttttcatttcttttcttaggggggggggtatatcttttaaaattttttgggtcgcttcttaagagtgtgttattcgtttttattgcattttgttaataaattttgagcaaaacaataaatagttgaaatagttttttcaaaatttttttagggttttaggtgcgaacaataaaaaactagaaaatagttgctaacaactcgaaaactagcttaacaataacaaccgaaaaaacatgtttttcgtccgtttcaggccatagggagctcagaaaaaaataggtaaaaaactaaaaattggagccctaatgatcagcaccaattaccattgatcactgatcatttggtcaataatcagtgataagaatggtatataagtgatcaaaaagtcactaataccaaaacattaagtgataatggtcaaatgatcaatcactgatcagcggcgatcacttgtccctaatccttcccatggcttttctttctttactcactttccgtttcattgcttccggcggaattcctccgaaagtccaacagaattggcgagctgcacttctcatcgtccatttgctgctgcttttcctcctccaatgccatttcggttttccccaaatgatcaaattccatgtccaaaaatgccctctccgtcgttttgctgtgccgtttcgctccgcgcaaatgctttggccgacggattgcgttaaaataatcgtcaatttgaagttgctgctgtttctgttggcattttgcccgtttttggcgctgtttattattcccatgccgttgctgttggttatcatcgctgggcttaggtcgaaaatacaccgaagtttcgtctaaaaggcgaaagtgacagagcaaatcctcctgacttgactttggcgtggaacacgaggccaacatttctgaatttcctttgccttcaaatggaatttttagtgccatttcacgtgccattcattacctctctctctctcccgctttccc

SEQ ID NO: 7391 - DNA, 1207 bp, Heterodera glycines
cccctctctccccctttcccccccccctctctaccccctcgttttcttccttccccctccccactctctcccttcccttccttccttcccgctcccactctctccctatctctcttcccttcccgcactctttcccacctcttctgtcccagtcccatttcattctcgacggtgtcagcacttctcttcggtggacgattcgcttctgaaacttcttctcctcttccgcttcggtgtccgattgggtgaaattccgggaggagaaagtggacgaactttgggaagagatggagtggggacgcacggtggagaaggaactgtaggggaacatcagcagagcagcggaggaagaagaacacgaggaaggacgacgattaataagggcacggaagaatgggcattggaagggacaaagtcgagaggaacagactgaaagtgggggaaatcagccaaaaagtggaaaccatcggatggaggggtgggaaaagaatcaaaaagggggaggggaagataagataccgtggggagggattgtcgagagtgcggtgagattggaccttcaggaactttttgatggtcgatgagacggtcaaggggaggggactaatggtccataagtgatagaggccaattaagtgagcaatcaggcggaattgaaaaacacaaatggaagcgaatgggggaaaagtggcgatggagaaggacactctcgaacggacaccacaaaaaagaaatggatgtaggaaaatgatgaaacggatgaatgagagaaattgggaggaatagacaaaatgggaaggatgataggctgatgaacaaaaaatgggaaaacaaaacaaatttgaagggaattatgctaaatgcataaaaaagggataaatggacaattgggttgtttggcaaaaagtgccaacaaataaatgatgaaaaaatcggaattaagcgacaattaaatggaaatgatgatgggagagatgggatgaacaaccggaagaatgggcaaataatgaaaggggggaggaaggaatgggggagaagaggggggaagatggaagggagggaggggcagaagggagtgccaattgcagaacccaagtcagaagagctcaacaacatccccgcctagcatttatattggttgggttgggcgtggcaaaagaaattgagagaaatgtggaaaacagagggggggggggggattggagga

SEQ ID NO: 7392 - DNA, 978 bp, Heterodera glycines
tttacatggaaaagttaggacctaatcatatacccatatgatgttggagcaaatattcgaattaacgaacagctgatggatggtcaaaaatggccatcagagcaaacgctgtgggcattgtaagcttattgcctttttaattgcttttatgctcgggcgatgtccatttgaatgtccggaagggattagctcggaagtgacaggtgccgagaaacaaagcgggcactaatccccgaggaaaagcggaggaagggaagtgagccgggattatcgcatgcggagaacaaatgggattggggaagggggaggaagggacagcgaagtgggcataatgaagaatgaaaagtgggggtggggcaaccgacaggggaggaaatgagacacgggtgatcgttttgaaatgccaaaatttgaatttatggacgacgtgcgacaggtgggcgggaggggggaggaagatcattttccaaatatgccgtcgtcaccctctccaccccgtccgccagtggatcattttcctcccgactcaccaatatttccattgaaattaatgaatttgcccatctgttcccattgggcaaaggtgccaaattgaaataacaaaagtcattttgctttaactgacttttgttactttctttgtttgctcagctgttgctgcgcatttgaggaagggcgaaattggtacggaaaaggaggacagacaaaccggcaacagaacattttgccaagaatggcacactgacaaaaaaaggtgagaggggaatcaaaaattgagacaaaaagacggatagaagaataataagaacgaaaaggacatcagcagcagggcagagagagaggagtttaaattcaaacgcaacaaaatgatttatgaattgctaattaagtgacgggcaaattggcgccaaatggcaaatttcaaatttgtgcccatgattgcattaatacctgctgaccgacaaataaatcttaatc

SEQ ID NO: 7393 - DNA, 278 bp, Heterodera glycines
aaagaagagagggagagaaaggaagagagggggggaattaaaaggagaaaagaagagagggagagaaaggaagagaggggggtaattaaaaggagaaaagaagagagggagagaaaggaagagaggggggaaattaaaaggagaaaagaagagagggagagaaaggaagagagggggggggaattaaaaggagaaaagaagagagggagagaaaggaagagaggggggggggaattaaaaggagaaaagaagagagggagagaaaggaagagaggggg

SEQ ID NO: 7394 - DNA, 1342 bp, Heterodera glycines
atcctgaaatagcacttttacagtatactcaagatgacttctaataaaaattattcgttagttttttaatagaaaaacgttttttgtcaatttaaaaatttttatattcacaaaagctaaatataatttatattaatgtagaaaacacaaatatttgttttataaattgttaatttcataaattatttattagatttaacttttaaaagaatttttattttttttatatttctttcataaatcctaaattgttcttcatcccttctaattacaagtttatggaaggaagaaaacggcactttcttgcagccaaaaattagaaataattttttcggtacaattaccgaaaaaatatttatctaataaaataggaaaatgactaaatcaaattaataaattcaattcaacttttaaaaatttttcgccttcggcatcgccggactaaatattgaaattcttttgtttttcatcataatctcaaaatcaaaatttaaagggaagtcaatttcgagtcattattatgtgaaagttcaacgaataaatgagaatttgaaaaagatgttttttacatttttattatttattgcaataaaataatgctctgctttataaaattggtaatttgccaattaatatttaatacatttaattaatcaaataaataaaagaacacccaaatatagattaaaaatggtcgataacttagcatttaataaatgaatttaaattatatttttattttcataatattgatttaaaaatgattttaaaagtttaaatatttgtcgatttaaaaacaatttttatacttataaaatggaatatcgatggcttttcgtcgtcccccccccccccgaaatattgttgtacttttttttaatcataaaatgctggcctgtcatttttatgttatttttgactaatatacaattttattatttgtttgccaatcagtcatatcggagaaaaacatttatttcaccaatttttccactttttaagtatttttcttccatccagaatttttgttactaatgccattttctaaacttttatttgtcaatcagtcacattcgtcgaaacatttacgttgccattttcacgcatattaattatttcacaaattaatgtgttactaatggcatgggtgtgagagcaaaagccaaaacaggcctttaaaaggcgcacaaattgaagcgccaaatcattcattcattccgctcaaaagtgccatcgatttcctccccacaaaaagcatcaaattctcgattctcggaaaaatgaagccaacattcaacttcaacctttttgcatccgtctttcttgtgctttgtgtggtaag

SEQ ID NO: 7395 - DNA, 1939 bp, Heterodera glycines
tttcttcaaaatcaggcatgtaatcaccccatttgcgttggaactggcaacttgtcactcaaacgatggtcgtgggacggtcgtcattgtaaggtacaacaagcaatcaaacaatttaatggatgagataagcaccggctttccccattttctgatttttatttatttaagcaattcatctacaaagggcagggcggcaacacaaacaatttcccatcaaagaagcattgtgtccaagtgtgcaaggtgaaattgcgcggcacgatctatgagaaaggcaccaaaggggagggattgtttaattgagaaaacgagaaatggcgagagagtgtatgggaaaaggaaggagacataagagaacagacagttagagatcgatgagagattggttgccccttcctcctcctgttaatgggataataataataaatttaaaaaatcaccaaaagtgaaaaaaatgagataaaattattaataatgtgattggtacggtacgtctccatgccgtcccttaccctcggcaggggcttttttaagcccagatccccaagacacgtccatgatgtgaggggtggatattggaattattgctaattaattgcccaattttttcagccatgaatgagccgtggaaagaaggtgcagcgtgaagagaccagcaaaagaagaaaagcgaagaaattcaaagaaatttttgaaaaataaaatttaccgctaatagttaaaatgattttggtggaataaacaaaaaatttgcgtctgtccaaataaaaaatttttttttctgacaaatacggaaaatagagcgaatcaatcacaacaatcaatcagtcccccatttctgatcacatcgcatcccatctagctcaatcgctgtgcttagatgttgctagccatccattttttgtttggcattgcgcaccacggcataatatttctaaataaaaaaatagcgttttcgtgaaatatcaatattaaattaaaaaaatatttttaattaaaatacacacttcgccgtcactgaacaatccaaaatatggtgacaatgatgcgtcctttgctttcaaaccgaaattgaaaaatttctcgtcgtcaattttttcaatgacgaattcagcactacgttcagcagagggcagcaaagagtcggagaatgaattctaaataaattaataaaataataaaaaaggaattattaaaaaaaatacatttaaatcggagatatataattagccaaaagcaaacaatttatatatataattagccaaaatcaaataatttcccatttttgttataaaaataaaccattcaaaataattctctccctagcggtccaatttcggcaccggtggacataaaatttcattttttcggtgccatttttctgtaaaattggcggtccgcaaaattttcccaccagaatttcacaggcggacgtcgtctgctgctggccgcttcgcttctccatcatctccttgaacatgttcattccgaacacctcaatgccatttgttgtcttgtcaccgcgtctctcgccgaacgatttgcaaatgctttggcgcatgccaagtttaaattggcgttctgttcctccgtccgcatccgccattgttggcgcctcggggctgaacaagcagcccaacaatgtgccaacaaagcgtttccggtacatttcggttggcaccggtgacacaacttcctgagagtttatgaattccgtctttaatctggtttggcattcccttgttaatcgattttgtccaaaataatcaaaatagataaattaattttattacatttaaaattaggcgttatacataagatagaaatggaaatttaaaaaaagcttttctttcttatgctttaatggcaatccatttttttcatgcttttttaaatcttttgctaaatttttaatacgacccaaactggttaaacc

SEQ ID NO: 7396 - DNA, 1704 bp, Heterodera glycines
tgcagacaaaggtggctttctgttcatatttcgtgtctgctgccggctgtcttttgcagtgtgggcaaattgcgcggattgcgcaattttttgtgccaattgttgtgtccacggattcgtcgttgctgccacctgtgctgttgttgttgttgttgttgccggattcgttggttgggggtccatgaattggacaacccaaaccaagcgcactgtagtcattcagtccattggtggcaaggtactgtaattcgaatttttaaagaaaatttcaagaaaaaattttgaaaattatttagcgatttttcatattttttgatgaaatacaaagtttttttcaataaatttctccaaaaaatcggcagaaaatttttcttcttgaaattttcttaaatttagaatttttttttttgagaaatttcggtttgaaattttttaatttttcggggaggggatgcaattcccctggtccccgaccaaataagtcaccctctaaatcttaaaaatgtttctttaaaaattaaaattaaacaaaattttctgtatttttcaaatgcttacgtgcgcgtcttgcttcactctgtcggccaattgtctatacgcttccgcagacaattgcgcgaaaactcttttttccctttctgtaatacagtacccgacgcacaaggagaaaatcaagcggcgcttcaaccgttccgaagttgtttacaactatgtgcagcgtccatgtacgttttctggacggtgtaaaaattatttttgaattgttgcacttttttatgggtgcatattttcatcatcctcaaaaagggaacttttatttttccaaaaaaaaagaaagaaaaatatgttattttcctgaatttctcgttgaaaaaatattttgattcaattttttgaattttcggtggaaaaaaaataaacaaattaattgcctcttaacacggagactgaacttgttaataaattatgattttttatttcccaaaaaagtgacgggtctgtatttttccccttaaattttacattttttacaattcgcttttttttaattgcccctcccctccctttgccactgtcagtcctccactgctcctgggagaaggaggaggcgcgttcccgccacgtggactttgcctgcccaattgtgaagagcaagtccaacccgagtttggcttccgccgcctccgaccctttgccgcaggtgccattttcagaggagacaatttttttgaaatatgtgccgttttcttacaattttcaaaaaagagtgatttatcgcttttaaaagtaaattcaacaaagcatttgagtgctttttaagcctgcgccgttgcaaaacaacatcaacaatgggtgggcggcggagaatggtgccggcgaacattcggccaatttccagcaacggccgacgaatgacaacgacgggagcagcggaaatgagaatgaggccggtcaccacccaccaccgccctactcctcctcacagcaccaccaccattcccaacaaccgttgttcctcaatgtcggctcggcaccacccaactacggtcacaacggcaacagtaacaacattggcacaacgccgcagcaactaccgtaccatttgatcaataatggggcaggcggcacacagacgacggtgagtggtgctgaagtgatggggaccgggacaccactggaacgacgcggattttccgggatata

SEQ ID NO: 7397 - DNA, 3149 bp, Heterodera glycines
tgcatttttaagcgtcaaccattgcgctctccgcccgcaatcgtgcagaattcggcagcggatgattgaggcttaatggtttctgatgatatttttcaatttccactctcttctgtctcattgtgttcctttgacgcatttattttctatgcattcgtaaattgaaacttgtcataaatgaagcaaaagccattgaaggcatgtccgcgtattgatgggccaataattaagcataataatactggatggttgactaattagccgaataattagacatagaatggaatgcgctcgcagatcacccggaacagaacgcaggagaaaacaattttctattttatttcatactttgtttacactttttgaaataaagtgagtcatcattttgtgacttttgaaaacaaaaaaaatcgaaaaatggaagggggagcaaagcacgctattaccattgttcgttctggtgtgtgatatgaatcactatttcccattttggtgtcttttccgtatgcatttgtaattgaaacttatcaaaagaaaaagcatggataaaatgaattttcttttcgaaaaaataataaagtaaaatacgtacaggttaaatgtttaagaaattaagattaagcagaagattgatcatccacacttttctccgtttttcgtttaatcgctttcactttcttcctcgaattttccgttgaatgctctcccattcgccatttcgtccaacccaaccttccaaatctgatcatccgccgaattccaatggaaagactaaataaaaaccaaaatcactgccagcgtagtggaccgattagagtacgctacactctcccccatgtcgtctctcttcccccgaaaaaataagttaatttttcaacaaaaaactaaaaatttctaggaaaaaatagaaaaattttaatagccaatttgcgtcgctgatgggggcggctactgggccccataaaagcaaaccctgaccagcataaaccggtacccatcattttatacattaattcgtgaatttaaaaaaattgaaaaattttatgtttggcttgaatctggctggatccatgcttggatttcgtaggtcagtacccaggccatttttggcaaccgggattttatccagaaatccaggaccatgccttttttaaaatgcacaatgttcatgacatatgttaagttttcgcaataattttgctgtccgaagatttgatcaaacaaaaaaagatatttttacaaaaaaaaaaaaaattattttagctaattaaacgggacgaagatgaattaaaaatatctcacgaccagggacgataattatacgggggaggggctgatcccgggagaaacgagctgctcccgaccgactaggcaaaccgtgtaattgcgtccataaaacccataaattaatttccaactttttgtgccattatatgccaaaaggtaatggccaagttttgattgtaaaatttcccgcatttgcgagtttatttccctccggttcgcaatacctttttcgcaccattgccctttccgaccgattcaatgcgaacggatgggcaatgtttcgcgacgaatgcttccagttgattgggtgtgtccaacgcgttttcgcgaatgactggtccaaacaaacacaacaacaactcaaggagatcgtcgcgcttaattcgcaaccaaataatggccacggaaatgcaaaataacaaacctccatattacgacggctaaacatcgtctcgttgatcagtgtggccatcgatgtagaattcccaaaaaccttggaaaatattaaaaatttggcaaaatcaattcgaattttgtgcccatattctctatctggtgagaaaagaaccgttcaagagaaagattaattttgtgcggccaaattaattaaggccaactgtagagttgacttggtcttctattctgttcttaatttctgggtccaggtattttcggaaacctggatttttcctaaaccaagaggcaaaattccttcagcggtatctttctgcaccattcgctaaccatggacgttttgtcgagttggatggacgtgttggaagtgctcggtgtttttacgggctcagcggacgtgttggaagtgttgttggacgttttgtcgagatgaatggacattttggaactgtcagattcgagtttgatgattttttttttactagttggtttgcccttctcaagacgcacaagtctttgccgattcgcttcgcccaatgtcagttgccggtgctggtgctgcaatcggccatttgagtccagcacctgttgtaacgggtaaagtgagtacgggcaccagccgaaagttccaaaatgccaaagattttttttttttgcatattcatagtctttctgacaatgagctcacaaacgaatggtccggtggtgtcggcaggcggacaaaaaaattttgcaaaatgatttaaaaaaaggaaaatgacccttgcctggcaaaaatatttactttccgttccaatgcttcgtccaaaaacagcctttgcgtggtgttcgggtcaaccacagtcagcgacaggttgtcaaaaaagccaatttcgacggcctttgccagtgacattggttcgcgcattccgtgcaaatgcaccgtcccgttttccgtgttcaaaatcctttcaacaatcgcctttccgacgttgtaaccatgtaatggcacttcgatggtgccattgttttcgttgtaagcgcccatcaccgcctaaacgaaaaaaatggcataaaaactaacataacctatgcaaatttttaaatttagaccatttcaaaagtttcacttttggcctcttttaaaaaagcacccgacaaactggtaatgccatttttaatcctggccaggtttatgcaattattcctttcttaattcgggccctggcaattcaagggcatcttttgttcttattattttctttacaaactttgtgtccatttcctcgctctttttgttcgtttggcgccttgccagtcgtttctcccttattttaataaaaaatgatcaaattagaaggaaaaaacgcatgtttacaaaaaattcacccgacaaaatgtaattcgatatttaaaacaaatatgtaaattgaagtgtgggcaaactacgacaccggagataccctaac

SEQ ID NO: 7398 - DNA, 4781 bp, Heterodera glycines
  unsure (1)..(4781): unsure at all n locations
aatgattntgaatgaaaaaattagtaagaagaaaaaggccgtagaagatgagtgaagttgagaaaattgaaagaaggaatggaggaaaataaatggaatagacggaaatggatggaagaaaaaacggagaaagagagagagaaaacatagtagggaatggaagaaaaaggaaaaaggaagaaagagcaaagaaggagtgatggatgagaggaaaatggttggcggaagagaaagtacggaagacaagagaaaggggaaaaagagagagagaaggaaatggacggaagaggaagaaaaagaaatgatggaagaggggaatgaggggagggaagagaaagtgaggaagaaaaaggaaattggaagagagagagagggagagaggggaatggacggaagaggaagaaaaagaagtgatgaaagagaggaatgagcggcgggaagaggaagtgaggaaggaaaaggaatgaatggaagaggagaaatcagggaggtggggaaggaatggaggatcttccgccgccgtcttcacctcctcccccgcccaattcgtctgtccgtcccctcgggggaggggtggggtcaacgcccaacgccgccctcccccaacagcagcagacaatgtgaataaaccaagcaagcaaatgacccctacacttctgctgctgttgatgatgaccaccccctccccccattgaacttttttatttgttagcacagcaaaatttttaccaaaagcgtcgtcagagagggggggggggctagcaaaaaaaaaaaattgaaaatttcaccaaaaattggaaattttaaatgcaaaaatggcctaacaaatagcaaaatgaacagatcagggacccaacccaagttttcagttaaaattaagccatttccaatccattttgttgttttccttaattaaacatgaaattctcatagaaattgggggctcacaaaaaaaagagaaaattttttccaaaaagtggaaattttaaatgcaaaaatggcctaacaaatcggaaaatgataccccacagggactcaacccaagttttaagttttaaaattaaaccattttcaatttttggcttaattaaaacataaaattctctcagaaattggaattgctcctcctcagctgtcctcctccaacttgaagttgttcataattgggttggttctcttttctctctctctccgtttgcatttgctgtgctgtggtgaagtggacgaacgcatgcacacatttattatttgcggatgagtgaatttgagatttgtctttataccatccaaaaatgaaaaaaacggaagaggaagcggaaaattgaaatttttgtaaatgccgattataaataaaaagcacagtgatcgctgatcgaaaatttttttgtcaaaaaaaaactccaggattcaggtgggatccgatttagaattttgttacaaaggtccggaattcgtcccaagaatcagtggatcaacaaatccaggaaattttctgaaataagaatgggatgggatgtgctcaagcattggcacacaccagacagcaccaccatttgttgtttatagcctgggacaaaatcaggcatttccgcggcaaatttttttttggcatgaaaaatacgaaaaaatgaatttcttacattaatttgctcccccgagggcttccgggattacttttatttccgtaaaaaatttatgggtctcactcattgtgtgctgctgctgtgcacataatgatggactcccgcccgcgagcatacaatgcgcaatttttttttgacgccgacgaactttgaagtacacacattttcacaacagcgcagaatttgggtcgactcaattttgacgcccgggggaaaaatccgccgataattgcgactgcgccgacaattgaaaaaaagggtggcatggagcataataaaagcccatcaaaagtttgttgggaaaaattcaaaaaatgtattggacattttttggcaccggtagggacagcaggggggggaccgtaccgtagttgttttgttactcaatacagtaatatacccgtgtatttacaaaggaaggtccccaggtgtccgtgggatttccgaatgaaatttggtgggtggatagagcacccacaggttcttaagaaaagtgattttattttttgcggaatgaacccgagtgccgagttatgacgtgccaaagttttttagtgaataaataaattaaaatttatttgcgccttcatcaggtctctaatggcgcagcggtagtgagctagtcctcgttatttaagctcacaggttcggatccctgacatgcaaactcattttttaattttatttttgcctttttatgcaaaagtaaataatcaaatatgtttttttatgaactgattttttttaccattttaacatataagatattcaataaaaatattagataaaattatatctttaacagaaaggtgtgtatcttttaaattaaattattgcgtctttatctttaatgatttttttgggtgttaatgaaataaaataaaataactatttcataaaaaatatttttaataatagactgcaccagaaaagcaaaaataaaaattgtaaaaatgtattagcatgcagaggattcgaacctgagacacaaaataaatttaactaacgcactacctctacaccaatagatgcttgtggtgtagtgaagtaattatttcttttctttaattagaaaaaaccaaaaactttggcacgtcataactcggcactcgggttcattccgcaaaaaataaaatcacttttcttaagaacctgtgggtgctctatccacccaccaaatttcattcggaaatcccacggacacctggggaccttcctttgttagtgttattcagtgcaatatttatactgtactttatattattgtatggactggggaggtattttccctgttttcaagaaaaaattttcaaaatttttcgaaaattatgagcaattttcttggcaaattgcattaaaattcccaaaaaaatttttacccctatttagcatattttttgaaaatttaagtcaaaaatggcaaaaattggacatgttttggcgaaaaacggctacaaattcatggttttctccatagagaccaaaattttaaaataacacttgaggaaaatattcatggaccgaagagcaaaaaattcggctcccccctccggaattttttttgttttctggctacaggcctttgggggggggtgcattttcgggaacagttacataattattgttgcagtagttcatgtgctctctattttccgaaatccgacgaaaattgcccgccccccaaaaaaaatttgtttttagagaaaatctgtccaacaaatccatgcgcattcattcatcacatagaagagcacttcacaaacatcgaccacggaagcaagcaattcattcattcatttcgctggtgaagtggtcgccgcgggcgggcgggcgatggtcatcgaaatccatcgaaatccgaccaaataaattggaaaagtgttaaagaaagagcccagcaaatcgatgcacagtgatggacaaaacaaaagcaatgtgcttggggatcggattagaaagaaaagtgtgaagcaattattggatggttgaaattgtgagggggattttcaaggactggcaattgcgagggttttatgaataggcaatgacggattttttaaggacatccaaagataggcaattgcggactttgtttaaggctagagcttgcgggttttaaggacatttcaaggacaaggcattttggattttaaaaacatttcaaggacaaatttttttggatttctagacatttcaaggacaaggaattttggatttttaaagacgggtctgtatcgttttggcgccgccgttttggcgccagcccaagttttcggactataacttttttatttgttatccttataccacctaatcgttggtcatcactcgacccgcttaatgtgtctagaccactctgagagaatagatggtttgagatttgtactgaacaaccttattggtcacaagatgccagtgccattgtcgaggctgttgttgtccgcttgctgcccacgcgccaattttcatcccttttctcaaacatattttatgtgttatatgtatgcttttcgtttgccccccgtggggccccggaaatgaagcggaaaaagccgcaattttgtccacgtctattttgcccgtcccagggcggaccgccggcggggcggcgatggcaaattttttattttttgatcaaaatttattttaaaaaaccttttttcgaaaaactcgaaatttaaaatattaaaatgcaaaataaattgtaaaattgtcatttttgcgatgaaagaaatgaatgttgtgatttaaatttggaaagcttttctctaagataattaagagaaattaaaaaaagtctcagtttttccattttaatttggaatttttatattataatattattaaaatcttgctttttcatttctttttttttacgaattttttagtttacttttacccataaaattgaaatgataaacgattatcgtcggcgggcgtctttaagtcccagcacaaataaatttgggcatttatccaaggcactaaattggtatttggccttcccaaatggcaataacgcattttttaaaaggaatatatgaaaatatatttttatttccatttattttttaaaccatttttaaaaataatattttattatatttccgaaaattatttttttatcaaattttgttt

SEQ ID NO: 7399 - DNA, 897 bp, Heterodera glycines
ctacaaaatttcaaaaaattttgttaagtttcaaaagagttaggtccaaatatgctcaaaacccaagattttttgagttcctctagtcataacttttttgaaatttgacgaaattttttgaaattttgtagtctgatagagaacacttagggctatcgaaagatatcaaaaatttggttacttttgaaccaagttataaataatttttcatcaaatcatattgatggttttttaaataaagactccacccccttttaactcattcattaattgtcaagaaatgacaaatgggacagggagagaagcaaaagcattctcttgacctttcctctcggcaaaaaatgggatggaatgcccacttgaaaatggactttttgtggccaaatggtgcaaaagagcaaaatgaacgatggccaaaaggtgtcgaaatgcatttgcccccgggggtgacactttgcccgcctcctttttctctgattaagtgcgaaaaatgtgatggatcattttacaattattggcacagggtgaaccgaacgggccgagctcccccaatgatttgtggggtgagaaatttgggacgaaaacagcagaaaatgaggggatggatggcacacccagaaaaatgatgggtggcaccgcttggtgcacttgagtttccccagcacattagaaattgaacttcaaaaatttttcgaagggggggggggtagcaaaagaaggaagtaccgaaaatgattccaaatttattttttaaaatagttttttgaatgcaaatgtttttttaaatttagagatggaaaaccccgtaatcgagattggtagggatcgggtgcccaaccaagagaattagtgggggaatcagtgcttttcctgttacaacaaagttacgaaattcag

SEQ ID NO: 7400 - DNA, 4832 bp, Heterodera glycines
atcatttttattctgcttcaaatgttatgagcgcccttggcgaagggcggggaggagtctcctgcgggtcaacatgttcagcgcttattgtcgagatccgtcttgcgccaatcaaatgctgtcgccatgttcggtgcagcgccacgcttacggatgatacggtattttcgaaaccgtgacgcatttgatgccgccgttttgccgcccgcagtgccaccaccaaaccccatttgccgatcaccgagcaggaccgggtggtggttctgctgcgctgccgtcgttgttgccatcacttcgtccataccgtagcccctcggcatggcggcggcggttgcggcaccgttcggcacaaatgccatcgacgtcgaatgcggtacggtagtaacaaagtcgtcgtcatcgtactcccttccgatgacaccaccgttggaaagcatcgctgtggctgatggcggcagtacagtgtcgtcgtcgccaatgtcaccgtactcctcctctcccactccgaccgcggacacaccgtttgacagcatagcgatcgccggcggcacattaccaccagcactgacttctccaccatcatggtcgatgctgtataatgcaatgttctttcccgacgtttcgttcgagttcggaggaaaaaatttttaaagaaaattttacaaaaaaaatttttgaattttttttgcgcttttttcaaatttgcatgagttaataaattttctcataacttaattaaaaaatttgcttaggatttttgaaaaaaagaaaattttggcttgaaatttaaaaaaaaaattttagggggtaagaacgtagtgcacccgaaatatgatcgtcgcccgagtgtctgcttttacctgccactgtacgcgtcgaattccgccgctgcggtgccgtcgttgtcctccgccggctgctgctgttgttgctggcgcatggcctcccattgtgccatgtcaaactgcatcatgtaaaggcgtgcctggcggtccaactgttgcagaatcacccattcctaaagcaaaacatggccaattcaaagaatgggaagcaattattttcctctttattttaaaaaaaaaactaactgaattttttgatcagcatttcttaaaggggtttttgctagtaaccccaaaaaatgtttgaatttaatttttcggggtttgaagtctttctttgaaagaaaatagccaaatttaaagaaattaaacaacaatttgatcaaaaaaaaaaatttttttttttctaaataacaaaaaatttaactgttttaattttactgattcgtaatgctctctctctctctctttacctttttcaccgggtagcattgcgggtgatgagccgggaagcaatcgccttggatatcaccgtccttcatcgtcaactttggccgatattcatcctgcaaaagggaataaataaaaaaatttttaaattttccttgaaatttttattttttttttgccgcgacattcattatgtctcggcgatgttacggcgacaaccttttggggtgcatcataaaattttgaaaaaagcactataaaaatttctcaatttttttttcttataatttcatataatttgaaaggaccatttcattttttcctaaaagaggctgtttttaaagtctaaaaatggtataatttttaaaaaataaataaaatattcaattatttattacatttgtgtaacgcatcagcgactcgcagcgcgaacagcgaaagtacagtgtgtcgccctcccggttctgggtggtcatacggtactggcggaccatgccccagttgtgctcctcctcgggcgggcatggaatggacaaaatggtggcactagaaattgcgcgacagttgcaactcaacgcgaccggacgaatggaatctgagggaaaaatggcaaaaacacatatatcagagaacgcactggcaattaaaaaataatttttttttttttaatttctttaaattgttcctcatttttaaattggggtgatatgggttcagcacacaaccaccttcgctttcgaaaattaaaatttcacagaaattttcaaaaaaaaacagaaaacttttttataggaaaatctaaagaatttttttttttttgcgatttctcaaaatattattttgaatcaattaacaattattttttcaaaactgttccaaaaatcacacaatttcaaaatatcgttagaaaataattattataatttctttgaaaatttttagtaaaaaaatttttaaaaaattcgggggggggggcaagctgattccaaataatgtagtcatcattcacaccaattttatagaaaaaaataaaaaattatctaataaatttaatttttgggttgaaatttgggaaaaatgtccaaaaacaaacaaaatgtcgtagactctgtccggctgagcgcgaatgtactgctcgtcaaagccgtagtgttccatgcagaagtcgttcaggttggggggcgccgtgtgctgcatttgttcagcaaatgacggcgacttgaccattccgacagccgattcgtccccgataaattcgtcgtatggcctcaaaaagggagcggaaattaaatgaagttataattacgggtaattttaagagtattaaaaaattcttgaaaaaaacggatacaaattgccaaaaaataacagtaaatcgattgggagaaatgcgccaaaaatacggtattcattttaaattttcaaaaaatagtaaaaaaaattattgttttgtctgtatgaaaaaactcgtccgctcgcacatcgaaaactatttccatcaaaaattaatttatttttattttttttcaaaaatttttcaataaaattattaaaaagtcattgataaaatatttcatttattttcaaaaattaaaaattttttctttaccttttcatgcctttacgcttcggttgcacaatggcggcggcatcgtcgtcattttgttgtgccgacatcggaccaacgcagggcgcaaattcgcgctcaagcaacatgtccaacccgtggtaatccaacacggttggcatctgtcaataatgacatacacagttgaaatagaaaaaaattttaaaaaagttttttttttttttttgaattatttataaaaatgaaaattgcagtttgagtgccaattttgtttccaacattctcaacgcaattaatttaatttaaaaaaaattctaatttttgccaattttttgccatcgctcaaagattctttgatggtatttatgtttaatttcaattttactataattaatttaaaaaaagtgctttttacttccgtaaatttattttcaaatttcagatttgctagtattctgaatgtgagcattgttccaattcaataggttttttatttaaaaaaatgaaaaatttcatattttttttcttgtcattttaaacggtgcatttcaatattgtaaaacgtattttttaactgacccccacttcgtacgaaaccaattgcttcggttgtcctcgccttggacgtcgcgggtcatcaccaacaagatggacacgcaaagcgggatcctcctaaaaaaatgtgccaacaacagcaaaatatacataatgagcaatatattgtatttctatcattatttacacttatttgcttttcaatttaatcggaatttcaaaaaaaaactgttgggtttcgattcagttcagttttcattttggatttttcggacattttcccttttctcatttttgcccaaaacatttcctttgccattcatccacaaatccatcactcaatttgacccattttcccatttctctttggccaaccattttgtaatgtcactcgcttggcccctcccattatgtcagtatttaagctccccaattgcctctcgcttttaaccattcttttcccattctcatcctgacccttactcatctcacactaaaccaatttactttacttttcatcctttttcctttgcttaattcttaaacacaaataaaccaatcgcattcccccttttgtgggcatttggaaaagttaatatttggtgaaagttggaattaaataaggcacatcggagtctaagcttagtcaaatacacaacaatttttggtgccacgacccgggagaaggtcaaaaggctaagcaagactagatgaagcagttcagctgtggtaaaggctctgtgcctaaaccaaatccatcaaatttgagctggtcttagttgtgtactaccagccaggctgtttgtgccaatcaccaaatttaaaggagctggtcaagtgtgttttctagccgagctgttgtgctgaaaaaaggactaaatgtcttcaaaaaaaagtgttttaaaacaaaaaaaaagaattttggaaaatggctgagcaaaattcttttaattctcaaaagggcgaaaatgtggtcctacagggacaaattggttcggatttcgatccaattttctttacccctgaggagaaccaaaatctgaacaatgtactgactcgaatgcgaacattcgaatccgctatttgccgtcaatttcgtaaattggagcgagaatttgcagagttgaaaattgtggctcaccaatcagatgataccgatcgaatggtcaaaattgaacggtcaataattgatttggaggatcgagaagaaatggacaattttcaaatggaagaaaaagtgataaaaatggcagaaaaggctgaaactctcgaaatacggcaaaatgcatttgaaagattgaccaaagtcaaatttaacaaggtggtggagaaaatgaaagtggaaatggcgaaaaataacagaaaacattgacgttttgaaaataagagtggaa

SEQ ID NO: 7401 - DNA, 793 bp, Heterodera glycines
agacgtgccattattgtttaacccaccaccaaatgtgccggtaattttgggtcgttttaggttgcgttttctcaaatgaccaagtgtattttttaggaaattcgtgtgggaccaaatcatgatgggcattttttccaatgccgctgagagttttgccgcaaattatacatccgccaccaaatgtgccggtaattttgggtcgtttttggttgttttttctcaaattcccaagtgcatttttcaggcatttcgggtccaaccagttcaacaaccgataccactgagagacgtgccgctatttgtcaacccaccaccaaatgtgccggtaattttggctctctttttgttgctctttcaaaatcccgagtctttttttcaggccgttcgggtccaaccagtgtaacaaccgataccgctgcgagacgtgccattatttgttaacccaccaccaaatgtgccggtaattttgggtcgtttttggttgcgttttctcaaattcccaagtgtattttttaggaaattcgtgtgggaccaaatcatgatgggcaacaaccaatgccgctgagagttttgccgcaaattatacatcggccaccaaatgtgccggtaattttgggtcgtttttggttgttttttctcaaattcccaagtgcatttttcaggcatttcgggtccaaccagttcaacaaccgataccactgagagacgtgccgctatttgtcaacccaccaccaaatgtgccggtaattttggctctctttttggtgctctttcaaaatcccgagtccttttt

SEQ ID NO: 7402 - DNA, 1256 bp, Heterodera glycines
  unsure (1)..(1256): unsure at all n locations
atttatagactttactttttgtgttttatttcgcatttaataaggtgtgtcgaacnnggtaattctttcatatattatacccccccccccctttttttgaaattcgccacaattatgccctgcccgctccccgccgaactgatcaaggaaataattgatgctattccccctccaaaaacacaccggcttctgctagtaaattttgttttggcatcctttgttaaatgtcggttctattccatgatgagaagattgtttcgctcagatcatttattaatgccaacgttatttgatgaaaacggagaagaaacaaaggcaattggccatggaattgatggaaaaggcagggataagcacggatgacaaaacttttggtacccaacaccttgaggctgtacaaaaattttgggactcccaatactcgggcaactttcgcatcgtcacttttgaaatagtaaccaaattcgctggaaaaaatatcccgttacttatttttagaagacccgacttaagccaattttcaagggagaaggtgttcgaagaaatgagatttgtgtgataagagatggggaccacttggatggattaaaatcggtgtcctggtttttctgtgttcgcaacttttgcgtgggttgtgaagtgacgtacgatcgacctgaaagacacagaatggagtgtaaggaaaaatgcaagaagtgctgtagaatgggattcgggttcccatgtgcggatgtgtgcgataagattcactgcgaggagtgcaaccgcaacttctataacaacgaatgttttgaagcgcacaagaaggcggcttgtaacgagtataataaatgtgaaaaatgtggagaagtctaccaaacaggttcgaaacacgtctgcggggaaaagttttgtagactttgtaaagttttccacccaggacggcaatgcttcatcaaaaaaattcaagttcgaccgcagaaagcatatataattgtggcatacgacctggagacgactgtagatgggggagaacaccggcctaatcttgttagtgtggcactaacatgcagcatttgtgcgggagaagagagggaatgtgaaatttgtgaagggcccaagaaaatcacatggtcagtagcggatggttttgacccaatgagcgagtttgtcgtttggataatgggttttcaacgatttgagacggttgcttttgcccactatgccgggaggttcgattcccactttgtcttgtccgagctaacaaagaaggaaat

SEQ ID NO: 7403 - DNA, 5180 bp, Heterodera glycines
tttatttgacttttttaaactttttacttattttcacttcccttgttacaatatcttttctttacaaatgtgtaaatcttatttctttttcaataaaaattcgtaaatttcaggtattttgtcttttaaattgttcaaaatcaatggcccgtctcgaacctgcaccatatatatttgtgcgtttcttttattaaccacttaatttttagtggtaatttctaaatttagatgataaaatcgattctgcatgatgctgggccgcttcaaaagcacgaactggttaaaaaaatattggagacctacaaactgaaatcgaaaaaacacgtaataatgacaatttttttatatattttatttaaatcttatttaatttgtttaggttaattcccgcgtcaaaaaaaactctgcggacatacgttgggaatggtgagctcgaagtagaggctggaagatattcggtggccgcatcgggcggtggtgataaatgaatggtttgaacggttccattttgttattttccatttgttaattgttaataaaaaattgaaaaatattttaacggaaagccaaaatgtttaatgagaaaatggggaaaacgggagaccaaagaattgattaaatgaaagtttatttagtttcgcaaataacaaaaagattagcaactttttatttttttccaaataacaaaaaagataataataataataaagattaaaaatagtgatgccaaatgtaacaaaaagtttatacaaaatgaaaatacaaaatatgacaaaaagaaatataatatctgcaaaataagataataataatgataataaagattaaaaataattatgccacgtgtaacaaaaagcttatacaaatgaaaatacaaaatatgacaaaaagaaatataatatctgcaaaataagataataataatgataataaagattaaaaatagtgatgccaaatgtaacaaaaaaacaagataaaatataatatctgcaaaaaacattatgaaaatttaaataaaaaagcaaagaataaattatggaaaaaagaaaaaatagtggtaccccttgtcttggactgatcctcaactgggttcattatgcattaccaccatgtccgagctgggctcgtccctctcagcgaaggtgcgcatgggggacgttcgaaggcgtgaaccccaaacacgccatcccccgagggggcttaactcgaacaccagcgctgagagagcgaaccgagcgcataaccactacgccacggaacactttgatgacgaaaaataaatgcggaatttgaaagtaattttttcgagatcaaaatcggagatagtgtgcgggcggcgacggagggagggggggggcattaggagaggggagggggcagcaaaaatggaaaattggaaaacgggggatcaaataattgattcaatatgatgtttaattattttcacaaatagcaaaaaagattaataaatttttattgttttcttccacataacaaaaacattagcgattgggaataatgcgaaaaggcgcgagaaatttttccattcttccatatccataaaaaatcaattagatggaaaagtgtgaccgtgagatatgggtttaggtgcgggtatgcagcggggcatctttatacccttgcatgtatgactgtcaataacaccctcccccccccccataggttttcaccattaaatttcacctcttttcaccgcttttttcacctcttttcaccgtttttttcatctattgaagaaaattccggccccgtgtgtacaccggtttcgcgcgatggttcgtggtggggcgggcggggttgggggttggggcaattttagggcaaaaaaatgtactaaccactactgtcctcgttctttcgctgttcacctttttttgttgcgggctgcgctatgtgtacattgagacggacattgtcaagctgtgggtttcaggttggtgtaaaaatttaaaaaaatatatttgaccgggttggacaccgtccgtcagtttttaataaatttaaagggaaaattggaaaaaaaacgaatgaattttttgggtaatttttgaatcttgcatggttttcttattaaaaatcctatgaaaatttctttttttccacacggcattgccgaaaaatgccatcagagaacccaaattttgcaatttcagtccaaaagtgcccataaaacgttgaatttttttctaattttttagagggtggtcgtctgaacgaggagctgaattttctgtccactctgcagcaggagagccgccaacgtcgtcaaaatgcgacaaaacggcacagcgacgaggacgaaccgacaaccgcggcatatgagcaacggcactttttgcccgaggatatggacgaacggttgttcgaaattccggaggacgaagcgcccatttcatcgtatcaggtgggaatgggggtgcgggaggtgcccaaaaaaaaacgaaagttttagagaatttcgaaaccttcccccaattttccaaaaaatagtatttgccgcacttaaaccaatccaaatccgggaaaataattaagatatttaaaaattaggtctttttcctcatattgaatgtttgtaaaaaaaattttagaaaaaaatcatgaaattttgaaaatttttcgtttttttttgaaaattttcaaaaatgcaaaaagtgattttgcatttgccttttatctgcactgaatttaaaatttacgccttttcaggtgctcatccaaacggcggaccattcgacgccctcgcgaaatgtgctgaccaaaaaggagttgctgcgccatgtgcagctgatgcttgaaatcacgcagctcagtgtccacaaatttggattgtacggtttttttggcaaatttcttaaattttctgatgccaaattattgcgttttcaaaaatttacggttttttttaattttctgccaaaattaagcggcaaaatttcggatggtttcataaaagtgtacctgtttttcatacatttttttcaaaatagtctataatttttccataattctgaatttaattactaaattttattgccagaaattggacgctggacgacatttgcttcaagccgggcgccctggacatcagccccgactcgatggcctatgtgctgaagccgaccctggagcggctgatcccgtgcatttggatttcgcccattgactgcttttttgagggcgcgaaaccactgtattaattttgaaattacttcagaaaattcttgcaagaacccaaacgctttcaaaaattgagaaaatttttgatttcctgctggcaaatcctcttggaattttgaaaatcatacaaaatattgtttttttttaaatattggggaggtaagaaagattcacgctctttaaaacccaaaaaaatccgataaattttgaatttttgcaataaattttttaacccctcccttttttaaagcggtccgtcgcccccaattgacatacaaaacattccgttgggtcccctgctgcaactgatggtggacgacattccggaccaggtcagctggaccaacctggacccggagcacgtggtcagtcaagtgaccgccaccttcgacctgggcaccatgcgcaacttcttcatgcgagtacgtctcggatttttggaaatgtttttttcaaaaaaaatgtcggctggtaaaaaatgcaaaaaagaaatgttttttctcttttttgaagtttgaaatttaaaattttccttaaatgctcataaaactgataaaaaaaatcattcggacaggttcccctcgagaaaatttttaaaaaatttaaaacttctggattaaaaagatttttcttgctttttgaaaaatgcctgtagacattatttcattcattttccagtccggcatcggcaaaggctacttggaacggttgtgcatcgacccgcttgacccggcatgtccaccgacggcaccgaatcactacggcggcaccgtgttgtgcgatgcaattcggcattttgagcagcgaattgttggcgtcggacaaatgaccaaccggacaattgtggacattttggcgccgtacaaatccgtcgacggcacaaacaatgccgggaacaaacagaagaagcagaacacatcgccattcgacattttgcaagcattttgtgagtattgtttaagggtttatgtgtaaattcgatggaaaaagggcagagaatggagaggaggatgagagacagtaccataaaaggagcaaagagagagtaagagattgggaaaagagtgcgacaaaaataaagttgttaatagagaggggcgatagacttttggtctggaaaggaaaagaatataagacaaaaagaaataggatagcaattctagagagagagagggtgaattgagaatatcgaacaagagagagtatagggaaaaggtgagagagagcgagagagttcggctagtttataagggaatggagagaaagaaagggagagttcggcatggagaaagacgagacggaaagagagaaagaattaggtacagagaaatattgagttaaagacagagagagagagagagtaaaaatagggagttggtggaggttgaaaaacttcttttttaattttgggttgaatttcagttggtgacgctgatagtggcgctggtgctgataagtctggccagtcgagcaatgccaccgcaaccaacacctcttccacatgttccgtgcacaaaacggcattcatgcgttggctgtcccacaacttggagacgttcgggggccaattcccggcccatttgttgccccgtttccccaactatggccaagtgatgcgccacgggtgccgcggcgttgcctccagcgtcatgaaatggccggccagaatggttatttaaagaattccgtaaatttaataaaattatccccaacattagagtccggaacaggaccggatccttggcacgatctaaaaaatgggttcggggtcagagtctggataaacatcagagtctggataaacaacagactttttaatcctgaaatcgtccaggtgcaattcccgaatcaagatgctgaaattttttttaaattccgaactgcccaatatccgcatattgtttccgaaccaaaactaaaatgatttttaaaaatgttgactcgcataagtcctcgaaatttggtaattttctggctca

SEQ ID NO: 7404 - DNA, 898 bp, Heterodera glycines
cgcttcctccgtccgtcattcttccgcttcgcactccctacttcgtctccactgatccccgccgcaggttcgctgtggcactgatcatcggccattggaatgtgcctaaacaatgatcggttgtattcctctcttcccttccctttccgtctgatcgtttggccaccgcccctcccaccgttcttcaaaaagcatcatcatcgtacactccgctgctgatgagcagtcgtattggctttgttcgcccgaagtgaatagctcttcgctgagtgtcggggactgaactggggataactgagaatggcattggcacgattaaaataaaaaataaattatccaagcaaagatttggaatttggaaattcggtcgacctgatcgccatgcttcatcttcacaagctctttcaaatgttgagaacgaatgtggcgactccaattggaagccgaaatgaatttcagacaaaaaaggcaaaggccattcgcagggcgacgaacgatcgaccgacgctcagggaaaaattctaaatttggaagggaccaccggtaaattgttttgcaattgtcaaaacgcaccgggcgttttgcttttcgcttggctcattcgtttggggagaaaaagtgagaagagtcagtcgaagcaaaaaacaaattaaatgtatgtattgcttaattaataataatttttattatatttatatatagtaaaaaaatatataataatttacggtaaaacggagggcaatgagaagaaaacaatgaaagataaataaaggtaatgattacatacatgagtaccatggtgatgtgtaaaataaagaggatgagaagggagggaagagagggcatagagaggaaacgaaagggaggagggggaagggagggatgagtgaagagaacg

SEQ ID NO: 7405 - DNA, 4149 bp, Heterodera glycines
gagaggcaaagagaggcgagagaacgcggacagacgactgacccccgtgggcgagggaagtgaaaagagaccttccgccgatttctcatctcttcccttctgttgacgaaaaagcatttgctaatatcagcttcatcatcggcttatcttatcacttctatttctaaggcttacaattggtgaaaagtgagtattaccgaaaaatatggtgaatagaaaaccaattacctagttaatgtaattatatataataagataattagttaatccgacctgcaaaaacaacaaacttttaaagaaagcatgcctaactaaatgaaaaaaaccattaacaaatctttattatgcatgaattacataatttacatatactcttgttgcaaatttggtaatttggttatttgcatcgtttaaaaattaagcataagaattggccaaggcattcatcgacttcgttcttcgaatcagttcgcaccaatgcaattttaaatattatgggagaaaaggcttcttttatcgaaatatttataaataaagtaaaatgcgcatccaacgaatttcatttggaaatcccacggacacctggggaccttcctttgtcagtttggagaccgggtgggatcgggattctgcaggcttttcttgggaccctggatcccgcaggatttgggatttctacctcgggatcgggatccctcccgaccaatcccgcgggattggagtcactttgattttagaacataaagcttaaagcttttaaaagcaatcaatttttggtccaaagcctcttcaacagaatttctaaagaaaaagtcgaatttttgcttgtaaagaatggctacaaaaattttgttaaaatttcttcacagtataaaaagcttaatcacacttcttaacacgatatacatgcaaatagccaatgacgtagcagggagagggggaggggaggctaagggaccatagccctccacccccgtaaacgaaaaatggaaatttttttattgaaaaacgagaacctttttaaaaaaggtcagttttttcttaagaaaatgcaatagagttcgctctcgatcaattataaaagctatataaaagcaaagacccggggttgatcgggatttagtcgggatccctccgacatcagcagttgtccggtctctaacacaatttcgcaaattgcgtcggaattaaatcaaataaatttttgaaataaatatttgcaaataattgttaattcataaaaatgatctctctgacaatttttgtttgcttttttgcgcttttgagcagtgattttcctgtcaatgcttccgtcctttggcaaacacttcagagggatggcaaagacaaaaacaaaaaatgcttaaagcacgctgaacagtttaagcataacataacaatttattaaaatgaaaattattttcgtcaaaatattcactgccggcactttgttggcaatgctaacggtggcggtaatcgtcacaaaattttactttatcgaggaatgggaggagagaagggacggcggaggacgccatcgaaacaggcaaaacgaaaagaaaaacttttagggataaaaaaacaattaatggtcataaaagattaaaggggtgtgtgtcatttacggcactcgtttaatgctcgatcagtgttggcttgcttctgatcagtgatcacccattgttgccctcctcagcaattgcactttggtcaccgcctttttcacgctcgccttcgccccatcctccgcctcgccggcccaacgccaattgcttggccaatggcacgccatgttccgacccattcttcacctccgtcttccaatggtcatttttaccgattccgttacgacgccatttgtgaccgctgtccgacaatccgtccaaatgcaaaaccaaacgcgggtctgacgagtacaattaaaatgatagctgtattagctaaattgctatcatttactggatctaatttttagatttggaatatttccttgtcggaactacccttgtggcgaaatttctctctgttccaagctatcattgacgagcatcagaatgtgcaacaatttggacaggcagcccaaaccgtcaaaatgggaaatctttcgttggaatcgcgcattttggccaactccaagtcgtatttcctcctcaatgcttcggtaatggaaatttccaaatcactcgtttttctttctgttggcctttcacagacagaaaatccgttcaattcgactgcttttgcttggatggacccctcttatgggcacggcaagccgagctttttcccggccaaattcgaatggcacccgaaattcccaccgggcaaaatttcactgctcaaagtttaattgaatttttttaatggttaatgggtctaattgaagttggcacctctcaacgcttccatcttcctttttgacaccgacgatttataccataaccatgaactaaatcttttaagcaccgaattcatggcaggagacaggtacggtaaaggaaaaaatacggtaaaatagaaaaaggatttaaatttcattgactgataagcaaagggaatgagcagaaactgagtttattttcgaaactcagcaaaagcattgaacaattccatcggttatttaccgggaaattatttgacgaggtaatggacgaccaaatctttgacgaggacgaccaagtcagttcaaaacacttcatctattactagtattaaatcgttttttcaggcacttttactttctctgatcaaggaaaggccttctctctttaacattgttcagggagaatggttcaacgcttttcatcttttttaactttttttaatgtctcttattgtttacaagcaatgtacacatagaaatgtgatcaatatgatttttatttttcatcggtttaattattcaccgaaattttacaaacattcatcaataatgccaacaaatgtgaaaatgaaaagactataattgagggagttttgtttcacttttcaattgtacacttttgttttttatactaattgctgggaatttattctctgcttcccttctactcatagaacaactttaaaaaatgaaagattatttcacatgtcgacagtttgcatttgtccgtccgttgagtgtttggtttttgttgaaaaagcaccgccaaaatggcgaagtgaggaaactcatcgccatggcacaccaatcgccaactgacgagacgaattcgccaaacactccctgcgaagtgaagaggacgaaagtttgcccgtcgcggtattggccgtcgattaaataatatttgggcagtgtcatatgatggcggaacccgtttttgcggtagaaaacgatggccgaatggttgtcactaagaacatgcaggaaaatcagttttgaagccaagggaactgaaaaagtggagacaaagcataaaaacgccaacaaatgaccatgcgaagagaaactcgggtccgagcttaaaatggtccaaaaaatcttattctgatcaaagcgacctgaaaacctcattggaacaagattttataactttgttgttaaacaatgtcaacatcaaagtttagccccaattaatttcaatcgttaaattgaatggatcattggatgacccctaatgacccaccgctgtaatcagtgatcagatggtttagcaacagcgtaccaatgcccctccgtctatacctatcggagacagccaaactgaacaaattaaaattaattcatttggaaagtgaaaggaatagcaaaaggcaaaacacctgagaatataaatggcagaagcatttgggtctttgtacaaatttcggtccttaaaaaattaaaatgtttttggagtgacaaacatttgataattacataatttgttttaatgaaattgacaagtcaaaatatggaataaaaaaacacctcatattcgcactcgaaaatttgtttccgttgagcaacaattaacgcggttaacaaatcgtcactaaaccaatgataaaatgggaaggaaagttgtgacaaaaggcaaccgaaagaggccgaaactgatgaattggccagcaaccacagatttgttccaagccaagggataatccagcggaaatgccttgctgaaaagacggtgcttattacaaatgtttggcaattcgaaatgaaaa

SEQ ID NO: 7406 - DNA, 2232 bp, Heterodera glycines
ttcgaagacatcgtcaaagtccttctcaaccaaattgcgccctgccagcagccgtcctcgtcgggaaagtgtcccaacggaggcgaggtcatcaaccaatgcgtgaccaaaaagcgaaatggctaacaataagcagccacttcagcgtcagtttgtgcaattaccattcgaataatgcatttattactttggaaaacccaatattccttaaagaaattgttgattaatttaaaaatgccatggaaaatgggcaaaaatattaaaatcataaaaaatgaattaataatgaaaagacaaaatttgcattcaacaaacgacacacatttggtacaatgttcaacaaagagtcggcagggaacgaaagagatggaataatatgtcgttgaaaactgggagattaagctcaaaatgaaacacgtaaaattcgataagtatggaaagagttggggacaaatcggcgaatgatatgagcgattggcaagacaacggaaatggattatattttggtaacaaatggaaaaatcgaaatcctaaacaaattggcaatcacattaaatggactcaaagctaaaatccgtcccatttccccacactttgtctcacaatcagtgacaaacgtccgaagtgaaacattcgacttgttcaggcgcccctcctccgtcaccacaggccggacaaacacagcgacttggaggcgcacatttgacattggcgaacagccaatggccaaagccggcaccaagcacaacggcagcagtcaaataggtgttgaaggtcatctgggaaggggggtcagtctcggaaaacaaacgtttaaattaccgaaataagcatcaaccaataggccctaaagtggaaaattatgaaaatttagcgataaatttactgtcttacaatacaagttggaaaatgtagattagtgtttcgaacattcggcaagttgatggaggaaactcacggcttatataactcatcaaccaacttaaagtgccaatttaactcggctcttacgaacaaataagcaaaagtgtgcggtacgtccaacggttgatcgtcatgttgggactgatcggcgccggtcggacaacagttggcgcataaacttgctgctgactgccaattgtgtttttcagtgaatcgtcggcagtgccatcgcacgcgttgcaaccgctggcggacgaatttgtgacggcggccgtcgccttttcaatgagtgccgcttccacgccatgctgactccgccggaatttgccacgaacggcgtccattgatatgcaaccggacgatttttgactaacagaagtcttaaatgattttaatggataaagaaaagggagacaaatggagtcgaaagatacccaaagttggaaataaacgcggaaccatttggcaccttcgtacagaacggccatcataaacaccaaaatcagcgagaaaaacagccctaaaaggaaaaataaatgtaccaatagaaggtggcaatatttatttcccccttaagcataccataaaatgtttcggttctccaaaagtcgaaaagaatcacttcccgaaagcctccgtggaaaaacattttcatggcgtggccatggtcgtggtggtgatggccatgagaatggactgaaatgaacgctgtaaattaaaacaatacgaattcaagtagagtgattatgactttaatgtaccacaaaagagcaaaaaacatagtgcaaagcgcttatatctttttcatgactatcgcaagacaaattttaccattcaaatccggaagagaatttacaattccgtcgattgggttggccggcggcagtgaagtggtcgaaatttgaacgtgggattcgtgatgatgggcatggttatggttacggccatccatctgacagaaaatcaaaaaaaataaataaataaatcactaaagtcagcccgaactacaaaatgagaagaaacagtttgcctgtgacaataaataattgactcaaaatcgattaggaatcgtttattattaattaccaaaataatgtattatttagtttaaacaatatttattcaccaaaatatttctgaaaaaaggaacaagacaatggaaaatggaaattgagatgggtgggtaacaaaataataggagaaatgaaaagaacaatatgaaactaaaaaacaacagggtaaaatgtaaatcatttattttttagtggaagcgttttttcaactttcttagcgcgttttcatacaact

SEQ ID NO: 7407 - DNA, 1499 bp, Heterodera glycines
ccaatgcttttgtgaatatctgtcaatatttgcaaatccttccgcccctctcacaatggctgacgcctttcgtgagttgtaagcgccgatttccgtccaacggcaatttcttcagctgatctaaattgtcaaagattccttggtcaagggtggagatgaagtcgtagtccaagtacaactgatgcaatctctgtcccaatttggccgtgagtaaatcgctgtaaaattttgaaaataaatttaatgctttgtggcagtgattctctggcattttgttttactagctgatctgttcgctgtcaattttgttgtgcgtcaacatcagcacttgcaatttggcgaacttatcaaaagttgccggttcaatgtcggaaattaaattggacgaaaggtccaaagacaaaacatttgtctctttgccgggcaaaattttgtcctaaatttaaatttttattgactcccattgaatcgaaaaatgaatctctctccttgagtaaatattttatgaagttgtgctccatgtgcaccaccgaaggcgaaaaattcgccggcaaatcggcgtccgttgtggtcaaattctgagacacacacaaaaggtcacttcgaccgccgttcgattcgcagtggcaaatttccgtttgattctctgaatttaaaaatattaaaaacaatttttaaaccaaaattaaacgaaccccctggggcggtgccggcggttgagcacagtttgaggcgtttcgccttcgcccatttgccctcttcccagtcgctgtagtccaattcttctttggtcgcgtcataactgtcatcctcaaaggatttccgtcccctaattgtcaccgtaattattcaaaaatagtgaaatgtgagtgaaccaatgctctccacggtattcggacaatgtgccaacaacaacaacggcctttcctttgctgccgtcacttgcaaaagcgacggtagttaatgaggtaattaaaaggatttgttggaaaaacatttcacgtaaaaatgaaaagagagagttaataatagtaaaagaataactgaaagaaaccaccaagcaaaggcatttgcatattgaagttaatcatttcctaaactaaaaagggttggaccccccccgtctaattaatgtctaattaattaatgatcattagttatcgatttgcctattttattacatatttggccattatgaatttgctgcttttcgaattgataagaaaggtaaaaagagatgcgagcagaggcagcggagaaaaagggaaagagaggcggagactgacaaatgaatgctttttaaaaataattattaggacgcagattatttatttaaatatttattatgcagctttattttaatgagaaagaagcaaaaaaacatcatttatctgaaattattcaaaaatttacaataaaaaatattttaacttttttgatctttattgaatgaagagaagaaggaggaggaagacaaacggaagaggattcaatctttt

SEQ ID NO: 7408 - DNA, 5174 bp, Heterodera glycines
ccatatgtatgccaagtgtttttaatgttaaaatacataaataaggttggacaatatttatccaccaaaaaatcggactaaagtttatatttttttgtgggggggtccggtcaccaacacagtgatttcaaatcttcataaattttcaaatttcccggcgctggcctaccgaccaccaactcttatgtcgccgtggagccaactagctgagctaactcgccatggccaactcgacgcaccttgttttacggcttactcgtagcctttttttcgataattagggctaccactttaggcacaaaaaatcacaaaaaagcacctatgtaaaaagaagaaaaaacaatcgcaaaataggcataaatagacataaaatcctcgaataggcactaaaaaagacaaataaaaatttttattaacgctttttaggtagcaaatcacctaaaaactaaatgaaaaaaacaattttggctttatatttcaattgtaaatgaatattaaatattttagtttttaaaccaaaaattttacaaagaaaaaaattttttaagggaattaattttagcgaaattttttttcttagggggtatattttctgaaattttttggggggtgtgtaaatgtagagaaacaaaaacaaacaaaaaaaagaacaaatttgatttaacgccagcaaatttctgtaaaacgtttttttaaagaatacggtatatgtaccaaaaacccatatggtctcttgtcagtggggaaaagtctcacaatcagcgatatgcgcttttttgttattctgtccttcctattctttttccccgaagaattttttgaaacttttcccgatttcaaggccattttggcagccatgaaggaatgatctgttcaacaatttgtgcaaatgttaatattgtagcttaatagcataaaaattaggtacttttccgtttttggcctatatctcaaaattttttaaaaatgtcaacaaagggcgcgctgaagggatactttttgtaccattctcatagcattaatttgcttagcgatcaagaattttatgaattatgacattgcgccccggacatttatcgtcttgttgatatattttttaattttgagctgtatgcccaaaacggaaagtatgaaattatttcatactgtatttatagtaaaatgttcaatattttaaagtttaaatttctttatgggttaaattattgggattggttgaaaatttagtagaaaaggttttaattctagtgaaaaataaataattagggctgggatttttaggtgctaaaaatcccaaaataggtactaaaataggtgctaaaaaagtgcataggtgctaaaaacccccgaaaaggccaaaataggtgcgaaaataggtgttaaaaattggaaaaatccagtgtctttatgtacaaacattccaaaagcgactaattttttatcaatttcgcccacacaattgcaattggtcaagaaaacaaataataaatacatattgtggacgaatttttgggaaaattttttgtttcttaggggaatattttctgaaattttggtcaatctttaggggtatatttaaaaacaattttttggacaggttcttagggggtgtgtttttcaattttattgcatttttgctatgaaatttctggaaaaaggccaaaatacgtgctaaaactcgaaaaatgccaaaataggtgctattgaccgaaaagccagttttaggtaattttaggtgctaaaaagtcgctctaaatcaaaattgttcggagaaaatgctatttttgggcttctctcatcataactaagccgcaaaaaaaataggtaaaaacctaaaaatttaggggcctatttttcaattttttgtattttccttaagaatttttctgggaaaatcccaaaataggtgctaaaaattcgaaaaatgccaaaataggttgtaaactattttaggtgccaaaacgccaaaatagttaggtgctaaaaagtcgctctaaatcgaaaattgttaagagaaaatgctatttttgggcttctctcatcataactaagccgcaaaaaaataggtaaaaacctaaaaatcccatccctagttattactaatttttaatttacattttcggggcgatttaaattttgttttttagtttttgttcatattaattctcaattatcgaataaattcctttgatggcttctttcgtaaagcttttcaaaaggaaaacttcaaagcagggttcactgtccgatcctttcaattcagcggaaatgccttctaactcatcaataaatgttatggtaacgaaaatatgttcttatcagttaatatattttttaagcacgatggaaaacagattagaacagcatcattccgaacaaacagaaaaccaaacgcgcaaaagtacgaatgttgcaaagaaacaagaacaaatggtggggaaaaacaatgggccaatgccacggagtacagccaccacaagtgatttataaataatcttttgttttaattcttttcacttcctttgggtctccgtattcggtgtttactgagccaaaaatgggccgttctgcccgttcttgcccggtgggtcctcccagcaaagaaacggattatcggatgcgaaattcccataatttctctcctccatttggtgttcaaccgacaattcacgagcgaagcggaagctacgagaatttcacggcgtcgcaattgcagcaattttggggagcgaagcaaagtgaacgagaggaagtggggaaagagaacgagagaggggcagagagagaaagaaacgccgagaggagcgaagaggaaaagccgcaccaaaaaaggcaacggccgcagagagtcgacggaatggcaacgcacgggaatttagcaaaaaggcaggccaatttaggcaaaagcacataataatataaagaccgaaaaagaaatttgccctttttgtccacccgaatttcgttttactatcagttggatgggttgaggtgtcggtgccacggagttcattcatctgcgcattgttttcatcagtatccccagcagcagccgttatcgacctcggagtattggtcgaatgatccgagtccaattggcgagagtcagtcccaccaccggcacttccgcgtttcacaagggataagcaatggaatgcgaggggaaatgacgatggcaatggtcggtttggagatggccagagaggagagcagttcagaggatggggacaactcatcggatgaccaggaaatatcccccacggctttgctacaggcaacaaccgcaaaaaatgcataaatttaaaatggcatttcagttttggcaacaacaagttaggatgctgaaacgcgaattaaaatcatccagagaaactacagaaaagtaaagtctgacaaacgcgacccttcaaataggacacgtaaataaaggaatctgcacatttttctatcattttccgactcaaaacaatcctcgaagataaatcaaaacgacgctttgtatttgctattattttaggtaccggaataaatatttacgactcaaaaccaaaacggacgaactgagcaatgaattaacgcgtgaaaaagaaagggtcggtccttttggaaaggaattgactaaactctgattcattttagaatatttggttgttcaatcagttgatagcaacaaatgataagatgactcggctcaattgggctcacatttacttcagaggcactcaaacgcagcaaaatccgctaacaatgaacgcaactgaaatcgccgagaacgaacccttcggaccgattaaagacgagcggttggaagacgggagaaagttggggaaaggtaacgaattgcaaaaggcagacaattggtacttttgcgattgacacagcctattgtttatgatataattagaaattaattaatttatttcatgccaaaaaacagagaaaagcgaggacaattctcaacaccggtcgacggccggggaagtccaagctgaactttcatcggacgattttgacgacaaatcggcaacgatgcgtgaggggatttgcagaattgagaatgagcatggttgtcaaataatggcccaacaacaaaaatcgcaaccgcagtcgatgagaacgccgacgcccgtcccgtcgagcaatgccaacgattccccaaacggacttttaatgggcaattttctctgcgcgccgccttttcttaacttcaattccttccacaacatacaacaaattcaaaaccaacttcacgtggaagtggccagaggaggtcaattgaacaatgcgcgcaattcaaactctcgtctgatcagcccgccaataaaaaaaggcgtgagaaaggtgccgaaagtggcgcgggaatttcgacactgaatttttaattcctcagacgtacaaaagtaattcacctttggctatcgaaaaggacgaaaacgaagagcaattgaagcacgaggaagaggaggaggacaacaacagtctgaccggtattgatttggaagaggacggtccaattgtaattccattggacgcattctgtcatcaacaaatcgaaaatagcagcaaagggacggaggaggggggaaaagagtcactcaatgggcggacgacgagggggtaaaaaaacgcaaattgggaggccaatgccaaaaacggggcgcgcaatttcagtgtgaagtcgcttcttcgaaattgccgctcttccgaagaccttcgcttctctgctgacaatgaaaggggaacgatggttggctcagcagtgggcagcagttccgaagatgacctcagaatgtggaagaaacagttgcgcagcagaggcaagacaatggacgggaattgaaagaatcgcctaatttacatttattattcgtcaggcgacagagtcctttttcgcccgtcaagaaaaactgtacgtttgggatattttaattttgagattgtcagactccttcagctgttttctggcgtaatcggaaatgaaaaagggccaaacaaatattttcgccgttttggtcagcctgagcgggaggcactcgccaaatttgattatttatgtggtgaacgcactgatgtgagtggactaatgagcagtccggagaaaataaatggttgagataataaataagaatgagaagaaattgtgtcatttataaattttttcgccgatcctttcc

SEQ ID NO: 7409 - DNA, 1421 bp, Heterodera glycines
cgtgccaggtgaattcgacagtgagtgatttcgacactaaactattttgctttttttcactgtctgcgtgtgatttcgacagcgagtgaattcgacaataagtgatctcgacagcatcagaaaaattgtgaattcgaccgtaccaggtgttttcgacagtggttgatttcgacagtgattggtttcgacagtactttttattttactgtacatatgaattaatattaatatacaattagcatatacaaaatttataattgaagtaatataaaaaaagattggtaaaggatttttttgtcaaaaatttttctttttcactttttctatacaaatatctcctgatagactgtagtcaaaaatacaacaaatttcctagataaaattcttgattcgtgtgggaaaatctgttaccagatgccaagtttgaatgccaagatgcaaaccttcaggctcttgaagcagaatttgaaactcgcaaaagccctctacaatatataagagcatgtgcttatcatttaaattcaaaatttaacgagacttatgcctagggctaatatttatagttttttcactatttttttccttagctcctcgtagcctgaaatgcacgaaaaacatgttttttttttctgctgttgttaagctacttttcgagttattagcacctattttctaggtttttattattagcacctaaaacctaaaaaaaaatttaaaaactatttcacgtattttggcgttttgcccaaaatttgttaacaaaaatgcaataaaaacgaaaaatagacccctaagaatcgacccaaaatttttttcaaaaaatacacccctaagaatcgacccgaaaattttcaaaaacacacccctgagaaatgaaaaatttctcaaaaattcatcttcaaaatttatttattttcttgttagaatttttaattttgaaaattatatattttgaaggaaattttcaattttacacccctaattttggaactttttggcacctattttgggggttttttaaaacctaaaacctacctattttggcagtttttagcacctaaaaatatcatccctaattatgacttttgggaatttttagtctccaaattgagttaatattaattttttaattttgaaattgtcaggcgattgttcgaagagataaattgatatagtttttgaaaaccaaataaaactgaatccctttggcgctgcttgcaaagagccctcttttgaattttatcaaaaagtaaaaacaaaaggggggacccttttggtttacaaattttttttaatctatgatcatgaaaatttggccccgggtgtttttggggcccttgatcacgaatctgtcaactattttgaccaattcctatttcttaaccttatttcttaacctaaatttgaacaaaaaatcataa

SEQ ID NO: 7410 - DNA, 6254 bp, Heterodera glycines
catcagttacttcagcttgtgagtcatccgaactttgttccttttcaagattccattcgtcggtaggcgcttcttgagaaaaaaaattttttttttttggcacattgccaattcaaatttatttacgcattgatgttgatgccgatgtgcttgcggcgtttgcctctttttcctcccatgcacgaactttttcctcagaacgctcaaccctttttataaaatacttgcatgcatgagttgggctacaaaaattctctccttctactttttcagaatcgtttccatggaatcttcctcgaaatcgacaacgtcagacgcattgtcatcgattcctaattctttttccatttttgcatacttttgttcgagcgcatttaacctgttatatgagagtactgctttggcacattttttttgtaattaccagttttcacgcttctctcctcgtgcatggatcattgctccaagcaatgaggttgcggttccatcgaaagagtgccgtcgctttcggccactgcttgactcctcatcggatgtgaaagttgagtgagtaacagcgacctccgtcttagcttttaccgtgtcggcaacgtttgtcgttgtttcttctccttcatcatttttcatgttggccgcttgttcaacgtttttacgggatgccattttcttttattcaatatactagtttatcattataacgcattaaatatctgccattttcctaggcatttccaccacaaataccagtaaaaaaaaaaaaattttttacatttacatattcagaatcactcgaaaccaaaaggaagaacgctcagattttcttttattatccccttctggcagactggaagatagcgcttcaactgctctcttgtcactatccgactgctcttggtcggttgtattttgtcatagctaaacaccgccgggcgctctccatgacggccatagtttaacactttctgtttgaagtgctcaaactggagcgcttgactattctgcacatcaaatgttattccgcgaattttttgtacatatttgcattcgccggtactctcatccaccatttttagggcatactgtttggcacctttgtacacaaatagaggctcaacattaacttggtaaaaaaattcattaatcaatcacctccacaaacgaagctacggatcgcgaatcccacatattcctgagacatttgtcccataaattcacccgtctgaattggaacatggtcgcaccgatgcttcacaattacactatcagtgtcctaaacaaaaggtgttggaaactcaaccgggagggactatagaccaaccgtataaagtagctcagcaccctctgccctatccacctggttcatgtaatcaagaagtttgaggcgggcgcagcctttaatttaccgtttttaaactttatccgccatttttgttaaatgtttactggttgtccataaactgagaacaatgttgcttgtagcatgctcatcaataaaattcttcttctgtttgtaggacacacgaataacatcgtcagtaagaggaattattgcagaaatttcctgagcaagataaaaaagaaattagacccagttaattaataacgaagcgatgaactcacaactttatgatcaagcgcaagcttataaaattcttgtggctttagtataacacgatttgcacctagctcatttctcatgctgaatttccccctaaaatggctgattctgtccaatttagttggagaaaaacacaccataaactgtttagcatcagctttgcaatgaaacgtaggccggggtttcttcgcacatgtgttaaatccaactcaacagtgtatcgcctcatatattcatctgcgaacatttgtttctgcagttccgtttgaacgccatccgggaatccgcttgattcaacctgttttaaaatttttcacgtacatagaagataaataaaataaaccttcaacttaatcataagtcgaacataatctttaaaaatttggtcgctccttaagggattatatgatgaaaaaattatttgctcatcatcgctataccattcctcataatgccacgcgcgccagaatcggtccactcggtatccgctgtccagtgcacggcccaactcaacatgtgtgtaggtgcctgtgtaagcacgctgttcgtccgaatgattgcacttatggtgtcttcttgtgccaagcgccctaaatttgccagcgcatcggtgacaacaactgaacagcagtctctaatccaatttcacaggtaaaattggtatgtgaagtccgcgaggcggtatgactcgcactcgataaaggccgcggtagagaagggcggctgacgaacgcctgcagacagaggtgcattgaacaaaaaacaacaacaactaaccaatcaatgacaatttgttcaacagacgggtagataattttaggtatacctactggatattcggcatcgtagttcacctgttgaatttcaagaatgtatccgtctcattatatctattttctcacccacggatacaaactgacgatatcatagacgcaaattttttcaccttctgatggctcagaaaaaagtttcaaaggccctgttctacctgaacatacatacatgcgcgttcatataactaactctattttcattgaacttattattattattttgggaaataatttttgtttcttagcttatttgtttgttcacctccacagtaagccgcgcgtggatcgaccggaccgcgctcgtttccgagatcactgaagaattcacgcatttcggcgtttcggtagtctgacagcattgaattgatctcacactcctatacaatttttaattgcttattatttttaaaatgcgaaagataaaattttaaaaatttaattgtacgcacccaaatttcctccacctctatacaatgaccctgctcgtccggctcacgaagctgagtcaaccgatcctgggttgactcgttaagttcacgacacgttcttccatcaaccaatttgtcatttgggtcatagcaacgttcacaaccgtgccaaaagctttaatgatgaggattatagtcctttctgaataagacatctttaccatcctaacacttcgatgcatttattccgctcttcaatccatccatcaagtttaaagtttttcatgagtttttcacggccgtttccagcatgctgtatgaatactccgtctgttttggctctccaatccaggtatttaatagccttaatgtgaaaaaccggtgtacgccgcaaattaaatatttattcattcaccaaaacactggctcggtcatttcgctcataaccagcctcgggaacaatggccaactggtcttttttcatgaacagagcacgaaaaatgttcatgcatacgctaaacggtggcgccgatgctcgataatgttttttaccacccacctggcaatcgtgcaactgatcggcaacacatcaaaaccgttggttatctcatcgcatcaaaatttgacgaaatttcagaacggatttcatcagaatttcggtgtcattaagacagtaaatgcgtaactgatccggtaaaaagaagggtgtttcgccagttctccacgtacctttgttgagccaatttatcacattacaatttttgcttaaactcattaccattgctcaaacttatctagctttgcctgtttcatcgacccgggaaagtaatgttctctggctggcaaattttcgagtcggatagtataattttccctataatttttttgatcattttccagccattttcagcaattacaattccaattgggacaaccttcgattgtagccatagggaaaaaatggtttatccgcacaatcaaggctaaaggtacttttcagtccgtcgagccgaattgggaacagaagacatgagtcccgccatgttaggagcgaatttccgcgtgagtgttgcaaacgaaactcaaaagtcttgaatgggctggagctgatcaatgccgtaagcattcatggcttctcgaatgcccgctccattcagcaaacgctcagcggatgagcgcatcaacgcccgattggttaacagtagacgaaatgcttcttggccttcacaaaaatcttgcagcaacgttagctgtgccatattttgttgcggttgttgtcgggcttgtgtccattctttgaacagtaccgggtcgtgataagcacgggagccaattaatgcgtagaaaagacagtaattgtcgtcccagttacagatccgtatacggtgtttctcgttgtatccccaaaattgatggggaaaatgtcgaggtcgagcgccagcaggaggcgcaaagcaggtgactgtgacttgaattgcttcgctcaacaaaagggtgcgcttgtccattcccgctccttcctcatctccagcatcgtctccatcactttggccaagtttatcgagctcagccataagcacgtcgcaagtgttttgttccagtggacgaagtgggagcacaattggctcgtacaaccctgtaaagcagaggaaatgtggatgataattaatgaatggacgaattagcgcacacctctgccatgcaaactgatgccaatcttggcaacaggacgtccactttgtttttgcgtgttatcaacagcctgcctgattagcatctcaaacgcggagcgtaaggcttcctcaggttcctcaacgctagcgttcagcacaaattctgtgacatgacgcgacagggaaaagcgttccaatttgtgcacatggtaagcagtttgttcaaatagcggagcgttttggctctgccaatgtgccgcctcactttctacatctctgctacttggtccctctcctaattgtaggcggcgttgatcctgagttatttgagaagaggaggagacgcctgcttgttcttctgcgtcatcggcgtcgtcgtcctccgatgggatgtttttgttcaaaaaaacttactgaacggaaattccagcgtcttttcatgctataactattgctggtcatgttatttatattattattatgaaaataagtgtgcgaattaaaatatataaataatggatgttcgtaatgacgtgtcattaagaataaaaaattacacattacaattttattgtctccaaaaagaatgtctaattctatgctttaacacagtgctccatgaacttgtatgggatcggatcatagtgtccgcccgctcaatcattcttttcgatactggccccttgcttggacgatgtcgaatgccccataaattgtatttcttcatcataagcatcagagacctttttagcagctccttctgactctaatgttttcatcttctttttatcgccaccgtcctcatcctcctccatgtcgtcatttgcagcgattgtgagaatgatccagtcaaaatcttggccttcaaattcacctttagcctcctaagagcacgaaaaatgcagttttttcctgatggcaatgacagtacactgacctttatattcagcttaacaaccacttgttggtccagttttttttctaatatttttgctaaagtatccggctcgttgtcgcccatctatctcatcaatcgcgacggccttcaactgcaaaaatttttcagcagcagtcgaaaaaacggttgcgtattgtgtgcattcaggatccaagcaatccgccagttcgatgcgaagaaaaagattttttaatgggatttttgccgtgtgaccgcacgccgcacaatggcgattatcgtccaattttcgtcggcaaaacatgccccgtgatttcaaagggcacgcctaagaaacgctgattttacgtaaaatgaaaaaaaatgaaaaatacacctctaaaaatcgatttaaaattttataaaaagacaccccccccaaaaaatcgacgcaaaaatttttaaattcctttgagatggaaatttttctcaaaaatgcactttcttggcaaggttttttaatttaaaaattatttttaggtaccaattttggttttcgctattaacaatcctagccctaatcattttcaaatgcaacgcgcgaataaaaattattttgcttactttttggctaaaaattatgtcactattcgttcctatatcgcacttttttcccactgtttatcactattttggcattttactcactattttcgttaattatttgagatttttcgtcactaaaaagtcacggccctagttaaagatgagaaaaatttttgtagatagtgccgaaaaaacaaatta

SEQ ID NO: 7411 - DNA, 2234 bp, Heterodera glycines
attgtctgctcactcttgcatttcaaatatttaattcatcattattcacccgatttaattaatttaatttttgtgaattttggaaaatgaaacccatcatttgtgatggatgtgtcacataccgccgatcacattgctcgtcggcagtgccatcatccgcacatctcacgcggcgccgccgccaatgcatcggtgcccaggcgacgcacggctcagcgcagcaccgccttaccctgatgaggagccatggtgttacttttaaaagcattaagtgataattaaaatacactaattatatttgtttaagggggggagtcatttcggccatgtggaaaggaaaaaggaaaggaaaaataaaaacttatgtatataatttgaatttccagcagatgggaattctacttttctgggcacgtatttgaaaaaaacgcatttcggacttgtaaatttgcatttccgctaattaaaaaggcgagataaaagccgtacgattagcctaaattctaatcgtaattttttcggaaataaaaaaatatctgaacattagaagtaaaaataatgaatgttcagaggagacaaatgattattaaattaattattaaactaaaaaaacaattaaaacattttcaaaaagagagagaaaaaattaggcaaagttaagttaatcagggaaagactttgattgatcattttgtcaaaatacgatttttacaattaaacgcatttgttttaattaaatgtcaaattctttaaattaaaaccgagttttacacactcaaaagtccaatcttcaaaattcaattgatggtaccaaagagcaaaagaaattattttcaaaaatatgaaaaatacattttttgttgaagtcaaaaatttaggtttaagtcttttactattattatttaaaagaaattgacagaccttaaataaaattatcgtagataatggggtccgatcactaatccaattatattaattgatcagaaaagcggtgtttaattggtcagctactaattatttttcgctcaaaaaaatatgaacgatgaaaaaaaggattgggctgaagatttttttgtaacatattcaattccttcacctcttacagaaaactgatcagcaagaatgggtctgatcacttttgtcaataatattggattattattgtctgatcactcttgcatttcaattattttaattcaaatattatttcaccgtttaattaattattgtctgtcttaattttggaaaatgaaagccagcatttgtgatggtcacataccgccgatcacattgctcaacggcagtgcaattgtgcgtgtcttcggcagtgccatcgtccgcacgtcgcacacggcgccgccgccaatgcgccggcttaagcgcggcaccacttcactttatttgttagagggattaggtatatgaaaaatgtagcatttgattgaaatgtatagataaatatgtgtatgaatggggagggggggggcgtttcggccacggggaacggaaaaagcaaattaaaaagtatttgcattcgtggcacggatcattcatccccaactcaatccatatccattcataattcatccaacgcgatgcgggtccgatgggggcttgtttcggtttatcttcctttctatttttccccgtttctatttttccccgtatcgattttacccccgtttcggttttaatccaaattcgattttaccccgtcagtgccgtcatccgcacgtcgcacgcggcgccgccgccaatgcatcggtgccaggcgacgcacggctcagcgcagcaccgccttaccctgatgaggagccatggtgttaattttaagagcattaagtgataattaaaaagcactaatgggggaggggggagagcggaacaagacaaaatttcaccaccgaattttttttttatttttaaacttagaaatcatataagaatccaaaaaaattttataggtaaattccataaaaatttctagaaaagttttgaaaaattgatgactaattttttttgaaactttatttttttgaaaatttttccaaaaatctcttaaaaatttttaaaaaatttttaaattcagcgaccgaattttggggtgcacccggcgagggtgcagttcgtttcggccataggcaaaaaaaggaaaatgaaaaatttcggagttccaaatttgcagtttcatcatttaaaaaagtggggatacgacacgactcccaaacgattag

SEQ ID NO: 7412 - DNA, 2685 bp, Heterodera glycines
  unsure (1)..(2685): unsure at all n locations
tatccgcttatttgattagataaaataatttcatgcttaaaaaatggcacttntagaaaacgctctaaagcccattatggcatttttaaatcaaggtgcgatcaagacgggagattaaataataggggtaaaatctagtggattccactaatacattatgcatatttgtatttaatataaaataaatcggcgatttgtcacttttacgaaacgcccatagtggcacttttacgaaacgcccaaagtggcctttttacgaaacgccctggcacttttacgaaacgcacattttggcactttttacgaaatgcccaatttggcacttttacgaaacgcccaaagtggcactttttacgaaacgacccagcacgctcccaaacgattagccgcaatttttttacactttaattttctcggaaaaaatgaacatattgaagaaagaaagaaggatggatgatgatgatcaatgaatgttcagcagaggagacaaatgctgcataaataaatgatttggttgaaatgagaaaagattttttacaacatttcggtggcaagtggccgtagggggggggggacacgttttgctaattgttttcattcatcccctacggggacaaaaagttgaaaaatgatggaagaatgaaaaacggaatgaatgcaaatgttggcattggattaatttttccatcagttgaataagttccttccgggaactttgaaatccagtgacgatttaacacagcgtttgatttggctgctttaggcatttaaatatataaagaaattttctaaatgcttaagaaacgtaaagtagtcaacttttaaggtgcattttcagattttcttgtattttttcttacgatttttctcaaaaatgccaaaatatgtgctaaaaaatccaaaatagcccaaatatgtgcgatatgtttttatgtgccaaaacgccaaaatatgtgtttcggacaacacttttaaaatatgatccattgttcctgtggcctagtcgctgttctcattaattggtttccctctttactcagatatcgatggcatttgtccttatttgtaagggctgtataatctgtgaaattcaaaaaatcctaagtaataaaaaatttgtcccaattttagcctaacgtcctcattttttccttgtttgtaaaaataacaaaatgaaactcttcggggacaagtggccctaggggggcggggggagaacttttgctaattgtttttattcatccccctcgggggataaaaagttggaaaatggtggaagatggaaaaacggaataaatgcaaatgttggcattcacaaagggacgaatgaaaatgcacagaacagagggaggccaattcaaaaatagaaaatgaatcaatttatagaacaaagttttgtaaaaaaaaatgtttgtgaaaattattatgttttagccaaaatttaaaaaaaacaatattttacaaaaaattaaaagagatttttcatttatttttggttattataaaatttaattaatttaattttgtaatgctcgagaatgtccgtcttttctgttctcgaaaacacctaaatctcctctatcagttctcgggaaatccaaaatctcagaaatcgtattttaacacagacggcaaatccctcctacccactgcatgcccacgattaacaacggttattggaacgaaaattcacaggtcggcacttccattttgaaatccgggattgaaacccgaaaatgtcggaatccgaggcgaaactttttcttacattcaaaagttggaaattttcgttaaatactaaactcggatggtcgaattgcattcagttgtagcaaaataaacaaaaaaataatatacacaaaaatgaaaattttagggccgttgggtcaaatagaagcatttttggatctgagtaagcttctgaaggcatctgtatttctcggctaacatcccatcatttggcaaccctccggacggattacagtacgctaaatgaaaaaattctaaagaaaatcaatcaagtaaaatttacgtcgacaatggtcgaagccggactcaaaaacgccaaatgcttggcaacaggcggtggcgtccttgaaaaattgaaaatcttttttcaatttcatgcgaaaaagaggcgggtataaaaaagtcattatgccaattagcgctaaaaataacaatttaaaaaatcactaaacaatgttttgtttcgttaattttttactttttcagaagtgatttttttaattggtccccctttttttacctcatttccactagcgcatacctaaatttaaacttggtcataatttgttcatttttgcctcattttctcaccatcatttcaccgacgcgactcaccggacacccttacagtaggagggaaggggttggattagtgtcagtggatactgtatacgctttgttttttcttacttccggtcagcacggccaattgtatctgaaaaaggcaaaatgaaaatggtaagagattttatagattttcaagaatagataaaaattttaaaatcaaaatatgggataatattttacgctaatcctaattaacaaaaaatttaccgtgcccaagttctgatcatagctgcacagttgttggcacccgtcgccgagtcgggcacaacaattacgaaatcgctaagaaaaagacgtttttgtaattac

SEQ ID NO: 7413 - DNA, 1884 bp, Heterodera glycines
ggcaccgggccaaagccggcttgcggaaagaattcatccggctgttgctgctggttgtagaagccaccaaagctggtggtctgttgttgttgtggcgcagcaaattgtccaccctgacgctgatcagccggcacaaactgttggccaccgccttgctgattttgtggcacaaattgctgcccaccctgatcgcccggcggcacaaattggccaaactggccggactgtgccacaaattggccgccttgctgctgctgctgattttgatagggaagcggcccaaattggccaccagctggcacgaattggccgccttgattttggtgatcggctggcacgaattggccaccaccgccttgctgcccattttggaacggcagttgttgctggtggtggtaatggttttgttcagcagcaccggctccaaaatcagtgccatattggtttctgaacgccttttgacgccctaaaacaattttagtttatttattataattgaaaattttttcagtatttattggaataaactatttttgacactattcctttatgatctaaaaccggatcaccagaattccaaaataatggtgcctttccatgtacatcagaccaaccagggctcccggaaaatgcgtcagtagaaaatgttgtcagtgaaaattttattgtcataaaaactagttccttggggtttcgaggtcattgatcacgaacccatgtatccatttgggccagctccgaaccccagacccgaactcgaacaaaaaaccgaatgttaaaattttcgtagttttagcatttatggtccaaatggcataaatgatctcatattgagggattggtgcctttcagtttgtttccgtgtatttacataaacttattttgaaccgaaaacttaaggctacagaattttattttaaaatgtttgtatcactgacgcactttccggtcacgccaaccagtgtttggaattcaaaaattaaaaaccttattggatccacaaaaaaaaaagtttgggataaaatggaaaaataaatcatcctttttttcttgatcaatataagaatgttaattctttaaatttattccaccattgttattgttgttgtttacaccccgtgagttcacttggcgttgatgttgtctctgttgtgctgctggtactgcttcaccaactctttgttgcggtgctccgccaactgaggaagggaagggcaattgttgcgcgaatggcactttgacttgcgcttggccaaatgcccttgcgtccggcacttgtgccgactgttgtgcctgcaattaataacaccaatggtcagcagaagtgatcaaacagaaaattgtggcgaatatgttaacagtcaatttcgactgatcgcaatgctagccgagacgttaacagggttttgatcagatggacactaattatttaataatttaaaataaatcagtttgaatttataaaaaaaaaatttccgaccttttattaaaaattataaaatcagaatttcgacgtccaaaattttttcggaaattaaaaattgggattccgactgttccgtgccatcactgatccaaactattgagtaagctttcgaaaagggattgttagttactgattagaaatttttgaatgaaattgacttctgctgaccgtagtgatgaaaagtttgttgccaatgggcccacagacggcacacgccccggggcacatttcggcgatgaacggcacccggcaatgagagcattttgcgcgaatgcaacttggcaaatcggcaccaactgaggccggcgcatgccaaatgaaaccaagcaaaatgagtaccagtgccattagtatagagcaaaaaaagtgccaataatttgaattcatcgccttttaat

SEQ ID NO: 7414 - DNA, 1213 bp, Heterodera glycines
taaaaaaactgctgccggagataattttaacattttagcgaacatttttaaaaaaatatacaaatttaaatttttaaaaaaataaaacaaaaatttttattcaaatttaattaaaaaacaattttataacttttcaactattaataaaagtataacacgaaaaaacttggttaacacagttataaacaatttcacagaatatttccttcaaatttttatgacaccatgcaaaattcgcaatgccagcagcagaactttcaaatggcatcacaattacacaatgggtgaatgaatggaatgaatgaatgaacgatttatgtattggcgttgtgttttgttcggatttgtgtggcgaactgctggcggcgctgcacagttttccgcctcgcaaaagccgagagcattttgcgcgcaatttagccgccgcgccgcgccgtcatttgaatgtggcgccattttgggtgcgcaaaacgaccggatttaccccccccccccggtgaaatgcgccgtttccgccgctctgaaggggaaaatgacgatgataaatccttgccacctctgctgctgcacaatttagctgctataaacttcatgcttttttttgttgcttaaaaagagcagcaatggaaaacggtcacgccaatttgtaggagaaaagggggaaaagtatattttattaaaaaaaggataaaaaaatgttacgaaaataatttaccatatttgctctttttatgtgccagtctccattaaactgccggtctctaattatctacccctttctgaggaggttgaaaaataatataccatggcacataaaaagagcaaatatggtatttcatttaaaataaatgatcaggataagtaaggcaagtagagctattgctaacaagcaattaaactatttataaaaaggttgcaacatgaataccgtaaaaaagtttaattttagcattttatttatattttgtgcctgcaaatttttgcgattattggaaagctattaaaacttgataagagtttttgaatggtgacaattttataaaatttcatttaattgaaataaaagttgtgccttattaaatttgcctgaacaaagcttgcgggacagtgttggcctgattgtgatttaaagagtgcttataagtaggaggaatacaagcttgcccacgggctaagcctgaccgccctaccacctctttaacgcgttaatgag

SEQ ID NO: 7415 - DNA, 931 bp, Heterodera glycines
  unsure (1)..(931): unsure at all n locations
catcttttacataatgcatattntggaaattaaaactccgtttttgatattacttctttttcatttatttttgagaatttctcggaataagatattattagcttttatatattttttgatgtcaaaagaagttcaattttttaagaaaataactatttatattgtttcttttgtaatgagttaccttaattttattagattatttaattattcttgacggatgtagtagtcacaaaggacgaatgcgcagttcttatggagaaatgttaatagtaattttttatactttaattatttcatttgtttttaaatttattttaacatgttaattatatttttaattcaagtaattggtatttttataaatagatcaaaaagaataaattatttatatttatttatacatttatatttaaataaataaattatttattattgtattatcaatgaattattttaacatttaattaactatttcatgctgaagatatgttcgagagaattttaaaaatttaaaatataaagcatctatttttagtattcgtcaacttagtttattttattattgtagatgatttatctcatttattcttgtcgctgtcggtaagaatcggtagggttgatgtaccttataaaaatttaaatttctataaaaaaaaataacaaaaagtctttatattcatcattaaatagtaaataaaaaagattaataaatcggtttttttataaaatagaaatatgtagcattcgaaaaaagaattttaaatagaaaataaaaataacgaattggttttcaaaaatactttaaaatccagataaataataattagtaatctccattcataaataaaaacaataatattttaatgattatatattgtaaaaagtcaaatttttcatcattttattttttaattttaatattaaaaaa

SEQ ID NO: 7416 - DNA, 3521 bp, Heterodera glycines
taattactctcgtttcttttccagcaaaatctcttcagcttctacactctatcattggtttagttctgcttcttaatataaatctattaatctgttaacaacgaaaagccttctcccctctctctctcctctgttgtccctttctcctctctcattctctctctgtttctctctcttctatatctctctctctacccctcactctcgtctttctcctctatttcctctctctctttctctctttctttctctttcacttttgctctatcttttcatatgagttcaaactttatagaatattattctaatttatataagtaaaaaatatcttttatttttaattcattatttttagtcaaattttttggtttttatatttaaaaaagaaagaaactttaaaacaataaatttttatcagaaataggaaatttttaaattcttgtcaattaataagatataaggtagaaaaaaccaaaagaaaatgaataaaaaatatacgatcaaaataaaaattttaaaatttaaatcaaaatctttcattcaattcaaatttaaaaaaattaacccaaggacgagaaaaatgttcttatttgaaaatgttagcaataatatccaaagaaataattatttagattaaaagaaatatgatttctttctatgctaattaaattaattaaaaaagaaattgaattctttttaaatttgaaaatgtgaaaaaacatttttataaattattagtaataaaataaccataattattggagcattcaaaacagaaatgtaatcggagatgatacatttttaaggtgtaaaaataagataggatttaaagaaacatttttttaatatttgagatttaaaatcatcaaattttaaaatgttaaactactccaaattaatttgagagcaatgaaaaattatctaattaaaagatcaacacgattataaagaaaatatgacatacataataaattttcaattaatagcttaaaactcaaaaagattgaaaaaaacaacaaaataaaataaaaagagttaaattttagataaaatcttttagcaaattgcactctacttttaatagtttcccacggcttctatcggcaccgccggatcccccccccccattcagcatacaaaatttagtgtttccagcagcaggacctttttatgaaaattttgagattgtaaaattcaatgtctctttaggcactttattccaacaaatggaatttttgggtcaaaatatttattttacaattaattcaaaaaatttattaaataaaaattaaattttcagtctcccattatcaaattaactttttataaaaacataaatagaataatggatttaaaattcatttatttaatttagagaagaaaaaagataaaaaaataataaaacggaataccaagcacaagcaaaaagtgaagtgccatatattaagtagcatataaaaatattaactatttaaacatcaacaaaatcaaaaattcatttaaaaaattaaaaaatatatttaccaaattaagttgtaaagttaataatttatactattttggtatatttataaaatattttgtttccataaatttagttcaactatagtaaaaattaaaaagaaatgactggaatattttataaatttataaatattatttttaaatgatattataaaataaagattattcatatatttcatctttgaaaaatagaaaaattctgatctgaattagatcgggtttttcacttaaatttaattttgcatttcaattcatataattaattatgaaaaaaccaaaagaaatgtattaaattttaattattattattattatttctacataaagaataatttataattaaaggataataattatgaaatacggttaatcaatctcattgtcaaaaaaaagaaattaaaaatggattatcctaatataaatataattataattacataaaaacaataaattaaaagttaaacgataaaatgcgatcgtctctggcatgtctaatttgacgtccgcgcaagaataaaacataaattacttaataaaataaactaagtcagcttttaataaaaaaacaaataaaataaaataaagatgctctattgttttaaaaattgaaatttaaaaaattaagaaaataaaggaagataaataacctgaaaattataaagattttgttcaaacaaatagaagaaaaattgttcaaacataatttaaagtttaaaaaatttcaacttacgcaaaattaatcgtataagcgatattattttaaacggacacattaggtggtgaggttaaaacaaaaaatattattatctacaataatattataatttatggagattttacaatttataatttcaaaaattgtaaaaaacgtacaatttaaaaaattatttcttctaaattttttttaaaattataattatataattttaaagaggcatatattaattataaaatattggacacacaaaaaaatagttgaaataaatttattatgcatatataatatactttaaaatacctaaaaattagcatacttaaaaacaattgactcgcttggcaatttgcattagaggtcggacgggaccgggatcccgcattgattgaattcgggatcccgatctctggatccatccctatcgtttttccaaaatcttcgtgattgatcgtgcttcgggctggatcttaatcggaatctttcccgaccaatttgccaatcccgagggatcccctttcgacaaaatttttttgtgcttgtgaaaactctttctcggggttttggggtccccctccctgatcacgaatctgacatatatacaaaaggattatggctcgacgcaattacagattatggattccataattacggctttggacccaattatacggatgatgagttatagattttctaatctactaattacgaatttatgtaattgaaaatccaattacgtgcaacactgtttcagatgaaaaatttattaatttattcagaatgaaaatattatttagacaaagttcagaatattttagaaagcaaataataatatttcttagttgaattacaaataaatatctttttgaatttgaaacacaaaaagctacaacaaaaaatgtgtttcaaaaatttgaataaaataattataattctaattatcattctcttgaacaaaaagattaattttatttaactatataaattatcatttcaaaaatataaaaataagacttaattataaatttaaaagtgcgtgaggagtacaacaaaaaatagagatagaagagcatgaaaatgatagaaggaattaagaaaaattatttattaaaaatgaagttttttaaataaattaacaaataaaaaagttaactgttaaaagttcatttaattaacataaaatccgtaactaattgcaacttaaagaagtttaatttaatgaatttagcattatctaattcatacgcagggattgcattccgaggccccacaaaattttcggaaa

SEQ ID NO: 7417 - DNA, 1604 bp, Heterodera glycines
  unsure (1)..(1604): unsure at all n locations
atataaaatatgataataaaaaaatntaaaatttataactttcccataaatataaatntaaaaatatattcaaatcaaaagataattaatgtaaagatgaaaataaatataaaataaatcatttttataaaatgacgacatataaaaccaaaacagaatttatattaattaatgtaccttagtataaataaatttgttttaattattagcgttaaaataaatataaggaatgtatgtcattatttatttagttattaaaaaaataacaattatatataaaacttttgatatgattattaaagtaaaattaatattaaaacaaattaaaaaacatatttaataaatataaaaaactaataattatctgaacattaataataatattaaaatagaggtacgaacacaaataaacatctgaaaaaaggacaagaaaatataaataaatcaattaataacaaattattaagtctctaatgtgaataaacataatgttaaatttgaaagcaataacctgaacttatcaaaaaattttaaaataaatcaaataaaattaaaattaacaaattacataagcattttactcattttttttatataaaggataatgatgatgaaaatgtagttaattcacctcatagtagacgaaaaaaaaaatttaaaattggttgattatcttaaaaataaatattaatttttatttatgaaaaccaataataaagaaactgaagcctcggaaataaaaacattatgaaaaaataaaatatttatggaaaaggattactaaataaaaataaaataaaatagatgcgttattaatttaataaaatgaaattctttcggctaaatagaaaaaataaaaataataaattatttttgcctaaaattctaaaaataaatgaaaaaaagtaatattaaaaacatcattttgatcaaaattctcaaaaataaagtttatttggatttattttatttcaaattaatgaagaaaatttttcaataaaaaggcaatcattagatatttaataaaattaagaattgttttaaaaagaataaattgaaacaagattataaatatgaatattacataagataagaaataaatgattgttatttcattccgagcaattttttagcacacaaaaaaaaatattttggacattatgctaataagaaaaattttgggcttttcgggattcttcttacttagtaaatattttggcaattttttaattggagttttttttgaaaaattagttttttgtcaatcaaattcttcccaaaatgaccacaaattgttcaaaaataattcgtcggccctttcggcacctgtagcgtgttaaaaataagaaataaatgtacaattgagtcaaatttcataacctttttttattattacagaagcctaaagctaccaaaaattgaaatggataaaatgacacttttttgcaaaaaattcactaattttggcagtttggtttcaaatttaaaaatcattaaatttaagttcaagaaaccatttacattcaatagagaatttaatataaaaaatgaaaatattgctcatagaaagcatttatagttcaaatttttaaattatagatact

SEQ ID NO: 7418 - DNA, 1757 bp, Heterodera glycines
ggccttctccttctaatgcctgcggaaatacaaatttttgtttggggcaaaatgaattacggtagaaaaaatggaaaggacacggtaattaggatgggagacatcacagcacaaaatgaacaatggagaagcgaaatggacatataaaagtacggtagaggaaggggaaggggtacggttgtgatattactgggaagtacggtggaatagaagtcttgtattgttgtcagagagatggggttacggtaacatatttggaaatacgatatgacttaaattaggaggaagaaacaaaaattgggagcggttcaaatgaaaaaatggaatttgcattgccttacagttaggttgaatacggtaaaaaaatgcaaagaggggaaacagggattacggtacgaatcacaaagggacatgctgtggagtttgtgtacccaaaaatactgtggaattggaaggtctatggtattgaggacgaaaaatgacagggaaaatttcggtgaaaattatggttgaaagataaaaagaattacggtagagtttctatccaagtcaacttgggtgaaacacaatgaagcaaacagcatgaagcattacggtgtaacttttctgtccaaggggggggggatacggtggaataaagcggaagataaactggaaggaatacggtagaatttccaagtaaacttggtcaaaaagcacagaattaaatacagtgaagattacggtgcaaaatataatgggtgggtaacatacggtaataaacagtaaacttttcagtaaaacatgctaattctgattatcaattatctcaatcacacatatcgttaaaattaaggagggaaataaataatatctaatgccatatattctctttgtttctttttcttgcccattgatcagacccattatcgatcaatataattgcctcccctgatcagtgtgatcagaaactgagccgacgtgctcgatcagcaacgccgcctatcgcacttgcccgtccgcatacaattgccattttggcaatgcttcctccgccgtcgtcgttgttggcaccctgtttctgatcggcaccaaatccatgttgatcatcatgatcaccctcagcatcattagcatctttttgaggagtgccttgtggtggtgccggattttccatgccattgccatccgccggtttgttggcactttcattgccattgttgctttctgccgttatttcggtgccatcatccgttttttgttgcgccgtttcgcattcatcattgccattctgttgctgttcattttttggcgccgtcaaatgtccatttaaatgtgcgccgttgccattgccaacatcggttgaaccttaaaaagggatgcaaaaattttaaaatgataaataaaatttaggatgccatccccgacaatttgggggcccggaattgtcggggagtgccagggtttggcaaaaagagagcggggatttggggtcggatttagcctagacgtaaatagattctgatcggattataagggtttcaaaaattcctaaaaaaattgaaaaaaaaaccaaaaaatttgcatttaaaaaaaaaattttcgttgctaataaaattgtaaatctgatgacaattagcttgacatgagaagccaggcactagcaaaaatttcttcagaatttatgaaaaaaatgacaattgaaaattgggtccaaactttttagctttttaaaaatttcctacaaaattttttagggaatatttactgatcagtaa

SEQ ID NO: 7419 - DNA, 2782 bp, Heterodera glycines
aattttgatattttataaatatttctttccagatttcattaattttcaaaaataaaaattccactactgaatttaaggacaaatttcttcctttgtcacaaattgtgcttcaaaaaaatcaggacaaatttcccggaactcagatggaaatgtccttttatgtgttgattgtgaactgtccggtgtatgtcagtttttttttctcaaatttactaaaatttaattgttcattaattactttcttgtcccattttcggccgaatttgctcgcgattcggccccgccgctctgtttgttgggcttgggctggttgtgttgcggcggttgtttctgtttggagaccaccaccaactcaatggtgccaccattttgggctgtcgccggtgtcttcgtcgtagtcgacgacaccgacagaatggcatccgaatttatttggcattttgttgttggcggcccagataagaagtttttcagttgctcacattcgatcagaggggcaattttctcatcgctgtcaacctgaaaattgtagcgcacaaattttgatcaaatttattagggttggattaagaaactaatgcattaaaccaagaatcttcgaatcagtttcagactaatcaagaaaaaagacaacaaactgagcagcagaaagatcaaaaaagaagaaatggttgaaaaatgatcaaaccaaaaattattttttccatttttattgatcagaaataggtggtgattaaaaaagcagactgatcaaggacagaactgatcataaaatgctattgatcaatcataaactgctagtgatcagcattaataaaagcagtctgatcaaatactgaactgatcatgaaatgctagtgatcagcattattattcgtattgctcaccgtctccttgtactgctcgacgtccgtctgctgttcctcggttgacacgtccacatcatccgcaatgtcgtcatcatcatccgcatcctcatcatcctcttcaacattggtcgtcgtcgtcctcctcctcgtcctcctcgtccgtgtaaatgccgaccaccgatcgggcagtccatttgctggtgattctgcagcttcaaatgtgtgaggggtaattcataattgggagactaaaaaccataaaaattccgctatttttagccaaaaacagcaaagcatttgaacaaccccaaaaaattcaaaaattttattgattttatgaagaattaattaaattttaaaatctaaatccgaggccgaaccgaacttcgtctgatggatctgagcctggatttggggcttttagggtccactgtgttttggtttttcggcattgtctagaaaaaccgagacgaaaaattgaaaaactcgatctcaaaatttgaatgcctccctcacgaagaattcagcaaccaaaaaaaagtgttcctaatcattaattatctgctggccatcttccaaatcactgatcagaggctatcaaaccgggactgatcagagatgatcaggggatagctattcccaaattagtgccaaattcaaatatcgcgcacctttcgctgtgagaacgtgccccgtgtttggcgcaatggctgcgacggatttggacagaaattgatgccagaagcaggatgattttggtggttttcgaccgatgaagacacttcctcgttgctgcccatcattttcacgccgttaattgtccaacgaaaatttgaaaggaaaaattggaatttttaatttaaaaaacgcataaaaattaaactaaatgtatttttaatatatttttcccgattaatttatactttatacacaaagtcttactgtctttttctaaaccctaccgaatcgaaaccgggaatttttttgagatttttgccaaaattttaaaaatttaagaaaaattaggtctactgctggtagggaatttctaaaacttttggtcaatctaaccgaaaaaacaatttttctcgggttggtttccgattttttagccgctatttacggaaatttcccggacaaattcatttaaaagcaaaaaaaaaattaaaaaatttgccccataaaaattgagtttcacttattcgcagccgccaatttgttcagtgccgagccaaaaccgccaaaataggcgttcataatgtgctgcttgcgctgttttgcacgcgacgccggtgttgtcaatggcaccatgcgattggcactgttactcagcggaagcatcggctgattgcggacgccggtgccggcgtacagcgacacggtggagccatgatggaatgccaaatcgactgaatgtcaaacaaaaatttttatgaaatgaaaatgaccaaaagccggctgtttggcataaaaatagaaaaattaaaacttggcatttgagaataagaatctgaagcgaaaaaccaagttgtcttgaacttttgaaaagccaaaactacaagcaaataaaaataagagctgattaaatattttaaaaatttgatgataaattatccatccgttattttattataaatgaacaaaatcaatgtttagcaagaatttctttcttaaattatatttaaaaattttattttattaacttttgctcaaaatactcaacaaacttttcatcgaaattgttttttatttttaattataaaatatattaacaaatttaaacaaattctcacgatggtctctgtccatggccatccgttgctcggccaatgaactgctcgaatgttttcgtgcaaattgcatcatattctgcaggtgttgttgttgctgttgtactgcttgaactcctcctc

SEQ ID NO: 7420 - DNA, 3276 bp, Heterodera glycines
  unsure (1)..(3276): unsure at all n locations
ctgatcaatgttttctcgaattctctgataagttaaagattgataagactaaggtcaggaccaggacgagaatttgggaattggatcagtacaggactccagattaaaatctctatttttgtgaccaaccagtgacgcatttgctttttctggctttggaatcggaatcagaatttggggaattggactaagaatggcaagtgtgcaatgtgtgaaacatatgcaatcaaattttcctctactatctgatcagtttaacatctgatcattaatgacctcaaaattcaaaaagttccatgacaaagtgaccaatgttgatttttaatcatcaatgtgttaatgacctaattgcctcgttaataaatctgcaccatatccaaattttcatttctggtcaacaggtgaaatttttaattacataatcaaaaaacgtaatcagttaatgcgtaaaattttttatttgacacttttaacaggttcgaattgcttctctctgctgctgatcagcccgccccctacaatctgtccgaacaatcatcggcaaatcagatcacaagcatcgggcccaccttctgctgctgttgctgctgatcatcatcatgctgttgctattgcctccggcaccgttttcttccgccgccgacggtacgcgcccgcctccgccgccgcctccgatgatgatgtcattgttgttgccgccgccgaaatctaccgcatcgtccacgaccaccgcgttgttggacgcgtaaaattgatacgaactgttggaaggggttgcgcgaagctctccgccggtgccaccagcgcaataaatgcgacgcccaattcgaccttaggggacgggcaaagtggaaatgttgaaatttaaaattttggctttaattaatcgcgatcgcttaattggaatattgattttttaggaaaacaaagcttgaattgacaacaaaattaataatcaaaacttaagttttttacacctataaaattctatttgaacaattcacgaagagttgatcactcaatttatatatttgatcactcaatttattgatttgatcaccaatttatgnataaggcatttcggaccgattctgttcacttttccctttgtcagacgaaactatcgaatgcccactaattatgatcattttaaaatgctatctcgcaaatacagctgctgatcagcctctataataaaatttaatcccatttttggcgtccaacttggcgatatgccattgtgggagttcggcagactgctcaagctggtgttgtggtggtggctgaaccggtgatggttcgggtctcgcttcacaaatggtggacgccgttgcacaaactgttgttgttgttgttgctgctgctgttgttgttgttgctgttgttgctgatgttgttgtgccatgccgtcggtcaacgcgtccagcttggactcgatgaagtacagtttgctgttcagctgcgtgtgcaacagttccatgcggccaagcacattgcgctccaatttctgttaaaaaacaaaaattttagcaatttaaattcgtaaaattgaaaaaactcggacaaatttagaggaaatcggcctggattggatccaggcctggatttttcctggatccaggcccaggtccatttttggcaacttgggtttttcctgaacctggggtttcctgggtttttgtccagaaaatccagatccaggcccaacatggaaccaagggccagttccaggtccaggcttttttcaaaatgccgatctcatctcttctatgagtatattcagtgacattccaacacccaaacccagtcttaaatctaaaatttattgcatatgttttcaaattttaaactaaaatcttgtaaaaattaagtgcctttgttttgatcgaaatttcttatagcaattccttgaaattaattttatctcccaaaaattgaaattatttaaaatttggttactgtacccgcatttcggtcaatgtccgttgctcaagctccaacaaggctcggttcatgttcatattttttaataatacaataataaattatttgtgttgcttaattatttttaaataaggaaaatttctcaaaattttttttagcgaattagaggttaattttatttaaatattttcattaaaaacatttattataagacttttttaattgtgagatttggtcaggggcttgaaaataaatttggcctaatatttatacaaaaatgtcgaaaaaatctttggctctaagagtaaaaataaaagtcttcggattgtccttccgaaatttttttcgggcctatgggcctgcgcgtgccctgcatgtcccccccccccctgctcgaatgaaaccatcaaccttccacggttttggtcgggaattctcgactcgctaagtgccgttccaataatattttgccaatttggttggagaaatttgaacctcccagcaggagaatacattatcgcatttttgttctatttttacaaagaaatgctttatttgctctcttttagtttgctgtttccaacactcgtacagttttgggttatttgaatatttgccgttcactttcaatgtttggcattgtgacacgtaatattttagttgtaaacgaaattaatttaaatatttctagggtttttccgaaaaaggacatttccgaaagtccagcaggcaatgcttatcggcagaaaaggaattgaaaaattgattaagatttaaataaaaacagttaaaaaaacttaaacattaaaggaccaaatcctgtgcaaatgcccaagtgttggactgacgcaagagcatttaaggacaggtttattttttcaaggcagtctttgttttgcgttaattgctcacaaatctggactctattaattaattagattacagcctactactaatgaggaatggtgggtacactggaaattgacaatgcattgaaatttcgttttttaatcctatttttacctctctaatgaccaatatttggaaaaacttttttttgcgctttgatcagcgattttcgggttcccattcactctctctcgagtgttatcctccttccttcctgttcgagattggatcgggagagttcagcagaaggcgacgaaatttgtttccctttttgggagtgatcgagatcaaatcgggattctcgctgcaaaaaagaagtgctaccagcagcagagaacttgtttttgtgttgttggtattagtgggatcaacagcggaattgggtgaaatcggatatatcggatcggattctcgagacttgcc

SEQ ID NO: 7421 - DNA, 2427 bp, Heterodera glycines
  unsure (1)..(2427): unsure at all n locations
attcagtatattgtcacgtaatacaaatttgggatcaaaaaacatacaacancatntgttcgtccagtacatcggattatgaatttaaacaatcactagaaaaaatattagaaaaaagcatatataaaagaatcaggatttttaaaacaattctaaaactacaatattctaactttctagtagtcttaccactacggttaccacaggaaaatacaattgacgttctgttagaacagcctatattttcaactttttaccgttagatgataccgtaatttttgaaataacaattgttaattttaataatgacaacaattgaccaaaaaatcaattttataaaggcacaagtcgaaacggcttggaaaatgggcagaaaattagttagagaagcagatagtttggtattttattcctatgagctttcgaaaattgctgagttttatatcagaggaaatgactcacgaaatgatttattatttgatgaattcttgaaatcggttcgaaaaacttggatgctttttcagaatatttaacaagaatataaaaatactgcctttgcaatgagtgggattgagaattgtctaaaaacaaaaaatttagttatttgccaacgatcagagaatatagcaaaacaaagcgaagaattttttgaaaactatcaaaaccaactcgcgaatgttagaattgatttagaaaattaattcaaaaaatacgtgagcctaaaaaaatagcgcgagaaatattctttacaccctaccgtaagnggggaggttcaaaataaataaggtttatgaaatatattatgcacccaataatatacatcgacaattaaatgaaaaattttagtccatatagaagagataaaatattcaaacagatcttagttcgttaaaaaacctaaataaaaaaattaaaagtgagtagcatagaatatttccaataatgtatagttcaaagaaaataatactaattcaaaagaaaatgaaaaataatgatatgaaaataaaaaaattgtggtaccccttgtcttggactggtcctcaactgggttcattatgcattaccaccatatccgagctgggctcgtccctctcagcaaaggtgcgcatgtggacgttcgaaggcgggaaccccaaacacgccatcccccgagggggcttaactcgaacaccagcactgagagagcgaaccgagcgcataaccactacgccacggaacgctttgggtgcgaagaataaatgtacaatttgaaagagattttttactagatcaaaatcggatataatgggctggcggtggagggggggaggtgggcagaaggaagggtgggggcaaaaataatggaattggaaaacgggggaccaaagaattgattgaagatgtttaattattttcacaaataacgaaaagattagcaaattcttattataatcaattacatgaaaaaggggtggaccaagatatgggtttaggtggaggtatgaagcggggcgtctttatacccttgcatgtatgactggctgtcaataacaccctccccctataagttttttcacccttaaatttcaccttgatccctgcgttttttcacctcttttcaccatgttttttcattattgtgaaatgtttttttcacaagccccgttctaaatttcgacagttttcgaatatatttattgtccttaattttgcattaattttcgcgcatttggatttgtccttaaatttgatttttgtcgttcgatttatctcttttactttgtcatcgattaaagggaccatctccgaaaaagaggatgtcatcgcacacacatacatatccgagcagatttttattttacatttttttatttttaacagaaacaaatagatataaaccttagcttagataagggtaaaattctatgattttttaaaaaattttatgatataaaatagagaaaaaatataaaataataatacaaaatcattatttcatattcctttatttaccgcactaaaaattgccgtggccaaaagagaacagaggggtaaattttttaattcaaaaagtttttctaaaatgtgattttatttgggtcatagatatgggggggggggggggtttaacaaanacatttcctaaacttttcttcgattcataatgatatgtgcattaatcaaaaattgataactttcacttggatcactattttgggacacgcaaaaaaagaagcgacgcgcgcatcggtgcgaaatgtacccggcaataccaataggctggagtttttgcattaaattagtggcaggggtctcttctttacattttaattgcttttctttgcttttgcaattactctttttctctaattctctcgtctctcctatgatgaatgcgcatctctctgcccagggggggggggcagatttttatccctatactactcc

SEQ ID NO: 7422 - DNA, 2359 bp, Heterodera glycines
  unsure (1)..(2359): unsure at all n locations
aaaaaagatataaagatataattngctacagtaattcaaataatttaatctgaaaaattcacgaataanttcattcaaaattgtattnntagtcaattctataaaaaggttatttaatattaataaaataaatttaagaaatcataaaaaaagaaaaaaattctaaatataaataaacaaaaataaaagaagaataaatggagcagataccataattgacatatggagataaaaagtatataacagaattaccaactaactaaaacaccttatggagacattaaaaaaactacccctcaggacatgaaatttaaattataaagctaattaacaaataaatatacaattagaaattgaataaaaaattaatcattaaaattatattctacacattctgcaatcgaatttttttatgtttgttctttaaaaaatatatcaaaatacgaactgaaaaaatttactataaattaaataatatttttccgttttttgatttcttgttaaacaaaaattttaacataccattcaaataaacaaaataaataatgatattcattgtaaaaaacaataaaaaaattttattcactattattcaaccattaagttattttaaaacatatttttatcaagaaatatttttaaaaattgagacgttggtatttctataaatgcatatgtataattgaatattttattaaaaataacttaaaaatgaaatgaataatttaagataaataaactaataaatttctgattatagcaaataaaatgaaagctttaacaattaaaagtctagtcgattatatcactcgacaaaattaagttaatagaattaagcactattcaattgcactttgagaaaattaattttttttaacttataatttttaacaatctttaatcttaaatttaattataattaattaaaaataagagatttaatgaaaatacaaaatcaatttaatatgcgatttgccctattgagctattaatatgtgattcctattagctattaattcttataaataaaaaataattaatgagaattgatgttgaacaatacgatcgttaatgagaattcgttaaaataagttaaggtatgaacttaaatcttcattgggataatcgcccaatgaatcaaaatattcaatttctgtcggcaaaacagcaatccagtgttcaagtatcgtgcccgcccggtcggtattcgccacaaaacagtatggaaaatgcctgttccttctatttaggcatcttgtcggaagcaaaaacgccgataaaatattttcgggttgtcggatgtttggatagaaatatttcaatctcatgagaattcatcatatgcttccgtcgctactgagcacacgattagcattaatagataaaatcgaatcaaattcccccagaacgattatctcatacccgccatcctttataggctcattaaattgcaccttgatgctggtcgttccgtttcgaatcaattcaaaaccgggggtgtcctctagagtagaggtcatcgggataaaataagcaccaaccgtttacaaatttttgtatattgatcgacattgttcattaaccgtcgtccatcccgagtcccgtatacatgtcaacaaatgctcgaatgtatttgtttcgatcaaaattaagagaatagggtgacccggggaatatgtttccattcgcttcgacactgatagagcgtatttttgcatgttcaaagacgaagggtgactctttaggatttccggtatacgcaccggttgaaacaaacccggcgattaaacgtctcggaacaatgcttgtaaaaacattgtgcgagagatcagaagtgccccgtgggatgaaaagacttctgatctcaatttttctcatcggatatttggccggggtggtttgtagctgattgcttattacgttatttaatgcttgggtaacatctactgtttttatataaattctaatatcgtgtatgttaatatgatatgtgtgcgggttcgctatgactgcatttccggaaacatatgacggtgcaataattagaaaatcatcggtattacgatgtatgctaaaaattacatcagagttattaagcaaaagattgggctaacggccgagattaaaattaagtttcaccatggtctcacattgggcccatcagcaaaacgtgacgctctgtttttaagccgctatttgtgtaatcatcctggtcgacatcgtcgacataatagcaggacgcttcacaaagaccctttttgacatctttctgaaatccccattcagtcatcatatatgccttnanacgcatagtaaataccagaaatcatagattcgacaccggaaattgacacgttta

SEQ ID NO: 7423 - DNA, 3427 bp, Heterodera glycines
ggacaatgagatcattaaagagaatccgttcaaataagttaagatatgggcttaaatctccattgggataatcgcccaatgaatcaaaatattcaatttctgtcggcgaatttacaaaacaggcgacccagtgttcccctatcgtgcccgcccgatcggtattcgccacaaaacagtaaggaaaatgcctgtccttaaatttgggcaccctgtcggaagcaaaaacccctataaaatattttcgggttgtcggatgtttggatagaaatatttcaatctcgtgagaattcatcatatgcttccgtcgctactgagcacccgattagcattaatagataaaatcgaatcaaattcccccagaactatcatctcatacccgccgtcctttataggctcattaaactgcaccttgatgctggtcgttccgtttcgaatcaattcaaaaccgggggtgtcctctagagtagaggtcatcgggatgacgaagaaacaccaaccgtttacaaatttttgtatattgatcgacattgttctttcaccgtcgtccatcccgagtcccgtatacatgtccacaaaagcgcgaatgtatttgtttctatcaaaattaagagaatagggtgacccggggaatatgtttccattcgcttcgacactgatagagcgtattttggcatgttcaaagacgaagggtgactctttaggatttccggtatacgcaccggttgaaacaaacccgacgattaaacgtctcggaacaatgctggtaaaaacattgtgtgaaagatcagaagtgccacgcgggatgaaaagactcctgatctcaatttttctcataggatatttggccgaggtggtttgtagctgattgcttattacattatttaatgactgggtaacatctactgtttttacataaattctaatatcatgtatgttaatacgatatgtgtgcgggttcgctatgactgcatttccggaaacatatggcggtgccataattagaaaatcatcggtattacgatgtatgctaaaaatcacgtcagagttattaagcaaaagattgggctgacggccgagatcaaaattaagtttcaccatggtctcacatttggccccatcagcaaaacgtgacgctctgtttttaaagccactgtttgtgtaatcattctggtcgacatcatcgacataatagcaggacgcttcacatagaccctttttgacatcttctgaaaatcccaattcagtcatcatatatgccctaaacgcatagtaaataccggaatcataagattcgacaccggaaattgacacctttaatgttttgacaaagctgtgcccaaaattttgaatgacaccgacgtgttggtcagcttcactgtccttggtaattggaatccaattgcttttgtcttttctctctattgaagttgacaaatagagaaaagttttattgaggtcacaaaactgattatctgaaaaaagtctaaatatatacggtccagattgatttattgctgaaagtggcagcaattcccgaatactggatttattaattgcaacgttcgtcggggggatatcgaaaagtgaaaggcccccctcgagaccgtcctcactcgccgtgtcgattttcttgagagttgtcattttttaactttttgtattatttattccatttatacctttagatgaaacttaactgatcatatacttgttttcggttcttattagtgatcagagacctttttcctttcccacattgttgtaacttatcggtaaggttagtcaacacctgtgttgaatgttccctcatggaatcccttaaatcgcgaccctgggcgatgtcactcagaactctctgcccagcggcgagccccgcgtgtcctgcactcgaggcaatatttctcgcaatagggatcaagaaacgtgccacattaccgaggaaaccgactccccgttgatacttgcttccgacaaagtattgtttctgtcctcttccatgttggggagtgataaaagatgaccaatcgaccgacttgggatcgaaaaacacatgtgtcatttcttaaaatatacttttcttaaaagagaatacaacttcccagtgaaatttaacgaattcgccaaacggtgtgtgaatttcaattgtaatttctgaaattcgtttcgactgtagacgatgaaaatactcggtgctatatataacttcactaatcgatcctgggtcatcgacgacgttaactattcttaagagtggggccatctggttgccgataattgtgtttttgattaaatttggtgcataaatgtatagctgccttacacctcccgttcccaataatagtttatgcgattattggaatagtcttttttcataatcgacaatcaatctcatgcaaagatgaaagtggattccttcacgataaatttgaggttgttgttacttttgtgtttattttaaaaaataatgatttgatataacttttcatattattattcttgcattcaatcatttgtttcttgcccgcaggcaagggtgaagattagtgttatttatttaaaatattaatatgtattaacaaattatttataaaattactttttaatatttaaaggcatatagtagtagattttaggctaataatttaaactaattaataaattaagtatgattgtttatattctggtataattaaacataatggataaattatttatatgaagaacaaatattgaaatgaaaaaataattaatattgtttatagcaaaaattaataaatactcaaatccaattataaataatattaagtaaaaatttaatttttctaacttgtccatatatgctacaatgtccaaccttatgtcggagcgtttatttctattctattttttgcttttttaaaaaaaataataagtaaaactgttttgaagtaatcaaaatatcgctattttcttttgttaattaattaatgtttctccttttttctctttgaatttcatatttttgtatatttgattcgttctccaacaaacaattttttctgtacacattacatgtattaattttaagataatttatcaaacaaataaaaaacaaattcggtgtcttaattatggcgccaataaattttgtccttagaaatttgttataaaatttaatttttaaaactttaaccaaacacaagcaaaatctttaaaataataactagagtgaagcgggtccgggaacgggccgggaattcacggtcaaccaaggtcccggttcccggtcttttgtattattttcacttaaaataattaaaatttaatttattgaattttttaaaatttttttttgaatttttcaaatttcccggttggtcccggttaccggtcccgaagaaaatcgagatcccggtcccgttcccggcttctcaggtcacggcaagtc

SEQ ID NO: 7424 - DNA, 1357 bp, Heterodera glycines
gtatatttttagaatttgtcgtcaaattgaccaatgttttatttcaaattatcaaaaatggttaaatttctgctcacttcgttggtttcgctctccgcgtattggccggggccggaaagcattgctcggatggtcttcgaaatcagggcatgctcctgcaaaaggaggacaatgaatgaatgaatgaatggattggtgtcattttattgttttatattcactgagcagcgaccataaatttgcattaaaaatatttttacaataaaatttttgattttttgcgcaatattaggaaaaatttgtaaagaatgtccgtccgctgatgtcaaaaatctctgagaaaattcaattttttttgaagcaatttgagcttatctgatggcatttttttaaagatactttaaaataaacacaaaagtaattttcgttggatttttttcaaattttttcaaatttctttaaattttttggttttttaggtatttctaaatctcgaaatgccatgagcctccgccccaccaacactttccattgtacgtactcaactccggtggcggtcccactcactttgcggatgacaaattcatgtccgtcactgctcaccagcatcacatagcacgcgtcggggccctcgcagccgccgaacaccgccaatttgtcggttgcgccactgctggagccactggtgctgctgttgtgggccaacaaatcgctgctgctcataattaattaattatcccttggatgggggataaagaatcaaaatttaatggaaacataaaggtaattaatctgcatagaaaaagcattaaaaaaacaaattatgggtgaaaaattgaaatttatacataatttaaaattacattttataattatatagcaattgggcaatttgagggtagaaattaaggcaaaaataaatggctttagatttagttagatgacgtggtggagagactttgccgatcaaagctttgcccgtcccttcaatcgcccggcccagtcgaccaagtcgcgcatgtccagcagggcacgttccaacgcattggcaaatctgatttcggaaaaataaaaaataatctttttattgcttatggggcattccacttcgatacacacaaatggaatgacattttggcttttcaatgccattttaaagtcattaataaatgtttctatccaaggcgccgctgtgaattttttttttgaaaaatttaatgaattttgagaaatttggaatgaaattagaaaatgccatttcaatgaaacatttaacggcgatggatggcgggtggtggcatttaaaatttttagaaatcttaaaactccgaacccctcccattgtatcatccactcc

SEQ ID NO: 7425 - DNA, 1848 bp, Heterodera glycines
ggtttatgttgtcggatcatcttcctcatccctagatcgatctgtcttatcgagagctatcattgtttccatattcgtggagattggtccgagagaataaaacatcgtattaagcaagatattccagacccataataaaaccctaaaagattggcagattaggcacttaaaactattaaaattatacaaaaaagactggtcttttccatttttggccaaatgggacttaccgccaaatgtttgcctcctatttaagcaagttcctttggcttggtgatgctaaaatcgtgggatccgttttgaagtttacacgacctttaagcttctttattgcatgtcattctatggctttaaggctttttattactttgtaaagtttaacaaatttaattaagttttaaaaagcgtctaaaactcgacaaatttattaatcagaaattttgcgatatgttaaaatatctgctatttttaaagcttcgtgtaaaccgtaatagtgagccctattttggtgatgcaagttgtgtgtgccctctttttgcaaaaaataaatcatttttcgagatgagattgcgggttttgagggtcgacgaatccaattttgacattcttcggcccgttccgaacccgaaccaaatgtcgaaaatttaatttggaactaactgatttactgactatgaaaccttctttttccactcaaaagaaaaatttttttttttaaaaaatcgtaatttaaaaacaaaaaatttatttaaaagaaaatttcaagtttttgaaaaaatttttggaaaaactaattgctagtatagcaattcatcataaaaatagctatagatttttatttttttttgaacatttgtgtttgaaaattaaaaaaaaattggagaggaaaacgagctcggggtggaaataaaggtacccgaggaattatccttgtcattatacttatgattttggaaaataacaattccccccccccaatttgcccaccgttcatcacttcgccagtgtagcgtttgtgcccgacaatggccgcctccatcagtccgtccacaatggtgccaatggacatggtcgtcttggccggcattttggccaccgcctccacaaagtgtttggacgccatggttggcagtcggacggtgtccgtccgtccgtcggcgaaccgtcgcagcgaacccgtctcataggcaggcgcatgggagccatggaggcggaagaaggccaattggagggccacctgaacagtgagtgaatggagtggggggaaatgcgtggcacaatcaaagggacagagagaattcggcatattttttaaccatggcaggtgtcatatttacaggaaacggattttctaggattttaccgaaattctcctgaaattccccttatctttgcttaaatttcaatttttgtaaagaatcaaaacaaaaataaaaaattcagaaaagagattttctctctcacaattagtaattttttttcgattttcttaaagctaaaaaattttgctatgtttatacatacaaatttaaatgtaagtacattcattaaaattcaaaaaaaaaaatttgtatttaaaaaacaaaaaatgctttaaaaatcagttcccacaaatccgaatcccaatgcctttgaatgagtatcaaaatgttaatgggttaaaatttcgcacataactgaatccacgagtcggggctgaacagcgcagttttcggcacatttttgccaaagtgattgaatttcagcgatcggacctccaaatttttgatggcactgaatcaaatttattttttggaaaattaatgcagaaaagacactcaatcaaaatcacctgtcaaatcgctcgga

SEQ ID NO: 7426 - DNA, 3461 bp, Heterodera glycines
tcgataaaaaacatataactgcatttaaattttttacagtgaaatggaatttttttcttttggcagcccccagcaccaggaagggactaaggaaatttcgggttccgttcaaaagttcaaaaacttctgtatgagtttagaatggttcggttagcttcgccgtcactggcaccgacagaaatggacccacacccattttgtgacaaacaaatgccaaatgactggccatataaattcgggaaaaatcccgaagcctcccccgcccttcctcacaactgctcgcagatgaagtccaacagcatggccagcggtgggccctccgccggcgtgtgctcatacgttatgccaccgtagccacactcgttcaaatggaactgcaacgtcttgtcaaaccagcggttgttggcattctgtcgcgtgccgccgccgtgcaacgcctgggccatgttccggtcgtcggggtcgaactgcaacgacgccgaggcagaaccaccgtcctcggcatgctcaaagtgacggtccaacgacatgacgaacagcgcgtcctccaccaggccaagttccgtcggatccctctctgaatggtgccgtgccggataattttgaaggattttcggaaaaatttatacaaatttttaggaaaattttagtgaggtagatcttggaggtggtaccaacaaagaaaatcgaaaattttcagcaaaaataaaaagccctcaatcccggggaccgtcccaataaacaaaaaactttccacgaattcgtgcataaaccgtggcccacatttcccggccatcgcttgacacaatgttgatggcccgtgccttcttcccctgctgttggtcagcgagtgccatcacatggcccaactgtgccaccaattggccaatggtcaacggattgccagccccgtcgtacaccggcacatggaaagtctatgagaaaaaaggaagcaaaattacaatggaaattataccatttgtgggatagtttaccgataggtccttttttggttggaaaacaaatttttttttaaatttttcattgttaatattgcttcaaggcaaaacaccttattatgtgtttattggatataattcaggcaatttgtgaccgtacgtcaggtcgattcaatggtatttatgaaagtaattttaacaataaaaatgtgaaaaaaagaaacattttggacctaaactatattactagtagtaccataacaccatcaccaaaaccaattagaaaggtcgactttttgttttattgtaatataaaacccataaaatttttgaaaaaaaccaagtataattctatgacttttaagttttcatttgataccatgaacatgaatgtagacattgctcaagaaaaaaactatggccaattaaattgaaaattagtcatttatcggacccataaagtgcccgtgagaccccgccaccccatggatttttcgtcctccgcccgcccactcacacgtccgtctcgggtgaccaaaatgtgccgtgcccaactcggccggtccttgccataccgaattgtgtccgtgccatggcccgggatccgagtggtgccgaacattagtctgtactgactcatgtcgaagggcacgccgcccgggcctttgtccaccggtaactgatcgctgaacgaatgaaaaaatttaaaagcaaaaaattaaaagttaaaatgccaccgaatattttgagaatttataaaatcgcagaaaaagcaagacatttgctccattttacataatctgtgagaaaagtataatcaaacttgatgattttgtggtggtatttgagcgccgcttggaccattttggccgcgcattgcaattgcgcctcagtgccgggcacggcgaagtcgaatttgggaaaagtgatgcccggactggtcacaattggcagcggagtccgtgccgccaaataagcaacgttcagccaccacggagtgagctaaacgaactgacaagtcacagaatatggacacatagactgtattaagatgtttgctggaaccccaggcggtactcatgcaatgaggatatcatccgtacaattttcgaatttatttttcctgtaccaataatatcctcatgggcaagatgccaatgaggatattatccatacaaattttttaattttatttttgttcgagttcggaacaggggttcgaaattggcaaaaatgggtgctgtattcgtgatcagcgacctcaaaaaccccttaaaacttattttcattaatctctaaaacacgtttattggcatctgaaaatgtatattaaaagtatccagtaaactgcatgagtaccccccaggcccgtaaccaaaaaaaatttcgggagggacaattttttttgctctttgagccaaaattttttctcccgtgtaattttaaaactgtcgacgccggagagcaaaaacaggaaatcgtaaccgcctttcaccaaaaaaggacaaatttttaccctaatttgaattaaaatgggactggaatcccatcgggaacaacgccgatagcgataattgcgactaataacctcgaatttgttaaaaatgttaaaacagaggtatttaatcaaattgtaaataaactcacccaattaaccaatttgcgccctctttgttcaagtaagcgttgcaattcattggcttctttgctctccagaaaacaattgacaagcttaaaagggaagggttttttacggattgtccggtctaattgtaagacaacttttctataattttttccaggattccggaaaatcaaatttcacagccctactttatgtacaatacgcaattattttcatttaattggttatttggctttggtcttgctcacattgacggttgtgctaaactccgcttcggataggaggggttcagcaaatttgagaaatttttctgttgtctgtgccaatggagggaccggcagagaagggagagtttgtggtggaggcggcgatgtattgaacagctctacaaacgaattaatcatcattttgttctcggcatacacacgacctctgctgcttcccccggcatgcgatgagcgcaacagaattttgtaccaagcggggcaaatttgtttactttttgagaacacattgcggtacatagcgatggtcatttgtagtgcggagaatgaatggacaaattaatttaaggattagctcactatgagtcaagtccagtgtcagacaaaattgttcataacgccaaatagcgtaattggcgtaatttttgcgcgctaattcaaaatttacactggtaaatgtttttttttttgcacaatttattttgatgatcagccataactcgcttcattcccaactaaaccgaacaaatttgatatctaaaataagtttttgaaaaggagaatttttttcaaagcgaatggctaagcaatttgacatctcagaaaaaagttgttggagtttcaaatttttat

SEQ ID NO: 7427 - DNA, 2169 bp, Heterodera glycines
tttcatcctcagaggatggtgaatggcatagttcaatctcaccagccaattcccaggctgaaaatcgagagctttttgcttttgtcgaggttaaagaggcgcttcattgttgtcgagggacggattcgaatatgcttttgaaaaagactcggcaatggtcgaaggtgtagaatattggagatgccctcatgtaagcgctaattttcgagctgtacacacctattatttaagcgccccccatattgtcccggtcgcatttatgtccactctcgttggcatgaaagaggcgaattacgattcaaattaggatggaccaaaaatgaaaaccattctcacaatgaaattttggacaaaaacaaagtaaacaaaaaaaagaattttttatttatatttatcccaaaaattaggtacgaaatgcggctgagcgtttgaggcaactagccagagaagctcatccgcttcaaactagggatgccatagatgaagcaagggccgcactgtctgctgaagctcgtgttactgccccttcttcttctgccatgggaaaagtttttcggcgtgccaagcgtaaagctgccgaactacagggtgaccagggattggactcagttaatcctttggaaatgattgtgcctaattatttggagccaataattttactgaatgagaacatcgaaattgccggtcaacaacgaaaacttattgcctttgccacacaagcctcactccgaatgcttggtacttaccgcagtgaaatttcaatcgacggcacttttaaagtaagtcggagttttttaattacctaattaatattataataacagacagctccgaagggatttggacaactatttaccgttcatactgtaattgactcctgtgccattccttgtgtgtttgcctgtttaccaacgaaacacatgcaaggataccttcgcgtttttgatgcattgcgaatccgaatcggaaactggtttcctcaaaaagtaatgacggactttgaagttgcaattacggcgatgggtgtgatgggtggctgagagctttggatcgaaaatgataatttggctcaaagacaggcattgttcacgattgaggcaattccgttttgtctttttcattaaataattttattaagttatggaaccaaactgctcgcatccaaaatggactatcgagaactaataattcattggaaggctggcatcaaatatgggggtctctcttagccaggaaacccccatttagcatttttgtgaggcgaatgagaaaagaatttgagcgttgggagaacatcgtcgaagatttcgaaaattcacctgccaacggcattcgtggaaaagggctcaaaagaaaagcaatttatgtccaacaggatcgtaatttgcaacgtgtttttgctgaatttctgcagcgtgctgacgacccactccgttatctccgtaccgtctcatatcatttagcagaaatttgaattttatttttaaaaatttaattttattgtcgaaacggtcattgtcgaaacgtcattgtcgaaacggtattgtcgaaagggtcattggcgaaacggtcattgtcgaaatgtccgggagccggattagaaatatgttttatgaaatacgaaataccctccacctctgccgaggccaaaatttttacggaaaaaatgcttataaaatttttcttaaacgatcattattgcttttcaccgtggtgcgacttttggggatttgcaacttggggacccgacatttggggacccgacatttggggatcccgacatttggggacccgacatttggggatcccgacatttggggacccgacatttggggatcccgattggggacccgacatttggggatcccgacatttggggacccgacatttggggatcccgacatttggggacccgacatttggggatcccgacatttggggacccgacatttggggacccgacttttggggacccgacatttggggatcccgacatttggggatcccgacatttggggacccgacttttggggacccgacatttggggatcccgacatttggggacccgacttttggggatccgacagttagggatcccgacatttggggacccgacttttggggatccgacatttggggatcccgacatttggggacccgacatttgg

SEQ ID NO: 7428 - DNA, 2918 bp, Heterodera glycines
aaattattatgaaatttaaagaaaaaatataattgactatttttttaaaatttacattatctatcgtctattgtgtataattttgaatagtaaagaaagaagacaaaatgagacgaatctattagaaatccaaaattcaattcagttaatgtagtgtccttttttcacccattaggcaaaattttttgattctcaaaggataagatatgaatggcatcatagctcaagaagttcagccaattcatggctaaaaatcgggagcttattggatttgcctaggttaggtaagtcaaaaagacttcattgttattgaggaacagataaattcgaacacgctcttgaaagactcggcgatggtcgaaaatgtcgaatatttttaatgcctcataaacgcaaaattcgaaaactaaaaaagcaattcccataatgttatcttgaaaaaaaaagaaaaaaaaactattttatattgatcccaaatcctcatccatctcatatcattcagcagaaatttgaattttatttgaaaaaatatatttatatggatcctaaaagttccgaaatgacataaaaaataatattacctaattgtccaaactgtgattttgagccaatttttaagaaaacaaatgatttttagggttcaccgcgggacccacgcgtttcggcgacagctcgtttttccacgatagcttttttctttggcatccatccaacaatcttggtatcattcgaaagcttttaacatgctctattagtcctgtcaaaagcgaaaatattttcaagcctggaaaaatttttattaagaaaaaacaaaaaaaatttcgacttttcgcaatttcatgtataccaataaatggaatttttaatttttcgaaaagttttttcaaaaaaacagtaaacaaatgctaacaaatgagcaattcatcctcatctcccactcatccagctctacatcatctattatgtacgtcattattaggggtcggaaaaatatgtttgggtttttcaatattttttaaatattataagtagagcctggatttttagacatatgcctttttttgttgctaacttgctatggcctaatactcacgaaaaacgagtttttaacttggtttgaagcttttagcttgattttttttgtgccttttttttgccttttttgcaattttggtgcctatttcatgcctttttttgttgaaaaaatggaaaaaaatttttcttgacaaaatttttgtttaaaaaattcaatatttgttaagaaaatattagaaaagaaatgcacctcatttgcaactgcattcagtgaaatttttttgctcattttttttgctgacaattatatcactaaaatgtcactatttcggactcttttcattattatgtcactattttggcactttttcgtcactattttagttaactattttgagatttttcgtcactaaaagtcggggccctagataaaacataggagaaaaaaaatttggtccgaagagtaaaaaaaaaagatcttttggaaaatgttttgctaatttgacaaataattattgacgcaaatgttgatttttgctgactttttccaatttttcgtgcattttttgacgttttagttcgttttttatgccttttttcacatttttcgtgcctatttggtgccaatttttagaaattttcgtgcctaaaagtccgggctctaattataaccatttttagaaatttcacgtaaaaccccctttctgaggaggttgaaaaataatccccccggggtgataaaagagcaaatacggtaacttttttgctaattgtctaatcccgaagcaatagcttagaaaaagcttctaaatagattaagctttcgaaggacaccaacaatgttggatttggtttacaaggtaaaaagttatagctaaaaacatgctggcgccgaaacggagtgacccttaaccgccgtggaaaattttgaaaatcattgatattacgccataaaattataaattttttgaagaatttaagaaatcagaacaaaattggggcactctctccaaatctgaacatttctggcaaatccgaacagatccacaccctggtttcgcggcgcctaaacgctcgtctctccccctaaaattattacccgcgggaacaaattttaaaaaatagcgttgatattaatgttatggatagggttcccaaaaatatggataacgaaatatggacataaaatggcaaaaatatggacataaattttccgaattgaagggtaattcttccaaattttattcaaattaattaaattttactaacaataagatatgtacatataaaaatggttaaatatggtataaaaaatcattttaaaagaaaaaaacacgctacagcttaaaatttactcattttgcgaaaattttcgcttttttgcttatttttaatataaattaaccaatttttaagaaaaattaaatttaaatgtcgttttctgaaattttttcagtctttagggtaaaaaatgtcaatttacctgttgggggtcgttctaatagaggttttttagggccaccaaactttggacataagaattgatgctaatggtaaaaattttcgactagacaatatgcaagccttcgtcgaagattttgaaaatcttgatcctttgatttaccttcgagagtgctcattcattttcattttagctccaattattaattgtttttaaaaaattatggtactgtcgaaatcaatcattgtcgaattcgcaatttttttgataatggtcgaaatcacctggcatggctgtgcctttttggtttggttgcagtatgggtctatgatattttaaaaataaagagaaatattttcatggtataaaatttctactatttaaattcattaaaaaaatcaaacaatataaaactctccta

SEQ ID NO: 7429 - DNA, 1976 bp, Heterodera glycines
accatggtattggcatccaagtacaattcagaataatttttctctgctaattattttttaaaaaaaacttcaaatattgtgtaaaaataagtgtcaaaattatttgatgggctaaaatttgaaaatagggatttttaggttcgagcacctaaaataggaattctagggtcgaatggggggcttgaaaaggaagaattttcgcgctacaaatatgtttttcgtgcttttctcattgatttaaggatgtagaaaaataagtaaaaatctaaaaatcaatccgctccctaacggtttagcattttgattaatattttttgttcccaaaattgaatttaaatttgattccatttttgtacagaatcatcatcgactgttgcgtcgacgatgacgaccagcgaagggaaagcgacggcgatcacttcgcccggccccccggggttggacgagggcgactcaccgccccaggcgccaacagaacaacagcagaagggcggaccacagcagaaggagaaggacgagaaagagttgcactctctgctgaacaaagaaaaggcacgcgcctgtgagtggtgagttcgtgaaattcgggtcaagaaaggtcggattgttcggttctcgagtttcgggcggcaaccctattttggaatacaacccacttccaaatttatttgcacaattcttttatgataaggtcgtcaatctccgctgtcccgatcattggcaccattctgctgatgttcttctttttccaatgcacatcagcaatgcaaacgaacacggcgggcacggagggcaaacagtgtgtgatgcgcgggatttgtggaaaggatggtgaactgcgtcagaattgccggtcagtaagtcagtcagtcggtggtgtatgtgtgtgcgcatgtgtcaaagtgcaaaaaattcagttaaaacacaattcaaaactaaaaattagaaaatttgttttcggctgggctcgaggtgattttttgtaaactttttgccaaaaataacaaaattttcagtgtttttaattaaaaataatgtgttttatttcaatttcttcaacgatttcattaaataaaatatttttaacggtctggaaatagcgaaaatgataataaaataataattaaaattcaaagtatctaaatatcggtcgaagcattgctttttcctcactacttaaatcgatttcttaattccatgatattctacgggtttccgggtggtggccgattcttggacatgggagcacagcaacaggatgtaaatttcatgaaaatgcttatttttttattcagttcggagttgaaagggcctcaaaaaccgaaaatttgcccattctcgacagaggcaactaagtgaaacaattgcacagttggttaaaaatgggctttttgtgccaagggttcagatccgcttgcctgtaaatctttttaaaattattttggattttttgagttcgggtcagggttctgaattagtcgaagtgaatgtcaaatgcttgatcattggtcccaaaacttcgtgaaacaatttttaaaaatatttgcagccaagtggaatcgaactcatggcccaaaaacccattttaaccaaccgtgcaactcagttttcttatttccctctgacgagagtcaaaaaacgaatggttattgagccttttactaatccttaactaaaaattgctgattttttatgtatatttcttttcatatactttttttttaaaacagtgatcttaattttcaaatttttccaaaatttatgtacctaataacttttctttttaagatagaaaattttttacgaacctcatgccgtaaaaaaactggaattattttcatttttggagggggctttaattcagggggctttattgtcaccccccccccttcaaaaggggggctttatttcagaggggggctctaattcagggggggggggctataatgcaataaatacggtataataatatcatt

SEQ ID NO: 7430 - DNA, 2407 bp, Heterodera glycines
  unsure (1)..(2407): unsure at all n locations
tgcaggtctaaaaaattaacncgctaatgggagaaagtttatagctatagaagcgggtcaatttggcgcgccggtctaggcgctttaattttttttttttaaatggacgcgccaaacaatgagcggacatgcaaaaacccgcaccaaacttgccaattcccgaatatttagccgattcccgaatatttatgtatatgttttatttataaataaatgaggcaattcccttgggtttggaaataaataattaattaatttgttggcattacgcaaaacagttgttgctcatcagcacgatcgccacaatcatcatatccgtcacataaatcagcaggctgtaaatatatgtatattaaaaaaaagaaataagtaataatgtaaaaattgaatttgtatatacagtatgctcactattacagtaactatttcaaataatagtaatccttttaaatgatataggattcatatgttaaaatatgttttctctcaaaattacagttattaacctttttaataataaaggaaatacaggatttttttgttcaatatacaatatatttttctttcataccgtacctgtatgcaaatgtttgtgttcgggcacttcttgcgcaccccgcgacaatcaataggcagtccaggacacgttttggcattctcatccgacacttcctggtcatggcaatcattgtggccgtcacaaacgcgtgaactgttgatgcaatgcccattcatgcaggcaaatgaacctgatgaatttttgggagtggggtaattaattaattaattggttcgagagtattgaaacagtgaattcgactatagaatccggatgggacagggaccccgtcgggctttcctcgtcctgatgccgacttgaggatcctgacaacatatcgggattcaaatcccggggatttgaatcacggtatgcccaccgagtcgagattttaaattcgtttgaccctcctcaattaattatcatcccatcattaaacattgaatcacctggcgggcacaccgtgttgaccaccattgccgtgcccgtgccaatgccgccgcttccgctgccgccgccttcctggcccgttttttgagtgggcaagctgcaatcaatttcgtcggaccggtcgccacagtcgttgaccccgttgcagcgcaactgttcctgcacgcagcgcctgtttgcgcacagatagtacgtctcggggcagaagcgcacaaaacagtagctgggcgcttcgtccgacccgtccgcgcagtccgcccgcgcgtcacacgttttgtccagcgcaatgcagtggccgtccgacgcgcattggaaattgtacgggccttcgcagctgacgcgtgccgcttcgttcggcacacattgggtggcaatgtcttcgcccggctgcttcacctgacaataagtgatcagtgtaaaaattgccaagagataccattttgtgactcgatgccaagaccctcgagcatttttctaatttaaaatttaagaaactcactaaaaaaatttatcggacgggcgcttattgacccagcaagtaccagacaagtttattttttaaaattcagcctaaattcgttctcgattcccttcgttccctcaaaaaacaaaaacaaatagaaagataaaagtctaattttgagaaaattggagttaaaaaaaatttctgacttttttgaagtattggatgaggagaggactaaaatattgatactacctagttaacttaaaattttaagtaaggaaaacaaaaaattttaatgatatttggaaattctagaaaatgttaaaattttggaaattatggttttttttctgaaatacattctcccagctacagaaattacccacattggcatttatttgtgccattgaaaatgatgataagcacccaccaattgataggtgtcattacagctgcactgcactttatgtgccggagtgcccatatcatcggagatcacatgacaaatctgatcacatccaccgttgtttttggcacacaaatgactggtccgctcattgcaccttttaattaggctcagtaatgtcaataagttggtgattaaacaaaaatcggtcaattaatcgatcggtaattacccagtaaatgtcaattagtcggtaattaaaaataatccgttaattaatcgataaaattaaataaaatacgttgaatcaactcttttttaccattgattacgcgttttgatgtctgattcgctggcaaaaatgcgcacagttcccggcaagcgatgatcaggtgccacactttcgtagaaattgcccgtgaatttgttcatgcggaaaatgccattggacaacggatcactgaggtacagccaattctcccaaatgtccatggattttgctctcaatccaacgccttaatgggat

SEQ ID NO: 7431 - DNA, 4808 bp, Heterodera glycines
  unsure (1)..(4808): unsure at all n locations
gcgccatctgtctcactctacccctctcccctttcttcttcctctctcgctctctctctttctctccnccgcctcccaacgtgccaattgtgcgccgatttgtgccatcataattggccgattcgatgctcaaccgattcacatccgaccagtatatgcgctgctcatggccgtccaccgtgagcgcggccgcaaggctcagctcctcgcggatgatcacgcgtcggttgccgcccgccatgttggcacgctcaatgcgcggctcgtaggcaccgcccgttaccttgaaaatttgagagcaaatttaaaagaaaataaaaaaaaaaaaatttatttagcaaaagtggaaggaagggttttgaaataatttttctaaaatgaataaataataatgaatactagggatgcgatttttagttaaatacctaaaatttttgcgcacttgtaacgttgagataagcataaaaaacgagtttttagcttggtttggagcttctacacccacttttataatacctatttttacctatttgggggtttttctacctattacctaggtacctatttttatacctatttcggcatttttgttacctattttaaggattttcaaaaaattcttaacaaaaatgcaataaaatcaaaaaatatacccataagaatcgaccaaaaaaattttcaaaaatgcaccctaagaattggaaaaatttctcaaaaatttctcccaaaatttatttatttttttcaattgacaaaatttttaatttaaaatgtcaatattatctaagaaaatattaatatatttaaattttcgtttacaaagagatatgtagaaccaaaattttccctctttgtttgcttttttccactaaaaaatcgttaataaaaattttatttacctattttggtacctattttggaatttttgtacctatttaatacctattttgagatttatttttacctatttaagtacctattctgggatttttcttacctaaaaatcgcatccctaatgaatacaattcaaaaaagaattgaaaaccaatttatttattattttacaattttcttataagatttctctaatgaaccacaaaacaaaatttttaatagcaacaattcttttttaataattatattaagatgtgtaccaaataaattgctgaatattaaatgcaattttgtagtcatgaaatcccaatgattaagaaaaacctaaaatatttttattttatggaattttttttagaataaaccaaattctctccaattaaaaattattaaaatatttgtaattaaagtatttaaatcgtgatttgatgtccgagatttagtctcagtcacacaagtctcggcaaattttcggtatatctcgtgcatcattactaaaatcaccaccttatagccgctgtccgaccagaacacatagccagcacacgggtccaatgccaacgcatatgtccaatcaccggtggcaattgtcacaacttaattaattaaggcgtcaaagtacaactatttttcctttggggataattgatagaaaataattaatttaattaaagtagccaacatccattaattaaaattaaatataattgtgattctattaaattaattgtactaacgataaaaaaaactcactatggtctcctcgcgtgtcgtaggcgtaaatttttcctaaaaatattttaatggaaattgcataggtaaattaaattgcgacaaaaaaattccattaattttttttatgttttgacaacgatgacttatttttagtaagcaatttaaaaaaaaattattcaaattattataaacaattgttgaaatgttcgacagttttaagtcgttcaaattatttcttctataaaaaaatagaaattctcaaacatatattttttgtttctgaataatttatttattttttaattttatgaatagtgaaatttataaatttaattttaataaaaaatttggcactatatggaaagtgacagtttttgaaacaaaaggggggacccttttgttttgcaaaatttttttaagataaaaaaccatgatcattttttatccggggttttaaaggtcgctaatcacgaatctgacatgtattttgactaatttctaatccctaacccgaactcgaataaaaatcgaaattttgaatttttaaaattatgattttttgttcaaatttagattaggaaatcggaattgatcaaaataattgaaggattcgtgatcggggaccccaaaaactccagagaataaatttttatgactatcacaaaaaaaattttgcaaaataaaagggtccccccttttgaaaaacttttcaaaactggtcactttccatatagtgccaaaacacccccccccccattggactttcgggctttatgtgtagggatttggctgattatgagcattgttttctgacccctgagatttgagaaaactatatatcatattaaaacgctgccccaatgagtgagtgaataaaacgctttttctctatatcaaacaaagagagaggcgtttgaaatattttgcttttttttttttatttaaatttttagcagaaaaattacttatttgttatttaaattaataattggattaataaatttagataattaaatacaaaatgactttaattataactcgttgtttaaccttcttttccattttattcagtgctctgcccttagctgctcaaaacggagcatgcaatgtaatggcccgatttttaaaacttaataacaatttaaataactaaaataaataaaaaagcaaagaaaaaagtgtaattggtgttattaatgagcattttatgtttaagcaaaaaaggcttaccaagtttcataaaaaacaaataagctccatgaaaattgttccgaatgattttgctatcttaaaatattatgaccataaattaagaatcattgaatttaaaatatccttgtttatttatgtgtaatctatttaaaaaaattgtcattttttgcggcatttcacctactaaatccaatcttttttataaactaataataaacaatattattataatattccctcatattttcaatcagtgctcttcttccgaacaaattggccaattgcgttgcgccgggtgcgagccgacctgcgacaacccaatgcccgaaatttgcacgcaaatgcactgcttttgctcgtgcgattgtgtgccgggaatgctgcgcaattcgcagacggaccaatgcgtttggcctgcccaatgccaatcagaaaagaattgagaacggcacaaaaacaattgttaaggtgacagaaatggcactttctttgattcgaattgattaatttttgcaaaaacaaattaaatgaaaaatgcctaatgacttttaattcgtcaactttttataattgaaaacatttaaaaattcatttccattgcgcttgcaattgtttgaagtgtatatttgcttcttcattcggttgactttttacaatgctcggctttcgaacgcggctgacatatttgataaatcgaatatacaccacaagggtgaccagagaatgcaggaaaagcaactgaaaaatgggaatttgttttataaacttaccgtatgctttattgtcagtttatttctgtctctaccataccgtattcgccatatggtaataggagacgtaattggcggttgaaagcatttgccggtaggcgcgaaggaccagcacaataacattgtatatgggataaatcaatgcgtaaagcaagtccatcgggaagatcagcatcatggagagggtgttttcgttgatttggtacttcagactgaggttgtactcagtcgatgggccattcccgacccggtttagccttttgttcagcaaataaatgcgccaatcgcacaatgccgtcgcaacgaccaaaagcatcgtgaaaagcatggcccaaaaaatcaggttggcattgtaatcggaggtcaagtaaacgacgccttgggggtggccagagatttgagggtcggcaagtgccaagccgacaatgcacgccaaatacagcaaagaagcaagccactgaattgggatatttcaaaatggttaattaataaccgaaacaattaacagcaattggtaaaacagacaatggcgcagatgattgcgatgatcagtttcgggcccatctgctcataattgtgcacctaattaattatccaagcaagtgtctccttttttgtatgtgaatatccttctcatttggtactcagagattgtgtccctaatctctcaaatgaatgctttttgccttttttatgaatgtttttttgggatggaaccaaacaaagaaagcctggggcattttgcgaagtttctcaccaaaaacaatgctcgaatgcgttcgaaagtaacagcgaaatggagagacggataagcgacggaatacacttggtaagggcccataaaaacggggaccatccaaacggggctcagcagatcacacgtactggtgtaaaagaagagaagcaactgaattttttaattttggaaaatgatgtcatcattttttattaattaataattcattaattaataattaattaactattacccgatatcgcaaaaagtagacgaaccaagtcagagaatggaagaagtaaaggacgaggatgttgatgaacaggatcttaaactcattaatgtgcgagcgcattttaatatttgtaattaaattgcattttttcaataaaatacccttaagtttccgtggatggaaattcaaagtttgaaatattgacgaaccaaaataacaatcanaa

SEQ ID NO: 7432 - DNA, 3273 bp, Heterodera glycines
ctgtgcccacaaatttcccttaagtggagaaaataggctttatttgcgatgttatgatgttttaaaattatgtaccgctttttggcatttttatttgtatgccatgaaagaactcatgaaattggtcgtggtgtgggctgaactctaccgtaccacaaaaatttttttttttaaatataccgtatgactggtgcattttcattaacacaatttaattttgaatagatatttttttttgttctttatttcactgttttgaacaatcgacacttcttttcttggttttgtgcatcgctatttcccatctttggcatttttaaattttgttttcacattttttacccacttttggcattttgtccatattatttgccttcacttcctttctatcaccaaaagccaaaaagttgttattttgagggcagcagaagatcctttttcaagctaagagatcccccgaggggggggggcacttttcctcctttcattcattattatgtgtgtgccggtactgttgtgccaatattcacaggactgtttgtccacaacggcacggctcggctcccgcagtgtgccaaaagtactgcccactctcgccgagccttgccattgttgtgggtgccaaaaaacattttggatgatgcgacaaaaagtggcaaaagccaattttccagaaatatgacacccatgaaggccatatttttacaaaaatgttttcttttacaataatttcatgtaaatgatagacaagccaaaattggaaataaaattaaaatccaaaactttttatttttcgaaaaaaaattcatcgtttttaggctaaagaattttgttccaagcatccagcaatttcttaaatttaaatcaattctaagtaaaaattttaaattttgtccccatatatttttcgtgaatttccccgatgagctttttcagaatttttggcacgcaaaattttgaggtttttaaaaataaacttttatgctaaaacatatgacccacctaaaaattggtgtgaatttttcgtaaattccggcattaatcaccttattatctaaattctctgaattttttccaccataaataggctaatttcagacaaatgaatacaattcgtaaaatttttgttaattcattttagatccctaatgttctctattagccctcaaaatttcaaaaatttcgcttgactttcaaaaagttatggccagaggaggtttttcaaattttatttagggttcctccccgaccccgagctccccggtccccgaccccgatccctgacatttttgggcctattccccgtcccgacccccgacatgtcgctccccgaggtccccggcccccgactttttgccccccgactccccgacactaattcagggaatcggggaccccgagcattgttaaaatttaaaaagttaattcaacaacgaagaggggaaaggttgaaaatttatgaaattttgaacaattttcttaataaaattagttaaaaattccaaaaaactttttggcggcgcctatcagcgacgccgcccccccccccccaaaactccaattttttttttgcaaaaaattgtcccaaaattgctaaaataggtatttttaggaaaaatctgttaataaattaaaaattttcaaaaaaattttcctcgcggctcccaacagcatcgcccccatcccccttctgctgtagcccatagtttttttgaaaaagagcgccgcaaaaaaatggtggtcaaattcgatgttcagacggattcgcaaaaatttcggttaaacccagggtttctatcgaaaatttttcaaaatcaggacatcgggcccaaaaaatcagattttggagtcgaaaatcaggactttttgcaaaattgcttcaatggaggtagtccggcggtgccgacaggcgccgccggaaattttttttgatttgttaacagattttcaccaaaaaggccattttttaaattaaatccaatgccataaaatttcaaaattattgagtttttttttaagaaatcggaataatttcgtcgctaccccaaaatcagaacattcttataaataagaacaaatggaagccctggtttaaaggcgccagcttggactcactcatactggcgctaacgaaatcagatgattaaagtgaaaaaagggaagatttacgagtagtgaaaaagaaaaaaatttattttttgtgttaaaataaaatccccggcccccgactttttgcccccgagggctcggggcttaaccctagttgatatgatttgaaaatttcgattacgcaaatttacgccaattttttttcttaaatagtccctgactatttaaaccggttttaatgtgatttgttaacagaatttgcccacaaaaatggccaaattttgcaattttaagcaaaaattttaagaaaataaaggatttttagggtacagcggtgccgataggcgccgccgggggaaaaattgagaattttgaccatattattagcagattttcattaaaaaattctttattttgtggttttttggaaaatttaacaaaaaaccacaaaagcctcaaaatttctgaaaaaaccacaaaaagcctcattttgaaaatttagcctcattgacctatctaaaaaccacaaaatgaggctaaagcctcatatctacgaaccctggataaaaatcaatgattttcggcaaaggcgcagaattatggtcccgatgggaaaaaatagtaaaagtataaaaagcattttttctggggtagaaaaatacgctgatcacgaatctgagctcagcttttgaaaaatcattgattttgtctacatatgactttttatcaagtacttgattttttcaaagttttaatcttctgtaaaaattttctttccattgaatttgaggtattcttgtttattgtcaataaagaaaaagtccacaaaagggaaaaatccgcttacattgaggacaaaacattaattaaaaaatgtcctcaagaaagcgcaaaacaattaaaacgagatcaccgccaaaaaatatatatataatgtgaatcaaataaataaataaaaagtcaaatattgaccaaatcacttttaattttaatgaactaaaaattcgactttaatttttttccggtctattttacaggaatagagatagttttaattttatttttaaattgatttaatgagtttatttcaatgagccttttatcgagttggttccaaattttagttacccgccccgcaaaaggtataaattttttgcctaattt

SEQ ID NO: 7433 - DNA, 2811 bp, Heterodera glycines
taaataaaaaatcacgaatttgacgcaaaaattctcatctaatttgccgttttcgttgacacaaattgaccgaaccctgtgttaattgtacaatagtaataatattatataaattttatttgtttaaaaattttattatatgcacacataaaataatataatataattgattaccattaatgaagaaatgaatcattgcagcatcatatgatatgtatatgaattggcataatccaaaaaattatgggctttttttcggcaaatattactccaattttattcgcattagcatttattccaattcttctttccacactaataatgagactctccaaatctaaatcattttttattcaaagttataactttagttatgaaaaatttaaaaaatttttcgaaaattgttgaaaggggggagaaggagtgagtgaagcggcggctaaattttatttttttttattgaaatttttcaattttttgagcactgaaaaaattatttaaaaaattcctctcataaatatttgcttgaattttttcaacccattttgaaatttttaaggcaaaaaaagaagctttgaaggatgtcaattaccgaaaaaattgacgaagagatagtaaaactgaagcaaacaaaaaaaaaacaatttttaaaattcgagcttttggaaaaatcggcgaaataaaattttaaattattaattattcctattaaaattagtttttgattaatttcaactaattttgaacatttaagcatcattcataactttttgtataatcatttttatagcattttgaaaaaatgtttccgtattttgttacgcctctcctactaattaccctaattattccaacatttgtcgtcgtaaattcaaagtcgtttggtaacatcagcgacaaatacaccattcatcctccaggcccctaccatattgttgttgttttctatgttgccggtaattttgagtattgtactgtagattgtttcatttcaatcatttaaaaataaaaaactacggtaattttaattcgtaaacattttattttaaattttttgttctgttccatttgcgcgaatttgtggatgttcccaaaaaaaaaaaaattttttttccacgtaattaagaaatccatccggctctaaacacataatccgagttggaatccgtaatttttaaataaaagtgtcatacttttgaactgacagtgaactgtaatgcagtagggacgtgtcaaaatgccaatttccgacatttttgggcacggaattccgatttttaatatttttttgaggttgtcggcacataccccagaattccgacttccgagttctgaatttttttttttttggcacggatttctgacttatcaaagcgagtttttagcacataaataatgttttggacttttagctgacaaaaaatgttttctgctttttagcaaatattttggcgatttttggcaaatataaatccgggctctggtggattaaacaaatttaattttttagatggccatcagaaagaatttccatttgcaactgatgagaacggcagaatcaaattgtcatttaatgagaaagtgttgaaaaaacgtgccaacattgacaaagaggacaaaaatcttcactcatacatagcatttttcgaacggtaggaccctagcaaaattagtacataccattcgaaagcctctgatgggataagcccaaaaaagggaactttttgagccggtttataactcgaaaaacagtgaaaaacatgggacaaatgagtcccagtgaaaatggaacccacttcagtaccaatgaaataattaatggaagcacaaaaaagggtgctgctgggtcgtttcgttaaaaatgccactatgcgcatttcatgcaagtgccaaacaaagaaatttttcgagaaaaaatcgacatacaaaaatttccacgtacatactatgtgtatgaaaagtctataaaataatatagaaatttaatcgttttaaaaatcccccccccccccccggtttaagtaaggagatccgagatgacggctccaccgtcaaaatagcggttcatttgcgcaacagtgcaaatgaggagcgacttttgcatcccttcgaaatgtttaagtataatgaagcacatgagactgaattggttcgaacatttggcaattatgcccttttcatgaaggaccgaaagtataatgagtgtcgattgcacgaagtgtttcaaatcatgtttgatcgtcttccattgctgacggtaatcatcattagggatgcaatttttagtttttttcactatttttttgctgttaactcccagtgacctgaaaagcacgaaaaacatggcttttttggtggttgttaagctagttttcgagttattagagcctattttctagttttttatttttagcacttcaaaaatttttgaaaaaaaaattcttttttttaacaattttggcgttttgccaaaaatttataacaaaaatgcaataaaaacgaaaaataaaacacccctaagaatcgacccaaaaactttcaaaaatatattccaaagaaatgaaaaattttctcaaaaatttatttatttattttcttgatagattttaaaaaattttcgtttgtgattcgggaccaagagccaaaaagccgagattttgttataaatttttctggccagcggtgtcgattagtcggcctgaaagaattagaagtttttgccaactcttttttgtccaagaacaattccgtaattacggaattatttttccaattacggaataatccgtaaatactttattgcctcacagc

SEQ ID NO: 7434 - DNA, 4627 bp, Heterodera glycines
  unsure (1)..(4627): unsure at all n locations
agtcttgacgacngctgccagtcgacgcnntaaaacgagccccatcagctccattcttgggattgtgaacgttcccgaagccttctntggcttaagtcgggatttggccatgatgagacgggagagaatgctcccgtccactccttctgatcggagatatgctgcagcggcatataacgaagtgcgcgcacaatacacgcagcctcggagtactgaaaacattaggcctatttttgtgcgccaaacagctattcattcgcatctaagtgctatgcgtttaccacccatccaacagccggttgtggcaatagatttccctgagcagtttgtccagagaaatacccaaactaacatgccgcaaccacctttctatggcaatcaacgccaaaatgaaaatttgcaccaaaatttacaacgagttgctggcaacgaagtacaataaagaggagtgcatataaacccaggaaattttccggaaagggttaatgctccaaatgccgatgcttttcatatgcgacgggaaatgcatgatttagttctgacacaagcaattaaaagcttggataatttctcttattcaatgacgttgaattcactcccagagctgaaagggaatacaggctcagatgcggttcgagcatttttccgtcattttgatgttgcaactgaagaatggccagaggctaagcgccttagcgcacttaggtcaaagtgttcaggccgtgctgaacgcgctttttctcgccgaaataatgaaaggattgacgatttggcagatcgggtctcttccctagtcagaaaggcttaccctggcttgttggagcatctttatgatgattactcaatccgtcattttatcagagcacttcagaaccccgaacttgcactcactcttgaattagcccgtagaccatcaatgatttttgatgagtttgtagcattagctgctcgggccgaagcaactcaaaaggcgtcaaagatttcattgcaaaaacaacgaaatataccaaatttccaagaccataatcagtctgttcactaaaatccccggccaatgcaacagactttccgcaatgaaaattttccgcggatcagtcagagtcaaaaccgacaaaattgttacaattgtggtcgtttcgggcattttgcccgacaatgcaattaccctcggcaagttagaactgaaaatgctaacattggtactccagcgactggtgccaacaaaacatcagtcgaagtgcctaaagacacgtcacagccacaatacaacaaaccgctaccgttttcaagaaattatctccgtcaaaattttcttgttgaacaacaagaaaatcctccaccgacgtcacaaaattttttgattggaggaatttcaatgagtaatgatgaattggagaaactttttgaaagagacaaaagcgttgaagctgaaaatagtcgagcaaagttgttgaatgtctctgttggtaaaatcgtggtcattaaagtttctgtttgtgatttatcagccacggccatgttggacggaggagcacaagtttcacttgtgtcctttgcttttttctcgaaaattatgactgagaaaaacctcgataaaattcaactttgtccgacccggaaaagcactcaagttgttgacataaacgggaaaacagtagagtatgttggagtcgtgtcattgccaattgtcagaaaaaatactgaagtttggatcagatttcatgtgacaaaagcgtcatttggttatgaatttctttttggcaccaacgcattggctcgtttgaatttcaagctctatgatgggcaaaaccaagaaatgataagtttcacagaggttgacagtgaagaaaaaaactcggtacatgttatctatagaacaactttattaccgcaagccacgactttggttgaattggctagtccaatgaattttaaaggggaaaacgtggctgttttcccaaattcagaaaaagaaataaagattgagccaacactcacggtttccgaaaaaggaaaactgattgtaccaatcaccaatttttcctctcttccgataacattggaaaaggatacacatgtcggaaatatcgaattggttgaaaattttggcgaaacggaggacttttttctgtctccgttaattgcgtattgtcgtcaacaaaacgagccgagccttgctcaaatgagtgagcaaaatgcgaacaagttggacactatgagagaaatttgggtgccaaaaataaaaaatctgaaagagggccaaatccgaaatttggatgaattagtccgccaattcgaaaatatttttgccttatatatgaccatgagttaacgcaaacaagtttggtggagcataacatcgatacaggaagcgcagcgccagttaaaaatcgaatgagacccgtcccatatgcttatcgggaaaaagttgcggaaatgttgcgagattatttgggccgtggaatcattaaatcatccatttcgccatgggcgagtccaattgttttggtgccaaaacgcgacggaagtttgcgattttgcgttgattacaggggaattaatgcagtaacgaaaaaagatgcatttcctctgcccaatattgactatatcctaatggcgataggtggaaaaaagttcttttcaacactcgattttatgtctggatactggcaaattcgcatgagtgaagactcggttcaaaaaactgccttcacaactgaatttgggcttcacgaattcaccgttctaccatttggtttgtgtaatgctgtcgcaacatatcaacgattcatgacaagacttttcaacgaaatggttaatgatttcgttttcatttatgttgacgatattttggtggcgtctgagacttgggatgcacatctgaaacacttggagcaagtttttgagcgagtcgagcaggctgagttgaaattgaaaattgacaaatgtcgttttgctgccgaagaattaccctttttgggtcatatcctaacaacaaatgggataaaaatggacgcggataaaattcgtccaattcttgaacttccacttccttcctcaaaaaaacaattgcagtcatttcttggattcatgacatactaccgtaaattcatttacggatttggatctttggctgcgccactcttccatctcattaaagaaaatacaccttttgtaatgggcaaaaaagaacagaaaattgttaattttttgaaaagaaaagtgttagaagatgttgtgttgtattttccggactttaaagtagctgcggaaaatgcgttgaggcgatttatcattttgacggatgccagtaaatttggaatctcagcagttctctgccagcaggacgaacttaaaaatgttcgcccgatatactttgcttctcgccaatgcaataaatataagagtaaatactgtcctactgaactcgaagcactggcaatccgttttggaactcgaaaattttcacaattcattacgggtattccatgccgtgtgatcaccgatcataaagcattaattcccatgtttcgaagtaaaaaggaaacgggaaatgcaagagtcgatcgatggctgatggaagtgaacgctcgttaccaattatctgttgaatatcagccagggaagcagaacgtggttgctgaccttctatctcgagttggaaaacagtcagacacagaaaaaatggaaaatttgttagatgattgtccgtctgaggtagttgttatcaaaaaattgtctatcaaagaaattaagacaaatgctgacattgagaaactggaccgaaaagagtgggttgaacagaccaaaagcagtgagttaaaaggcatttatgagtttttcgagaaaagagaaactccacaaagcattaacgaggcacaaagtttaatggacaaaatcaataattttgctctgattgaacaacttttgtatttcgttgatcaaaagacagggagggtcctttcgtttgttcgtgcctgaaaaatacagaaaagaactgatcaaaagaaggcacgaaggaaaatgcgcagggcatttaagcggaaaaaagttgtggagacaactttgtgaattatatttctggccaaacatgatgaatgactgcttaaaattcgcattgagctgtcggatttgtgcccattccagtaagcctcggaaaaatgagccaccgatgcaaatagtgaagtctttagagccactagaattagtgtgtcttgtatactttccattggaccatcagagtcagaaaaccgttatgtgcttgtggccattgatcacttcactaaatatctcattgctgttcccctaaccaacaaaaacagtgaaactgtcgcgcgcgcatttgtaaacgaatttattctcgtatttggcactccgaaacgtctccatagcgatagagggggtgaatttgtgaatgaaactttggcggaaatctcaaaattgcttggtgttaaaaaaactgtaacgtccggttacgatccacaggctaacggagtaacggaacgcgcaaatcagaccatattaaatatgctgagaaaatcaaccgggtcaaattggagttgggacgaaagacttccgtttattgtgttttgtattaatacacgccatcggaggtgacaggtttttc

SEQ ID NO: 7435 - DNA, 740 bp, Heterodera glycines
  unsure (1)..(740): unsure at all n locations
ctccacccgtacccccctcccccgccgctgtccaaccacacaatgccttccacccaactaatcccattttgggaggaagtgattggaatgaagcgacgacgaccttgtggaggaaggaaaaaggtggcaggggaggagggaatgtgcgcgcggcatcggccaccatcagatttattgttggaatataaaggcaggagggggatatatggcgttgggaaaacattcgtaattcaaaggaacaattgaatttacaaactatgacaatgcaattggaaatattgtgcgaaatcatgggtatcacaaatatcacattaatttggggagccattagctcgtggaatcaaaaaatctttcatctccttcttttatcccttttcaagtgctcagttttattgtgccaacagaggaagcaatttcatgttttttcgccagtgcgtttagcctttcctgcaattggccgtgcaattcggccaaattgtcgcgaaaaacgccaaagttttcacagacgagaacacctgttaaacttgtcattagactctgtcagaaaggggaagaggaagggtatacaattttttagtgattcttggatgacttccgccaaaaggtcgctacacgaacttccctccagaaattggtccatcagctcaaaaagatgtgaaagcaaatcggcaaaagagtccaatctgaaaaacggacaataattaacattcgcatanatattcttttttttttgcctgcta

SEQ ID NO: 7436 - DNA, 3239 bp, Heterodera glycines
  unsure (1)..(3239): unsure at all n locations
tcgttgctttgaaatcgtaattcccttcncattcgatcctttcncattccctcctaccacaccatcncagtcaaaatcccctaaattgacaccaaattcgacagctgattggtttacaatgtgtgaagatggtacaaacaagtttttttaatttgtcgcggtgggaaagaccacgctttcacctgtaaagatgcgtccatgtaacagttggacagtctttcgtgctcccccaccgcccgctctccttcccctatgtgttgctgttctgtgacattattcgttccattttgatcattatttggcactgaaaattgcttcgagtgattgtcgttggttagtatttgagcagacggaggagtcgccggaagtttcattggggcacatcttacaatgagcagatttttgatttacgaatttaactgccaactcactttcctccatccagactggcttcaaccattgttcgaagacacctcgtgaattgggcaaaattcgatggcgttatatgcgccgcatcacgggccaaaaacgtcaaaatttcacagacttttagaaaagcggctggatcgtgtcgggataaattgaatgccagtacgatagtgccacgtttgaaaaccgaagaacagtttttgggaaggggcggtgggggcaactgaaagggatagccaacatatgtaagcatcaaccagccgaacagttgtttttcaactaataatagcgcctgaaacacacctcgaccatttctgccccgtcgatttcgtcgcggtaagcggccgcgccgacagattccaaaagtatgaaaaacatttcccaatgttcgctcgcgtgtaaattggcagcatttgcgcggaggagctgatggagaccgaaagcaatttgacgggagaacagaaacaattcgggtggtcgaagtgccaacagttcacagcccatgaaatggagcacttcgtcggcacaattgctggcgcggtcctggacagtctgctgattggaaaccagtgaatctgaaataaaaatccaatttataaacaaaaattaacgtttcaatttgtttattatcgatgccctgcctttgttcgtcacgtcgccccgttgttgcttgtgctgtttgtcgtcgtccattgggtccaccacaatcaccacgcatttgttttgtccggcaatgatttgctgcgattgcttttgtcttgccaaattcggtgctatcaccgcttccgaagtttgtttccccttttcaattggagttggtgtgaaatgttgtcctaaacggaagagattccgattggcaattcggacaatggacacgacggcacgctccatcagttgttggttgtgtgggaagtgggaaagcaaagtgcgcaggtggtcgcgcaccggagaccacacttgggccagcctgtctcgattctccagcacaatgttcgtctggaattattaccttttcagtaaaaaattaagtgttgaaacccaccatcaattcaagcaaaaagaccatcgcctcttcctcttccggtgacagtttcaccaccgatggcccattttgctgaaggccgttgttcgagtggtggggcgaagtgcggtcgtcagaagtcgactcaatggaaagtgtggaacccgccgcctgacgaagcagcggttgttgctcagtgccgtctgtcggtgcgcggcgaagcatttcggcagggggcacagcgacattggacaagtcgacgaaggagtcctcgtcttaatggctaacactttccacataattccaaagggtacgctacattatgttaccccaccgcacaataagataatcaaaattgtcatatatttttcggcagtgcctgtcggtattgtgccggacccctttgtgtcttcccttattcgttcgcaccagcgcttttcatacgtttattttcgacctgtcaaccaaccttggctttcgtgttgtgagtgttgctgttggttatcttgttgatgatgtgtcggtccgtgcaaagtgcagagaatgggtgccacggtgaaagaacaatggatgatggaattgactaactcagtgagcgaagaactggccaaatagcgactgtccagcacaatttgctcagggtgacactcggcaactgtattagcagccaactgaaattggaatttggaagactcgatatgaaataaaggtgcaacaaatattgggttgttccataaatattgttatatctaaacttcattgttaagcttgagaatatgagatgtttgttgcgcgtgtttttgttattttttgtactttttaggctttagaaagctgtaacaattcgaaagtttgtcaactaaccgaataggacaatgattatgaaacgacctaatctaagtgattgtttctagccttgctcaactccttctcttgctcgttttgtggtcggctttgccccgattctccgccgccggtggctgaactgcccgtaagtccgagccaactgaggagtccgctctcttcctttttcggtgcagtcggacggcgtttgaagcaatgtttaagcgaaacgaagccggacagctccacaaaatcttccaattggacaagaggagacggcagaagattagctttgagcatgtaaagaagacaatccaacacattcatccatccctaaatggaaaaggacggactaaacactgtaaaatgtgcgcctgttcgaagcggtctactgaaaaggaacagaacttctcgaaggttgtccccgtattgatgcaccaggtcgaacatcgcccgtgccgccatttgtgcctttttattctcgccaaatgcaagtgccatttcctctgatgaattccactgcttccaatgtcgtgctgtgtcattgattttggccgaagttgtgccattaaacgctagtcgggagtgaagcggttgtgaggacggtggcgaattgagcggcggattcgcagtgtccacggggggagacgcagcgcgactctttggcttttgctgttgaagccccggcggagaggcagaagagcgactgttgtcgctgccagcggcttcggaggggcagacatggcattcctcagaagttggagtcatttccgaattagcagactcacaacaaaaagcaaaattgactaacacttcagaagagtacaacccaaaagtaaatgatattggcaatgtacgaatacccaaattaaggacacgaatataacaaataaggcaataattccatcnaatccgagcaaacatttaatgacaatgagcatctaat

SEQ ID NO: 7437 - DNA, 1159 bp, Heterodera glycines
tttattgaagaatgatgagtgggagcaaattgaagaactagttggggttttgaaatgtgctgaagaggcaacaaaaaggttcacggaggagccaatttcgtttgtccttcctcaagcaagatcactacacgatgagttgtacgaaatgaaaattgtcaacaggactgtggagacaatcagaacgacactttactatgcgtttgaacggcgcttttttgagctagcgaacaagaagtaaaaaaattatacttggttttcattaatgtttggtcttagggaatatgctctggctacttttttggatgtgcggttcaaagacaaagtgctgactgaaaattccgcaacttttcgcgccagagtcactgtctggatcaaaaatgaattgaaagaattggacattgataatgacttcgaggaactacaacaaaatgaatttgtccgtcctgtaatttcaccccagcccgaaaatctgccagccaaacgacgaatgtcattttttgaacgtcttaaagaatattacaggcgcgaacacaagtgaacagggtgatttttcgtctcttaaaattaattttataatgaatttaaggtctccaaacatcgcaagacgatgacattgaaaaagaaattaaagaatttctctcagtggaaattgcgaacccagaagcaaacccgcttgatgaatggaagaaaatagctccccgattttcaatccttgccaaatttgcagaaaaatatctttcagcacccgccaccagtgtcccaagtgaacaaacattcaaagtcgcccgtgatgtttttgattatcgccgttccaaattatcacccgaaacggcagaacaacttatttttttgaacaagtctcttccccagatgaattacaattattgaaactatttttttgtgtatttttattaaacttgttatataatttctatatagttgatgaaatttgtgggtttttttcccaaattaacatgtaaaaattaaaatttataccaacccggaacccggtcccgggcccggcaatttgaaaacccgggttgaccgggctaaccgggttgaccgggttttgagaggccgggcccggaacccggttgattctggaaaaatcagcccggcccggcccggcatttttggaaattccggtctctagtaaaaa

SEQ ID NO: 7438 - DNA, 3280 bp, Heterodera glycines
tcccccattttccatttgcccatggtggcatttctgttggcccaacctcagcccttcgccccttttggtcgtctccgtctgctttttgtgccctttcggcgtaggtgcgttctcaaactgttgctgttcgtcctcctcctccttttgcttctccgtctgctcatttcccccaattccgactctcttccgatcacaagggatgtgttcatcttcgccagcttcctctacaaaaacaccaccaccaggtgactgtgactcgtgcctcgagggttcttcctttctcttcggctaattggcttttcgtcccttacgaagtctgtccgcctctgtccacgactccgtggccgtccttttcctggccaaccgtaacgacaacttcccttatttacgctgcgctctctccaatggctcctccacgcgtccgatgcctcctgcccaactgttccatcttgactatgtcgccgtctgcaaactgatcattttcgtcgcctggtgcaacttcccgcccaattcctttcccgcaaatgctcaaaaagtgttcgtcgacttgggcacgcaagtgctggctgatcagtcattgagagagcgatacacacggccaatccttcacaaagtgagacggtcaaagacttgcaaagcaaccaaaacgccaaatttggtcagattcacgttcaaaaagcgaatgaaacaccgcgaaagttggtgatgtgcatcagcaggtaaacgaacgaactgcttggaattgttggacaaaagaaagccccgatttgcagaatattcgccttcgaaaagtgggaactgctcattgtggcaatggaagtgtacaagcgattaggtgtcgatttggtgagtatcgattggaaatgcgaaagggcaggcgggtactgtaggcttacaaccgagagtacggtactcacacgcattactcccgtccgaaggtggtaacccacgtgtattccgcactgacgcctgtctttgaactgatcagagcctacgaaacggagggtcggctggcaatacgaaaggtagggaaaggcacaacaaaaaatgaacaaattaccctaatcggccaataaaaaaaagaagggaaaagcgttcattccaaatgcaatgattatttttaccaatgtttgtttgtgcttttcccaaagggggttaagcttcccttcctgcgccatctgatgaacttcgaccccgatcgtcagctcgaatactccggccaattggccatggcccacgaatgtttctacgaatttcgtcagagtgccagcttcatctcgctggtcgactgggacgaccttctgatcaccaccaatttcccttctctgcccgacgcgtttttcgccgctgcgcaaaaatacccaaattcggcctatttcttagtcaacaaattggaaagcggcattcacaaaagcgcagtccaaagtcggcacattccaatcgcttctcttccctcaaaatccctcctttgctcagatcgatcgcccgccaattttcggctcgaaaatctcctccaaaattcagtgttcactaaaagagcgtataacagcgagaaaatggtaagggtttgagtcgaatggaacttaattaacatttgtttgttttgggtaattcgtccgtcgcgagtcgacggcttttggattcatttcacgcgacattatgcgaataaatacgaagcaccggtccaattgcccattggaaatgcgaccattttgcacctttcgaaagaggtgacacccgaaaaattgaagagcctttcgaaatcctttctatttcctgacagatcagtggaacggaaatggcatacaaagagaatgttttgtccgccctttggcactcgccaaatgcctccgaaaaagcgaacgcattttttgccaacaaaaccgtgggaagggtaagcgaataaaacggaacgaaaacgggggaagggatttcctccccaattcgtcatcttttcatgtcttggctcatcagattatgcgctcgctgccctctcgcctgtactatttcgcctccatccgtcactgctccctcttcctcaacgcttaccccgaccttttccctcctccgccctgtctctcctattccctgtgctcattcccacaaatttctgtcccatgcactgtcgccaaaacgcattttcacacgacaagcattgaacccacaagagtttatcgggttcacgttcgacaatggtcccgtttcgagaaaagatcacagggatgtttcgacagaaaataatttcgcaaggatatcatatattgtgttttgtgcattttctcgctgaattcgttccattcggaaatcaaaaatttcgttaattcgatagctttccacgttctttctgattacaattcatcattccttcccggctgttctccattcgcaacttggctcttttgttgttgctgatttacaatcgattccattggtgtcactgattttttgactgtcgaattgcccacaatggcggaagtgttttcacgataaaagttgaccaattgtgtgccgattaaatactgaaatgtttgatggaaaataatttagaaccaacaaatgctgtccaaattgacgaaagaatgaaagttcggcacaatccttacagaaatgcccaaggggaagagaggaagagacaacaaatatcaaaatacaaacagcaaaacaaacaaacaaaaaccctacccaatattcattattagagtagcaaaacaaagcaccttgtcgttacgaattttctgggccaaaagtttgagcttttgccattgccatgtgattaaagcacagaaacaaatggagccgagcagaaacggataagcaaatcgtatcacaatgatttgttcctcgcgtgaagcatctgaaaacacagaataaaatagtgataaaatattttgatattaaaatttgggaaaagaaaaaaatttaaatcgcttaccgacaaaaaagaggagaaaattgctgagaacgtaaggaaacgcgatcagaaaagtgagtgtattcacaattgggaacaccaggttcgtgtaaaggtctcgcaaacggatgttccaaatgccatcggcgtaaatcttaaaaacaaacagtgacaacccagcacatgtgcgttgttggacctgttcaaaagccgtcttcagccaccagtcggggcccatcaaaacggaagcacaaacaattttgaagtggacaacacccatggcccattctttccaggggaagaaaagcggcgattggaaaatggccacgcgaagaggagaaatgacgagcattggaagtaaaggccgag

SEQ ID NO: 7439 - DNA, 3006 bp, Heterodera glycines
tagagattcgatggatgacgaggccatgaataaaaatggcgaccaaaccagtcaaaatcgaaataggaagttcgaaaaatgcaatctttccagacccaaagccgatggtagacagaattccagaaccaatttgagcagggaagtacactaaactgagggtcatcgacaaattggcaattaattggaccaacggaaaacgatgttgaacacaatgttgagtgaaattgtccaaaacacgtgctcaataaaagcaaaagagccgtccaaacccaaaagtttttgccatgtgagctcatccacaaaacgttgctgctgcgggtcaatttcggctgccgccgcgtctccgccattgtgcgcttgttggccttggtcggccggttgattttggttggccacaagcgcagcttgaacaggttggtagaattggagagggcggagttggcgattttggggaagttggtcaagctggttttcagcttctgtttgatcattagcatcagtcgaatcggaagttgccgccgaagtggacggaccaaaagaactcatttgttcagtgggagttagcccattgtaagcattttcgttctttccatccccatgttcttctgcatccgcttctgcactttgcccggcattgtcaggcggttggtctaagattcggttgatattaaattatgtgaatgggtatttttctcactttggtgttgttgatgctcaacaattggttggtcctcgttcaaatgtaaaagatgggcaggtcctccaatctgttaaaaactcattaagaattgaaatccacaaaattgtaccattatttgttcacgaagccaaacgagggaaataaaagtgcatagaaaaatagtgacgactaaagaaccccgggcgatgtcaattgcgacattttcagttgagaatagttggaaaatgcgggaggagaaaaaagcggtcataaggccagagaagacgagccgatggatgcgagccgccattaacggcacaatgcctaaaatgggacgaaaattgccataataacaaaatgcacttggagtggagaccgagccaacagcaagcgaccatcgcataagtcagagccaaccgcatgaagttggccaatatgagaaagacgcctgacaatgaaagatggaaagtggcaactgcaaaacacaagccaacccctgagtaagtcgaaaatgggaagcctttcgggcatatccggccgataaagtggacgaaaagagaatttgtggttgcacaattcgcaaacatccttcttgctgtacttaagccactgtagcagacaatcctggtgcacgtactttatgctgccagtgcctaaattgtcaattaacaaattttgaaattgaaaagccaattagttacaaaggcacggatggtataaaacgtcgttccccgacaatcgacaaacacggcagatatctgtattcagaaagaatttggcgctaattaaggctatttttgaaacttattagaaacaaaagggggaacctttttggttgccaaattttatttaaaaaatcggaaaatataacggtagcatgaatctgacatcgacttcgaccacttaacacttttttcctcatgtagaaataatttttaccggtaaacctaaaaagtgccccctttggtttttgttaaatttttaatagttatgcgttacccctttctccctgtccatcctcttcctcatgtgcgttcattatgttttccattattctatccttcagacttttttcttttctttgaacttgcgtcgaacttgactcagcagctaaagacgaagttgccgatgtttcttgttcattcatcgtcctaaattaggtcaaacaaagacagattttgtataaataatattataatacttaaatttatgtgaattcgataagtatgaggaaatgcaattattcacacgcatttagggtgtaattaatttaagtaccgagaccgcattttgatgcaaatgcctttttttctgcgcactagtttcgatatattaatcataaataacacattttccacttgatttgagtcttctacgttgacttttattatgccttttttttgcctttttcgggattttcgtgccttaaattccttttttggcattttgccgttttggtgcctttttggcgttttttccggaacattccattaaaaatggaataaaaatcgggaaaataaacccctaagaaatgacttgaaaaattttcagaaaacaaaacattataaaatatttaataattatttatgaccaaaattaagtttttggttaagttttacgtgttttggcaccctaaaaaaccttagaaaaaatttttttgaatgccttttttcatgcctttttcgggattttcgtgccttttttgcggtctctattaattactagggctgcaacagggacgtatccaggatttgggcttggggggggggggggggtaccgatccgaaaagtcaattcttaggggtgtattttttaaaatttttcgcccgattcttaggggtgtattttttaaaatttttcgcccgattcttaggggtgtattttttaaaatttttcgcccgattcttaggggtgtatttttgaaaattcttcgcccgattcttaggggtgtatttttgaaaaactttcgcccgaacgaccttttttttttttgctcataccagcgacgctgggaaaataggggtgtatttgaaacgataaattagcattttttccatcgtttacacaatggattttgaaatttagctattttgactgcttttgctccgcccctggcgaaaggaaatgaagaaattgaagacagagaaaatgtttctttgtaatttggcgttggaatttaaaattaatatgttgctttcgttatgataatttggcgttaatttaaatttggcattcctttttctctctggggcgctggttggtcttgttgggggggggggggtaccacctctctttttcccttaccgacgggggtcttgggggggggg

SEQ ID NO: 7440 - DNA, 4847 bp, Heterodera glycines
agtcataaaaatttttaggaaaaattttccaaatacaaaatttttattcagttttcgcgcgagtacctgttttttagattagaattgttcagaagtatacgtatattgagggtgaccaagtttttttttcaaattcaggataaagaacactaaaattcagacgtagacctcaaaattcagattatcgcaaaacaaggggtcagcagccaattttccaatttcgtgaaggggtctccggccacgtaaattaatcgtaaatcaacgaccttttttcgctttcaacaccgctttttacgcggcacgttttttccaagacttttgggggacaaggagggccggcggtgccgataggcgccgccgggaaaaattttgtaatttttaacgcgatttgttaacagaatttgtaaaaaaaatgaccaattcgattaagttttgggtttttagggtgcttaacatcgaaagaaaaaaagttggaatattttttaaaattaaaatttttaattaaaataatggtaaagaaaacgggagggatatttccatccaagtgggggaaattgaacccaggcgaaaaattatgaaaggtagaaagtttaaccactacaccacatgtgcatgtgtgtaatcccatgactaaatgaaataaaatttaattttttctcaaaaatttctccttcttcaccaatttcctactcttttctcgaccagacccccattcttaccagtgcaaatttttaccggcggtaccggtactagacaaaccggtaacggtaatttcatttttgaaaaaaccggtaccggtaccggtaccggtaccaaaaaaaccggtaattaccggccagtaccggtaccggtaccggtaccgctcaaccctattttaaatgcttggactaggtctataacttttcttctttcctctaaagattgtatcttgaaaaaactgagacgttgttggtagggaatataaggtaattaatctacatttgaagagagcaatttttgtaaaatatttttgacatctttcaattttaatgatatccttttttaacttaggattccaaatttcaggtgcgtattcaaggagggggcgaatgtacgtcttgtaaacagtagtccatacccgaattgagcgggattttagaaacttggctatatatctgatccttaaataagcagccttagtaattttaagatagtgatcagaaaactttaacttattatcaattaaaacacccaaatcattaatcgattcaacctcattgataattttgttgcataatttgtattgttgtttagagttgtttttgccaaaaaatataataaatgttttatcgggtgagatttttaaaccatttaaactggcccaattttcaatgttttgtaaagctgtgtttagcttaatgcgctcatttctttttttgtatgaaacatatagtttcacatcatctgcaaaaagaaactgttatgtttttgcttagtaggcgaaatgaatgtttttgggttagtaggcgaaatgtcagtaggcgagatgtcggtaggcgagatgtcgagtaggcgaaatgtccgtacaccgtccaccactggtcacgccagaaacaaaatttcaaaaaaaaaacattgagagacaacaaaggtcgtggatcagcagcagaagcaaaattttatgtgtttatcaaccatgccgaatctgtgcattttgaattgcccgaccgtccgcttcccaacaaaattcgctttaagcgacttttgattacgtatttcaaaattcaaagaattatagtgtgataaagagattccttttcagctacatcgatcattccatcatcacatttctccgtgccaccagcaaatttttgacaaaagcaccgatttggggttcattgttagttgctccgataatgccatgaaagtccagcaaatttgggatgtttttgcgcgtgaaatttggccattgttgcgcccaacattcaccatttggactttcccgatgaccatcatttggacaatttgcatcgtctcatttcgccaacaattctcgccgatctcgatcagttgaattcaatcgactccgatgatttattgcccgattcaccagctgatgatggaccaaatgcaactgttggccaagtgctgtcaaattggttgaacactccgcgaaacgatggaaagccgaagcaattgcgttcttgtgactattgtcatgtgtcagaaaccatgggaatggtcaacagtttcaaagaggtgtgtggccatatttccgtaaaatattttgcttaattgccatttgctttttgtttcacattgtttaggcatttcttcgtgccaccactcctgtcggctacacatttcgacttgaactttatgattcaacggaaattgtcacgccatttgaagtgatgaacgaacggaccaacgaaatgctgacatttgagaaagaaggaaacgatgaaattgtggatgaagatagtcaatttactgatgctgtttggctgttgaagcgatgcccaattggggggacggcgacgattcagtgggaggacagaaagtcggacaaattgaacaaagtcgatattcgtctttatggaaattgcattgggtgcgtggcaaccgtgtcccggcatttgcgtttttgtccaaaaatcgggttcaaaattaagtttttttcaatccctgcttgctgatcgcctaaaacaagcgatacaaagtgatcgtatctgatcatttgatcgtcaatgaatttatgatattaaaattttcaaagagcagagttaatgctctctaataagtgagaagactgtgttttaattttaatgatctttagatcagggatgaaaaaaaaaaattaaatttgattccgatttttttgacaaaggcgcaaatgtcggggttccgtggcaacggcatttttgtttcgtttaaagtcattcaaatttcacttaatattcaggccattgtctccactaaaggcgggccaaatgaacgcaaaaaatcatccgaaaatgaatcccgagcccagcggacagcagaagaaaaagtgaaagaattattaggaaatgacaaatgattgatcataggaatggaaattgatctgataatttttccttatatttatttgttgcttctttcatttgaatacatttaggtaatttgtctggatttttggaacttttacgcagaaaatcttttttgtctttagaaattcattgtctaatgttctattttttgtgctttacttttgcctaatttttcaggacttttttgcatttcttacgtacgttttttgacgattttttatgactttaaaaattaaacaataggattttgtcttgaaattgccgttacgttgagtggttcacctacactttttgtcccagtaaaatgctaaactgctgaataattttttttagtatcaattacctatgaaatgacctttgttggacgcgtaaaatggcacgggataggtgaaatgccgttttggttgaacgcctaattagaaacccaaaaaacaacagttttacaagtcagggctggagcgcgcacagaaaaaaaccgcggccgcggaccgcgcaaaaaaaaaaaaccgcggccgcgcattcaaattgccgcggccgcgcaaaaaaaaaaatgccgcggatcgcggtcgcgctccagccctgttacaagtgtgatacaaggattacagctttattgtccgaatacattcatacaacatatattatgtacacataatgattgggtgttgcattggagcacatacaaatacaatatataggacatacatacatatatcattacaacaattacaacgatttgatcactgatatggacagcgcataaagcttatcacggacaacagatcagagggtgataaagcacatacaaatgatataatttggggggaggggggaaacagcgtcatattgggggatcagcagcagttagaaggggagaagcgtttgttgctcgaattccatcgttcgttcatccgcgggggccgtcctcgagtcgatcattgttcaccgctggagctcttcgacgctttctgcttcttgtccttcttggagccgccgcccgccgatgccctggcccgtttggcggtgtaaatcatgccacagtactgaaaagaaaatgggaacaaattagacacaaaatgaacacgaacggaggcaaaagcgggccaactaaaccattttactagtcatggaacaatgaaattttgggttttcgggtccgaaattggtcaaactgaacgttgtatatgttaatggcacttctgaaaagcctcaaaatcaatttttggattctaaaatttggtttcgtctcacaccagcaaaaaacacataaataagccaaatgcattttccgtgcttttatgagtctcgaatttaccctgcttgaaagctcaatcccgagaaattttgtccattgttttaaggacaaacaatacattttggaatggatacaaatttgattggattcagaaaaagcagcaacaacgcgaattccccccacccccaaacccaccgctccaccgccgaacgcaaccgcagccacgaacatgtagaagaggaagcccattgtgttgattggagagcagcagcagcagcagaagtgatcggagtcaacgtgtgcacgggcgatggatgtgctgtgttgaagcgttgcgcaattgtcgtcgttgctgattgtttgttgttgttgtcgctgtgaagggaatgagagaccaaccgacattttccctccttttatacatcccaaaaccaaaaagattcatccggcgacattttgggtgctgcagtgcccagcagaatttgatataaaaggctcacattttgatgactcctgccatt

SEQ ID NO: 7441 - DNA, 3319 bp, Heterodera glycines
ctgaaagtggtgaaagatgtcgcactccttggatcgaagcagtttaaggatctgacttattgtaattcggaggcagttaacattggcgctcccgctctgctgcaagcggaattggataggatctttgtaagcaaagaaccaaaaaaatttgcagcaacaaatcgtttactcactttagggtaagactgacaaggccaccagttctgaacaagtgcaagatatggtcacaaaagtaacacgggtttggtgtttgggattgtttgttagaacgctgctttagaactatgcagcgactgtgagtctgatcgccatcatgcagaagcaaggggatctgctgaaacacctggaagatgccttcgtgcgccagtttcggctcatgaacacgacggtccagaaagcaaacgacagaattgcggcccttgaaacgctgctcagaacccgtccctatcaaggtgcattaaatttgcaaaaaaaaaaaaatttattaattttggcgtgcagattattccctccgagggcgcggccgcggttggcatgggcgacatcgatggcctagggggaatgggcctggaggacaacgaggagctgaagggaccaggaggaagcaaagatggtggagttcgtcgttttgataaccgtggcagtcgcggcagatacgctaaggtaagaaaacccaagagttgagaagtggggagggggtcggcggtggttattataacaactttcatggatttgaaacttttagatttcgtcgaaaaaaaagagggtgggcgctcaacagaaaggtggccggaggaagcggccctgcggatgatgaaaagccagtcgacaacaaaccaaagttgaacatcaatttcgaaagccaaaaatggaatgaaaggaaaaaggaattggacgcactgcaaaaattgttggtgcaatcgccgagacttactgattcgccaaattaccgggaggtcatcgaacgcttaacaaaggttataaattaaaaaaaaagtgaaatgaaaaaattggaatgaaaaatttataaaattaacattttgtaatttagattatggcaaatgacgcaaatatcttttgtcgccgcaagtgccaccaaatgtgtgatgcttttcgccaagggattgggtgccaaatttactcctcacgtgtcgtttgttgtcccggtgatcttcgacaagttcaaagggaagaaacagttgctcagagatgctctcgtcgagtgcatcgatgtcatcgcagcaaatacagtaaaaatgcataaacaaaattgaatattttacgactttttttagagtttcggtaaactcagcaaggccttactcaatgctctgacatcaaaacagaatctgagtcagaaatcacagacggatttgttcatctaccgcctgttccgttctcttccggccaaagacgttcccaagggtttgctgaaggatttggtggccattctgagcaaagtaacattttatttgattttctacctaattttcagccctttagcatggctttgatgccgcttccgaagtgagggactcttcttttgctgcgttgggtgccattatgaaatgcattggggaaagggacttgtgctgtttcatttcgctcgaattggccaaagatgcgaacaaaatggccaagattgctgaaaaacgtgacactgcttaggtattttttttatttgtttagaaattttcccatatttttgttaaattttagaccatttattttctattttttttacccctttttccatgtatttgataaatgagacactcttcggattcggtatttttggtcatgatgtgttccactttagtgttcacaatatacctatatgttaatattttggtccacggacgctaattgaccattggtgtaacggtaaatcggttccattctcacgggataattccccaattgcttgcaaattatttgcagaatggcactcacactttccatgtgctaatgtgaaaatttacaaactctcccaattcaaagccatcgcagccgctgaacttcaaaagtccactcccgtgcaaaattcgccggctgatttatgggcacctttccagtcattaaataatttcgctgaccatctttttaatttggttttcagctttttgatgcccggttatctgtccactcgtgccgttttccaatgcggcacattttggcatgtcgaaatgcacgcgccacggagcagcagtgcaaagtgacgaactgaacaaattgggggaagggaatttgtttatttgcaggatggagaacaaacacttcaactgctccatcgccaatgccttccctttgtgatgcgccgacttaaagtgatcagaaaatggccaaatcatccggggaattgccattgtttgctcgctttttcagactgatgttctgacagaactgcctgaaaagattgtgcaagacctttttgtttggctagaaagttatagattacttgtaaaaatgacagcggatatgcaattctatagtgtagagcaactagtgtatagactcactacactacactctacactactctccaaaagtctatataagcgcagcaaaattgcgcatccgctgtcatttttgcaagtactatagtgtagagcaactagtgtagagactcactacattacactctacactatagaagcacactacactagttcttgcacaaatgatagcggatgatcgttttcgctagccgaaactggcgcacgaaggcatcttccaggtgtttcagcagatccccttgcttctgcatgatggcgatcagactcacagtcgctgcatagttctaaagcagcgttctaacaaacaatcccaaacaccaaacccgtcttacttttgtgaccatatcttgcacttgttcagaactggtggccttatcagtcttaccctaaagtgagtaaacgatttgttgctgcaaatttttttggttctttgcttacaaagatcctatccaattccgcttgcagcagagcgggagcgccaatgttaactgcctccgaattacaataagtcagatccttgaactgcttcgatccaaggagtgcgacatctttcaccactttcagcacattgctcttgctcagaaaagaaattttttttggggggggggggggggggggggggttcaacctgccgaaaacatatctgaacagaatttttattaaaaatcaaaatatgcattagtagcctgttcaaatatccacattttgaatcaataccttatggaagtcgaaaattttttccagataatcggtatagtcctggactctatcaatcacctgcaaatttgaacaattacataacg

SEQ ID NO: 7442 - DNA, 2712 bp, Heterodera glycines
tctccaatatagaggacgcgagacgactgacaaagtggcgttttgggggaccaaatgaaattttgtaaggggcccagccatgtaaatagttgggggggggtattgaggaaggcataaataaatggtatttggacatttacccatcgattaattaaattaattattttttatatcatcaggagccaatgttggccgaagcgatcagcatcaagatggaacatgccgccgcaacccaaacgtgcggatttgagaactcggtggagcattgcgaacaaaacaaaagtgtaagtatcaaattaaatggaccgatcgggagagggggggggcggggagcaacagatgtgatgaaaaatagaaaaatcatgtacaaaaattattaattaaaaaatgaagattgtttatgcggtcatcgacgaaatggacgacgaagacgtggatgaagccatggcgccaccaccaccccaatcatcatcatcgcataagggcacttgcagtgtagcgacgcagacaaagatgagttattgaataaaataaattaaaaattaataggtgagtgctcagacactcctaaatttaaaaaaataattaaaaaaaggtagagtgctcaggcactcctaaatttaaaaaataatttaaaaaaggtagagtgctcaggcactcctaaatttaaaaaaaaaaatttaaaaaacagtagagtgctcaggcactcctaaattaaaaaataattaaaaaaaggtagagtgctcaggcactccttaatttaaaaaaaaaattaaaaaacagtagagtgctcaggcactcctaaattaaaaaaaaattaaaaacagtagagggcttaggcactccgaaatttaaaaaataattaaaaaacagttgagtgttcaggcactcctaaattttaaaaaataatttaaaaaaatagtagagtgctcaggcactcctaaattaaaacaaattaaaaacagtagagtgctcaagcactcctaaatttaaattaaaaaaatttttaaatttaaaatataatctaaataaatatccaaataatattttttttttcatttttagaagcgaacacgaacgaacagacagaaaacaattgcgcgcttatggaaagaagagatttacaacggaaaatttttttttccacgatagcgttgttttatttttaattcaacaaatttgttcaaaataaaaatggattaaatgattaaattgcatgaaaaacatttatgtattaaaagaagagttgaacggtaatcggtaccgataatttttggattgaaaaagcggtactttttggttgggaaaatcggtattaatacaggtaccggtcaaaaccggtactaggtacacaattttagtttttttttttttttttttttttttttttttcagaaacagcaccggaaccgctcaacccataatttaagggggggagggacaatgatcataatagggttttaaattacggaaattttaattagggttgtgctaaaagccaaaattactgtaattctcaatacatttttaaaataaaatcattgaatgaaagggagatggcatgtttagtagtgctgttcaataccgaacttgtaaactaaacttgaccccgagacagagatcaaaaagctcgagaccaaaaaaaaacaaacaagggactattcttattttattaaaagcgtttaaaaatttttagtaccgacaattttgttgagcctagactcaagactgatacactctcgaacagcactaatatttaggatcatgttacatcaatttaattttttctgtatttttcatcgatgttaagatcctaaatattccaattgggtgacattctcgaaacaaatcaaacatttgggttcatcactggcaattatcggtactgaacatggggggcagcaaaaaaagtggccacatttcctactcccgaatgaaactggaccctcccccaaacaccattgacaccgattgctgataattatttttgtctccccctcttttttattttctttttctccgtccccctttgcctccatcagctgaccaatcacctcagaactttgagttgcgatccgctgtgccctttgtcgctctttgtccatcagcgaagtccattttttatccaatcgctcttccatctccaacatttgccggcgaaactgctgatccatttctttgcgcaggatatcggtttggagctcgacttcctcttttgcatcgtcctcaatttttcggacccgctcttccagggcctgggtttgctcagaaaccagctgcttcatctgcgtgaatgcggcaattgtcaaagatgcggcatctatacgagcaatcattacataacaaaaatgaacaaatgtttatttataaataataataaatgagcattacagtacctctgtccacttccgataagccgtttggcaccgaagtggacaataacttccgcttttttgatggtgaattatcaggtagcggtgatgatgatgatgataatgatgatgatgatgaaattgttcgttttaatgatgcgagggcagtttgcacaactgcaacctcaacattgccgtggcgcagaatccgatcggccatgacgtcgtgcacattttcttgttgcttcaacaaatcgaacgattcacggagaacggctggtgaaattgatgaagtcgtgtcgagcggataaggcgaaaagtgctaaaattattatcacta

SEQ ID NO: 7443 - DNA, 3635 bp, Heterodera glycines
aaatttaaagaaagaaatatttaaaaaaatttccattaattattgatcactgaaaaaaattcgtctttcatgcattgttaggctttttcttcataggcgcaatgagatcggttgcgcgacaattggcccacgcgcattcttcacagagctcaaagctcaccgcaaaacggccatcttccaagcgcgcgactttctgttgattatggaacagtcggtcccagtcgtctaaataaattttattaaattaataaaatttaaatttaatattccaatttaacctgcgcataagtacgtcgcgagcatgaatttcccttttgccaatttccacagttcccggtcctccaccttgcgcttctttgtagtgtctgattttggtggctccacttccgcgtttggttgattgatttctttttgttcgggaacagcgacggtaacggatttcttcattttggcaaaaatgaattgggattcgggatggtaatttaaatttgcttgaaaaatgggtggagtcaaatttgaatttggatgggcgtggccaagtttttgagtataaaatgagtgtccaatttgcaactttatgtaatccctctgaaatggttcttgtcactgtattttgctctaaactgctgaactgtcagcccaagtcgctgcgcgatcggttaaatcatcccgaggatcggagtcttgttctgaagcatcttattggtcgtaaagtgcgcacgacctacaacgacaggaacggaatgaccaaaacatttttcgtcggcggcatttcgactaaagaggcggcatttcttccagcatatgggcagctgcgcagtccatttaacatcaatgtagcagcgcatttctatgcgcgacaccgcataaggcttcactttccctatttaccgtgcattgttgaacactttgggggaggaggtgagaatcgctactacccaatggagcttcttgacctgattgatgacaacaacaacaataacaacaacaacaacaacaacaataatgaacaatggttgggctgccttttcaccgaaattgggtcaccatcatcatcaaattcatcgtcaactcagacactgtgcctatccattgatgaagagatgacagaaaacaatgggcgtagtgagtgcagccaaaattcgtcattatattggtgattttttaaattgtttcttttaacgactaattttgcaattttcctccttaattcaccgttctgcattcattaattaattatgcgttctaaaatatatttccttcacactaattatgcattttcccacccaaaaacgacatcttcttcttaataataatgctttatcagaaataaaattgttataaagtgtgaccaaaattcaaaacattaaaattaggaccaacaattcccttgcccacaaatggtcgatagcacttttgcataggcatagagacaacccgaccgccctccctgatgtttggccggagaaagtttggatatgtgacgataatcggttcataatctcctcttgttgcataattgatcacttcctctttgaatcgttcatagcgcagtccctggttgttgacgacgtcgtaattgagcgtcatcccccggacttttagcacgtactccgactcagcatcgggtcccgcctctttcctccgcagacataaaccgtacttaaacaaataacagtaatttgtaaaatgtaattttacaaattttacttgttttgaccctccgctgcagtactccacgatgtcgtgatcggggtactcatccgtgaactgacccaaatgtggaccagttttgagtgggcaacattcctccggatggacgaggatcagactgtcggtgtctgtaatttttcaaaaattattgtacgaagatttttgttcatttacctgtgtacagtagctcacatcgctctgacctgaccaccttttgcattgcctttagcaaaacaatccgcgcagcggaagtggtccacaaagaaattactgtaatttttgattaagcaatatttaaagaaaatttctcaccaatatttgagcaagcgtgctcatccacccagtccttcttgtgtagatatgtgatgagaatatgctccccatccagctgatcaattgacgaaacttcaatcgatttgttgtccaggtactctgctaatataactgggttgtccgtaatcagagtctgcgacagcccgtagtttcgtagtgaaaagcgcccccctaaattaaaaatttttaaagataactaaaaataaaaaaatgcttacataaattgtttaggcacaacttggccaaggaccgctttcctttgttaaccaccattttggttgggtccacatttataccaaacatttcctcgcactctcgtacaaactgctcctccatagcggcatttcctttgatcatgctatcaaacccgctggcttggatcttttgcgccataaattccgcgatgtatgggcggaaaagttggtcgtcgctttgctcgtactccaacacgcggaacaccttcgtgacgcggtagccctcatccaaagccgcattcagctcaattgatgtgcatgtgctgacccatcccctttgctggtcagtgtgctcgcagaggtagtcgttgttcactcccccagtcgggtactcctttgcacaactgatgcacaatgggaagcacaatctgtcgtccactttcaccggcaacaccgggacatcgatgcgacggggaggcacaacccagaccttcagcagtgccaagggatatgggttgtccaccgcactgctccagtccacttgttggttcagcacatgtactttcgggtgtccaatggggtatcgggttgtgaagctaaaataaagattatttatctgtaaatttaataaaaaactcacttcacgtatgggtaaagggatgtgaagtcgtagtaggagatcttctctcccggtccagccctgcgcagcaatttcatcggtccagtccgtcctcccataaacgcatcccttatcaccaacggaccgtcgtccacgtaattggcaaagcatttccgcattgctttgctccgggccagcatttccgaaattcgacattcccagtacacatccacgcgattgcaatatcttctgatgtactccatcctcttgccgtctcgctcccgcacctgtcccgctgtttttccattgggaagcaccatgttgtcatttgggtaacatttcttacatccgtgccacgtacatccttaaactcatgattaaaaaaagagggaaagccggccgccttaccgttgacttcgattgcgcggctttccgcttcgatccaaccgtccaggaagtacggcccgatccgcttctctcccccggccgaatgcgcggtttgtatgtcgacaccgtactcctcggaataccaatggaaaaaccgcagtgccagtagactttggttctgcgcgttgtcgtaaccacgctcgggcacaattgcgaggtgttcgggagggagatgattcgtgcgaaaatgccgcatgcacgctcccgcaattgtcatgcactctcggagaacatcaattccatcgtgattctcacgctcatcaatcccgtcaacgtattcctgtcgtcgagaaatctcgaagaactcgcgacggaacgcaatgagggca

SEQ ID NO: 7444 - DNA, 1390 bp, Heterodera glycines
ttttttgaaccttaaccaagtttttctaaattttgcaggctaatagaagacagatagggctattgaataataccaagattgttagatttggttataaaaggaaaaagttatagccaaaaccccgctggggtccaaacgtgccggggcccaactgagcgagtccgattttgtggggttttttagaaactaaaaatgaattattttggcagtttttagcaactataaattggagccctactcatcagtgccagaataagcccttaatacatattatctagtaaaaatggcaaaagacattccgccgatcaccaaatccatcaaaaatttccaattcttgtttcgccttgctgatgacttttttatttacggataacaaataaatttgtctcagaatcgcatttgaccttttccgtcatcactagggaagcaacttttagtgaaaaaactttttgtttgctcaattgttttgaagaaaggagctcaaaaaacgcatttctgcgttaaaattttttcatttggacgtcacttttcgtcactagaaatcactattttggcgatttcgtcactaaaatagctaaaaatcactattttggcgatttcgtcactaaaatagttaaaaatcactattttggcgttttgtcactatttcttcattattttggcatttttactcactattttagttaactatttcgggatttttcgtcactaaaagttgctaccctagtcatcactcatcagcaacggcatttcccgtgccccgtaactgctcaagtttcactcgtcattctcattccaccgccattttcattgtcctctctctccctctctcttccgccctgtttctttcattttccgttggttcgtcgtcactccgcccgattaatttttttcccacccttttcttaatctttgatcttaaaatgtcacaattattttaagcaatttttagcaagaggttgaaaacggacggtaaaacccaactcgtatgtactgctaccgattcgtatactttttttgataaaaaaaatattgtatcataatttttgtcaaaattttcattcaaatgaagaaaaaaaatcttggtttgattcgatagcttcttaagtttctctatttgtatggaaaatttcaaaaaatttatcatctttcaaaaaaggtatgtacgaaatctttttttgtaacgattttcgtcaattttatcaatgtgctgaccgcttaattgcacataattatccacataaattcagctggtcactaatgatgatcaataccgaaagttccccgtactcgagaccgagacaaaaaaaaaacacgagacttttctcaagacgagattcgagaccgagactctcgagcatcacacaacactatccaccacagaaatgac

SEQ ID NO: 7445 - DNA, 1463 bp, Heterodera glycines
gggggggggggggaagtgccaaatcaaattcaccaaattgttttacttccctttgctgccccctcaaaagcggctcgcatttcccgtcaatgctcattaaaaaagccccacaaattggcaatttgtttttcggcaaattgctttaactgccctatgccaaaatgaggcaaataatgccaaccgtatataaaacagtgaagtgaaaaaaatgccaaacgcaaattggcacattctcatccttttggcattaacaattgttttgagtcaaagcgtcaacaatttgatgtgtccaaaaacggcatcatttgttgccccattttttttgcgggcaatttatgtgggcttttgcaaaggacggcacaaatgtgccaaatttagctgagcaattactttggcgaatttgtccattttacccactacccccactcacatccatcatcaacaggatatgctatatgaactttcacctttactccctcaaattgcgttttttagtgggtaagtgcggtggcgatgggttgaaatattgtgaaaattgaaaattcaacaaaaaaaatttagtttggctaaaggtccgtccatcaaaaatgaaattttccaatttttgtaaattgcaacttttctgtttgtttttaatttcttgatggagttgtgaggtgctaaaaaattacgaaagttggaaattccgagactcgccaaaatttcggaaatcattactcggattccgaggcctaaaaatatcggaatttgtaaatttcatgccatccttgtgccacgtacctaaaaaatttcctcttctccccaaaaattctctacaaaatcaaaagtttcgcatttgaatttacgatcttttttcatcgtttttatttccaacgcattccatcgttttattcgcttttttcggttcatttcccggggcggcaccgccggcggcactgctcaaacccaacgcacgcaacatggccatccgatctgtccgtccaaaaaaaaaattcattacgtccatccctaatcctccgcgtgggcaccaaagtcccaaaccccccccccccccctcgtccaaaaaatgctttccgctcaattaaatggcccatcaaccccttttgggtggcactttttatgccatccttttctgctaatgttgttgccatcaaaaatcccattgatgtgaaccctcctcttccatggtgtgtatttaatttcagttgctgggaaaagatttcctcagggcacccgcgattttgttgctcattgtgagaatgcaccctcaaccattttaatgccatggcatttgttttgatttgggcctaaatttttagggcctaaaaaccgttaaattagcctacagaatttaaaaaaaaatttgttaaattttccaaaaaaattgtagctaaaaatttcaatacctgatcctctgaaaatttttggccttactaacttgtttaacttgaaaatttttttga

SEQ ID NO: 7446 - DNA, 2156 bp, Heterodera glycines
ctcacagtccatcacatccgttgcatgcggctttacaattttccacgtttttttgtcattctcacccaacctcctgttgctgacaaatttgtggggtgatttttgggctctcactaatcccctttggtccccttgccccccccccccatttgccattcccatccaattttgatgatggctttttgttgttgtgcgccaagggggtggcagtggtgcgaaaaaagcgcggaaagggggggggaaggacggggagcagctgcttcatgtggatattggtggtgggattatctagcaacagtcgaagcgccaagcaaaaaaaaaaattggacttggccaaatgagtacggaggcaagcggaaatgggaaaactgcggcccaccaactgcgtctcccctaccagaaggtcatccaccaccggaaatttacacccgttcattttgcgcctctaccaattgcgcccacatggggaacagaaggagccctttgccccgcgctcaattggcccgcactcacttggcatgtgcaccccccgccccctcccaactcaaaaattgtcgggtctatgacggttccggccccggccttttcggctccggggacgtttcggctccatacgtaaaaaattttcaattttcaaaacccataggtctagggctttttttttaactaggcttagttattttaactgttaattgaccggatgagagtcgggggccctggccgaccagcgaccagctggcagcagcatataattattatcatcatcatcatcatcagctggcagtaagcgcacgcccccgccgccgcgcatttgcaccagccaacagcagcagaagcggaggaggaggaaaagcatctgctgcttctgaacaatgcccctccccccacccccgggcgggggacgaaaagcgctttttatccctccgcccccgccaccctcgtgtaaaaaaaatgcttgcgcttcttctgtgtgcttctctcctccccctccattcaccccattgtgttgcggtgatggatggctctgttgatgacgaattttgatgggattgggtgggccattccattcaaatcccctcaaatcccccccccttttccctctcacttttcatcctttttttatccttccaatgtcaattgttccgatggatggaattggaggaattgggtgagaattgccgcctcccctccttccctcgggagactttttatagcgcgtgatgatcaaatattggcgcccaatttttacactgtggaagccaattttagaaacacagtgttttctcagcagccataaattcggcacctgccccatttttccatttttgaatccccacttccaatgctttgtttcgattaggttttgtgattgtgtgttagccgcccttccccattcatttttgccgttttatcatatagtattgtactttttttaatttttgactaattcgagaatctcgacctaatgtataaaaatcggcacaatttcaaagcgcccggctgaattttacaaaaaagtagatacgggcgctagcgcccgtatttcaaaaaattttaaaaaattccaattcgcttttatatccaatggcatatttaggtagcgaagctctcaaagcgcgcagggctttatcccagcctagacccgtctattcacgcacccgcttgttttttaaatatgctaatttgctagaatttcaatcccaaaacctcgagatgtcggtgtcgaaacttcccgatttatccaacatgaaatcccgaaaggtagaccaatgccgagacctctgcgccgggatactttactcatgtcgagatattgcttttggcccaaggccacttgaatatcatcacattatactgaccccgaaactctcggccaagtgagttttccaccaaaatcccacacgaattttcacccccttaatttcctacaccaaccgtcgaccattaggcatgtgccgtgccatcattcattcttcatttcccgcttttctcccccgtcggcatttccgaccccatcaagaaaattctttgcctaattaaagccttggggcgctcccccccccccaaaaaaaaacgtgcccatttagtagggcattttatcccatggccacgccccccgggggcatccctcaaaatatcaaacaaatgttttttgg

SEQ ID NO: 7447 - DNA, 2274 bp, Heterodera glycines
cttgtgccagagacttgtcaagacttggccacaaattgtccttggtagagactttgcttgcccaactcatacgcttagccttggcttcttttgcttggtttggccattctccgcccttggccatcccttactcttggccaacttttgatgttgttcgtcctccccctcccgccctcatcaatcccatttcatttccgcctcccccctcactctccaatttcccactcttcccgtccaccaccactgtcacaaaaaaaaacagctgccgttaacaccacggcaccgggactcagtcggacggcgctggtgcggcgagccaaaagccaaccgaggcccggtgcgaaggcggaggcaaaagcagatgttagttgttgtaatgggtggcacatctgttttttgctgctttctattgccactttcgtcctgtctttctctcccctcccccttttttggtgcccccgccttcgtcccgagggcattctaatttgtgtgtcagtgcctctctttgacatttccgcacacccccttgggtgccaataatgaggccaacttgacgaatggaacgggcacaccaaaggttatattggcacaaagcgatgagtgatgggcaaattgacaggacctcccccccccccccccccccccggggggggggggagagaaagttgtgaaattccgggaaaaatccaccaggaagtcaaatgccgcataatttggcgggcgagggggagggagtgccggggcggctggacatcattaaaatgccgataaatgggccacttcagcctcaacttccggcccttaaactcctaattgtcccacggggattatgtttggagcagtccaatccaaaccaatttctgcgtctgaattcattttaaatgtaaaaatattgccaattttatgtgtgacagtgccaaaattcaaaaactatgccaaaagccgtgtgtgtgttctttctctgcttttcaagtgccaaagttaaaggtgccaaatatctggcgctcgtctctaatccaaaaccgatggagaaaagtgttttcaaaaatttggaatgacaagcgaaaagtaccaaagttcaaaaacattcattcgttaagtgccaaacacaatttgactcacagtcttaaaagtgccaaagttcaaaagggcaaagtgccaattttgaaagacctgtcaaatccatttttaaatatattttttatctgactaatttctctaattacataggcatttgtcattacctacctattttagggagttcttttttcataataacatgtttatttggaggattaaactgtttgtttttatgatgaaaacgattttgcacccaaatgccaattaaatgcgctaatttctgccatgctttttccgctttataatcccacttaattcatccgtccattaaaatgccaccatcggtatttggcattcaaaaaaaaaagattaatgtacccattaaaaggctgacatttgccgtcaacaatagcatttcataaaaagcatcgtaatattaaattttcccaaatttttatgccaaaagcacaaatttatcccatccatccaaattacaaatcaccaaaaaattaatggatttgaatttattgtaaggaattgggtgcttcaaaaataaggacagtccttacaaaaggacatggtctttaccaaggacaatttgttcgttctttccctctaagttcattattcattatgctggtgccgcattttgccggcacccgccggagccattaaagctattagacggctcattaaatatttaattttggcaccaaaattagcattttgtgccaaaaaattatagccattataaattttcaaaaatgatgaactgcacattaatgcaacattcatcacatcatcatcatcgccagctgccattccatgccattcattggtctttcatttgtttaattagcgcccattcatcccctcggggggcgtgggacggcatttatcgtcacgcggcgtcccctcaggtgccattttatgccgctcctttttttgcattttcccatttcattttgtccatggtcctttgtcctctttatgtgccgtccgcctctccaatgagcaacatcagcagatgttattgcttcttctgttaatggtgggccaagtcccgtttttggccaaaaatttctcttggccattcagtcttggcaatgatttttagcaaagttctgtttgagggcacattgcatggcattcccgaggagtggtttaaaacttggcatgccatggaaacagttt

SEQ ID NO: 7448 - DNA, 3292 bp, Heterodera glycines
tagaaaaaattaagaaatttagaaaatcgaaaaatttgcgtggacgaagcgtagagtttgcccactaaggtccccaattcccccattcattcatttttgcaatgccttttctctgccctaaaccaaatatgccattgtttcggactgccaacccacacgcactgaacagcaaagtcgtccgtggcattgccaagcagcgcggcattacgcctgagcaagtgttcttccgattcaccatggacattggcatcacaccgctcagcggcaccaccaacgggtgggtgccggtttccgcgagagcagttcgcccccaccccccgtatcaaacttaaaaaatttttaagagaagttcaggagaaagtttttgaaattttttagcaattttttcaaaattttatgatatttactaagttttaaagattttttttttgtttgaaagatttctagcttgaattttttaattttcgaggggaaatgatacggggggtcgaccctccctgacttcattcgtatgagaggctgaaaaaggaggggggggggggggggttggaacttcgtattggtttggtggacaaaaatgtgaaaagatgtggggaaagattgaagaggaagtgtaagagagagagagaggcgacttcgtaaaaacgaaaacaattaaacaaattaatcaagatatttacttttttctgaaattcaaagcacatatttgtttgcttgttaagcgaacacatggcacaagacgttctggtgccggatatgccaccactgagtgccgaagaaatcaagcaaatcgaatccattctttatggggatggctgaagaggacaaaatttaaacttatttccagatcattattgataatcaggaaccaattcactaattgctttataaaaaagcgaacacattctgttgaataatatttattccaattaatcacaataaatatgaaaatgctaatttataaataaattttatgcaacaaatcaacagaatcagtcactggaacaatgggttctcttaaaatggatactgagtgtattttagggttcggacctcgtgggcgagggtggcttttcgcgggggcgggggtcagagtcgcgggggtgagaaatttctcgcccccgtggacgggggcgggggtttgtttttaattagctccaaaaaatctcacaaaaaatttttttttttgaatgatgtgtttggctccacattcctttattcgatgtatcgcctcgattcaattcttttttggtataattgcatagatattgtctaaaaatgaccaaatttaaggattataaattatgccaaaatagtcaatttttatgggtgtttttgtctaaatccagggtttctatttcaaaattttcaaaataagaataaaggccaaaaaataagattttagggtcaaaaataagaacattttgcaaaattgcttcaaatatttttacattttattcgatcaaaaatgtattctattattatatttttcataaatttcagtgcattcgggatcactaaatcagatttttaacattttttgcggcatatttccaaaaaacttggtgaatgtgcgaggggagaggtccggtggtgccgattggcgccgcaagcggaaaatttttaagactatatgaattttgttagaaattagccaaattttttagaaatttcccttatgcctataattttaggcttatattttaaaaacttttatcgaattagctctcaatataaataataaaattgcactgaattttataggcatattccccggtaaaggactattaactagagaccggaaatttcaaatttgcggatcccgctgcgggactggaatccaaaattttttgcgggacgggatcccgcgggattaatcccgcaaatcccgcatttaaaatttgcgggatcccgtgcgggattgcgggattttggaaaattcgaaaaaatttcaattaaatttcaaaaaatttccaaaaaacaaaaaatacctgacattttgaaaaagaaattttttaggggctggggtgcatttaaaggggctgatgggtcgactaagattttcaaatggatcagcagactgtaaaaagagatcgggaaccaaaatctcctaatgatccataaatttgaatatttttgcttttcaaaaccgttttttggtgcgctattttttcaaaaaactaggaacagggtggggggggggcccgccgtagaaattctttgaaatttaatacgatttgttaatagattttgtaaaaaatgaccaaattttgtaattttgagtgaattttttaaaagagaataatgtggaggccatccggcgggttacctatcatttcgtcactgagaaataattttttaaaaatgttggcaaaatgtcattatgtaaattattttcattaaataaaatatttttatttcggaaatgtttattaaactagcggggagataattatattgaaaataaattctgttattatttttttaaatatatttttttaaattctttgtttcaagcgatggaaaatatgcacaaataagagtgcgaattggccagtaaattttaattttcggctaaaggatcgctatcttaaatctgcacatctgttgtttacttttttatttgaatgaaattgaagaaataacaattagtacatattattcggttcatcgcagcaaataaacgaaaataagagtttttttaccaaataataactctttctgataagcaatttcatttttctgttttggcttaaattgtttttaatttgtgtaaattattagtcccaaaaatagtcttaaaatggacaattgggttcaacttcaactgaaagggacaattgcgctcaatttaaaaaaatatattaaaaaaataataacagaatttcttttcaatataattatctatttaataaacatttccgaaataaaaaatattttattaatgaaaataattagagatcgacattttgaaaaaagcctggacctggacctggattccatgttggacctggaccttgatttcctggacaaaaatccaggaaaatctaggtccaggaaaaatccaggctcctctagacctggatccaggcctggacctggattttttgaaatttattttaacaatcaaaaaaatgtttgaaaaaattaattatttgctagaaacatctaaaaatatctaattaataataataataatgtgtttttaaatttatttaatctgtttttgaaaacttgaaaaaacatcggtcacttgaaaaaataaattctaaaattttgtccagaaaatcca

SEQ ID NO: 7449 - DNA, 1411 bp, Heterodera glycines
  unsure (1)..(1411): unsure at all n locations
aaattatcactctggggattttttagatcgcttaacatctgcttaatgatagtttctaaacacttagtgcttccgaataacataaattttataaaaatttgtagaaaaagaaaaaagttatgaacaaaagattagttttctagaaaattttttccagatgaatttttctcgaaatttttattattttttccattttcaaaatgattgatcagataaacgcatgcactgattttgcagagagcaaaatgcttgggcaaaaaattttttccaacccaaatatttcctatccatttcaatttgtcgtgacggaaatgcacatgaataaaaaaacgaataaaaaaaacgttgtcagacggatgcaaacaacattaataactaaaaaattataacagcaaatcaaaacagttttattcgaaatatatttctgataatttttagattcgaaaaaatgtatttgtcaaaaataatttttttatttttttataattttaatggtgtatttggaatttatgaaattgatagtaaagaggatcttaaagatttaaatgtaaaaacggaaaattgtaaaaaagtaaagatagagaatttttctgtttctgtaaaaaatgagccaatttttgatgataaacatttggtggggaaaatcggacattttgcagaaaatgcgactgatcaaaagcatgaagagtttgcgattaaaaaagaatctgatcagcagagnatttattgtattgatgaggataatggggatgaaaatgggaaagtaattttngttatttngaganaaatttntttaggtgtataaaaaaagtctcggtcttgagtctcgatcgaaaatgtagactcagaccgataacttgagccgagcccaaaaaccgccgcgagacaaataaattttatatatggcaatagttatgttaataaatttagccaaaaaataaataaaatttataaatgtttaaaatgtagataggtataactccaaattagtaaattggaaaaaaatatcgttaccaactttaaaaaaactaaattttttcgtaaatttttttatgaggtttatttttggtaaataatttttagatatcctcggcagaaacggatgaattggaaatggtgaagcaatttgacgtaatgaaaaatgaattgcgactgaataaaaactataaacaattatcaaaaagtaaatttgaagcaattgtagcacaaaaattgggcaaaagccgtgcacaaatttatgcattaaaaaggaaattgaagaaaaaatatggaaaaataattaacacaaaaatggaggaaaatgccgagacaaaattaatgataattaggcaatttgatgagatgaaagcggaagagaagcgaaatggaaaacttaagacggaaaacttagtgaacattgaggaacaaattg

SEQ ID NO: 7450 - DNA, 1220 bp, Heterodera glycines
attctgtatttttacacaatttttggcattttttgatggttaaaagccattttgggtaatttttaaggcatattttagtgcatatttgggcatttttcgggtttttagtgcatatttgagggatttttagtgcatattttatgcgcatattttcccattttttagtgcatacaacttataaccctaatgatcagcgagcgacccctaaaaccttttggaatagcgcccataattttttttttctaattgaaatattatctttttatataatttttagtcttttttttcttccaaatattttaattgaaaaaatatttcatgcattgaaaagtctgattacttttttttacttcattgtccgtccaacttggggcattcattccttttttaaacgacaaattccttcgccaaacattttttctgcacattttttttttgcgattggcttttcgtctcccatcatttttctcttcttcttttgctgcttctgatcaaatttttacatcattttttttatcacctctgtctgatcagcccgcttctttttgtttgatcacggataagtccagcacatcgccaaatgtgctatttttaaaacagccgttaacccctgtcccgcccgccgctttgttcctctttttccaagccgaagttggttggggcttcatcatttttaaaagcagcagagtgtgaaatgcaaacttaaaatttcaaaatcttcattttcaatatattttatgagaaagtttggaatttatatgatatattaacaatttttagccaaaaatgctagagactatgaatattattaggtaaaattttaaaaatttgcgcccggaaggtgtgctgtgaatttttttggcatttttatgcatttgtaacagattttgcctaaaaatgccatttttggacatctttgtgcccaaatttttgcatcaattaacagaattgataatcttcggaagcagtgccgacgacaggcgccgccggagacataatttcaaatttagtgcttaaatgggttcataaaaaatatttatcctcatttaaaaaattgccacaaaatgcggataaaatatcctcagaattcacagctttgctttaagcggtgttcgtatcacaacttaaatttcacagcctcccctccctgaacattaagctttcccacacaagcaaaagcagcttttcccaacatctgttcacacacatctctgtttact

SEQ ID NO: 7451 - DNA, 2678 bp, Heterodera glycines
cattttagaaaacattttgctattttggatatattttattacgtaatttcccgtctctaattttcgcttggatcggatttcctaaagtcgtgactaagtatccttaccattagcaatccattagaaaataaatgatgtgatatgtataataagcagataagttgtggaattcagccatcatagaagaagcagaaaaatgacgaatgatgatgaaaagcctctgattttcacagtgacataaccggcgaattgaaactcaaataagcacaagaaatggatcataaaattgcatttaaatacaggctttacatatttttgaccgaaaaagtaaatcctcccaaatcccaaggcctaacaaaaataatcatattgtcatatccgagaaaataagctggaattttttctggctccacaaccatcagcttatgcataaatcgaggacgagaccgaatgaaacaatttttaagaacaaacttttatagaaaatttttttctctttttgggttattatacaaaagttatttcaccaaaatctaaaaatttatatagattttatgtccttattttattcaagccgttttcgcaatttttgtcccaaaaatcttatttttctataccatcaacatcattattatcatcatcatattagcagcacccaattaaatgtaatttgtgtggactgagacgggaaaaagcgtggaaaaaaaggatccacatcccaccaacgaacgaacgcccttcccaaatcccaatgggtggatttgttgtgtgagaagaaggcacttctgttgaggacacacacaaattttctcaattcatcgtcgtgaaggggatatttgggctttttttttattgatttagccatcccttcacaagtgagcatcccttaatttggttgaagcaaattaaattcaacatttcataccaattttcgttttaatgaaggtaattactaattggcaaatatataacctatttttaaacttttaattaggtaattatgaattgttgaatatatgacctattttaatttgttaattaggataattgctattggcaagtacattacctgttttattggttttaattaggtatgtaattatgaattggtaaatatacatatgtacgattttttaatagttttacataattagggtaattactaattgacgaatataaatgattcattatgcacttttagaaagcctaagggtcgatttttcaaagaaaaatattctccacataaataaatccttttaattggcccaaataatttacagcatctttaattttttgtgtattatatacatatacattttaaatatatattgaattttatattatttatttttaggctaattttttcaatcagtttttcttaataattttattaaaatcccctaaatgtatgtagtacatatatcttaatttaatttgataaattccatcatggtaattcaaatttttaaaatttggtcaaatggagactaaaatttataaaaataaaaaataatatttttaattatgtataaattcaacttttatttattatatgtacaaacatatgtatttatttactacagaattatagtggtggaaaatgatctctgatacattaaaatatagtgtgtctttctcgtttattttattttattttcgtcgcattgttttccatctctttttgagcgtggcaaccagcagcagaacgtaaacaaactgtttccaaattataaatcattaaaattcacattttttctccgaaattttacccgtttttctattttattttagtgtttgaaatttttttttttttttttattaatatataataagggggtattccatgaaaaatataccaaagtttttttttcgaattgtagtgaattttggtaagaaaaaaatgaaaatcttatcaagtttgccctttccatagaaaaaacgaattaaatttttcaaaaaatcgtttttcaaattttaaattggccatttttctctatgaaaatttaattgttttttttttctttgctccggcactcatggagtgaaaatatgggaaaaatcgttttttcttcgtttcgttactcactcaactatacttttaaatattgtttataatgattctcattaatttattattttttttccaaaaattttaattaaaaataaaagaaattttatttttaattttgtttaccaaacaaaacatcccaatgagagtggaaaatatatatgttaggactccttcttttttcattgaattattgatgagaaggcctcgccaaccgacgcctcatgcatttaatggatgagtcttttggccatccaccgcccgcccacccattggcaaattccagccgaaggcacacacaccaaattgtgcggcacattttgttgccccaggcagagagaatgggacggattagcttcacgcaaaacagtggtgggtggcactatgtctccctccattttagtgaaattttgacaagaattcttgggccatgtatccaaaataagaatggaaaaattttttcccatttttcttttattaaatttttgtttttgttttaatggattcttccttttttaaaaaaaaaaaaaaaaaaaaatttttggggcccaaaattttttcgggtaaaaataaaatttttttaatttaaaaaaaaaaatattttttgaat

SEQ ID NO: 7452 - DNA, 828 bp, Heterodera glycines
tggttgacaaagaaaaaagttatagtttttaaactcgccccacgcgaaaacggcccacgcgaaaacgaccccgaccctaaatagagggtattatatatatgtatggccttgatcacattgatcaacatttaaattttaaaggggaggatcaattggggggggaaggcaatgctgtttttaaatgaatgaaaactgctgatcacattctctgtcattgcccgtgttgatcttgtgacgacgacacactttgtcagaggtgatcgaaaattttcatgaaaattttcttccatcaaaatccgtcatcaaattttataattcttgtaaatttaattgcctctaatagtgttgtatgaatatttgtaattcagcagctaacagtttaaaaaaacaataaaaaaccccccaaaaaaaacttgataaaatgccgtagcctcagagagcattggcatcaaataattaatctgatcattttttaactgggaattctggtacctaaattttatcgatattcaaaaaaaaatacacatgaattcaaaggtttcgaccaattggtccccaaaatgggtggtgggggtttggcaaataataatgatgtttaaagagtgaatttttcgacgacaaaaaatttttgattgattatgggagcacccgcccgataaaaccgataaaatgggggctgatcagcaaacagccccccggggcgattgggtcagagaggaagccgccgacacaccaattggctgctgactgatgactgactgatcatcaatgattatgatgatgattatgacacaaacaaacaaacagcggtagttaggacgtccgggt

SEQ ID NO: 7453 - DNA, 1563 bp, Heterodera glycines
  unsure (1)..(1563): unsure at all n locations
tttttggggtccaagaattcgaatatcttttcggcaccttatcccgaccctgatcccaacccttttttccttgcatccatagcattttttggacccggaattcagtatttcgaaaattgatatcccgaccgtggtccaccaatctcccttttccccaacaaacattcataacgcaacaaaatttggggctggctctccattgttcaactctcatcaaaaccaatgaattttgcttgggcctgacttgtcccgtcccaactgagtacacaagagagccaaaaaataaaacatttttcgtttgcccattttggcggattgaaaatgttcagtctccccgttctccgttcacaaacacagctcccccccaatctcaaatttcgcgcatcaaccaatttcactctcggttagtttcacaaataaacaattctttgccaaccccgcgcctccggggacggcggacggggcggggatcgggcgagatgagtaataaataccccaacccaacccccgcccccccctctctttttaatgtcatataattcacacaatgttcttcacttcctctcgagagtctcgacaacggatgagggcatatacatatatgtgattctgatcattttgcgttttcttcaacaatccaatcactttctctctatcctccttgaaaagttgttcccactagcccccaaccaaccttttgtgtgccacctattcttgagaatatttattttcgagtatcacctcccctccaccttacaatttcaaatcataatttcgggcaatctggctaaatttgacaaaatttaatatttttttaattgaaaaatgtgctagctaaattttatctaattatttttcgattctttttcttaatgttttattttaatttttgaattttaaagctagaaaattttgccttttatttcgtttaattaactcaccatcaaatcatcatgaaactggtcttgttcggcgttattcttctcggcaccctgctgtgccagtgccattctgactcggtggctgttgaacaggtgttaattgacattcatttattttataatatgaattttttaagtttgtagaagcctttttttacttagtattgatgcaaatttataacaaaaaattntaattttaattaatgtcaaaaaaataaaaataaatttgacgttttgccggtttttagtcaaaggtggatgccgtcgatgttggagacgcgccgcacatgatgttgacgcgggcaaagcgtgccagcggcggccgatggaccacgcagcagatcatcgagtgcattttcgcaattttcatcccgcccgttgctgtgctgatccatggcggccacgaatgggtgctccatctgatcatcaacatcgtgtacgttttgcctttttttgtgggcgattctgatcactacttaactgagttggattaattggtgtcagtcatcctgattctgatcaatgcttggtcacttaatgtcagtcgtattgatcataatgtcagtcgtattgaccagtgtccgttgtcctgattccatgcttgatcacttactgtcacata

SEQ ID NO: 7454 - DNA, 5401 bp, Heterodera glycines
  unsure (1)..(5401): unsure at all n locations
agcaacatcaaanttggcttgaagaaagcattcaccgaatcagtacctctgttgccgtccaggttcggaattgcgttgagtgtcatcgtatatgaaaaaccgtcgaggcttcgaatggcctgtgccatcatgccatcgaataccagcccagggtgggggaccggttgctgattgcactcaggacgattttgttgattggctcttataggtaggttttttttgaaatttgggtgttgctgtccttggtgaaactcaaatccttcgtcctgggaccgacggtgtccttgtgtataggcatgtggcggaggaattcgccgaacgtgtgattgttggtcctcaacaaccggttgctgtgtgagccttatctgctgttctctctgccgctcaaaattaaccgcagcgttttcgtacaactggccattgggtcggcaagcaatcggattcaatgcagggaaattatgcgcgactgggtttggcatttgattttgcatgaaattcataaccctaatttggttttgtatgacgctcaaattttccggaagttgcattcttaggtctcgctgcagagcgcttagattttgctcgttaagcggcgttgaaaacgctcgcaacccatgtgcgtccaatgcatcgtttccaaaactccctctatccccagcttcaactccattttcgaaattttgttgcaccataccgttgacattttgttcgtcgccgttttccatttcgtcgtactccaattgttcctcaggtgcgctttgttccattcctccgtaaagcaggcgacgacgaatctcagtctctgctaaaacattttcatgattgtcgtccagtcgctgattttcgttgtttgctaagggcgagtcggcctgccccccgaaactccaaaattttcagccctaattgcgtttccatcgcggtcaacaatgattccctggttgagtgccctcgtccgggttagtggtggcgttcggagaacaggcattttgtttgagctaccgcagaggtactactcaacaaaacaaaaacaaagttaaacggcgatcctcgaaaaacggcccgatttgtcggtgatttgtcgatgtccacacttatcgcaacaatgcgttatttgtgggacacaaatgcaactcgaagaaaagcgcaacaatgcgttatttattcagaatcgcagctatgcgtttttctgaaatgtcccttgctcctcgtcctcactttgttgctttattgcccctggcagacaggcaagcaataaacggcgagataacgaaccccggcaaacgggctattcgctttgatgaacaactaagtaaagctccgacagacggactacttcacttttgttgaattcccgtgaaccacaaatttctcccttccaattttgttcccgagctcgccctttttcgaaaaaccaaaaattcccggcaccgcttactcagttgaccaggagcgccacgtgcaaaaattggagtccaattggtcggaggggctcgtctcttttgctttgcttcgttcggcttttcctcttctcgggccaaataattaattagcacagaaaggacaaacggggccaatgcttattaattaaggacggcgaaatagtcggggacagttcaatttatttaatttaaattcaatgcgaagacgacgaaaattaagagtccacacacaaaatatttagaggagaaaagtctgaggtccaaatttgtgaacaccaaatagaatgaataaaggaaagcacaagggagaagaaaagcaaaggaatatcgattgagaaaaataggaatacattagagagaaaaacaaaaggaaaatagcatataattagagaattgaattaaaagaataaaaggcagtcagaggcaaaggaaatggcacataattagagaagaaaaatattatagaaaagccaaattatttcccatttaacacataataaaaaaattttaaaaacaaaaaaaaatttgggtataaattaatcacttatatattttagtgaatttatgagaagcgattttcacgcattgcaaatcacggacgttggcaatgcttcttcttccaatccgtcgaattttgagccattggcacaaattgtccgttggcattgggaccaaaatggggcacaacaaatcattagtgtaggtttaaagaaatgatcaaacttaaaaaatgcataaattaatcaattaaatcatttagacccatacacttaacaagggcagtgaagttaattacgacaacattgctaatgattcatcaattgttatccgaattctcaaaaagcgggagacaaaaaagtaaatgtgattgattaataataagatcgaaataactgatttttttaatttgagtcaattagaatttccatatatttttgaaaaactaaatgcgactgacgcgttttctactgaagcatttttgggatgggtcctcccgatcactaattgatttcattttccgttttttcttatttttccccattttttaagtcagttcccggcgccttccagcagcttacccgacgacgatttgacgatgaaaattggtgacaaacaggtgaaaaacagaaagaacaacagcaacattaagcatcaccggtttttcatggttccatacaaaaaattttgaaaacaatttgtgcttgttaaatttaagtctgcaaaaaacaatttttcggcacatgaaatttagataataatttatgtatggatactgtacattaagtaaggcctgttctgtcaaaaatctatcacaaaaattcatccgcaaatgtgcaggatgtgtaattgccaaattatcagactcattgaaaacaatgggggcggaaggggggagggctcaactttataagggggatgagggcgtaatcacaacaatgattttgatcagatcactaataattcttgatcaaatcgttgatttatcttggtcagatcacttatcaattttgcttacaatcagcagatcgctgtgtccgcccattggctgtcgtccgtttccccggtgatcagtcgcatgatgaaggagaagcagcagcgaatgatcactttggacgaattgggcgtggacatggaccaattcaagcagtttttggaggccatcacttatcttacaatgatcggaccttttctgcccaaccgtaatgccatgacatgatactgtatttattcaataaccccctgaggggtgaaaaatgatttttaattttcaattttttttttaatttgaattctcaacttttagctaaaaatgtgctgatgctgctcaaattggccgactatttccaggtgagttcctctgatcacttatcaaaacctcatttaatgtttaaattttctctatcagcctgtaaaatttttatgaccaaaactattaaaaaaatttgtgtttttttctaatttttttgtaacctaattaaaaattctttaaaatttggaggctaatagagaacattaatggccataaatgaccccaaattcgctaattagtttgcttataaaaaagtgtcgcttcgctttgaggtgaccgcgttgaagtcgcgctgtgaaaagcatctgatcaattgcgtggaaattccgctgatcgaccgtttccttctgattgaacgcttcggactcggcaatttgaaagtgatttatttttcaattaatttaaattatattttcaatttttagtattattttttggattttgatgtcatcaaattgcgtacctttttcaacgcgaaccatgaacaagtctttccttttatcagcaaagaattttttggtgaattattgctccgagtttgtggatgaatgaatttgttaaactcttttgatcaaattgattttggcattttcaatttctttacgaaattaattttcggtgataaaatttgttttattttttttctgatctggattaaaagtatttgttacactgattgtaggcagggataaatatctaaaccaaaactatcatatcatttcatatagaaaaacatttttcttttagatcgtttttctatttttcgcgcactttttggcacattgattaaatcaatcattgtgcccattgaatgcctgatccactcactcaaagtgcctaattcattatcccttcaccctacacaaatttagttttcacctaatttatggatttatttttaaaaagcaattctcttaacaaaatacattaaaatttccaaaattcccaggcggagtttacaccagcaccgtacctcaatttactatgtttttgagaactggagactaaactggtaaaataggcattgtttggcaaaaaacaagtaaaaccctgcaaaacccacacccctaattcgggatttctaaaaaaatgaaaaataatacacctagaaatcttcttttttaattcagcctccccccccccccgccgaagccaagggtatgtaactttacgctttacgcccttcatttgagatacagtacacaaataggtcataagatggataatgagggatactgtaggaagatatttaaggcagccttgttttaaaaattgattgaattggtcatggtgattccataagtttgaaaattatattttttttttataaatttatggttttgtgctctaaaggaattgatgatgatcgacaaagcgatggttgtccaaaccaaaaacgaaggtgaacttataaaaaaataaaatgcaataatttaataattaaaattaaattaattacgctttttaattttaatagtgcctcgaggcgacaacgctgcacatggccgccggcggtggtcacgcaaaaattgtgaaaattcttctggaaaatggtgccaacccggaggatgagaatgctgttgtgattaattaaaaatttttaatattaaaagattttttaaaataatttttatcaagcaaaaaattaattaaaagaaaaaatgaaaaataaatacagtaaataagccagccctaattattaaataattgataagttttacatttctgtcgtaatattattttggtccaccgcacttgaagaacactcacaaccaaatgaccaaataggctttcactttattaaaacacacaaaacaaaataaaacaaagtcggaagacgaggtgggaaccaaacaatcaatcaaatccaaaatactgagaacagcaaaacatgacaaaactctaaggggggagaagaagtgcatgaaaatgagaatgaataaaacaaacatcaataaatggtcaaaacgccaagcaattacgcactaatttaaataataacacatccccggccgctgacgagaggcgtccctgccgatcagctgcacatcccgcatccggctgtcgaaaggtgatgtccgtttgggatcagctcactgccatagccttgaagcacgcgcatcattggttgtcgatcagcagaaggcgaagt

SEQ ID NO: 7455 - DNA, 5492 bp, Heterodera glycines
ccaaaaaattttttggaaaaagcgtaccgcaaaaaaagagtgccaattttgtaagctgtgtaaatatgttataatcaacaattattattattattattattattatgttataatcaacaattattattattattattattattattatagattatactgttattcgttatatatgttaattgttctctaatatataagtatgaataatataatttggtaatactgtcgatggtacccccgcccttttttttgaaaaaaatttttgttttcaaaacacctgaaacatgtttccgatggttttcggggtcactgatgacgaatccggtatccatttcgaccaactccaaatcacagacccgaatttgaacaaaggttcgaaaattattatcagatttttggttcaaagtgatttaaataatcgtttattaatgagtttcagttgattccgcgtatttagcctaattctgaactaaaaagcaaagtttgaaaaacttgaattttcgaacctttgttcgaatccggttcgggttcgtatttggtcgaaatcgatgtcagaatcggaaattccaaatcaaaaattattcagttaatttgatcaggaagtttttgggatcacctgaaatactgagacaaggttgtttaccttaacacataaaccctttttgcggcacggttttttcaaaaactttgtgggtcaggagctgtctggccgacagacgcgccggagaaatttttgaaaatagattttcaatttgttaacagttttctccaaaaaatgaccatcattgattttttaccgagacaaaattctctgatctggtgtcacatcagcgatacatatgacgtcagatgagtgatttgacggaaattgaaataggcccctggttttttacaataaaattatgtttaaaagttaatttatccaaaaagcctattcattaaaaaaataaaattaattaatattgaagaattgatttattcaatagtgaacaattgattcacccaaaaacaaaaattgattaaaaaatcccgataaaataaataaacataataaataagtattaaatgtctggtcaacatttgtttatgccatttaaaaagcctaagaattgaaaaaattttcataaaaattattctctaaaatattaattttttttcttatatttaatttaagattttccttattcgaaaaaaacgtttatatatttaaattaatatgatggattattttattccaatatttttattattaatcattgccttttctttgcatttacaagtgataatggatccgtaagtttctctgctaattaggtgacaataattaagcatttttttatcaatttgtcagatggaagatgacgcaatggttgagcttgcaaaaggacccgaatattttaacaaattttgcgcggataaaggattaattatcaatgagaaaaaccaatttgtgtctgataaatatgaagtccaccttggccttttgtatgttatgcgaatgaaatggaatcatgtgatggaaacgcgagtaagcaaattctctgtatattaattaattaattaattaactcgacttgacaaatggttagcgataatttgggcaatggaaccactgggcccacagtgaacagtttgggaaattgttgtaaaaaactaattttcaacaatttcgtgatttaccggaactcagaaatttttactgtactcctccacattcagtctgatcactgccccaaaattatccacggccacaatcaattgtccaaataataggcaaaaccatggccaattactaattataccggagacaaaatttaaaaaagccataataaaaggcaacgtataagcttcaaaccaattggaaaatgtgtttttttatgcttaaaatatcggaaattttaccatcttatttttaagcataattcaagcttcattaatgaattggaaaacattcgccaatttgctttcattctctacgaatacttcttctggcaatatgttgctgaatatgtaaaaggtaacggaatttcgaacccaaattttaaattgaaatttcaaattaaattaaatcccgtaaaattttctagcagtagacccaactttagctgaacaaatttccattacaaagaatcccattaaaccaaaattaaaaagcaacgggagagaaataaagttttgtgaagcgatcctagattgggcattcgtttggaagaatcaaatgtggggcggaaattattctaaaacgacacgcttaattaataaagaaacgctaattgaaaattatggaataaatttaaacaattggtatgagcaagaatcattgtttgacatgacaaaattgaaattggaattgaatgccaattcaaaatttgacaattcatttccccgtcttcgcaaaatgttcgatttcaacatggcaaaatgaaagaggatgacactggagaaggtgtcagtaattgatatgctaattgaattttcttcaataacaaacgaaacattgatttggcatattaatgacaagccattttatgaaatagacaaagcggtaaatgaactggaagtatttttggcgctttcagtgatgcttgaggagagtctcaactcgagacaagtggtctcggccttttatgagtctcggtctcgggaaattttcggtctcaagcatcacctaggtactttgcgccagggaaggcacgggattccgattcttgtttgccgagatttatgggatcggaattcaggttcctgaaaaaattttggaggttcgttggcattccgatttccgaaatttttttcgacacaaatttttcagacataaaatcttaaatggcggcgattcactgctaaaatgagtcatttttctattcatcgaaaaatttttgacaaatcctctcatgaatttcaaatttttattttatgtccaaaaagtcaatcctgggggagatgtacgtatgtttctttcgattttaagaccttttattatttggttcttgtccaaaatagtaccaaatttccggtaaaagtcaaaaaatagtgtgaaatatgacttttattcttgtatagccctaagcatacatataaatataattttagatcgaagacaacatatttcttgttgttctgaaagaaatgcgtgttgaaaagtttggtgccaaattggaaacggcgccattaagtgccaatgccaaatcattgatccattcacagaaattggaaatcaagctctatcttaaaatcatttatttgatgagactcaaatggcaatgtgcggaaattgagaattaccgaaaagaatgcacaaaattccgaaaatatttcaattttttgtatgaatatctcttccgaacatacaatgaaggtattgtgagaaactttgtttaatgtggtaagacaattgtccccaatttcggcattcttttttgacccaacttatgcaaaagaattcgattacaaattggacaaatatttcaaaaaatatgcggaaccaaaattactaaacgaatcggaagtgagcggtgaaaagacaattggccaaaaagtttttgaaagtgtggcaaaaataggaaaaagtccaaaaagggtggaagaagaaaaggcagctgcagcagttttagcagaaaaacaacaactcacatttgacttaagccgttcaaatttttgacaatttgttgagagaaaactttgaaaaattacaaagagaaaatgattatgaaacggcaaacggaatttataaatggctttatttgccgacaaataaaaaggcggggaaaatgccaatgttccaagagccatagcccaaaatgccactgctgcaagtgccaaaggcccaactcaacgatggcactgatattattagccttcccgatgacgagctatttgtcgcatttgttgaagacagttccaattttgagaaccattgcatgaaatggaacgccagaatttgttggcgcatgtcggattactatcaaagcgaaagggcaaaggcaggtacgatattggagagaccgtacggtatttgaaactacagtatgaagcataccttggcgttgtgcatttgttgaaaaagaaatggaattgtgatcctatgttaagagaatgcgaaaaatttaaagaatatttgcttgttttatatgaatttttgttcaggaaataccttgaaggtaggtaacaattttttattaagtttttgaaaatttattattagttaggatggaagtttaatctaatttttccatgggttctacgtcctctgaatattttttcttaaaagtaaaaaatccgaaatttcggaatattttgtataaattttgtttttttacaattttgacatttttgagaatttatagaaatttcttgtgaagttcaaaaattttatgcacccttattttttcatcaaagagataacaataattaatttttaaaactcaaacgttaatctaaaggtcattttatggcattttgcgccctattttgacgcatataatttccatccctaattattagttaattgtccatcgttccaattcgccaccacagtacaaccaatttttgtacttggaaacagcaaaacaaatgcgacaataattgacgttttggacagtcttggcattatttgggcattcttttttgattatgaatatggcaaaaaatatgagaattacttggaaaagttattcaaaatgaaggcaacattagaaccaaaatggttgaacgaagaaacaattgggcataaaattgtgaacaatttacaacaaattaccaaatatgccgcagattttaagcaaatctttgggagagaaaaatccgataaaaatgaagaggagcttaagcaaagtttattaattgatgaggctacaaatgagcattcttcaaaggcaaattcagacaaagcaattcagtcattccgtgaagcatttgatggcataatcgaatcgatggcggaaacggcaaaaaccatggaggaatcggaggaaggatttggcaaaacgaaaaaacttttgcgttatctattcctttgaaatggtgctaggacgaagttacaaaagtatcaatgtgggcgaagttacaaattatcaatgtgaggtgatcggaagaggggggtcgtttcagtacggaaaattattttaataaataattatttgattaatttatgtttgctaatcataaatatttataattttttttaatatttacaaattcaattaataattatgcaataaaatccataatcacattttatccattcaatatttgcactttatctttattaatattgtatcttaatattttaataaaaataatattgagaaataagcatttttccttgtcatgagttggcaaattcttttctctaaattattttattatattttttaaatttatttttaaaatattttagaatgaagaatttatttctgatattttaaagtgcaaatataagaaatgaataaagtgggaatagggaatatattgtataaatattaatttaaaaa

SEQ ID NO: 7456 - DNA, 926 bp, Heterodera glycines
attagataagtgactgaaagaattgtgtctgataccttaatggttgtaaatttttttgaaaaatcatcaattattcaatcagcagaattgacggaaaaaacttgatttaaaattttttaatttttctaaaaattcatggccagcataaaacacataaggaacatatggattatatggtgaaaattggaggaagagaagggcgataaggattaggatgaggggtcaaaaattgggaatgattcagcaaaaaaatggtgagaagtgaaacgagtgaagagaaaaaggagcccaaaatagacgataaacaatacttaagtaccaaaaaatttccccctgggggcaaagattaagatgcgaaaaggccgcgccgaagggtacaaaaatcagcgtggagaaaaaagccaaaacaaagggaaaaatgagatgaatgcaaaatggccaaatggaaatggcgatctgagaaagtgtgaacaaaggaatcaaaatcggaggcagatgtgaataggcagaaaaggggggaagaaaaaggcaaaatggcgaagttgaagaaaacataattcaaataggcaaaaaatggaaataaatgaattttaaagaaaaagacacatgaaaatttagtaaagagaaaaataaagaggggtgaaaatgtcgacaagaaaaaaggggggtcgcttaacacggtaatggtctttatccgggaatgtcccctccggacttttcgatcagcgtcgtcctcctcggcgcttctttcctcctttgttcgggtcccgcggttgcacgggggggggtggctggcccactcattttcctcatcctctgacagttccctcgccgtaccgtcggcgttgaacaccaagattccgcttcgtcctcctctggccctctcgtcggcaaccaaatgccgacagagccattaacgtaggaga

SEQ ID NO: 7457 - DNA, 4176 bp, Heterodera glycines
  unsure (1)..(4176): unsure at all n locations
attaaaagaggtacaatagtgattaaaagaggaagaacagtgattagaagaggttcaacagtgattataagaggtacaatagtgattaaaagaggaagaacagtgattagaagaggtacaactgtgattaaaagaggtacaatagtgattaaaagaggaagaacagtgattaaaagaggaagaacagtgattagaagaggtacaactgtgattaaaagaggtacaatagtgattaaaagaggaagaacagtgattagaagaggtacaactgtgattaaaagaggtacaaaagtgatgagaagaggcacaacatggtttaaaattaaataaataatgaaaagtttttataaaatcgattgcattttaatttaaatttttttataataaaatactctttttattcattaaatatatttnntgaaattnantaatttgaatatttattttgnaaatgaattccattttttataaattcaaaaaaataaataattgaaatttaaataaattatattaaataatttaataaaaaatctttgaaattaaatttaaaacctttaaaaataacccaaaaaattaccaaaaaaaaaattattgttacccccccccggggtccccaacctccccccttatttgaatttttttttattcaaaaaaaaaaattaatttttaaaaaatttttttccacaaaaaatattttatttttaatttaaaaaagtatttaaaaaaaaaaaccccctcttttttatgttttttaaaaccttttaaaaaaattctccccacaattgtttttcaaaaattttgttcccccccccccggtttaaaatttccccccccccccccccaaaaagggctcccaaaccccccccccacccgggttttttgggggtgtaaaagtaaaaaaaaaaaaaatttttccctttttttgttgggcggcaaaaaaaaccccccaaaaaaattttttttgatttttttgtggaaaaaatttttttccccaaaaaagtggcccccccccccccgcgcgcccaaaaaaaatttttttttttttttttttttttcccaaaaaaaaaaaaataaaaaaaaaaatattttttttttttttaaagaagaaggggggtttgttttttttttgttttttttttttttttttttctttttctctcctcctcccccacccataattttttttttttttttttttataataaaaaaaaaaaaaaaaaaaaaaaaaatttttttttttttttttttttttttttttttttttttccccccccccccccccccccaaaaaaaaaaaaaaaaaaaaaaaaaaaaaaaaaaagaaaaaccccccccccccccccctttcttttccccccccctggtctccaatccgggagggcgggggggttgggcaaaaatttggggggggggggccccaaaatttaaacccaaaatttttcccatttcggccagaatttttttggcnaattaagaaaattttattgctttttacgggggctttatccatttgtaacgaaggaaaatagtaccattctcctattttattgttttttgaataataataaaatattatttatttagtataaaattaaaattttatgttttcaatctttgctataaaaaatgaaattcaaagcgaattgatttagtcannttactnaatgtnntaaaaattagataaattttttggctaaaatcnnaattcagtgggaanaattttgcgaanatcatccattcttcgaataggtacttaatgatgcattttctatttttacccctttntaagaatttttttaaaataatggcacacaaaaatatgcaaatatccgtgtactaattaattatatttagttttaacgcttcaacaaaaatatttttatttggcatttaaatgccatttttgacgagccgatttgaaatatcgccacaaaaatattttattatttattcacccatcaccaccattttgagatgcaaatttttgtgtgtcaatttatttacggcgggcgatttaaatcctaaaacttttaggcgcacaaatttattcaattttaaagggggaaacaatcattgacaagccgtggaaaactggaatttaaaatgcaaaatgagctttcccttttcccacacaaaatttcatcgatccgtcggaatatttttaggaaaataaaataaaataatatttaatttattaaattgcttttttaattgatttagctaaatcaattaattgcggattttttgaaaagtttcagtcgtccgcctgctcaagccaagaggaaatttgggtcggtggtgccaatttggagcgaccactaaatacccaggtaattaattaaaaaaacaaatatgaattaattaattcatttcatagtttaaatttaattttttaatgtttttttcatctttacgtacccaaattcatcattattaaatttcgttttttttattaattttcaaaagctcttaaaaaatttaattttcaaaaataaaaaaccttttttacattaaaaattaatttccaaatttaattttcaatttttgcagctttacttttcgccctccgctgctgacagccgccggtgttcgacgttggcatcgccgcaggtaaaaaagtgaaaaaaagtaaaataaaatggcaaatcgatttaagagtgaatttgcattttgttcaccttttttgaatcgctgtgaataaattagcattttttgtttgtgccgccgccgaaagcgtcgcggcatttgcgccgcgcgctaatgacacaaaacactttggcaaaacggggagaaaaatgggacaaaacaatttttaatattcacaaaatgccaaaatatacaaataaaaccaacgattattttcgggttggaaaaagtaaaaaaaaaactaactttttaagattttaggactaattaacaatttggcattttttttagatttttgtaatttttttaaatttctaaaataagaaatatccattactttttaccgaaattataaaaattgtttaatgtttcttttttttccaaaattagaaatattcctttttatttcacagaaatgattccaaaaatgtttagtgttttcccaaatgttcagagtctactcagttccggcatgcattcggcgagcagtgccgtcgcgtggagtccgtgctcaagccgttcactttcgccatgtgcctcgccggccaactccctcaaggggtcatggtcatacggtaaaattagctaattaattaaataaaaaataaataataaaataaatatttaaattcacagacataatcaatttgcctgtccatttggaacgacacatcaaagtgctaaaggtaagcaaaaaaagaagacatttttaatatgctaattttattgtttaagaatttacaaaaatataattaaaaatttaaaaatattacttaaaaattataaaatatcaccctaaataaaataatttattgtaatgaaagaatattttaaatttactttcataaaaattaaaatatttagtattttgattaatttcgaataaataaaataattttcacaaaaaaaataatttttctcgcaaattaatgattctaacaattatttaattgacaattcaaaaacttgacatggtaaaataaataaattaaattatcaaaaataaattaaaaataatattttaattttattaattttaatgcattttcaattttcaatttaagtcccatttgccccttggcgttgtgttggatgccaacattgacaaagcgatcaacggatgcgtggtgaaaagcatttgcagcaaaaaagcactggccaaagacggacgaattcaggtgaaaaacaaaaagcgcaaaaaattaattaaattttttataaattcgaatttttatattttttagcccggcgatcacattgtgaaggtgaacggcgaaagtctgcgcaatgtgacaaatgcgcaggcgcgtgccatcatgcgacgggcaaatctcgtcggggcacagtgcgggtgagaccggggggattggcacggaatcagtcgcggaaaattgtgcacatttttattttattttttaatttcttgctacaaatcccggaaattggacacattttttgttattttttggcacgagtcttggcaaaagttggcacaacccaaggatgtgtcggaatgccgatttcctactt

SEQ ID NO: 7458 - DNA, 3463 bp, Heterodera glycines
ctgtagcatttcgtacatcaccagtgcggacgccaaactgtggaaggagcggcttcaacattttgttgttggcattggcaccggcggcatttgtgccgaaactgcgtcaaatttcatgacatcggatgagcaacaacaacagcagaagaagctgcttgaacagctcgaacgttcccggctgtcaccaaagtaaattgtctttcttttcaaatttgtttttgtggcgaaatgtaccgaatttcgtaaattcgttttttttgtcagagtttatccaaagttttaccggagcccaattttggataaaccattggaatcgccacaaagtgaagaagaaccgcagcagcagcaacaagaacaaccaggccagtcaaaatgccaaacccattttttaattgttttttgttgttctattttaaatttaaggcccaacaaccccagtggatactgtagctgtacagcctactgtagcgctaatacaacaatttgtggaccaattgctgaaggcaaattttaaattaattttagtatttttccttaaattttaaattaatatttaattaaattttttaaaatttttggcatagtgccaattttggagtttaatttattttgttctccaagaccttctcatgtttttcagtccatttttgcggatgccattttcgacgtgtacattttggaccggtcggaattgcgcgcccggcgctccgtccgccgtccaattcgttccgcttctgtggccgcggaagcggactcagtgccggcgccgtctccgtcattgccaaccatcgcttccgtgcggtcgccgccgccaccaaaagcgacggagttgcgcagtgcgtcgtcggtggtgcacagactgatcagaagcgcctcatcttcgctgaggcggaaggtgagaaatgtgatcaatgctggtctgatcactttttttctcactgatcagcagtcactgaccaatattgctaatcaacaaaattgattgatcatgtgcggttcagaaaaaaagctattaagtggctaatttaatcacttatttttactgatcaatttgaattagctggttatcgtttggatttaggtatctttgccacaattaatcaaggagtaatcaaagtgatcagtgaccaccactcatttattggcattttctgatcatttgaagcacaaaagtcaaatattggccacagaaactgcctcagccccaaaaccttctttaaactacataatataatttaattatctcatgttttaaacgtaaaattaacccccattttttacaaattttaaattttccgactcattcattaataaataattcaaaatttgcctttaagtttttttttgttttttcggcttttttatgcatgccaatggcgaggcattggatgtttttatgtcctccgccggcattgaatgccgtgccatttctcacactttttgatgtttttaaggccccgggggcgccgtcgcttttccgcccaatgaaccagcgaaatctgctgcaaatgagcagacccatgacataaaagcatgaacacattgaccacattttgtgctgaagggcacgaaaaatgccctccttttcaatgccaaattgggtgccatttttgctgaagtggcaatggcaaagcgaaacaatggcaatttaatgaatgaattcgccggcggagtaatggacaatttttttcgatttttgccatatttttccataaaatgaaaaacaaaatttcaaagaatcattttttccgtcctttttatggcttatttaacagttttttacgctgaaaaacctattaatatttttaaatttctttattttgtttttgcaataaatttttcactaattgttttaagaaatagaaagcattttctttattacttaatttatttttctttactttttttaatgaaaaaattttttaaaaatttaattttattaaatttatgccaattttcagaagcatcgtccgccggcttctcctccgatcagcaaaagtcaacaacaaattgaggaagctgccgctttgatttcgtcttctcgaaaaatgggcacggatggtcaaaaaacaatggcacaaagtgaaaaagtagcagcgaagacaatgccggaggcaataatttaatttaaaataaaaataaattaaattaaatttagtcagccaaatcgatgaacttttggagtgaaccacgcacagttacattgagcagaaggcacaacgaaacattcggtgggtttttcgcattacaaaactataaaatttagagttggacattttgaaaaaaaattggaaaattttgaatatcagaatgaaaggaaaatcgaatatgggtaaatacattagtttatggtaccatacggtacataggatggtagaaacatttcttattgacatttcttgggtaaaattttgtaaaatttcgttaaaatatgatcagaaacccccgacgatttaggctaataaatattaccaccgcattttgcgccacaaattattccaattttaaaaaattacattttccgccgatcaaaaaagccgtatttggcattatgccattctttgttttgtgtcacaggtataagcattgttggtggtcgcgtggaagtcacccaaagggacagcattaccgacgccggcggcactctgccgacgacggcagtgccaatttgcggcggcggtgccgccgctgatgaggagggcacagcactggtggctaaaacggtgtccggcattttcatcaaatcggtggtgcccgactcgccggccggccgatcggggcaattgtttatgggcgatcgggtgcttagggtcagtttattttaaagtattttagaaaattcaatttaaaaaaattcaaattcaaaattttttttaataattatattttagcaaattcaaaattaaatttaaatttttttttaattcaaacttttaatataattttataaaacctttaatttttttctaaaattataaatgatgtttttcttattttcacattaaattagaatttttacaaatatttaaacgtattcccttttcattatcttcatagattcaataaaaaatatttgttaatgtgtgcaaattttagaatattttataaattaaaaaagtaattaatgtttttatttatttttattttttttttggcttaattccaaaatttcccttcgttttctgcaggtaaatgacaccgatctgagcaacaccacccacgattatgcggtgcaagtgatcaaaagtgccaaaaacccagtcaaatttgtggtccaatcgcttcagtccctccaggcgtttgtgccgagctcggtaaattgtgacggaaatgggacaaatttgggaattaaattctaaaaaaatagcaccaaaaagccaacgatgtgttggccaatcacggcacaacgtcagccgcagcagaaacatgtgccgaaaatgtcgaatctgatgacatcgacctg

SEQ ID NO: 7459 - DNA, 1490 bp, Heterodera glycines
ttttgtatagttattttattaaattttcaaaatttcgattttctcgtatattgaatatttacttaaaaattttttacctcttgatgctgatgatgttgatgatggtggatgatggaatgatgaattgattgccccggctctgatgtccatttctaattgaatggatcggtcatttgccaacttgcacatcgttgcgcccgcacacttaacaattcaatgataatgctttttttgcacaattatatatattttttttgcttaacgaattcaaataaaaattattgaataaatgttaccgaaattaataagcggtttttactttggcttaatcaatggcacttataaatgtccaacgaccacaatttatgcaaaatcttttgtgaattatataccgtatgccctcccatttgccacggcaatggcacagcccaatttgctattcaaattggtgccgtccgtcgtgtgtattcatcaaacattattcacgccaaagcatttattggtgcggagggtggccgctctcgactctcgccctgccgtggcgaaattcgccggccaattttcctcgccaatcgaatgaccaattcagtggcatcaacagcaggtgtgtgtggtgccacactttttatccctctcaaaattcattatttgttgaatgaatggtgccgcaccacctcaatggcacattggcgtattatgtcttaattacatgtcctttctgataattcgacttttaattatgaatattttagcttcgagaaaatttaaaagcagtcaattctgtacgaagaagaaaagtaaagatattaaataattttttttaatttccgagcgctaaaatatgttcgaagtttagtcttccccgccccatatttttgcttttggatgaaaagccttgaacatttatcagcttatcacccagcctattcccaacatccgtcaaaaaattagcaagatttttttttgttgatttattgttgtttcttattatcttttcttattggcaaccgttgcttctggtgatgattgattacggattgggaatgctttttttgagtttgccgatgagtgcctctgctgatcatcttcttgtggttttgatggattatgctcacttttctgttggtcattttgagactcgacaaaaaaacaacactaacaaaccaaataattaagcttcttgatcacattttctctcgattatattagactgatcagaacaaacgttaagtcactgccgattttgtgaattcaataaggtcaatcttacgaatttggcaccctaatttattccattattcctagtatttctgctcaagaatttcgcgccatttctcggtctcgagcctcgggaaattccagtttcgagcacactattaatttgatcagacaaacacaatgagaatgccgaaaaattttcccgcaatgatccaataaaatttgaatttaaagctattaattaagcactgatcatttgtagccaagaacat

SEQ ID NO: 7460 - DNA, 2470 bp, Heterodera glycines
agctcaaatccatttgccgaaagtgtgtaaatcggagaaagctgccgccattttggcgatgaaaattcataaaaacaatgagtcattgaatttcagcgattcatttttgaattttatgcctatttccccatttaaacccaattagaatttgaatcaaaattgtttaaaatacatggccagccccagacttaaattggctcaatttttcaaaaaattggcgcgtgaatttttttttccattatttaccttttacgtaaccccagaaattcacaatttaaatattattattttttattaaaaaataaattgctagaattaagggccaaaacctgctgcagctgtttttgtcataaaacaaaggcaaaaggtccgcagaagcgagccgaaaatccgcattttcaataaatttttatttctctgatcaattgcttccctatggtcgggggagggacagattctctgatccgccaaaacaaacattttgtttccgatgagaaatgaatgaatggccaagtgcaaaaaaattgctttgtatgcgccgcaaattgcagagagaaagtgaaaaaacggaggggaataaatgatcagaaggggactgactgctgcctgatctaatcgctccattctttgagatcggcaaaaaatatgtgacggcagtgcgaaccgccgccgattgggactgatcggaaccatcaaaatttatgaacatttttttacacttgccttgggttaatgatgctaaattttgagcacagtttattttgttttaactttaccaaaaattttaatgacaatttttagaggaaattttaatggaatttatgttcgagttaagccatagaaatattgtaagcttatgaaaatgcttcacaaaaaattcgaaattttcaaaagggtcaaagattggaatttcgttagattagaaaaagcgtccccacattaattaatgtccttccaatctcttctgtgcatgtacatgcgtaatacgctctcccatggtcattagtggtcattaattggttgttgttcgtccattcgttttcccattttttttgtttgcccatattttgccattcctttcgtttttctcttcttctcttccaatttttgccgttttttttgttactttcaaactgataaaaatgcacaaacatacatatacactgaacacatgtattattgacatattgaatgaatggcttaataatgccattttaggagttcaaaaacataaattgtaatatttaaatatttttggcgtttacattcgttttttaaatttaatttaaactcttcttggtggtcttccaatgtatttccctagggagaacccgagttccccgaccactttagccttttccccgaccgcgatccccgatctgccaaaccccgcgctccccgagaatttcttccccgacggacgggtggggtttcccccccccccactccgaaaaaaaattgaactgactttcccataattattttctgtccctccaatcggcagaccaatccaacaaatattgcgcaatttctttcctcctatttccatatttatcttcttttttttttgcttccttgaacaccaaaaatttctgatgaaaacaactgaatcaaaaattgcgtaaaatgacaccaaaaaacagtcaagaaaaaaggaggaaaaaatcaaagaaaaaatggagaaactcagagcagaaattggcaatatatttgaaatattttatgtggcgcgatttacaatataaatacaaaaacgcacagaaaggactatttccttaaaatggtacaaacagtgagatggttaccttttatggaccaatgttaacggaattttttgggttgaaattccgacgggaaaaaatggctgaatccaaccggtagaagggtgggttaaagggatttttcaaattaaaatttatcaaatataaagtgtgtttttctatggtttccattgaaatcagccaggcatgaatctcgaatgtccaaaagagtggtgccgaaaatgcgctgctgttggcaggaaagttactgttgcccaaaatggcatttattggctgtgccgaaaggacggccacgccccgtccccattgttagtgccgcttctcctccgctctcatcccaacaaagggtcatttggctgactcacaatcgtgcgattgttaaaaagctgttttatcaatttttaaatctggataatttcagcagtgtatgaattctcttgcaaaaaaaagaaggtcgaaaatttattgtgccgaagagaaaagtgccgtcgttgaatatgaactatgttttgaaaattcccataaaatttttaaaaaccctaattttcagaaaaaatccttgatatccatccccaaaattaaagtgagaatgagttcctacgcgaattctaactttgattttactcaccaccatccttcgagcactacatttcttgatcttatcgtactcatgcacactaattaaccat

SEQ ID NO: 7461 - DNA, 855 bp, Heterodera glycines
ttccttatcccccccccaattagcatttaattccattcatttactcatacaaatttgaatttgattctttgtttttttagttaattattttttagattaaattaagccaaaagctaagtgcgtgtgaaatggtaagcaatagcaacaacaaaagcgcctgctgcttcgccttccctcttttctgctgccttcttttgccgatgcttctcctttttgcacttccaaaatgccatttttgtgccattgtttttgaccatcatcagcccaattctgtgccatcatcatcatttttatcacaattatcgtccccattattttcgtccgaagttcgcttcatgcaaaaactgttcgatcgctttaagcgcggaaatggcatcggaaacagtgccattggctacgcaccgacagtttccggtgacattttttactgtgaataccgtacacgggaaaaagggcttaggaatgatattttggcggaatatttcatgaaccctcggataatttgataattttccaaaattattttttttacgccactaaattgctttccccattaaattctctatttgagttgaattggttatgtcacgaacaaatacaacaaatgtcattggattacttcttctgtccattgctagcgatgttcaggggatttctgacctttctgttgttggcaaataaacattggcacttttcgtttttgtccacagccccttaagtggcatatggtattaaattgcaaatctttctgtgtaaataaaataaaatacttttataatgtatatcagggataagacggaatgccgatttacgacgtttttggacccggattccctattggcaaaaattttttgc

SEQ ID NO: 7462 - DNA, 2571 bp, Heterodera glycines
tgcttttttaaaaacaaattcctttaattaaagaagcaagtaaaaaagtttttggatttaaaaagggattaaaaattttcaaagtatgatagtataagtttttaatttcaaattacaccattacagtatatacgtgccgagcttcatcttcacggccgattggactcctttttggatgctaaatggacaaaatcaacaacaccaccacttcacattgtccaatttatgtgcagcagtaacaaatggacgcaaaagattggcaaaaatggaaaagactatggcaaatggccaaaaaatgggaccggcggcacaatttggccaagtcggaaaatttcgcttggattgacacgaattgatcagatggacgagaaacagcaaaagaagaattatcatcgccaccaccaaattcactccccgggatggtcaacttttgacgcgatgactccccttttgtacgcatcgaaggacaatgccgagcagcaacaggacgaactgcacataaacgtacaaagggacaaatgattgggatgggcaaagggcgaacagaaaaattgttccgagactccatgcaaacgaaatttttgaacaatttaagccggattcataggttcaaatcagcgaaacattgaaaaataaaaaataaataaaattaatccggtccgtcttttgcctcgggttttttgctcacctggttaatctgggcatatttattttgggaaaatattattgttcttactgtaatttgcacagttccatcgctaccgtaaaccgctggatgagcgacagctgaaccgttttattaacatccatcgtccatttttggtggtctacacagaggaattagcatcagcgaaaaatggagggaatgaagacaaatttgcaggaagacgtgcaaagcgcgacattcgcgcaacactgactgattacggtaggactactgtaggatttatgacaaaaatttaaaatcttttaaaatttcataatacaaaattataagacaaaaaaaaatttcatgctctttttagataactttcggcatcaaatggacaaagtgcgcaaaacggcggaatatttttcttacggtatggccaaaggcaatgtgaacgatgctgccaatgatgcgcaaatgccgacagaaagtgccggcgatggaaacgattttgacactttccgacgattgaaccgacgccgaaaaatggtgcaaaaaactgtgcaaagcatggaaaatcaaaaataatcactatattaaaaagttaaaacttcattgatcattaatatccaaattcttccctggggccaatttgtcatttaaatcggcacgaaaaatcgaaatttcttaaaattctatttataatttgaatcagtctattagttttattttagagaaaccgaaagtcaaaatccgcgcaaaaaaaataccccggctttgatgccaacgacccgatgctcggctttggcacgcccttttcgccatggcaacggatgtcgccgtcagtgaatcggcggaccaaaatgttgcaaagtcccaacgctggcacatcactgaacgacattctgggcttgcgagaacacggctattggttcggcaccgaaatgggtccgaaaattaattaattttttaacaaaaataattaataaatttatcgaaatttaattaaatttctgaaggaaatggcacaaacagagctaatggtggaggagaagcagcaattgatgagacaaagctattcataatggacgaaaacccgcaaaaatcggatgtaattaatttgaaaatcattaattacaaatttgcgaaaaaaatattaaattcctaccaatgcaaaaggaagccctaaaatgattaatttcacaatttccgttccgacagagatgcgcttggcacaacatgaccgtggactttcaccagttgggttggtccgaccgaatcattgcgccgaagagattcgaggccggcttttgcggcggacattgcgattatccgttggaaaatgtacgacaaaattattaatttatattaattatatttataaatttatttaaaatttttatcaatttattttgacttcaaacaaacggtaaacaatttaacttcaatttattttatcaaataattattaaaattttccattatttacaaaaataatttctttgtttttgccaaggagtccaacccgtcgaaccatgccattctccaatcactaattgcaacccaacagcaacatgaaggacaagcaatagcagcagcacaaccacggcgccgaacaatggcgtcgccttcggccgtttgttgcgcaccggcggagtttgactcgctgacgctgctgtactttgacgaacgggacaatgtggtgctgaagaactacccgcggatggtggtgatgtcttgtggctgtttgtgagaccaaaacggcagaagaagagacacaaaagcacaaaacaacgaccaaaaaagcatttctgctgatcagtcagtcattcgtttatttgtaaatccgagccaccatggatttacaaaatcatggaaacatttaatttcctaattagtgtgactctgttagtctgctaaat

SEQ ID NO: 7463 - DNA, 3042 bp, Heterodera glycines
catttttttcttacatattttaaggattttttactgtttgggaaattctcaaaaaaatccaaaattttggttattgcttatttttcatttttctttatttttgaaatttatagaatggctcgtgaaaaaataaaaattaaccaaaaatcaagttttcaaatacttatctggttctacgcctatttagctaattttatggcattttagcaaaatttgcaattttgagccatttttaattaaacgattttgcacataaaaactttgttaaataaattgaaaattaaaatttttgaattaaaatattcctgttttttgtgttcccatttttacagtagccacaaattgagcacgacatgagaaaatgacaaaaccgatgacaatgattcaattttcatccatgcacaagagggacggacatgaaatgaattcatcgtaaataataaatattaaaattaaattataatattttatgaatttaaaataaaattatagccaaaatgcaagaaatggtacaattgctgggccatgcacttcgagtccatgttgcgctgaaaaccaaaaattcacatacttttgtatgtacaaattcactaatgtaaaaaacattcgattttgagacaaattccttttgttttgccaattttttaatgttttgtcattaattgcagtggaaaaacagaaagaagtaaaattgttttttctgtgttctctttggcaaaaatggtttagccaaagactcacaaatcaacgtcatttcaagtcgttaagaaattcgtaatttgaaaattccaaatttagcattttggcaattacaaattttttgcgttttgttcaaaaattttttgttcaaaaatttatttatttttggtgcaatttattgggcattttttaataatattggttgattgattataattgtaaacatttaggcatcgtctcggcaactgtttgaacttggccatatccctcatttttgggaatctgtttgttgtgccgggaaaatgcacaaatcacaaatttgtaaaaaaaatctgttggtaatttagtttatttttattttttagcaatgctcaccatagaatatcttttgtcacaacatgtttgttatgccatgcaagaaatttaatgagaatctaaacatcatacagtatcaataatattttattttaattaaaatttcatattgaaccttttttattttatactcattgtttaattaataattgttattgtttgtttggttgttgttattttggttgtgactttcacagcttacaattttcgtgttctttcattcttttccaacacttcgttatgattttattcaatattttaaattaattaccacattatttgtttaattgttaaaagtaaaaagagccagagaaagtaaagtataatgatattttattatatttaagattccaattacataagctgattccaaaattgattcgcgaatttttctaatacttctctttatctaatctccctctttctaatttttctctaatctctctcactctctctctctctttttccactcccccccccctccttctcatacatctctcctttttctttctctttttctctctgtctctctcttttcttttttttctccctccccctcatttatccctcctttccggtctacctcagttcggcccccacggttcggccccagcacgtttcggccccaaataaaacaattaatttttcaaataaaatttcacgtaaaaattagcaagcaaaatgactacttttttaaattaatagtgttattcttatttttatatttttaattttaattcgaacataaatttaaactttttaagatttattatgtaccgtatgcaacatcaaattgacgccaaaagaaacaggtcaacgctacaacatgatggccatctttacaaatttgctaagacaagtaccgacgggacgattaaattttggcgatgtgagttcaaagacagcggtgtggacaagttcaaaggacggatttggacttcacttcgagatgaattcatccgcatggcgacacctccctcacacatatgaacggaatccaagccacgtcattgcgcaaaaagtcacgactgccatcaaaaggcgtgctgttgagacgatggaagctccctctgtaatccgtgctatttctcttcaaagcattagttcgcctgcactttcagaagtgccgtcaaaaaaggcaaccaattttgtaaatcttttcaatcaaaatttgttaaaagatctttcggccgatgcccgaattctggcaaaggttcagatttattacgtcgacatgcccaacaacgatgatcacaattatattaaccgtcatccccgtagaatcgaatatttgaaaggtatttcccgcaattaccagatgaatccttgatcagtttttgtatttttgtttttttaaattttaatattgttattagtagggctgctaattttaggtaaatacttaaaatttttgcacacttaatacacggagataggcgcgaaaaacgagtttttagcttggtttggagcttctatacccacttttataatacctatttttacctatttgggggtttttctacctattacctaggtacctatttttatacctatttcggcatttttgttacctattttaaggattttcaaaaaattcttaacaaaaatgcaataaaatcaaaaaatatacccataagaatcgaccaaaaaaattttcaaaaatgcaccctaagaattggaaaaatttctcaaaaatttatcccaaaatttatttatttttttcaattgacaaaatttttaatttaaaatgtcaatattatctaagaaaatattaatatatttaaattttcgtttacaaaagagatatgtagaaccaaaattttttccctctttgtttgctttttccactaaaaaatcgttaataaaaatttttatttacctattttggaatttttatacctatttgatgcctattttgatatattttttaacctttttaagtacctattctgcgatttttcttaccta

SEQ ID NO: 7464 - DNA, 3296 bp, Heterodera glycines
aattttttttaaagggcaaaaaaaatttcacaaaataaacagagggcggttgctggccttttaaaaagcaattttatttttggacatgtctcgatttaaataaaattgaaatttgctctaagcatatagagagttagttatttttgagaaattttcaaaattttttcattgtgtacttttcgatttgcataactcgcaagcaggatgaatctgtgcaaaagcccagtccaagccttagtcaaaattaagaatttttatttcctcttgtcgaatgttttttgtttttttcagaaatacgaaaaatttttcaaagtgagtcttatattaaattttttttaatttttttaaagaatttccttttaatattgtgcaaatttcagcatgacgctgggaagatgcaaaccaattagcctagaagcagaaatagaaacaaagaaaaagcttgaaggcgcgacatgatgaacattatttgttaaaataattgattatttaattgaaaaatgaataaaatggtggaaaaaaacattcaaatttatgtaaatatgttttattgtgaataaatatttaatcaaaaacaattttcaagaatttaaaaatatgtttttgacgaataaatgggtaagccgacaaaggtcagaaattaactacagtttatggttccacaaattaacacaaacttaaaaatttttaattaagtcagctaatattgaaaagcgtagaataatattgaccaattaaatacaaatttttacattgtttcattcattgttatctttttttaaaaaacgattttaagtgctcgaaataagtaattgtttatcgatgaaatgttaaattgctataaaacaattttccaagacatttgttagcaattcagtcaagtcctgggatgattcgagagtgtatgtcgagactaattcgcattggcattgtgccgcattcggctattgaaattggcctgcacagtttgaactgtcattgtttgagttccacgcctccgaaacggcacaaacattttccgaatcatttgcgcaaattgcacacgcatgtccatacagacggccaacaaaaagagctgcaaaaataattttggacaattgacgggcgaattaatttagttttaattaatgttttaacggtgctaggttgaaccaaaaatatattgtcagtgtgggctaattcgaaaatttgcctcagtgtcaataaagtaattaaatttataattagacgattcaaatttggtgtccaaaaataacaaattctatgtcattgcaaagaaaccttttttcaatgccgatgatgcttacagcatttcattaattcatttatttatttgtgtttttcaagcagttctctcacagcggaataaaaccgcaaaaaaaaatccgttaaaaacaaaaaattcgcaccctaatgatatttaattaattttaaatttttttgattccaaataattaaattgtaaattaattgcctcgtctgatatgtaaaacaacgatgtgaacgcattgattgggtaatacaattgttgcaagattgggtcgtaatttgtacatatcgtcaacatcgtgtaccatggcgtaatggtgagattaccaagtaacacaaaacatatgccatggatttggacggcaatgcataccacagtgattcgcgcactttccttgtccaaaggattttgtgccgtcgccgcatcagtggcggcattattccaacggcgcttttgtgcttaaaattttaaaatgtactggtctcatttatgaaaaaggtgaggaggaataattacaaaaaaaaattctgaactatttaaataaatgtttatgaagaataatgccaaaaaatttaagaaaatattaaccaaaaattataaatttagagcaaaaaaaaaaatttgaaactttcacttataattgaaataaaaacatgcaaaaaactattattatttattgtccattttccatggttaagcccaaccgatttcggcaagaataattttaaatttagttctacagggcaaaaaaatttcgaaaaattggatttaattttttgtaattaggccaggatcgaatattttttgtgtttaattatttaaattttaaaattgaatttcattaaatattattattattatttattattaaattatataaaatctgcaaattctttaccaaaaaatttgtgatgatgtgccaaacatagtagaagttaccgtactttctctatttgaatgcccgggcattgtattgttcaacccctccaagcatttaattagagagaggcattctaccagagacgggcattcaaataaagaaactacggtaaaccaattaattgtcagaattgaatatttttttgtatgaaattttaattaaattatttgttataaaatttgttcattttatattttcaaaaatttgcaaatttcctatcaaaaatgagttgtgccaatcttttaggaaattaaatccttaattaacccttaatccatgccagacgaattacaattgccaaataaaaaagacaagtaacgaacaaataagaagtgttgaagaaaacatcttaaatatttggcgaaaaattatcttgaaacgcatatcataaacttacactgataaaatggaattgaaatgatggatatcagatgaataatcacacattggacgaaaactttccttaaattaagatttgtttccaaaaaaaaatatttccatgaaatgccgaaatttggataaaaaatggactgaaatgtataaatatatggaaaatatgtattcggtgcccttactgaaatttttactggatataaaaattcgaaaataacttccgcaaaatttttcaaaactttgcacaacatttcaggagtcggaatcccgcaaccgaaaaaaacaaaattttcggagccggaaattttatccattccttgtttatactatggattcgcacggaattccgagttgctacatttttgtgaccggaattccgactttcagaaaatttttaggactcggaattctgatttcccttttcagaaaaatttttgtgccactgagtgcttgcaatccctggtttgtaccaaaaatgccattttggtcatgtaaaaaagcaaataattcggattccccggaaccggttatccctcgaggtatgaattgtttattttgtttactttttggtgatggtttgtgcataattgaatgggaagagctccgcatgtgctctatttgccgccatcacaacgtaatgcaaacgaatacaaacattaccgtattgctggcaatttaatgcaatcgttgcaa

SEQ ID NO: 7465 - DNA, 1992 bp, Heterodera glycines
tatttatcaatcaaaactggcactttacgaaacgcggcgatttagcccgagtgatcatgaccaactctgatcaaatcaaccctgccgatgaaaaaccataccttgctgatcaccatgtacaatgtcaggcgttctcgagccaacctgtacattggaaaagcgcacaaaatcataaatgctatacaaatcagaaaatttgtgatccgaaaggcgtcgcgcactttcgacagaggtgacaacgaatttatgatagtgcaattcatttgctgttttttgacaaaaattaggttaataaatttatttgaaaataaattacaatgaatttcacaaaatgagatgttgaaaatttgatgattagaaaactatttttgtacacacagtcaatgcccattctttttttataatcatgtaccaccaatttaaaacaatatttttgtaattttttaaaatttttgactgctgaatttcatattaaatcgattaaataaaaatacatataaatatgaatttaaaaataaataatcagttattttatatagcatatatgaatggattttatgttctcttcacaattgtaggggggggagggattagtaaaagaaaatattaattatttaatgagcattgtgttgtggcaaatttgcttgattattaaaataatatttattacttagtgagcattgtttgtgtggccaatttgcgtgattattaaaacatatttattacttaatgagcattgtgtgtgtgtgtgtggcaaatttgcgtgatggctttattttttaattttacaatgattaaaaatacctaaatttcattaaaattctcgttaataccaagtggcgtgtgtttacttacaattagtgataaaatgcacacctttattaaatacatggaaagttaattaagaattttttaacggaataataatgaagaactatgtcgagaaattttcatgtttttttggtgcgtttgagttatagggatcaaatttaaaaaatggtgcaataccaagaataaagtgctctatttttctgccaaagttcaaaaattttttgttaaatttcccaaaaatgaattgattacttaaattgaattttctacaggtttgaataatttactttctctctgccgcttcggcatttttttcattaactgcaggtcggcccaatacttttgatgaagtgatttttgtattgatgctgttggattacaattggttgttatttcatttctgaagtgttgaacctgtcggtcggccactcaactttttgctcactttcgagaaaatcactacatcaataagttttattactcatttttggttcattttttggcccattgatcaatcatccctcatttaacccatttattctactcaaatttattttcacctaattcttgattttttttaaaaaggaaatcttagtgtccaattttcctttagtgtccaaaattccggcggtgtccatttttccgcttggtgtccaattttctggtgtccaattttccggtgtccaattttccggtgtccaatttaccggtccccattcgtatcgcatcccttccttattttcaccccatctttaatccatgagacacagaagtgaaatttgccaacgttttttaaaatgtattattttgtgatgcacactattgtgcctctcatgctttagagagagcacatgtgttgaatttgtcaaaaaattatttgttattgtattgttatgagatgaccctgattatggtgttatcgtacctttgataagcccaccacagaaagtacaatatgtggaataatatcctttattccgatcggtacatgtttaacaatggtgagctttcccgattcggagcggggagtgagggggtcgggatccgaatccaacggccaggtggagtgatgtgtgtatggacaaaggaaaagcatatacaagcacattgggggaggagacaaagggaaggaccgccccaggcaaattgtcatatggctat

SEQ ID NO: 7466 - DNA, 7037 bp, Heterodera glycines
tttttttatttcttattgttaaatagttacatactaatgttttttaaaaatattttgttaattttttcattattttttcccacttgaaatttccatttgcattttcttctccatttctgcccttctcttcgccctgtctttcaaatcatatctgcacattcccatatcgaattggtcattttttatcagatgttctattttgtttccaatttctttttgtaatttttcaaattctcgccaattatattttcctggcggtaattggccaatgtttggcattctgaaaaattttaattcgaacaaaatgtccataaatttgagtgtcattcgtggaatagacattttttgcatcttggaaaatttatacaaagaattgacattcgaatgctgaaattgaattttgaattaattgttggcaaagtgtttgttttttgttcccatggcattctctgctcaccctgcaaagtgtgcagtggagggattggtccgcgcattggtcgccccttttggcgtcgctttggtcgcattggaatttgccgaggacatttcgctggtcaaagccatgcggcaaaatgccaatggcgtcgatttggtccaattgcatttgcaaatgcattaaacttgagaattgaattcgcacctccgccgactaaattggcaaattaattactaattgtttttccaaatttggcccttccctttctctctcacccaattttgaatgattttctccaatttttccgtcaaatttttaagcgtttcttttgaatgatttattttttgcgtctcttttaaaatcttaaatttggctaatgctttactcaatattatgcaataaaacagcaaaacctgctttgttttttcctcatttatttttgaattttctccgtattttatttcttgccatccttccggaaattgtgccaatttcgtcaatcggaatttctcacgttctttttcctcaaccatttcaatcaaattcgcttctttggtcaattcgttaaacaatgtttggtctaaaaattatttttaattcaaaaatcattgaatttggccaaaaagtaaattaattaaaatccaattaatttaattgcctaattttctctgcccatcaaagtgtttgacggcctttaattgctcttcgaattccgctcggtgctttggcattccgtcctcgcgcccatcgttttccgtttgaatcagtgccaaaatcactttgtccattttgcgctttaattggcgttccgtttcgctcttggccattgtcttggccaattttctcgagtgcagctgacttttcgtctcctcaatctctgtccataaatttgtgccgttttccgcacaaaatccgtccattgaggccacaattttcttcagcaacaaatgcaatttggccatcaatttgttcctctcgcataagctaattatcttgcttaattcaaccattttaagcttttcccattgcttttcaatttccaatttttcgtttttgccaattattttcaattcctccaaagtgccaaaaagtccaatccgattcgaaatttcgttggcataaactccaagatggagcgtccaacacaaagttttgactgttaaagcatcgttttcctcgtcattttcccaactttctttgcttactgcccaaaacagttcgccatatttcaaactcagcaaattatcgtctgaaaaatgcccgattttcagatgaagcaattcattttggtccaatttgtcctcttcttccgaattttcttcactttttgtttcccaatttgccatttcctgttcatttctgttcggcactttgccatcaaattttggcattttgccattgcaattttcttcttcttcttcttcttcttcttctgattcgtagttcgcttttctctcactttttaattcgtttaaatttctcttcaaattgtcttttacttctgagctcagttcttcttcttttgttttccttttttcgtccgctttttctcctcgatttccaattattttgttaccatttgtcgtccctttgtcactccctaatgtttgatcatttgtcctactttcattttgatcagctgcatgaatctgttccatcatttttccacctcttactgattgaatgtcttctaaattttggccatcaccaatttcttttgtcgtcactttgtcctcctcttttgtcgtcactttgtcctcatcttttgtcgttattttttcatcctcttttgtcgttactttatcatctttttttaccttcattttgactaatgttttgtccttttgtccgtcgtcatttttctgcgtttcttcgtcgcttaatattttattttccatttcattgctatcgcttttgctaagttcgctttcgtttttccttaacgatccaatttatagcaatttaaaaatgggtttactttgtttccgtttttgctcctccattttcaattcgtccatttgtcggcttttccttttgcttctttttgttttcctttttccttctgtttttgttattcttttttatcccattttctctttctttctctgttatttccatcaaaatctcttctaccgattgttcttttatttcttctctcgttccacaaattatcaatatttcatttgccctttcaatgccaaaacgattcattagtgtttttatcgcttcttccgatgactcataaacttaaaataattttcgcccccttttatttgtttgttttttaaaccaacctttttttaaattgctcttcatctgtccattctcggccattaatttggtcaaagtgtcgaaatgtaaattgtttatccattttccataaaattccgcgtcggccttttgttcggtcttttgtctgtccgacgttttatcatccgaatttaaacacaaaagtttcatcgctttgtcttcctccccatttaggctcatttccatgcatttcttcatcactttgtccatgtattcatcaattaattccacaaattccatgactctcaattctatttctgatatttcactgtccaaaattcggtcgaacaattccataaatgaatatttattcttttcccaaaactttcccaagggctgtagtcgtttggcattttgctccagtgccaattcgatcttttgtgcaattacgacaacgtccgcctttaaccaatttgccatctgatggaattggcacttttcgtccaataatgcttcctcataaaattggctcaaaggtgcattcaaaaaagctaaatattccaattagcattttgtttgcttttgctttttccatccttcgcttttaccttcgcgcacacattccggcgttctgaacattgcccttattttctcggcattcgcttcttcgcctttgtctgtgccgtctgtcagcagttttcgaattcgctcttttgccccgcttattttgttgaatttggccctaaagaattcttcgcttaaaagtcggtccaaatattcgaaatgagtctttcgcattcgctgcctttgctccgccagtgccctcttcacgcccttttccgtttcgcattctgtcggcttccatttcacaatttttgtcacatttttcgcattaattccctgagaatttctgctgtttttcatcaaaaattgctctacgaattttgccatttcaattaatttacacacattttgcctttgcctttgttttcccatcttcgaattttgttgttcctcaaaaaattgccctttcgcattcgcaattttttccaaataaatattttgtgcattcgcggacaaattgggcgcaccatttgccagattagcttcgtaaatttctaatgctttgatcaaatttggcgccataatccgagcttcaaaaaattcggcgcaaagtgtgccgctttgaaattgcatttgtctcgtcaaaagggagaggtactgagcagtgaggagatgttctgaatgaaaagaaaagtcatttttgaaattaaagtattaattaactgaaatggaaaatgtccgggtaaaagttctccaacaaaaacattatttgcacattgaccattttcactaaattctcctttattttaagaaagttccgttcggaagtgcctttataaaaaaattctctaaattttatgcttcgatcaatcaaatttctgatcgcaaaaaagtggatttgtccaatctttgtcgaatcagttatttgatcaaaaaacatttcaacaatttgatcattttcacagtccatatttgcccattcagtttcgacattctctggcagaacagtcatttgctaaacccaaaagtaagttagcgctgtttttaaagtgttgaacgaaacacgggagcagagaaatggaaaatgggagaatggacggactttctaattgtttctaattgtttttaatttatggaattattcaaaataaataatgtaattctgaccgtatatttgctcaaatcttccttttctttttgcacaaatttttcaatctccgttttccaatccgaattcattttgatcagcgtctgatcagtggccaattcgtaagccaatttgtacgtcatgcacaattccctctttctgccgttactcttttcactgttttggcccgataggttttgtcctttgagtttgtacttgtctattctgtccttgaatttggcattttgttgtccatgttgttcaattagcgtatcggctaattccaaaaacgagttgatgcattttcgataataccaatgtgtcgcatgcattttcaaattttgcataaatggcgaatcctttctcaaattatcagccgattcagtggttagaagctccatgtactgcttcatcacgattatggcatcttgttctgtaaatggtttggaattatcaaataactaaatatttttaattaaaattccctttcctaccgcaccttttgtgttctcaaattcgatattttggtccttcaattctttaacaaaacttctgttggcattattaataaaatcgtctttttgtggtttgctgattccttaaatcaaaaaatataagtattttgaattatataacttccatttttcaattttatttgatactacgactttcaaacaattccattgttttgttcaacaacgaatcatcacagcttgaagaaacggcggattcaaagagcttctaaaataataggcattggttgaaggggcaaatgccagaaaggcacccaccaccagacgcctctatttaaatttatttttttaattgcaaggcaaaattaactttctaaccaatttcccttctcttccccccccctcacattcactccttcccaattttcgggttgttcacgaaaattgttcctgaatgcctcattttccaggtaaagttcgatcagacatctcccaagatcattcagaatcagtttcaatcgttctgtcactttcgatgtgccaaattcgctgtccattttggccaacagttcgtcaagttgtgccaatattttctgtttgttactttctttgcgccattcgtcgtttttgcccataattttgtcaaattgtttccaataaattttgtatttgtttatgctgtctttcttttgacaatttgcaaaatgtgcaataatttttgcgaataaaatggacagtttgatgaacatcacatttccattaaatccatttttgttaattccttcatataacattcgaaaaaagtcatcactctcaattcctgaaaattaaagtacgaaattgtgattagtgttgattagtgctatttgccctaccaatcgccaatagaattgggttgttcaattccaattggtccacgctgctctgatccatcaaaaaagcaatcattatccttttggcatgttttatctgatcaaattcattctttgctgtcagttctctgaatctttgcgtcatttcactttcttcgtccgtttttctgttttcaatttcaaaaatttgcctaaaattcgaattctttcgcatttccctttccgtcaacaaattgtccaaatatacgaaatgacaatccgacaaaaacatgttaaattgctttgcaaaattcttgaattgttctggatgctttaactccgttacgtgcatttccaattgctcacaaaatgcgttcatttcttcaaattccaccgattttttagtttttaatttttcgacgtataaccaaaagttgcgcagaaagcacacgtccatcagagtgatgtctccgttttttgcttcaattttttctataattttgttaaattgcgcttttaattcgtttttattggtcgtttttcttccgttcgctttttgcaaaaatttcatttgtttttcaatttccaagtgaactcgaacggcgctcagctgaatagcaagcaaatattgttcatcataattcaaactttggtcaaacattaagcgcaagtaattttcctccaatttttttatttcaattcctttaaaattaattttttaatggtaattaaagatcccattaccgtaaagtgtttttggcgtttgagcacaaaatttaccgaagaaatttataattaaatataaaaaaggaatataaaaaatcattgctctaaaaaatgtcattttgtaaaacgcaaaaataatttagtattttatgaatgataattaatgctaatattacaccacagaaaaaagaagcaataacgaattgatgaattgtacaaattttaattgattttattgagaaataaaaccacgtaatgtttaaactgcaaacatttttttttattatatttattaaaagcaatgaaatttgtaaataaggaagaatcattaaagagaaattatcaatttttatttataaaggattatttcgaatgaaattcccatcagttcctatggcaccgtagtcattaatagggcttccaaaaatatggatataaaatcgcgaaatatggccatgaaatatggaccaaaaatcgcgaaatatggacataaaattgcaaaaatatgggacataattttttcaaaattaagggtatactttctcaaattttcttcaaatttgctaaatggaaagaaaaacgtttaaaaa

SEQ ID NO: 7467 - DNA, 3803 bp, Heterodera glycines
  unsure (1)..(3803): unsure at all n locations
aataaatggtgtgaagtcaaattgggttcacaaaaaaaaataggttcaaaactgaccgaaaaggttattataaaaataaatatgtgcaaacaaaaagaaagaattaaaattctatgattggacgtatcggaccgtacaataggttttggcctttagggttagtaactgatagctgcggtcgtccctgtggggttcaggtcgccactaacgcaaaccgcttggaatgagacttaagcgggggttggttgcctgcgcaactgtgaatgaatgggccgttgggagataggggtttgagaccagactgttagtcgattaaacaatcgactaattgacacgcgagggatagccggttaaataaccggctaattggccagttggctgtgcttgacctgatccaacggcgtcaattggtcctcgacttgtgtgtgcagcgatcagttggtgacggacggcgattggtgaacaccggacctggtgatgctcggacagaggcgaagagaggtccaagtggtgatcagttggtcaacggagacggtccaagtggtgatcaattggtcagcagagaaagatccaagcggcgatcaacggagtgaagaatggagagcaacaaaagggggaggaaacaattattttggaaataaataacacagtggacaaaaatgccaaacgatggagcgagactgatcgggcaaaggaccgatcaaatgattaaccgggatttcaagcactagtgcttgatgtgaggggataatgtgctaaacagcaatcggcgaatggaaaccacaagtgatccaaatcgcttttaccgtaccaagtgtcttacggtaccgttcttggtcccagggttgggaattccctgcttacagtttttaggcccttttctaaaagacgattcccttccgggatttaatttagaaagggaaccccgaatctgatgtttattcaggattagaaaaagccgactttttccccttgtttgacaatttgacggagcaaattttattgtcagttgagatgagcgaagcaaaattattagaatgaaaacggggaaaagaaaatcgtccatcggtgggggagggggcggatcgaagggtcgcaacagtttaaacgatgtgaaatgtctttcgtccgtcgttcttcaatggcattgtccaagcgttggggccaggcggagatggtgcgaatgatgtgcgatggagagagagtgggggcggatgagacggcagatgggacgacggatgaccaagcagtgggggagcagagatgaagcgatggatgtgcagtggagaaatgcagattggcggaacagagagggagggggcaaagacggcgatttcatcggctgactgttgcttctgctgaaaaaaaaggaggaaaaagggaaaatgaatacattagcgccgttcggtcgcggcggtcgctgaagaccaatgactgaacagccaatagaagagagactaagcaaaggagagagagtcctttgcttaacatcccccgggggagagaaaacatagaaagaatttgtaaatcgaaaataactataaatagttcattttcgacactcccattaagaaacgaaagacacgctaaacagcgttgttaggtttttacgtttgccgacccctcttaatagttttccgtaccttcctaggcataactgccttcgtgtcgaattcagaatcgcttccactgatcacttcctgaaaaggaattttttgggattttaattttcctatgcgattattttccattttctcttttggtttatctttcaaaaattcacttaattcaatttcctttttcgttgcccttttcacttcctttttcacctctagttctatccatttcccgaccaaaattttgtatattttccacatccattctgctaaaactagcagaatgaccgcgttgaccaaattttcccaagccaaaattttgtgtcctattaattttaaaacatttgtttccaaaactggaaatttcgagtgatcattttcacatgactcactcgaccctccccgcacggaagctgaatccaacggaaattctgaaaaacttgctctcagcgcctttaactcactcatcatttttgtttgtgtttctgtcagattacttatgatcaaaagacgaaagatttgcagagaagttgacggtacagctgatttccaaattttgttactgatttctatctcacttatttccttaacaggactcttaatacctaaaacttgatcaatctcataaagtcgaccttcaagaacgatatgtttgtagcgatctgtctgacaatcaacttttctagcttctgcacttattatgagggtttttgggtccaaataagccagaattggcttgtctttcctaactaatgtcacctttactgggattttcttgtaacatttatccttggtttgtgcgaatccgtactcataaactggtgaacatggccaaatttccaaaatgttctgtgaaatccattcggcttcgatttgctggttgtccgaaagctgacgaatcaaaaaattcggattgagatgtgagagatcagtgcccaaaactgagccaaagatggagtcacaaataagtttaaaatatgcctgcaatacttttctcatttctttatctgcgaacatcgaacgtgctgtgagttgagcatctaattgtgatgtgcgaacttcaccgtccaacggttcatcaaaattaacatttcggcgagttctgtccaattgtcggttgaattttacaaattctctttcttcgattgcgaatccttgttggctaactaccaatcttcttaaacaagaagtaataaatgtcggatcttccccaaatgttagggctaagtccggtgggtcactgatccaacctattcgataaatggttccatttttctttgaaaaacttttaaaaacgcaatgtccgtgtcgagccgcccatggttcagatgtgtgataccgatcaacatcccaaactacaatagaatcgtgtaaactgcatctgccgtcgtcgtattgacaatgttggaggtctccgacaatcgaatcaattctttgggatccgggatatccaatgattgttatattgttgactatgcaattaaccgtctcaacagactttttaccccaagaccaccaagaatgctcataaatgagtttattttctgttatcatggtaccgtctgagtcacctactagaatgccgaatctgcattttttggttttggagatttcttggcattcttcggcagaaatcggcatcatttcttgacttttgatgtcgaatggatcattcagtaaattcgtccaaaattggaccgaatgtttaaggagtaaacattgatgcccccaaaaggtgtattccttttggttaggacgatacaatgtaagttctaaattttttgtacctctttcaaatatttgagatatccctgaacaggcactattgtttcgaccaattttgacaaatcttgatggcacgtttctgtgacaaatcattggtttttgacataaatttacgcccaacaacataaaaaggcaatgtgaatttgctatttgtaaatgttctcaatcctcttgactgaccttttgggaatccgaagtttctctcgaaatctcggtcctcagtttggcttctgtgcacattatgtgttgtttgtacgttgtctggcttaattcccgtgaattttttcattgactcattcatttgctncacagcaattttatcgaacgaatcgtcttctgatttcgtcgtcattgaccatgctacatcaatttaccgggttttagctaaacaggcgttttact

SEQ ID NO: 7468 - DNA, 2444 bp, Heterodera glycines
ctgtgcttgctatttcgagatttttgaaactttttacgtcgaatacgtcttcctcaacaggaatattttgaaaattttcttccctattttttggccatccataatttggctgaacagcccgtgttgtaccttttggtgttgcctccttcaaatcatctctgagttgcatcaacaatcgtcctagtgtgttcgaaccgttccactgttgtatgtccgctgttggccatttgtcataaatgagtcccggtctacaacccaccccccaaaactggtcgggtgataattcgcaaattatggcagatccagtgctcaacagcacatctttaagatcgggcaccgaaaacttggctttaagtgcttcttccataatgccaattttgagctcagtccattctcggacagtcacttcgtcctccccgttcatatttgcgaatttcttcatctcaaatgcgcttattcttttgccatatttgtttgtccccagcataatcgcatccgccgcgttgaaacgtttcagatacaacgctttttgggcacagtaatactgctccacacatcggtaggttctttcgtggatgacgaattcatacgcttcgttgaaattcgaaaagtaaaattgctgattaaaaaatcctagcaattctcttttttcaacccggacacggcggcaaaatggtgctctgtcattgatgaacggcggaattggcgggatactttccaatttccaaaaatcgtaaacggccttgaccggaaactgctgttggcggtggagacgtggatttgagctggactgatgttgctgcaagtcctcaacaggacggattggtcgaattgcctgagtccattcgctgtgcgatggttggtcctcaacaggacggaaccttttcgactttgttgcgcccgaactatgatcatcagaaaatggttgttggcatcgcttcttatacagcgcacttcctcccctttgagtgattcgcggagcaaatgcgaggtgcgcgagcgaagcgagcgcatctgcgctagttgatattaaaaatttgatttaatttcacatcaaaaattaaattttactttttgagatattcatgaaaaaatttttcaattcttccctggtaacgcaaaccgcttggaatgggacttaagcggcggttgcctgcgcaactgtgaatgaatgggccgttgggagataggagtttgagaccagattgttagccgattaaacaatcgactaattgacacgcgagggatagccggttaaataaccggctaattggccagttggctgtgcttgacctgatccaacggcgtcaatcggtcctcgacttgtgtgtgcagcgatcagttgttgacagacggcgattggtgaacaccggacctggtgatgctcggacagaggcgaagagaggtccaagtggtgatcagttggtcaacgaagaacggtccaagtgtgatcaattggtcagcagagaaaggtccaagcggcgatcagcggagtgaagaatggagagcaacaaaagggggagaaaacaattattttggaaataaataacacagtggacaaaaatgccaaacgatggagcgagactgatcgggcaaaggaccgatcaaatgattaaccaggatttcaagcactagtgcttgatgtgaggggataatgtgctaaacagcaatcggcgaatggaaaccacaagcgatccaaatcgcttttaccgtaccaagtgtcttacggtaccgttcttggtcccagggttgggaatttcctgcttacagtttttaggcccttttctaaaagacgattcccttccgggatttaatttagaaagggaaccccgaatctgatgtttattcaggattagaaaaagccgactttttccccttgtttgacaatttgacggagcaaatttattgtcagttgagatgagcgaagcaaaaattaatagaatgaaaacggggaaaagaaaatcgtccatcggtgggggagggggcggatcgaagggtcgcaacagtttaaacgatgtgaaatgtcttccgtccatcgttcttcaatggcatggtccaagccgtggggccaggcggagatggtgcgaatgatgtgcgatgtagagagagtgggggcggatgagacggcagatgggacggcggaaggccaagcagtgggggagcagagatgaagcgatggatgtgcagtggagaaatgcagattggcggaacagagagggagggggcaaagacggcgatttcatcggctgactgttgcttctgctgaaaaaaggagggaaaagggaaaattgaatacattagcgccgttcggtcgaggcggtcgctgaagaccaatgactgaacagccaatagaagagagactaagcaaaggagagagagtcctttgcttaacatcccccgggggagagaaaacatagaaagaatttgtaaatcgaaaataacta

SEQ ID NO: 7469 - DNA, 3651 bp, Heterodera glycines
tttttatgggttttttggtttaaaaatttactaaatttgaaaaaaattattaaattaaaaaagaaaaccgtcccccgattatggacctttaataaaaatttggcaaaatgtgtttaaaaaattcaaatttgtatatatttttttgtctttactctaacgaaaatgccattcttagggtgtatatttaaccccgaccccgagttggggttaagggtcggggtcggggttgggagcgtcggggtcggggtcggggttaaccccgaaaaatggccaaaaaagtcgggggtcgggcggggtcggggtcacaaccctaattataagcatgggatcggaatttgggacatttcggggacagaccgtaaaagattttcggctatttttctaacaagaaagtgctgaaaatttgggatggggaaatgccgaaaactcaaaggatcaccttacttacatagttcagcagggagcaaaagtgtctgcacgtctgtagttgggggatagatcggagattcggggtcggggacccggttgcaaatggtgccaagcacaaatgtaaagattcgggaataccgaaaaaggtcccatctccatatgtgacgggtgatcagtcctagagtttcgcagattcgagatttgtcgagatcattgtcccaacatgctgaagccgatgttcaggaagcggggggccagcccgccaatgcggcgcctgtgccgatgcgtcaaggccacgccggcacgttgctcggaatgggagtcaaaaatataaagagagaaatagaaaaaagggagagaacgagagagaggagagagagagagagagcgtgaggcaagttgggagaaatgtgagagaaatgtgagagaaggatgaaaataatttggttttaattttgactagcgcgaggtgcgcgagtgaagcgagtgcgcctgcgctagttaatacatactaaaactcttgaaaagttatttataaatttcgagttttggttttttgaaattccgcaaaaaatacataacgccaaaccaagtgacactacagttggccgctcattagtagctccgccgccgcccgtcttggggtcaatgcggccaactccttcgggagtcattttttcggcttggggaccaactccatctcgtcaacaccatgggtaaagacgaataataatttaaaagattgaaattttaaaaattgggacaatttggtggaaattgtgccaaaaatggtctatgtgctgctgctggctaatgtcgccccctcagtcgccccaaggtcggaatgaagtcgtctacgagtcgccgtaaatgccaatgccgtacaatgacatgtatcgcccaaccaaaacaccactcactgacggtttggcaatagcacttttataggttttttaggtgctgaaaactgaccaaaatctgtggaaacgcatttaaaccggtttaaaaacacggaaaaaggaacataatggggcactcttaatttaaacggtaatatccggacattgctatcatcgacagctcttttgtctatttcactgagactcactgaccaaggtctcagattgtttggttcgacttcttcccctgacggactctgtcagatggacctcacggttcggcggcgcccacggttgggccctcacgtttaggccccagcatgtttttgattattacttttttctttgccatccaaatccaacaaccttggtatcattcgaaagcttaacttgctagaaaatctttttgtaggctaatcgagagctttcgaatgataccaaacatagctcgccaatagcttacgaattatccaaatttgtcagggttcgattgtttttaaaaagttagaagtgacaaattctcgctattttcgagaattttgaacaagcgcaaaagccgttcttccacatggtctcatcgagatcttccgattgttacaacatttgttcttatccgtctacaaagaaaagtcccctatactccgtgttagcctacattcttagtatcatttgaaagcttaatgtctcgggaatttataaacacaagaaatgagaaaatactataattaagaaaaaaattacaatggattttttcccggatatattcaaattgaattttttttttttttttgtaggttccttttaactcggaatttttgagtaaaattctacatacttctgagctttcattggataccaagaatataggcattaggcattcaattgtcattggttcaattatttccaattttaattaattaattaatcccgttataggtttgtcgcttgcggatcgacgcacattgtgccaagttcaaaaatatacattggtaagaataagggtctgggttaaattatagacatagcagaggaaataaaaaatgttagaaaaaataatttcaaatttaatttaaaatgtcattgaatattgctcctgtgtggcaaagaggttattctcttgagttgtatccctctgctcatgttcaattccttctaattgcgtttaatattatctccattcaaatttttgttaaaatctacttcactttataaaatatacaaagtctaaatttatttttgggtaaaatctgtaaacaaatttagcaaaaaaccttaaaaaatcttcccgttgcaaatatattttttagaaggaattttttttaatgacctcttcattccatgaaaataattatttaaaaaaataaaatttcaaataatttgaaatttaaattttcatatcttctgaaatttttagataaaaaatatttgatttgctaggaagcaattgaactactatttttattttaataattacaaatcatttcgtgaaatatttttttttctgagtatttttttctcgacgcagacgcgtccggttgaaaaacttgggcctggacccggaatcccagactcggtttttgcccgaatacccgacccgtgtaaccaactctagtgcatatacctaagtcctccttttaaatgaaaaaaaactaatgagacacgagaaaatatgtgtgctatagctcttttgtcaacccacctttttagctattttttgacaaaacatggtataacttttgtttaaaaggaccaatcaaattttacattctaaatatcattcaatagtccagctttttgattttaagcaaatttatgccatgttttatcgaaaaatagctaaatggtgggttttatgaaacaatccaacacggaaaatatgtgccaatttcctttttctctgtctcagtccgctctcttccatgtaattactaagatgaccaccatcacaaatcaattaacaaaaaggggtgctgagtcgttatataaaactatcaataagagggcgttatgtaaaaaaccatcaaatggaaatttccaacaaaaaactgcccataatttttgtctaactaaaccaaattaaacattcttattatcattggaagccctaacatttctctattagctcgcctaaatttaaaaaaatttggccaagtttgagcaaagttatggccaagagtacacaaggaacctggttttcaaaattttttggctataacttttttgaatcttaatgaattttttttttgaaaaacaagggatggttaattgattagactcataaaatacctttggactcataaaattcgattggactcataaagtg

SEQ ID NO: 7470 - DNA, 1639 bp, Heterodera glycines
tggggggaaagcgaattcgaagttttttgatcatttgcttattttcatttgttaattttctttttcttttcacttctctctcttctttctctctctcttctctctctctctctctcgctctctgtctgtctctctctctctctctctcctctctctccctgcagttctaataaaaagccttttctgcttcgttttttattaattgtgttcttaaaaaacccaatcaacagaatggaatccgttctttggtgacggacattcccctaaaaatgaattaacaaaaatcaaatagttccaaattcacttctttcttctcgactttcttttcgatttgatcaatccatcatttatctctctccaaaaacaaagctttgtccgcttttccttcctgtgcttttgcccccccccctcccccattttgtccgtttcccttcacccccagcgaattgtcttttgccgattttgtcccaccaaaattgccataatagtattccttaaaatcattcccatggccccaccattcgcgtgaatttttatcaatttgccatcattctttgatcccaaatccggggcttttctttccttcgctctttccatcgattggcttaatccctccgctcatttttaggcactgcaggaaaatattgaaacagaaggacgaacgaagcactaatagctgtgtaacaacaccagcagaagcaggtccattggaatgacacgcgaaaagaaaaaagggaatgaaaaggaaaataaaagaatggcattttcctaaaattaggcaaattttaactctttaaaaaaacattacagcaaaaccaaaacaaacggcaaaaggacgttggcaaagtcatttcggacgagtgtgcgcagcccgaacaacgctatttggcactttggctggaatccttcgagagtttagaactcatccatcactttacggcacttttcttaaggtaagttgggtttttgcttttacaaaccaaagggatggtcaattaaagcggtgtcatcaatcgcttaagcttaaattggtaataaaagccgtggttggccacttcacaaaattttatccttcgtttttcattcacttttattttttggctcggatttcacatttgtctgttgctgggcttcgagtggagtgggccgttggggctgtcatcgccgccgcccccctcccccccccccgacaattctctcataaatttccctttccctcaattgcgatggcttttggttggactggggggaaagcgaattcgaagttttttgatcatttgcttattttcatttgttaattttctttttcttttcacttctctctctctctctctctctctctctccctgccccctctcccgtcgattttttggagaacaatataataatttttaaatgtttcaatgaattttgactaattattttaaagaatttttattttagctcagtctcactcactgatcttgttcatccttcctcctcccgctctctcccctccctcgctcccctccctcatccttcctcctcccgctctctcccctccctcgctcccctccctcatccttcctcctcccgctctctcccctccctcgctcccctacggcatcggtcctcctcccgctctctcccctccctcgct

SEQ ID NO: 7471 - DNA, 1673 bp, Heterodera glycines
tttcaagcaaaagtatacaaatagtgattaagggccaactcccccatggacaaagatacggttttgttgagagactttgaacatcagtacttccaacttacacatcccgattggtatcatcataatgccattttgcgaactttgggacaactggacaatgcggaatcagggcgaatctaacgactacccacttgaggactattcaacgagcggcattgttgcgtactattttcaagggtcgttttagcacagctgcgaaagttatctcttttactttacacgtaacgatgaaattatattgtttaagacgtttaattgacacttaaacatttgttgagtcatatatttccgtagaaaaaatgcaattgtatgttgaataataatatttttaattggaagaaaaattagaagaactggcacataaatattgaaaaattcatttttgcattaatttatgcgttggatccttattttttcatttatttatcattgcccatttttattatcttattaaatttatgcagcgccacacactgggaagtgtaggttatctggagttgcgccggcctttaaaatatgaaaaatcaaaattttaaataaaaaagaaaaataataaaataagaaaaaatattttttctataattaccgggtaccagcggcaatgatgagtttgcattccgaaacaatccatagcagttattagaccaaaacaatatgcgtgagagttttggcaccgatttgtctgaaaaaagacgaaaacgaaattgttggtcataataataatacggattttaggtattatgatgaacattttttaaattaaacaacatttacaaaaagttttaacaaacaaaccgaatcgaccgaacagaatgggccctgaagttggcaaatacatcaagaaaatcgttcatttttgaaaaaaattaaatcattagatttactgaatttagtttttttaattttgtatattttaagattttaaataaaacttacgagaaggaaataagttttttcaaaaaatttttccaaaaaaatcgctaaaaatttttcaaaaaattttttcttgaaattttcttaataaaaaatttcctaggaatttttcttttatatttttgtttgtagttttttttaaaagaatttcgggggggggggggggaggaagtgactgttcgcccttgcggtcttaatattacgtccgtacaggctttgggtgacaaaaataacgctgacattccaattgtgggaaccgcgtgtgaacagcaaatccaaaaaatcgttccctacattaagcatcaaatcatcaagcacaagaagcaatggtttcggctgactctggatcaatgcttgatccggaacgccattatgtgtctcgattccgcgcttcatcagctcaatgactgattggttcatctcagagtagcaatacaatactttagcaggcggaggatcgataagttcagcgtagcttctcagcaatttcattagccattgggttttaccgctcccagtggcccctgacagaattagagtgaatggggcaataaacatttttattttttgcaatttgtaatttgtctttgtcatttatatacattttcagttcaaaatgggcggcgattaatcattttttcctgttaaatactttaaaattatgaataatgaaagctgtc

SEQ ID NO: 7472 - DNA, 2375 bp, Heterodera glycines
aagcattaagcttttattgtttttgtcatttatcgcttttcaaaattttaattttatgattttaccaaaaaacaaaaatttgaatcgaaaaatataaaattattaaaagaaaactcaaaaactgcaaataacaatgaaaagaaacattttcgctttaactactttttgctctaaaacaattttttacggaggaggcaaaatttaaatatcatttattttattagcattttaatataatttaaattttaaataccatttttgtggatgaatcaatccattaactatttttggattttcacaatcttctgggtcgtgaaagcctgggcaatagaccggttttccaacaaataagtaccttaatgatttatcattttgggataattaatttttgaataaatcacccagctcgcggatgttcaggctgtgccatgccaaaaatgtacaacaacccgaagagggttagcagttgaagaagcatcatttttataaagaaaaaattcaattaaattgaaaataaaaaagaaatttcagtctttaaaaacagcaaaaattaatgctcattaatattcaatgtgagcttatttatttaaaaacgcattaaatacatttagtttttagctttaatttattgaagagattttattatgtttttacttttcaaaatgaaatgacaaattttaatgctcttaaaaatggatttaaaataaattattctgggcagcaatccttttaaaaaaacaataaaaaacgctttttaatatttatgactctttaagagagaaaattattttaaaatacccttttcattattatttctttaaatgtataaaaaaaagaaaattatcaacgatcttcgacttcaaaattttattaaaaatagcaattcggctagctccatttccgttgagctgcgccttaactcaacgtgtgggagatggcacggcttaatcattgaacaaaatctggatatcgaagagcgaacccttgacatttttgctgaataactaacaaaaactacgacgataaagggtcttgtattaacgaatctagtggtaaatctgagcaaatattcaaaattttggggaattttgtaaaaatagactagaaaatcttgatggaatattgttaatacaatacaatacaattctatgtaaaaaattgatttgtcgcatgaaattttattaaattttactaactaagattataattattattttttggttttaatttttaaataattatttcgcttttatttttataaaatgattatttgtctattaatttgatcatttgcttttttagtacttcattataagttgtgccattgaaggacaaattttaaccaagctgaattgcggtaattggcatttcattttttgctcatttgcaaaatagtggcaaaaatagtggcgaaaaagttctaaatttaggggtgtaattttttaaaaagctgttttttaattgtaaaattaaggcaaacaattttattcactgattgcagttacaaaatattttcttagcaaatattgagcaagaaaaaaaatttgggggaagaatttttgagaaaattttccaattcttaggggtgtaattttgaaaatttttagttcgatttttaggggtgtattttttgaatttcttaggtcgattcttggggtatatttttcatttttattgcattttttgggaaattttccaaaaaatgccaaaatagtgacaaaacgccaaaatagtctgcaaaaaattattttagtggccaacttacaaaataattttttttagtggcgaagctccaaaatagtgattcctagtgatgaatagtggcgttaaaacgaagaatttccgagctaaaaatgtgtttttcgtgcatttctcgtcgaaataagccgcagaaaaaaaaagttaaaaaactaaaaatcccagccctactgatcattgctgctgaagaattccacgcgatatacacaaagaaaattgtaattataaatcatttataaaaaaaatagaagagtttcataatgggaaaacataacctgcgaatatagaaataggaaattttgtaaaaaataaggacacaattaaattgatgtatgtatagggtgctaggtcgtttcgtaacttccgccactatgggcgtttcgtaaatccgccaaaaaataataattcatttaggccaaaattttcataaaaattatatttttgaattttatctatagaacatttgttggatgcactaatatcagtctagacatatttattaataaatgattgttttcactaaaatttagtaaatatttgttaacattattgtcaacattatctcagttataatagtatggtcttccgcatatctaattgagttatatatgtattta

SEQ ID NO: 7473 - DNA, 1957 bp, Heterodera glycines
agtgaaaaggaatttgattttatttttcttaaaaatgttaatgttctgcatagaataaaaaataatgtatatttttttctattatatttttgttggcggatttacgaaacgcccatagtggcggaatttacgaaacgactcagccacggtatgtatgtatatgtgtatttctgttggatcaccttccatttatagacaaataaaatacggaaattgtataaaattatggaggtcattatggttggttattgaccgcgctgttgtgcaaaatttttgacacttcaattaagttaataagcttttgttaaaagcttagtaaattttgcgatttgaacccataaaaaattttggatgaaaattaaaaaaatatatcttttgcgtccgacggtcccggatggaataaaaaattggaattttataattgcattattttatccaaatcttatcaaattatatgtatgtattaccgtattttctctaattatgtgcccgggtatattgttttcaacatcctcagaaagggggcgccaattggagacggagagattaatggagacaggcatatgtataattcaagaaaatacggtttatctttgaaatgaagttaatttatactgaatttcattcaaaaaaaaattaaaaatatatatattttttgaccatatagagcccatcaattggggtgcatttttgaaaaacttcgtttctgtttttggcctaaacaagatgtttttcggtttttggtgaacgaccataattttcctaatttatatacctaatgcataccgcatttccctcgattataacccccccccctcgaataaagccccacttgtgaggggagttgaacaatagcgcccctctcgattagaaccgccctctcgaacaaagccccccccccttcaatagagcccccggcggttataatcgagtaaatatggtaatcttagacttagtttaagataacatgcatctatttaaaattaagctcacccgatcgttttgaagaaatccttttggtgccaaaaaagcgggttgcgacatccattttatttttttacgaattgatcattttttaaatttcgttttgtaatttccgcaaaattcaaatcaaaaaatttgagtattttctgtttttttttacctatcttaaattagaggacgaattttaatatacgaaaattttgtagttgcaaataattggagtgacgtcaccacactcaaaattgattataccccacatttttctcattcacatcatgcaataaaaatctcaaaaattaattacaattttctaaatttaattttttaaaatttgtttttcaattcattctttttttttacattttcactattattctcttttcgtcgtcgtcaccatttgaaagaaatgtacaataaaaagaattgaatggtccgattttgtggtgcaatgaatgaatgaatgaaaatgaatggaatgaatggccgccgctgaacaaattgggcgaaggaaattccgcgcaaattgcgacgcattggtcaccgcatttttcagtcctgaggagttttttttattagggcctattttctaattttttataaaaacgaaaagcataccccgaacaatcggccgcaaaaatttcagtatttatttatttattttatttttttggcaagaatttttggtgttaaaaattatgtatgtgttgtctcaagcaaatcaatatttaaatacctatggtttttttttctacacaaaaacataactattcccacagccaccggactcagttgtccaagatactcaaaattgctgggccacagttggcgccgcgtaattgcgccaaaatgaatgtccctcccacccatcgccttgctgacgatggtccttaagcccagtcaaccaaacaacaaccaaagccatcagcagtcaacaacaaatgttattttctcagggcccgtgtggggggggggg

SEQ ID NO: 7474 - DNA, 1160 bp, Heterodera glycines
  unsure (1)..(1160): unsure at all n locations
gtcccgacccgtccttattcatatcatgcctgccggggattcaattacaattctcgagttttcgcaattttccgtgagtttcncaggattctcgcgcgttctttcgcagtttccgggactcgatctcataattctcgagctttatctctccaaattggccctgggttgatcataattctccaatatattttttttcgctatttccccacgattcgagtataattctcgggtttcatccgcttacatattttgattttttgtgtttcgaatctctctttctgtctgtacctatttatatagaaatttattttggggcaatcattttttggtccttgcttccccccgccttcggcccttcgctaattaattcgccatttatttgttgtctttcataaatagtaattaattgcttttggccgggtgtctctgccgcccacccccaattttttcccgcacaaatacaaaaccatccatcaaacaatgcattttttttatcaaatatttcttcccgaatttttataacaatttgtgtaattaatttatgtcgtcgtccgtccatttccctccctccgcgcaaatttcgcgcacattcatttgccccccttaattagtatgaatcatctccgcctcccgtcctccccccgcccttaaagcgcaatatttttataccaaatcgtaatgacgaggaaaagatgaaagaaaaattgatttgaaaagcacggctgggtgagtctcggcaatttgagtcccacaaaactcacttcagcggcgaattaattgatcgggtcagtggttgtcacagaaaatttggttctgatcagaattcttgggttattcgtgggactaaagatccgattaatctgatctgattcgaatattttccaattataaggttttggatcattagatgggaatgaaatccttggagttcatttggccttagtttttgaggccagtggaatgagtccgatcagcatttttcgtccttgaaattcaatctgtcagaattcggatcaatctttggtcgattacctattgaaattgtgccgattaatactcattgatctattccaaccactagccaatcgcctttaagactgaaattctcgggaccaaaattgctctcaaaccgtccgatgtcgccgtcatacaatggcact

SEQ ID NO: 7475 - DNA, 1364 bp, Heterodera glycines
ttgttaatctacttttcgagttattagagcctatctcttaaggtttacttttagagccaaaaaagcttttctatttactttcatttggcggtttatagagcctaaaaattggctagtcataattaaaataaatgtttcgtttttaattactcaatttcgcctgaggcgatgttcgggtcgaccaatgtaatagtcgcgcatggaacgccaacggcgttccggaattgtgccatttgaaaagcaagaaaatagtagagggaagagagagagaaagtgaggagggcggaagagagaagtagagagaagagaggaaggaggaaagaaagaaatgagagagagaatagaaaaagagagagacagaaaaggggagagagaagaaggggaaagaaaaaaaggaagaagagaaaaagactgcagaaaataaacaaaaaatgaatttgaaaattgtgagttgggtgaacgtttcctacccaaaaagccgcatttacgggcaatttgctcccatgccaacgcttttctgtaaatggatgggcaattaattttgattttacagcctttcccttcgaatcgcattcaccgattgttgtcccggtaatgagcgttgcccggtcgtacaattcgggatgacatcgaattgcattgatcagcagcaaatcgcgctcacacttcatggtggaattttcaaaatggttctgaatttaatgaataaaattaaacacattttaaaaggaaaaatggagggattacggtagcagggccattactaccgtaaccgaagcggctgctttaagcccctcccccaccttctgctgctgctgattgtcctcctcaacgaaagaagttccgctttccctatttatttgatcgatggagtttctaagcgcaaaacaaaaaattattggccaaaaatttttgtattgaaataaatttttataatttaattcattttaaatattctctatttttatgaaagtcttttcactttaatggaagtcactccctaataaataaacaaaaaaatgcacccaaatcattggccgccgcaggggaaaggtgaaaagattcagcgtaatggaatttgtaatgttctctgaaaggggacaacggaatgagacaaaaaaaaaagtcaaaaaggtaaaacacatagaataaacttttcctttaaaacatcgaatggtgctaggtcgtttcgtaaaaagtgccattataaaaatatggttgagtatagagttatgaattcaaaaatttatgtttgtgttatacatatgagtagtatatgtccacaaatctcggtgtaaaattccggcccttcctagacaaaccccccacccgtccaattattaccgagctcccttttatgaacg

SEQ ID NO: 7476 - DNA, 2851 bp, Heterodera glycines
aaaatgtctcgtttctgccctctcgttgaaaccaaggaattgggacgcctttccgctccgaaggggaaatttagtgagtttgaaatcactttaaattcagcacaagatttgcaaatctttaacttttgtttaggcctattttactcccttgaattcgcacgaaattaccgattgattggaaaggagataacggaagacaagtttcgttatctcatgaaaacagagaaaaaacaaagagaaatggctgtcaaatatgggcttcaaacaatttgaaacggttgcttttgctcattatgctggacggttcgactcacatttcgtccttcgtgtgctgacagaaagggggcttaacaccgaactgatgatggccaaagaccttagggctgagcatcccggcaaagttgtactttcctcataagtacaataaaaatgagaattttgggaagagattgtcacacctgccgccttttgatgattacaatccaaatgctatgaaggaggaagaatatgagaagtttgaaggatggtataacgagaattttgagaccgaatttgagctaggttagagaaagtgtgttttaaataaaattttgtatttttttaggagaacagcttaaggtttactgtgaaaacgatgtggaaatactgatggaggcaattatgaagttccggcaattgtttttggatattactgacgggatggatgtgttgaaggacagtgtcacaattgctggggtcgtgatgaggatattcaggacgaaattcttgaaggacaggcacattccgatcatgccggagggaggatatgaaagggctgataatcagagcaaaattgccgtgaagtattttgaatggttggcgcaccgggaaggcataagggtcagacatgcggaaaatggtggtgagattaaattcggtgacctcaaagttgattgcgtcattggtggtcagaaaagaataattgagtttcaggttttcaaaaataaaagtcatccgttaatgtgagttctttaaggggtgtgcataccatgggtgcaaaaattgttttttgccctgggctgttggaccgaatggtttatgcatggaagagaattacagaaggacagagatgcggatggaagtattgagagaaatgtgtaaaaacttctcggtggaggaagtttgggtttgccaatttccaacagttattgattattgattgaacaaatttaggaatgtgaggtgaaagcggaattgaagaaaaataaggagatgaagaggttctttgaaagtgtgccggataagggaccgattaatccgagggatgcttacgcaggaggacgaacaatgcctttttgcttgtatgcaaaggctacggaagcagttgagatttcgatgtttgatattatcagtttgtacccctttgtgaattatggtaaaaatccgcttgcatttttaatattgccattcacttaagacactccttatcccgttggtgtcccaaaaattgtggtgagcaggaattttaatgtgaattggacggtgcccgacgatgtgccctatgatggactgctaaaggtgaaggtcatccccccgaaggaactgctgtaccccctcctccctgtgcacattgatgaaatgctcctcttcccaaattgtggtatttgtgcgagaaaggccaagaacgagtttgttacgacgaaggatgtgaaaaaatgtaaccatcggccagagcagagagcatttttggggacgttcacttcgattgaactgcggaaggctttagagctaggatatagaattgtgggattctatcgagcgtatcactttgagcaatttgacaatcaattgttcaaaggatatgtgcggatgttcttgaaaataaaggtggaggcgtcggggtggccggcggaggtgaaaagtgaagaggaaaagagagcattcaccgatatgtacaaggcgaaatacgatatctgccttgatcatgacaaaattgtctttaacccaggccttcgtatgatagcaaaattggtacgaaatacgcaaatattaatttatcagcaatgaaaattaaggggttgaacagcttgtgggggaagttttcgatgcgcaacacgctttcgacgagtgagatttttaacagcatggaacggtgggtcgcattgtcacaagacaatacgcttgatgtttcgacaccaatacaaatatgtgaaggagtagagcgtgttgtatatcgtaaaaaggaggagttcataaaggagcataaggtgtcgaatatagttttatctttgtggactacgagcgctgcaaggataaagttgtacgagtatatggagcaggtctacagggaggagggatgtaaaccactgtattgtgatacaggtgttttattataaacaaaatttccataaaattttatatttagattctctggcctttgctcatcggaaggggcggtgtccgttgaaggaggggaagtttttggggtaaaatacaaatttttgaaactctttaaattggctttaagggagatgactcgagaatattccgatagcgagattttggaatatgtgtcagctggtccgaagcagtacgccctgaagctcaggaggaagaaagatggggagatttgggaaaagaccaaaattcggggattcacgttgaataggtccaacaagatgcggtatgaagaattcaaggagatggtgttgggctatcaggaaggagtgaaaaaagtgtttcgttatccggaaaagattgggccgacaagggatagcaggatactctcaagggatgtaaagaaagaatatgggcccgtgcagaggaaagggattgttgatgaaaactttaatgtgttgccttttggatatta

SEQ ID NO: 7477 - DNA, 2034 bp, Heterodera glycines
  unsure (1)..(2034): unsure at all n locations
agaggaaagggattgttgatgaaacttttnaatgtgttgccttttggatattattgaataaacttttgcttttattcctccgccttgtaaaaaagtaaatcatcctttatataaggcatgaattgtatcaatcatcatctatttaagggtagaatttatcaattaaaaatactttaagaatgtcgttccaaaatacgccaaaagaagttcggcgtgcgagaaacacacgtcactttttcaaggcaacccctgacaagggaaagtgtctcgaaaagattgagagccatgtcaacgagcgagccaagtttggtataagggagcacgtaactagtttttatttcaaatgcccaccaaatgaagatgcggaaaataattttagaataattatcgataaactaatacaggaggcaaaggaaaaagaacctgcacaaggatggaagacggaaagaattttgctgaatttatattgtgctgctttgtctgatcctgttatgataccattgagaccactacaccaagtaacttcggatgttgtgctaaacgaatttatgcatcgtcagcaatcatttggcgacgtaaaccttatggacgaaagaatttctgtgatcgtgaccacttttgcatatcctctcaagtgatcttatgtgaaaataaacttataaatacattttttcgctaattacaataaaataatgtcactatttggtagtttttataatccgattggaagctgtgtaagagaaaacgaaaaatttgggataaaagaacatgcgacaagctttcattttagagttgtagaagatgaggacaattatgcaaattttgagcttatcttaaataaaatgttaaatgatgcacgaattaacaagccaaaacgagggtggaaaatggaaaaaatttctgtcgacttttatcgtaattgtctcaatggaccaataagtatcccgttaagtccgctcaacaaaatcacagccaacactctttttaatgtatttatgatgcttcctggtgatggaataatacttgacgatattggactaattactataattattagtacttattcatttccaagaaaaatgaatagaaaaataaaaaatgtaacgggaaaaaatgaaaatattgcttaatgcacataacaaatgaaaaaaagtctttaaccaaacataattttgaatccaattatcgtattattaatttgccttatgatgtcagactttaaaacagaataaaaccttccaccgaacatttattaaaaaatgcccatgaggttgggagccgatggggctaggggtctggtgatgggcatgtgcccatggggctgggggctgatggggctatgggtttggtgatgggcaagtgcccattgggttgggggatgatggggctagggatctagtgatgggcaaatcccatggggctggggtctggtgatgggaaatgcccattggtttggggactgatggtgctggcggtctggtgatgtgtcatagcaggtgaaaaaagggcagaacaggtagcaggtgaaaaaaagggcagaacaggtgaaaaatattgtcataacaggtgaaaaaagggcagaacaggtgaaaaatattgacatagcaggtgaaaaaaagggcagaacaggtgaaaaatattgtcatagcaggtgaaaaaaagggcagaacaggtgaaaaatattgtcatagcaggtgaaaaaagggcagaacaggtagcaggtgaaaaaaagggcagaacaggtgaaaaatattgtcataacaggtgaaaaaagggcagaacaggtgaaaaattttgacatagcaggtgaaaaaaagggcagaacaggtgaaaaatattgtcatagcaggtgaaaaaaagggcagacaggtgaaaaatattgtcataggaaaaaagggcagaacaggtgaaaaatattgtcatagcaggtgaaaaaagggcagaacaggtgaaaaatattgtcatagcatgtgaaaaaaagggcagaacaggtgaaaaatattgtcatagcagatgaaaaagggcaaaacaggt

SEQ ID NO: 7478 - DNA, 5866 bp, Heterodera glycines
actatcactgagtttaaacgggaataaactcgaaaccgaagctcgcaagaattgggatcgcttctacaaaagaaattcggacaattcttcaaggaccgaaattggacaaagcgagagattgagcaaatgtgcgcaaaagacatggaactgagtgtaatagtgaagcgaaaatgattgaggggaagaatgactcacgaggaaagggggacgaaagtgaacttcaaaaatggaatttaacccacgggactctctttctctccttttctacgccttttgcagcggaatgccctcctcacaaattcacaaatcaggcaacaaattccaattccgtggcctcgtcacttctcgggtttcggttatgatacaaaaaacgacctcacgttagtcgtggtttatatgtacgaaattcacccaactttctgcccaattcttttggttccaaagatttttctcggcctttactttttaggctcctttgactttgcttgacgccggttgcggctgtggcaacactttattcccattggccaaattcttccccaattggactttctgtggcgtcgatttttcctcaaatgccctctctttgcttcagcaaagggctgtacaaattggaactaacagttcggccgtttttctcattccattccatttcatttttgccttttcagttcataccgaattggtggatctgtcgggcgataccctcgtcaatttctcttcgcttcctaaagctgatctgatcactctgatcttcgttctctcctccatttccttggagcatcattcaaaagttgtccagaatttgagaaaacttctcaaaccctcgggcagtgtcattttccgcgattacggcgactccgatcagttgccattgacttttgcttaattgtttaattatagcgaattcagtgctatgcatcgattcaacacaaagtccaaaattgttgatcgtttcttcgctcgccaggacgggacaagggcctatttcttctgtccaggttaaacgaactgaaaaagaaaacccaaacatttccgtaactacaaatgcagacgaaacgaagaaattattcgaaagttgcggcttcgaaacaattaaaagcgaatacactcacagaataacggaaaacctaaaggagcaaattcgcatcgaaagaatttttgttgagggaagattcaaggcaccagcgaaagagtgattttccacttcacatattttatcgcttgtttagcactttgcagtttattaggcccgatgaaaagtcatagaggggatctcttgatgattttttttctttacaagggtcgttgatcatggacatgtatttattttgttgtaccgcaccaacaaaaatagaaaaattggccattaataaatcacaaatttatcatcgccctcaataattaaaattagagattgccttaacttgtttcaataccattcataacattggaaaatccggtttttcttggccctattctcacgacaattgtccacagtcagcgatcataatgtctttcgaagcgcgcccggactgagacccctgagcttcaacagctttcaccacatccattccatcagtgacgcgaccgaatacgacgtgtttaccgtccaaccactaaattaccaaatgaccttattatattagtgaaatcgaaatacgatagtttaataattaggtgcttcgaaagggcgtttgtataagcatttctcacacaaactcacttcggtcttcacagtcgtaacaaagaattgtgacccgtttgtgttgggcccggcgttggccatcgagagaatcccgggctgggtgtgtttctctttgaaattctcatccacgaacttctcgccatagatcgattcccctccggtaccattaccgcgagtgaagtcgccaccctaaaatattttttagtatcctttgtaacttgtcagttttacctgcaacatgaaatttggaatcacacggtggaatttagaccctttgtaatggagaggtttgcctaaaaacaaaattttgaagataattatactagattgtcctcaccactctttcccatccccttttcgccggtacaaagcgaacgaaaattttctgccgtttttggaacttaatatttaaaaaaatgaaaatgattagtaactgtccttatgatttaccaatgtccgaataaagctccatcacgatacgcccagctgcttttccaccaatggttatatcaaaaaagactttaggtctcgacattttcagttttcttcttataaaataaataagaattgattactcaatgacaggaaatgaaagataatagttttttaataagcaaatgttcctgagaagctagaccaaaaaacctagatctcgcacctccctaatgaatggaggcaaatggcgaatacattatgggctattggtcaactccactgtgagaaaaaccttgtactatttcgttgtttctctttttcttgcatttttttcattttggcgtactatcacttcattttttatagaaaaatagtatttactttttttatatgttaaattcactttgcatagcaataaaacaggaaaattactatattttttcgattataagacccctttgcgaggggttggaaatagaagacctttgtctaataatcgaagaatacggtaacaaaattttagtgttttcggattagaaaatatacatttttctttttctcttcctttggcatgttattttcaccatatctctaacaaataaaggaacaagaaattcgcaaatctaataattttgtccagcgctcagcctcgcttcaattgaaattatcaaatagctcactcctattctggctattttttaaagataaattaattttaattctctcagtatttgatattccttttatataaacgatattttacttcaaaaatcggacatgggcgatgatttggtttttgcaggttaatatgcataagagataattattttgcaattccaacccccacccaaattttgctcctcttttaagtgcgtggttctttcgggtattctttacaatgcggtataaagtctcctacggaagtgattagcgaaaatctgtaattttttttgaatttactaaaaatgcattttttttcagtgatcccaaagatagttcttgtcgctgtttcacatttagcaataacggcgtctacttcgcttattgtaattcgaataggtaatttacgctgttaaatttccttgttgagtgtatttttttttgttaagcactacaatcgtcgaatcatccactggccgaaaatgtttttccgcagatttgggcaaaactcaatgcattattttttctcctaaagacagttttatggtcacttatgaaccgtaagtcatggctgttaataggttaccctatttgaataaaggtacgtgatctacgggtctcgtaagaattccgatgggtccctcaaaactccgaaccccaacctccgtttctggtcagtgccaaatggcgagctgttggccacagttgttgcagacaaacaggtgcagtttgaaaatactgaattccaatttcaagacaaaaacttaaatttattaaggcagtttggaagccttacttttccgctgatgagtccttaatgttgcgggtgcttggttcggaagttcatttcttcaaaaatggaaattttggttcgttgaatatcaattattaaatcggtcgtggtttagcaaaggctgcacacaaagttgtggtcaaagacatcgcttccttttcgattagcccgggcacggcaatgccgcacttcgcctgtttcattccatcaaaggtagcgcaactgttgcaaatacttttggttacttttggaatatcaaaggattgtcatttggtccatcaattctgtctgtggttattgtgtgaaaaaaaagttaaagggaacccaaaaaactacatttttgttgtactttgaaacttggggaaaagcatatagagatagcaaacgatacgaagaatctcgtattttattccaaaaaaagtcattaaatttgttttatccttacttttcatggttctgtaaatttttttaggatagggtaaatgcaatggagcatggttttcagtgattttctcgcatcgtccccattgtatgcactgttttccatttcttagaatcaaccggcgatgattcagcttcgaagtctttccgactcgttggaggttctcttctccaaggcgtcgttcacttgcgaccgttgcattatgaattggaactcgaagggtctgtggtcattctgtcactgcttcaattccttcccttttaagggaatgctctgctggtgaccgcttctgttgacgtggacaaatccaacaaagtttccaatgtcttttttacctcattttcaattctttctgtcaagtcgtattacggggtcagccatttgtactgtcttcttaccaaatcgtatggcgattgtttcaatgtactgtgactttggtgtagtgccaatcaaacgaaattaatttaggtcactttgaataagcaagggccggtgcattgtgttcaatgggccccaaattcaaaagagttttgtgtttgctatggttttatgccttcaaaggtttgcaaatatcgacaaactttgtttcctcctacgctttttaggtttcaattttcaacacccgtggcgacaccgtttgggagctcagcgaagggcaccgcaacgaagtgtacttcaacccacagagcacaattctggtcacttgtggcttcggaaacattgcttctggcaagatggagttttggaatttggaaacccgaagcgaaatctgtgcattttgtgctcctcacacgactcactttgaatgggcaccggacggacagcacatttggtgattttttggttttgtccgtttcgcgtttattttttcttaatatttatatcctgatacagtaattagtgttaatgaaatacgtaaaatcgactagaatcttttttttctgataagcctttataattaaatcgttttttttgaagcacgtcgaccacagcgccaagactcaggacagacaacggatttaaactttggacatatcggggcgattttgtttatgaacaaaaatacgatcgagaggaactttgggaggttcgctttatgtccaaaaaaaagaaaatgaaatcgcatgttcatttaatagcccccccccccccaccaccgaaaactaaaagattaaagtttaaatgaaattttgttatttggaaacgatgaggtccaaactcatctttttcaagaacctgaataccattcaacctccaatcacagttaaaagcattacccattttgttcgctttcagatcaaatggcgaccgtgcgcagcgtataacaaattcaaaattgaggagcccaacagagagcaaagtacatcaaattccagccgaataaacgacggaaatgccaaaacgcccttcgacaatttgccgaagggatcgctgacgcaaacggcgcgttacgtcccaccgcatctgagaggtgtctcgagaaaagtgaaacggtggaaatttacaaattcaggaaaaccgcagaaaaaggaagaaaaagggaagaacgagacaaattcggaagagacggacgtggggaagaaaattcggacattgcagaagaaattggacgatatttcgaagctgaagacgaaaagggccgcgggccatcagttggagttgaaccaaatggacaaaatacgcaacgaagaacgattgctggaggaaatggaacgactgacggccacggccaactgctgaaagaattagcatttaatgtcattgtttccttttgtttgttgcccttaatgtctattccatttcattacatttgtaaagatcatttatt

SEQ ID NO: 7479 - DNA, 599 bp, Heterodera glycines
aatttggtgatgaaaagtgtgaattggtcattggccactcaattaaaagcgtgaaattccccccccccccccgcttcttatccccgcgttcccgcttcttcaaacttttgttgtccgtttggcgccgctaatcgttgggggaagatggattgacaagagagaataatggaaaggagaaatggcaaaggaaatgagacgggagacggggagtgtcggggttgagagtgccaattggggggggggggcgacaggtggcggaaacaaagggaatttcggagacatccaaaggggtggtcaatcggaagaaacaatttggagggcgggtgggagagttatggggggagaagaaagagtggaggccggggttgccaattgttcgcccgattctttgagacgggaaaggaaagggcgggccgatcaattcgatgtcccccgtcgccccgggggtcattccgatcgaatttcccctcgggggggggggggttaatttgggaaagggtcaagcaaaatcgattatttcccattttattccctttatttcttcccgcatatgcgccattattttcaccgcttttggcatcgcttcagagggggcggag

SEQ ID NO: 7480 - DNA, 4024 bp, Heterodera glycines
tgtgttgcattgtcggtagttgtgaagtccatgattgttgctttgtgggcagttttttgatggacacgcacatggcgtctgatcggagttgctgacaatggccttgggcttgaacgcgggccttaatttaagtttttcttataaaatagtgatttattgacttacgaaggtcagaagctgacgttgacggcccactttcagtggcttgggtcgatgtcccctctccatctgctgttggcgcggcattggtctgctttagccctggaaaatgcagtgtttttaaaataaaattaattttggtcaattttcgtcactttttggtgttcaaccaacactgcgaccaagatcccggcgccattccttccgctttcgccttgcttctacaccagaattgctcatattctttaatttttcgctttttttgcgtgtcaagaccatttttagctgaaaaatgatagaaatttattgaaattttctagggtcaaaaaaattttcctagggtcagattttcttgaaattttgcgtaggcatattttttggccccatctatcgaattctattttgttttttgaaagtatattttttaactcgagatcggctcttctatttttacaagggaaaatcccaagaaaatttaaagttatgcaaagttttggcgttctgattactaaataaaaaataagcataattgtactgggagcccaaaattgggccgctgtgaataacagcaatatgaattttcaaaaagagaaccaaagaattaggaccgacaatttaccgagagcaaaaattttcccaaaagtctccgcccctaaacgagcaaaggatggccgaaacgaacgcaatttgtcgcagaaaccgatagagtcagccaatgtttcaacaatttttgctggtctttttgcttcatttttggttgttgccaacgcgttttcgaatgtgaagactaaaactcatagccgccgaatcagctctacggctagtagcagctcgagattgccggcattatgaaatccgttgaatgttgcatttgaaaaattgaggaaaagggaaaattccaaagaaaacagaatcaacagcaaagtgaaaacaccgaaagggaatggccaattgaggacaattgttttttcgaaggctggggaggaattggccgactcaacaggtccaacgacgaagttgttgaaagccgacacagaacgaaaattgtcagccgttgatggcacaattacgaataaagctgcgtcaagttacgctatcaggcctgttcaaaattgtagttttcgttttttccgcacattttacaggtcaaattatgatattggtctgtgccactgctgattgtccacccttactgccccttttggaagccgaatgccctgccgatggatttgaagcgctgaggacatcgctttgtagagggcgaggatgtcatatcgttgttgatttgaattattttggcgttttgttttagtttttgtgaccctttattttattttgttttgtttggagtatgtgtgatatatgtgctcttcctaaatttgtaattgattgctgtgtgctgttttattaattggaagtaaaagaaagcagtgaaaagagacggcgatttggttttggatttgggatacaattcccctttcccattggactattctttttcctacgacgtggcgctcctgtacaaaggtggctcagcagtggcaataaacgacaaatttggacgagcaacaacgattttaaaaggaaaagtaaatccttctgcaatttgtaacaggaaaagcaaatcctggtctctggaaaagggaaacaaatccctactgaatttcttcattggttgtggaccacaaaatcagtaaaacgggaaaactaaatccctcttcatatcaaaaaaaaaacgcagcttagaaaaggaaaagccgtaaagtgtgaaacaaatcacgaaaatttgtcagttcggtaaattaactccgtctacaaaactgacttcaaaaccgggaaacgaaaatcccatttcaacatgcaatttcttcgtcaacacaaaatttcgcccgaggaaaattgtaaagacaatcgcaactttttggtttcattacaaaatggtggatgcgaaagtgagaaagaacaaaaacaaatttgttctttggaatttctcctcactctggaaaaacttcccgaactaaatggaaatgaaggacgagagcaaatacggacatttttcaaaaaattttcgttagctaccgaagaatggccagaaaaacgccgaatttcagcactcgagtgcaaagtaagtggaaaggcggaacgtgctttcagcgccgctgcagtgaatcggccggcgaaatttgatgcaatacgaagcgaaatggagtcacttttggacgaatgggattgtaccgcaattcaagcattcaacgaattgtgggatggaccaaaacggcgaccaggcgaaaatttggaagaatttgcagaacgagtttaccaacttgtgctttgtgcatatccaggtttgccgttggatttgtacaacgattatgcggcaaaacacttcattcgtgctttggaaaatgccaaaatttcgattgcattggaaatggctcgtcgtccgggtttgagctacgacagcttggtcgcgttggctgtgcgtgcggaaatagcgcaaaaagccgcaaagttaattgcagaggatgaaaacgcacacatagcacgcagctttaaaccaaataaggcggaaaagacgaccaccgattgggaaaaattttacgtccgaccgacaaataaaagcgtctgttataactgccgtaaaattggccacatcgcgcgaaattgtaaggtcaaattcacttggaaaaaatgcggctttgaacaaaataacagcaatatgaattttcaaaaagagaaccaaagaattaggaccgacaatttaccgagagcaaaaattttcccaaaagtctccgcccctaaacgagcaaaggatggccgaaacgaacgcaatttgtcgcagaaaccgatagagtcagccgatgcttcaacaatttttgctggtctttttgcttcatttttggttgttgccaacgcgttttcgaatgtgaaggctaaaactcatagccgccgaatcagctctacggctagtagcagctcgaaattgccggcattatggaatccgttgaatgttgcatttgaaaaattgaggaaaagggaaaattccaaagaaaacggaatcaacagcaaagtgaaaacaccgaaagggaatggccaattgaggacaattgttttttcgaaggctggggaggaattggccgactcaacaggtccaacgacgaagttgttgaaagccgacacagaacgaaaattgtcagccgttgatggcacaattacgaataaagctgcgtcaagtcacgctatcaggcctgttcaaaattgtagttttcgttttttccgcacattttacaggtcaaattatgatgttggtctgtgccactgctgattgtccacccttactgcccctcgatggatttgaagcgctgaggacatcgctttgtagagggcgaggatgtcatatcattgttgatttgaattattttggcgttttgttttagtttttgtgaccctttattttttttttttttggggtatgtgtgatatatgtgctcttcctaaatttgtaattgattgctgtgtgctgttttattaattggaagtaaaagaaagcagtgaaaagagacggcgatttggttttggatttgggatacaattcccctttcccattggactattctttttcctacgacgttttttttcttgccgttttggtttttgtcattttttcgcgtcctcgcgacgacgttttattagctccttttagatatttttaatttaatttaatgtacttttatttaacctttatttttcatcaacaataattttattaattattaaatgtttcaattaacattaatcaataaaaataaatatccaattattaataaaaattttatattaacagagaatttcagttttatttttg

SEQ ID NO: 7481 - DNA, 1039 bp, Heterodera glycines
ctgctggccccgttttggaggcgttcggcaacgccctgtaattgcagaacaacaacagcagccggtttggcaaattcatcaaggtacgtattacggtagtagaagtacacggtattttttataattaaaatgacaaattaaacctacttttcaaaaaacagtagtgaagagtattaaaaaaactataaaaaaaaacatatttgaatttaaccgcatccatactaaattaagataaattttaattaataaatatttattatactattttatgttttcttaggtgaattaccgagaaaatggcattgtttgtggagctaatgttgaaatttatctgctcgaaaaatcaagaatcatctcacaggcagttggcgaaaggtattggtttcgagttacgtgttgagatttgtcgtatccctaatttgtaaggttccagcagagactcttgctcttgactttcgaagtcaattatccattaattaacaatttataggataaaataaatagaggattatatgtaatccaaaaaatcattcaccttatacctggacgctaaaaataaaatttatttgtaaaattctttttttttatgaattaccacgtgttctactacctgttggagggtgcgtcggaacaagagcgcaaagatcattttttgttggagccaaaggattattactatctgaatcagaacagtgccagtgatagctgctgccccatctccaatgatcagtgcaatgaaaagcatgaatttgaacggcttaaacatgcgatgggcgctgttggattttcggaaaattcgcaacaaaaaatttatggcatgatttcagccgttttactgctaggcaacattgagtatataaaggtattgttgaaattttttggaatcttatgaaaatttaaatcggtaggctctgagaaaataagtgaaattttgttaaaatttgttaagaaaatagtcaaaatttgggaaaatgcctaattttcaacaaaataaattgttttccataaataaagaaattattaattctatttgtattta

SEQ ID NO: 7482 - DNA, 4293 bp, Heterodera glycines
tgtagataattttaaattttaaaatatcttaaattaacataaaattatttttaaggcattgacaatgcgacggacagtgctaaagcatgacgtgctggtcacgcgttattcagtggctgaagcaacccaaacacgtgatgccatggcaaaatgtttatacaatgcgttgttccattggattgttttgcgaataaatcgtaaaatatttttttattttaattaaaattaaaaaatgtatttttaatataatccttttttagattcattaatttgccgagaatcaactgcaataaacaaaaatggcctttatattggcattttggacatttttggttatttcaatttaaatgaattaattataatgattatttttagaaaataatatttaaaataaaaaatgataataaaaaaaattctcaggttttgaggatgttggagctcaatggaattcgtttgagcagttgtgcatcaattacgctaatgaacggctgcaagcctattttaaccagcacattttccaatttgagcaggaggaatatttaaaggaaaagttggtatttaactgtctatttttagaatgaattttggttaattgaaattttattttattggatttaggttaaatatagagccaaaaacgggaggaggggggggggggtgtaaaataatttttaatttaattaaattattttttctaaatttctataaatagaaggcttttcatggatattttattaagaaaaaataaattaatttgaaaacaatgcgcgtttttattattattttgcgattttttctattttaaaaaataatttaaaaatttacataaaatattcctttttagtatccattggactacaattcaatacacagataatacagaatgtgttcaaatgtttcagtgtaaaccatacgggtaaaatttgtttttacaaaaaataattatttaaatcaaaaatcaaattatttaagcttacttcgtcttgtggatgaggagagcaatattaacaatgaaatggtttcaggtacattttaatgcttggtgataatttacgcaaaaaaatgaatccatttaaatcaatgaatatttctaatttttttaaaaattgggttttttctgcttttattggagtatttgtgttttgatttaaagcactaagattaatttttgtttaaggacatcaaaaccaagtcattatgttaaggcatagaaatttttcatcattttcaagaaaattaaacggttttagcggttctataaaatacggttgtttttaaacaccgtaatgcttgaataggttaatgttttttgttagctaattgttcatatatttatcaaatacagttctataattagtgccggattttgacagaccaatccatgctggacaaattgaaccattttttgcgcacaaatgaatactacgaagtgccgcataagcgtgaagcagcattcatcattgcgcactatgcgggaaaagtgaaatatcaaattgctggttttcgtgagaaaaacaaggatctgatgcgccacgatgtggtcagagtttttatagtcaaacccaattaataaattattttaatcgatttaaaaaatcgattttttcaatgaaatttgtcaatcagaacttttgatttttttaatttcagaatttaaacattttaaaaatccttaaatttccaaaaataaatataattaattttatgaaattaatttttttaagtttactaatttggaaaacttttttaaaataacaaaactatttttttaattgtagatgaacacgttgaaaggcagcaaaagtgcctttgtgcgcgagttggttggtgaggatccgcttgcggtgttccgatgggcacttgtccgtgcaacattccgtgccgcgtatgcattccgcgcagctgggaagcggaacaaacgcgcgggtattttattttccaaaattcccaattttctgtatcatataaaatgatttaattaatttaaattttttttttgtaaaattagagacatttaggcagtgttgaccgctatgggacttcaaccgttggcaatcatggcattattggcacaaaaattaatggcgactgtgccaatggaagcccaaaaatgttgcatcggcgctcatcagactcgcggcttaacgcctttctgcgaggggaattagcgtaagtttggtatttccaacagtaactatttgatactgtaaaaataatatccctttatttttaatccaggcccagcattgtgcccgacttttgtgacacttcagtgtttaagacaattgttgagcgggcgagaaaggtgtgcgaaatttacctgtcataaggctattagcaaaataataaaaataataagccgactaataaatataatgttgatatttattaataaaaattaaaaaaagtttctgatttttaacaaagaaaaagctcgaaagaagcttaaattaagaattttattttttgtttgaggctatttttattttcttcaatttgtaagaaattatttttaattttattttccgtttttagaaaatttaagtgtcaaaatgatttataaagcatgtgctatgtttaaggcgccaaagaagccgcacaatgacaggttcagcaatttgagaacactacaacaactcaagggaatcatgtccaaaaagaagcagctttctaataagccaagttcggtaagaataatcgcaaaaaaacattattaattaaaattattgaaaaaattataattaataattaaacacaataataaaaaacatatttaaaatgccaaaaaaaggaaaaaaatcagtaaaatatcttccgaaggaaatggtttcataatgttcttccgctttttatattctttaaattcaatttttcatcacgctaaaaacattcccggatatgtttactttttgctaatgaatttaataaacataaaaattttattttttggtcagcaaaatttcaattagtctatttattccgattctttgttccggcaaaatttaaaaaaaatgtttccacaaattttatatttatttaattgaatctattttttttttcaattttaaattgggttgatgattgattattcgatattttatgaaatcaaataatttcttcgtgaccataattcggttttgattagaatttattctaaaaatttgattaataattaagcttttttgtgaataaatttttattcatgcgactttcaatgaattgaaaattcttaagtttttcaaattttaggttagccgccaatttggcgaatcgctatctcgactgatgaaaacattggaccgggcatcgccctacttcatccgttgcatcaaatcaaacaacgataaaattccaaattattttgatgacaacatcattttgcgccagcttcgatacaccggtatgctggagacggtcagaatacgacgggctggctacagtgtccgcattgaatacggggtactgtacaaaatacaatagaagcaacaatttgtatatttgataagatatattgttaaaaatttttttttagtctttcgcaaatcagtaccgtactctgcttccaaatggccataatgtaagttttggaattcgtaatttattttccgccaaatcattaaaatatttgaatgaaactcgaattcccgtctttgaccttgagtctcgaccttaataatcagaccttgcgaattcttgaactgttgtatcggattttatgctcatctcgagtactaggaaaatacgactctcgaacatttgtacatattagagaccggcaattcaatcggtatttttcaataaagttccgaaaaaatcgataccgaaaaacatgtgaaaatttctacatcaattttttaaataaaatatcgaaaaacacgaaaatttcttgatgggtttttttaattatcgtagtcatcgatattaatatcgactgataaatcaatcgtgccggtctctctctgtctttaacccaaagcgcctgacacctcaaatatatctctgacaggtcgaaggatattttttttgaaaattctcatttttagtcgaccaaggaagacatccaggagttcattcggtccatcccggtcatcgactacaacaatttacagtatgggaacacaaaaatttttatgcgtgacacggagaaattgttgctggatgaccacttgcatcgggtgataatgaagaacatcgtcacactgcagcgctggtttcgtgccaagttggagcagcaccgttaccagaagttcaggcagggcatcatcaaattgcaggtgatttgaatggcttacg

SEQ ID NO: 7483 - DNA, 2810 bp, Heterodera glycines
  unsure (1)..(2810): unsure at all n locations
aaaaccctttttttaattcaaaaaatttttaagaaatttcaagaaagaaaaaattaggaaatttttttagcgatttttttcaaagtttaatgatgaatttttaaaaaaattgcaaaataaaaaagtttcaaaatttttgaaaaaactttcatttattttttttcttgaaatttttttggtaaaaattttttaaagaattttgcttgaaaatttctgtttgaaaatttttttagaagcattcgacggcgagattttgtagcgacttcgggcggcgagattttgtcccgccccataaaatagcataactaaaactccaaaaattattaatttataattttcataattatgttaaacatttaagcgaatcttctgagcttgatcttgacgccagttttgtgctagaaaatgcgcgtttaaagctgatcaaatcccatgatcagaaacaatttgagaagttgatgcacagacggcaatcattggcgataaccgtttccacgaaaaaagtaaaataatcttttatttttccatttaaatatttattattattattattataatttagctaaaaatgcttcgtcgagcagctagcacagaaagtgatcaaattcaacgggaagaagaccgaaacgctatggttaaggtgggggttatatgaaattcaaaaatggcacagatttacaagaaatttcaaagaattttttaaataaatttttgcaaattttcgcttgcacattttcagattaccaattccttttcaaaagtggcaccacgtgccaaaagtggttttatgaaagcgaagaagcacctgaaaactttgctgaccaagaccgggcgtcagggcaccacggaaggcacattcagtgaggaaagcctgaacatggaaggaccgtcttcgtcaacaagaaggtcacaaagtgtgaacaactccatggatagccatggatacaaattagaacaaatattattaaacaattattaaatacagaattttttggcaaaaatttttttgcataatatgtttttttcttggcacaaaaaataaaaacatcgaatttctgagtctgtttggaccagggctggccgtgatcacggctcacggatcacggaaatcacggggtttttggggtgccgtgatctcggatcacgggtcacggattttttcaaattttccgtgattttgatccgtgattggcattttatatagggaatttttattgagacgaaaataggaaagtggtgtgaagaattttttgagaaaaataaataaattctttcctgcttacaaattagaaagtaaacatatatatgtagtctggtggttaagccttctgtctttcgttgtctgtcccttgggttcaattccccattgggataggacaatttatatattttgttttgataattttaattgaaatttaattaacaagaaatttcataacattgaaaattttttttctttattttttaaaacgtccatagaccaataaattaaccaatgattggacatattttggataaaatctgttaacaaattcactcaaaatttcaaaatttttcccggcggcgcctgtcggcaccaccgacagacggacccccattttaccgtatttttgaaatgttgaccccaaaatggcagaaaaattaccatttttggcatataaactgctaaaaaccctattttttctctccgtcgcttaaatttaaaacgacaggcctaatcaaaattttcagaaaattttcccaaccctctaagaattttttcaaaaattttcccgactttcagtatcttttggggtgttcagattgtcatgaaggactgagcatgttggtccaaaagattttttcagcatcaaaagttagcttacaaattagaggaaatttttttctctacataaatagatttttggttaaatttaagaaaatttgaaaaattttcttaataaattagttaaaaataaaaaattttccttggagatttctacaaaaagctctaattttcctcaaaaaagtgccaaaaatcgtaaacttagtcattttttggaaaaggtcgccgcaaaaaaagcggtttatatgttttggtttctttaaaacattttttgggaatttttcccgcgattaaattccgttttttaaataaatttaaataaaaaatcattagaaaatttttttttataatcacggatcacggctcacggatcacggaaatcacggggattttggggtgccgtgatcacggttcacggatttttttaaagccccgtgattacggctcacggatttccgtgattggaaattcaatcacggccagccctggtcagtacggctcttcattcagatatgtataaagagaataattgtatttttttattttcaggtatgcctaagtagttaacaacaancttatttacaattcaaaaattaaatggatatgacatcggctaaacttgaggcgttcaacaagcttgaaaataaaaaataattatttaattgtttgctttttatatttaatttgttgaaatttgctttttgtttatgtgactctacgggatgaatccaaacatcaaattgtgtaataaaaattcaaatttacgttcatagtttatttggatttagaagagccgtactgaagaagaagcccacttttccatttattttttcaaatgaaacattttttcacgaattttgcgcaaatgtccgcccacaaattccctctgcggattaaattcagtgccgtaaatgttttctgattatcataatgttctgatttggaaatttctcccatgggccttttggcaaataaaatttttttt
